United States Patent Application Publication US 2025/0333448 A1 - sequence listing, part 8

SEQ ID NO: 154565 - protein, 10 aa, Artificial Sequence
  Description of Artificial Sequence: Synthetic peptide
  Seed: GMMMGMFNML
GRMMGMFNMT

SEQ ID NO: 154566 - protein, 10 aa, Artificial Sequence
  Description of Artificial Sequence: Synthetic peptide
  Seed: GMMMGMFNML
GRMMGMFNMV

SEQ ID NO: 154567 - protein, 9 aa, Artificial Sequence
  Description of Artificial Sequence: Synthetic peptide
  Seed: GMMMGMFNM
GRMMGMFNY

SEQ ID NO: 154568 - protein, 9 aa, Artificial Sequence
  Description of Artificial Sequence: Synthetic peptide
  Seed: GMFNMLSTV
GSFNMLSTA

SEQ ID NO: 154569 - protein, 9 aa, Artificial Sequence
  Description of Artificial Sequence: Synthetic peptide
  Seed: GMFNMLSTV
GSFNMLSTF

SEQ ID NO: 154570 - protein, 9 aa, Artificial Sequence
  Description of Artificial Sequence: Synthetic peptide
  Seed: GMFNMLSTV
GSFNMLSTI

SEQ ID NO: 154571 - protein, 9 aa, Artificial Sequence
  Description of Artificial Sequence: Synthetic peptide
  Seed: GMFNMLSTV
GSFNMLSTL

SEQ ID NO: 154572 - protein, 9 aa, Artificial Sequence
  Description of Artificial Sequence: Synthetic peptide
  Seed: GMFNMLSTV
GSFNMLSTM

SEQ ID NO: 154573 - protein, 9 aa, Artificial Sequence
  Description of Artificial Sequence: Synthetic peptide
  Seed: GMFNMLSTV
GSFNMLSTV

SEQ ID NO: 154574 - protein, 10 aa, Artificial Sequence
  Description of Artificial Sequence: Synthetic peptide
  Seed: GMFNMLSTVL
GSFNMLSTVF

SEQ ID NO: 154575 - protein, 10 aa, Artificial Sequence
  Description of Artificial Sequence: Synthetic peptide
  Seed: GMFNMLSTVL
GSFNMLSTVM

SEQ ID NO: 154576 - protein, 10 aa, Artificial Sequence
  Description of Artificial Sequence: Synthetic peptide
  Seed: GMFNMLSTVL
GSFNMLSTVV

SEQ ID NO: 154577 - protein, 10 aa, Artificial Sequence
  Description of Artificial Sequence: Synthetic peptide
  Seed: GMFNMLSTVL
GSFNMLSTVY

SEQ ID NO: 154578 - protein, 9 aa, Artificial Sequence
  Description of Artificial Sequence: Synthetic peptide
  Seed: GMFNMLSTV
GSFNMLSTW

SEQ ID NO: 154579 - protein, 9 aa, Artificial Sequence
  Description of Artificial Sequence: Synthetic peptide
  Seed: GMFNMLSTV
GSFNMLSTY

SEQ ID NO: 154580 - protein, 9 aa, Artificial Sequence
  Description of Artificial Sequence: Synthetic peptide
  Seed: GMMMGMFNM
GSMMGMFNA

SEQ ID NO: 154581 - protein, 9 aa, Artificial Sequence
  Description of Artificial Sequence: Synthetic peptide
  Seed: GMMMGMFNM
GSMMGMFNF

SEQ ID NO: 154582 - protein, 9 aa, Artificial Sequence
  Description of Artificial Sequence: Synthetic peptide
  Seed: GMMMGMFNM
GSMMGMFNI

SEQ ID NO: 154583 - protein, 9 aa, Artificial Sequence
  Description of Artificial Sequence: Synthetic peptide
  Seed: GMMMGMFNM
GSMMGMFNL

SEQ ID NO: 154584 - protein, 9 aa, Artificial Sequence
  Description of Artificial Sequence: Synthetic peptide
  Seed: GMMMGMFNM
GSMMGMFNM

SEQ ID NO: 154585 - protein, 10 aa, Artificial Sequence
  Description of Artificial Sequence: Synthetic peptide
  Seed: GMMMGMFNML
GSMMGMFNMA

SEQ ID NO: 154586 - protein, 10 aa, Artificial Sequence
  Description of Artificial Sequence: Synthetic peptide
  Seed: GMMMGMFNML
GSMMGMFNMI

SEQ ID NO: 154587 - protein, 10 aa, Artificial Sequence
  Description of Artificial Sequence: Synthetic peptide
  Seed: GMMMGMFNML
GSMMGMFNML

SEQ ID NO: 154588 - protein, 10 aa, Artificial Sequence
  Description of Artificial Sequence: Synthetic peptide
  Seed: GMMMGMFNML
GSMMGMFNMM

SEQ ID NO: 154589 - protein, 10 aa, Artificial Sequence
  Description of Artificial Sequence: Synthetic peptide
  Seed: GMMMGMFNML
GSMMGMFNMT

SEQ ID NO: 154590 - protein, 10 aa, Artificial Sequence
  Description of Artificial Sequence: Synthetic peptide
  Seed: GMMMGMFNML
GSMMGMFNMV

SEQ ID NO: 154591 - protein, 9 aa, Artificial Sequence
  Description of Artificial Sequence: Synthetic peptide
  Seed: GMMMGMFNM
GSMMGMFNV

SEQ ID NO: 154592 - protein, 9 aa, Artificial Sequence
  Description of Artificial Sequence: Synthetic peptide
  Seed: GMMMGMFNM
GSMMGMFNY

SEQ ID NO: 154593 - protein, 9 aa, Artificial Sequence
  Description of Artificial Sequence: Synthetic peptide
  Seed: GMFNMLSTV
GTFNMLSTA

SEQ ID NO: 154594 - protein, 9 aa, Artificial Sequence
  Description of Artificial Sequence: Synthetic peptide
  Seed: GMFNMLSTV
GTFNMLSTF

SEQ ID NO: 154595 - protein, 9 aa, Artificial Sequence
  Description of Artificial Sequence: Synthetic peptide
  Seed: GMFNMLSTV
GTFNMLSTI

SEQ ID NO: 154596 - protein, 9 aa, Artificial Sequence
  Description of Artificial Sequence: Synthetic peptide
  Seed: GMFNMLSTV
GTFNMLSTL

SEQ ID NO: 154597 - protein, 9 aa, Artificial Sequence
  Description of Artificial Sequence: Synthetic peptide
  Seed: GMFNMLSTV
GTFNMLSTM

SEQ ID NO: 154598 - protein, 9 aa, Artificial Sequence
  Description of Artificial Sequence: Synthetic peptide
  Seed: GMFNMLSTV
GTFNMLSTV

SEQ ID NO: 154599 - protein, 10 aa, Artificial Sequence
  Description of Artificial Sequence: Synthetic peptide
  Seed: GMFNMLSTVL
GTFNMLSTVA

SEQ ID NO: 154600 - protein, 10 aa, Artificial Sequence
  Description of Artificial Sequence: Synthetic peptide
  Seed: GMFNMLSTVL
GTFNMLSTVF

SEQ ID NO: 154601 - protein, 10 aa, Artificial Sequence
  Description of Artificial Sequence: Synthetic peptide
  Seed: GMFNMLSTVL
GTFNMLSTVI

SEQ ID NO: 154602 - protein, 10 aa, Artificial Sequence
  Description of Artificial Sequence: Synthetic peptide
  Seed: GMFNMLSTVL
GTFNMLSTVL

SEQ ID NO: 154603 - protein, 10 aa, Artificial Sequence
  Description of Artificial Sequence: Synthetic peptide
  Seed: GMFNMLSTVL
GTFNMLSTVM

SEQ ID NO: 154604 - protein, 10 aa, Artificial Sequence
  Description of Artificial Sequence: Synthetic peptide
  Seed: GMFNMLSTVL
GTFNMLSTVT

SEQ ID NO: 154605 - protein, 10 aa, Artificial Sequence
  Description of Artificial Sequence: Synthetic peptide
  Seed: GMFNMLSTVL
GTFNMLSTVV

SEQ ID NO: 154606 - protein, 10 aa, Artificial Sequence
  Description of Artificial Sequence: Synthetic peptide
  Seed: GMFNMLSTVL
GTFNMLSTVY

SEQ ID NO: 154607 - protein, 9 aa, Artificial Sequence
  Description of Artificial Sequence: Synthetic peptide
  Seed: GMFNMLSTV
GTFNMLSTW

SEQ ID NO: 154608 - protein, 9 aa, Artificial Sequence
  Description of Artificial Sequence: Synthetic peptide
  Seed: GMFNMLSTV
GTFNMLSTY

SEQ ID NO: 154609 - protein, 9 aa, Artificial Sequence
  Description of Artificial Sequence: Synthetic peptide
  Seed: GMMMGMFNM
GTMMGMFNA

SEQ ID NO: 154610 - protein, 9 aa, Artificial Sequence
  Description of Artificial Sequence: Synthetic peptide
  Seed: GMMMGMFNM
GTMMGMFNF

SEQ ID NO: 154611 - protein, 9 aa, Artificial Sequence
  Description of Artificial Sequence: Synthetic peptide
  Seed: GMMMGMFNM
GTMMGMFNI

SEQ ID NO: 154612 - protein, 9 aa, Artificial Sequence
  Description of Artificial Sequence: Synthetic peptide
  Seed: GMMMGMFNM
GTMMGMFNL

SEQ ID NO: 154613 - protein, 9 aa, Artificial Sequence
  Description of Artificial Sequence: Synthetic peptide
  Seed: GMMMGMFNM
GTMMGMFNM

SEQ ID NO: 154614 - protein, 10 aa, Artificial Sequence
  Description of Artificial Sequence: Synthetic peptide
  Seed: GMMMGMFNML
GTMMGMFNMA

SEQ ID NO: 154615 - protein, 10 aa, Artificial Sequence
  Description of Artificial Sequence: Synthetic peptide
  Seed: GMMMGMFNML
GTMMGMFNMI

SEQ ID NO: 154616 - protein, 10 aa, Artificial Sequence
  Description of Artificial Sequence: Synthetic peptide
  Seed: GMMMGMFNML
GTMMGMFNML

SEQ ID NO: 154617 - protein, 10 aa, Artificial Sequence
  Description of Artificial Sequence: Synthetic peptide
  Seed: GMMMGMFNML
GTMMGMFNMM

SEQ ID NO: 154618 - protein, 10 aa, Artificial Sequence
  Description of Artificial Sequence: Synthetic peptide
  Seed: GMMMGMFNML
GTMMGMFNMT

SEQ ID NO: 154619 - protein, 10 aa, Artificial Sequence
  Description of Artificial Sequence: Synthetic peptide
  Seed: GMMMGMFNML
GTMMGMFNMV

SEQ ID NO: 154620 - protein, 9 aa, Artificial Sequence
  Description of Artificial Sequence: Synthetic peptide
  Seed: GMMMGMFNM
GTMMGMFNT

SEQ ID NO: 154621 - protein, 9 aa, Artificial Sequence
  Description of Artificial Sequence: Synthetic peptide
  Seed: GMMMGMFNM
GTMMGMFNV

SEQ ID NO: 154622 - protein, 9 aa, Artificial Sequence
  Description of Artificial Sequence: Synthetic peptide
  Seed: GMMMGMFNM
GTMMGMFNY

SEQ ID NO: 154623 - protein, 9 aa, Artificial Sequence
  Description of Artificial Sequence: Synthetic peptide
  Seed: GMFNMLSTV
GVFNMLSTA

SEQ ID NO: 154624 - protein, 9 aa, Artificial Sequence
  Description of Artificial Sequence: Synthetic peptide
  Seed: GMFNMLSTV
GVFNMLSTC

SEQ ID NO: 154625 - protein, 9 aa, Artificial Sequence
  Description of Artificial Sequence: Synthetic peptide
  Seed: GMFNMLSTV
GVFNMLSTF

SEQ ID NO: 154626 - protein, 9 aa, Artificial Sequence
  Description of Artificial Sequence: Synthetic peptide
  Seed: GMFNMLSTV
GVFNMLSTI

SEQ ID NO: 154627 - protein, 9 aa, Artificial Sequence
  Description of Artificial Sequence: Synthetic peptide
  Seed: GMFNMLSTV
GVFNMLSTL

SEQ ID NO: 154628 - protein, 9 aa, Artificial Sequence
  Description of Artificial Sequence: Synthetic peptide
  Seed: GMFNMLSTV
GVFNMLSTM

SEQ ID NO: 154629 - protein, 9 aa, Artificial Sequence
  Description of Artificial Sequence: Synthetic peptide
  Seed: GMFNMLSTV
GVFNMLSTT

SEQ ID NO: 154630 - protein, 9 aa, Artificial Sequence
  Description of Artificial Sequence: Synthetic peptide
  Seed: GMFNMLSTV
GVFNMLSTV

SEQ ID NO: 154631 - protein, 10 aa, Artificial Sequence
  Description of Artificial Sequence: Synthetic peptide
  Seed: GMFNMLSTVL
GVFNMLSTVA

SEQ ID NO: 154632 - protein, 10 aa, Artificial Sequence
  Description of Artificial Sequence: Synthetic peptide
  Seed: GMFNMLSTVL
GVFNMLSTVC

SEQ ID NO: 154633 - protein, 10 aa, Artificial Sequence
  Description of Artificial Sequence: Synthetic peptide
  Seed: GMFNMLSTVL
GVFNMLSTVD

SEQ ID NO: 154634 - protein, 10 aa, Artificial Sequence
  Description of Artificial Sequence: Synthetic peptide
  Seed: GMFNMLSTVL
GVFNMLSTVE

SEQ ID NO: 154635 - protein, 10 aa, Artificial Sequence
  Description of Artificial Sequence: Synthetic peptide
  Seed: GMFNMLSTVL
GVFNMLSTVF

SEQ ID NO: 154636 - protein, 10 aa, Artificial Sequence
  Description of Artificial Sequence: Synthetic peptide
  Seed: GMFNMLSTVL
GVFNMLSTVG

SEQ ID NO: 154637 - protein, 10 aa, Artificial Sequence
  Description of Artificial Sequence: Synthetic peptide
  Seed: GMFNMLSTVL
GVFNMLSTVH

SEQ ID NO: 154638 - protein, 10 aa, Artificial Sequence
  Description of Artificial Sequence: Synthetic peptide
  Seed: GMFNMLSTVL
GVFNMLSTVI

SEQ ID NO: 154639 - protein, 10 aa, Artificial Sequence
  Description of Artificial Sequence: Synthetic peptide
  Seed: GMFNMLSTVL
GVFNMLSTVK

SEQ ID NO: 154640 - protein, 10 aa, Artificial Sequence
  Description of Artificial Sequence: Synthetic peptide
  Seed: GMFNMLSTVL
GVFNMLSTVL

SEQ ID NO: 154641 - protein, 10 aa, Artificial Sequence
  Description of Artificial Sequence: Synthetic peptide
  Seed: GMFNMLSTVL
GVFNMLSTVM

SEQ ID NO: 154642 - protein, 10 aa, Artificial Sequence
  Description of Artificial Sequence: Synthetic peptide
  Seed: GMFNMLSTVL
GVFNMLSTVN

SEQ ID NO: 154643 - protein, 10 aa, Artificial Sequence
  Description of Artificial Sequence: Synthetic peptide
  Seed: GMFNMLSTVL
GVFNMLSTVP

SEQ ID NO: 154644 - protein, 10 aa, Artificial Sequence
  Description of Artificial Sequence: Synthetic peptide
  Seed: GMFNMLSTVL
GVFNMLSTVQ

SEQ ID NO: 154645 - protein, 10 aa, Artificial Sequence
  Description of Artificial Sequence: Synthetic peptide
  Seed: GMFNMLSTVL
GVFNMLSTVR

SEQ ID NO: 154646 - protein, 10 aa, Artificial Sequence
  Description of Artificial Sequence: Synthetic peptide
  Seed: GMFNMLSTVL
GVFNMLSTVS

SEQ ID NO: 154647 - protein, 10 aa, Artificial Sequence
  Description of Artificial Sequence: Synthetic peptide
  Seed: GMFNMLSTVL
GVFNMLSTVT

SEQ ID NO: 154648 - protein, 10 aa, Artificial Sequence
  Description of Artificial Sequence: Synthetic peptide
  Seed: GMFNMLSTVL
GVFNMLSTVV

SEQ ID NO: 154649 - protein, 10 aa, Artificial Sequence
  Description of Artificial Sequence: Synthetic peptide
  Seed: GMFNMLSTVL
GVFNMLSTVW

SEQ ID NO: 154650 - protein, 10 aa, Artificial Sequence
  Description of Artificial Sequence: Synthetic peptide
  Seed: GMFNMLSTVL
GVFNMLSTVY

SEQ ID NO: 154651 - protein, 9 aa, Artificial Sequence
  Description of Artificial Sequence: Synthetic peptide
  Seed: GMFNMLSTV
GVFNMLSTW

SEQ ID NO: 154652 - protein, 9 aa, Artificial Sequence
  Description of Artificial Sequence: Synthetic peptide
  Seed: GMFNMLSTV
GVFNMLSTY

SEQ ID NO: 154653 - protein, 9 aa, Artificial Sequence
  Description of Artificial Sequence: Synthetic peptide
  Seed: GMMMGMFNM
GVMMGMFNA

SEQ ID NO: 154654 - protein, 9 aa, Artificial Sequence
  Description of Artificial Sequence: Synthetic peptide
  Seed: GMMMGMFNM
GVMMGMFNF

SEQ ID NO: 154655 - protein, 9 aa, Artificial Sequence
  Description of Artificial Sequence: Synthetic peptide
  Seed: GMMMGMFNM
GVMMGMFNI

SEQ ID NO: 154656 - protein, 9 aa, Artificial Sequence
  Description of Artificial Sequence: Synthetic peptide
  Seed: GMMMGMFNM
GVMMGMFNL

SEQ ID NO: 154657 - protein, 9 aa, Artificial Sequence
  Description of Artificial Sequence: Synthetic peptide
  Seed: GMMMGMFNM
GVMMGMFNM

SEQ ID NO: 154658 - protein, 10 aa, Artificial Sequence
  Description of Artificial Sequence: Synthetic peptide
  Seed: GMMMGMFNML
GVMMGMFNMA

SEQ ID NO: 154659 - protein, 10 aa, Artificial Sequence
  Description of Artificial Sequence: Synthetic peptide
  Seed: GMMMGMFNML
GVMMGMFNMI

SEQ ID NO: 154660 - protein, 10 aa, Artificial Sequence
  Description of Artificial Sequence: Synthetic peptide
  Seed: GMMMGMFNML
GVMMGMFNML

SEQ ID NO: 154661 - protein, 10 aa, Artificial Sequence
  Description of Artificial Sequence: Synthetic peptide
  Seed: GMMMGMFNML
GVMMGMFNMM

SEQ ID NO: 154662 - protein, 10 aa, Artificial Sequence
  Description of Artificial Sequence: Synthetic peptide
  Seed: GMMMGMFNML
GVMMGMFNMT

SEQ ID NO: 154663 - protein, 10 aa, Artificial Sequence
  Description of Artificial Sequence: Synthetic peptide
  Seed: GMMMGMFNML
GVMMGMFNMV

SEQ ID NO: 154664 - protein, 9 aa, Artificial Sequence
  Description of Artificial Sequence: Synthetic peptide
  Seed: GMMMGMFNM
GVMMGMFNT

SEQ ID NO: 154665 - protein, 9 aa, Artificial Sequence
  Description of Artificial Sequence: Synthetic peptide
  Seed: GMMMGMFNM
GVMMGMFNV

SEQ ID NO: 154666 - protein, 9 aa, Artificial Sequence
  Description of Artificial Sequence: Synthetic peptide
  Seed: GMMMGMFNM
GVMMGMFNY

SEQ ID NO: 154667 - protein, 11 aa, Artificial Sequence
  Description of Artificial Sequence: Synthetic peptide
  Seed: GLQSSDDFALI
GVQSSDDFALV

SEQ ID NO: 154668 - protein, 9 aa, Artificial Sequence
  Description of Artificial Sequence: Synthetic peptide
  Seed: GMFNMLSTV
GWFNMLSTF

SEQ ID NO: 154669 - protein, 10 aa, Artificial Sequence
  Description of Artificial Sequence: Synthetic peptide
  Seed: GMFNMLSTVL
GWFNMLSTVF

SEQ ID NO: 154670 - protein, 10 aa, Artificial Sequence
  Description of Artificial Sequence: Synthetic peptide
  Seed: GMFNMLSTVL
GWFNMLSTVY

SEQ ID NO: 154671 - protein, 9 aa, Artificial Sequence
  Description of Artificial Sequence: Synthetic peptide
  Seed: GMFNMLSTV
GWFNMLSTY

SEQ ID NO: 154672 - protein, 9 aa, Artificial Sequence
  Description of Artificial Sequence: Synthetic peptide
  Seed: GMMMGMFNM
GWMMGMFNF

SEQ ID NO: 154673 - protein, 10 aa, Artificial Sequence
  Description of Artificial Sequence: Synthetic peptide
  Seed: GMMMGMFNML
GWMMGMFNMA

SEQ ID NO: 154674 - protein, 10 aa, Artificial Sequence
  Description of Artificial Sequence: Synthetic peptide
  Seed: GMMMGMFNML
GWMMGMFNMI

SEQ ID NO: 154675 - protein, 10 aa, Artificial Sequence
  Description of Artificial Sequence: Synthetic peptide
  Seed: GMMMGMFNML
GWMMGMFNML

SEQ ID NO: 154676 - protein, 10 aa, Artificial Sequence
  Description of Artificial Sequence: Synthetic peptide
  Seed: GMMMGMFNML
GWMMGMFNMM

SEQ ID NO: 154677 - protein, 10 aa, Artificial Sequence
  Description of Artificial Sequence: Synthetic peptide
  Seed: GMMMGMFNML
GWMMGMFNMT

SEQ ID NO: 154678 - protein, 10 aa, Artificial Sequence
  Description of Artificial Sequence: Synthetic peptide
  Seed: GMMMGMFNML
GWMMGMFNMV

SEQ ID NO: 154679 - protein, 9 aa, Artificial Sequence
  Description of Artificial Sequence: Synthetic peptide
  Seed: GMMMGMFNM
GWMMGMFNV

SEQ ID NO: 154680 - protein, 9 aa, Artificial Sequence
  Description of Artificial Sequence: Synthetic peptide
  Seed: GMMMGMFNM
GWMMGMFNY

SEQ ID NO: 154681 - protein, 9 aa, Artificial Sequence
  Description of Artificial Sequence: Synthetic peptide
  Seed: GMFNMLSTV
GYFNMLSTF

SEQ ID NO: 154682 - protein, 9 aa, Artificial Sequence
  Description of Artificial Sequence: Synthetic peptide
  Seed: GMFNMLSTV
GYFNMLSTM

SEQ ID NO: 154683 - protein, 10 aa, Artificial Sequence
  Description of Artificial Sequence: Synthetic peptide
  Seed: GMFNMLSTVL
GYFNMLSTVF

SEQ ID NO: 154684 - protein, 10 aa, Artificial Sequence
  Description of Artificial Sequence: Synthetic peptide
  Seed: GMFNMLSTVL
GYFNMLSTVY

SEQ ID NO: 154685 - protein, 9 aa, Artificial Sequence
  Description of Artificial Sequence: Synthetic peptide
  Seed: GMFNMLSTV
GYFNMLSTY

SEQ ID NO: 154686 - protein, 9 aa, Artificial Sequence
  Description of Artificial Sequence: Synthetic peptide
  Seed: GMMMGMFNM
GYMMGMFNF

SEQ ID NO: 154687 - protein, 10 aa, Artificial Sequence
  Description of Artificial Sequence: Synthetic peptide
  Seed: GMMMGMFNML
GYMMGMFNMA

SEQ ID NO: 154688 - protein, 10 aa, Artificial Sequence
  Description of Artificial Sequence: Synthetic peptide
  Seed: GMMMGMFNML
GYMMGMFNMI

SEQ ID NO: 154689 - protein, 10 aa, Artificial Sequence
  Description of Artificial Sequence: Synthetic peptide
  Seed: GMMMGMFNML
GYMMGMFNML

SEQ ID NO: 154690 - protein, 10 aa, Artificial Sequence
  Description of Artificial Sequence: Synthetic peptide
  Seed: GMMMGMFNML
GYMMGMFNMM

SEQ ID NO: 154691 - protein, 10 aa, Artificial Sequence
  Description of Artificial Sequence: Synthetic peptide
  Seed: GMMMGMFNML
GYMMGMFNMT

SEQ ID NO: 154692 - protein, 10 aa, Artificial Sequence
  Description of Artificial Sequence: Synthetic peptide
  Seed: GMMMGMFNML
GYMMGMFNMV

SEQ ID NO: 154693 - protein, 9 aa, Artificial Sequence
  Description of Artificial Sequence: Synthetic peptide
  Seed: GMMMGMFNM
GYMMGMFNV

SEQ ID NO: 154694 - protein, 9 aa, Artificial Sequence
  Description of Artificial Sequence: Synthetic peptide
  Seed: GMMMGMFNM
GYMMGMFNY

SEQ ID NO: 154695 - protein, 11 aa, Artificial Sequence
  Description of Artificial Sequence: Synthetic peptide
  Seed: GLQSSDDFALI
GYQSSDDFALV

SEQ ID NO: 154696 - protein, 10 aa, Artificial Sequence
  Description of Artificial Sequence: Synthetic peptide
  Seed: GLQSSDDFAL
GYQSSDDFAV

SEQ ID NO: 154697 - protein, 9 aa, Artificial Sequence
  Description of Artificial Sequence: Synthetic peptide
  Seed: HGTGTGYTM
HATGTGYTF

SEQ ID NO: 154698 - protein, 9 aa, Artificial Sequence
  Description of Artificial Sequence: Synthetic peptide
  Seed: HGTGTGYTM
HATGTGYTI

SEQ ID NO: 154699 - protein, 9 aa, Artificial Sequence
  Description of Artificial Sequence: Synthetic peptide
  Seed: HGTGTGYTM
HATGTGYTL

SEQ ID NO: 154700 - protein, 9 aa, Artificial Sequence
  Description of Artificial Sequence: Synthetic peptide
  Seed: HGTGTGYTM
HATGTGYTM

SEQ ID NO: 154701 - protein, 9 aa, Artificial Sequence
  Description of Artificial Sequence: Synthetic peptide
  Seed: HGTGTGYTM
HATGTGYTV

SEQ ID NO: 154702 - protein, 9 aa, Artificial Sequence
  Description of Artificial Sequence: Synthetic peptide
  Seed: HGTGTGYTM
HATGTGYTW

SEQ ID NO: 154703 - protein, 9 aa, Artificial Sequence
  Description of Artificial Sequence: Synthetic peptide
  Seed: HGTGTGYTM
HATGTGYTY

SEQ ID NO: 154704 - protein, 9 aa, Artificial Sequence
  Description of Artificial Sequence: Synthetic peptide
  Seed: HGTGTGYTM
HGTGTGYTF

SEQ ID NO: 154705 - protein, 9 aa, Artificial Sequence
  Description of Artificial Sequence: Synthetic peptide
  Seed: HGTGTGYTM
HGTGTGYTY

SEQ ID NO: 154706 - protein, 9 aa, Artificial Sequence
  Description of Artificial Sequence: Synthetic peptide
  Seed: HGTGTGYTM
HITGTGYTF

SEQ ID NO: 154707 - protein, 9 aa, Artificial Sequence
  Description of Artificial Sequence: Synthetic peptide
  Seed: HGTGTGYTM
HITGTGYTM

SEQ ID NO: 154708 - protein, 9 aa, Artificial Sequence
  Description of Artificial Sequence: Synthetic peptide
  Seed: HGTGTGYTM
HITGTGYTY

SEQ ID NO: 154709 - protein, 9 aa, Artificial Sequence
  Description of Artificial Sequence: Synthetic peptide
  Seed: HGTGTGYTM
HLTGTGYTF

SEQ ID NO: 154710 - protein, 9 aa, Artificial Sequence
  Description of Artificial Sequence: Synthetic peptide
  Seed: HGTGTGYTM
HLTGTGYTM

SEQ ID NO: 154711 - protein, 9 aa, Artificial Sequence
  Description of Artificial Sequence: Synthetic peptide
  Seed: HGTGTGYTM
HLTGTGYTY

SEQ ID NO: 154712 - protein, 9 aa, Artificial Sequence
  Description of Artificial Sequence: Synthetic peptide
  Seed: HGTGTGYTM
HMTGTGYTF

SEQ ID NO: 154713 - protein, 9 aa, Artificial Sequence
  Description of Artificial Sequence: Synthetic peptide
  Seed: HGTGTGYTM
HMTGTGYTL

SEQ ID NO: 154714 - protein, 9 aa, Artificial Sequence
  Description of Artificial Sequence: Synthetic peptide
  Seed: HGTGTGYTM
HMTGTGYTM

SEQ ID NO: 154715 - protein, 9 aa, Artificial Sequence
  Description of Artificial Sequence: Synthetic peptide
  Seed: HGTGTGYTM
HMTGTGYTY

SEQ ID NO: 154716 - protein, 9 aa, Artificial Sequence
  Description of Artificial Sequence: Synthetic peptide
  Seed: HGTGTGYTM
HQTGTGYTF

SEQ ID NO: 154717 - protein, 9 aa, Artificial Sequence
  Description of Artificial Sequence: Synthetic peptide
  Seed: HGTGTGYTM
HQTGTGYTM

SEQ ID NO: 154718 - protein, 9 aa, Artificial Sequence
  Description of Artificial Sequence: Synthetic peptide
  Seed: HGTGTGYTM
HQTGTGYTY

SEQ ID NO: 154719 - protein, 9 aa, Artificial Sequence
  Description of Artificial Sequence: Synthetic peptide
  Seed: HGTGTGYTM
HSTGTGYTF

SEQ ID NO: 154720 - protein, 9 aa, Artificial Sequence
  Description of Artificial Sequence: Synthetic peptide
  Seed: HGTGTGYTM
HSTGTGYTI

SEQ ID NO: 154721 - protein, 9 aa, Artificial Sequence
  Description of Artificial Sequence: Synthetic peptide
  Seed: HGTGTGYTM
HSTGTGYTL

SEQ ID NO: 154722 - protein, 9 aa, Artificial Sequence
  Description of Artificial Sequence: Synthetic peptide
  Seed: HGTGTGYTM
HSTGTGYTM

SEQ ID NO: 154723 - protein, 9 aa, Artificial Sequence
  Description of Artificial Sequence: Synthetic peptide
  Seed: HGTGTGYTM
HSTGTGYTV

SEQ ID NO: 154724 - protein, 9 aa, Artificial Sequence
  Description of Artificial Sequence: Synthetic peptide
  Seed: HGTGTGYTM
HSTGTGYTY

SEQ ID NO: 154725 - protein, 9 aa, Artificial Sequence
  Description of Artificial Sequence: Synthetic peptide
  Seed: HGTGTGYTM
HTTGTGYTF

SEQ ID NO: 154726 - protein, 9 aa, Artificial Sequence
  Description of Artificial Sequence: Synthetic peptide
  Seed: HGTGTGYTM
HTTGTGYTI

SEQ ID NO: 154727 - protein, 9 aa, Artificial Sequence
  Description of Artificial Sequence: Synthetic peptide
  Seed: HGTGTGYTM
HTTGTGYTL

SEQ ID NO: 154728 - protein, 9 aa, Artificial Sequence
  Description of Artificial Sequence: Synthetic peptide
  Seed: HGTGTGYTM
HTTGTGYTM

SEQ ID NO: 154729 - protein, 9 aa, Artificial Sequence
  Description of Artificial Sequence: Synthetic peptide
  Seed: HGTGTGYTM
HTTGTGYTV

SEQ ID NO: 154730 - protein, 9 aa, Artificial Sequence
  Description of Artificial Sequence: Synthetic peptide
  Seed: HGTGTGYTM
HTTGTGYTY

SEQ ID NO: 154731 - protein, 9 aa, Artificial Sequence
  Description of Artificial Sequence: Synthetic peptide
  Seed: HGTGTGYTM
HVTGTGYTF

SEQ ID NO: 154732 - protein, 9 aa, Artificial Sequence
  Description of Artificial Sequence: Synthetic peptide
  Seed: HGTGTGYTM
HVTGTGYTL

SEQ ID NO: 154733 - protein, 9 aa, Artificial Sequence
  Description of Artificial Sequence: Synthetic peptide
  Seed: HGTGTGYTM
HVTGTGYTM

SEQ ID NO: 154734 - protein, 9 aa, Artificial Sequence
  Description of Artificial Sequence: Synthetic peptide
  Seed: HGTGTGYTM
HVTGTGYTY

SEQ ID NO: 154735 - protein, 9 aa, Artificial Sequence
  Description of Artificial Sequence: Synthetic peptide
  Seed: IRALTLNTM
IAALTLNTF

SEQ ID NO: 154736 - protein, 9 aa, Artificial Sequence
  Description of Artificial Sequence: Synthetic peptide
  Seed: IRALTLNTM
IAALTLNTL

SEQ ID NO: 154737 - protein, 9 aa, Artificial Sequence
  Description of Artificial Sequence: Synthetic peptide
  Seed: IRALTLNTM
IAALTLNTM

SEQ ID NO: 154738 - protein, 9 aa, Artificial Sequence
  Description of Artificial Sequence: Synthetic peptide
  Seed: IRALTLNTM
IAALTLNTY

SEQ ID NO: 154739 - protein, 11 aa, Artificial Sequence
  Description of Artificial Sequence: Synthetic peptide
  Seed: IATPGMQIRGF
IATPGMQIRGW

SEQ ID NO: 154740 - protein, 9 aa, Artificial Sequence
  Description of Artificial Sequence: Synthetic peptide
  Seed: ISTTFPYTG
IATTFPYTF

SEQ ID NO: 154741 - protein, 9 aa, Artificial Sequence
  Description of Artificial Sequence: Synthetic peptide
  Seed: ISTTFPYTG
IATTFPYTI

SEQ ID NO: 154742 - protein, 9 aa, Artificial Sequence
  Description of Artificial Sequence: Synthetic peptide
  Seed: ISTTFPYTG
IATTFPYTL

SEQ ID NO: 154743 - protein, 9 aa, Artificial Sequence
  Description of Artificial Sequence: Synthetic peptide
  Seed: ISTTFPYTG
IATTFPYTM

SEQ ID NO: 154744 - protein, 9 aa, Artificial Sequence
  Description of Artificial Sequence: Synthetic peptide
  Seed: ISTTFPYTG
IATTFPYTV

SEQ ID NO: 154745 - protein, 9 aa, Artificial Sequence
  Description of Artificial Sequence: Synthetic peptide
  Seed: ISTTFPYTG
IATTFPYTW

SEQ ID NO: 154746 - protein, 9 aa, Artificial Sequence
  Description of Artificial Sequence: Synthetic peptide
  Seed: ISTTFPYTG
IATTFPYTY

SEQ ID NO: 154747 - protein, 9 aa, Artificial Sequence
  Description of Artificial Sequence: Synthetic peptide
  Seed: IRALTLNTM
ICALTLNTF

SEQ ID NO: 154748 - protein, 9 aa, Artificial Sequence
  Description of Artificial Sequence: Synthetic peptide
  Seed: IRALTLNTM
ICALTLNTY

SEQ ID NO: 154749 - protein, 9 aa, Artificial Sequence
  Description of Artificial Sequence: Synthetic peptide
  Seed: ISTTFPYTG
ICTTFPYTF

SEQ ID NO: 154750 - protein, 9 aa, Artificial Sequence
  Description of Artificial Sequence: Synthetic peptide
  Seed: ISTTFPYTG
ICTTFPYTW

SEQ ID NO: 154751 - protein, 9 aa, Artificial Sequence
  Description of Artificial Sequence: Synthetic peptide
  Seed: ISTTFPYTG
IDTTFPYTW

SEQ ID NO: 154752 - protein, 9 aa, Artificial Sequence
  Description of Artificial Sequence: Synthetic peptide
  Seed: IRALTLNTM
IEALTLNTF

SEQ ID NO: 154753 - protein, 9 aa, Artificial Sequence
  Description of Artificial Sequence: Synthetic peptide
  Seed: IRALTLNTM
IEALTLNTM

SEQ ID NO: 154754 - protein, 9 aa, Artificial Sequence
  Description of Artificial Sequence: Synthetic peptide
  Seed: IRALTLNTM
IEALTLNTY

SEQ ID NO: 154755 - protein, 9 aa, Artificial Sequence
  Description of Artificial Sequence: Synthetic peptide
  Seed: ISTTFPYTG
IETTFPYTW

SEQ ID NO: 154756 - protein, 9 aa, Artificial Sequence
  Description of Artificial Sequence: Synthetic peptide
  Seed: IRALTLNTM
IFALTLNTF

SEQ ID NO: 154757 - protein, 9 aa, Artificial Sequence
  Description of Artificial Sequence: Synthetic peptide
  Seed: IRALTLNTM
IFALTLNTH

SEQ ID NO: 154758 - protein, 9 aa, Artificial Sequence
  Description of Artificial Sequence: Synthetic peptide
  Seed: IRALTLNTM
IFALTLNTI

SEQ ID NO: 154759 - protein, 9 aa, Artificial Sequence
  Description of Artificial Sequence: Synthetic peptide
  Seed: IRALTLNTM
IFALTLNTL

SEQ ID NO: 154760 - protein, 9 aa, Artificial Sequence
  Description of Artificial Sequence: Synthetic peptide
  Seed: IRALTLNTM
IFALTLNTM

SEQ ID NO: 154761 - protein, 9 aa, Artificial Sequence
  Description of Artificial Sequence: Synthetic peptide
  Seed: IRALTLNTM
IFALTLNTV

SEQ ID NO: 154762 - protein, 9 aa, Artificial Sequence
  Description of Artificial Sequence: Synthetic peptide
  Seed: IRALTLNTM
IFALTLNTW

SEQ ID NO: 154763 - protein, 9 aa, Artificial Sequence
  Description of Artificial Sequence: Synthetic peptide
  Seed: IRALTLNTM
IFALTLNTY

SEQ ID NO: 154764 - protein, 9 aa, Artificial Sequence
  Description of Artificial Sequence: Synthetic peptide
  Seed: ISTTFPYTG
IFTTFPYTW

SEQ ID NO: 154765 - protein, 9 aa, Artificial Sequence
  Description of Artificial Sequence: Synthetic peptide
  Seed: IRALTLNTM
IGALTLNTF

SEQ ID NO: 154766 - protein, 9 aa, Artificial Sequence
  Description of Artificial Sequence: Synthetic peptide
  Seed: IRALTLNTM
IGALTLNTM

SEQ ID NO: 154767 - protein, 9 aa, Artificial Sequence
  Description of Artificial Sequence: Synthetic peptide
  Seed: IRALTLNTM
IGALTLNTY

SEQ ID NO: 154768 - protein, 9 aa, Artificial Sequence
  Description of Artificial Sequence: Synthetic peptide
  Seed: ISTTFPYTG
IGTTFPYTF

SEQ ID NO: 154769 - protein, 9 aa, Artificial Sequence
  Description of Artificial Sequence: Synthetic peptide
  Seed: ISTTFPYTG
IGTTFPYTW

SEQ ID NO: 154770 - protein, 9 aa, Artificial Sequence
  Description of Artificial Sequence: Synthetic peptide
  Seed: ISTTFPYTG
IGTTFPYTY

SEQ ID NO: 154771 - protein, 9 aa, Artificial Sequence
  Description of Artificial Sequence: Synthetic peptide
  Seed: IRALTLNTM
IHALTLNTF

SEQ ID NO: 154772 - protein, 9 aa, Artificial Sequence
  Description of Artificial Sequence: Synthetic peptide
  Seed: IRALTLNTM
IHALTLNTI

SEQ ID NO: 154773 - protein, 9 aa, Artificial Sequence
  Description of Artificial Sequence: Synthetic peptide
  Seed: IRALTLNTM
IHALTLNTL

SEQ ID NO: 154774 - protein, 9 aa, Artificial Sequence
  Description of Artificial Sequence: Synthetic peptide
  Seed: IRALTLNTM
IHALTLNTM

SEQ ID NO: 154775 - protein, 9 aa, Artificial Sequence
  Description of Artificial Sequence: Synthetic peptide
  Seed: IRALTLNTM
IHALTLNTV

SEQ ID NO: 154776 - protein, 9 aa, Artificial Sequence
  Description of Artificial Sequence: Synthetic peptide
  Seed: IRALTLNTM
IHALTLNTY

SEQ ID NO: 154777 - protein, 9 aa, Artificial Sequence
  Description of Artificial Sequence: Synthetic peptide
  Seed: ISTTFPYTG
IHTTFPYTW

SEQ ID NO: 154778 - protein, 9 aa, Artificial Sequence
  Description of Artificial Sequence: Synthetic peptide
  Seed: IRALTLNTM
IIALTLNTF

SEQ ID NO: 154779 - protein, 9 aa, Artificial Sequence
  Description of Artificial Sequence: Synthetic peptide
  Seed: IRALTLNTM
IIALTLNTM

SEQ ID NO: 154780 - protein, 9 aa, Artificial Sequence
  Description of Artificial Sequence: Synthetic peptide
  Seed: IRALTLNTM
IIALTLNTY

SEQ ID NO: 154781 - protein, 9 aa, Artificial Sequence
  Description of Artificial Sequence: Synthetic peptide
  Seed: IATPGMQIR
IITPGMQIR

SEQ ID NO: 154782 - protein, 9 aa, Artificial Sequence
  Description of Artificial Sequence: Synthetic peptide
  Seed: ISTTFPYTG
IITTFPYTF

SEQ ID NO: 154783 - protein, 9 aa, Artificial Sequence
  Description of Artificial Sequence: Synthetic peptide
  Seed: ISTTFPYTG
IITTFPYTW

SEQ ID NO: 154784 - protein, 9 aa, Artificial Sequence
  Description of Artificial Sequence: Synthetic peptide
  Seed: IRALTLNTM
IKALTLNTF

SEQ ID NO: 154785 - protein, 9 aa, Artificial Sequence
  Description of Artificial Sequence: Synthetic peptide
  Seed: IRALTLNTM
IKALTLNTH

SEQ ID NO: 154786 - protein, 9 aa, Artificial Sequence
  Description of Artificial Sequence: Synthetic peptide
  Seed: IRALTLNTM
IKALTLNTI

SEQ ID NO: 154787 - protein, 9 aa, Artificial Sequence
  Description of Artificial Sequence: Synthetic peptide
  Seed: IRALTLNTM
IKALTLNTL

SEQ ID NO: 154788 - protein, 9 aa, Artificial Sequence
  Description of Artificial Sequence: Synthetic peptide
  Seed: IRALTLNTM
IKALTLNTM

SEQ ID NO: 154789 - protein, 9 aa, Artificial Sequence
  Description of Artificial Sequence: Synthetic peptide
  Seed: IRALTLNTM
IKALTLNTV

SEQ ID NO: 154790 - protein, 9 aa, Artificial Sequence
  Description of Artificial Sequence: Synthetic peptide
  Seed: IRALTLNTM
IKALTLNTW

SEQ ID NO: 154791 - protein, 9 aa, Artificial Sequence
  Description of Artificial Sequence: Synthetic peptide
  Seed: IRALTLNTM
IKALTLNTY

SEQ ID NO: 154792 - protein, 9 aa, Artificial Sequence
  Description of Artificial Sequence: Synthetic peptide
  Seed: ISTTFPYTG
IKTTFPYTW

SEQ ID NO: 154793 - protein, 9 aa, Artificial Sequence
  Description of Artificial Sequence: Synthetic peptide
  Seed: IRALTLNTM
ILALTLNTF

SEQ ID NO: 154794 - protein, 9 aa, Artificial Sequence
  Description of Artificial Sequence: Synthetic peptide
  Seed: IRALTLNTM
ILALTLNTM

SEQ ID NO: 154795 - protein, 9 aa, Artificial Sequence
  Description of Artificial Sequence: Synthetic peptide
  Seed: IRALTLNTM
ILALTLNTY

SEQ ID NO: 154796 - protein, 9 aa, Artificial Sequence
  Description of Artificial Sequence: Synthetic peptide
  Seed: ISTTFPYTG
ILTTFPYTF

SEQ ID NO: 154797 - protein, 9 aa, Artificial Sequence
  Description of Artificial Sequence: Synthetic peptide
  Seed: ISTTFPYTG
ILTTFPYTW

SEQ ID NO: 154798 - protein, 9 aa, Artificial Sequence
  Description of Artificial Sequence: Synthetic peptide
  Seed: IRALTLNTM
IMALTLNTA

SEQ ID NO: 154799 - protein, 9 aa, Artificial Sequence
  Description of Artificial Sequence: Synthetic peptide
  Seed: IRALTLNTM
IMALTLNTF

SEQ ID NO: 154800 - protein, 9 aa, Artificial Sequence
  Description of Artificial Sequence: Synthetic peptide
  Seed: IRALTLNTM
IMALTLNTH

SEQ ID NO: 154801 - protein, 9 aa, Artificial Sequence
  Description of Artificial Sequence: Synthetic peptide
  Seed: IRALTLNTM
IMALTLNTI

SEQ ID NO: 154802 - protein, 9 aa, Artificial Sequence
  Description of Artificial Sequence: Synthetic peptide
  Seed: IRALTLNTM
IMALTLNTL

SEQ ID NO: 154803 - protein, 9 aa, Artificial Sequence
  Description of Artificial Sequence: Synthetic peptide
  Seed: IRALTLNTM
IMALTLNTM

SEQ ID NO: 154804 - protein, 9 aa, Artificial Sequence
  Description of Artificial Sequence: Synthetic peptide
  Seed: IRALTLNTM
IMALTLNTV

SEQ ID NO: 154805 - protein, 9 aa, Artificial Sequence
  Description of Artificial Sequence: Synthetic peptide
  Seed: IRALTLNTM
IMALTLNTW

SEQ ID NO: 154806 - protein, 9 aa, Artificial Sequence
  Description of Artificial Sequence: Synthetic peptide
  Seed: IRALTLNTM
IMALTLNTY

SEQ ID NO: 154807 - protein, 9 aa, Artificial Sequence
  Description of Artificial Sequence: Synthetic peptide
  Seed: ISTTFPYTG
IMTTFPYTF

SEQ ID NO: 154808 - protein, 9 aa, Artificial Sequence
  Description of Artificial Sequence: Synthetic peptide
  Seed: ISTTFPYTG
IMTTFPYTI

SEQ ID NO: 154809 - protein, 9 aa, Artificial Sequence
  Description of Artificial Sequence: Synthetic peptide
  Seed: ISTTFPYTG
IMTTFPYTM

SEQ ID NO: 154810 - protein, 9 aa, Artificial Sequence
  Description of Artificial Sequence: Synthetic peptide
  Seed: ISTTFPYTG
IMTTFPYTW

SEQ ID NO: 154811 - protein, 9 aa, Artificial Sequence
  Description of Artificial Sequence: Synthetic peptide
  Seed: ISTTFPYTG
IMTTFPYTY

SEQ ID NO: 154812 - protein, 9 aa, Artificial Sequence
  Description of Artificial Sequence: Synthetic peptide
  Seed: IRALTLNTM
INALTLNTF

SEQ ID NO: 154813 - protein, 9 aa, Artificial Sequence
  Description of Artificial Sequence: Synthetic peptide
  Seed: IRALTLNTM
INALTLNTM

SEQ ID NO: 154814 - protein, 9 aa, Artificial Sequence
  Description of Artificial Sequence: Synthetic peptide
  Seed: IRALTLNTM
INALTLNTY

SEQ ID NO: 154815 - protein, 9 aa, Artificial Sequence
  Description of Artificial Sequence: Synthetic peptide
  Seed: ISTTFPYTG
INTTFPYTW

SEQ ID NO: 154816 - protein, 9 aa, Artificial Sequence
  Description of Artificial Sequence: Synthetic peptide
  Seed: IRALTLNTM
IPALTLNTF

SEQ ID NO: 154817 - protein, 9 aa, Artificial Sequence
  Description of Artificial Sequence: Synthetic peptide
  Seed: IRALTLNTM
IPALTLNTL

SEQ ID NO: 154818 - protein, 9 aa, Artificial Sequence
  Description of Artificial Sequence: Synthetic peptide
  Seed: IRALTLNTM
IPALTLNTY

SEQ ID NO: 154819 - protein, 9 aa, Artificial Sequence
  Description of Artificial Sequence: Synthetic peptide
  Seed: ISTTFPYTG
IPTTFPYTW

SEQ ID NO: 154820 - protein, 9 aa, Artificial Sequence
  Description of Artificial Sequence: Synthetic peptide
  Seed: IRALTLNTM
IQALTLNTA

SEQ ID NO: 154821 - protein, 9 aa, Artificial Sequence
  Description of Artificial Sequence: Synthetic peptide
  Seed: IRALTLNTM
IQALTLNTF

SEQ ID NO: 154822 - protein, 9 aa, Artificial Sequence
  Description of Artificial Sequence: Synthetic peptide
  Seed: IRALTLNTM
IQALTLNTH

SEQ ID NO: 154823 - protein, 9 aa, Artificial Sequence
  Description of Artificial Sequence: Synthetic peptide
  Seed: IRALTLNTM
IQALTLNTI

SEQ ID NO: 154824 - protein, 9 aa, Artificial Sequence
  Description of Artificial Sequence: Synthetic peptide
  Seed: IRALTLNTM
IQALTLNTL

SEQ ID NO: 154825 - protein, 9 aa, Artificial Sequence
  Description of Artificial Sequence: Synthetic peptide
  Seed: IRALTLNTM
IQALTLNTM

SEQ ID NO: 154826 - protein, 9 aa, Artificial Sequence
  Description of Artificial Sequence: Synthetic peptide
  Seed: IRALTLNTM
IQALTLNTV

SEQ ID NO: 154827 - protein, 9 aa, Artificial Sequence
  Description of Artificial Sequence: Synthetic peptide
  Seed: IRALTLNTM
IQALTLNTW

SEQ ID NO: 154828 - protein, 9 aa, Artificial Sequence
  Description of Artificial Sequence: Synthetic peptide
  Seed: IRALTLNTM
IQALTLNTY

SEQ ID NO: 154829 - protein, 9 aa, Artificial Sequence
  Description of Artificial Sequence: Synthetic peptide
  Seed: ISTTFPYTG
IQTTFPYTW

SEQ ID NO: 154830 - protein, 9 aa, Artificial Sequence
  Description of Artificial Sequence: Synthetic peptide
  Seed: IRALTLNTM
IRALTLNTF

SEQ ID NO: 154831 - protein, 9 aa, Artificial Sequence
  Description of Artificial Sequence: Synthetic peptide
  Seed: IRALTLNTM
IRALTLNTI

SEQ ID NO: 154832 - protein, 9 aa, Artificial Sequence
  Description of Artificial Sequence: Synthetic peptide
  Seed: IRALTLNTM
IRALTLNTL

SEQ ID NO: 154833 - protein, 9 aa, Artificial Sequence
  Description of Artificial Sequence: Synthetic peptide
  Seed: IRALTLNTM
IRALTLNTV

SEQ ID NO: 154834 - protein, 9 aa, Artificial Sequence
  Description of Artificial Sequence: Synthetic peptide
  Seed: IRALTLNTM
IRALTLNTY

SEQ ID NO: 154835 - protein, 9 aa, Artificial Sequence
  Description of Artificial Sequence: Synthetic peptide
  Seed: IRALTLNTM
ISALTLNTF

SEQ ID NO: 154836 - protein, 9 aa, Artificial Sequence
  Description of Artificial Sequence: Synthetic peptide
  Seed: IRALTLNTM
ISALTLNTL

SEQ ID NO: 154837 - protein, 9 aa, Artificial Sequence
  Description of Artificial Sequence: Synthetic peptide
  Seed: IRALTLNTM
ISALTLNTM

SEQ ID NO: 154838 - protein, 9 aa, Artificial Sequence
  Description of Artificial Sequence: Synthetic peptide
  Seed: IRALTLNTM
ISALTLNTY

SEQ ID NO: 154839 - protein, 11 aa, Artificial Sequence
  Description of Artificial Sequence: Synthetic peptide
  Seed: IATPGMQIRGF
ISTPGMQIRGF

SEQ ID NO: 154840 - protein, 11 aa, Artificial Sequence
  Description of Artificial Sequence: Synthetic peptide
  Seed: IATPGMQIRGF
ISTPGMQIRGM

SEQ ID NO: 154841 - protein, 11 aa, Artificial Sequence
  Description of Artificial Sequence: Synthetic peptide
  Seed: IATPGMQIRGF
ISTPGMQIRGW

SEQ ID NO: 154842 - protein, 11 aa, Artificial Sequence
  Description of Artificial Sequence: Synthetic peptide
  Seed: IATPGMQIRGF
ISTPGMQIRGY

SEQ ID NO: 154843 - protein, 9 aa, Artificial Sequence
  Description of Artificial Sequence: Synthetic peptide
  Seed: ISTTFPYTG
ISTTFPYTF

SEQ ID NO: 154844 - protein, 9 aa, Artificial Sequence
  Description of Artificial Sequence: Synthetic peptide
  Seed: ISTTFPYTG
ISTTFPYTI

SEQ ID NO: 154845 - protein, 9 aa, Artificial Sequence
  Description of Artificial Sequence: Synthetic peptide
  Seed: ISTTFPYTG
ISTTFPYTL

SEQ ID NO: 154846 - protein, 9 aa, Artificial Sequence
  Description of Artificial Sequence: Synthetic peptide
  Seed: ISTTFPYTG
ISTTFPYTM

SEQ ID NO: 154847 - protein, 9 aa, Artificial Sequence
  Description of Artificial Sequence: Synthetic peptide
  Seed: ISTTFPYTG
ISTTFPYTN

SEQ ID NO: 154848 - protein, 9 aa, Artificial Sequence
  Description of Artificial Sequence: Synthetic peptide
  Seed: ISTTFPYTG
ISTTFPYTV

SEQ ID NO: 154849 - protein, 9 aa, Artificial Sequence
  Description of Artificial Sequence: Synthetic peptide
  Seed: ISTTFPYTG
ISTTFPYTW

SEQ ID NO: 154850 - protein, 9 aa, Artificial Sequence
  Description of Artificial Sequence: Synthetic peptide
  Seed: ISTTFPYTG
ISTTFPYTY

SEQ ID NO: 154851 - protein, 9 aa, Artificial Sequence
  Description of Artificial Sequence: Synthetic peptide
  Seed: IRALTLNTM
ITALTLNTF

SEQ ID NO: 154852 - protein, 9 aa, Artificial Sequence
  Description of Artificial Sequence: Synthetic peptide
  Seed: IRALTLNTM
ITALTLNTM

SEQ ID NO: 154853 - protein, 9 aa, Artificial Sequence
  Description of Artificial Sequence: Synthetic peptide
  Seed: IRALTLNTM
ITALTLNTY

SEQ ID NO: 154854 - protein, 9 aa, Artificial Sequence
  Description of Artificial Sequence: Synthetic peptide
  Seed: IATPGMQIR
ITTPGMQIK

SEQ ID NO: 154855 - protein, 9 aa, Artificial Sequence
  Description of Artificial Sequence: Synthetic peptide
  Seed: IATPGMQIR
ITTPGMQIR

SEQ ID NO: 154856 - protein, 11 aa, Artificial Sequence
  Description of Artificial Sequence: Synthetic peptide
  Seed: IATPGMQIRGF
ITTPGMQIRGF

SEQ ID NO: 154857 - protein, 11 aa, Artificial Sequence
  Description of Artificial Sequence: Synthetic peptide
  Seed: IATPGMQIRGF
ITTPGMQIRGM

SEQ ID NO: 154858 - protein, 11 aa, Artificial Sequence
  Description of Artificial Sequence: Synthetic peptide
  Seed: IATPGMQIRGF
ITTPGMQIRGW

SEQ ID NO: 154859 - protein, 11 aa, Artificial Sequence
  Description of Artificial Sequence: Synthetic peptide
  Seed: IATPGMQIRGF
ITTPGMQIRGY

SEQ ID NO: 154860 - protein, 9 aa, Artificial Sequence
  Description of Artificial Sequence: Synthetic peptide
  Seed: ISTTFPYTG
ITTTFPYTF

SEQ ID NO: 154861 - protein, 9 aa, Artificial Sequence
  Description of Artificial Sequence: Synthetic peptide
  Seed: ISTTFPYTG
ITTTFPYTG

SEQ ID NO: 154862 - protein, 9 aa, Artificial Sequence
  Description of Artificial Sequence: Synthetic peptide
  Seed: ISTTFPYTG
ITTTFPYTI

SEQ ID NO: 154863 - protein, 9 aa, Artificial Sequence
  Description of Artificial Sequence: Synthetic peptide
  Seed: ISTTFPYTG
ITTTFPYTL

SEQ ID NO: 154864 - protein, 9 aa, Artificial Sequence
  Description of Artificial Sequence: Synthetic peptide
  Seed: ISTTFPYTG
ITTTFPYTM

SEQ ID NO: 154865 - protein, 9 aa, Artificial Sequence
  Description of Artificial Sequence: Synthetic peptide
  Seed: ISTTFPYTG
ITTTFPYTV

SEQ ID NO: 154866 - protein, 9 aa, Artificial Sequence
  Description of Artificial Sequence: Synthetic peptide
  Seed: ISTTFPYTG
ITTTFPYTW

SEQ ID NO: 154867 - protein, 9 aa, Artificial Sequence
  Description of Artificial Sequence: Synthetic peptide
  Seed: ISTTFPYTG
ITTTFPYTY

SEQ ID NO: 154868 - protein, 9 aa, Artificial Sequence
  Description of Artificial Sequence: Synthetic peptide
  Seed: IRALTLNTM
IVALTLNTF

SEQ ID NO: 154869 - protein, 9 aa, Artificial Sequence
  Description of Artificial Sequence: Synthetic peptide
  Seed: IRALTLNTM
IVALTLNTM

SEQ ID NO: 154870 - protein, 9 aa, Artificial Sequence
  Description of Artificial Sequence: Synthetic peptide
  Seed: IRALTLNTM
IVALTLNTY

SEQ ID NO: 154871 - protein, 9 aa, Artificial Sequence
  Description of Artificial Sequence: Synthetic peptide
  Seed: IATPGMQIR
IVTPGMQIR

SEQ ID NO: 154872 - protein, 11 aa, Artificial Sequence
  Description of Artificial Sequence: Synthetic peptide
  Seed: IATPGMQIRGF
IVTPGMQIRGW

SEQ ID NO: 154873 - protein, 9 aa, Artificial Sequence
  Description of Artificial Sequence: Synthetic peptide
  Seed: ISTTFPYTG
IVTTFPYTF

SEQ ID NO: 154874 - protein, 9 aa, Artificial Sequence
  Description of Artificial Sequence: Synthetic peptide
  Seed: ISTTFPYTG
IVTTFPYTI

SEQ ID NO: 154875 - protein, 9 aa, Artificial Sequence
  Description of Artificial Sequence: Synthetic peptide
  Seed: ISTTFPYTG
IVTTFPYTM

SEQ ID NO: 154876 - protein, 9 aa, Artificial Sequence
  Description of Artificial Sequence: Synthetic peptide
  Seed: ISTTFPYTG
IVTTFPYTW

SEQ ID NO: 154877 - protein, 9 aa, Artificial Sequence
  Description of Artificial Sequence: Synthetic peptide
  Seed: ISTTFPYTG
IVTTFPYTY

SEQ ID NO: 154878 - protein, 9 aa, Artificial Sequence
  Description of Artificial Sequence: Synthetic peptide
  Seed: IRALTLNTM
IWALTLNTF

SEQ ID NO: 154879 - protein, 9 aa, Artificial Sequence
  Description of Artificial Sequence: Synthetic peptide
  Seed: IRALTLNTM
IWALTLNTI

SEQ ID NO: 154880 - protein, 9 aa, Artificial Sequence
  Description of Artificial Sequence: Synthetic peptide
  Seed: IRALTLNTM
IWALTLNTL

SEQ ID NO: 154881 - protein, 9 aa, Artificial Sequence
  Description of Artificial Sequence: Synthetic peptide
  Seed: IRALTLNTM
IWALTLNTM

SEQ ID NO: 154882 - protein, 9 aa, Artificial Sequence
  Description of Artificial Sequence: Synthetic peptide
  Seed: IRALTLNTM
IWALTLNTV

SEQ ID NO: 154883 - protein, 9 aa, Artificial Sequence
  Description of Artificial Sequence: Synthetic peptide
  Seed: IRALTLNTM
IWALTLNTY

SEQ ID NO: 154884 - protein, 9 aa, Artificial Sequence
  Description of Artificial Sequence: Synthetic peptide
  Seed: ISTTFPYTG
IWTTFPYTW

SEQ ID NO: 154885 - protein, 9 aa, Artificial Sequence
  Description of Artificial Sequence: Synthetic peptide
  Seed: IRALTLNTM
IYALTLNTA

SEQ ID NO: 154886 - protein, 9 aa, Artificial Sequence
  Description of Artificial Sequence: Synthetic peptide
  Seed: IRALTLNTM
IYALTLNTF

SEQ ID NO: 154887 - protein, 9 aa, Artificial Sequence
  Description of Artificial Sequence: Synthetic peptide
  Seed: IRALTLNTM
IYALTLNTH

SEQ ID NO: 154888 - protein, 9 aa, Artificial Sequence
  Description of Artificial Sequence: Synthetic peptide
  Seed: IRALTLNTM
IYALTLNTI

SEQ ID NO: 154889 - protein, 9 aa, Artificial Sequence
  Description of Artificial Sequence: Synthetic peptide
  Seed: IRALTLNTM
IYALTLNTL

SEQ ID NO: 154890 - protein, 9 aa, Artificial Sequence
  Description of Artificial Sequence: Synthetic peptide
  Seed: IRALTLNTM
IYALTLNTM

SEQ ID NO: 154891 - protein, 9 aa, Artificial Sequence
  Description of Artificial Sequence: Synthetic peptide
  Seed: IRALTLNTM
IYALTLNTT

SEQ ID NO: 154892 - protein, 9 aa, Artificial Sequence
  Description of Artificial Sequence: Synthetic peptide
  Seed: IRALTLNTM
IYALTLNTV

SEQ ID NO: 154893 - protein, 9 aa, Artificial Sequence
  Description of Artificial Sequence: Synthetic peptide
  Seed: IRALTLNTM
IYALTLNTW

SEQ ID NO: 154894 - protein, 9 aa, Artificial Sequence
  Description of Artificial Sequence: Synthetic peptide
  Seed: IRALTLNTM
IYALTLNTY

SEQ ID NO: 154895 - protein, 9 aa, Artificial Sequence
  Description of Artificial Sequence: Synthetic peptide
  Seed: ISTTFPYTG
IYTTFPYTW

SEQ ID NO: 154896 - protein, 9 aa, Artificial Sequence
  Description of Artificial Sequence: Synthetic peptide
  Seed: KKAKLANVV
KAAKLANVF

SEQ ID NO: 154897 - protein, 9 aa, Artificial Sequence
  Description of Artificial Sequence: Synthetic peptide
  Seed: KKAKLANVV
KAAKLANVL

SEQ ID NO: 154898 - protein, 9 aa, Artificial Sequence
  Description of Artificial Sequence: Synthetic peptide
  Seed: KKAKLANVV
KAAKLANVM

SEQ ID NO: 154899 - protein, 10 aa, Artificial Sequence
  Description of Artificial Sequence: Synthetic peptide
  Seed: KKAKLANVVR
KAAKLANVVR

SEQ ID NO: 154900 - protein, 9 aa, Artificial Sequence
  Description of Artificial Sequence: Synthetic peptide
  Seed: KKAKLANVV
KAAKLANVY

SEQ ID NO: 154901 - protein, 9 aa, Artificial Sequence
  Description of Artificial Sequence: Synthetic peptide
  Seed: KLANVVRKM
KAANVVRKF

SEQ ID NO: 154902 - protein, 9 aa, Artificial Sequence
  Description of Artificial Sequence: Synthetic peptide
  Seed: KLANVVRKM
KAANVVRKI

SEQ ID NO: 154903 - protein, 9 aa, Artificial Sequence
  Description of Artificial Sequence: Synthetic peptide
  Seed: KLANVVRKM
KAANVVRKL

SEQ ID NO: 154904 - protein, 9 aa, Artificial Sequence
  Description of Artificial Sequence: Synthetic peptide
  Seed: KLANVVRKM
KAANVVRKM

SEQ ID NO: 154905 - protein, 9 aa, Artificial Sequence
  Description of Artificial Sequence: Synthetic peptide
  Seed: KLANVVRKM
KAANVVRKV

SEQ ID NO: 154906 - protein, 9 aa, Artificial Sequence
  Description of Artificial Sequence: Synthetic peptide
  Seed: KLANVVRKM
KAANVVRKW

SEQ ID NO: 154907 - protein, 9 aa, Artificial Sequence
  Description of Artificial Sequence: Synthetic peptide
  Seed: KLANVVRKM
KAANVVRKY

SEQ ID NO: 154908 - protein, 9 aa, Artificial Sequence
  Description of Artificial Sequence: Synthetic peptide
  Seed: KMARLGKGY
KAARLGKGF

SEQ ID NO: 154909 - protein, 9 aa, Artificial Sequence
  Description of Artificial Sequence: Synthetic peptide
  Seed: KMARLGKGY
KAARLGKGY

SEQ ID NO: 154910 - protein, 10 aa, Artificial Sequence
  Description of Artificial Sequence: Synthetic peptide
  Seed: KMARLGKGYM
KAARLGKGYA

SEQ ID NO: 154911 - protein, 10 aa, Artificial Sequence
  Description of Artificial Sequence: Synthetic peptide
  Seed: KMARLGKGYM
KAARLGKGYI

SEQ ID NO: 154912 - protein, 10 aa, Artificial Sequence
  Description of Artificial Sequence: Synthetic peptide
  Seed: KMARLGKGYM
KAARLGKGYK

SEQ ID NO: 154913 - protein, 10 aa, Artificial Sequence
  Description of Artificial Sequence: Synthetic peptide
  Seed: KMARLGKGYM
KAARLGKGYL

SEQ ID NO: 154914 - protein, 10 aa, Artificial Sequence
  Description of Artificial Sequence: Synthetic peptide
  Seed: KMARLGKGYM
KAARLGKGYM

SEQ ID NO: 154915 - protein, 11 aa, Artificial Sequence
  Description of Artificial Sequence: Synthetic peptide
  Seed: KMARLGKGYMF
KAARLGKGYMF

SEQ ID NO: 154916 - protein, 11 aa, Artificial Sequence
  Description of Artificial Sequence: Synthetic peptide
  Seed: KMARLGKGYMF
KAARLGKGYMI

SEQ ID NO: 154917 - protein, 11 aa, Artificial Sequence
  Description of Artificial Sequence: Synthetic peptide
  Seed: KMARLGKGYMF
KAARLGKGYMK

SEQ ID NO: 154918 - protein, 11 aa, Artificial Sequence
  Description of Artificial Sequence: Synthetic peptide
  Seed: KMARLGKGYMF
KAARLGKGYML

SEQ ID NO: 154919 - protein, 11 aa, Artificial Sequence
  Description of Artificial Sequence: Synthetic peptide
  Seed: KMARLGKGYMF
KAARLGKGYMM

SEQ ID NO: 154920 - protein, 11 aa, Artificial Sequence
  Description of Artificial Sequence: Synthetic peptide
  Seed: KMARLGKGYMF
KAARLGKGYMV

SEQ ID NO: 154921 - protein, 10 aa, Artificial Sequence
  Description of Artificial Sequence: Synthetic peptide
  Seed: KMARLGKGYM
KAARLGKGYR

SEQ ID NO: 154922 - protein, 10 aa, Artificial Sequence
  Description of Artificial Sequence: Synthetic peptide
  Seed: KMARLGKGYM
KAARLGKGYV

SEQ ID NO: 154923 - protein, 10 aa, Artificial Sequence
  Description of Artificial Sequence: Synthetic peptide
  Seed: KMARLGKGYM
KAARLGKGYY

SEQ ID NO: 154924 - protein, 9 aa, Artificial Sequence
  Description of Artificial Sequence: Synthetic peptide
  Seed: KAKLANVVR
KAKLANVVA

SEQ ID NO: 154925 - protein, 9 aa, Artificial Sequence
  Description of Artificial Sequence: Synthetic peptide
  Seed: KAKLANVVR
KAKLANVVC

SEQ ID NO: 154926 - protein, 9 aa, Artificial Sequence
  Description of Artificial Sequence: Synthetic peptide
  Seed: KAKLANVVR
KAKLANVVE

SEQ ID NO: 154927 - protein, 9 aa, Artificial Sequence
  Description of Artificial Sequence: Synthetic peptide
  Seed: KAKLANVVR
KAKLANVVF

SEQ ID NO: 154928 - protein, 9 aa, Artificial Sequence
  Description of Artificial Sequence: Synthetic peptide
  Seed: KAKLANVVR
KAKLANVVG

SEQ ID NO: 154929 - protein, 9 aa, Artificial Sequence
  Description of Artificial Sequence: Synthetic peptide
  Seed: KAKLANVVR
KAKLANVVH

SEQ ID NO: 154930 - protein, 9 aa, Artificial Sequence
  Description of Artificial Sequence: Synthetic peptide
  Seed: KAKLANVVR
KAKLANVVI

SEQ ID NO: 154931 - protein, 9 aa, Artificial Sequence
  Description of Artificial Sequence: Synthetic peptide
  Seed: KAKLANVVR
KAKLANVVK

SEQ ID NO: 154932 - protein, 9 aa, Artificial Sequence
  Description of Artificial Sequence: Synthetic peptide
  Seed: KAKLANVVR
KAKLANVVL

SEQ ID NO: 154933 - protein, 9 aa, Artificial Sequence
  Description of Artificial Sequence: Synthetic peptide
  Seed: KAKLANVVR
KAKLANVVM

SEQ ID NO: 154934 - protein, 9 aa, Artificial Sequence
  Description of Artificial Sequence: Synthetic peptide
  Seed: KAKLANVVR
KAKLANVVN

SEQ ID NO: 154935 - protein, 9 aa, Artificial Sequence
  Description of Artificial Sequence: Synthetic peptide
  Seed: KAKLANVVR
KAKLANVVP

SEQ ID NO: 154936 - protein, 9 aa, Artificial Sequence
  Description of Artificial Sequence: Synthetic peptide
  Seed: KAKLANVVR
KAKLANVVQ

SEQ ID NO: 154937 - protein, 10 aa, Artificial Sequence
  Description of Artificial Sequence: Synthetic peptide
  Seed: KAKLANVVRK
KAKLANVVRA

SEQ ID NO: 154938 - protein, 10 aa, Artificial Sequence
  Description of Artificial Sequence: Synthetic peptide
  Seed: KAKLANVVRK
KAKLANVVRI

SEQ ID NO: 154939 - protein, 10 aa, Artificial Sequence
  Description of Artificial Sequence: Synthetic peptide
  Seed: KAKLANVVRK
KAKLANVVRL

SEQ ID NO: 154940 - protein, 10 aa, Artificial Sequence
  Description of Artificial Sequence: Synthetic peptide
  Seed: KAKLANVVRK
KAKLANVVRM

SEQ ID NO: 154941 - protein, 10 aa, Artificial Sequence
  Description of Artificial Sequence: Synthetic peptide
  Seed: KAKLANVVRK
KAKLANVVRR

SEQ ID NO: 154942 - protein, 10 aa, Artificial Sequence
  Description of Artificial Sequence: Synthetic peptide
  Seed: KAKLANVVRK
KAKLANVVRS

SEQ ID NO: 154943 - protein, 10 aa, Artificial Sequence
  Description of Artificial Sequence: Synthetic peptide
  Seed: KAKLANVVRK
KAKLANVVRV

SEQ ID NO: 154944 - protein, 10 aa, Artificial Sequence
  Description of Artificial Sequence: Synthetic peptide
  Seed: KAKLANVVRK
KAKLANVVRY

SEQ ID NO: 154945 - protein, 9 aa, Artificial Sequence
  Description of Artificial Sequence: Synthetic peptide
  Seed: KAKLANVVR
KAKLANVVS

SEQ ID NO: 154946 - protein, 9 aa, Artificial Sequence
  Description of Artificial Sequence: Synthetic peptide
  Seed: KAKLANVVR
KAKLANVVT

SEQ ID NO: 154947 - protein, 9 aa, Artificial Sequence
  Description of Artificial Sequence: Synthetic peptide
  Seed: KAKLANVVR
KAKLANVVV

SEQ ID NO: 154948 - protein, 9 aa, Artificial Sequence
  Description of Artificial Sequence: Synthetic peptide
  Seed: KAKLANVVR
KAKLANVVY

SEQ ID NO: 154949 - protein, 9 aa, Artificial Sequence
  Description of Artificial Sequence: Synthetic peptide
  Seed: KWNENQNPR
KANENQNPR

SEQ ID NO: 154950 - protein, 9 aa, Artificial Sequence
  Description of Artificial Sequence: Synthetic peptide
  Seed: KKAKLANVV
KCAKLANVF

SEQ ID NO: 154951 - protein, 10 aa, Artificial Sequence
  Description of Artificial Sequence: Synthetic peptide
  Seed: KKAKLANVVR
KCAKLANVVR

SEQ ID NO: 154952 - protein, 9 aa, Artificial Sequence
  Description of Artificial Sequence: Synthetic peptide
  Seed: KKAKLANVV
KCAKLANVY

SEQ ID NO: 154953 - protein, 9 aa, Artificial Sequence
  Description of Artificial Sequence: Synthetic peptide
  Seed: KMARLGKGY
KCARLGKGY

SEQ ID NO: 154954 - protein, 10 aa, Artificial Sequence
  Description of Artificial Sequence: Synthetic peptide
  Seed: KMARLGKGYM
KCARLGKGYA

SEQ ID NO: 154955 - protein, 10 aa, Artificial Sequence
  Description of Artificial Sequence: Synthetic peptide
  Seed: KMARLGKGYM
KCARLGKGYI

SEQ ID NO: 154956 - protein, 10 aa, Artificial Sequence
  Description of Artificial Sequence: Synthetic peptide
  Seed: KMARLGKGYM
KCARLGKGYK

SEQ ID NO: 154957 - protein, 10 aa, Artificial Sequence
  Description of Artificial Sequence: Synthetic peptide
  Seed: KMARLGKGYM
KCARLGKGYL

SEQ ID NO: 154958 - protein, 10 aa, Artificial Sequence
  Description of Artificial Sequence: Synthetic peptide
  Seed: KMARLGKGYM
KCARLGKGYM

SEQ ID NO: 154959 - protein, 11 aa, Artificial Sequence
  Description of Artificial Sequence: Synthetic peptide
  Seed: KMARLGKGYMF
KCARLGKGYMF

SEQ ID NO: 154960 - protein, 11 aa, Artificial Sequence
  Description of Artificial Sequence: Synthetic peptide
  Seed: KMARLGKGYMF
KCARLGKGYMI

SEQ ID NO: 154961 - protein, 11 aa, Artificial Sequence
  Description of Artificial Sequence: Synthetic peptide
  Seed: KMARLGKGYMF
KCARLGKGYMK

SEQ ID NO: 154962 - protein, 11 aa, Artificial Sequence
  Description of Artificial Sequence: Synthetic peptide
  Seed: KMARLGKGYMF
KCARLGKGYML

SEQ ID NO: 154963 - protein, 11 aa, Artificial Sequence
  Description of Artificial Sequence: Synthetic peptide
  Seed: KMARLGKGYMF
KCARLGKGYMM

SEQ ID NO: 154964 - protein, 11 aa, Artificial Sequence
  Description of Artificial Sequence: Synthetic peptide
  Seed: KMARLGKGYMF
KCARLGKGYMV

SEQ ID NO: 154965 - protein, 10 aa, Artificial Sequence
  Description of Artificial Sequence: Synthetic peptide
  Seed: KMARLGKGYM
KCARLGKGYV

SEQ ID NO: 154966 - protein, 10 aa, Artificial Sequence
  Description of Artificial Sequence: Synthetic peptide
  Seed: KMARLGKGYM
KCARLGKGYY

SEQ ID NO: 154967 - protein, 9 aa, Artificial Sequence
  Description of Artificial Sequence: Synthetic peptide
  Seed: KAKLANVVR
KCKLANVVA

SEQ ID NO: 154968 - protein, 9 aa, Artificial Sequence
  Description of Artificial Sequence: Synthetic peptide
  Seed: KAKLANVVR
KCKLANVVK

SEQ ID NO: 154969 - protein, 9 aa, Artificial Sequence
  Description of Artificial Sequence: Synthetic peptide
  Seed: KAKLANVVR
KCKLANVVR

SEQ ID NO: 154970 - protein, 10 aa, Artificial Sequence
  Description of Artificial Sequence: Synthetic peptide
  Seed: KAKLANVVRK
KCKLANVVRK

SEQ ID NO: 154971 - protein, 9 aa, Artificial Sequence
  Description of Artificial Sequence: Synthetic peptide
  Seed: KAKLANVVR
KCKLANVVV

SEQ ID NO: 154972 - protein, 9 aa, Artificial Sequence
  Description of Artificial Sequence: Synthetic peptide
  Seed: KWNENQNPR
KCNENQNPR

SEQ ID NO: 154973 - protein, 10 aa, Artificial Sequence
  Description of Artificial Sequence: Synthetic peptide
  Seed: KKAKLANVVR
KDAKLANVVR

SEQ ID NO: 154974 - protein, 10 aa, Artificial Sequence
  Description of Artificial Sequence: Synthetic peptide
  Seed: KMARLGKGYM
KDARLGKGYA

SEQ ID NO: 154975 - protein, 10 aa, Artificial Sequence
  Description of Artificial Sequence: Synthetic peptide
  Seed: KMARLGKGYM
KDARLGKGYI

SEQ ID NO: 154976 - protein, 10 aa, Artificial Sequence
  Description of Artificial Sequence: Synthetic peptide
  Seed: KMARLGKGYM
KDARLGKGYK

SEQ ID NO: 154977 - protein, 10 aa, Artificial Sequence
  Description of Artificial Sequence: Synthetic peptide
  Seed: KMARLGKGYM
KDARLGKGYL

SEQ ID NO: 154978 - protein, 10 aa, Artificial Sequence
  Description of Artificial Sequence: Synthetic peptide
  Seed: KMARLGKGYM
KDARLGKGYM

SEQ ID NO: 154979 - protein, 11 aa, Artificial Sequence
  Description of Artificial Sequence: Synthetic peptide
  Seed: KMARLGKGYMF
KDARLGKGYMF

SEQ ID NO: 154980 - protein, 11 aa, Artificial Sequence
  Description of Artificial Sequence: Synthetic peptide
  Seed: KMARLGKGYMF
KDARLGKGYMI

SEQ ID NO: 154981 - protein, 11 aa, Artificial Sequence
  Description of Artificial Sequence: Synthetic peptide
  Seed: KMARLGKGYMF
KDARLGKGYMK

SEQ ID NO: 154982 - protein, 11 aa, Artificial Sequence
  Description of Artificial Sequence: Synthetic peptide
  Seed: KMARLGKGYMF
KDARLGKGYML

SEQ ID NO: 154983 - protein, 11 aa, Artificial Sequence
  Description of Artificial Sequence: Synthetic peptide
  Seed: KMARLGKGYMF
KDARLGKGYMM

SEQ ID NO: 154984 - protein, 11 aa, Artificial Sequence
  Description of Artificial Sequence: Synthetic peptide
  Seed: KMARLGKGYMF
KDARLGKGYMV

SEQ ID NO: 154985 - protein, 10 aa, Artificial Sequence
  Description of Artificial Sequence: Synthetic peptide
  Seed: KMARLGKGYM
KDARLGKGYV

SEQ ID NO: 154986 - protein, 10 aa, Artificial Sequence
  Description of Artificial Sequence: Synthetic peptide
  Seed: KMARLGKGYM
KDARLGKGYY

SEQ ID NO: 154987 - protein, 9 aa, Artificial Sequence
  Description of Artificial Sequence: Synthetic peptide
  Seed: KKAKLANVV
KEAKLANVF

SEQ ID NO: 154988 - protein, 9 aa, Artificial Sequence
  Description of Artificial Sequence: Synthetic peptide
  Seed: KKAKLANVV
KEAKLANVL

SEQ ID NO: 154989 - protein, 9 aa, Artificial Sequence
  Description of Artificial Sequence: Synthetic peptide
  Seed: KKAKLANVV
KEAKLANVM

SEQ ID NO: 154990 - protein, 10 aa, Artificial Sequence
  Description of Artificial Sequence: Synthetic peptide
  Seed: KKAKLANVVR
KEAKLANVVR

SEQ ID NO: 154991 - protein, 9 aa, Artificial Sequence
  Description of Artificial Sequence: Synthetic peptide
  Seed: KKAKLANVV
KEAKLANVY

SEQ ID NO: 154992 - protein, 9 aa, Artificial Sequence
  Description of Artificial Sequence: Synthetic peptide
  Seed: KLANVVRKM
KEANVVRKF

SEQ ID NO: 154993 - protein, 9 aa, Artificial Sequence
  Description of Artificial Sequence: Synthetic peptide
  Seed: KLANVVRKM
KEANVVRKM

SEQ ID NO: 154994 - protein, 9 aa, Artificial Sequence
  Description of Artificial Sequence: Synthetic peptide
  Seed: KLANVVRKM
KEANVVRKY

SEQ ID NO: 154995 - protein, 9 aa, Artificial Sequence
  Description of Artificial Sequence: Synthetic peptide
  Seed: KMARLGKGY
KEARLGKGF

SEQ ID NO: 154996 - protein, 9 aa, Artificial Sequence
  Description of Artificial Sequence: Synthetic peptide
  Seed: KMARLGKGY
KEARLGKGY

SEQ ID NO: 154997 - protein, 10 aa, Artificial Sequence
  Description of Artificial Sequence: Synthetic peptide
  Seed: KMARLGKGYM
KEARLGKGYA

SEQ ID NO: 154998 - protein, 10 aa, Artificial Sequence
  Description of Artificial Sequence: Synthetic peptide
  Seed: KMARLGKGYM
KEARLGKGYF

SEQ ID NO: 154999 - protein, 10 aa, Artificial Sequence
  Description of Artificial Sequence: Synthetic peptide
  Seed: KMARLGKGYM
KEARLGKGYI

SEQ ID NO: 155000 - protein, 10 aa, Artificial Sequence
  Description of Artificial Sequence: Synthetic peptide
  Seed: KMARLGKGYM
KEARLGKGYK

SEQ ID NO: 155001 - protein, 10 aa, Artificial Sequence
  Description of Artificial Sequence: Synthetic peptide
  Seed: KMARLGKGYM
KEARLGKGYL

SEQ ID NO: 155002 - protein, 10 aa, Artificial Sequence
  Description of Artificial Sequence: Synthetic peptide
  Seed: KMARLGKGYM
KEARLGKGYM

SEQ ID NO: 155003 - protein, 11 aa, Artificial Sequence
  Description of Artificial Sequence: Synthetic peptide
  Seed: KMARLGKGYMF
KEARLGKGYMF

SEQ ID NO: 155004 - protein, 11 aa, Artificial Sequence
  Description of Artificial Sequence: Synthetic peptide
  Seed: KMARLGKGYMF
KEARLGKGYMI

SEQ ID NO: 155005 - protein, 11 aa, Artificial Sequence
  Description of Artificial Sequence: Synthetic peptide
  Seed: KMARLGKGYMF
KEARLGKGYMK

SEQ ID NO: 155006 - protein, 11 aa, Artificial Sequence
  Description of Artificial Sequence: Synthetic peptide
  Seed: KMARLGKGYMF
KEARLGKGYML

SEQ ID NO: 155007 - protein, 11 aa, Artificial Sequence
  Description of Artificial Sequence: Synthetic peptide
  Seed: KMARLGKGYMF
KEARLGKGYMM

SEQ ID NO: 155008 - protein, 11 aa, Artificial Sequence
  Description of Artificial Sequence: Synthetic peptide
  Seed: KMARLGKGYMF
KEARLGKGYMV

SEQ ID NO: 155009 - protein, 10 aa, Artificial Sequence
  Description of Artificial Sequence: Synthetic peptide
  Seed: KMARLGKGYM
KEARLGKGYV

SEQ ID NO: 155010 - protein, 10 aa, Artificial Sequence
  Description of Artificial Sequence: Synthetic peptide
  Seed: KMARLGKGYM
KEARLGKGYY

SEQ ID NO: 155011 - protein, 9 aa, Artificial Sequence
  Description of Artificial Sequence: Synthetic peptide
  Seed: KKAKLANVV
KFAKLANVF

SEQ ID NO: 155012 - protein, 9 aa, Artificial Sequence
  Description of Artificial Sequence: Synthetic peptide
  Seed: KKAKLANVV
KFAKLANVM

SEQ ID NO: 155013 - protein, 10 aa, Artificial Sequence
  Description of Artificial Sequence: Synthetic peptide
  Seed: KKAKLANVVR
KFAKLANVVK

SEQ ID NO: 155014 - protein, 10 aa, Artificial Sequence
  Description of Artificial Sequence: Synthetic peptide
  Seed: KKAKLANVVR
KFAKLANVVR

SEQ ID NO: 155015 - protein, 9 aa, Artificial Sequence
  Description of Artificial Sequence: Synthetic peptide
  Seed: KKAKLANVV
KFAKLANVY

SEQ ID NO: 155016 - protein, 9 aa, Artificial Sequence
  Description of Artificial Sequence: Synthetic peptide
  Seed: KMARLGKGY
KFARLGKGY

SEQ ID NO: 155017 - protein, 10 aa, Artificial Sequence
  Description of Artificial Sequence: Synthetic peptide
  Seed: KMARLGKGYM
KFARLGKGYA

SEQ ID NO: 155018 - protein, 10 aa, Artificial Sequence
  Description of Artificial Sequence: Synthetic peptide
  Seed: KMARLGKGYM
KFARLGKGYI

SEQ ID NO: 155019 - protein, 10 aa, Artificial Sequence
  Description of Artificial Sequence: Synthetic peptide
  Seed: KMARLGKGYM
KFARLGKGYK

SEQ ID NO: 155020 - protein, 10 aa, Artificial Sequence
  Description of Artificial Sequence: Synthetic peptide
  Seed: KMARLGKGYM
KFARLGKGYL

SEQ ID NO: 155021 - protein, 10 aa, Artificial Sequence
  Description of Artificial Sequence: Synthetic peptide
  Seed: KMARLGKGYM
KFARLGKGYM

SEQ ID NO: 155022 - protein, 11 aa, Artificial Sequence
  Description of Artificial Sequence: Synthetic peptide
  Seed: KMARLGKGYMF
KFARLGKGYMF

SEQ ID NO: 155023 - protein, 11 aa, Artificial Sequence
  Description of Artificial Sequence: Synthetic peptide
  Seed: KMARLGKGYMF
KFARLGKGYMI

SEQ ID NO: 155024 - protein, 11 aa, Artificial Sequence
  Description of Artificial Sequence: Synthetic peptide
  Seed: KMARLGKGYMF
KFARLGKGYMK

SEQ ID NO: 155025 - protein, 11 aa, Artificial Sequence
  Description of Artificial Sequence: Synthetic peptide
  Seed: KMARLGKGYMF
KFARLGKGYML

SEQ ID NO: 155026 - protein, 11 aa, Artificial Sequence
  Description of Artificial Sequence: Synthetic peptide
  Seed: KMARLGKGYMF
KFARLGKGYMM

SEQ ID NO: 155027 - protein, 11 aa, Artificial Sequence
  Description of Artificial Sequence: Synthetic peptide
  Seed: KMARLGKGYMF
KFARLGKGYMV

SEQ ID NO: 155028 - protein, 11 aa, Artificial Sequence
  Description of Artificial Sequence: Synthetic peptide
  Seed: KMARLGKGYMF
KFARLGKGYMW

SEQ ID NO: 155029 - protein, 10 aa, Artificial Sequence
  Description of Artificial Sequence: Synthetic peptide
  Seed: KMARLGKGYM
KFARLGKGYR

SEQ ID NO: 155030 - protein, 10 aa, Artificial Sequence
  Description of Artificial Sequence: Synthetic peptide
  Seed: KMARLGKGYM
KFARLGKGYS

SEQ ID NO: 155031 - protein, 10 aa, Artificial Sequence
  Description of Artificial Sequence: Synthetic peptide
  Seed: KMARLGKGYM
KFARLGKGYV

SEQ ID NO: 155032 - protein, 10 aa, Artificial Sequence
  Description of Artificial Sequence: Synthetic peptide
  Seed: KMARLGKGYM
KFARLGKGYY

SEQ ID NO: 155033 - protein, 9 aa, Artificial Sequence
  Description of Artificial Sequence: Synthetic peptide
  Seed: KAKLANVVR
KFKLANVVA

SEQ ID NO: 155034 - protein, 9 aa, Artificial Sequence
  Description of Artificial Sequence: Synthetic peptide
  Seed: KAKLANVVR
KFKLANVVC

SEQ ID NO: 155035 - protein, 9 aa, Artificial Sequence
  Description of Artificial Sequence: Synthetic peptide
  Seed: KAKLANVVR
KFKLANVVE

SEQ ID NO: 155036 - protein, 9 aa, Artificial Sequence
  Description of Artificial Sequence: Synthetic peptide
  Seed: KAKLANVVR
KFKLANVVF

SEQ ID NO: 155037 - protein, 9 aa, Artificial Sequence
  Description of Artificial Sequence: Synthetic peptide
  Seed: KAKLANVVR
KFKLANVVG

SEQ ID NO: 155038 - protein, 9 aa, Artificial Sequence
  Description of Artificial Sequence: Synthetic peptide
  Seed: KAKLANVVR
KFKLANVVH

SEQ ID NO: 155039 - protein, 9 aa, Artificial Sequence
  Description of Artificial Sequence: Synthetic peptide
  Seed: KAKLANVVR
KFKLANVVI

SEQ ID NO: 155040 - protein, 9 aa, Artificial Sequence
  Description of Artificial Sequence: Synthetic peptide
  Seed: KAKLANVVR
KFKLANVVK

SEQ ID NO: 155041 - protein, 9 aa, Artificial Sequence
  Description of Artificial Sequence: Synthetic peptide
  Seed: KAKLANVVR
KFKLANVVL

SEQ ID NO: 155042 - protein, 9 aa, Artificial Sequence
  Description of Artificial Sequence: Synthetic peptide
  Seed: KAKLANVVR
KFKLANVVM

SEQ ID NO: 155043 - protein, 9 aa, Artificial Sequence
  Description of Artificial Sequence: Synthetic peptide
  Seed: KAKLANVVR
KFKLANVVN

SEQ ID NO: 155044 - protein, 9 aa, Artificial Sequence
  Description of Artificial Sequence: Synthetic peptide
  Seed: KAKLANVVR
KFKLANVVP

SEQ ID NO: 155045 - protein, 9 aa, Artificial Sequence
  Description of Artificial Sequence: Synthetic peptide
  Seed: KAKLANVVR
KFKLANVVQ

SEQ ID NO: 155046 - protein, 9 aa, Artificial Sequence
  Description of Artificial Sequence: Synthetic peptide
  Seed: KAKLANVVR
KFKLANVVR

SEQ ID NO: 155047 - protein, 10 aa, Artificial Sequence
  Description of Artificial Sequence: Synthetic peptide
  Seed: KAKLANVVRK
KFKLANVVRA

SEQ ID NO: 155048 - protein, 10 aa, Artificial Sequence
  Description of Artificial Sequence: Synthetic peptide
  Seed: KAKLANVVRK
KFKLANVVRG

SEQ ID NO: 155049 - protein, 10 aa, Artificial Sequence
  Description of Artificial Sequence: Synthetic peptide
  Seed: KAKLANVVRK
KFKLANVVRI

SEQ ID NO: 155050 - protein, 10 aa, Artificial Sequence
  Description of Artificial Sequence: Synthetic peptide
  Seed: KAKLANVVRK
KFKLANVVRK

SEQ ID NO: 155051 - protein, 10 aa, Artificial Sequence
  Description of Artificial Sequence: Synthetic peptide
  Seed: KAKLANVVRK
KFKLANVVRL

SEQ ID NO: 155052 - protein, 10 aa, Artificial Sequence
  Description of Artificial Sequence: Synthetic peptide
  Seed: KAKLANVVRK
KFKLANVVRM

SEQ ID NO: 155053 - protein, 10 aa, Artificial Sequence
  Description of Artificial Sequence: Synthetic peptide
  Seed: KAKLANVVRK
KFKLANVVRS

SEQ ID NO: 155054 - protein, 10 aa, Artificial Sequence
  Description of Artificial Sequence: Synthetic peptide
  Seed: KAKLANVVRK
KFKLANVVRV

SEQ ID NO: 155055 - protein, 9 aa, Artificial Sequence
  Description of Artificial Sequence: Synthetic peptide
  Seed: KAKLANVVR
KFKLANVVS

SEQ ID NO: 155056 - protein, 9 aa, Artificial Sequence
  Description of Artificial Sequence: Synthetic peptide
  Seed: KAKLANVVR
KFKLANVVT

SEQ ID NO: 155057 - protein, 9 aa, Artificial Sequence
  Description of Artificial Sequence: Synthetic peptide
  Seed: KAKLANVVR
KFKLANVVV

SEQ ID NO: 155058 - protein, 9 aa, Artificial Sequence
  Description of Artificial Sequence: Synthetic peptide
  Seed: KAKLANVVR
KFKLANVVY

SEQ ID NO: 155059 - protein, 9 aa, Artificial Sequence
  Description of Artificial Sequence: Synthetic peptide
  Seed: KWNENQNPR
KFNENQNPK

SEQ ID NO: 155060 - protein, 9 aa, Artificial Sequence
  Description of Artificial Sequence: Synthetic peptide
  Seed: KWNENQNPR
KFNENQNPR

SEQ ID NO: 155061 - protein, 9 aa, Artificial Sequence
  Description of Artificial Sequence: Synthetic peptide
  Seed: KKAKLANVV
KGAKLANVF

SEQ ID NO: 155062 - protein, 9 aa, Artificial Sequence
  Description of Artificial Sequence: Synthetic peptide
  Seed: KKAKLANVV
KGAKLANVM

SEQ ID NO: 155063 - protein, 10 aa, Artificial Sequence
  Description of Artificial Sequence: Synthetic peptide
  Seed: KKAKLANVVR
KGAKLANVVR

SEQ ID NO: 155064 - protein, 9 aa, Artificial Sequence
  Description of Artificial Sequence: Synthetic peptide
  Seed: KKAKLANVV
KGAKLANVY

SEQ ID NO: 155065 - protein, 9 aa, Artificial Sequence
  Description of Artificial Sequence: Synthetic peptide
  Seed: KLANVVRKM
KGANVVRKY

SEQ ID NO: 155066 - protein, 9 aa, Artificial Sequence
  Description of Artificial Sequence: Synthetic peptide
  Seed: KMARLGKGY
KGARLGKGY

SEQ ID NO: 155067 - protein, 10 aa, Artificial Sequence
  Description of Artificial Sequence: Synthetic peptide
  Seed: KMARLGKGYM
KGARLGKGYA

SEQ ID NO: 155068 - protein, 10 aa, Artificial Sequence
  Description of Artificial Sequence: Synthetic peptide
  Seed: KMARLGKGYM
KGARLGKGYI

SEQ ID NO: 155069 - protein, 10 aa, Artificial Sequence
  Description of Artificial Sequence: Synthetic peptide
  Seed: KMARLGKGYM
KGARLGKGYK

SEQ ID NO: 155070 - protein, 10 aa, Artificial Sequence
  Description of Artificial Sequence: Synthetic peptide
  Seed: KMARLGKGYM
KGARLGKGYL

SEQ ID NO: 155071 - protein, 10 aa, Artificial Sequence
  Description of Artificial Sequence: Synthetic peptide
  Seed: KMARLGKGYM
KGARLGKGYM

SEQ ID NO: 155072 - protein, 11 aa, Artificial Sequence
  Description of Artificial Sequence: Synthetic peptide
  Seed: KMARLGKGYMF
KGARLGKGYMF

SEQ ID NO: 155073 - protein, 11 aa, Artificial Sequence
  Description of Artificial Sequence: Synthetic peptide
  Seed: KMARLGKGYMF
KGARLGKGYMI

SEQ ID NO: 155074 - protein, 11 aa, Artificial Sequence
  Description of Artificial Sequence: Synthetic peptide
  Seed: KMARLGKGYMF
KGARLGKGYMK

SEQ ID NO: 155075 - protein, 11 aa, Artificial Sequence
  Description of Artificial Sequence: Synthetic peptide
  Seed: KMARLGKGYMF
KGARLGKGYML

SEQ ID NO: 155076 - protein, 11 aa, Artificial Sequence
  Description of Artificial Sequence: Synthetic peptide
  Seed: KMARLGKGYMF
KGARLGKGYMM

SEQ ID NO: 155077 - protein, 11 aa, Artificial Sequence
  Description of Artificial Sequence: Synthetic peptide
  Seed: KMARLGKGYMF
KGARLGKGYMV

SEQ ID NO: 155078 - protein, 10 aa, Artificial Sequence
  Description of Artificial Sequence: Synthetic peptide
  Seed: KMARLGKGYM
KGARLGKGYR

SEQ ID NO: 155079 - protein, 10 aa, Artificial Sequence
  Description of Artificial Sequence: Synthetic peptide
  Seed: KMARLGKGYM
KGARLGKGYV

SEQ ID NO: 155080 - protein, 10 aa, Artificial Sequence
  Description of Artificial Sequence: Synthetic peptide
  Seed: KMARLGKGYM
KGARLGKGYY

SEQ ID NO: 155081 - protein, 9 aa, Artificial Sequence
  Description of Artificial Sequence: Synthetic peptide
  Seed: KAKLANVVR
KGKLANVVA

SEQ ID NO: 155082 - protein, 9 aa, Artificial Sequence
  Description of Artificial Sequence: Synthetic peptide
  Seed: KAKLANVVR
KGKLANVVI

SEQ ID NO: 155083 - protein, 9 aa, Artificial Sequence
  Description of Artificial Sequence: Synthetic peptide
  Seed: KAKLANVVR
KGKLANVVK

SEQ ID NO: 155084 - protein, 9 aa, Artificial Sequence
  Description of Artificial Sequence: Synthetic peptide
  Seed: KAKLANVVR
KGKLANVVL

SEQ ID NO: 155085 - protein, 9 aa, Artificial Sequence
  Description of Artificial Sequence: Synthetic peptide
  Seed: KAKLANVVR
KGKLANVVM

SEQ ID NO: 155086 - protein, 9 aa, Artificial Sequence
  Description of Artificial Sequence: Synthetic peptide
  Seed: KAKLANVVR
KGKLANVVR

SEQ ID NO: 155087 - protein, 10 aa, Artificial Sequence
  Description of Artificial Sequence: Synthetic peptide
  Seed: KAKLANVVRK
KGKLANVVRA

SEQ ID NO: 155088 - protein, 10 aa, Artificial Sequence
  Description of Artificial Sequence: Synthetic peptide
  Seed: KAKLANVVRK
KGKLANVVRK

SEQ ID NO: 155089 - protein, 10 aa, Artificial Sequence
  Description of Artificial Sequence: Synthetic peptide
  Seed: KAKLANVVRK
KGKLANVVRV

SEQ ID NO: 155090 - protein, 9 aa, Artificial Sequence
  Description of Artificial Sequence: Synthetic peptide
  Seed: KAKLANVVR
KGKLANVVS

SEQ ID NO: 155091 - protein, 9 aa, Artificial Sequence
  Description of Artificial Sequence: Synthetic peptide
  Seed: KAKLANVVR
KGKLANVVT

SEQ ID NO: 155092 - protein, 9 aa, Artificial Sequence
  Description of Artificial Sequence: Synthetic peptide
  Seed: KAKLANVVR
KGKLANVVV

SEQ ID NO: 155093 - protein, 9 aa, Artificial Sequence
  Description of Artificial Sequence: Synthetic peptide
  Seed: KAKLANVVR
KGKLANVVY

SEQ ID NO: 155094 - protein, 9 aa, Artificial Sequence
  Description of Artificial Sequence: Synthetic peptide
  Seed: KWNENQNPR
KGNENQNPR

SEQ ID NO: 155095 - protein, 9 aa, Artificial Sequence
  Description of Artificial Sequence: Synthetic peptide
  Seed: KKAKLANVV
KHAKLANVF

SEQ ID NO: 155096 - protein, 9 aa, Artificial Sequence
  Description of Artificial Sequence: Synthetic peptide
  Seed: KKAKLANVV
KHAKLANVL

SEQ ID NO: 155097 - protein, 9 aa, Artificial Sequence
  Description of Artificial Sequence: Synthetic peptide
  Seed: KKAKLANVV
KHAKLANVM

SEQ ID NO: 155098 - protein, 10 aa, Artificial Sequence
  Description of Artificial Sequence: Synthetic peptide
  Seed: KKAKLANVVR
KHAKLANVVR

SEQ ID NO: 155099 - protein, 9 aa, Artificial Sequence
  Description of Artificial Sequence: Synthetic peptide
  Seed: KKAKLANVV
KHAKLANVY

SEQ ID NO: 155100 - protein, 9 aa, Artificial Sequence
  Description of Artificial Sequence: Synthetic peptide
  Seed: KLANVVRKM
KHANVVRKF

SEQ ID NO: 155101 - protein, 9 aa, Artificial Sequence
  Description of Artificial Sequence: Synthetic peptide
  Seed: KLANVVRKM
KHANVVRKM

SEQ ID NO: 155102 - protein, 9 aa, Artificial Sequence
  Description of Artificial Sequence: Synthetic peptide
  Seed: KLANVVRKM
KHANVVRKY

SEQ ID NO: 155103 - protein, 9 aa, Artificial Sequence
  Description of Artificial Sequence: Synthetic peptide
  Seed: KMARLGKGY
KHARLGKGF

SEQ ID NO: 155104 - protein, 9 aa, Artificial Sequence
  Description of Artificial Sequence: Synthetic peptide
  Seed: KMARLGKGY
KHARLGKGY

SEQ ID NO: 155105 - protein, 10 aa, Artificial Sequence
  Description of Artificial Sequence: Synthetic peptide
  Seed: KMARLGKGYM
KHARLGKGYA

SEQ ID NO: 155106 - protein, 10 aa, Artificial Sequence
  Description of Artificial Sequence: Synthetic peptide
  Seed: KMARLGKGYM
KHARLGKGYF

SEQ ID NO: 155107 - protein, 10 aa, Artificial Sequence
  Description of Artificial Sequence: Synthetic peptide
  Seed: KMARLGKGYM
KHARLGKGYI

SEQ ID NO: 155108 - protein, 10 aa, Artificial Sequence
  Description of Artificial Sequence: Synthetic peptide
  Seed: KMARLGKGYM
KHARLGKGYK

SEQ ID NO: 155109 - protein, 10 aa, Artificial Sequence
  Description of Artificial Sequence: Synthetic peptide
  Seed: KMARLGKGYM
KHARLGKGYL

SEQ ID NO: 155110 - protein, 10 aa, Artificial Sequence
  Description of Artificial Sequence: Synthetic peptide
  Seed: KMARLGKGYM
KHARLGKGYM

SEQ ID NO: 155111 - protein, 11 aa, Artificial Sequence
  Description of Artificial Sequence: Synthetic peptide
  Seed: KMARLGKGYMF
KHARLGKGYMF

SEQ ID NO: 155112 - protein, 11 aa, Artificial Sequence
  Description of Artificial Sequence: Synthetic peptide
  Seed: KMARLGKGYMF
KHARLGKGYMI

SEQ ID NO: 155113 - protein, 11 aa, Artificial Sequence
  Description of Artificial Sequence: Synthetic peptide
  Seed: KMARLGKGYMF
KHARLGKGYMK

SEQ ID NO: 155114 - protein, 11 aa, Artificial Sequence
  Description of Artificial Sequence: Synthetic peptide
  Seed: KMARLGKGYMF
KHARLGKGYML

SEQ ID NO: 155115 - protein, 11 aa, Artificial Sequence
  Description of Artificial Sequence: Synthetic peptide
  Seed: KMARLGKGYMF
KHARLGKGYMM

SEQ ID NO: 155116 - protein, 11 aa, Artificial Sequence
  Description of Artificial Sequence: Synthetic peptide
  Seed: KMARLGKGYMF
KHARLGKGYMV

SEQ ID NO: 155117 - protein, 10 aa, Artificial Sequence
  Description of Artificial Sequence: Synthetic peptide
  Seed: KMARLGKGYM
KHARLGKGYR

SEQ ID NO: 155118 - protein, 10 aa, Artificial Sequence
  Description of Artificial Sequence: Synthetic peptide
  Seed: KMARLGKGYM
KHARLGKGYV

SEQ ID NO: 155119 - protein, 10 aa, Artificial Sequence
  Description of Artificial Sequence: Synthetic peptide
  Seed: KMARLGKGYM
KHARLGKGYY

SEQ ID NO: 155120 - protein, 9 aa, Artificial Sequence
  Description of Artificial Sequence: Synthetic peptide
  Seed: KAKLANVVR
KHKLANVVK

SEQ ID NO: 155121 - protein, 10 aa, Artificial Sequence
  Description of Artificial Sequence: Synthetic peptide
  Seed: KAKLANVVRK
KHKLANVVRK

SEQ ID NO: 155122 - protein, 9 aa, Artificial Sequence
  Description of Artificial Sequence: Synthetic peptide
  Seed: KKAKLANVV
KIAKLANVF

SEQ ID NO: 155123 - protein, 9 aa, Artificial Sequence
  Description of Artificial Sequence: Synthetic peptide
  Seed: KKAKLANVV
KIAKLANVM

SEQ ID NO: 155124 - protein, 10 aa, Artificial Sequence
  Description of Artificial Sequence: Synthetic peptide
  Seed: KKAKLANVVR
KIAKLANVVK

SEQ ID NO: 155125 - protein, 10 aa, Artificial Sequence
  Description of Artificial Sequence: Synthetic peptide
  Seed: KKAKLANVVR
KIAKLANVVR

SEQ ID NO: 155126 - protein, 9 aa, Artificial Sequence
  Description of Artificial Sequence: Synthetic peptide
  Seed: KKAKLANVV
KIAKLANVY

SEQ ID NO: 155127 - protein, 9 aa, Artificial Sequence
  Description of Artificial Sequence: Synthetic peptide
  Seed: KLANVVRKM
KIANVVRKA

SEQ ID NO: 155128 - protein, 9 aa, Artificial Sequence
  Description of Artificial Sequence: Synthetic peptide
  Seed: KLANVVRKM
KIANVVRKF

SEQ ID NO: 155129 - protein, 9 aa, Artificial Sequence
  Description of Artificial Sequence: Synthetic peptide
  Seed: KLANVVRKM
KIANVVRKI

SEQ ID NO: 155130 - protein, 9 aa, Artificial Sequence
  Description of Artificial Sequence: Synthetic peptide
  Seed: KLANVVRKM
KIANVVRKL

SEQ ID NO: 155131 - protein, 9 aa, Artificial Sequence
  Description of Artificial Sequence: Synthetic peptide
  Seed: KLANVVRKM
KIANVVRKM

SEQ ID NO: 155132 - protein, 10 aa, Artificial Sequence
  Description of Artificial Sequence: Synthetic peptide
  Seed: KLANVVRKMM
KIANVVRKMI

SEQ ID NO: 155133 - protein, 10 aa, Artificial Sequence
  Description of Artificial Sequence: Synthetic peptide
  Seed: KLANVVRKMM
KIANVVRKMV

SEQ ID NO: 155134 - protein, 9 aa, Artificial Sequence
  Description of Artificial Sequence: Synthetic peptide
  Seed: KLANVVRKM
KIANVVRKV

SEQ ID NO: 155135 - protein, 9 aa, Artificial Sequence
  Description of Artificial Sequence: Synthetic peptide
  Seed: KLANVVRKM
KIANVVRKW

SEQ ID NO: 155136 - protein, 9 aa, Artificial Sequence
  Description of Artificial Sequence: Synthetic peptide
  Seed: KLANVVRKM
KIANVVRKY

SEQ ID NO: 155137 - protein, 9 aa, Artificial Sequence
  Description of Artificial Sequence: Synthetic peptide
  Seed: KMARLGKGY
KIARLGKGF

SEQ ID NO: 155138 - protein, 9 aa, Artificial Sequence
  Description of Artificial Sequence: Synthetic peptide
  Seed: KMARLGKGY
KIARLGKGK

SEQ ID NO: 155139 - protein, 9 aa, Artificial Sequence
  Description of Artificial Sequence: Synthetic peptide
  Seed: KMARLGKGY
KIARLGKGY

SEQ ID NO: 155140 - protein, 10 aa, Artificial Sequence
  Description of Artificial Sequence: Synthetic peptide
  Seed: KMARLGKGYM
KIARLGKGYA

SEQ ID NO: 155141 - protein, 10 aa, Artificial Sequence
  Description of Artificial Sequence: Synthetic peptide
  Seed: KMARLGKGYM
KIARLGKGYF

SEQ ID NO: 155142 - protein, 10 aa, Artificial Sequence
  Description of Artificial Sequence: Synthetic peptide
  Seed: KMARLGKGYM
KIARLGKGYI

SEQ ID NO: 155143 - protein, 10 aa, Artificial Sequence
  Description of Artificial Sequence: Synthetic peptide
  Seed: KMARLGKGYM
KIARLGKGYK

SEQ ID NO: 155144 - protein, 10 aa, Artificial Sequence
  Description of Artificial Sequence: Synthetic peptide
  Seed: KMARLGKGYM
KIARLGKGYL

SEQ ID NO: 155145 - protein, 10 aa, Artificial Sequence
  Description of Artificial Sequence: Synthetic peptide
  Seed: KMARLGKGYM
KIARLGKGYM

SEQ ID NO: 155146 - protein, 11 aa, Artificial Sequence
  Description of Artificial Sequence: Synthetic peptide
  Seed: KMARLGKGYMF
KIARLGKGYMF

SEQ ID NO: 155147 - protein, 11 aa, Artificial Sequence
  Description of Artificial Sequence: Synthetic peptide
  Seed: KMARLGKGYMF
KIARLGKGYMI

SEQ ID NO: 155148 - protein, 11 aa, Artificial Sequence
  Description of Artificial Sequence: Synthetic peptide
  Seed: KMARLGKGYMF
KIARLGKGYMK

SEQ ID NO: 155149 - protein, 11 aa, Artificial Sequence
  Description of Artificial Sequence: Synthetic peptide
  Seed: KMARLGKGYMF
KIARLGKGYML

SEQ ID NO: 155150 - protein, 11 aa, Artificial Sequence
  Description of Artificial Sequence: Synthetic peptide
  Seed: KMARLGKGYMF
KIARLGKGYMM

SEQ ID NO: 155151 - protein, 11 aa, Artificial Sequence
  Description of Artificial Sequence: Synthetic peptide
  Seed: KMARLGKGYMF
KIARLGKGYMV

SEQ ID NO: 155152 - protein, 10 aa, Artificial Sequence
  Description of Artificial Sequence: Synthetic peptide
  Seed: KMARLGKGYM
KIARLGKGYR

SEQ ID NO: 155153 - protein, 10 aa, Artificial Sequence
  Description of Artificial Sequence: Synthetic peptide
  Seed: KMARLGKGYM
KIARLGKGYS

SEQ ID NO: 155154 - protein, 10 aa, Artificial Sequence
  Description of Artificial Sequence: Synthetic peptide
  Seed: KMARLGKGYM
KIARLGKGYV

SEQ ID NO: 155155 - protein, 10 aa, Artificial Sequence
  Description of Artificial Sequence: Synthetic peptide
  Seed: KMARLGKGYM
KIARLGKGYY

SEQ ID NO: 155156 - protein, 9 aa, Artificial Sequence
  Description of Artificial Sequence: Synthetic peptide
  Seed: KAKLANVVR
KIKLANVVA

SEQ ID NO: 155157 - protein, 9 aa, Artificial Sequence
  Description of Artificial Sequence: Synthetic peptide
  Seed: KAKLANVVR
KIKLANVVC

SEQ ID NO: 155158 - protein, 9 aa, Artificial Sequence
  Description of Artificial Sequence: Synthetic peptide
  Seed: KAKLANVVR
KIKLANVVE

SEQ ID NO: 155159 - protein, 9 aa, Artificial Sequence
  Description of Artificial Sequence: Synthetic peptide
  Seed: KAKLANVVR
KIKLANVVF

SEQ ID NO: 155160 - protein, 9 aa, Artificial Sequence
  Description of Artificial Sequence: Synthetic peptide
  Seed: KAKLANVVR
KIKLANVVG

SEQ ID NO: 155161 - protein, 9 aa, Artificial Sequence
  Description of Artificial Sequence: Synthetic peptide
  Seed: KAKLANVVR
KIKLANVVH

SEQ ID NO: 155162 - protein, 9 aa, Artificial Sequence
  Description of Artificial Sequence: Synthetic peptide
  Seed: KAKLANVVR
KIKLANVVI

SEQ ID NO: 155163 - protein, 9 aa, Artificial Sequence
  Description of Artificial Sequence: Synthetic peptide
  Seed: KAKLANVVR
KIKLANVVK

SEQ ID NO: 155164 - protein, 9 aa, Artificial Sequence
  Description of Artificial Sequence: Synthetic peptide
  Seed: KAKLANVVR
KIKLANVVL

SEQ ID NO: 155165 - protein, 9 aa, Artificial Sequence
  Description of Artificial Sequence: Synthetic peptide
  Seed: KAKLANVVR
KIKLANVVM

SEQ ID NO: 155166 - protein, 9 aa, Artificial Sequence
  Description of Artificial Sequence: Synthetic peptide
  Seed: KAKLANVVR
KIKLANVVN

SEQ ID NO: 155167 - protein, 9 aa, Artificial Sequence
  Description of Artificial Sequence: Synthetic peptide
  Seed: KAKLANVVR
KIKLANVVP

SEQ ID NO: 155168 - protein, 9 aa, Artificial Sequence
  Description of Artificial Sequence: Synthetic peptide
  Seed: KAKLANVVR
KIKLANVVQ

SEQ ID NO: 155169 - protein, 9 aa, Artificial Sequence
  Description of Artificial Sequence: Synthetic peptide
  Seed: KAKLANVVR
KIKLANVVR

SEQ ID NO: 155170 - protein, 10 aa, Artificial Sequence
  Description of Artificial Sequence: Synthetic peptide
  Seed: KAKLANVVRK
KIKLANVVRA

SEQ ID NO: 155171 - protein, 10 aa, Artificial Sequence
  Description of Artificial Sequence: Synthetic peptide
  Seed: KAKLANVVRK
KIKLANVVRG

SEQ ID NO: 155172 - protein, 10 aa, Artificial Sequence
  Description of Artificial Sequence: Synthetic peptide
  Seed: KAKLANVVRK
KIKLANVVRI

SEQ ID NO: 155173 - protein, 10 aa, Artificial Sequence
  Description of Artificial Sequence: Synthetic peptide
  Seed: KAKLANVVRK
KIKLANVVRK

SEQ ID NO: 155174 - protein, 10 aa, Artificial Sequence
  Description of Artificial Sequence: Synthetic peptide
  Seed: KAKLANVVRK
KIKLANVVRL

SEQ ID NO: 155175 - protein, 10 aa, Artificial Sequence
  Description of Artificial Sequence: Synthetic peptide
  Seed: KAKLANVVRK
KIKLANVVRM

SEQ ID NO: 155176 - protein, 10 aa, Artificial Sequence
  Description of Artificial Sequence: Synthetic peptide
  Seed: KAKLANVVRK
KIKLANVVRS

SEQ ID NO: 155177 - protein, 10 aa, Artificial Sequence
  Description of Artificial Sequence: Synthetic peptide
  Seed: KAKLANVVRK
KIKLANVVRV

SEQ ID NO: 155178 - protein, 10 aa, Artificial Sequence
  Description of Artificial Sequence: Synthetic peptide
  Seed: KAKLANVVRK
KIKLANVVRY

SEQ ID NO: 155179 - protein, 9 aa, Artificial Sequence
  Description of Artificial Sequence: Synthetic peptide
  Seed: KAKLANVVR
KIKLANVVS

SEQ ID NO: 155180 - protein, 9 aa, Artificial Sequence
  Description of Artificial Sequence: Synthetic peptide
  Seed: KAKLANVVR
KIKLANVVT

SEQ ID NO: 155181 - protein, 9 aa, Artificial Sequence
  Description of Artificial Sequence: Synthetic peptide
  Seed: KAKLANVVR
KIKLANVVV

SEQ ID NO: 155182 - protein, 9 aa, Artificial Sequence
  Description of Artificial Sequence: Synthetic peptide
  Seed: KAKLANVVR
KIKLANVVY

SEQ ID NO: 155183 - protein, 9 aa, Artificial Sequence
  Description of Artificial Sequence: Synthetic peptide
  Seed: KWNENQNPR
KINENQNPK

SEQ ID NO: 155184 - protein, 9 aa, Artificial Sequence
  Description of Artificial Sequence: Synthetic peptide
  Seed: KWNENQNPR
KINENQNPR

SEQ ID NO: 155185 - protein, 9 aa, Artificial Sequence
  Description of Artificial Sequence: Synthetic peptide
  Seed: KKAKLANVV
KKAKLANVF

SEQ ID NO: 155186 - protein, 9 aa, Artificial Sequence
  Description of Artificial Sequence: Synthetic peptide
  Seed: KKAKLANVV
KKAKLANVH

SEQ ID NO: 155187 - protein, 9 aa, Artificial Sequence
  Description of Artificial Sequence: Synthetic peptide
  Seed: KKAKLANVV
KKAKLANVI

SEQ ID NO: 155188 - protein, 9 aa, Artificial Sequence
  Description of Artificial Sequence: Synthetic peptide
  Seed: KKAKLANVV
KKAKLANVL

SEQ ID NO: 155189 - protein, 9 aa, Artificial Sequence
  Description of Artificial Sequence: Synthetic peptide
  Seed: KKAKLANVV
KKAKLANVM

SEQ ID NO: 155190 - protein, 9 aa, Artificial Sequence
  Description of Artificial Sequence: Synthetic peptide
  Seed: KKAKLANVV
KKAKLANVW

SEQ ID NO: 155191 - protein, 9 aa, Artificial Sequence
  Description of Artificial Sequence: Synthetic peptide
  Seed: KKAKLANVV
KKAKLANVY

SEQ ID NO: 155192 - protein, 9 aa, Artificial Sequence
  Description of Artificial Sequence: Synthetic peptide
  Seed: KLANVVRKM
KKANVVRKF

SEQ ID NO: 155193 - protein, 9 aa, Artificial Sequence
  Description of Artificial Sequence: Synthetic peptide
  Seed: KLANVVRKM
KKANVVRKL

SEQ ID NO: 155194 - protein, 9 aa, Artificial Sequence
  Description of Artificial Sequence: Synthetic peptide
  Seed: KLANVVRKM
KKANVVRKM

SEQ ID NO: 155195 - protein, 9 aa, Artificial Sequence
  Description of Artificial Sequence: Synthetic peptide
  Seed: KLANVVRKM
KKANVVRKY

SEQ ID NO: 155196 - protein, 9 aa, Artificial Sequence
  Description of Artificial Sequence: Synthetic peptide
  Seed: KMARLGKGY
KKARLGKGF

SEQ ID NO: 155197 - protein, 9 aa, Artificial Sequence
  Description of Artificial Sequence: Synthetic peptide
  Seed: KMARLGKGY
KKARLGKGM

SEQ ID NO: 155198 - protein, 9 aa, Artificial Sequence
  Description of Artificial Sequence: Synthetic peptide
  Seed: KMARLGKGY
KKARLGKGY

SEQ ID NO: 155199 - protein, 10 aa, Artificial Sequence
  Description of Artificial Sequence: Synthetic peptide
  Seed: KMARLGKGYM
KKARLGKGYA

SEQ ID NO: 155200 - protein, 10 aa, Artificial Sequence
  Description of Artificial Sequence: Synthetic peptide
  Seed: KMARLGKGYM
KKARLGKGYF

SEQ ID NO: 155201 - protein, 10 aa, Artificial Sequence
  Description of Artificial Sequence: Synthetic peptide
  Seed: KMARLGKGYM
KKARLGKGYI

SEQ ID NO: 155202 - protein, 10 aa, Artificial Sequence
  Description of Artificial Sequence: Synthetic peptide
  Seed: KMARLGKGYM
KKARLGKGYK

SEQ ID NO: 155203 - protein, 10 aa, Artificial Sequence
  Description of Artificial Sequence: Synthetic peptide
  Seed: KMARLGKGYM
KKARLGKGYL

SEQ ID NO: 155204 - protein, 10 aa, Artificial Sequence
  Description of Artificial Sequence: Synthetic peptide
  Seed: KMARLGKGYM
KKARLGKGYM

SEQ ID NO: 155205 - protein, 11 aa, Artificial Sequence
  Description of Artificial Sequence: Synthetic peptide
  Seed: KMARLGKGYMF
KKARLGKGYMF

SEQ ID NO: 155206 - protein, 11 aa, Artificial Sequence
  Description of Artificial Sequence: Synthetic peptide
  Seed: KMARLGKGYMF
KKARLGKGYMI

SEQ ID NO: 155207 - protein, 11 aa, Artificial Sequence
  Description of Artificial Sequence: Synthetic peptide
  Seed: KMARLGKGYMF
KKARLGKGYMK

SEQ ID NO: 155208 - protein, 11 aa, Artificial Sequence
  Description of Artificial Sequence: Synthetic peptide
  Seed: KMARLGKGYMF
KKARLGKGYML

SEQ ID NO: 155209 - protein, 11 aa, Artificial Sequence
  Description of Artificial Sequence: Synthetic peptide
  Seed: KMARLGKGYMF
KKARLGKGYMM

SEQ ID NO: 155210 - protein, 11 aa, Artificial Sequence
  Description of Artificial Sequence: Synthetic peptide
  Seed: KMARLGKGYMF
KKARLGKGYMV

SEQ ID NO: 155211 - protein, 10 aa, Artificial Sequence
  Description of Artificial Sequence: Synthetic peptide
  Seed: KMARLGKGYM
KKARLGKGYV

SEQ ID NO: 155212 - protein, 10 aa, Artificial Sequence
  Description of Artificial Sequence: Synthetic peptide
  Seed: KMARLGKGYM
KKARLGKGYY

SEQ ID NO: 155213 - protein, 9 aa, Artificial Sequence
  Description of Artificial Sequence: Synthetic peptide
  Seed: KAKLANVVR
KKKLANVVK

SEQ ID NO: 155214 - protein, 9 aa, Artificial Sequence
  Description of Artificial Sequence: Synthetic peptide
  Seed: KKAKLANVV
KLAKLANVF

SEQ ID NO: 155215 - protein, 9 aa, Artificial Sequence
  Description of Artificial Sequence: Synthetic peptide
  Seed: KKAKLANVV
KLAKLANVL

SEQ ID NO: 155216 - protein, 9 aa, Artificial Sequence
  Description of Artificial Sequence: Synthetic peptide
  Seed: KKAKLANVV
KLAKLANVM

SEQ ID NO: 155217 - protein, 10 aa, Artificial Sequence
  Description of Artificial Sequence: Synthetic peptide
  Seed: KKAKLANVVR
KLAKLANVVK

SEQ ID NO: 155218 - protein, 10 aa, Artificial Sequence
  Description of Artificial Sequence: Synthetic peptide
  Seed: KKAKLANVVR
KLAKLANVVR

SEQ ID NO: 155219 - protein, 9 aa, Artificial Sequence
  Description of Artificial Sequence: Synthetic peptide
  Seed: KKAKLANVV
KLAKLANVY

SEQ ID NO: 155220 - protein, 9 aa, Artificial Sequence
  Description of Artificial Sequence: Synthetic peptide
  Seed: KLANVVRKM
KLANVVRKA

SEQ ID NO: 155221 - protein, 9 aa, Artificial Sequence
  Description of Artificial Sequence: Synthetic peptide
  Seed: KLANVVRKM
KLANVVRKC

SEQ ID NO: 155222 - protein, 9 aa, Artificial Sequence
  Description of Artificial Sequence: Synthetic peptide
  Seed: KLANVVRKM
KLANVVRKF

SEQ ID NO: 155223 - protein, 9 aa, Artificial Sequence
  Description of Artificial Sequence: Synthetic peptide
  Seed: KLANVVRKM
KLANVVRKI

SEQ ID NO: 155224 - protein, 9 aa, Artificial Sequence
  Description of Artificial Sequence: Synthetic peptide
  Seed: KLANVVRKM
KLANVVRKL

SEQ ID NO: 155225 - protein, 10 aa, Artificial Sequence
  Description of Artificial Sequence: Synthetic peptide
  Seed: KLANVVRKMM
KLANVVRKMA

SEQ ID NO: 155226 - protein, 10 aa, Artificial Sequence
  Description of Artificial Sequence: Synthetic peptide
  Seed: KLANVVRKMM
KLANVVRKMI

SEQ ID NO: 155227 - protein, 10 aa, Artificial Sequence
  Description of Artificial Sequence: Synthetic peptide
  Seed: KLANVVRKMM
KLANVVRKML

SEQ ID NO: 155228 - protein, 10 aa, Artificial Sequence
  Description of Artificial Sequence: Synthetic peptide
  Seed: KLANVVRKMM
KLANVVRKMT

SEQ ID NO: 155229 - protein, 10 aa, Artificial Sequence
  Description of Artificial Sequence: Synthetic peptide
  Seed: KLANVVRKMM
KLANVVRKMV

SEQ ID NO: 155230 - protein, 9 aa, Artificial Sequence
  Description of Artificial Sequence: Synthetic peptide
  Seed: KLANVVRKM
KLANVVRKT

SEQ ID NO: 155231 - protein, 9 aa, Artificial Sequence
  Description of Artificial Sequence: Synthetic peptide
  Seed: KLANVVRKM
KLANVVRKV

SEQ ID NO: 155232 - protein, 9 aa, Artificial Sequence
  Description of Artificial Sequence: Synthetic peptide
  Seed: KLANVVRKM
KLANVVRKW

SEQ ID NO: 155233 - protein, 9 aa, Artificial Sequence
  Description of Artificial Sequence: Synthetic peptide
  Seed: KLANVVRKM
KLANVVRKY

SEQ ID NO: 155234 - protein, 9 aa, Artificial Sequence
  Description of Artificial Sequence: Synthetic peptide
  Seed: KMARLGKGY
KLARLGKGF

SEQ ID NO: 155235 - protein, 9 aa, Artificial Sequence
  Description of Artificial Sequence: Synthetic peptide
  Seed: KMARLGKGY
KLARLGKGK

SEQ ID NO: 155236 - protein, 9 aa, Artificial Sequence
  Description of Artificial Sequence: Synthetic peptide
  Seed: KMARLGKGY
KLARLGKGM

SEQ ID NO: 155237 - protein, 9 aa, Artificial Sequence
  Description of Artificial Sequence: Synthetic peptide
  Seed: KMARLGKGY
KLARLGKGY

SEQ ID NO: 155238 - protein, 10 aa, Artificial Sequence
  Description of Artificial Sequence: Synthetic peptide
  Seed: KMARLGKGYM
KLARLGKGYA

SEQ ID NO: 155239 - protein, 10 aa, Artificial Sequence
  Description of Artificial Sequence: Synthetic peptide
  Seed: KMARLGKGYM
KLARLGKGYF

SEQ ID NO: 155240 - protein, 10 aa, Artificial Sequence
  Description of Artificial Sequence: Synthetic peptide
  Seed: KMARLGKGYM
KLARLGKGYI

SEQ ID NO: 155241 - protein, 10 aa, Artificial Sequence
  Description of Artificial Sequence: Synthetic peptide
  Seed: KMARLGKGYM
KLARLGKGYK

SEQ ID NO: 155242 - protein, 10 aa, Artificial Sequence
  Description of Artificial Sequence: Synthetic peptide
  Seed: KMARLGKGYM
KLARLGKGYL

SEQ ID NO: 155243 - protein, 10 aa, Artificial Sequence
  Description of Artificial Sequence: Synthetic peptide
  Seed: KMARLGKGYM
KLARLGKGYM

SEQ ID NO: 155244 - protein, 11 aa, Artificial Sequence
  Description of Artificial Sequence: Synthetic peptide
  Seed: KMARLGKGYMF
KLARLGKGYMF

SEQ ID NO: 155245 - protein, 11 aa, Artificial Sequence
  Description of Artificial Sequence: Synthetic peptide
  Seed: KMARLGKGYMF
KLARLGKGYMI

SEQ ID NO: 155246 - protein, 11 aa, Artificial Sequence
  Description of Artificial Sequence: Synthetic peptide
  Seed: KMARLGKGYMF
KLARLGKGYMK

SEQ ID NO: 155247 - protein, 11 aa, Artificial Sequence
  Description of Artificial Sequence: Synthetic peptide
  Seed: KMARLGKGYMF
KLARLGKGYML

SEQ ID NO: 155248 - protein, 11 aa, Artificial Sequence
  Description of Artificial Sequence: Synthetic peptide
  Seed: KMARLGKGYMF
KLARLGKGYMM

SEQ ID NO: 155249 - protein, 11 aa, Artificial Sequence
  Description of Artificial Sequence: Synthetic peptide
  Seed: KMARLGKGYMF
KLARLGKGYMV

SEQ ID NO: 155250 - protein, 11 aa, Artificial Sequence
  Description of Artificial Sequence: Synthetic peptide
  Seed: KMARLGKGYMF
KLARLGKGYMW

SEQ ID NO: 155251 - protein, 11 aa, Artificial Sequence
  Description of Artificial Sequence: Synthetic peptide
  Seed: KMARLGKGYMF
KLARLGKGYMY

SEQ ID NO: 155252 - protein, 10 aa, Artificial Sequence
  Description of Artificial Sequence: Synthetic peptide
  Seed: KMARLGKGYM
KLARLGKGYR

SEQ ID NO: 155253 - protein, 10 aa, Artificial Sequence
  Description of Artificial Sequence: Synthetic peptide
  Seed: KMARLGKGYM
KLARLGKGYV

SEQ ID NO: 155254 - protein, 10 aa, Artificial Sequence
  Description of Artificial Sequence: Synthetic peptide
  Seed: KMARLGKGYM
KLARLGKGYY

SEQ ID NO: 155255 - protein, 9 aa, Artificial Sequence
  Description of Artificial Sequence: Synthetic peptide
  Seed: KAKLANVVR
KLKLANVVA

SEQ ID NO: 155256 - protein, 9 aa, Artificial Sequence
  Description of Artificial Sequence: Synthetic peptide
  Seed: KAKLANVVR
KLKLANVVF

SEQ ID NO: 155257 - protein, 9 aa, Artificial Sequence
  Description of Artificial Sequence: Synthetic peptide
  Seed: KAKLANVVR
KLKLANVVG

SEQ ID NO: 155258 - protein, 9 aa, Artificial Sequence
  Description of Artificial Sequence: Synthetic peptide
  Seed: KAKLANVVR
KLKLANVVH

SEQ ID NO: 155259 - protein, 9 aa, Artificial Sequence
  Description of Artificial Sequence: Synthetic peptide
  Seed: KAKLANVVR
KLKLANVVI

SEQ ID NO: 155260 - protein, 9 aa, Artificial Sequence
  Description of Artificial Sequence: Synthetic peptide
  Seed: KAKLANVVR
KLKLANVVK

SEQ ID NO: 155261 - protein, 9 aa, Artificial Sequence
  Description of Artificial Sequence: Synthetic peptide
  Seed: KAKLANVVR
KLKLANVVL

SEQ ID NO: 155262 - protein, 9 aa, Artificial Sequence
  Description of Artificial Sequence: Synthetic peptide
  Seed: KAKLANVVR
KLKLANVVM

SEQ ID NO: 155263 - protein, 9 aa, Artificial Sequence
  Description of Artificial Sequence: Synthetic peptide
  Seed: KAKLANVVR
KLKLANVVN

SEQ ID NO: 155264 - protein, 9 aa, Artificial Sequence
  Description of Artificial Sequence: Synthetic peptide
  Seed: KAKLANVVR
KLKLANVVP

SEQ ID NO: 155265 - protein, 9 aa, Artificial Sequence
  Description of Artificial Sequence: Synthetic peptide
  Seed: KAKLANVVR
KLKLANVVQ

SEQ ID NO: 155266 - protein, 9 aa, Artificial Sequence
  Description of Artificial Sequence: Synthetic peptide
  Seed: KAKLANVVR
KLKLANVVR

SEQ ID NO: 155267 - protein, 10 aa, Artificial Sequence
  Description of Artificial Sequence: Synthetic peptide
  Seed: KAKLANVVRK
KLKLANVVRA

SEQ ID NO: 155268 - protein, 10 aa, Artificial Sequence
  Description of Artificial Sequence: Synthetic peptide
  Seed: KAKLANVVRK
KLKLANVVRI

SEQ ID NO: 155269 - protein, 10 aa, Artificial Sequence
  Description of Artificial Sequence: Synthetic peptide
  Seed: KAKLANVVRK
KLKLANVVRK

SEQ ID NO: 155270 - protein, 10 aa, Artificial Sequence
  Description of Artificial Sequence: Synthetic peptide
  Seed: KAKLANVVRK
KLKLANVVRM

SEQ ID NO: 155271 - protein, 10 aa, Artificial Sequence
  Description of Artificial Sequence: Synthetic peptide
  Seed: KAKLANVVRK
KLKLANVVRV

SEQ ID NO: 155272 - protein, 10 aa, Artificial Sequence
  Description of Artificial Sequence: Synthetic peptide
  Seed: KAKLANVVRK
KLKLANVVRY

SEQ ID NO: 155273 - protein, 9 aa, Artificial Sequence
  Description of Artificial Sequence: Synthetic peptide
  Seed: KAKLANVVR
KLKLANVVS

SEQ ID NO: 155274 - protein, 9 aa, Artificial Sequence
  Description of Artificial Sequence: Synthetic peptide
  Seed: KAKLANVVR
KLKLANVVT

SEQ ID NO: 155275 - protein, 9 aa, Artificial Sequence
  Description of Artificial Sequence: Synthetic peptide
  Seed: KAKLANVVR
KLKLANVVV

SEQ ID NO: 155276 - protein, 9 aa, Artificial Sequence
  Description of Artificial Sequence: Synthetic peptide
  Seed: KAKLANVVR
KLKLANVVY

SEQ ID NO: 155277 - protein, 9 aa, Artificial Sequence
  Description of Artificial Sequence: Synthetic peptide
  Seed: KWNENQNPR
KLNENQNPK

SEQ ID NO: 155278 - protein, 9 aa, Artificial Sequence
  Description of Artificial Sequence: Synthetic peptide
  Seed: KWNENQNPR
KLNENQNPR

SEQ ID NO: 155279 - protein, 9 aa, Artificial Sequence
  Description of Artificial Sequence: Synthetic peptide
  Seed: KKAKLANVV
KMAKLANVA

SEQ ID NO: 155280 - protein, 9 aa, Artificial Sequence
  Description of Artificial Sequence: Synthetic peptide
  Seed: KKAKLANVV
KMAKLANVF

SEQ ID NO: 155281 - protein, 9 aa, Artificial Sequence
  Description of Artificial Sequence: Synthetic peptide
  Seed: KKAKLANVV
KMAKLANVH

SEQ ID NO: 155282 - protein, 9 aa, Artificial Sequence
  Description of Artificial Sequence: Synthetic peptide
  Seed: KKAKLANVV
KMAKLANVI

SEQ ID NO: 155283 - protein, 9 aa, Artificial Sequence
  Description of Artificial Sequence: Synthetic peptide
  Seed: KKAKLANVV
KMAKLANVL

SEQ ID NO: 155284 - protein, 9 aa, Artificial Sequence
  Description of Artificial Sequence: Synthetic peptide
  Seed: KKAKLANVV
KMAKLANVM

SEQ ID NO: 155285 - protein, 9 aa, Artificial Sequence
  Description of Artificial Sequence: Synthetic peptide
  Seed: KKAKLANVV
KMAKLANVV

SEQ ID NO: 155286 - protein, 10 aa, Artificial Sequence
  Description of Artificial Sequence: Synthetic peptide
  Seed: KKAKLANVVR
KMAKLANVVK

SEQ ID NO: 155287 - protein, 10 aa, Artificial Sequence
  Description of Artificial Sequence: Synthetic peptide
  Seed: KKAKLANVVR
KMAKLANVVR

SEQ ID NO: 155288 - protein, 9 aa, Artificial Sequence
  Description of Artificial Sequence: Synthetic peptide
  Seed: KKAKLANVV
KMAKLANVW

SEQ ID NO: 155289 - protein, 9 aa, Artificial Sequence
  Description of Artificial Sequence: Synthetic peptide
  Seed: KKAKLANVV
KMAKLANVY

SEQ ID NO: 155290 - protein, 8 aa, Artificial Sequence
  Description of Artificial Sequence: Synthetic peptide
  Seed: KLANVVRK
KMANVVRK

SEQ ID NO: 155291 - protein, 9 aa, Artificial Sequence
  Description of Artificial Sequence: Synthetic peptide
  Seed: KLANVVRKM
KMANVVRKA

SEQ ID NO: 155292 - protein, 9 aa, Artificial Sequence
  Description of Artificial Sequence: Synthetic peptide
  Seed: KLANVVRKM
KMANVVRKC

SEQ ID NO: 155293 - protein, 9 aa, Artificial Sequence
  Description of Artificial Sequence: Synthetic peptide
  Seed: KLANVVRKM
KMANVVRKF

SEQ ID NO: 155294 - protein, 9 aa, Artificial Sequence
  Description of Artificial Sequence: Synthetic peptide
  Seed: KLANVVRKM
KMANVVRKH

SEQ ID NO: 155295 - protein, 9 aa, Artificial Sequence
  Description of Artificial Sequence: Synthetic peptide
  Seed: KLANVVRKM
KMANVVRKI

SEQ ID NO: 155296 - protein, 9 aa, Artificial Sequence
  Description of Artificial Sequence: Synthetic peptide
  Seed: KLANVVRKM
KMANVVRKL

SEQ ID NO: 155297 - protein, 9 aa, Artificial Sequence
  Description of Artificial Sequence: Synthetic peptide
  Seed: KLANVVRKM
KMANVVRKM

SEQ ID NO: 155298 - protein, 10 aa, Artificial Sequence
  Description of Artificial Sequence: Synthetic peptide
  Seed: KLANVVRKMM
KMANVVRKMA

SEQ ID NO: 155299 - protein, 10 aa, Artificial Sequence
  Description of Artificial Sequence: Synthetic peptide
  Seed: KLANVVRKMM
KMANVVRKMI

SEQ ID NO: 155300 - protein, 10 aa, Artificial Sequence
  Description of Artificial Sequence: Synthetic peptide
  Seed: KLANVVRKMM
KMANVVRKML

SEQ ID NO: 155301 - protein, 10 aa, Artificial Sequence
  Description of Artificial Sequence: Synthetic peptide
  Seed: KLANVVRKMM
KMANVVRKMM

SEQ ID NO: 155302 - protein, 10 aa, Artificial Sequence
  Description of Artificial Sequence: Synthetic peptide
  Seed: KLANVVRKMM
KMANVVRKMT

SEQ ID NO: 155303 - protein, 10 aa, Artificial Sequence
  Description of Artificial Sequence: Synthetic peptide
  Seed: KLANVVRKMM
KMANVVRKMV

SEQ ID NO: 155304 - protein, 9 aa, Artificial Sequence
  Description of Artificial Sequence: Synthetic peptide
  Seed: KLANVVRKM
KMANVVRKT

SEQ ID NO: 155305 - protein, 9 aa, Artificial Sequence
  Description of Artificial Sequence: Synthetic peptide
  Seed: KLANVVRKM
KMANVVRKV

SEQ ID NO: 155306 - protein, 9 aa, Artificial Sequence
  Description of Artificial Sequence: Synthetic peptide
  Seed: KLANVVRKM
KMANVVRKW

SEQ ID NO: 155307 - protein, 9 aa, Artificial Sequence
  Description of Artificial Sequence: Synthetic peptide
  Seed: KLANVVRKM
KMANVVRKY

SEQ ID NO: 155308 - protein, 9 aa, Artificial Sequence
  Description of Artificial Sequence: Synthetic peptide
  Seed: KMARLGKGY
KMARLGKGF

SEQ ID NO: 155309 - protein, 9 aa, Artificial Sequence
  Description of Artificial Sequence: Synthetic peptide
  Seed: KMARLGKGY
KMARLGKGK

SEQ ID NO: 155310 - protein, 9 aa, Artificial Sequence
  Description of Artificial Sequence: Synthetic peptide
  Seed: KMARLGKGY
KMARLGKGM

SEQ ID NO: 155311 - protein, 10 aa, Artificial Sequence
  Description of Artificial Sequence: Synthetic peptide
  Seed: KMARLGKGYM
KMARLGKGYA

SEQ ID NO: 155312 - protein, 10 aa, Artificial Sequence
  Description of Artificial Sequence: Synthetic peptide
  Seed: KMARLGKGYM
KMARLGKGYF

SEQ ID NO: 155313 - protein, 10 aa, Artificial Sequence
  Description of Artificial Sequence: Synthetic peptide
  Seed: KMARLGKGYM
KMARLGKGYH

SEQ ID NO: 155314 - protein, 10 aa, Artificial Sequence
  Description of Artificial Sequence: Synthetic peptide
  Seed: KMARLGKGYM
KMARLGKGYI

SEQ ID NO: 155315 - protein, 10 aa, Artificial Sequence
  Description of Artificial Sequence: Synthetic peptide
  Seed: KMARLGKGYM
KMARLGKGYK

SEQ ID NO: 155316 - protein, 10 aa, Artificial Sequence
  Description of Artificial Sequence: Synthetic peptide
  Seed: KMARLGKGYM
KMARLGKGYL

SEQ ID NO: 155317 - protein, 11 aa, Artificial Sequence
  Description of Artificial Sequence: Synthetic peptide
  Seed: KMARLGKGYMF
KMARLGKGYMI

SEQ ID NO: 155318 - protein, 11 aa, Artificial Sequence
  Description of Artificial Sequence: Synthetic peptide
  Seed: KMARLGKGYMF
KMARLGKGYMK

SEQ ID NO: 155319 - protein, 11 aa, Artificial Sequence
  Description of Artificial Sequence: Synthetic peptide
  Seed: KMARLGKGYMF
KMARLGKGYML

SEQ ID NO: 155320 - protein, 11 aa, Artificial Sequence
  Description of Artificial Sequence: Synthetic peptide
  Seed: KMARLGKGYMF
KMARLGKGYMM

SEQ ID NO: 155321 - protein, 11 aa, Artificial Sequence
  Description of Artificial Sequence: Synthetic peptide
  Seed: KMARLGKGYMF
KMARLGKGYMV

SEQ ID NO: 155322 - protein, 11 aa, Artificial Sequence
  Description of Artificial Sequence: Synthetic peptide
  Seed: KMARLGKGYMF
KMARLGKGYMW

SEQ ID NO: 155323 - protein, 11 aa, Artificial Sequence
  Description of Artificial Sequence: Synthetic peptide
  Seed: KMARLGKGYMF
KMARLGKGYMY

SEQ ID NO: 155324 - protein, 10 aa, Artificial Sequence
  Description of Artificial Sequence: Synthetic peptide
  Seed: KMARLGKGYM
KMARLGKGYR

SEQ ID NO: 155325 - protein, 10 aa, Artificial Sequence
  Description of Artificial Sequence: Synthetic peptide
  Seed: KMARLGKGYM
KMARLGKGYS

SEQ ID NO: 155326 - protein, 10 aa, Artificial Sequence
  Description of Artificial Sequence: Synthetic peptide
  Seed: KMARLGKGYM
KMARLGKGYV

SEQ ID NO: 155327 - protein, 10 aa, Artificial Sequence
  Description of Artificial Sequence: Synthetic peptide
  Seed: KMARLGKGYM
KMARLGKGYY

SEQ ID NO: 155328 - protein, 9 aa, Artificial Sequence
  Description of Artificial Sequence: Synthetic peptide
  Seed: KAKLANVVR
KMKLANVVA

SEQ ID NO: 155329 - protein, 9 aa, Artificial Sequence
  Description of Artificial Sequence: Synthetic peptide
  Seed: KAKLANVVR
KMKLANVVC

SEQ ID NO: 155330 - protein, 9 aa, Artificial Sequence
  Description of Artificial Sequence: Synthetic peptide
  Seed: KAKLANVVR
KMKLANVVE

SEQ ID NO: 155331 - protein, 9 aa, Artificial Sequence
  Description of Artificial Sequence: Synthetic peptide
  Seed: KAKLANVVR
KMKLANVVF

SEQ ID NO: 155332 - protein, 9 aa, Artificial Sequence
  Description of Artificial Sequence: Synthetic peptide
  Seed: KAKLANVVR
KMKLANVVG

SEQ ID NO: 155333 - protein, 9 aa, Artificial Sequence
  Description of Artificial Sequence: Synthetic peptide
  Seed: KAKLANVVR
KMKLANVVH

SEQ ID NO: 155334 - protein, 9 aa, Artificial Sequence
  Description of Artificial Sequence: Synthetic peptide
  Seed: KAKLANVVR
KMKLANVVI

SEQ ID NO: 155335 - protein, 9 aa, Artificial Sequence
  Description of Artificial Sequence: Synthetic peptide
  Seed: KAKLANVVR
KMKLANVVK

SEQ ID NO: 155336 - protein, 9 aa, Artificial Sequence
  Description of Artificial Sequence: Synthetic peptide
  Seed: KAKLANVVR
KMKLANVVL

SEQ ID NO: 155337 - protein, 9 aa, Artificial Sequence
  Description of Artificial Sequence: Synthetic peptide
  Seed: KAKLANVVR
KMKLANVVM

SEQ ID NO: 155338 - protein, 9 aa, Artificial Sequence
  Description of Artificial Sequence: Synthetic peptide
  Seed: KAKLANVVR
KMKLANVVN

SEQ ID NO: 155339 - protein, 9 aa, Artificial Sequence
  Description of Artificial Sequence: Synthetic peptide
  Seed: KAKLANVVR
KMKLANVVP

SEQ ID NO: 155340 - protein, 9 aa, Artificial Sequence
  Description of Artificial Sequence: Synthetic peptide
  Seed: KAKLANVVR
KMKLANVVQ

SEQ ID NO: 155341 - protein, 9 aa, Artificial Sequence
  Description of Artificial Sequence: Synthetic peptide
  Seed: KAKLANVVR
KMKLANVVR

SEQ ID NO: 155342 - protein, 10 aa, Artificial Sequence
  Description of Artificial Sequence: Synthetic peptide
  Seed: KAKLANVVRK
KMKLANVVRA

SEQ ID NO: 155343 - protein, 10 aa, Artificial Sequence
  Description of Artificial Sequence: Synthetic peptide
  Seed: KAKLANVVRK
KMKLANVVRG

SEQ ID NO: 155344 - protein, 10 aa, Artificial Sequence
  Description of Artificial Sequence: Synthetic peptide
  Seed: KAKLANVVRK
KMKLANVVRI

SEQ ID NO: 155345 - protein, 10 aa, Artificial Sequence
  Description of Artificial Sequence: Synthetic peptide
  Seed: KAKLANVVRK
KMKLANVVRK

SEQ ID NO: 155346 - protein, 10 aa, Artificial Sequence
  Description of Artificial Sequence: Synthetic peptide
  Seed: KAKLANVVRK
KMKLANVVRL

SEQ ID NO: 155347 - protein, 10 aa, Artificial Sequence
  Description of Artificial Sequence: Synthetic peptide
  Seed: KAKLANVVRK
KMKLANVVRM

SEQ ID NO: 155348 - protein, 10 aa, Artificial Sequence
  Description of Artificial Sequence: Synthetic peptide
  Seed: KAKLANVVRK
KMKLANVVRR

SEQ ID NO: 155349 - protein, 10 aa, Artificial Sequence
  Description of Artificial Sequence: Synthetic peptide
  Seed: KAKLANVVRK
KMKLANVVRS

SEQ ID NO: 155350 - protein, 10 aa, Artificial Sequence
  Description of Artificial Sequence: Synthetic peptide
  Seed: KAKLANVVRK
KMKLANVVRV

SEQ ID NO: 155351 - protein, 10 aa, Artificial Sequence
  Description of Artificial Sequence: Synthetic peptide
  Seed: KAKLANVVRK
KMKLANVVRY

SEQ ID NO: 155352 - protein, 9 aa, Artificial Sequence
  Description of Artificial Sequence: Synthetic peptide
  Seed: KAKLANVVR
KMKLANVVS

SEQ ID NO: 155353 - protein, 9 aa, Artificial Sequence
  Description of Artificial Sequence: Synthetic peptide
  Seed: KAKLANVVR
KMKLANVVT

SEQ ID NO: 155354 - protein, 9 aa, Artificial Sequence
  Description of Artificial Sequence: Synthetic peptide
  Seed: KAKLANVVR
KMKLANVVV

SEQ ID NO: 155355 - protein, 9 aa, Artificial Sequence
  Description of Artificial Sequence: Synthetic peptide
  Seed: KAKLANVVR
KMKLANVVY

SEQ ID NO: 155356 - protein, 9 aa, Artificial Sequence
  Description of Artificial Sequence: Synthetic peptide
  Seed: KWNENQNPR
KMNENQNPK

SEQ ID NO: 155357 - protein, 9 aa, Artificial Sequence
  Description of Artificial Sequence: Synthetic peptide
  Seed: KWNENQNPR
KMNENQNPR

SEQ ID NO: 155358 - protein, 9 aa, Artificial Sequence
  Description of Artificial Sequence: Synthetic peptide
  Seed: KKAKLANVV
KNAKLANVF

SEQ ID NO: 155359 - protein, 9 aa, Artificial Sequence
  Description of Artificial Sequence: Synthetic peptide
  Seed: KKAKLANVV
KNAKLANVM

SEQ ID NO: 155360 - protein, 10 aa, Artificial Sequence
  Description of Artificial Sequence: Synthetic peptide
  Seed: KKAKLANVVR
KNAKLANVVR

SEQ ID NO: 155361 - protein, 9 aa, Artificial Sequence
  Description of Artificial Sequence: Synthetic peptide
  Seed: KKAKLANVV
KNAKLANVY

SEQ ID NO: 155362 - protein, 9 aa, Artificial Sequence
  Description of Artificial Sequence: Synthetic peptide
  Seed: KLANVVRKM
KNANVVRKF

SEQ ID NO: 155363 - protein, 9 aa, Artificial Sequence
  Description of Artificial Sequence: Synthetic peptide
  Seed: KLANVVRKM
KNANVVRKY

SEQ ID NO: 155364 - protein, 9 aa, Artificial Sequence
  Description of Artificial Sequence: Synthetic peptide
  Seed: KMARLGKGY
KNARLGKGY

SEQ ID NO: 155365 - protein, 10 aa, Artificial Sequence
  Description of Artificial Sequence: Synthetic peptide
  Seed: KMARLGKGYM
KNARLGKGYA

SEQ ID NO: 155366 - protein, 10 aa, Artificial Sequence
  Description of Artificial Sequence: Synthetic peptide
  Seed: KMARLGKGYM
KNARLGKGYI

SEQ ID NO: 155367 - protein, 10 aa, Artificial Sequence
  Description of Artificial Sequence: Synthetic peptide
  Seed: KMARLGKGYM
KNARLGKGYK

SEQ ID NO: 155368 - protein, 10 aa, Artificial Sequence
  Description of Artificial Sequence: Synthetic peptide
  Seed: KMARLGKGYM
KNARLGKGYL

SEQ ID NO: 155369 - protein, 10 aa, Artificial Sequence
  Description of Artificial Sequence: Synthetic peptide
  Seed: KMARLGKGYM
KNARLGKGYM

SEQ ID NO: 155370 - protein, 11 aa, Artificial Sequence
  Description of Artificial Sequence: Synthetic peptide
  Seed: KMARLGKGYMF
KNARLGKGYMF

SEQ ID NO: 155371 - protein, 11 aa, Artificial Sequence
  Description of Artificial Sequence: Synthetic peptide
  Seed: KMARLGKGYMF
KNARLGKGYMI

SEQ ID NO: 155372 - protein, 11 aa, Artificial Sequence
  Description of Artificial Sequence: Synthetic peptide
  Seed: KMARLGKGYMF
KNARLGKGYMK

SEQ ID NO: 155373 - protein, 11 aa, Artificial Sequence
  Description of Artificial Sequence: Synthetic peptide
  Seed: KMARLGKGYMF
KNARLGKGYML

SEQ ID NO: 155374 - protein, 11 aa, Artificial Sequence
  Description of Artificial Sequence: Synthetic peptide
  Seed: KMARLGKGYMF
KNARLGKGYMM

SEQ ID NO: 155375 - protein, 11 aa, Artificial Sequence
  Description of Artificial Sequence: Synthetic peptide
  Seed: KMARLGKGYMF
KNARLGKGYMV

SEQ ID NO: 155376 - protein, 10 aa, Artificial Sequence
  Description of Artificial Sequence: Synthetic peptide
  Seed: KMARLGKGYM
KNARLGKGYR

SEQ ID NO: 155377 - protein, 10 aa, Artificial Sequence
  Description of Artificial Sequence: Synthetic peptide
  Seed: KMARLGKGYM
KNARLGKGYV

SEQ ID NO: 155378 - protein, 10 aa, Artificial Sequence
  Description of Artificial Sequence: Synthetic peptide
  Seed: KMARLGKGYM
KNARLGKGYY

SEQ ID NO: 155379 - protein, 9 aa, Artificial Sequence
  Description of Artificial Sequence: Synthetic peptide
  Seed: KAKLANVVR
KNKLANVVA

SEQ ID NO: 155380 - protein, 9 aa, Artificial Sequence
  Description of Artificial Sequence: Synthetic peptide
  Seed: KAKLANVVR
KNKLANVVI

SEQ ID NO: 155381 - protein, 9 aa, Artificial Sequence
  Description of Artificial Sequence: Synthetic peptide
  Seed: KAKLANVVR
KNKLANVVK

SEQ ID NO: 155382 - protein, 9 aa, Artificial Sequence
  Description of Artificial Sequence: Synthetic peptide
  Seed: KAKLANVVR
KNKLANVVL

SEQ ID NO: 155383 - protein, 9 aa, Artificial Sequence
  Description of Artificial Sequence: Synthetic peptide
  Seed: KAKLANVVR
KNKLANVVM

SEQ ID NO: 155384 - protein, 9 aa, Artificial Sequence
  Description of Artificial Sequence: Synthetic peptide
  Seed: KAKLANVVR
KNKLANVVR

SEQ ID NO: 155385 - protein, 10 aa, Artificial Sequence
  Description of Artificial Sequence: Synthetic peptide
  Seed: KAKLANVVRK
KNKLANVVRA

SEQ ID NO: 155386 - protein, 10 aa, Artificial Sequence
  Description of Artificial Sequence: Synthetic peptide
  Seed: KAKLANVVRK
KNKLANVVRK

SEQ ID NO: 155387 - protein, 9 aa, Artificial Sequence
  Description of Artificial Sequence: Synthetic peptide
  Seed: KAKLANVVR
KNKLANVVS

SEQ ID NO: 155388 - protein, 9 aa, Artificial Sequence
  Description of Artificial Sequence: Synthetic peptide
  Seed: KAKLANVVR
KNKLANVVT

SEQ ID NO: 155389 - protein, 9 aa, Artificial Sequence
  Description of Artificial Sequence: Synthetic peptide
  Seed: KAKLANVVR
KNKLANVVV

SEQ ID NO: 155390 - protein, 9 aa, Artificial Sequence
  Description of Artificial Sequence: Synthetic peptide
  Seed: KAKLANVVR
KNKLANVVY

SEQ ID NO: 155391 - protein, 9 aa, Artificial Sequence
  Description of Artificial Sequence: Synthetic peptide
  Seed: KWNENQNPR
KNNENQNPR

SEQ ID NO: 155392 - protein, 9 aa, Artificial Sequence
  Description of Artificial Sequence: Synthetic peptide
  Seed: KKAKLANVV
KPAKLANVF

SEQ ID NO: 155393 - protein, 10 aa, Artificial Sequence
  Description of Artificial Sequence: Synthetic peptide
  Seed: KKAKLANVVR
KPAKLANVVR

SEQ ID NO: 155394 - protein, 9 aa, Artificial Sequence
  Description of Artificial Sequence: Synthetic peptide
  Seed: KKAKLANVV
KPAKLANVY

SEQ ID NO: 155395 - protein, 10 aa, Artificial Sequence
  Description of Artificial Sequence: Synthetic peptide
  Seed: KMARLGKGYM
KPARLGKGYA

SEQ ID NO: 155396 - protein, 10 aa, Artificial Sequence
  Description of Artificial Sequence: Synthetic peptide
  Seed: KMARLGKGYM
KPARLGKGYI

SEQ ID NO: 155397 - protein, 10 aa, Artificial Sequence
  Description of Artificial Sequence: Synthetic peptide
  Seed: KMARLGKGYM
KPARLGKGYK

SEQ ID NO: 155398 - protein, 10 aa, Artificial Sequence
  Description of Artificial Sequence: Synthetic peptide
  Seed: KMARLGKGYM
KPARLGKGYL

SEQ ID NO: 155399 - protein, 10 aa, Artificial Sequence
  Description of Artificial Sequence: Synthetic peptide
  Seed: KMARLGKGYM
KPARLGKGYM

SEQ ID NO: 155400 - protein, 11 aa, Artificial Sequence
  Description of Artificial Sequence: Synthetic peptide
  Seed: KMARLGKGYMF
KPARLGKGYMF

SEQ ID NO: 155401 - protein, 11 aa, Artificial Sequence
  Description of Artificial Sequence: Synthetic peptide
  Seed: KMARLGKGYMF
KPARLGKGYMI

SEQ ID NO: 155402 - protein, 11 aa, Artificial Sequence
  Description of Artificial Sequence: Synthetic peptide
  Seed: KMARLGKGYMF
KPARLGKGYMK

SEQ ID NO: 155403 - protein, 11 aa, Artificial Sequence
  Description of Artificial Sequence: Synthetic peptide
  Seed: KMARLGKGYMF
KPARLGKGYML

SEQ ID NO: 155404 - protein, 11 aa, Artificial Sequence
  Description of Artificial Sequence: Synthetic peptide
  Seed: KMARLGKGYMF
KPARLGKGYMM

SEQ ID NO: 155405 - protein, 11 aa, Artificial Sequence
  Description of Artificial Sequence: Synthetic peptide
  Seed: KMARLGKGYMF
KPARLGKGYMV

SEQ ID NO: 155406 - protein, 10 aa, Artificial Sequence
  Description of Artificial Sequence: Synthetic peptide
  Seed: KMARLGKGYM
KPARLGKGYV

SEQ ID NO: 155407 - protein, 10 aa, Artificial Sequence
  Description of Artificial Sequence: Synthetic peptide
  Seed: KMARLGKGYM
KPARLGKGYY

SEQ ID NO: 155408 - protein, 9 aa, Artificial Sequence
  Description of Artificial Sequence: Synthetic peptide
  Seed: KKAKLANVV
KQAKLANVA

SEQ ID NO: 155409 - protein, 9 aa, Artificial Sequence
  Description of Artificial Sequence: Synthetic peptide
  Seed: KKAKLANVV
KQAKLANVC

SEQ ID NO: 155410 - protein, 9 aa, Artificial Sequence
  Description of Artificial Sequence: Synthetic peptide
  Seed: KKAKLANVV
KQAKLANVF

SEQ ID NO: 155411 - protein, 9 aa, Artificial Sequence
  Description of Artificial Sequence: Synthetic peptide
  Seed: KKAKLANVV
KQAKLANVG

SEQ ID NO: 155412 - protein, 9 aa, Artificial Sequence
  Description of Artificial Sequence: Synthetic peptide
  Seed: KKAKLANVV
KQAKLANVH

SEQ ID NO: 155413 - protein, 9 aa, Artificial Sequence
  Description of Artificial Sequence: Synthetic peptide
  Seed: KKAKLANVV
KQAKLANVI

SEQ ID NO: 155414 - protein, 9 aa, Artificial Sequence
  Description of Artificial Sequence: Synthetic peptide
  Seed: KKAKLANVV
KQAKLANVL

SEQ ID NO: 155415 - protein, 9 aa, Artificial Sequence
  Description of Artificial Sequence: Synthetic peptide
  Seed: KKAKLANVV
KQAKLANVM

SEQ ID NO: 155416 - protein, 9 aa, Artificial Sequence
  Description of Artificial Sequence: Synthetic peptide
  Seed: KKAKLANVV
KQAKLANVS

SEQ ID NO: 155417 - protein, 9 aa, Artificial Sequence
  Description of Artificial Sequence: Synthetic peptide
  Seed: KKAKLANVV
KQAKLANVT

SEQ ID NO: 155418 - protein, 9 aa, Artificial Sequence
  Description of Artificial Sequence: Synthetic peptide
  Seed: KKAKLANVV
KQAKLANVV

SEQ ID NO: 155419 - protein, 10 aa, Artificial Sequence
  Description of Artificial Sequence: Synthetic peptide
  Seed: KKAKLANVVR
KQAKLANVVR

SEQ ID NO: 155420 - protein, 9 aa, Artificial Sequence
  Description of Artificial Sequence: Synthetic peptide
  Seed: KKAKLANVV
KQAKLANVW

SEQ ID NO: 155421 - protein, 9 aa, Artificial Sequence
  Description of Artificial Sequence: Synthetic peptide
  Seed: KKAKLANVV
KQAKLANVY

SEQ ID NO: 155422 - protein, 9 aa, Artificial Sequence
  Description of Artificial Sequence: Synthetic peptide
  Seed: KLANVVRKM
KQANVVRKA

SEQ ID NO: 155423 - protein, 9 aa, Artificial Sequence
  Description of Artificial Sequence: Synthetic peptide
  Seed: KLANVVRKM
KQANVVRKF

SEQ ID NO: 155424 - protein, 9 aa, Artificial Sequence
  Description of Artificial Sequence: Synthetic peptide
  Seed: KLANVVRKM
KQANVVRKH

SEQ ID NO: 155425 - protein, 9 aa, Artificial Sequence
  Description of Artificial Sequence: Synthetic peptide
  Seed: KLANVVRKM
KQANVVRKI

SEQ ID NO: 155426 - protein, 9 aa, Artificial Sequence
  Description of Artificial Sequence: Synthetic peptide
  Seed: KLANVVRKM
KQANVVRKL

SEQ ID NO: 155427 - protein, 9 aa, Artificial Sequence
  Description of Artificial Sequence: Synthetic peptide
  Seed: KLANVVRKM
KQANVVRKM

SEQ ID NO: 155428 - protein, 10 aa, Artificial Sequence
  Description of Artificial Sequence: Synthetic peptide
  Seed: KLANVVRKMM
KQANVVRKMV

SEQ ID NO: 155429 - protein, 9 aa, Artificial Sequence
  Description of Artificial Sequence: Synthetic peptide
  Seed: KLANVVRKM
KQANVVRKV

SEQ ID NO: 155430 - protein, 9 aa, Artificial Sequence
  Description of Artificial Sequence: Synthetic peptide
  Seed: KLANVVRKM
KQANVVRKW

SEQ ID NO: 155431 - protein, 9 aa, Artificial Sequence
  Description of Artificial Sequence: Synthetic peptide
  Seed: KLANVVRKM
KQANVVRKY

SEQ ID NO: 155432 - protein, 9 aa, Artificial Sequence
  Description of Artificial Sequence: Synthetic peptide
  Seed: KMARLGKGY
KQARLGKGF

SEQ ID NO: 155433 - protein, 9 aa, Artificial Sequence
  Description of Artificial Sequence: Synthetic peptide
  Seed: KMARLGKGY
KQARLGKGH

SEQ ID NO: 155434 - protein, 9 aa, Artificial Sequence
  Description of Artificial Sequence: Synthetic peptide
  Seed: KMARLGKGY
KQARLGKGK

SEQ ID NO: 155435 - protein, 9 aa, Artificial Sequence
  Description of Artificial Sequence: Synthetic peptide
  Seed: KMARLGKGY
KQARLGKGL

SEQ ID NO: 155436 - protein, 9 aa, Artificial Sequence
  Description of Artificial Sequence: Synthetic peptide
  Seed: KMARLGKGY
KQARLGKGM

SEQ ID NO: 155437 - protein, 9 aa, Artificial Sequence
  Description of Artificial Sequence: Synthetic peptide
  Seed: KMARLGKGY
KQARLGKGW

SEQ ID NO: 155438 - protein, 9 aa, Artificial Sequence
  Description of Artificial Sequence: Synthetic peptide
  Seed: KMARLGKGY
KQARLGKGY

SEQ ID NO: 155439 - protein, 10 aa, Artificial Sequence
  Description of Artificial Sequence: Synthetic peptide
  Seed: KMARLGKGYM
KQARLGKGYA

SEQ ID NO: 155440 - protein, 10 aa, Artificial Sequence
  Description of Artificial Sequence: Synthetic peptide
  Seed: KMARLGKGYM
KQARLGKGYF

SEQ ID NO: 155441 - protein, 10 aa, Artificial Sequence
  Description of Artificial Sequence: Synthetic peptide
  Seed: KMARLGKGYM
KQARLGKGYI

SEQ ID NO: 155442 - protein, 10 aa, Artificial Sequence
  Description of Artificial Sequence: Synthetic peptide
  Seed: KMARLGKGYM
KQARLGKGYK

SEQ ID NO: 155443 - protein, 10 aa, Artificial Sequence
  Description of Artificial Sequence: Synthetic peptide
  Seed: KMARLGKGYM
KQARLGKGYL

SEQ ID NO: 155444 - protein, 10 aa, Artificial Sequence
  Description of Artificial Sequence: Synthetic peptide
  Seed: KMARLGKGYM
KQARLGKGYM

SEQ ID NO: 155445 - protein, 11 aa, Artificial Sequence
  Description of Artificial Sequence: Synthetic peptide
  Seed: KMARLGKGYMF
KQARLGKGYMF

SEQ ID NO: 155446 - protein, 11 aa, Artificial Sequence
  Description of Artificial Sequence: Synthetic peptide
  Seed: KMARLGKGYMF
KQARLGKGYMI

SEQ ID NO: 155447 - protein, 11 aa, Artificial Sequence
  Description of Artificial Sequence: Synthetic peptide
  Seed: KMARLGKGYMF
KQARLGKGYMK

SEQ ID NO: 155448 - protein, 11 aa, Artificial Sequence
  Description of Artificial Sequence: Synthetic peptide
  Seed: KMARLGKGYMF
KQARLGKGYML

SEQ ID NO: 155449 - protein, 11 aa, Artificial Sequence
  Description of Artificial Sequence: Synthetic peptide
  Seed: KMARLGKGYMF
KQARLGKGYMM

SEQ ID NO: 155450 - protein, 11 aa, Artificial Sequence
  Description of Artificial Sequence: Synthetic peptide
  Seed: KMARLGKGYMF
KQARLGKGYMV

SEQ ID NO: 155451 - protein, 11 aa, Artificial Sequence
  Description of Artificial Sequence: Synthetic peptide
  Seed: KMARLGKGYMF
KQARLGKGYMY

SEQ ID NO: 155452 - protein, 10 aa, Artificial Sequence
  Description of Artificial Sequence: Synthetic peptide
  Seed: KMARLGKGYM
KQARLGKGYR

SEQ ID NO: 155453 - protein, 10 aa, Artificial Sequence
  Description of Artificial Sequence: Synthetic peptide
  Seed: KMARLGKGYM
KQARLGKGYV

SEQ ID NO: 155454 - protein, 10 aa, Artificial Sequence
  Description of Artificial Sequence: Synthetic peptide
  Seed: KMARLGKGYM
KQARLGKGYY

SEQ ID NO: 155455 - protein, 9 aa, Artificial Sequence
  Description of Artificial Sequence: Synthetic peptide
  Seed: KAKLANVVR
KQKLANVVA

SEQ ID NO: 155456 - protein, 9 aa, Artificial Sequence
  Description of Artificial Sequence: Synthetic peptide
  Seed: KAKLANVVR
KQKLANVVG

SEQ ID NO: 155457 - protein, 9 aa, Artificial Sequence
  Description of Artificial Sequence: Synthetic peptide
  Seed: KAKLANVVR
KQKLANVVI

SEQ ID NO: 155458 - protein, 9 aa, Artificial Sequence
  Description of Artificial Sequence: Synthetic peptide
  Seed: KAKLANVVR
KQKLANVVK

SEQ ID NO: 155459 - protein, 9 aa, Artificial Sequence
  Description of Artificial Sequence: Synthetic peptide
  Seed: KAKLANVVR
KQKLANVVL

SEQ ID NO: 155460 - protein, 9 aa, Artificial Sequence
  Description of Artificial Sequence: Synthetic peptide
  Seed: KAKLANVVR
KQKLANVVM

SEQ ID NO: 155461 - protein, 9 aa, Artificial Sequence
  Description of Artificial Sequence: Synthetic peptide
  Seed: KAKLANVVR
KQKLANVVQ

SEQ ID NO: 155462 - protein, 9 aa, Artificial Sequence
  Description of Artificial Sequence: Synthetic peptide
  Seed: KAKLANVVR
KQKLANVVR

SEQ ID NO: 155463 - protein, 10 aa, Artificial Sequence
  Description of Artificial Sequence: Synthetic peptide
  Seed: KAKLANVVRK
KQKLANVVRA

SEQ ID NO: 155464 - protein, 10 aa, Artificial Sequence
  Description of Artificial Sequence: Synthetic peptide
  Seed: KAKLANVVRK
KQKLANVVRI

SEQ ID NO: 155465 - protein, 10 aa, Artificial Sequence
  Description of Artificial Sequence: Synthetic peptide
  Seed: KAKLANVVRK
KQKLANVVRK

SEQ ID NO: 155466 - protein, 10 aa, Artificial Sequence
  Description of Artificial Sequence: Synthetic peptide
  Seed: KAKLANVVRK
KQKLANVVRV

SEQ ID NO: 155467 - protein, 9 aa, Artificial Sequence
  Description of Artificial Sequence: Synthetic peptide
  Seed: KAKLANVVR
KQKLANVVS

SEQ ID NO: 155468 - protein, 9 aa, Artificial Sequence
  Description of Artificial Sequence: Synthetic peptide
  Seed: KAKLANVVR
KQKLANVVT

SEQ ID NO: 155469 - protein, 9 aa, Artificial Sequence
  Description of Artificial Sequence: Synthetic peptide
  Seed: KAKLANVVR
KQKLANVVV

SEQ ID NO: 155470 - protein, 9 aa, Artificial Sequence
  Description of Artificial Sequence: Synthetic peptide
  Seed: KAKLANVVR
KQKLANVVY

SEQ ID NO: 155471 - protein, 9 aa, Artificial Sequence
  Description of Artificial Sequence: Synthetic peptide
  Seed: KWNENQNPR
KQNENQNPK

SEQ ID NO: 155472 - protein, 9 aa, Artificial Sequence
  Description of Artificial Sequence: Synthetic peptide
  Seed: KWNENQNPR
KQNENQNPR

SEQ ID NO: 155473 - protein, 9 aa, Artificial Sequence
  Description of Artificial Sequence: Synthetic peptide
  Seed: KKAKLANVV
KRAKLANVF

SEQ ID NO: 155474 - protein, 9 aa, Artificial Sequence
  Description of Artificial Sequence: Synthetic peptide
  Seed: KKAKLANVV
KRAKLANVL

SEQ ID NO: 155475 - protein, 9 aa, Artificial Sequence
  Description of Artificial Sequence: Synthetic peptide
  Seed: KKAKLANVV
KRAKLANVM

SEQ ID NO: 155476 - protein, 10 aa, Artificial Sequence
  Description of Artificial Sequence: Synthetic peptide
  Seed: KKAKLANVVR
KRAKLANVVR

SEQ ID NO: 155477 - protein, 9 aa, Artificial Sequence
  Description of Artificial Sequence: Synthetic peptide
  Seed: KKAKLANVV
KRAKLANVY

SEQ ID NO: 155478 - protein, 9 aa, Artificial Sequence
  Description of Artificial Sequence: Synthetic peptide
  Seed: KLANVVRKM
KRANVVRKF

SEQ ID NO: 155479 - protein, 9 aa, Artificial Sequence
  Description of Artificial Sequence: Synthetic peptide
  Seed: KLANVVRKM
KRANVVRKY

SEQ ID NO: 155480 - protein, 9 aa, Artificial Sequence
  Description of Artificial Sequence: Synthetic peptide
  Seed: KMARLGKGY
KRARLGKGY

SEQ ID NO: 155481 - protein, 10 aa, Artificial Sequence
  Description of Artificial Sequence: Synthetic peptide
  Seed: KMARLGKGYM
KRARLGKGYA

SEQ ID NO: 155482 - protein, 10 aa, Artificial Sequence
  Description of Artificial Sequence: Synthetic peptide
  Seed: KMARLGKGYM
KRARLGKGYI

SEQ ID NO: 155483 - protein, 10 aa, Artificial Sequence
  Description of Artificial Sequence: Synthetic peptide
  Seed: KMARLGKGYM
KRARLGKGYK

SEQ ID NO: 155484 - protein, 10 aa, Artificial Sequence
  Description of Artificial Sequence: Synthetic peptide
  Seed: KMARLGKGYM
KRARLGKGYL

SEQ ID NO: 155485 - protein, 10 aa, Artificial Sequence
  Description of Artificial Sequence: Synthetic peptide
  Seed: KMARLGKGYM
KRARLGKGYM

SEQ ID NO: 155486 - protein, 11 aa, Artificial Sequence
  Description of Artificial Sequence: Synthetic peptide
  Seed: KMARLGKGYMF
KRARLGKGYMA

SEQ ID NO: 155487 - protein, 11 aa, Artificial Sequence
  Description of Artificial Sequence: Synthetic peptide
  Seed: KMARLGKGYMF
KRARLGKGYMF

SEQ ID NO: 155488 - protein, 11 aa, Artificial Sequence
  Description of Artificial Sequence: Synthetic peptide
  Seed: KMARLGKGYMF
KRARLGKGYMI

SEQ ID NO: 155489 - protein, 11 aa, Artificial Sequence
  Description of Artificial Sequence: Synthetic peptide
  Seed: KMARLGKGYMF
KRARLGKGYMK

SEQ ID NO: 155490 - protein, 11 aa, Artificial Sequence
  Description of Artificial Sequence: Synthetic peptide
  Seed: KMARLGKGYMF
KRARLGKGYML

SEQ ID NO: 155491 - protein, 11 aa, Artificial Sequence
  Description of Artificial Sequence: Synthetic peptide
  Seed: KMARLGKGYMF
KRARLGKGYMM

SEQ ID NO: 155492 - protein, 11 aa, Artificial Sequence
  Description of Artificial Sequence: Synthetic peptide
  Seed: KMARLGKGYMF
KRARLGKGYMR

SEQ ID NO: 155493 - protein, 11 aa, Artificial Sequence
  Description of Artificial Sequence: Synthetic peptide
  Seed: KMARLGKGYMF
KRARLGKGYMV

SEQ ID NO: 155494 - protein, 11 aa, Artificial Sequence
  Description of Artificial Sequence: Synthetic peptide
  Seed: KMARLGKGYMF
KRARLGKGYMY

SEQ ID NO: 155495 - protein, 10 aa, Artificial Sequence
  Description of Artificial Sequence: Synthetic peptide
  Seed: KMARLGKGYM
KRARLGKGYR

SEQ ID NO: 155496 - protein, 10 aa, Artificial Sequence
  Description of Artificial Sequence: Synthetic peptide
  Seed: KMARLGKGYM
KRARLGKGYV

SEQ ID NO: 155497 - protein, 10 aa, Artificial Sequence
  Description of Artificial Sequence: Synthetic peptide
  Seed: KMARLGKGYM
KRARLGKGYY

SEQ ID NO: 155498 - protein, 9 aa, Artificial Sequence
  Description of Artificial Sequence: Synthetic peptide
  Seed: KAKLANVVR
KRKLANVVK

SEQ ID NO: 155499 - protein, 9 aa, Artificial Sequence
  Description of Artificial Sequence: Synthetic peptide
  Seed: KKAKLANVV
KSAKLANVF

SEQ ID NO: 155500 - protein, 9 aa, Artificial Sequence
  Description of Artificial Sequence: Synthetic peptide
  Seed: KKAKLANVV
KSAKLANVL

SEQ ID NO: 155501 - protein, 9 aa, Artificial Sequence
  Description of Artificial Sequence: Synthetic peptide
  Seed: KKAKLANVV
KSAKLANVM

SEQ ID NO: 155502 - protein, 10 aa, Artificial Sequence
  Description of Artificial Sequence: Synthetic peptide
  Seed: KKAKLANVVR
KSAKLANVVK

SEQ ID NO: 155503 - protein, 10 aa, Artificial Sequence
  Description of Artificial Sequence: Synthetic peptide
  Seed: KKAKLANVVR
KSAKLANVVR

SEQ ID NO: 155504 - protein, 9 aa, Artificial Sequence
  Description of Artificial Sequence: Synthetic peptide
  Seed: KKAKLANVV
KSAKLANVY

SEQ ID NO: 155505 - protein, 9 aa, Artificial Sequence
  Description of Artificial Sequence: Synthetic peptide
  Seed: KLANVVRKM
KSANVVRKF

SEQ ID NO: 155506 - protein, 9 aa, Artificial Sequence
  Description of Artificial Sequence: Synthetic peptide
  Seed: KLANVVRKM
KSANVVRKI

SEQ ID NO: 155507 - protein, 9 aa, Artificial Sequence
  Description of Artificial Sequence: Synthetic peptide
  Seed: KLANVVRKM
KSANVVRKL

SEQ ID NO: 155508 - protein, 9 aa, Artificial Sequence
  Description of Artificial Sequence: Synthetic peptide
  Seed: KLANVVRKM
KSANVVRKM

SEQ ID NO: 155509 - protein, 9 aa, Artificial Sequence
  Description of Artificial Sequence: Synthetic peptide
  Seed: KLANVVRKM
KSANVVRKV

SEQ ID NO: 155510 - protein, 9 aa, Artificial Sequence
  Description of Artificial Sequence: Synthetic peptide
  Seed: KLANVVRKM
KSANVVRKW

SEQ ID NO: 155511 - protein, 9 aa, Artificial Sequence
  Description of Artificial Sequence: Synthetic peptide
  Seed: KLANVVRKM
KSANVVRKY

SEQ ID NO: 155512 - protein, 9 aa, Artificial Sequence
  Description of Artificial Sequence: Synthetic peptide
  Seed: KMARLGKGY
KSARLGKGF

SEQ ID NO: 155513 - protein, 9 aa, Artificial Sequence
  Description of Artificial Sequence: Synthetic peptide
  Seed: KMARLGKGY
KSARLGKGK

SEQ ID NO: 155514 - protein, 9 aa, Artificial Sequence
  Description of Artificial Sequence: Synthetic peptide
  Seed: KMARLGKGY
KSARLGKGY

SEQ ID NO: 155515 - protein, 10 aa, Artificial Sequence
  Description of Artificial Sequence: Synthetic peptide
  Seed: KMARLGKGYM
KSARLGKGYA

SEQ ID NO: 155516 - protein, 10 aa, Artificial Sequence
  Description of Artificial Sequence: Synthetic peptide
  Seed: KMARLGKGYM
KSARLGKGYF

SEQ ID NO: 155517 - protein, 10 aa, Artificial Sequence
  Description of Artificial Sequence: Synthetic peptide
  Seed: KMARLGKGYM
KSARLGKGYG

SEQ ID NO: 155518 - protein, 10 aa, Artificial Sequence
  Description of Artificial Sequence: Synthetic peptide
  Seed: KMARLGKGYM
KSARLGKGYI

SEQ ID NO: 155519 - protein, 10 aa, Artificial Sequence
  Description of Artificial Sequence: Synthetic peptide
  Seed: KMARLGKGYM
KSARLGKGYK

SEQ ID NO: 155520 - protein, 10 aa, Artificial Sequence
  Description of Artificial Sequence: Synthetic peptide
  Seed: KMARLGKGYM
KSARLGKGYL

SEQ ID NO: 155521 - protein, 10 aa, Artificial Sequence
  Description of Artificial Sequence: Synthetic peptide
  Seed: KMARLGKGYM
KSARLGKGYM

SEQ ID NO: 155522 - protein, 11 aa, Artificial Sequence
  Description of Artificial Sequence: Synthetic peptide
  Seed: KMARLGKGYMF
KSARLGKGYMF

SEQ ID NO: 155523 - protein, 11 aa, Artificial Sequence
  Description of Artificial Sequence: Synthetic peptide
  Seed: KMARLGKGYMF
KSARLGKGYMI

SEQ ID NO: 155524 - protein, 11 aa, Artificial Sequence
  Description of Artificial Sequence: Synthetic peptide
  Seed: KMARLGKGYMF
KSARLGKGYMK

SEQ ID NO: 155525 - protein, 11 aa, Artificial Sequence
  Description of Artificial Sequence: Synthetic peptide
  Seed: KMARLGKGYMF
KSARLGKGYML

SEQ ID NO: 155526 - protein, 11 aa, Artificial Sequence
  Description of Artificial Sequence: Synthetic peptide
  Seed: KMARLGKGYMF
KSARLGKGYMM

SEQ ID NO: 155527 - protein, 11 aa, Artificial Sequence
  Description of Artificial Sequence: Synthetic peptide
  Seed: KMARLGKGYMF
KSARLGKGYMV

SEQ ID NO: 155528 - protein, 10 aa, Artificial Sequence
  Description of Artificial Sequence: Synthetic peptide
  Seed: KMARLGKGYM
KSARLGKGYR

SEQ ID NO: 155529 - protein, 10 aa, Artificial Sequence
  Description of Artificial Sequence: Synthetic peptide
  Seed: KMARLGKGYM
KSARLGKGYS

SEQ ID NO: 155530 - protein, 10 aa, Artificial Sequence
  Description of Artificial Sequence: Synthetic peptide
  Seed: KMARLGKGYM
KSARLGKGYT

SEQ ID NO: 155531 - protein, 10 aa, Artificial Sequence
  Description of Artificial Sequence: Synthetic peptide
  Seed: KMARLGKGYM
KSARLGKGYV

SEQ ID NO: 155532 - protein, 10 aa, Artificial Sequence
  Description of Artificial Sequence: Synthetic peptide
  Seed: KMARLGKGYM
KSARLGKGYY

SEQ ID NO: 155533 - protein, 9 aa, Artificial Sequence
  Description of Artificial Sequence: Synthetic peptide
  Seed: KAKLANVVR
KSKLANVVA

SEQ ID NO: 155534 - protein, 9 aa, Artificial Sequence
  Description of Artificial Sequence: Synthetic peptide
  Seed: KAKLANVVR
KSKLANVVC

SEQ ID NO: 155535 - protein, 9 aa, Artificial Sequence
  Description of Artificial Sequence: Synthetic peptide
  Seed: KAKLANVVR
KSKLANVVE

SEQ ID NO: 155536 - protein, 9 aa, Artificial Sequence
  Description of Artificial Sequence: Synthetic peptide
  Seed: KAKLANVVR
KSKLANVVF

SEQ ID NO: 155537 - protein, 9 aa, Artificial Sequence
  Description of Artificial Sequence: Synthetic peptide
  Seed: KAKLANVVR
KSKLANVVG

SEQ ID NO: 155538 - protein, 9 aa, Artificial Sequence
  Description of Artificial Sequence: Synthetic peptide
  Seed: KAKLANVVR
KSKLANVVH

SEQ ID NO: 155539 - protein, 9 aa, Artificial Sequence
  Description of Artificial Sequence: Synthetic peptide
  Seed: KAKLANVVR
KSKLANVVI

SEQ ID NO: 155540 - protein, 9 aa, Artificial Sequence
  Description of Artificial Sequence: Synthetic peptide
  Seed: KAKLANVVR
KSKLANVVK

SEQ ID NO: 155541 - protein, 9 aa, Artificial Sequence
  Description of Artificial Sequence: Synthetic peptide
  Seed: KAKLANVVR
KSKLANVVL

SEQ ID NO: 155542 - protein, 9 aa, Artificial Sequence
  Description of Artificial Sequence: Synthetic peptide
  Seed: KAKLANVVR
KSKLANVVM

SEQ ID NO: 155543 - protein, 9 aa, Artificial Sequence
  Description of Artificial Sequence: Synthetic peptide
  Seed: KAKLANVVR
KSKLANVVN

SEQ ID NO: 155544 - protein, 9 aa, Artificial Sequence
  Description of Artificial Sequence: Synthetic peptide
  Seed: KAKLANVVR
KSKLANVVP

SEQ ID NO: 155545 - protein, 9 aa, Artificial Sequence
  Description of Artificial Sequence: Synthetic peptide
  Seed: KAKLANVVR
KSKLANVVQ

SEQ ID NO: 155546 - protein, 9 aa, Artificial Sequence
  Description of Artificial Sequence: Synthetic peptide
  Seed: KAKLANVVR
KSKLANVVR

SEQ ID NO: 155547 - protein, 10 aa, Artificial Sequence
  Description of Artificial Sequence: Synthetic peptide
  Seed: KAKLANVVRK
KSKLANVVRA

SEQ ID NO: 155548 - protein, 10 aa, Artificial Sequence
  Description of Artificial Sequence: Synthetic peptide
  Seed: KAKLANVVRK
KSKLANVVRC

SEQ ID NO: 155549 - protein, 10 aa, Artificial Sequence
  Description of Artificial Sequence: Synthetic peptide
  Seed: KAKLANVVRK
KSKLANVVRF

SEQ ID NO: 155550 - protein, 10 aa, Artificial Sequence
  Description of Artificial Sequence: Synthetic peptide
  Seed: KAKLANVVRK
KSKLANVVRG

SEQ ID NO: 155551 - protein, 10 aa, Artificial Sequence
  Description of Artificial Sequence: Synthetic peptide
  Seed: KAKLANVVRK
KSKLANVVRH

SEQ ID NO: 155552 - protein, 10 aa, Artificial Sequence
  Description of Artificial Sequence: Synthetic peptide
  Seed: KAKLANVVRK
KSKLANVVRI

SEQ ID NO: 155553 - protein, 10 aa, Artificial Sequence
  Description of Artificial Sequence: Synthetic peptide
  Seed: KAKLANVVRK
KSKLANVVRK

SEQ ID NO: 155554 - protein, 10 aa, Artificial Sequence
  Description of Artificial Sequence: Synthetic peptide
  Seed: KAKLANVVRK
KSKLANVVRL

SEQ ID NO: 155555 - protein, 10 aa, Artificial Sequence
  Description of Artificial Sequence: Synthetic peptide
  Seed: KAKLANVVRK
KSKLANVVRM

SEQ ID NO: 155556 - protein, 10 aa, Artificial Sequence
  Description of Artificial Sequence: Synthetic peptide
  Seed: KAKLANVVRK
KSKLANVVRQ

SEQ ID NO: 155557 - protein, 10 aa, Artificial Sequence
  Description of Artificial Sequence: Synthetic peptide
  Seed: KAKLANVVRK
KSKLANVVRR

SEQ ID NO: 155558 - protein, 10 aa, Artificial Sequence
  Description of Artificial Sequence: Synthetic peptide
  Seed: KAKLANVVRK
KSKLANVVRS

SEQ ID NO: 155559 - protein, 10 aa, Artificial Sequence
  Description of Artificial Sequence: Synthetic peptide
  Seed: KAKLANVVRK
KSKLANVVRT

SEQ ID NO: 155560 - protein, 10 aa, Artificial Sequence
  Description of Artificial Sequence: Synthetic peptide
  Seed: KAKLANVVRK
KSKLANVVRV

SEQ ID NO: 155561 - protein, 10 aa, Artificial Sequence
  Description of Artificial Sequence: Synthetic peptide
  Seed: KAKLANVVRK
KSKLANVVRY

SEQ ID NO: 155562 - protein, 9 aa, Artificial Sequence
  Description of Artificial Sequence: Synthetic peptide
  Seed: KAKLANVVR
KSKLANVVS

SEQ ID NO: 155563 - protein, 9 aa, Artificial Sequence
  Description of Artificial Sequence: Synthetic peptide
  Seed: KAKLANVVR
KSKLANVVT

SEQ ID NO: 155564 - protein, 9 aa, Artificial Sequence
  Description of Artificial Sequence: Synthetic peptide
  Seed: KAKLANVVR
KSKLANVVV

SEQ ID NO: 155565 - protein, 9 aa, Artificial Sequence
  Description of Artificial Sequence: Synthetic peptide
  Seed: KAKLANVVR
KSKLANVVY

SEQ ID NO: 155566 - protein, 9 aa, Artificial Sequence
  Description of Artificial Sequence: Synthetic peptide
  Seed: KWNENQNPR
KSNENQNPK

SEQ ID NO: 155567 - protein, 9 aa, Artificial Sequence
  Description of Artificial Sequence: Synthetic peptide
  Seed: KWNENQNPR
KSNENQNPR

SEQ ID NO: 155568 - protein, 9 aa, Artificial Sequence
  Description of Artificial Sequence: Synthetic peptide
  Seed: KKAKLANVV
KTAKLANVF

SEQ ID NO: 155569 - protein, 9 aa, Artificial Sequence
  Description of Artificial Sequence: Synthetic peptide
  Seed: KKAKLANVV
KTAKLANVM

SEQ ID NO: 155570 - protein, 10 aa, Artificial Sequence
  Description of Artificial Sequence: Synthetic peptide
  Seed: KKAKLANVVR
KTAKLANVVK

SEQ ID NO: 155571 - protein, 10 aa, Artificial Sequence
  Description of Artificial Sequence: Synthetic peptide
  Seed: KKAKLANVVR
KTAKLANVVR

SEQ ID NO: 155572 - protein, 9 aa, Artificial Sequence
  Description of Artificial Sequence: Synthetic peptide
  Seed: KKAKLANVV
KTAKLANVY

SEQ ID NO: 155573 - protein, 9 aa, Artificial Sequence
  Description of Artificial Sequence: Synthetic peptide
  Seed: KLANVVRKM
KTANVVRKF

SEQ ID NO: 155574 - protein, 9 aa, Artificial Sequence
  Description of Artificial Sequence: Synthetic peptide
  Seed: KLANVVRKM
KTANVVRKI

SEQ ID NO: 155575 - protein, 9 aa, Artificial Sequence
  Description of Artificial Sequence: Synthetic peptide
  Seed: KLANVVRKM
KTANVVRKL

SEQ ID NO: 155576 - protein, 9 aa, Artificial Sequence
  Description of Artificial Sequence: Synthetic peptide
  Seed: KLANVVRKM
KTANVVRKM

SEQ ID NO: 155577 - protein, 9 aa, Artificial Sequence
  Description of Artificial Sequence: Synthetic peptide
  Seed: KLANVVRKM
KTANVVRKV

SEQ ID NO: 155578 - protein, 9 aa, Artificial Sequence
  Description of Artificial Sequence: Synthetic peptide
  Seed: KLANVVRKM
KTANVVRKW

SEQ ID NO: 155579 - protein, 9 aa, Artificial Sequence
  Description of Artificial Sequence: Synthetic peptide
  Seed: KLANVVRKM
KTANVVRKY

SEQ ID NO: 155580 - protein, 9 aa, Artificial Sequence
  Description of Artificial Sequence: Synthetic peptide
  Seed: KMARLGKGY
KTARLGKGK

SEQ ID NO: 155581 - protein, 9 aa, Artificial Sequence
  Description of Artificial Sequence: Synthetic peptide
  Seed: KMARLGKGY
KTARLGKGY

SEQ ID NO: 155582 - protein, 10 aa, Artificial Sequence
  Description of Artificial Sequence: Synthetic peptide
  Seed: KMARLGKGYM
KTARLGKGYA

SEQ ID NO: 155583 - protein, 10 aa, Artificial Sequence
  Description of Artificial Sequence: Synthetic peptide
  Seed: KMARLGKGYM
KTARLGKGYC

SEQ ID NO: 155584 - protein, 10 aa, Artificial Sequence
  Description of Artificial Sequence: Synthetic peptide
  Seed: KMARLGKGYM
KTARLGKGYE

SEQ ID NO: 155585 - protein, 10 aa, Artificial Sequence
  Description of Artificial Sequence: Synthetic peptide
  Seed: KMARLGKGYM
KTARLGKGYF

SEQ ID NO: 155586 - protein, 10 aa, Artificial Sequence
  Description of Artificial Sequence: Synthetic peptide
  Seed: KMARLGKGYM
KTARLGKGYG

SEQ ID NO: 155587 - protein, 10 aa, Artificial Sequence
  Description of Artificial Sequence: Synthetic peptide
  Seed: KMARLGKGYM
KTARLGKGYH

SEQ ID NO: 155588 - protein, 10 aa, Artificial Sequence
  Description of Artificial Sequence: Synthetic peptide
  Seed: KMARLGKGYM
KTARLGKGYI

SEQ ID NO: 155589 - protein, 10 aa, Artificial Sequence
  Description of Artificial Sequence: Synthetic peptide
  Seed: KMARLGKGYM
KTARLGKGYK

SEQ ID NO: 155590 - protein, 10 aa, Artificial Sequence
  Description of Artificial Sequence: Synthetic peptide
  Seed: KMARLGKGYM
KTARLGKGYL

SEQ ID NO: 155591 - protein, 10 aa, Artificial Sequence
  Description of Artificial Sequence: Synthetic peptide
  Seed: KMARLGKGYM
KTARLGKGYM

SEQ ID NO: 155592 - protein, 11 aa, Artificial Sequence
  Description of Artificial Sequence: Synthetic peptide
  Seed: KMARLGKGYMF
KTARLGKGYMF

SEQ ID NO: 155593 - protein, 11 aa, Artificial Sequence
  Description of Artificial Sequence: Synthetic peptide
  Seed: KMARLGKGYMF
KTARLGKGYMI

SEQ ID NO: 155594 - protein, 11 aa, Artificial Sequence
  Description of Artificial Sequence: Synthetic peptide
  Seed: KMARLGKGYMF
KTARLGKGYMK

SEQ ID NO: 155595 - protein, 11 aa, Artificial Sequence
  Description of Artificial Sequence: Synthetic peptide
  Seed: KMARLGKGYMF
KTARLGKGYML

SEQ ID NO: 155596 - protein, 11 aa, Artificial Sequence
  Description of Artificial Sequence: Synthetic peptide
  Seed: KMARLGKGYMF
KTARLGKGYMM

SEQ ID NO: 155597 - protein, 11 aa, Artificial Sequence
  Description of Artificial Sequence: Synthetic peptide
  Seed: KMARLGKGYMF
KTARLGKGYMV

SEQ ID NO: 155598 - protein, 11 aa, Artificial Sequence
  Description of Artificial Sequence: Synthetic peptide
  Seed: KMARLGKGYMF
KTARLGKGYMW

SEQ ID NO: 155599 - protein, 10 aa, Artificial Sequence
  Description of Artificial Sequence: Synthetic peptide
  Seed: KMARLGKGYM
KTARLGKGYP

SEQ ID NO: 155600 - protein, 10 aa, Artificial Sequence
  Description of Artificial Sequence: Synthetic peptide
  Seed: KMARLGKGYM
KTARLGKGYQ

SEQ ID NO: 155601 - protein, 10 aa, Artificial Sequence
  Description of Artificial Sequence: Synthetic peptide
  Seed: KMARLGKGYM
KTARLGKGYR

SEQ ID NO: 155602 - protein, 10 aa, Artificial Sequence
  Description of Artificial Sequence: Synthetic peptide
  Seed: KMARLGKGYM
KTARLGKGYS

SEQ ID NO: 155603 - protein, 10 aa, Artificial Sequence
  Description of Artificial Sequence: Synthetic peptide
  Seed: KMARLGKGYM
KTARLGKGYT

SEQ ID NO: 155604 - protein, 10 aa, Artificial Sequence
  Description of Artificial Sequence: Synthetic peptide
  Seed: KMARLGKGYM
KTARLGKGYV

SEQ ID NO: 155605 - protein, 10 aa, Artificial Sequence
  Description of Artificial Sequence: Synthetic peptide
  Seed: KMARLGKGYM
KTARLGKGYY

SEQ ID NO: 155606 - protein, 9 aa, Artificial Sequence
  Description of Artificial Sequence: Synthetic peptide
  Seed: KAKLANVVR
KTKLANVVA

SEQ ID NO: 155607 - protein, 9 aa, Artificial Sequence
  Description of Artificial Sequence: Synthetic peptide
  Seed: KAKLANVVR
KTKLANVVC

SEQ ID NO: 155608 - protein, 9 aa, Artificial Sequence
  Description of Artificial Sequence: Synthetic peptide
  Seed: KAKLANVVR
KTKLANVVD

SEQ ID NO: 155609 - protein, 9 aa, Artificial Sequence
  Description of Artificial Sequence: Synthetic peptide
  Seed: KAKLANVVR
KTKLANVVE

SEQ ID NO: 155610 - protein, 9 aa, Artificial Sequence
  Description of Artificial Sequence: Synthetic peptide
  Seed: KAKLANVVR
KTKLANVVF

SEQ ID NO: 155611 - protein, 9 aa, Artificial Sequence
  Description of Artificial Sequence: Synthetic peptide
  Seed: KAKLANVVR
KTKLANVVG

SEQ ID NO: 155612 - protein, 9 aa, Artificial Sequence
  Description of Artificial Sequence: Synthetic peptide
  Seed: KAKLANVVR
KTKLANVVH

SEQ ID NO: 155613 - protein, 9 aa, Artificial Sequence
  Description of Artificial Sequence: Synthetic peptide
  Seed: KAKLANVVR
KTKLANVVI

SEQ ID NO: 155614 - protein, 9 aa, Artificial Sequence
  Description of Artificial Sequence: Synthetic peptide
  Seed: KAKLANVVR
KTKLANVVK

SEQ ID NO: 155615 - protein, 9 aa, Artificial Sequence
  Description of Artificial Sequence: Synthetic peptide
  Seed: KAKLANVVR
KTKLANVVL

SEQ ID NO: 155616 - protein, 9 aa, Artificial Sequence
  Description of Artificial Sequence: Synthetic peptide
  Seed: KAKLANVVR
KTKLANVVM

SEQ ID NO: 155617 - protein, 9 aa, Artificial Sequence
  Description of Artificial Sequence: Synthetic peptide
  Seed: KAKLANVVR
KTKLANVVN

SEQ ID NO: 155618 - protein, 9 aa, Artificial Sequence
  Description of Artificial Sequence: Synthetic peptide
  Seed: KAKLANVVR
KTKLANVVP

SEQ ID NO: 155619 - protein, 9 aa, Artificial Sequence
  Description of Artificial Sequence: Synthetic peptide
  Seed: KAKLANVVR
KTKLANVVQ

SEQ ID NO: 155620 - protein, 9 aa, Artificial Sequence
  Description of Artificial Sequence: Synthetic peptide
  Seed: KAKLANVVR
KTKLANVVR

SEQ ID NO: 155621 - protein, 10 aa, Artificial Sequence
  Description of Artificial Sequence: Synthetic peptide
  Seed: KAKLANVVRK
KTKLANVVRA

SEQ ID NO: 155622 - protein, 10 aa, Artificial Sequence
  Description of Artificial Sequence: Synthetic peptide
  Seed: KAKLANVVRK
KTKLANVVRC

SEQ ID NO: 155623 - protein, 10 aa, Artificial Sequence
  Description of Artificial Sequence: Synthetic peptide
  Seed: KAKLANVVRK
KTKLANVVRE

SEQ ID NO: 155624 - protein, 10 aa, Artificial Sequence
  Description of Artificial Sequence: Synthetic peptide
  Seed: KAKLANVVRK
KTKLANVVRF

SEQ ID NO: 155625 - protein, 10 aa, Artificial Sequence
  Description of Artificial Sequence: Synthetic peptide
  Seed: KAKLANVVRK
KTKLANVVRG

SEQ ID NO: 155626 - protein, 10 aa, Artificial Sequence
  Description of Artificial Sequence: Synthetic peptide
  Seed: KAKLANVVRK
KTKLANVVRH

SEQ ID NO: 155627 - protein, 10 aa, Artificial Sequence
  Description of Artificial Sequence: Synthetic peptide
  Seed: KAKLANVVRK
KTKLANVVRI

SEQ ID NO: 155628 - protein, 10 aa, Artificial Sequence
  Description of Artificial Sequence: Synthetic peptide
  Seed: KAKLANVVRK
KTKLANVVRK

SEQ ID NO: 155629 - protein, 10 aa, Artificial Sequence
  Description of Artificial Sequence: Synthetic peptide
  Seed: KAKLANVVRK
KTKLANVVRL

SEQ ID NO: 155630 - protein, 10 aa, Artificial Sequence
  Description of Artificial Sequence: Synthetic peptide
  Seed: KAKLANVVRK
KTKLANVVRM

SEQ ID NO: 155631 - protein, 10 aa, Artificial Sequence
  Description of Artificial Sequence: Synthetic peptide
  Seed: KAKLANVVRK
KTKLANVVRN

SEQ ID NO: 155632 - protein, 10 aa, Artificial Sequence
  Description of Artificial Sequence: Synthetic peptide
  Seed: KAKLANVVRK
KTKLANVVRP

SEQ ID NO: 155633 - protein, 10 aa, Artificial Sequence
  Description of Artificial Sequence: Synthetic peptide
  Seed: KAKLANVVRK
KTKLANVVRQ

SEQ ID NO: 155634 - protein, 10 aa, Artificial Sequence
  Description of Artificial Sequence: Synthetic peptide
  Seed: KAKLANVVRK
KTKLANVVRR

SEQ ID NO: 155635 - protein, 10 aa, Artificial Sequence
  Description of Artificial Sequence: Synthetic peptide
  Seed: KAKLANVVRK
KTKLANVVRS

SEQ ID NO: 155636 - protein, 10 aa, Artificial Sequence
  Description of Artificial Sequence: Synthetic peptide
  Seed: KAKLANVVRK
KTKLANVVRT

SEQ ID NO: 155637 - protein, 10 aa, Artificial Sequence
  Description of Artificial Sequence: Synthetic peptide
  Seed: KAKLANVVRK
KTKLANVVRV

SEQ ID NO: 155638 - protein, 10 aa, Artificial Sequence
  Description of Artificial Sequence: Synthetic peptide
  Seed: KAKLANVVRK
KTKLANVVRY

SEQ ID NO: 155639 - protein, 9 aa, Artificial Sequence
  Description of Artificial Sequence: Synthetic peptide
  Seed: KAKLANVVR
KTKLANVVS

SEQ ID NO: 155640 - protein, 9 aa, Artificial Sequence
  Description of Artificial Sequence: Synthetic peptide
  Seed: KAKLANVVR
KTKLANVVT

SEQ ID NO: 155641 - protein, 9 aa, Artificial Sequence
  Description of Artificial Sequence: Synthetic peptide
  Seed: KAKLANVVR
KTKLANVVV

SEQ ID NO: 155642 - protein, 9 aa, Artificial Sequence
  Description of Artificial Sequence: Synthetic peptide
  Seed: KAKLANVVR
KTKLANVVW

SEQ ID NO: 155643 - protein, 9 aa, Artificial Sequence
  Description of Artificial Sequence: Synthetic peptide
  Seed: KAKLANVVR
KTKLANVVY

SEQ ID NO: 155644 - protein, 9 aa, Artificial Sequence
  Description of Artificial Sequence: Synthetic peptide
  Seed: KWNENQNPR
KTNENQNPK

SEQ ID NO: 155645 - protein, 9 aa, Artificial Sequence
  Description of Artificial Sequence: Synthetic peptide
  Seed: KWNENQNPR
KTNENQNPR

SEQ ID NO: 155646 - protein, 9 aa, Artificial Sequence
  Description of Artificial Sequence: Synthetic peptide
  Seed: KKAKLANVV
KVAKLANVF

SEQ ID NO: 155647 - protein, 9 aa, Artificial Sequence
  Description of Artificial Sequence: Synthetic peptide
  Seed: KKAKLANVV
KVAKLANVM

SEQ ID NO: 155648 - protein, 10 aa, Artificial Sequence
  Description of Artificial Sequence: Synthetic peptide
  Seed: KKAKLANVVR
KVAKLANVVK

SEQ ID NO: 155649 - protein, 10 aa, Artificial Sequence
  Description of Artificial Sequence: Synthetic peptide
  Seed: KKAKLANVVR
KVAKLANVVR

SEQ ID NO: 155650 - protein, 9 aa, Artificial Sequence
  Description of Artificial Sequence: Synthetic peptide
  Seed: KKAKLANVV
KVAKLANVY

SEQ ID NO: 155651 - protein, 9 aa, Artificial Sequence
  Description of Artificial Sequence: Synthetic peptide
  Seed: KLANVVRKM
KVANVVRKA

SEQ ID NO: 155652 - protein, 9 aa, Artificial Sequence
  Description of Artificial Sequence: Synthetic peptide
  Seed: KLANVVRKM
KVANVVRKF

SEQ ID NO: 155653 - protein, 9 aa, Artificial Sequence
  Description of Artificial Sequence: Synthetic peptide
  Seed: KLANVVRKM
KVANVVRKI

SEQ ID NO: 155654 - protein, 9 aa, Artificial Sequence
  Description of Artificial Sequence: Synthetic peptide
  Seed: KLANVVRKM
KVANVVRKL

SEQ ID NO: 155655 - protein, 9 aa, Artificial Sequence
  Description of Artificial Sequence: Synthetic peptide
  Seed: KLANVVRKM
KVANVVRKM

SEQ ID NO: 155656 - protein, 10 aa, Artificial Sequence
  Description of Artificial Sequence: Synthetic peptide
  Seed: KLANVVRKMM
KVANVVRKMV

SEQ ID NO: 155657 - protein, 9 aa, Artificial Sequence
  Description of Artificial Sequence: Synthetic peptide
  Seed: KLANVVRKM
KVANVVRKV

SEQ ID NO: 155658 - protein, 9 aa, Artificial Sequence
  Description of Artificial Sequence: Synthetic peptide
  Seed: KLANVVRKM
KVANVVRKW

SEQ ID NO: 155659 - protein, 9 aa, Artificial Sequence
  Description of Artificial Sequence: Synthetic peptide
  Seed: KLANVVRKM
KVANVVRKY

SEQ ID NO: 155660 - protein, 9 aa, Artificial Sequence
  Description of Artificial Sequence: Synthetic peptide
  Seed: KMARLGKGY
KVARLGKGF

SEQ ID NO: 155661 - protein, 9 aa, Artificial Sequence
  Description of Artificial Sequence: Synthetic peptide
  Seed: KMARLGKGY
KVARLGKGK

SEQ ID NO: 155662 - protein, 9 aa, Artificial Sequence
  Description of Artificial Sequence: Synthetic peptide
  Seed: KMARLGKGY
KVARLGKGY

SEQ ID NO: 155663 - protein, 10 aa, Artificial Sequence
  Description of Artificial Sequence: Synthetic peptide
  Seed: KMARLGKGYM
KVARLGKGYA

SEQ ID NO: 155664 - protein, 10 aa, Artificial Sequence
  Description of Artificial Sequence: Synthetic peptide
  Seed: KMARLGKGYM
KVARLGKGYF

SEQ ID NO: 155665 - protein, 10 aa, Artificial Sequence
  Description of Artificial Sequence: Synthetic peptide
  Seed: KMARLGKGYM
KVARLGKGYG

SEQ ID NO: 155666 - protein, 10 aa, Artificial Sequence
  Description of Artificial Sequence: Synthetic peptide
  Seed: KMARLGKGYM
KVARLGKGYI

SEQ ID NO: 155667 - protein, 10 aa, Artificial Sequence
  Description of Artificial Sequence: Synthetic peptide
  Seed: KMARLGKGYM
KVARLGKGYK

SEQ ID NO: 155668 - protein, 10 aa, Artificial Sequence
  Description of Artificial Sequence: Synthetic peptide
  Seed: KMARLGKGYM
KVARLGKGYL

SEQ ID NO: 155669 - protein, 10 aa, Artificial Sequence
  Description of Artificial Sequence: Synthetic peptide
  Seed: KMARLGKGYM
KVARLGKGYM

SEQ ID NO: 155670 - protein, 11 aa, Artificial Sequence
  Description of Artificial Sequence: Synthetic peptide
  Seed: KMARLGKGYMF
KVARLGKGYMF

SEQ ID NO: 155671 - protein, 11 aa, Artificial Sequence
  Description of Artificial Sequence: Synthetic peptide
  Seed: KMARLGKGYMF
KVARLGKGYMI

SEQ ID NO: 155672 - protein, 11 aa, Artificial Sequence
  Description of Artificial Sequence: Synthetic peptide
  Seed: KMARLGKGYMF
KVARLGKGYMK

SEQ ID NO: 155673 - protein, 11 aa, Artificial Sequence
  Description of Artificial Sequence: Synthetic peptide
  Seed: KMARLGKGYMF
KVARLGKGYML

SEQ ID NO: 155674 - protein, 11 aa, Artificial Sequence
  Description of Artificial Sequence: Synthetic peptide
  Seed: KMARLGKGYMF
KVARLGKGYMM

SEQ ID NO: 155675 - protein, 11 aa, Artificial Sequence
  Description of Artificial Sequence: Synthetic peptide
  Seed: KMARLGKGYMF
KVARLGKGYMV

SEQ ID NO: 155676 - protein, 11 aa, Artificial Sequence
  Description of Artificial Sequence: Synthetic peptide
  Seed: KMARLGKGYMF
KVARLGKGYMW

SEQ ID NO: 155677 - protein, 10 aa, Artificial Sequence
  Description of Artificial Sequence: Synthetic peptide
  Seed: KMARLGKGYM
KVARLGKGYR

SEQ ID NO: 155678 - protein, 10 aa, Artificial Sequence
  Description of Artificial Sequence: Synthetic peptide
  Seed: KMARLGKGYM
KVARLGKGYS

SEQ ID NO: 155679 - protein, 10 aa, Artificial Sequence
  Description of Artificial Sequence: Synthetic peptide
  Seed: KMARLGKGYM
KVARLGKGYT

SEQ ID NO: 155680 - protein, 10 aa, Artificial Sequence
  Description of Artificial Sequence: Synthetic peptide
  Seed: KMARLGKGYM
KVARLGKGYV

SEQ ID NO: 155681 - protein, 10 aa, Artificial Sequence
  Description of Artificial Sequence: Synthetic peptide
  Seed: KMARLGKGYM
KVARLGKGYY

SEQ ID NO: 155682 - protein, 9 aa, Artificial Sequence
  Description of Artificial Sequence: Synthetic peptide
  Seed: KAKLANVVR
KVKLANVVA

SEQ ID NO: 155683 - protein, 9 aa, Artificial Sequence
  Description of Artificial Sequence: Synthetic peptide
  Seed: KAKLANVVR
KVKLANVVC

SEQ ID NO: 155684 - protein, 9 aa, Artificial Sequence
  Description of Artificial Sequence: Synthetic peptide
  Seed: KAKLANVVR
KVKLANVVD

SEQ ID NO: 155685 - protein, 9 aa, Artificial Sequence
  Description of Artificial Sequence: Synthetic peptide
  Seed: KAKLANVVR
KVKLANVVE

SEQ ID NO: 155686 - protein, 9 aa, Artificial Sequence
  Description of Artificial Sequence: Synthetic peptide
  Seed: KAKLANVVR
KVKLANVVF

SEQ ID NO: 155687 - protein, 9 aa, Artificial Sequence
  Description of Artificial Sequence: Synthetic peptide
  Seed: KAKLANVVR
KVKLANVVG

SEQ ID NO: 155688 - protein, 9 aa, Artificial Sequence
  Description of Artificial Sequence: Synthetic peptide
  Seed: KAKLANVVR
KVKLANVVH

SEQ ID NO: 155689 - protein, 9 aa, Artificial Sequence
  Description of Artificial Sequence: Synthetic peptide
  Seed: KAKLANVVR
KVKLANVVI

SEQ ID NO: 155690 - protein, 9 aa, Artificial Sequence
  Description of Artificial Sequence: Synthetic peptide
  Seed: KAKLANVVR
KVKLANVVK

SEQ ID NO: 155691 - protein, 9 aa, Artificial Sequence
  Description of Artificial Sequence: Synthetic peptide
  Seed: KAKLANVVR
KVKLANVVL

SEQ ID NO: 155692 - protein, 9 aa, Artificial Sequence
  Description of Artificial Sequence: Synthetic peptide
  Seed: KAKLANVVR
KVKLANVVM

SEQ ID NO: 155693 - protein, 9 aa, Artificial Sequence
  Description of Artificial Sequence: Synthetic peptide
  Seed: KAKLANVVR
KVKLANVVN

SEQ ID NO: 155694 - protein, 9 aa, Artificial Sequence
  Description of Artificial Sequence: Synthetic peptide
  Seed: KAKLANVVR
KVKLANVVP

SEQ ID NO: 155695 - protein, 9 aa, Artificial Sequence
  Description of Artificial Sequence: Synthetic peptide
  Seed: KAKLANVVR
KVKLANVVQ

SEQ ID NO: 155696 - protein, 9 aa, Artificial Sequence
  Description of Artificial Sequence: Synthetic peptide
  Seed: KAKLANVVR
KVKLANVVR

SEQ ID NO: 155697 - protein, 10 aa, Artificial Sequence
  Description of Artificial Sequence: Synthetic peptide
  Seed: KAKLANVVRK
KVKLANVVRA

SEQ ID NO: 155698 - protein, 10 aa, Artificial Sequence
  Description of Artificial Sequence: Synthetic peptide
  Seed: KAKLANVVRK
KVKLANVVRC

SEQ ID NO: 155699 - protein, 10 aa, Artificial Sequence
  Description of Artificial Sequence: Synthetic peptide
  Seed: KAKLANVVRK
KVKLANVVRF

SEQ ID NO: 155700 - protein, 10 aa, Artificial Sequence
  Description of Artificial Sequence: Synthetic peptide
  Seed: KAKLANVVRK
KVKLANVVRG

SEQ ID NO: 155701 - protein, 10 aa, Artificial Sequence
  Description of Artificial Sequence: Synthetic peptide
  Seed: KAKLANVVRK
KVKLANVVRI

SEQ ID NO: 155702 - protein, 10 aa, Artificial Sequence
  Description of Artificial Sequence: Synthetic peptide
  Seed: KAKLANVVRK
KVKLANVVRK

SEQ ID NO: 155703 - protein, 10 aa, Artificial Sequence
  Description of Artificial Sequence: Synthetic peptide
  Seed: KAKLANVVRK
KVKLANVVRL

SEQ ID NO: 155704 - protein, 10 aa, Artificial Sequence
  Description of Artificial Sequence: Synthetic peptide
  Seed: KAKLANVVRK
KVKLANVVRM

SEQ ID NO: 155705 - protein, 10 aa, Artificial Sequence
  Description of Artificial Sequence: Synthetic peptide
  Seed: KAKLANVVRK
KVKLANVVRR

SEQ ID NO: 155706 - protein, 10 aa, Artificial Sequence
  Description of Artificial Sequence: Synthetic peptide
  Seed: KAKLANVVRK
KVKLANVVRS

SEQ ID NO: 155707 - protein, 10 aa, Artificial Sequence
  Description of Artificial Sequence: Synthetic peptide
  Seed: KAKLANVVRK
KVKLANVVRT

SEQ ID NO: 155708 - protein, 10 aa, Artificial Sequence
  Description of Artificial Sequence: Synthetic peptide
  Seed: KAKLANVVRK
KVKLANVVRV

SEQ ID NO: 155709 - protein, 10 aa, Artificial Sequence
  Description of Artificial Sequence: Synthetic peptide
  Seed: KAKLANVVRK
KVKLANVVRY

SEQ ID NO: 155710 - protein, 9 aa, Artificial Sequence
  Description of Artificial Sequence: Synthetic peptide
  Seed: KAKLANVVR
KVKLANVVS

SEQ ID NO: 155711 - protein, 9 aa, Artificial Sequence
  Description of Artificial Sequence: Synthetic peptide
  Seed: KAKLANVVR
KVKLANVVT

SEQ ID NO: 155712 - protein, 9 aa, Artificial Sequence
  Description of Artificial Sequence: Synthetic peptide
  Seed: KAKLANVVR
KVKLANVVV

SEQ ID NO: 155713 - protein, 9 aa, Artificial Sequence
  Description of Artificial Sequence: Synthetic peptide
  Seed: KAKLANVVR
KVKLANVVY

SEQ ID NO: 155714 - protein, 9 aa, Artificial Sequence
  Description of Artificial Sequence: Synthetic peptide
  Seed: KWNENQNPR
KVNENQNPK

SEQ ID NO: 155715 - protein, 9 aa, Artificial Sequence
  Description of Artificial Sequence: Synthetic peptide
  Seed: KWNENQNPR
KVNENQNPR

SEQ ID NO: 155716 - protein, 9 aa, Artificial Sequence
  Description of Artificial Sequence: Synthetic peptide
  Seed: KKAKLANVV
KWAKLANVF

SEQ ID NO: 155717 - protein, 10 aa, Artificial Sequence
  Description of Artificial Sequence: Synthetic peptide
  Seed: KKAKLANVVR
KWAKLANVVK

SEQ ID NO: 155718 - protein, 10 aa, Artificial Sequence
  Description of Artificial Sequence: Synthetic peptide
  Seed: KKAKLANVVR
KWAKLANVVR

SEQ ID NO: 155719 - protein, 9 aa, Artificial Sequence
  Description of Artificial Sequence: Synthetic peptide
  Seed: KMARLGKGY
KWARLGKGY

SEQ ID NO: 155720 - protein, 10 aa, Artificial Sequence
  Description of Artificial Sequence: Synthetic peptide
  Seed: KMARLGKGYM
KWARLGKGYA

SEQ ID NO: 155721 - protein, 10 aa, Artificial Sequence
  Description of Artificial Sequence: Synthetic peptide
  Seed: KMARLGKGYM
KWARLGKGYI

SEQ ID NO: 155722 - protein, 10 aa, Artificial Sequence
  Description of Artificial Sequence: Synthetic peptide
  Seed: KMARLGKGYM
KWARLGKGYK

SEQ ID NO: 155723 - protein, 10 aa, Artificial Sequence
  Description of Artificial Sequence: Synthetic peptide
  Seed: KMARLGKGYM
KWARLGKGYL

SEQ ID NO: 155724 - protein, 10 aa, Artificial Sequence
  Description of Artificial Sequence: Synthetic peptide
  Seed: KMARLGKGYM
KWARLGKGYM

SEQ ID NO: 155725 - protein, 11 aa, Artificial Sequence
  Description of Artificial Sequence: Synthetic peptide
  Seed: KMARLGKGYMF
KWARLGKGYMF

SEQ ID NO: 155726 - protein, 11 aa, Artificial Sequence
  Description of Artificial Sequence: Synthetic peptide
  Seed: KMARLGKGYMF
KWARLGKGYMI

SEQ ID NO: 155727 - protein, 11 aa, Artificial Sequence
  Description of Artificial Sequence: Synthetic peptide
  Seed: KMARLGKGYMF
KWARLGKGYMK

SEQ ID NO: 155728 - protein, 11 aa, Artificial Sequence
  Description of Artificial Sequence: Synthetic peptide
  Seed: KMARLGKGYMF
KWARLGKGYML

SEQ ID NO: 155729 - protein, 11 aa, Artificial Sequence
  Description of Artificial Sequence: Synthetic peptide
  Seed: KMARLGKGYMF
KWARLGKGYMM

SEQ ID NO: 155730 - protein, 11 aa, Artificial Sequence
  Description of Artificial Sequence: Synthetic peptide
  Seed: KMARLGKGYMF
KWARLGKGYMV

SEQ ID NO: 155731 - protein, 11 aa, Artificial Sequence
  Description of Artificial Sequence: Synthetic peptide
  Seed: KMARLGKGYMF
KWARLGKGYMW

SEQ ID NO: 155732 - protein, 10 aa, Artificial Sequence
  Description of Artificial Sequence: Synthetic peptide
  Seed: KMARLGKGYM
KWARLGKGYR

SEQ ID NO: 155733 - protein, 10 aa, Artificial Sequence
  Description of Artificial Sequence: Synthetic peptide
  Seed: KMARLGKGYM
KWARLGKGYS

SEQ ID NO: 155734 - protein, 10 aa, Artificial Sequence
  Description of Artificial Sequence: Synthetic peptide
  Seed: KMARLGKGYM
KWARLGKGYV

SEQ ID NO: 155735 - protein, 10 aa, Artificial Sequence
  Description of Artificial Sequence: Synthetic peptide
  Seed: KMARLGKGYM
KWARLGKGYY

SEQ ID NO: 155736 - protein, 9 aa, Artificial Sequence
  Description of Artificial Sequence: Synthetic peptide
  Seed: KAKLANVVR
KWKLANVVA

SEQ ID NO: 155737 - protein, 9 aa, Artificial Sequence
  Description of Artificial Sequence: Synthetic peptide
  Seed: KAKLANVVR
KWKLANVVG

SEQ ID NO: 155738 - protein, 9 aa, Artificial Sequence
  Description of Artificial Sequence: Synthetic peptide
  Seed: KAKLANVVR
KWKLANVVI

SEQ ID NO: 155739 - protein, 9 aa, Artificial Sequence
  Description of Artificial Sequence: Synthetic peptide
  Seed: KAKLANVVR
KWKLANVVK

SEQ ID NO: 155740 - protein, 9 aa, Artificial Sequence
  Description of Artificial Sequence: Synthetic peptide
  Seed: KAKLANVVR
KWKLANVVL

SEQ ID NO: 155741 - protein, 9 aa, Artificial Sequence
  Description of Artificial Sequence: Synthetic peptide
  Seed: KAKLANVVR
KWKLANVVM

SEQ ID NO: 155742 - protein, 9 aa, Artificial Sequence
  Description of Artificial Sequence: Synthetic peptide
  Seed: KAKLANVVR
KWKLANVVN

SEQ ID NO: 155743 - protein, 9 aa, Artificial Sequence
  Description of Artificial Sequence: Synthetic peptide
  Seed: KAKLANVVR
KWKLANVVR

SEQ ID NO: 155744 - protein, 10 aa, Artificial Sequence
  Description of Artificial Sequence: Synthetic peptide
  Seed: KAKLANVVRK
KWKLANVVRA

SEQ ID NO: 155745 - protein, 10 aa, Artificial Sequence
  Description of Artificial Sequence: Synthetic peptide
  Seed: KAKLANVVRK
KWKLANVVRI

SEQ ID NO: 155746 - protein, 10 aa, Artificial Sequence
  Description of Artificial Sequence: Synthetic peptide
  Seed: KAKLANVVRK
KWKLANVVRK

SEQ ID NO: 155747 - protein, 10 aa, Artificial Sequence
  Description of Artificial Sequence: Synthetic peptide
  Seed: KAKLANVVRK
KWKLANVVRL

SEQ ID NO: 155748 - protein, 10 aa, Artificial Sequence
  Description of Artificial Sequence: Synthetic peptide
  Seed: KAKLANVVRK
KWKLANVVRM

SEQ ID NO: 155749 - protein, 10 aa, Artificial Sequence
  Description of Artificial Sequence: Synthetic peptide
  Seed: KAKLANVVRK
KWKLANVVRV

SEQ ID NO: 155750 - protein, 9 aa, Artificial Sequence
  Description of Artificial Sequence: Synthetic peptide
  Seed: KAKLANVVR
KWKLANVVS

SEQ ID NO: 155751 - protein, 9 aa, Artificial Sequence
  Description of Artificial Sequence: Synthetic peptide
  Seed: KAKLANVVR
KWKLANVVT

SEQ ID NO: 155752 - protein, 9 aa, Artificial Sequence
  Description of Artificial Sequence: Synthetic peptide
  Seed: KAKLANVVR
KWKLANVVV

SEQ ID NO: 155753 - protein, 9 aa, Artificial Sequence
  Description of Artificial Sequence: Synthetic peptide
  Seed: KAKLANVVR
KWKLANVVY

SEQ ID NO: 155754 - protein, 9 aa, Artificial Sequence
  Description of Artificial Sequence: Synthetic peptide
  Seed: KWNENQNPR
KWNENQNPK

SEQ ID NO: 155755 - protein, 9 aa, Artificial Sequence
  Description of Artificial Sequence: Synthetic peptide
  Seed: KKAKLANVV
KYAKLANVF

SEQ ID NO: 155756 - protein, 9 aa, Artificial Sequence
  Description of Artificial Sequence: Synthetic peptide
  Seed: KKAKLANVV
KYAKLANVM

SEQ ID NO: 155757 - protein, 10 aa, Artificial Sequence
  Description of Artificial Sequence: Synthetic peptide
  Seed: KKAKLANVVR
KYAKLANVVK

SEQ ID NO: 155758 - protein, 10 aa, Artificial Sequence
  Description of Artificial Sequence: Synthetic peptide
  Seed: KKAKLANVVR
KYAKLANVVR

SEQ ID NO: 155759 - protein, 9 aa, Artificial Sequence
  Description of Artificial Sequence: Synthetic peptide
  Seed: KKAKLANVV
KYAKLANVY

SEQ ID NO: 155760 - protein, 9 aa, Artificial Sequence
  Description of Artificial Sequence: Synthetic peptide
  Seed: KMARLGKGY
KYARLGKGY

SEQ ID NO: 155761 - protein, 10 aa, Artificial Sequence
  Description of Artificial Sequence: Synthetic peptide
  Seed: KMARLGKGYM
KYARLGKGYA

SEQ ID NO: 155762 - protein, 10 aa, Artificial Sequence
  Description of Artificial Sequence: Synthetic peptide
  Seed: KMARLGKGYM
KYARLGKGYI

SEQ ID NO: 155763 - protein, 10 aa, Artificial Sequence
  Description of Artificial Sequence: Synthetic peptide
  Seed: KMARLGKGYM
KYARLGKGYK

SEQ ID NO: 155764 - protein, 10 aa, Artificial Sequence
  Description of Artificial Sequence: Synthetic peptide
  Seed: KMARLGKGYM
KYARLGKGYL

SEQ ID NO: 155765 - protein, 10 aa, Artificial Sequence
  Description of Artificial Sequence: Synthetic peptide
  Seed: KMARLGKGYM
KYARLGKGYM

SEQ ID NO: 155766 - protein, 11 aa, Artificial Sequence
  Description of Artificial Sequence: Synthetic peptide
  Seed: KMARLGKGYMF
KYARLGKGYMF

SEQ ID NO: 155767 - protein, 11 aa, Artificial Sequence
  Description of Artificial Sequence: Synthetic peptide
  Seed: KMARLGKGYMF
KYARLGKGYMI

SEQ ID NO: 155768 - protein, 11 aa, Artificial Sequence
  Description of Artificial Sequence: Synthetic peptide
  Seed: KMARLGKGYMF
KYARLGKGYMK

SEQ ID NO: 155769 - protein, 11 aa, Artificial Sequence
  Description of Artificial Sequence: Synthetic peptide
  Seed: KMARLGKGYMF
KYARLGKGYML

SEQ ID NO: 155770 - protein, 11 aa, Artificial Sequence
  Description of Artificial Sequence: Synthetic peptide
  Seed: KMARLGKGYMF
KYARLGKGYMM

SEQ ID NO: 155771 - protein, 11 aa, Artificial Sequence
  Description of Artificial Sequence: Synthetic peptide
  Seed: KMARLGKGYMF
KYARLGKGYMV

SEQ ID NO: 155772 - protein, 11 aa, Artificial Sequence
  Description of Artificial Sequence: Synthetic peptide
  Seed: KMARLGKGYMF
KYARLGKGYMW

SEQ ID NO: 155773 - protein, 10 aa, Artificial Sequence
  Description of Artificial Sequence: Synthetic peptide
  Seed: KMARLGKGYM
KYARLGKGYR

SEQ ID NO: 155774 - protein, 10 aa, Artificial Sequence
  Description of Artificial Sequence: Synthetic peptide
  Seed: KMARLGKGYM
KYARLGKGYS

SEQ ID NO: 155775 - protein, 10 aa, Artificial Sequence
  Description of Artificial Sequence: Synthetic peptide
  Seed: KMARLGKGYM
KYARLGKGYV

SEQ ID NO: 155776 - protein, 10 aa, Artificial Sequence
  Description of Artificial Sequence: Synthetic peptide
  Seed: KMARLGKGYM
KYARLGKGYY

SEQ ID NO: 155777 - protein, 9 aa, Artificial Sequence
  Description of Artificial Sequence: Synthetic peptide
  Seed: KAKLANVVR
KYKLANVVA

SEQ ID NO: 155778 - protein, 9 aa, Artificial Sequence
  Description of Artificial Sequence: Synthetic peptide
  Seed: KAKLANVVR
KYKLANVVC

SEQ ID NO: 155779 - protein, 9 aa, Artificial Sequence
  Description of Artificial Sequence: Synthetic peptide
  Seed: KAKLANVVR
KYKLANVVE

SEQ ID NO: 155780 - protein, 9 aa, Artificial Sequence
  Description of Artificial Sequence: Synthetic peptide
  Seed: KAKLANVVR
KYKLANVVF

SEQ ID NO: 155781 - protein, 9 aa, Artificial Sequence
  Description of Artificial Sequence: Synthetic peptide
  Seed: KAKLANVVR
KYKLANVVG

SEQ ID NO: 155782 - protein, 9 aa, Artificial Sequence
  Description of Artificial Sequence: Synthetic peptide
  Seed: KAKLANVVR
KYKLANVVH

SEQ ID NO: 155783 - protein, 9 aa, Artificial Sequence
  Description of Artificial Sequence: Synthetic peptide
  Seed: KAKLANVVR
KYKLANVVI

SEQ ID NO: 155784 - protein, 9 aa, Artificial Sequence
  Description of Artificial Sequence: Synthetic peptide
  Seed: KAKLANVVR
KYKLANVVK

SEQ ID NO: 155785 - protein, 9 aa, Artificial Sequence
  Description of Artificial Sequence: Synthetic peptide
  Seed: KAKLANVVR
KYKLANVVL

SEQ ID NO: 155786 - protein, 9 aa, Artificial Sequence
  Description of Artificial Sequence: Synthetic peptide
  Seed: KAKLANVVR
KYKLANVVM

SEQ ID NO: 155787 - protein, 9 aa, Artificial Sequence
  Description of Artificial Sequence: Synthetic peptide
  Seed: KAKLANVVR
KYKLANVVN

SEQ ID NO: 155788 - protein, 9 aa, Artificial Sequence
  Description of Artificial Sequence: Synthetic peptide
  Seed: KAKLANVVR
KYKLANVVP

SEQ ID NO: 155789 - protein, 9 aa, Artificial Sequence
  Description of Artificial Sequence: Synthetic peptide
  Seed: KAKLANVVR
KYKLANVVQ

SEQ ID NO: 155790 - protein, 9 aa, Artificial Sequence
  Description of Artificial Sequence: Synthetic peptide
  Seed: KAKLANVVR
KYKLANVVR

SEQ ID NO: 155791 - protein, 10 aa, Artificial Sequence
  Description of Artificial Sequence: Synthetic peptide
  Seed: KAKLANVVRK
KYKLANVVRA

SEQ ID NO: 155792 - protein, 10 aa, Artificial Sequence
  Description of Artificial Sequence: Synthetic peptide
  Seed: KAKLANVVRK
KYKLANVVRG

SEQ ID NO: 155793 - protein, 10 aa, Artificial Sequence
  Description of Artificial Sequence: Synthetic peptide
  Seed: KAKLANVVRK
KYKLANVVRI

SEQ ID NO: 155794 - protein, 10 aa, Artificial Sequence
  Description of Artificial Sequence: Synthetic peptide
  Seed: KAKLANVVRK
KYKLANVVRK

SEQ ID NO: 155795 - protein, 10 aa, Artificial Sequence
  Description of Artificial Sequence: Synthetic peptide
  Seed: KAKLANVVRK
KYKLANVVRL

SEQ ID NO: 155796 - protein, 10 aa, Artificial Sequence
  Description of Artificial Sequence: Synthetic peptide
  Seed: KAKLANVVRK
KYKLANVVRM

SEQ ID NO: 155797 - protein, 10 aa, Artificial Sequence
  Description of Artificial Sequence: Synthetic peptide
  Seed: KAKLANVVRK
KYKLANVVRR

SEQ ID NO: 155798 - protein, 10 aa, Artificial Sequence
  Description of Artificial Sequence: Synthetic peptide
  Seed: KAKLANVVRK
KYKLANVVRS

SEQ ID NO: 155799 - protein, 10 aa, Artificial Sequence
  Description of Artificial Sequence: Synthetic peptide
  Seed: KAKLANVVRK
KYKLANVVRT

SEQ ID NO: 155800 - protein, 10 aa, Artificial Sequence
  Description of Artificial Sequence: Synthetic peptide
  Seed: KAKLANVVRK
KYKLANVVRV

SEQ ID NO: 155801 - protein, 9 aa, Artificial Sequence
  Description of Artificial Sequence: Synthetic peptide
  Seed: KAKLANVVR
KYKLANVVS

SEQ ID NO: 155802 - protein, 9 aa, Artificial Sequence
  Description of Artificial Sequence: Synthetic peptide
  Seed: KAKLANVVR
KYKLANVVT

SEQ ID NO: 155803 - protein, 9 aa, Artificial Sequence
  Description of Artificial Sequence: Synthetic peptide
  Seed: KAKLANVVR
KYKLANVVV

SEQ ID NO: 155804 - protein, 9 aa, Artificial Sequence
  Description of Artificial Sequence: Synthetic peptide
  Seed: KAKLANVVR
KYKLANVVY

SEQ ID NO: 155805 - protein, 9 aa, Artificial Sequence
  Description of Artificial Sequence: Synthetic peptide
  Seed: KWNENQNPR
KYNENQNPK

SEQ ID NO: 155806 - protein, 9 aa, Artificial Sequence
  Description of Artificial Sequence: Synthetic peptide
  Seed: KWNENQNPR
KYNENQNPR

SEQ ID NO: 155807 - protein, 9 aa, Artificial Sequence
  Description of Artificial Sequence: Synthetic peptide
  Seed: LQLFIKDYR
LALFIKDYK

SEQ ID NO: 155808 - protein, 9 aa, Artificial Sequence
  Description of Artificial Sequence: Synthetic peptide
  Seed: LQLFIKDYR
LALFIKDYR

SEQ ID NO: 155809 - protein, 10 aa, Artificial Sequence
  Description of Artificial Sequence: Synthetic peptide
  Seed: LQLFIKDYRY
LALFIKDYRK

SEQ ID NO: 155810 - protein, 10 aa, Artificial Sequence
  Description of Artificial Sequence: Synthetic peptide
  Seed: LQLFIKDYRY
LALFIKDYRR

SEQ ID NO: 155811 - protein, 10 aa, Artificial Sequence
  Description of Artificial Sequence: Synthetic peptide
  Seed: LQLFIKDYRY
LALFIKDYRY

SEQ ID NO: 155812 - protein, 8 aa, Artificial Sequence
  Description of Artificial Sequence: Synthetic peptide
  Seed: LANVVRKM
LANVVRKF

SEQ ID NO: 155813 - protein, 8 aa, Artificial Sequence
  Description of Artificial Sequence: Synthetic peptide
  Seed: LANVVRKM
LANVVRKL

SEQ ID NO: 155814 - protein, 9 aa, Artificial Sequence
  Description of Artificial Sequence: Synthetic peptide
  Seed: LANVVRKMM
LANVVRKMF

SEQ ID NO: 155815 - protein, 9 aa, Artificial Sequence
  Description of Artificial Sequence: Synthetic peptide
  Seed: LANVVRKMM
LANVVRKMI

SEQ ID NO: 155816 - protein, 9 aa, Artificial Sequence
  Description of Artificial Sequence: Synthetic peptide
  Seed: LANVVRKMM
LANVVRKML

SEQ ID NO: 155817 - protein, 9 aa, Artificial Sequence
  Description of Artificial Sequence: Synthetic peptide
  Seed: LANVVRKMM
LANVVRKMV

SEQ ID NO: 155818 - protein, 9 aa, Artificial Sequence
  Description of Artificial Sequence: Synthetic peptide
  Seed: LANVVRKMM
LANVVRKMY

SEQ ID NO: 155819 - protein, 9 aa, Artificial Sequence
  Description of Artificial Sequence: Synthetic peptide
  Seed: LSPGMMMGM
LAPGMMMGF

SEQ ID NO: 155820 - protein, 9 aa, Artificial Sequence
  Description of Artificial Sequence: Synthetic peptide
  Seed: LSPGMMMGM
LAPGMMMGI

SEQ ID NO: 155821 - protein, 9 aa, Artificial Sequence
  Description of Artificial Sequence: Synthetic peptide
  Seed: LSPGMMMGM
LAPGMMMGL

SEQ ID NO: 155822 - protein, 9 aa, Artificial Sequence
  Description of Artificial Sequence: Synthetic peptide
  Seed: LSPGMMMGM
LAPGMMMGM

SEQ ID NO: 155823 - protein, 10 aa, Artificial Sequence
  Description of Artificial Sequence: Synthetic peptide
  Seed: LSPGMMMGMF
LAPGMMMGMW

SEQ ID NO: 155824 - protein, 9 aa, Artificial Sequence
  Description of Artificial Sequence: Synthetic peptide
  Seed: LSPGMMMGM
LAPGMMMGV

SEQ ID NO: 155825 - protein, 9 aa, Artificial Sequence
  Description of Artificial Sequence: Synthetic peptide
  Seed: LSPGMMMGM
LAPGMMMGW

SEQ ID NO: 155826 - protein, 9 aa, Artificial Sequence
  Description of Artificial Sequence: Synthetic peptide
  Seed: LSPGMMMGM
LAPGMMMGY

SEQ ID NO: 155827 - protein, 9 aa, Artificial Sequence
  Description of Artificial Sequence: Synthetic peptide
  Seed: LQSSDDFAL
LASSDDFAF

SEQ ID NO: 155828 - protein, 10 aa, Artificial Sequence
  Description of Artificial Sequence: Synthetic peptide
  Seed: LQSSDDFALI
LASSDDFALI

SEQ ID NO: 155829 - protein, 10 aa, Artificial Sequence
  Description of Artificial Sequence: Synthetic peptide
  Seed: LQSSDDFALI
LASSDDFALL

SEQ ID NO: 155830 - protein, 10 aa, Artificial Sequence
  Description of Artificial Sequence: Synthetic peptide
  Seed: LQSSDDFALI
LASSDDFALV

SEQ ID NO: 155831 - protein, 9 aa, Artificial Sequence
  Description of Artificial Sequence: Synthetic peptide
  Seed: LQSSDDFAL
LASSDDFAM

SEQ ID NO: 155832 - protein, 9 aa, Artificial Sequence
  Description of Artificial Sequence: Synthetic peptide
  Seed: LQSSDDFAL
LASSDDFAV

SEQ ID NO: 155833 - protein, 9 aa, Artificial Sequence
  Description of Artificial Sequence: Synthetic peptide
  Seed: LQSSDDFAL
LASSDDFAY

SEQ ID NO: 155834 - protein, 10 aa, Artificial Sequence
  Description of Artificial Sequence: Synthetic peptide
  Seed: LNTMTKDAER
LATMTKDAEK

SEQ ID NO: 155835 - protein, 10 aa, Artificial Sequence
  Description of Artificial Sequence: Synthetic peptide
  Seed: LNTMTKDAER
LATMTKDAER

SEQ ID NO: 155836 - protein, 9 aa, Artificial Sequence
  Description of Artificial Sequence: Synthetic peptide
  Seed: LSTVLGVSI
LATVLGVSF

SEQ ID NO: 155837 - protein, 9 aa, Artificial Sequence
  Description of Artificial Sequence: Synthetic peptide
  Seed: LSTVLGVSI
LATVLGVSI

SEQ ID NO: 155838 - protein, 10 aa, Artificial Sequence
  Description of Artificial Sequence: Synthetic peptide
  Seed: LSTVLGVSIL
LATVLGVSIF

SEQ ID NO: 155839 - protein, 10 aa, Artificial Sequence
  Description of Artificial Sequence: Synthetic peptide
  Seed: LSTVLGVSIL
LATVLGVSIM

SEQ ID NO: 155840 - protein, 10 aa, Artificial Sequence
  Description of Artificial Sequence: Synthetic peptide
  Seed: LSTVLGVSIL
LATVLGVSIW

SEQ ID NO: 155841 - protein, 10 aa, Artificial Sequence
  Description of Artificial Sequence: Synthetic peptide
  Seed: LSTVLGVSIL
LATVLGVSIY

SEQ ID NO: 155842 - protein, 9 aa, Artificial Sequence
  Description of Artificial Sequence: Synthetic peptide
  Seed: LSTVLGVSI
LATVLGVSL

SEQ ID NO: 155843 - protein, 9 aa, Artificial Sequence
  Description of Artificial Sequence: Synthetic peptide
  Seed: LSTVLGVSI
LATVLGVSM

SEQ ID NO: 155844 - protein, 9 aa, Artificial Sequence
  Description of Artificial Sequence: Synthetic peptide
  Seed: LSTVLGVSI
LATVLGVSV

SEQ ID NO: 155845 - protein, 9 aa, Artificial Sequence
  Description of Artificial Sequence: Synthetic peptide
  Seed: LSTVLGVSI
LATVLGVSW

SEQ ID NO: 155846 - protein, 9 aa, Artificial Sequence
  Description of Artificial Sequence: Synthetic peptide
  Seed: LSTVLGVSI
LATVLGVSY

SEQ ID NO: 155847 - protein, 9 aa, Artificial Sequence
  Description of Artificial Sequence: Synthetic peptide
  Seed: LQLFIKDYR
LCLFIKDYR

SEQ ID NO: 155848 - protein, 10 aa, Artificial Sequence
  Description of Artificial Sequence: Synthetic peptide
  Seed: LQLFIKDYRY
LCLFIKDYRK

SEQ ID NO: 155849 - protein, 10 aa, Artificial Sequence
  Description of Artificial Sequence: Synthetic peptide
  Seed: LQLFIKDYRY
LCLFIKDYRR

SEQ ID NO: 155850 - protein, 10 aa, Artificial Sequence
  Description of Artificial Sequence: Synthetic peptide
  Seed: LQLFIKDYRY
LCLFIKDYRY

SEQ ID NO: 155851 - protein, 10 aa, Artificial Sequence
  Description of Artificial Sequence: Synthetic peptide
  Seed: LQSSDDFALI
LCSSDDFALL

SEQ ID NO: 155852 - protein, 10 aa, Artificial Sequence
  Description of Artificial Sequence: Synthetic peptide
  Seed: LQSSDDFALI
LCSSDDFALV

SEQ ID NO: 155853 - protein, 10 aa, Artificial Sequence
  Description of Artificial Sequence: Synthetic peptide
  Seed: LNTMTKDAER
LCTMTKDAEK

SEQ ID NO: 155854 - protein, 10 aa, Artificial Sequence
  Description of Artificial Sequence: Synthetic peptide
  Seed: LNTMTKDAER
LCTMTKDAER

SEQ ID NO: 155855 - protein, 10 aa, Artificial Sequence
  Description of Artificial Sequence: Synthetic peptide
  Seed: LSTVLGVSIL
LCTVLGVSIF

SEQ ID NO: 155856 - protein, 10 aa, Artificial Sequence
  Description of Artificial Sequence: Synthetic peptide
  Seed: LSTVLGVSIL
LCTVLGVSIM

SEQ ID NO: 155857 - protein, 10 aa, Artificial Sequence
  Description of Artificial Sequence: Synthetic peptide
  Seed: LSTVLGVSIL
LCTVLGVSIW

SEQ ID NO: 155858 - protein, 10 aa, Artificial Sequence
  Description of Artificial Sequence: Synthetic peptide
  Seed: LSTVLGVSIL
LCTVLGVSIY

SEQ ID NO: 155859 - protein, 9 aa, Artificial Sequence
  Description of Artificial Sequence: Synthetic peptide
  Seed: LSTVLGVSI
LCTVLGVSW

SEQ ID NO: 155860 - protein, 10 aa, Artificial Sequence
  Description of Artificial Sequence: Synthetic peptide
  Seed: LQLFIKDYRY
LDLFIKDYRR

SEQ ID NO: 155861 - protein, 10 aa, Artificial Sequence
  Description of Artificial Sequence: Synthetic peptide
  Seed: LQLFIKDYRY
LDLFIKDYRY

SEQ ID NO: 155862 - protein, 10 aa, Artificial Sequence
  Description of Artificial Sequence: Synthetic peptide
  Seed: LQSSDDFALI
LDSSDDFALL

SEQ ID NO: 155863 - protein, 10 aa, Artificial Sequence
  Description of Artificial Sequence: Synthetic peptide
  Seed: LQSSDDFALI
LDSSDDFALV

SEQ ID NO: 155864 - protein, 10 aa, Artificial Sequence
  Description of Artificial Sequence: Synthetic peptide
  Seed: LNTMTKDAER
LDTMTKDAEK

SEQ ID NO: 155865 - protein, 10 aa, Artificial Sequence
  Description of Artificial Sequence: Synthetic peptide
  Seed: LNTMTKDAER
LDTMTKDAER

SEQ ID NO: 155866 - protein, 10 aa, Artificial Sequence
  Description of Artificial Sequence: Synthetic peptide
  Seed: LSTVLGVSIL
LDTVLGVSIF

SEQ ID NO: 155867 - protein, 10 aa, Artificial Sequence
  Description of Artificial Sequence: Synthetic peptide
  Seed: LSTVLGVSIL
LDTVLGVSIM

SEQ ID NO: 155868 - protein, 10 aa, Artificial Sequence
  Description of Artificial Sequence: Synthetic peptide
  Seed: LSTVLGVSIL
LDTVLGVSIW

SEQ ID NO: 155869 - protein, 10 aa, Artificial Sequence
  Description of Artificial Sequence: Synthetic peptide
  Seed: LSTVLGVSIL
LDTVLGVSIY

SEQ ID NO: 155870 - protein, 10 aa, Artificial Sequence
  Description of Artificial Sequence: Synthetic peptide
  Seed: LQLFIKDYRY
LELFIKDYRK

SEQ ID NO: 155871 - protein, 10 aa, Artificial Sequence
  Description of Artificial Sequence: Synthetic peptide
  Seed: LQLFIKDYRY
LELFIKDYRR

SEQ ID NO: 155872 - protein, 10 aa, Artificial Sequence
  Description of Artificial Sequence: Synthetic peptide
  Seed: LQLFIKDYRY
LELFIKDYRY

SEQ ID NO: 155873 - protein, 8 aa, Artificial Sequence
  Description of Artificial Sequence: Synthetic peptide
  Seed: LEQSGLPV
LEQSGLPA

SEQ ID NO: 155874 - protein, 8 aa, Artificial Sequence
  Description of Artificial Sequence: Synthetic peptide
  Seed: LEQSGLPV
LEQSGLPF

SEQ ID NO: 155875 - protein, 8 aa, Artificial Sequence
  Description of Artificial Sequence: Synthetic peptide
  Seed: LEQSGLPV
LEQSGLPI

SEQ ID NO: 155876 - protein, 8 aa, Artificial Sequence
  Description of Artificial Sequence: Synthetic peptide
  Seed: LEQSGLPV
LEQSGLPL

SEQ ID NO: 155877 - protein, 8 aa, Artificial Sequence
  Description of Artificial Sequence: Synthetic peptide
  Seed: LEQSGLPV
LEQSGLPM

SEQ ID NO: 155878 - protein, 8 aa, Artificial Sequence
  Description of Artificial Sequence: Synthetic peptide
  Seed: LEQSGLPV
LEQSGLPP

SEQ ID NO: 155879 - protein, 9 aa, Artificial Sequence
  Description of Artificial Sequence: Synthetic peptide
  Seed: LEQSGLPVG
LEQSGLPVA

SEQ ID NO: 155880 - protein, 9 aa, Artificial Sequence
  Description of Artificial Sequence: Synthetic peptide
  Seed: LEQSGLPVG
LEQSGLPVC

SEQ ID NO: 155881 - protein, 9 aa, Artificial Sequence
  Description of Artificial Sequence: Synthetic peptide
  Seed: LEQSGLPVG
LEQSGLPVI

SEQ ID NO: 155882 - protein, 9 aa, Artificial Sequence
  Description of Artificial Sequence: Synthetic peptide
  Seed: LEQSGLPVG
LEQSGLPVL

SEQ ID NO: 155883 - protein, 9 aa, Artificial Sequence
  Description of Artificial Sequence: Synthetic peptide
  Seed: LEQSGLPVG
LEQSGLPVM

SEQ ID NO: 155884 - protein, 9 aa, Artificial Sequence
  Description of Artificial Sequence: Synthetic peptide
  Seed: LEQSGLPVG
LEQSGLPVP

SEQ ID NO: 155885 - protein, 9 aa, Artificial Sequence
  Description of Artificial Sequence: Synthetic peptide
  Seed: LEQSGLPVG
LEQSGLPVS

SEQ ID NO: 155886 - protein, 9 aa, Artificial Sequence
  Description of Artificial Sequence: Synthetic peptide
  Seed: LEQSGLPVG
LEQSGLPVT

SEQ ID NO: 155887 - protein, 9 aa, Artificial Sequence
  Description of Artificial Sequence: Synthetic peptide
  Seed: LEQSGLPVG
LEQSGLPVV

SEQ ID NO: 155888 - protein, 9 aa, Artificial Sequence
  Description of Artificial Sequence: Synthetic peptide
  Seed: LQSSDDFAL
LESSDDFAF

SEQ ID NO: 155889 - protein, 10 aa, Artificial Sequence
  Description of Artificial Sequence: Synthetic peptide
  Seed: LQSSDDFALI
LESSDDFALL

SEQ ID NO: 155890 - protein, 10 aa, Artificial Sequence
  Description of Artificial Sequence: Synthetic peptide
  Seed: LQSSDDFALI
LESSDDFALV

SEQ ID NO: 155891 - protein, 9 aa, Artificial Sequence
  Description of Artificial Sequence: Synthetic peptide
  Seed: LQSSDDFAL
LESSDDFAM

SEQ ID NO: 155892 - protein, 9 aa, Artificial Sequence
  Description of Artificial Sequence: Synthetic peptide
  Seed: LQSSDDFAL
LESSDDFAY

SEQ ID NO: 155893 - protein, 10 aa, Artificial Sequence
  Description of Artificial Sequence: Synthetic peptide
  Seed: LNTMTKDAER
LETMTKDAEK

SEQ ID NO: 155894 - protein, 10 aa, Artificial Sequence
  Description of Artificial Sequence: Synthetic peptide
  Seed: LNTMTKDAER
LETMTKDAER

SEQ ID NO: 155895 - protein, 10 aa, Artificial Sequence
  Description of Artificial Sequence: Synthetic peptide
  Seed: LSTVLGVSIL
LETVLGVSIF

SEQ ID NO: 155896 - protein, 10 aa, Artificial Sequence
  Description of Artificial Sequence: Synthetic peptide
  Seed: LSTVLGVSIL
LETVLGVSIM

SEQ ID NO: 155897 - protein, 10 aa, Artificial Sequence
  Description of Artificial Sequence: Synthetic peptide
  Seed: LSTVLGVSIL
LETVLGVSIW

SEQ ID NO: 155898 - protein, 10 aa, Artificial Sequence
  Description of Artificial Sequence: Synthetic peptide
  Seed: LSTVLGVSIL
LETVLGVSIY

SEQ ID NO: 155899 - protein, 9 aa, Artificial Sequence
  Description of Artificial Sequence: Synthetic peptide
  Seed: LQLFIKDYR
LFLFIKDYK

SEQ ID NO: 155900 - protein, 9 aa, Artificial Sequence
  Description of Artificial Sequence: Synthetic peptide
  Seed: LQLFIKDYR
LFLFIKDYR

SEQ ID NO: 155901 - protein, 10 aa, Artificial Sequence
  Description of Artificial Sequence: Synthetic peptide
  Seed: LQLFIKDYRY
LFLFIKDYRA

SEQ ID NO: 155902 - protein, 10 aa, Artificial Sequence
  Description of Artificial Sequence: Synthetic peptide
  Seed: LQLFIKDYRY
LFLFIKDYRC

SEQ ID NO: 155903 - protein, 10 aa, Artificial Sequence
  Description of Artificial Sequence: Synthetic peptide
  Seed: LQLFIKDYRY
LFLFIKDYRD

SEQ ID NO: 155904 - protein, 10 aa, Artificial Sequence
  Description of Artificial Sequence: Synthetic peptide
  Seed: LQLFIKDYRY
LFLFIKDYRE

SEQ ID NO: 155905 - protein, 10 aa, Artificial Sequence
  Description of Artificial Sequence: Synthetic peptide
  Seed: LQLFIKDYRY
LFLFIKDYRF

SEQ ID NO: 155906 - protein, 10 aa, Artificial Sequence
  Description of Artificial Sequence: Synthetic peptide
  Seed: LQLFIKDYRY
LFLFIKDYRG

SEQ ID NO: 155907 - protein, 10 aa, Artificial Sequence
  Description of Artificial Sequence: Synthetic peptide
  Seed: LQLFIKDYRY
LFLFIKDYRH

SEQ ID NO: 155908 - protein, 10 aa, Artificial Sequence
  Description of Artificial Sequence: Synthetic peptide
  Seed: LQLFIKDYRY
LFLFIKDYRI

SEQ ID NO: 155909 - protein, 10 aa, Artificial Sequence
  Description of Artificial Sequence: Synthetic peptide
  Seed: LQLFIKDYRY
LFLFIKDYRK

SEQ ID NO: 155910 - protein, 10 aa, Artificial Sequence
  Description of Artificial Sequence: Synthetic peptide
  Seed: LQLFIKDYRY
LFLFIKDYRL

SEQ ID NO: 155911 - protein, 10 aa, Artificial Sequence
  Description of Artificial Sequence: Synthetic peptide
  Seed: LQLFIKDYRY
LFLFIKDYRM

SEQ ID NO: 155912 - protein, 10 aa, Artificial Sequence
  Description of Artificial Sequence: Synthetic peptide
  Seed: LQLFIKDYRY
LFLFIKDYRN

SEQ ID NO: 155913 - protein, 10 aa, Artificial Sequence
  Description of Artificial Sequence: Synthetic peptide
  Seed: LQLFIKDYRY
LFLFIKDYRP

SEQ ID NO: 155914 - protein, 10 aa, Artificial Sequence
  Description of Artificial Sequence: Synthetic peptide
  Seed: LQLFIKDYRY
LFLFIKDYRQ

SEQ ID NO: 155915 - protein, 10 aa, Artificial Sequence
  Description of Artificial Sequence: Synthetic peptide
  Seed: LQLFIKDYRY
LFLFIKDYRR

SEQ ID NO: 155916 - protein, 10 aa, Artificial Sequence
  Description of Artificial Sequence: Synthetic peptide
  Seed: LQLFIKDYRY
LFLFIKDYRS

SEQ ID NO: 155917 - protein, 10 aa, Artificial Sequence
  Description of Artificial Sequence: Synthetic peptide
  Seed: LQLFIKDYRY
LFLFIKDYRT

SEQ ID NO: 155918 - protein, 10 aa, Artificial Sequence
  Description of Artificial Sequence: Synthetic peptide
  Seed: LQLFIKDYRY
LFLFIKDYRV

SEQ ID NO: 155919 - protein, 10 aa, Artificial Sequence
  Description of Artificial Sequence: Synthetic peptide
  Seed: LQLFIKDYRY
LFLFIKDYRW

SEQ ID NO: 155920 - protein, 10 aa, Artificial Sequence
  Description of Artificial Sequence: Synthetic peptide
  Seed: LQLFIKDYRY
LFLFIKDYRY

SEQ ID NO: 155921 - protein, 9 aa, Artificial Sequence
  Description of Artificial Sequence: Synthetic peptide
  Seed: LQSSDDFAL
LFSSDDFAF

SEQ ID NO: 155922 - protein, 10 aa, Artificial Sequence
  Description of Artificial Sequence: Synthetic peptide
  Seed: LQSSDDFALI
LFSSDDFALI

SEQ ID NO: 155923 - protein, 10 aa, Artificial Sequence
  Description of Artificial Sequence: Synthetic peptide
  Seed: LQSSDDFALI
LFSSDDFALL

SEQ ID NO: 155924 - protein, 10 aa, Artificial Sequence
  Description of Artificial Sequence: Synthetic peptide
  Seed: LQSSDDFALI
LFSSDDFALV

SEQ ID NO: 155925 - protein, 9 aa, Artificial Sequence
  Description of Artificial Sequence: Synthetic peptide
  Seed: LQSSDDFAL
LFSSDDFAY

SEQ ID NO: 155926 - protein, 10 aa, Artificial Sequence
  Description of Artificial Sequence: Synthetic peptide
  Seed: LNTMTKDAER
LFTMTKDAEK

SEQ ID NO: 155927 - protein, 10 aa, Artificial Sequence
  Description of Artificial Sequence: Synthetic peptide
  Seed: LNTMTKDAER
LFTMTKDAER

SEQ ID NO: 155928 - protein, 10 aa, Artificial Sequence
  Description of Artificial Sequence: Synthetic peptide
  Seed: LSTVLGVSIL
LFTVLGVSIF

SEQ ID NO: 155929 - protein, 10 aa, Artificial Sequence
  Description of Artificial Sequence: Synthetic peptide
  Seed: LSTVLGVSIL
LFTVLGVSIM

SEQ ID NO: 155930 - protein, 10 aa, Artificial Sequence
  Description of Artificial Sequence: Synthetic peptide
  Seed: LSTVLGVSIL
LFTVLGVSIW

SEQ ID NO: 155931 - protein, 10 aa, Artificial Sequence
  Description of Artificial Sequence: Synthetic peptide
  Seed: LSTVLGVSIL
LFTVLGVSIY

SEQ ID NO: 155932 - protein, 9 aa, Artificial Sequence
  Description of Artificial Sequence: Synthetic peptide
  Seed: LQLFIKDYR
LGLFIKDYK

SEQ ID NO: 155933 - protein, 9 aa, Artificial Sequence
  Description of Artificial Sequence: Synthetic peptide
  Seed: LQLFIKDYR
LGLFIKDYR

SEQ ID NO: 155934 - protein, 10 aa, Artificial Sequence
  Description of Artificial Sequence: Synthetic peptide
  Seed: LQLFIKDYRY
LGLFIKDYRK

SEQ ID NO: 155935 - protein, 10 aa, Artificial Sequence
  Description of Artificial Sequence: Synthetic peptide
  Seed: LQLFIKDYRY
LGLFIKDYRR

SEQ ID NO: 155936 - protein, 10 aa, Artificial Sequence
  Description of Artificial Sequence: Synthetic peptide
  Seed: LQLFIKDYRY
LGLFIKDYRY

SEQ ID NO: 155937 - protein, 9 aa, Artificial Sequence
  Description of Artificial Sequence: Synthetic peptide
  Seed: LSPGMMMGM
LGPGMMMGL

SEQ ID NO: 155938 - protein, 9 aa, Artificial Sequence
  Description of Artificial Sequence: Synthetic peptide
  Seed: LQSSDDFAL
LGSSDDFAF

SEQ ID NO: 155939 - protein, 10 aa, Artificial Sequence
  Description of Artificial Sequence: Synthetic peptide
  Seed: LQSSDDFALI
LGSSDDFALL

SEQ ID NO: 155940 - protein, 10 aa, Artificial Sequence
  Description of Artificial Sequence: Synthetic peptide
  Seed: LQSSDDFALI
LGSSDDFALV

SEQ ID NO: 155941 - protein, 10 aa, Artificial Sequence
  Description of Artificial Sequence: Synthetic peptide
  Seed: LNTMTKDAER
LGTMTKDAEK

SEQ ID NO: 155942 - protein, 10 aa, Artificial Sequence
  Description of Artificial Sequence: Synthetic peptide
  Seed: LNTMTKDAER
LGTMTKDAER

SEQ ID NO: 155943 - protein, 10 aa, Artificial Sequence
  Description of Artificial Sequence: Synthetic peptide
  Seed: LSTVLGVSIL
LGTVLGVSIF

SEQ ID NO: 155944 - protein, 10 aa, Artificial Sequence
  Description of Artificial Sequence: Synthetic peptide
  Seed: LSTVLGVSIL
LGTVLGVSIM

SEQ ID NO: 155945 - protein, 10 aa, Artificial Sequence
  Description of Artificial Sequence: Synthetic peptide
  Seed: LSTVLGVSIL
LGTVLGVSIW

SEQ ID NO: 155946 - protein, 10 aa, Artificial Sequence
  Description of Artificial Sequence: Synthetic peptide
  Seed: LSTVLGVSIL
LGTVLGVSIY

SEQ ID NO: 155947 - protein, 9 aa, Artificial Sequence
  Description of Artificial Sequence: Synthetic peptide
  Seed: LSTVLGVSI
LGTVLGVSM

SEQ ID NO: 155948 - protein, 9 aa, Artificial Sequence
  Description of Artificial Sequence: Synthetic peptide
  Seed: LSTVLGVSI
LGTVLGVSW

SEQ ID NO: 155949 - protein, 9 aa, Artificial Sequence
  Description of Artificial Sequence: Synthetic peptide
  Seed: LSTVLGVSI
LGTVLGVSY

SEQ ID NO: 155950 - protein, 9 aa, Artificial Sequence
  Description of Artificial Sequence: Synthetic peptide
  Seed: LQLFIKDYR
LHLFIKDYR

SEQ ID NO: 155951 - protein, 10 aa, Artificial Sequence
  Description of Artificial Sequence: Synthetic peptide
  Seed: LQLFIKDYRY
LHLFIKDYRK

SEQ ID NO: 155952 - protein, 10 aa, Artificial Sequence
  Description of Artificial Sequence: Synthetic peptide
  Seed: LQLFIKDYRY
LHLFIKDYRR

SEQ ID NO: 155953 - protein, 10 aa, Artificial Sequence
  Description of Artificial Sequence: Synthetic peptide
  Seed: LQLFIKDYRY
LHLFIKDYRY

SEQ ID NO: 155954 - protein, 9 aa, Artificial Sequence
  Description of Artificial Sequence: Synthetic peptide
  Seed: LQSSDDFAL
LHSSDDFAA

SEQ ID NO: 155955 - protein, 9 aa, Artificial Sequence
  Description of Artificial Sequence: Synthetic peptide
  Seed: LQSSDDFAL
LHSSDDFAF

SEQ ID NO: 155956 - protein, 9 aa, Artificial Sequence
  Description of Artificial Sequence: Synthetic peptide
  Seed: LQSSDDFAL
LHSSDDFAI

SEQ ID NO: 155957 - protein, 9 aa, Artificial Sequence
  Description of Artificial Sequence: Synthetic peptide
  Seed: LQSSDDFAL
LHSSDDFAL

SEQ ID NO: 155958 - protein, 10 aa, Artificial Sequence
  Description of Artificial Sequence: Synthetic peptide
  Seed: LQSSDDFALI
LHSSDDFALL

SEQ ID NO: 155959 - protein, 10 aa, Artificial Sequence
  Description of Artificial Sequence: Synthetic peptide
  Seed: LQSSDDFALI
LHSSDDFALV

SEQ ID NO: 155960 - protein, 9 aa, Artificial Sequence
  Description of Artificial Sequence: Synthetic peptide
  Seed: LQSSDDFAL
LHSSDDFAM

SEQ ID NO: 155961 - protein, 9 aa, Artificial Sequence
  Description of Artificial Sequence: Synthetic peptide
  Seed: LQSSDDFAL
LHSSDDFAV

SEQ ID NO: 155962 - protein, 9 aa, Artificial Sequence
  Description of Artificial Sequence: Synthetic peptide
  Seed: LQSSDDFAL
LHSSDDFAY

SEQ ID NO: 155963 - protein, 10 aa, Artificial Sequence
  Description of Artificial Sequence: Synthetic peptide
  Seed: LNTMTKDAER
LHTMTKDAEK

SEQ ID NO: 155964 - protein, 10 aa, Artificial Sequence
  Description of Artificial Sequence: Synthetic peptide
  Seed: LNTMTKDAER
LHTMTKDAER

SEQ ID NO: 155965 - protein, 10 aa, Artificial Sequence
  Description of Artificial Sequence: Synthetic peptide
  Seed: LSTVLGVSIL
LHTVLGVSIF

SEQ ID NO: 155966 - protein, 10 aa, Artificial Sequence
  Description of Artificial Sequence: Synthetic peptide
  Seed: LSTVLGVSIL
LHTVLGVSIM

SEQ ID NO: 155967 - protein, 10 aa, Artificial Sequence
  Description of Artificial Sequence: Synthetic peptide
  Seed: LSTVLGVSIL
LHTVLGVSIW

SEQ ID NO: 155968 - protein, 10 aa, Artificial Sequence
  Description of Artificial Sequence: Synthetic peptide
  Seed: LSTVLGVSIL
LHTVLGVSIY

SEQ ID NO: 155969 - protein, 9 aa, Artificial Sequence
  Description of Artificial Sequence: Synthetic peptide
  Seed: LQLFIKDYR
LILFIKDYK

SEQ ID NO: 155970 - protein, 9 aa, Artificial Sequence
  Description of Artificial Sequence: Synthetic peptide
  Seed: LQLFIKDYR
LILFIKDYR

SEQ ID NO: 155971 - protein, 10 aa, Artificial Sequence
  Description of Artificial Sequence: Synthetic peptide
  Seed: LQLFIKDYRY
LILFIKDYRA

SEQ ID NO: 155972 - protein, 10 aa, Artificial Sequence
  Description of Artificial Sequence: Synthetic peptide
  Seed: LQLFIKDYRY
LILFIKDYRC

SEQ ID NO: 155973 - protein, 10 aa, Artificial Sequence
  Description of Artificial Sequence: Synthetic peptide
  Seed: LQLFIKDYRY
LILFIKDYRD

SEQ ID NO: 155974 - protein, 10 aa, Artificial Sequence
  Description of Artificial Sequence: Synthetic peptide
  Seed: LQLFIKDYRY
LILFIKDYRE

SEQ ID NO: 155975 - protein, 10 aa, Artificial Sequence
  Description of Artificial Sequence: Synthetic peptide
  Seed: LQLFIKDYRY
LILFIKDYRF

SEQ ID NO: 155976 - protein, 10 aa, Artificial Sequence
  Description of Artificial Sequence: Synthetic peptide
  Seed: LQLFIKDYRY
LILFIKDYRG

SEQ ID NO: 155977 - protein, 10 aa, Artificial Sequence
  Description of Artificial Sequence: Synthetic peptide
  Seed: LQLFIKDYRY
LILFIKDYRH

SEQ ID NO: 155978 - protein, 10 aa, Artificial Sequence
  Description of Artificial Sequence: Synthetic peptide
  Seed: LQLFIKDYRY
LILFIKDYRI

SEQ ID NO: 155979 - protein, 10 aa, Artificial Sequence
  Description of Artificial Sequence: Synthetic peptide
  Seed: LQLFIKDYRY
LILFIKDYRK

SEQ ID NO: 155980 - protein, 10 aa, Artificial Sequence
  Description of Artificial Sequence: Synthetic peptide
  Seed: LQLFIKDYRY
LILFIKDYRL

SEQ ID NO: 155981 - protein, 10 aa, Artificial Sequence
  Description of Artificial Sequence: Synthetic peptide
  Seed: LQLFIKDYRY
LILFIKDYRM

SEQ ID NO: 155982 - protein, 10 aa, Artificial Sequence
  Description of Artificial Sequence: Synthetic peptide
  Seed: LQLFIKDYRY
LILFIKDYRN

SEQ ID NO: 155983 - protein, 10 aa, Artificial Sequence
  Description of Artificial Sequence: Synthetic peptide
  Seed: LQLFIKDYRY
LILFIKDYRP

SEQ ID NO: 155984 - protein, 10 aa, Artificial Sequence
  Description of Artificial Sequence: Synthetic peptide
  Seed: LQLFIKDYRY
LILFIKDYRQ

SEQ ID NO: 155985 - protein, 10 aa, Artificial Sequence
  Description of Artificial Sequence: Synthetic peptide
  Seed: LQLFIKDYRY
LILFIKDYRR

SEQ ID NO: 155986 - protein, 10 aa, Artificial Sequence
  Description of Artificial Sequence: Synthetic peptide
  Seed: LQLFIKDYRY
LILFIKDYRS

SEQ ID NO: 155987 - protein, 10 aa, Artificial Sequence
  Description of Artificial Sequence: Synthetic peptide
  Seed: LQLFIKDYRY
LILFIKDYRT

SEQ ID NO: 155988 - protein, 10 aa, Artificial Sequence
  Description of Artificial Sequence: Synthetic peptide
  Seed: LQLFIKDYRY
LILFIKDYRV

SEQ ID NO: 155989 - protein, 10 aa, Artificial Sequence
  Description of Artificial Sequence: Synthetic peptide
  Seed: LQLFIKDYRY
LILFIKDYRW

SEQ ID NO: 155990 - protein, 10 aa, Artificial Sequence
  Description of Artificial Sequence: Synthetic peptide
  Seed: LQLFIKDYRY
LILFIKDYRY

SEQ ID NO: 155991 - protein, 9 aa, Artificial Sequence
  Description of Artificial Sequence: Synthetic peptide
  Seed: LSPGMMMGM
LIPGMMMGL

SEQ ID NO: 155992 - protein, 9 aa, Artificial Sequence
  Description of Artificial Sequence: Synthetic peptide
  Seed: LSPGMMMGM
LIPGMMMGW

SEQ ID NO: 155993 - protein, 9 aa, Artificial Sequence
  Description of Artificial Sequence: Synthetic peptide
  Seed: LQSSDDFAL
LISSDDFAA

SEQ ID NO: 155994 - protein, 9 aa, Artificial Sequence
  Description of Artificial Sequence: Synthetic peptide
  Seed: LQSSDDFAL
LISSDDFAF

SEQ ID NO: 155995 - protein, 9 aa, Artificial Sequence
  Description of Artificial Sequence: Synthetic peptide
  Seed: LQSSDDFAL
LISSDDFAI

SEQ ID NO: 155996 - protein, 9 aa, Artificial Sequence
  Description of Artificial Sequence: Synthetic peptide
  Seed: LQSSDDFAL
LISSDDFAL

SEQ ID NO: 155997 - protein, 10 aa, Artificial Sequence
  Description of Artificial Sequence: Synthetic peptide
  Seed: LQSSDDFALI
LISSDDFALA

SEQ ID NO: 155998 - protein, 10 aa, Artificial Sequence
  Description of Artificial Sequence: Synthetic peptide
  Seed: LQSSDDFALI
LISSDDFALI

SEQ ID NO: 155999 - protein, 10 aa, Artificial Sequence
  Description of Artificial Sequence: Synthetic peptide
  Seed: LQSSDDFALI
LISSDDFALL

SEQ ID NO: 156000 - protein, 10 aa, Artificial Sequence
  Description of Artificial Sequence: Synthetic peptide
  Seed: LQSSDDFALI
LISSDDFALM

SEQ ID NO: 156001 - protein, 10 aa, Artificial Sequence
  Description of Artificial Sequence: Synthetic peptide
  Seed: LQSSDDFALI
LISSDDFALV

SEQ ID NO: 156002 - protein, 9 aa, Artificial Sequence
  Description of Artificial Sequence: Synthetic peptide
  Seed: LQSSDDFAL
LISSDDFAM

SEQ ID NO: 156003 - protein, 9 aa, Artificial Sequence
  Description of Artificial Sequence: Synthetic peptide
  Seed: LQSSDDFAL
LISSDDFAV

SEQ ID NO: 156004 - protein, 9 aa, Artificial Sequence
  Description of Artificial Sequence: Synthetic peptide
  Seed: LQSSDDFAL
LISSDDFAY

SEQ ID NO: 156005 - protein, 10 aa, Artificial Sequence
  Description of Artificial Sequence: Synthetic peptide
  Seed: LNTMTKDAER
LITMTKDAEK

SEQ ID NO: 156006 - protein, 10 aa, Artificial Sequence
  Description of Artificial Sequence: Synthetic peptide
  Seed: LNTMTKDAER
LITMTKDAER

SEQ ID NO: 156007 - protein, 10 aa, Artificial Sequence
  Description of Artificial Sequence: Synthetic peptide
  Seed: LSTVLGVSIL
LITVLGVSIF

SEQ ID NO: 156008 - protein, 10 aa, Artificial Sequence
  Description of Artificial Sequence: Synthetic peptide
  Seed: LSTVLGVSIL
LITVLGVSIM

SEQ ID NO: 156009 - protein, 10 aa, Artificial Sequence
  Description of Artificial Sequence: Synthetic peptide
  Seed: LSTVLGVSIL
LITVLGVSIW

SEQ ID NO: 156010 - protein, 10 aa, Artificial Sequence
  Description of Artificial Sequence: Synthetic peptide
  Seed: LSTVLGVSIL
LITVLGVSIY

SEQ ID NO: 156011 - protein, 9 aa, Artificial Sequence
  Description of Artificial Sequence: Synthetic peptide
  Seed: LSTVLGVSI
LITVLGVSW

SEQ ID NO: 156012 - protein, 9 aa, Artificial Sequence
  Description of Artificial Sequence: Synthetic peptide
  Seed: LQLFIKDYR
LKLFIKDYR

SEQ ID NO: 156013 - protein, 10 aa, Artificial Sequence
  Description of Artificial Sequence: Synthetic peptide
  Seed: LQLFIKDYRY
LKLFIKDYRF

SEQ ID NO: 156014 - protein, 10 aa, Artificial Sequence
  Description of Artificial Sequence: Synthetic peptide
  Seed: LQLFIKDYRY
LKLFIKDYRK

SEQ ID NO: 156015 - protein, 10 aa, Artificial Sequence
  Description of Artificial Sequence: Synthetic peptide
  Seed: LQLFIKDYRY
LKLFIKDYRR

SEQ ID NO: 156016 - protein, 10 aa, Artificial Sequence
  Description of Artificial Sequence: Synthetic peptide
  Seed: LQLFIKDYRY
LKLFIKDYRY

SEQ ID NO: 156017 - protein, 9 aa, Artificial Sequence
  Description of Artificial Sequence: Synthetic peptide
  Seed: LQSSDDFAL
LKSSDDFAF

SEQ ID NO: 156018 - protein, 9 aa, Artificial Sequence
  Description of Artificial Sequence: Synthetic peptide
  Seed: LQSSDDFAL
LKSSDDFAI

SEQ ID NO: 156019 - protein, 9 aa, Artificial Sequence
  Description of Artificial Sequence: Synthetic peptide
  Seed: LQSSDDFAL
LKSSDDFAL

SEQ ID NO: 156020 - protein, 10 aa, Artificial Sequence
  Description of Artificial Sequence: Synthetic peptide
  Seed: LQSSDDFALI
LKSSDDFALV

SEQ ID NO: 156021 - protein, 9 aa, Artificial Sequence
  Description of Artificial Sequence: Synthetic peptide
  Seed: LQSSDDFAL
LKSSDDFAM

SEQ ID NO: 156022 - protein, 9 aa, Artificial Sequence
  Description of Artificial Sequence: Synthetic peptide
  Seed: LQSSDDFAL
LKSSDDFAY

SEQ ID NO: 156023 - protein, 10 aa, Artificial Sequence
  Description of Artificial Sequence: Synthetic peptide
  Seed: LNTMTKDAER
LKTMTKDAEK

SEQ ID NO: 156024 - protein, 10 aa, Artificial Sequence
  Description of Artificial Sequence: Synthetic peptide
  Seed: LNTMTKDAER
LKTMTKDAER

SEQ ID NO: 156025 - protein, 10 aa, Artificial Sequence
  Description of Artificial Sequence: Synthetic peptide
  Seed: LSTVLGVSIL
LKTVLGVSIF

SEQ ID NO: 156026 - protein, 10 aa, Artificial Sequence
  Description of Artificial Sequence: Synthetic peptide
  Seed: LSTVLGVSIL
LKTVLGVSIM

SEQ ID NO: 156027 - protein, 10 aa, Artificial Sequence
  Description of Artificial Sequence: Synthetic peptide
  Seed: LSTVLGVSIL
LKTVLGVSIW

SEQ ID NO: 156028 - protein, 10 aa, Artificial Sequence
  Description of Artificial Sequence: Synthetic peptide
  Seed: LSTVLGVSIL
LKTVLGVSIY

SEQ ID NO: 156029 - protein, 9 aa, Artificial Sequence
  Description of Artificial Sequence: Synthetic peptide
  Seed: LQLFIKDYR
LLLFIKDYK

SEQ ID NO: 156030 - protein, 9 aa, Artificial Sequence
  Description of Artificial Sequence: Synthetic peptide
  Seed: LQLFIKDYR
LLLFIKDYR

SEQ ID NO: 156031 - protein, 10 aa, Artificial Sequence
  Description of Artificial Sequence: Synthetic peptide
  Seed: LQLFIKDYRY
LLLFIKDYRA

SEQ ID NO: 156032 - protein, 10 aa, Artificial Sequence
  Description of Artificial Sequence: Synthetic peptide
  Seed: LQLFIKDYRY
LLLFIKDYRC

SEQ ID NO: 156033 - protein, 10 aa, Artificial Sequence
  Description of Artificial Sequence: Synthetic peptide
  Seed: LQLFIKDYRY
LLLFIKDYRD

SEQ ID NO: 156034 - protein, 10 aa, Artificial Sequence
  Description of Artificial Sequence: Synthetic peptide
  Seed: LQLFIKDYRY
LLLFIKDYRE

SEQ ID NO: 156035 - protein, 10 aa, Artificial Sequence
  Description of Artificial Sequence: Synthetic peptide
  Seed: LQLFIKDYRY
LLLFIKDYRF

SEQ ID NO: 156036 - protein, 10 aa, Artificial Sequence
  Description of Artificial Sequence: Synthetic peptide
  Seed: LQLFIKDYRY
LLLFIKDYRG

SEQ ID NO: 156037 - protein, 10 aa, Artificial Sequence
  Description of Artificial Sequence: Synthetic peptide
  Seed: LQLFIKDYRY
LLLFIKDYRH

SEQ ID NO: 156038 - protein, 10 aa, Artificial Sequence
  Description of Artificial Sequence: Synthetic peptide
  Seed: LQLFIKDYRY
LLLFIKDYRI

SEQ ID NO: 156039 - protein, 10 aa, Artificial Sequence
  Description of Artificial Sequence: Synthetic peptide
  Seed: LQLFIKDYRY
LLLFIKDYRK

SEQ ID NO: 156040 - protein, 10 aa, Artificial Sequence
  Description of Artificial Sequence: Synthetic peptide
  Seed: LQLFIKDYRY
LLLFIKDYRL

SEQ ID NO: 156041 - protein, 10 aa, Artificial Sequence
  Description of Artificial Sequence: Synthetic peptide
  Seed: LQLFIKDYRY
LLLFIKDYRM

SEQ ID NO: 156042 - protein, 10 aa, Artificial Sequence
  Description of Artificial Sequence: Synthetic peptide
  Seed: LQLFIKDYRY
LLLFIKDYRN

SEQ ID NO: 156043 - protein, 10 aa, Artificial Sequence
  Description of Artificial Sequence: Synthetic peptide
  Seed: LQLFIKDYRY
LLLFIKDYRP

SEQ ID NO: 156044 - protein, 10 aa, Artificial Sequence
  Description of Artificial Sequence: Synthetic peptide
  Seed: LQLFIKDYRY
LLLFIKDYRQ

SEQ ID NO: 156045 - protein, 10 aa, Artificial Sequence
  Description of Artificial Sequence: Synthetic peptide
  Seed: LQLFIKDYRY
LLLFIKDYRR

SEQ ID NO: 156046 - protein, 10 aa, Artificial Sequence
  Description of Artificial Sequence: Synthetic peptide
  Seed: LQLFIKDYRY
LLLFIKDYRS

SEQ ID NO: 156047 - protein, 10 aa, Artificial Sequence
  Description of Artificial Sequence: Synthetic peptide
  Seed: LQLFIKDYRY
LLLFIKDYRT

SEQ ID NO: 156048 - protein, 10 aa, Artificial Sequence
  Description of Artificial Sequence: Synthetic peptide
  Seed: LQLFIKDYRY
LLLFIKDYRV

SEQ ID NO: 156049 - protein, 10 aa, Artificial Sequence
  Description of Artificial Sequence: Synthetic peptide
  Seed: LQLFIKDYRY
LLLFIKDYRW

SEQ ID NO: 156050 - protein, 10 aa, Artificial Sequence
  Description of Artificial Sequence: Synthetic peptide
  Seed: LQLFIKDYRY
LLLFIKDYRY

SEQ ID NO: 156051 - protein, 9 aa, Artificial Sequence
  Description of Artificial Sequence: Synthetic peptide
  Seed: LSPGMMMGM
LLPGMMMGL

SEQ ID NO: 156052 - protein, 9 aa, Artificial Sequence
  Description of Artificial Sequence: Synthetic peptide
  Seed: LQSSDDFAL
LLSSDDFAA

SEQ ID NO: 156053 - protein, 9 aa, Artificial Sequence
  Description of Artificial Sequence: Synthetic peptide
  Seed: LQSSDDFAL
LLSSDDFAF

SEQ ID NO: 156054 - protein, 9 aa, Artificial Sequence
  Description of Artificial Sequence: Synthetic peptide
  Seed: LQSSDDFAL
LLSSDDFAI

SEQ ID NO: 156055 - protein, 9 aa, Artificial Sequence
  Description of Artificial Sequence: Synthetic peptide
  Seed: LQSSDDFAL
LLSSDDFAL

SEQ ID NO: 156056 - protein, 10 aa, Artificial Sequence
  Description of Artificial Sequence: Synthetic peptide
  Seed: LQSSDDFALI
LLSSDDFALA

SEQ ID NO: 156057 - protein, 10 aa, Artificial Sequence
  Description of Artificial Sequence: Synthetic peptide
  Seed: LQSSDDFALI
LLSSDDFALC

SEQ ID NO: 156058 - protein, 10 aa, Artificial Sequence
  Description of Artificial Sequence: Synthetic peptide
  Seed: LQSSDDFALI
LLSSDDFALD

SEQ ID NO: 156059 - protein, 10 aa, Artificial Sequence
  Description of Artificial Sequence: Synthetic peptide
  Seed: LQSSDDFALI
LLSSDDFALE

SEQ ID NO: 156060 - protein, 10 aa, Artificial Sequence
  Description of Artificial Sequence: Synthetic peptide
  Seed: LQSSDDFALI
LLSSDDFALF

SEQ ID NO: 156061 - protein, 10 aa, Artificial Sequence
  Description of Artificial Sequence: Synthetic peptide
  Seed: LQSSDDFALI
LLSSDDFALG

SEQ ID NO: 156062 - protein, 10 aa, Artificial Sequence
  Description of Artificial Sequence: Synthetic peptide
  Seed: LQSSDDFALI
LLSSDDFALH

SEQ ID NO: 156063 - protein, 10 aa, Artificial Sequence
  Description of Artificial Sequence: Synthetic peptide
  Seed: LQSSDDFALI
LLSSDDFALI

SEQ ID NO: 156064 - protein, 10 aa, Artificial Sequence
  Description of Artificial Sequence: Synthetic peptide
  Seed: LQSSDDFALI
LLSSDDFALK

SEQ ID NO: 156065 - protein, 10 aa, Artificial Sequence
  Description of Artificial Sequence: Synthetic peptide
  Seed: LQSSDDFALI
LLSSDDFALL

SEQ ID NO: 156066 - protein, 10 aa, Artificial Sequence
  Description of Artificial Sequence: Synthetic peptide
  Seed: LQSSDDFALI
LLSSDDFALM

SEQ ID NO: 156067 - protein, 10 aa, Artificial Sequence
  Description of Artificial Sequence: Synthetic peptide
  Seed: LQSSDDFALI
LLSSDDFALN

SEQ ID NO: 156068 - protein, 10 aa, Artificial Sequence
  Description of Artificial Sequence: Synthetic peptide
  Seed: LQSSDDFALI
LLSSDDFALP

SEQ ID NO: 156069 - protein, 10 aa, Artificial Sequence
  Description of Artificial Sequence: Synthetic peptide
  Seed: LQSSDDFALI
LLSSDDFALQ

SEQ ID NO: 156070 - protein, 10 aa, Artificial Sequence
  Description of Artificial Sequence: Synthetic peptide
  Seed: LQSSDDFALI
LLSSDDFALR

SEQ ID NO: 156071 - protein, 10 aa, Artificial Sequence
  Description of Artificial Sequence: Synthetic peptide
  Seed: LQSSDDFALI
LLSSDDFALS

SEQ ID NO: 156072 - protein, 10 aa, Artificial Sequence
  Description of Artificial Sequence: Synthetic peptide
  Seed: LQSSDDFALI
LLSSDDFALT

SEQ ID NO: 156073 - protein, 10 aa, Artificial Sequence
  Description of Artificial Sequence: Synthetic peptide
  Seed: LQSSDDFALI
LLSSDDFALV

SEQ ID NO: 156074 - protein, 10 aa, Artificial Sequence
  Description of Artificial Sequence: Synthetic peptide
  Seed: LQSSDDFALI
LLSSDDFALW

SEQ ID NO: 156075 - protein, 10 aa, Artificial Sequence
  Description of Artificial Sequence: Synthetic peptide
  Seed: LQSSDDFALI
LLSSDDFALY

SEQ ID NO: 156076 - protein, 9 aa, Artificial Sequence
  Description of Artificial Sequence: Synthetic peptide
  Seed: LQSSDDFAL
LLSSDDFAM

SEQ ID NO: 156077 - protein, 9 aa, Artificial Sequence
  Description of Artificial Sequence: Synthetic peptide
  Seed: LQSSDDFAL
LLSSDDFAT

SEQ ID NO: 156078 - protein, 9 aa, Artificial Sequence
  Description of Artificial Sequence: Synthetic peptide
  Seed: LQSSDDFAL
LLSSDDFAV

SEQ ID NO: 156079 - protein, 9 aa, Artificial Sequence
  Description of Artificial Sequence: Synthetic peptide
  Seed: LQSSDDFAL
LLSSDDFAY

SEQ ID NO: 156080 - protein, 10 aa, Artificial Sequence
  Description of Artificial Sequence: Synthetic peptide
  Seed: LNTMTKDAER
LLTMTKDAEK

SEQ ID NO: 156081 - protein, 10 aa, Artificial Sequence
  Description of Artificial Sequence: Synthetic peptide
  Seed: LNTMTKDAER
LLTMTKDAER

SEQ ID NO: 156082 - protein, 10 aa, Artificial Sequence
  Description of Artificial Sequence: Synthetic peptide
  Seed: LSTVLGVSIL
LLTVLGVSIF

SEQ ID NO: 156083 - protein, 10 aa, Artificial Sequence
  Description of Artificial Sequence: Synthetic peptide
  Seed: LSTVLGVSIL
LLTVLGVSIM

SEQ ID NO: 156084 - protein, 10 aa, Artificial Sequence
  Description of Artificial Sequence: Synthetic peptide
  Seed: LSTVLGVSIL
LLTVLGVSIW

SEQ ID NO: 156085 - protein, 10 aa, Artificial Sequence
  Description of Artificial Sequence: Synthetic peptide
  Seed: LSTVLGVSIL
LLTVLGVSIY

SEQ ID NO: 156086 - protein, 9 aa, Artificial Sequence
  Description of Artificial Sequence: Synthetic peptide
  Seed: LSTVLGVSI
LLTVLGVSW

SEQ ID NO: 156087 - protein, 9 aa, Artificial Sequence
  Description of Artificial Sequence: Synthetic peptide
  Seed: LQLFIKDYR
LMLFIKDYH

SEQ ID NO: 156088 - protein, 9 aa, Artificial Sequence
  Description of Artificial Sequence: Synthetic peptide
  Seed: LQLFIKDYR
LMLFIKDYK

SEQ ID NO: 156089 - protein, 9 aa, Artificial Sequence
  Description of Artificial Sequence: Synthetic peptide
  Seed: LQLFIKDYR
LMLFIKDYR

SEQ ID NO: 156090 - protein, 10 aa, Artificial Sequence
  Description of Artificial Sequence: Synthetic peptide
  Seed: LQLFIKDYRY
LMLFIKDYRA

SEQ ID NO: 156091 - protein, 10 aa, Artificial Sequence
  Description of Artificial Sequence: Synthetic peptide
  Seed: LQLFIKDYRY
LMLFIKDYRC

SEQ ID NO: 156092 - protein, 10 aa, Artificial Sequence
  Description of Artificial Sequence: Synthetic peptide
  Seed: LQLFIKDYRY
LMLFIKDYRD

SEQ ID NO: 156093 - protein, 10 aa, Artificial Sequence
  Description of Artificial Sequence: Synthetic peptide
  Seed: LQLFIKDYRY
LMLFIKDYRE

SEQ ID NO: 156094 - protein, 10 aa, Artificial Sequence
  Description of Artificial Sequence: Synthetic peptide
  Seed: LQLFIKDYRY
LMLFIKDYRF

SEQ ID NO: 156095 - protein, 10 aa, Artificial Sequence
  Description of Artificial Sequence: Synthetic peptide
  Seed: LQLFIKDYRY
LMLFIKDYRG

SEQ ID NO: 156096 - protein, 10 aa, Artificial Sequence
  Description of Artificial Sequence: Synthetic peptide
  Seed: LQLFIKDYRY
LMLFIKDYRH

SEQ ID NO: 156097 - protein, 10 aa, Artificial Sequence
  Description of Artificial Sequence: Synthetic peptide
  Seed: LQLFIKDYRY
LMLFIKDYRI

SEQ ID NO: 156098 - protein, 10 aa, Artificial Sequence
  Description of Artificial Sequence: Synthetic peptide
  Seed: LQLFIKDYRY
LMLFIKDYRK

SEQ ID NO: 156099 - protein, 10 aa, Artificial Sequence
  Description of Artificial Sequence: Synthetic peptide
  Seed: LQLFIKDYRY
LMLFIKDYRL

SEQ ID NO: 156100 - protein, 10 aa, Artificial Sequence
  Description of Artificial Sequence: Synthetic peptide
  Seed: LQLFIKDYRY
LMLFIKDYRM

SEQ ID NO: 156101 - protein, 10 aa, Artificial Sequence
  Description of Artificial Sequence: Synthetic peptide
  Seed: LQLFIKDYRY
LMLFIKDYRN

SEQ ID NO: 156102 - protein, 10 aa, Artificial Sequence
  Description of Artificial Sequence: Synthetic peptide
  Seed: LQLFIKDYRY
LMLFIKDYRP

SEQ ID NO: 156103 - protein, 10 aa, Artificial Sequence
  Description of Artificial Sequence: Synthetic peptide
  Seed: LQLFIKDYRY
LMLFIKDYRQ

SEQ ID NO: 156104 - protein, 10 aa, Artificial Sequence
  Description of Artificial Sequence: Synthetic peptide
  Seed: LQLFIKDYRY
LMLFIKDYRR

SEQ ID NO: 156105 - protein, 10 aa, Artificial Sequence
  Description of Artificial Sequence: Synthetic peptide
  Seed: LQLFIKDYRY
LMLFIKDYRS

SEQ ID NO: 156106 - protein, 10 aa, Artificial Sequence
  Description of Artificial Sequence: Synthetic peptide
  Seed: LQLFIKDYRY
LMLFIKDYRT

SEQ ID NO: 156107 - protein, 10 aa, Artificial Sequence
  Description of Artificial Sequence: Synthetic peptide
  Seed: LQLFIKDYRY
LMLFIKDYRV

SEQ ID NO: 156108 - protein, 10 aa, Artificial Sequence
  Description of Artificial Sequence: Synthetic peptide
  Seed: LQLFIKDYRY
LMLFIKDYRW

SEQ ID NO: 156109 - protein, 10 aa, Artificial Sequence
  Description of Artificial Sequence: Synthetic peptide
  Seed: LQLFIKDYRY
LMLFIKDYRY

SEQ ID NO: 156110 - protein, 9 aa, Artificial Sequence
  Description of Artificial Sequence: Synthetic peptide
  Seed: LSPGMMMGM
LMPGMMMGL

SEQ ID NO: 156111 - protein, 9 aa, Artificial Sequence
  Description of Artificial Sequence: Synthetic peptide
  Seed: LSPGMMMGM
LMPGMMMGM

SEQ ID NO: 156112 - protein, 9 aa, Artificial Sequence
  Description of Artificial Sequence: Synthetic peptide
  Seed: LSPGMMMGM
LMPGMMMGW

SEQ ID NO: 156113 - protein, 9 aa, Artificial Sequence
  Description of Artificial Sequence: Synthetic peptide
  Seed: LQSSDDFAL
LMSSDDFAA

SEQ ID NO: 156114 - protein, 9 aa, Artificial Sequence
  Description of Artificial Sequence: Synthetic peptide
  Seed: LQSSDDFAL
LMSSDDFAC

SEQ ID NO: 156115 - protein, 9 aa, Artificial Sequence
  Description of Artificial Sequence: Synthetic peptide
  Seed: LQSSDDFAL
LMSSDDFAF

SEQ ID NO: 156116 - protein, 9 aa, Artificial Sequence
  Description of Artificial Sequence: Synthetic peptide
  Seed: LQSSDDFAL
LMSSDDFAH

SEQ ID NO: 156117 - protein, 9 aa, Artificial Sequence
  Description of Artificial Sequence: Synthetic peptide
  Seed: LQSSDDFAL
LMSSDDFAI

SEQ ID NO: 156118 - protein, 9 aa, Artificial Sequence
  Description of Artificial Sequence: Synthetic peptide
  Seed: LQSSDDFAL
LMSSDDFAL

SEQ ID NO: 156119 - protein, 10 aa, Artificial Sequence
  Description of Artificial Sequence: Synthetic peptide
  Seed: LQSSDDFALI
LMSSDDFALA

SEQ ID NO: 156120 - protein, 10 aa, Artificial Sequence
  Description of Artificial Sequence: Synthetic peptide
  Seed: LQSSDDFALI
LMSSDDFALC

SEQ ID NO: 156121 - protein, 10 aa, Artificial Sequence
  Description of Artificial Sequence: Synthetic peptide
  Seed: LQSSDDFALI
LMSSDDFALD

SEQ ID NO: 156122 - protein, 10 aa, Artificial Sequence
  Description of Artificial Sequence: Synthetic peptide
  Seed: LQSSDDFALI
LMSSDDFALE

SEQ ID NO: 156123 - protein, 10 aa, Artificial Sequence
  Description of Artificial Sequence: Synthetic peptide
  Seed: LQSSDDFALI
LMSSDDFALF

SEQ ID NO: 156124 - protein, 10 aa, Artificial Sequence
  Description of Artificial Sequence: Synthetic peptide
  Seed: LQSSDDFALI
LMSSDDFALG

SEQ ID NO: 156125 - protein, 10 aa, Artificial Sequence
  Description of Artificial Sequence: Synthetic peptide
  Seed: LQSSDDFALI
LMSSDDFALH

SEQ ID NO: 156126 - protein, 10 aa, Artificial Sequence
  Description of Artificial Sequence: Synthetic peptide
  Seed: LQSSDDFALI
LMSSDDFALI

SEQ ID NO: 156127 - protein, 10 aa, Artificial Sequence
  Description of Artificial Sequence: Synthetic peptide
  Seed: LQSSDDFALI
LMSSDDFALK

SEQ ID NO: 156128 - protein, 10 aa, Artificial Sequence
  Description of Artificial Sequence: Synthetic peptide
  Seed: LQSSDDFALI
LMSSDDFALL

SEQ ID NO: 156129 - protein, 10 aa, Artificial Sequence
  Description of Artificial Sequence: Synthetic peptide
  Seed: LQSSDDFALI
LMSSDDFALM

SEQ ID NO: 156130 - protein, 10 aa, Artificial Sequence
  Description of Artificial Sequence: Synthetic peptide
  Seed: LQSSDDFALI
LMSSDDFALN

SEQ ID NO: 156131 - protein, 10 aa, Artificial Sequence
  Description of Artificial Sequence: Synthetic peptide
  Seed: LQSSDDFALI
LMSSDDFALP

SEQ ID NO: 156132 - protein, 10 aa, Artificial Sequence
  Description of Artificial Sequence: Synthetic peptide
  Seed: LQSSDDFALI
LMSSDDFALQ

SEQ ID NO: 156133 - protein, 10 aa, Artificial Sequence
  Description of Artificial Sequence: Synthetic peptide
  Seed: LQSSDDFALI
LMSSDDFALR

SEQ ID NO: 156134 - protein, 10 aa, Artificial Sequence
  Description of Artificial Sequence: Synthetic peptide
  Seed: LQSSDDFALI
LMSSDDFALS

SEQ ID NO: 156135 - protein, 10 aa, Artificial Sequence
  Description of Artificial Sequence: Synthetic peptide
  Seed: LQSSDDFALI
LMSSDDFALT

SEQ ID NO: 156136 - protein, 10 aa, Artificial Sequence
  Description of Artificial Sequence: Synthetic peptide
  Seed: LQSSDDFALI
LMSSDDFALV

SEQ ID NO: 156137 - protein, 10 aa, Artificial Sequence
  Description of Artificial Sequence: Synthetic peptide
  Seed: LQSSDDFALI
LMSSDDFALW

SEQ ID NO: 156138 - protein, 10 aa, Artificial Sequence
  Description of Artificial Sequence: Synthetic peptide
  Seed: LQSSDDFALI
LMSSDDFALY

SEQ ID NO: 156139 - protein, 9 aa, Artificial Sequence
  Description of Artificial Sequence: Synthetic peptide
  Seed: LQSSDDFAL
LMSSDDFAM

SEQ ID NO: 156140 - protein, 9 aa, Artificial Sequence
  Description of Artificial Sequence: Synthetic peptide
  Seed: LQSSDDFAL
LMSSDDFAT

SEQ ID NO: 156141 - protein, 9 aa, Artificial Sequence
  Description of Artificial Sequence: Synthetic peptide
  Seed: LQSSDDFAL
LMSSDDFAV

SEQ ID NO: 156142 - protein, 9 aa, Artificial Sequence
  Description of Artificial Sequence: Synthetic peptide
  Seed: LQSSDDFAL
LMSSDDFAW

SEQ ID NO: 156143 - protein, 9 aa, Artificial Sequence
  Description of Artificial Sequence: Synthetic peptide
  Seed: LQSSDDFAL
LMSSDDFAY

SEQ ID NO: 156144 - protein, 10 aa, Artificial Sequence
  Description of Artificial Sequence: Synthetic peptide
  Seed: LNTMTKDAER
LMTMTKDAEK

SEQ ID NO: 156145 - protein, 10 aa, Artificial Sequence
  Description of Artificial Sequence: Synthetic peptide
  Seed: LNTMTKDAER
LMTMTKDAER

SEQ ID NO: 156146 - protein, 10 aa, Artificial Sequence
  Description of Artificial Sequence: Synthetic peptide
  Seed: LSTVLGVSIL
LMTVLGVSIF

SEQ ID NO: 156147 - protein, 10 aa, Artificial Sequence
  Description of Artificial Sequence: Synthetic peptide
  Seed: LSTVLGVSIL
LMTVLGVSIM

SEQ ID NO: 156148 - protein, 10 aa, Artificial Sequence
  Description of Artificial Sequence: Synthetic peptide
  Seed: LSTVLGVSIL
LMTVLGVSIW

SEQ ID NO: 156149 - protein, 10 aa, Artificial Sequence
  Description of Artificial Sequence: Synthetic peptide
  Seed: LSTVLGVSIL
LMTVLGVSIY

SEQ ID NO: 156150 - protein, 9 aa, Artificial Sequence
  Description of Artificial Sequence: Synthetic peptide
  Seed: LSTVLGVSI
LMTVLGVSL

SEQ ID NO: 156151 - protein, 9 aa, Artificial Sequence
  Description of Artificial Sequence: Synthetic peptide
  Seed: LSTVLGVSI
LMTVLGVSW

SEQ ID NO: 156152 - protein, 9 aa, Artificial Sequence
  Description of Artificial Sequence: Synthetic peptide
  Seed: LQLFIKDYR
LNLFIKDYK

SEQ ID NO: 156153 - protein, 9 aa, Artificial Sequence
  Description of Artificial Sequence: Synthetic peptide
  Seed: LQLFIKDYR
LNLFIKDYR

SEQ ID NO: 156154 - protein, 10 aa, Artificial Sequence
  Description of Artificial Sequence: Synthetic peptide
  Seed: LQLFIKDYRY
LNLFIKDYRK

SEQ ID NO: 156155 - protein, 10 aa, Artificial Sequence
  Description of Artificial Sequence: Synthetic peptide
  Seed: LQLFIKDYRY
LNLFIKDYRR

SEQ ID NO: 156156 - protein, 10 aa, Artificial Sequence
  Description of Artificial Sequence: Synthetic peptide
  Seed: LQLFIKDYRY
LNLFIKDYRY

SEQ ID NO: 156157 - protein, 9 aa, Artificial Sequence
  Description of Artificial Sequence: Synthetic peptide
  Seed: LQSSDDFAL
LNSSDDFAF

SEQ ID NO: 156158 - protein, 10 aa, Artificial Sequence
  Description of Artificial Sequence: Synthetic peptide
  Seed: LQSSDDFALI
LNSSDDFALL

SEQ ID NO: 156159 - protein, 10 aa, Artificial Sequence
  Description of Artificial Sequence: Synthetic peptide
  Seed: LQSSDDFALI
LNSSDDFALV

SEQ ID NO: 156160 - protein, 9 aa, Artificial Sequence
  Description of Artificial Sequence: Synthetic peptide
  Seed: LQSSDDFAL
LNSSDDFAY

SEQ ID NO: 156161 - protein, 10 aa, Artificial Sequence
  Description of Artificial Sequence: Synthetic peptide
  Seed: LNTMTKDAER
LNTMTKDAEK

SEQ ID NO: 156162 - protein, 10 aa, Artificial Sequence
  Description of Artificial Sequence: Synthetic peptide
  Seed: LSTVLGVSIL
LNTVLGVSIF

SEQ ID NO: 156163 - protein, 10 aa, Artificial Sequence
  Description of Artificial Sequence: Synthetic peptide
  Seed: LSTVLGVSIL
LNTVLGVSIM

SEQ ID NO: 156164 - protein, 10 aa, Artificial Sequence
  Description of Artificial Sequence: Synthetic peptide
  Seed: LSTVLGVSIL
LNTVLGVSIW

SEQ ID NO: 156165 - protein, 10 aa, Artificial Sequence
  Description of Artificial Sequence: Synthetic peptide
  Seed: LSTVLGVSIL
LNTVLGVSIY

SEQ ID NO: 156166 - protein, 9 aa, Artificial Sequence
  Description of Artificial Sequence: Synthetic peptide
  Seed: LSTVLGVSI
LNTVLGVSW

SEQ ID NO: 156167 - protein, 9 aa, Artificial Sequence
  Description of Artificial Sequence: Synthetic peptide
  Seed: LQLFIKDYR
LPLFIKDYK

SEQ ID NO: 156168 - protein, 9 aa, Artificial Sequence
  Description of Artificial Sequence: Synthetic peptide
  Seed: LQLFIKDYR
LPLFIKDYR

SEQ ID NO: 156169 - protein, 10 aa, Artificial Sequence
  Description of Artificial Sequence: Synthetic peptide
  Seed: LQLFIKDYRY
LPLFIKDYRK

SEQ ID NO: 156170 - protein, 10 aa, Artificial Sequence
  Description of Artificial Sequence: Synthetic peptide
  Seed: LQLFIKDYRY
LPLFIKDYRR

SEQ ID NO: 156171 - protein, 10 aa, Artificial Sequence
  Description of Artificial Sequence: Synthetic peptide
  Seed: LQLFIKDYRY
LPLFIKDYRY

SEQ ID NO: 156172 - protein, 9 aa, Artificial Sequence
  Description of Artificial Sequence: Synthetic peptide
  Seed: LQSSDDFAL
LPSSDDFAL

SEQ ID NO: 156173 - protein, 10 aa, Artificial Sequence
  Description of Artificial Sequence: Synthetic peptide
  Seed: LQSSDDFALI
LPSSDDFALV

SEQ ID NO: 156174 - protein, 10 aa, Artificial Sequence
  Description of Artificial Sequence: Synthetic peptide
  Seed: LNTMTKDAER
LPTMTKDAEK

SEQ ID NO: 156175 - protein, 10 aa, Artificial Sequence
  Description of Artificial Sequence: Synthetic peptide
  Seed: LNTMTKDAER
LPTMTKDAER

SEQ ID NO: 156176 - protein, 10 aa, Artificial Sequence
  Description of Artificial Sequence: Synthetic peptide
  Seed: LSTVLGVSIL
LPTVLGVSIF

SEQ ID NO: 156177 - protein, 10 aa, Artificial Sequence
  Description of Artificial Sequence: Synthetic peptide
  Seed: LSTVLGVSIL
LPTVLGVSIM

SEQ ID NO: 156178 - protein, 10 aa, Artificial Sequence
  Description of Artificial Sequence: Synthetic peptide
  Seed: LSTVLGVSIL
LPTVLGVSIW

SEQ ID NO: 156179 - protein, 10 aa, Artificial Sequence
  Description of Artificial Sequence: Synthetic peptide
  Seed: LSTVLGVSIL
LPTVLGVSIY

SEQ ID NO: 156180 - protein, 8 aa, Artificial Sequence
  Description of Artificial Sequence: Synthetic peptide
  Seed: LQLFIKDY
LQLFIKDF

SEQ ID NO: 156181 - protein, 9 aa, Artificial Sequence
  Description of Artificial Sequence: Synthetic peptide
  Seed: LQLFIKDYR
LQLFIKDYK

SEQ ID NO: 156182 - protein, 10 aa, Artificial Sequence
  Description of Artificial Sequence: Synthetic peptide
  Seed: LQLFIKDYRY
LQLFIKDYRF

SEQ ID NO: 156183 - protein, 10 aa, Artificial Sequence
  Description of Artificial Sequence: Synthetic peptide
  Seed: LQLFIKDYRY
LQLFIKDYRH

SEQ ID NO: 156184 - protein, 10 aa, Artificial Sequence
  Description of Artificial Sequence: Synthetic peptide
  Seed: LQLFIKDYRY
LQLFIKDYRK

SEQ ID NO: 156185 - protein, 10 aa, Artificial Sequence
  Description of Artificial Sequence: Synthetic peptide
  Seed: LQLFIKDYRY
LQLFIKDYRM

SEQ ID NO: 156186 - protein, 10 aa, Artificial Sequence
  Description of Artificial Sequence: Synthetic peptide
  Seed: LQLFIKDYRY
LQLFIKDYRR

SEQ ID NO: 156187 - protein, 9 aa, Artificial Sequence
  Description of Artificial Sequence: Synthetic peptide
  Seed: LQSSDDFAL
LQSSDDFAF

SEQ ID NO: 156188 - protein, 9 aa, Artificial Sequence
  Description of Artificial Sequence: Synthetic peptide
  Seed: LQSSDDFAL
LQSSDDFAH

SEQ ID NO: 156189 - protein, 9 aa, Artificial Sequence
  Description of Artificial Sequence: Synthetic peptide
  Seed: LQSSDDFAL
LQSSDDFAI

SEQ ID NO: 156190 - protein, 10 aa, Artificial Sequence
  Description of Artificial Sequence: Synthetic peptide
  Seed: LQSSDDFALI
LQSSDDFALA

SEQ ID NO: 156191 - protein, 10 aa, Artificial Sequence
  Description of Artificial Sequence: Synthetic peptide
  Seed: LQSSDDFALI
LQSSDDFALF

SEQ ID NO: 156192 - protein, 10 aa, Artificial Sequence
  Description of Artificial Sequence: Synthetic peptide
  Seed: LQSSDDFALI
LQSSDDFALL

SEQ ID NO: 156193 - protein, 10 aa, Artificial Sequence
  Description of Artificial Sequence: Synthetic peptide
  Seed: LQSSDDFALI
LQSSDDFALM

SEQ ID NO: 156194 - protein, 10 aa, Artificial Sequence
  Description of Artificial Sequence: Synthetic peptide
  Seed: LQSSDDFALI
LQSSDDFALV

SEQ ID NO: 156195 - protein, 9 aa, Artificial Sequence
  Description of Artificial Sequence: Synthetic peptide
  Seed: LQSSDDFAL
LQSSDDFAM

SEQ ID NO: 156196 - protein, 9 aa, Artificial Sequence
  Description of Artificial Sequence: Synthetic peptide
  Seed: LQSSDDFAL
LQSSDDFAV

SEQ ID NO: 156197 - protein, 9 aa, Artificial Sequence
  Description of Artificial Sequence: Synthetic peptide
  Seed: LQSSDDFAL
LQSSDDFAW

SEQ ID NO: 156198 - protein, 9 aa, Artificial Sequence
  Description of Artificial Sequence: Synthetic peptide
  Seed: LQSSDDFAL
LQSSDDFAY

SEQ ID NO: 156199 - protein, 10 aa, Artificial Sequence
  Description of Artificial Sequence: Synthetic peptide
  Seed: LNTMTKDAER
LQTMTKDAEK

SEQ ID NO: 156200 - protein, 10 aa, Artificial Sequence
  Description of Artificial Sequence: Synthetic peptide
  Seed: LNTMTKDAER
LQTMTKDAER

SEQ ID NO: 156201 - protein, 10 aa, Artificial Sequence
  Description of Artificial Sequence: Synthetic peptide
  Seed: LSTVLGVSIL
LQTVLGVSIF

SEQ ID NO: 156202 - protein, 10 aa, Artificial Sequence
  Description of Artificial Sequence: Synthetic peptide
  Seed: LSTVLGVSIL
LQTVLGVSIM

SEQ ID NO: 156203 - protein, 10 aa, Artificial Sequence
  Description of Artificial Sequence: Synthetic peptide
  Seed: LSTVLGVSIL
LQTVLGVSIW

SEQ ID NO: 156204 - protein, 10 aa, Artificial Sequence
  Description of Artificial Sequence: Synthetic peptide
  Seed: LSTVLGVSIL
LQTVLGVSIY

SEQ ID NO: 156205 - protein, 9 aa, Artificial Sequence
  Description of Artificial Sequence: Synthetic peptide
  Seed: LSTVLGVSI
LQTVLGVSW

SEQ ID NO: 156206 - protein, 9 aa, Artificial Sequence
  Description of Artificial Sequence: Synthetic peptide
  Seed: LQLFIKDYR
LRLFIKDYR

SEQ ID NO: 156207 - protein, 10 aa, Artificial Sequence
  Description of Artificial Sequence: Synthetic peptide
  Seed: LQLFIKDYRY
LRLFIKDYRK

SEQ ID NO: 156208 - protein, 10 aa, Artificial Sequence
  Description of Artificial Sequence: Synthetic peptide
  Seed: LQLFIKDYRY
LRLFIKDYRR

SEQ ID NO: 156209 - protein, 10 aa, Artificial Sequence
  Description of Artificial Sequence: Synthetic peptide
  Seed: LQLFIKDYRY
LRLFIKDYRY

SEQ ID NO: 156210 - protein, 9 aa, Artificial Sequence
  Description of Artificial Sequence: Synthetic peptide
  Seed: LQSSDDFAL
LRSSDDFAF

SEQ ID NO: 156211 - protein, 9 aa, Artificial Sequence
  Description of Artificial Sequence: Synthetic peptide
  Seed: LQSSDDFAL
LRSSDDFAI

SEQ ID NO: 156212 - protein, 9 aa, Artificial Sequence
  Description of Artificial Sequence: Synthetic peptide
  Seed: LQSSDDFAL
LRSSDDFAL

SEQ ID NO: 156213 - protein, 10 aa, Artificial Sequence
  Description of Artificial Sequence: Synthetic peptide
  Seed: LQSSDDFALI
LRSSDDFALV

SEQ ID NO: 156214 - protein, 9 aa, Artificial Sequence
  Description of Artificial Sequence: Synthetic peptide
  Seed: LQSSDDFAL
LRSSDDFAM

SEQ ID NO: 156215 - protein, 9 aa, Artificial Sequence
  Description of Artificial Sequence: Synthetic peptide
  Seed: LQSSDDFAL
LRSSDDFAV

SEQ ID NO: 156216 - protein, 9 aa, Artificial Sequence
  Description of Artificial Sequence: Synthetic peptide
  Seed: LQSSDDFAL
LRSSDDFAY

SEQ ID NO: 156217 - protein, 10 aa, Artificial Sequence
  Description of Artificial Sequence: Synthetic peptide
  Seed: LNTMTKDAER
LRTMTKDAEK

SEQ ID NO: 156218 - protein, 10 aa, Artificial Sequence
  Description of Artificial Sequence: Synthetic peptide
  Seed: LNTMTKDAER
LRTMTKDAER

SEQ ID NO: 156219 - protein, 10 aa, Artificial Sequence
  Description of Artificial Sequence: Synthetic peptide
  Seed: LSTVLGVSIL
LRTVLGVSIF

SEQ ID NO: 156220 - protein, 10 aa, Artificial Sequence
  Description of Artificial Sequence: Synthetic peptide
  Seed: LSTVLGVSIL
LRTVLGVSIM

SEQ ID NO: 156221 - protein, 10 aa, Artificial Sequence
  Description of Artificial Sequence: Synthetic peptide
  Seed: LSTVLGVSIL
LRTVLGVSIW

SEQ ID NO: 156222 - protein, 10 aa, Artificial Sequence
  Description of Artificial Sequence: Synthetic peptide
  Seed: LSTVLGVSIL
LRTVLGVSIY

SEQ ID NO: 156223 - protein, 9 aa, Artificial Sequence
  Description of Artificial Sequence: Synthetic peptide
  Seed: LQLFIKDYR
LSLFIKDYK

SEQ ID NO: 156224 - protein, 9 aa, Artificial Sequence
  Description of Artificial Sequence: Synthetic peptide
  Seed: LQLFIKDYR
LSLFIKDYR

SEQ ID NO: 156225 - protein, 10 aa, Artificial Sequence
  Description of Artificial Sequence: Synthetic peptide
  Seed: LQLFIKDYRY
LSLFIKDYRA

SEQ ID NO: 156226 - protein, 10 aa, Artificial Sequence
  Description of Artificial Sequence: Synthetic peptide
  Seed: LQLFIKDYRY
LSLFIKDYRC

SEQ ID NO: 156227 - protein, 10 aa, Artificial Sequence
  Description of Artificial Sequence: Synthetic peptide
  Seed: LQLFIKDYRY
LSLFIKDYRD

SEQ ID NO: 156228 - protein, 10 aa, Artificial Sequence
  Description of Artificial Sequence: Synthetic peptide
  Seed: LQLFIKDYRY
LSLFIKDYRE

SEQ ID NO: 156229 - protein, 10 aa, Artificial Sequence
  Description of Artificial Sequence: Synthetic peptide
  Seed: LQLFIKDYRY
LSLFIKDYRF

SEQ ID NO: 156230 - protein, 10 aa, Artificial Sequence
  Description of Artificial Sequence: Synthetic peptide
  Seed: LQLFIKDYRY
LSLFIKDYRG

SEQ ID NO: 156231 - protein, 10 aa, Artificial Sequence
  Description of Artificial Sequence: Synthetic peptide
  Seed: LQLFIKDYRY
LSLFIKDYRH

SEQ ID NO: 156232 - protein, 10 aa, Artificial Sequence
  Description of Artificial Sequence: Synthetic peptide
  Seed: LQLFIKDYRY
LSLFIKDYRI

SEQ ID NO: 156233 - protein, 10 aa, Artificial Sequence
  Description of Artificial Sequence: Synthetic peptide
  Seed: LQLFIKDYRY
LSLFIKDYRK

SEQ ID NO: 156234 - protein, 10 aa, Artificial Sequence
  Description of Artificial Sequence: Synthetic peptide
  Seed: LQLFIKDYRY
LSLFIKDYRL

SEQ ID NO: 156235 - protein, 10 aa, Artificial Sequence
  Description of Artificial Sequence: Synthetic peptide
  Seed: LQLFIKDYRY
LSLFIKDYRM

SEQ ID NO: 156236 - protein, 10 aa, Artificial Sequence
  Description of Artificial Sequence: Synthetic peptide
  Seed: LQLFIKDYRY
LSLFIKDYRN

SEQ ID NO: 156237 - protein, 10 aa, Artificial Sequence
  Description of Artificial Sequence: Synthetic peptide
  Seed: LQLFIKDYRY
LSLFIKDYRP

SEQ ID NO: 156238 - protein, 10 aa, Artificial Sequence
  Description of Artificial Sequence: Synthetic peptide
  Seed: LQLFIKDYRY
LSLFIKDYRQ

SEQ ID NO: 156239 - protein, 10 aa, Artificial Sequence
  Description of Artificial Sequence: Synthetic peptide
  Seed: LQLFIKDYRY
LSLFIKDYRR

SEQ ID NO: 156240 - protein, 10 aa, Artificial Sequence
  Description of Artificial Sequence: Synthetic peptide
  Seed: LQLFIKDYRY
LSLFIKDYRS

SEQ ID NO: 156241 - protein, 10 aa, Artificial Sequence
  Description of Artificial Sequence: Synthetic peptide
  Seed: LQLFIKDYRY
LSLFIKDYRT

SEQ ID NO: 156242 - protein, 10 aa, Artificial Sequence
  Description of Artificial Sequence: Synthetic peptide
  Seed: LQLFIKDYRY
LSLFIKDYRV

SEQ ID NO: 156243 - protein, 10 aa, Artificial Sequence
  Description of Artificial Sequence: Synthetic peptide
  Seed: LQLFIKDYRY
LSLFIKDYRW

SEQ ID NO: 156244 - protein, 10 aa, Artificial Sequence
  Description of Artificial Sequence: Synthetic peptide
  Seed: LQLFIKDYRY
LSLFIKDYRY

SEQ ID NO: 156245 - protein, 8 aa, Artificial Sequence
  Description of Artificial Sequence: Synthetic peptide
  Seed: LANVVRKM
LSNVVRKM

SEQ ID NO: 156246 - protein, 9 aa, Artificial Sequence
  Description of Artificial Sequence: Synthetic peptide
  Seed: LANVVRKMM
LSNVVRKMF

SEQ ID NO: 156247 - protein, 9 aa, Artificial Sequence
  Description of Artificial Sequence: Synthetic peptide
  Seed: LANVVRKMM
LSNVVRKML

SEQ ID NO: 156248 - protein, 9 aa, Artificial Sequence
  Description of Artificial Sequence: Synthetic peptide
  Seed: LANVVRKMM
LSNVVRKMM

SEQ ID NO: 156249 - protein, 9 aa, Artificial Sequence
  Description of Artificial Sequence: Synthetic peptide
  Seed: LANVVRKMM
LSNVVRKMY

SEQ ID NO: 156250 - protein, 9 aa, Artificial Sequence
  Description of Artificial Sequence: Synthetic peptide
  Seed: LSPGMMMGM
LSPGMMMGF

SEQ ID NO: 156251 - protein, 9 aa, Artificial Sequence
  Description of Artificial Sequence: Synthetic peptide
  Seed: LSPGMMMGM
LSPGMMMGI

SEQ ID NO: 156252 - protein, 9 aa, Artificial Sequence
  Description of Artificial Sequence: Synthetic peptide
  Seed: LSPGMMMGM
LSPGMMMGL

SEQ ID NO: 156253 - protein, 10 aa, Artificial Sequence
  Description of Artificial Sequence: Synthetic peptide
  Seed: LSPGMMMGMF
LSPGMMMGMW

SEQ ID NO: 156254 - protein, 10 aa, Artificial Sequence
  Description of Artificial Sequence: Synthetic peptide
  Seed: LSPGMMMGMF
LSPGMMMGMY

SEQ ID NO: 156255 - protein, 9 aa, Artificial Sequence
  Description of Artificial Sequence: Synthetic peptide
  Seed: LSPGMMMGM
LSPGMMMGW

SEQ ID NO: 156256 - protein, 9 aa, Artificial Sequence
  Description of Artificial Sequence: Synthetic peptide
  Seed: LSPGMMMGM
LSPGMMMGY

SEQ ID NO: 156257 - protein, 9 aa, Artificial Sequence
  Description of Artificial Sequence: Synthetic peptide
  Seed: LQSSDDFAL
LSSSDDFAF

SEQ ID NO: 156258 - protein, 10 aa, Artificial Sequence
  Description of Artificial Sequence: Synthetic peptide
  Seed: LQSSDDFALI
LSSSDDFALL

SEQ ID NO: 156259 - protein, 10 aa, Artificial Sequence
  Description of Artificial Sequence: Synthetic peptide
  Seed: LQSSDDFALI
LSSSDDFALV

SEQ ID NO: 156260 - protein, 9 aa, Artificial Sequence
  Description of Artificial Sequence: Synthetic peptide
  Seed: LQSSDDFAL
LSSSDDFAM

SEQ ID NO: 156261 - protein, 9 aa, Artificial Sequence
  Description of Artificial Sequence: Synthetic peptide
  Seed: LQSSDDFAL
LSSSDDFAV

SEQ ID NO: 156262 - protein, 9 aa, Artificial Sequence
  Description of Artificial Sequence: Synthetic peptide
  Seed: LQSSDDFAL
LSSSDDFAY

SEQ ID NO: 156263 - protein, 10 aa, Artificial Sequence
  Description of Artificial Sequence: Synthetic peptide
  Seed: LNTMTKDAER
LSTMTKDAEK

SEQ ID NO: 156264 - protein, 10 aa, Artificial Sequence
  Description of Artificial Sequence: Synthetic peptide
  Seed: LNTMTKDAER
LSTMTKDAER

SEQ ID NO: 156265 - protein, 9 aa, Artificial Sequence
  Description of Artificial Sequence: Synthetic peptide
  Seed: LSTVLGVSI
LSTVLGVSF

SEQ ID NO: 156266 - protein, 10 aa, Artificial Sequence
  Description of Artificial Sequence: Synthetic peptide
  Seed: LSTVLGVSIL
LSTVLGVSIF

SEQ ID NO: 156267 - protein, 10 aa, Artificial Sequence
  Description of Artificial Sequence: Synthetic peptide
  Seed: LSTVLGVSIL
LSTVLGVSII

SEQ ID NO: 156268 - protein, 10 aa, Artificial Sequence
  Description of Artificial Sequence: Synthetic peptide
  Seed: LSTVLGVSIL
LSTVLGVSIM

SEQ ID NO: 156269 - protein, 10 aa, Artificial Sequence
  Description of Artificial Sequence: Synthetic peptide
  Seed: LSTVLGVSIL
LSTVLGVSIW

SEQ ID NO: 156270 - protein, 10 aa, Artificial Sequence
  Description of Artificial Sequence: Synthetic peptide
  Seed: LSTVLGVSIL
LSTVLGVSIY

SEQ ID NO: 156271 - protein, 9 aa, Artificial Sequence
  Description of Artificial Sequence: Synthetic peptide
  Seed: LSTVLGVSI
LSTVLGVSL

SEQ ID NO: 156272 - protein, 9 aa, Artificial Sequence
  Description of Artificial Sequence: Synthetic peptide
  Seed: LSTVLGVSI
LSTVLGVSM

SEQ ID NO: 156273 - protein, 9 aa, Artificial Sequence
  Description of Artificial Sequence: Synthetic peptide
  Seed: LSTVLGVSI
LSTVLGVSV

SEQ ID NO: 156274 - protein, 9 aa, Artificial Sequence
  Description of Artificial Sequence: Synthetic peptide
  Seed: LSTVLGVSI
LSTVLGVSW

SEQ ID NO: 156275 - protein, 9 aa, Artificial Sequence
  Description of Artificial Sequence: Synthetic peptide
  Seed: LSTVLGVSI
LSTVLGVSY

SEQ ID NO: 156276 - protein, 9 aa, Artificial Sequence
  Description of Artificial Sequence: Synthetic peptide
  Seed: LQLFIKDYR
LTLFIKDYK

SEQ ID NO: 156277 - protein, 9 aa, Artificial Sequence
  Description of Artificial Sequence: Synthetic peptide
  Seed: LQLFIKDYR
LTLFIKDYR

SEQ ID NO: 156278 - protein, 10 aa, Artificial Sequence
  Description of Artificial Sequence: Synthetic peptide
  Seed: LQLFIKDYRY
LTLFIKDYRA

SEQ ID NO: 156279 - protein, 10 aa, Artificial Sequence
  Description of Artificial Sequence: Synthetic peptide
  Seed: LQLFIKDYRY
LTLFIKDYRC

SEQ ID NO: 156280 - protein, 10 aa, Artificial Sequence
  Description of Artificial Sequence: Synthetic peptide
  Seed: LQLFIKDYRY
LTLFIKDYRD

SEQ ID NO: 156281 - protein, 10 aa, Artificial Sequence
  Description of Artificial Sequence: Synthetic peptide
  Seed: LQLFIKDYRY
LTLFIKDYRE

SEQ ID NO: 156282 - protein, 10 aa, Artificial Sequence
  Description of Artificial Sequence: Synthetic peptide
  Seed: LQLFIKDYRY
LTLFIKDYRF

SEQ ID NO: 156283 - protein, 10 aa, Artificial Sequence
  Description of Artificial Sequence: Synthetic peptide
  Seed: LQLFIKDYRY
LTLFIKDYRG

SEQ ID NO: 156284 - protein, 10 aa, Artificial Sequence
  Description of Artificial Sequence: Synthetic peptide
  Seed: LQLFIKDYRY
LTLFIKDYRH

SEQ ID NO: 156285 - protein, 10 aa, Artificial Sequence
  Description of Artificial Sequence: Synthetic peptide
  Seed: LQLFIKDYRY
LTLFIKDYRI

SEQ ID NO: 156286 - protein, 10 aa, Artificial Sequence
  Description of Artificial Sequence: Synthetic peptide
  Seed: LQLFIKDYRY
LTLFIKDYRK

SEQ ID NO: 156287 - protein, 10 aa, Artificial Sequence
  Description of Artificial Sequence: Synthetic peptide
  Seed: LQLFIKDYRY
LTLFIKDYRL

SEQ ID NO: 156288 - protein, 10 aa, Artificial Sequence
  Description of Artificial Sequence: Synthetic peptide
  Seed: LQLFIKDYRY
LTLFIKDYRM

SEQ ID NO: 156289 - protein, 10 aa, Artificial Sequence
  Description of Artificial Sequence: Synthetic peptide
  Seed: LQLFIKDYRY
LTLFIKDYRN

SEQ ID NO: 156290 - protein, 10 aa, Artificial Sequence
  Description of Artificial Sequence: Synthetic peptide
  Seed: LQLFIKDYRY
LTLFIKDYRP

SEQ ID NO: 156291 - protein, 10 aa, Artificial Sequence
  Description of Artificial Sequence: Synthetic peptide
  Seed: LQLFIKDYRY
LTLFIKDYRQ

SEQ ID NO: 156292 - protein, 10 aa, Artificial Sequence
  Description of Artificial Sequence: Synthetic peptide
  Seed: LQLFIKDYRY
LTLFIKDYRR

SEQ ID NO: 156293 - protein, 10 aa, Artificial Sequence
  Description of Artificial Sequence: Synthetic peptide
  Seed: LQLFIKDYRY
LTLFIKDYRS

SEQ ID NO: 156294 - protein, 10 aa, Artificial Sequence
  Description of Artificial Sequence: Synthetic peptide
  Seed: LQLFIKDYRY
LTLFIKDYRT

SEQ ID NO: 156295 - protein, 10 aa, Artificial Sequence
  Description of Artificial Sequence: Synthetic peptide
  Seed: LQLFIKDYRY
LTLFIKDYRV

SEQ ID NO: 156296 - protein, 10 aa, Artificial Sequence
  Description of Artificial Sequence: Synthetic peptide
  Seed: LQLFIKDYRY
LTLFIKDYRW

SEQ ID NO: 156297 - protein, 10 aa, Artificial Sequence
  Description of Artificial Sequence: Synthetic peptide
  Seed: LQLFIKDYRY
LTLFIKDYRY

SEQ ID NO: 156298 - protein, 9 aa, Artificial Sequence
  Description of Artificial Sequence: Synthetic peptide
  Seed: LQLFIKDYR
LTLFIKDYY

SEQ ID NO: 156299 - protein, 9 aa, Artificial Sequence
  Description of Artificial Sequence: Synthetic peptide
  Seed: LANVVRKMM
LTNVVRKMF

SEQ ID NO: 156300 - protein, 9 aa, Artificial Sequence
  Description of Artificial Sequence: Synthetic peptide
  Seed: LANVVRKMM
LTNVVRKML

SEQ ID NO: 156301 - protein, 9 aa, Artificial Sequence
  Description of Artificial Sequence: Synthetic peptide
  Seed: LANVVRKMM
LTNVVRKMM

SEQ ID NO: 156302 - protein, 9 aa, Artificial Sequence
  Description of Artificial Sequence: Synthetic peptide
  Seed: LANVVRKMM
LTNVVRKMY

SEQ ID NO: 156303 - protein, 9 aa, Artificial Sequence
  Description of Artificial Sequence: Synthetic peptide
  Seed: LSPGMMMGM
LTPGMMMGF

SEQ ID NO: 156304 - protein, 9 aa, Artificial Sequence
  Description of Artificial Sequence: Synthetic peptide
  Seed: LSPGMMMGM
LTPGMMMGL

SEQ ID NO: 156305 - protein, 9 aa, Artificial Sequence
  Description of Artificial Sequence: Synthetic peptide
  Seed: LSPGMMMGM
LTPGMMMGM

SEQ ID NO: 156306 - protein, 10 aa, Artificial Sequence
  Description of Artificial Sequence: Synthetic peptide
  Seed: LSPGMMMGMF
LTPGMMMGMF

SEQ ID NO: 156307 - protein, 10 aa, Artificial Sequence
  Description of Artificial Sequence: Synthetic peptide
  Seed: LSPGMMMGMF
LTPGMMMGMW

SEQ ID NO: 156308 - protein, 10 aa, Artificial Sequence
  Description of Artificial Sequence: Synthetic peptide
  Seed: LSPGMMMGMF
LTPGMMMGMY

SEQ ID NO: 156309 - protein, 9 aa, Artificial Sequence
  Description of Artificial Sequence: Synthetic peptide
  Seed: LSPGMMMGM
LTPGMMMGW

SEQ ID NO: 156310 - protein, 9 aa, Artificial Sequence
  Description of Artificial Sequence: Synthetic peptide
  Seed: LSPGMMMGM
LTPGMMMGY

SEQ ID NO: 156311 - protein, 9 aa, Artificial Sequence
  Description of Artificial Sequence: Synthetic peptide
  Seed: LQSSDDFAL
LTSSDDFAF

SEQ ID NO: 156312 - protein, 9 aa, Artificial Sequence
  Description of Artificial Sequence: Synthetic peptide
  Seed: LQSSDDFAL
LTSSDDFAI

SEQ ID NO: 156313 - protein, 9 aa, Artificial Sequence
  Description of Artificial Sequence: Synthetic peptide
  Seed: LQSSDDFAL
LTSSDDFAL

SEQ ID NO: 156314 - protein, 10 aa, Artificial Sequence
  Description of Artificial Sequence: Synthetic peptide
  Seed: LQSSDDFALI
LTSSDDFALA

SEQ ID NO: 156315 - protein, 10 aa, Artificial Sequence
  Description of Artificial Sequence: Synthetic peptide
  Seed: LQSSDDFALI
LTSSDDFALI

SEQ ID NO: 156316 - protein, 10 aa, Artificial Sequence
  Description of Artificial Sequence: Synthetic peptide
  Seed: LQSSDDFALI
LTSSDDFALL

SEQ ID NO: 156317 - protein, 10 aa, Artificial Sequence
  Description of Artificial Sequence: Synthetic peptide
  Seed: LQSSDDFALI
LTSSDDFALM

SEQ ID NO: 156318 - protein, 10 aa, Artificial Sequence
  Description of Artificial Sequence: Synthetic peptide
  Seed: LQSSDDFALI
LTSSDDFALV

SEQ ID NO: 156319 - protein, 9 aa, Artificial Sequence
  Description of Artificial Sequence: Synthetic peptide
  Seed: LQSSDDFAL
LTSSDDFAV

SEQ ID NO: 156320 - protein, 9 aa, Artificial Sequence
  Description of Artificial Sequence: Synthetic peptide
  Seed: LQSSDDFAL
LTSSDDFAY

SEQ ID NO: 156321 - protein, 10 aa, Artificial Sequence
  Description of Artificial Sequence: Synthetic peptide
  Seed: LNTMTKDAER
LTTMTKDAEK

SEQ ID NO: 156322 - protein, 10 aa, Artificial Sequence
  Description of Artificial Sequence: Synthetic peptide
  Seed: LNTMTKDAER
LTTMTKDAER

SEQ ID NO: 156323 - protein, 9 aa, Artificial Sequence
  Description of Artificial Sequence: Synthetic peptide
  Seed: LSTVLGVSI
LTTVLGVSF

SEQ ID NO: 156324 - protein, 9 aa, Artificial Sequence
  Description of Artificial Sequence: Synthetic peptide
  Seed: LSTVLGVSI
LTTVLGVSI

SEQ ID NO: 156325 - protein, 10 aa, Artificial Sequence
  Description of Artificial Sequence: Synthetic peptide
  Seed: LSTVLGVSIL
LTTVLGVSIF

SEQ ID NO: 156326 - protein, 10 aa, Artificial Sequence
  Description of Artificial Sequence: Synthetic peptide
  Seed: LSTVLGVSIL
LTTVLGVSIL

SEQ ID NO: 156327 - protein, 10 aa, Artificial Sequence
  Description of Artificial Sequence: Synthetic peptide
  Seed: LSTVLGVSIL
LTTVLGVSIM

SEQ ID NO: 156328 - protein, 10 aa, Artificial Sequence
  Description of Artificial Sequence: Synthetic peptide
  Seed: LSTVLGVSIL
LTTVLGVSIW

SEQ ID NO: 156329 - protein, 10 aa, Artificial Sequence
  Description of Artificial Sequence: Synthetic peptide
  Seed: LSTVLGVSIL
LTTVLGVSIY

SEQ ID NO: 156330 - protein, 9 aa, Artificial Sequence
  Description of Artificial Sequence: Synthetic peptide
  Seed: LSTVLGVSI
LTTVLGVSL

SEQ ID NO: 156331 - protein, 9 aa, Artificial Sequence
  Description of Artificial Sequence: Synthetic peptide
  Seed: LSTVLGVSI
LTTVLGVSM

SEQ ID NO: 156332 - protein, 9 aa, Artificial Sequence
  Description of Artificial Sequence: Synthetic peptide
  Seed: LSTVLGVSI
LTTVLGVSW

SEQ ID NO: 156333 - protein, 9 aa, Artificial Sequence
  Description of Artificial Sequence: Synthetic peptide
  Seed: LSTVLGVSI
LTTVLGVSY

SEQ ID NO: 156334 - protein, 9 aa, Artificial Sequence
  Description of Artificial Sequence: Synthetic peptide
  Seed: LQLFIKDYR
LVLFIKDYK

SEQ ID NO: 156335 - protein, 9 aa, Artificial Sequence
  Description of Artificial Sequence: Synthetic peptide
  Seed: LQLFIKDYR
LVLFIKDYR

SEQ ID NO: 156336 - protein, 10 aa, Artificial Sequence
  Description of Artificial Sequence: Synthetic peptide
  Seed: LQLFIKDYRY
LVLFIKDYRA

SEQ ID NO: 156337 - protein, 10 aa, Artificial Sequence
  Description of Artificial Sequence: Synthetic peptide
  Seed: LQLFIKDYRY
LVLFIKDYRC

SEQ ID NO: 156338 - protein, 10 aa, Artificial Sequence
  Description of Artificial Sequence: Synthetic peptide
  Seed: LQLFIKDYRY
LVLFIKDYRD

SEQ ID NO: 156339 - protein, 10 aa, Artificial Sequence
  Description of Artificial Sequence: Synthetic peptide
  Seed: LQLFIKDYRY
LVLFIKDYRE

SEQ ID NO: 156340 - protein, 10 aa, Artificial Sequence
  Description of Artificial Sequence: Synthetic peptide
  Seed: LQLFIKDYRY
LVLFIKDYRF

SEQ ID NO: 156341 - protein, 10 aa, Artificial Sequence
  Description of Artificial Sequence: Synthetic peptide
  Seed: LQLFIKDYRY
LVLFIKDYRG

SEQ ID NO: 156342 - protein, 10 aa, Artificial Sequence
  Description of Artificial Sequence: Synthetic peptide
  Seed: LQLFIKDYRY
LVLFIKDYRH

SEQ ID NO: 156343 - protein, 10 aa, Artificial Sequence
  Description of Artificial Sequence: Synthetic peptide
  Seed: LQLFIKDYRY
LVLFIKDYRI

SEQ ID NO: 156344 - protein, 10 aa, Artificial Sequence
  Description of Artificial Sequence: Synthetic peptide
  Seed: LQLFIKDYRY
LVLFIKDYRK

SEQ ID NO: 156345 - protein, 10 aa, Artificial Sequence
  Description of Artificial Sequence: Synthetic peptide
  Seed: LQLFIKDYRY
LVLFIKDYRL

SEQ ID NO: 156346 - protein, 10 aa, Artificial Sequence
  Description of Artificial Sequence: Synthetic peptide
  Seed: LQLFIKDYRY
LVLFIKDYRM

SEQ ID NO: 156347 - protein, 10 aa, Artificial Sequence
  Description of Artificial Sequence: Synthetic peptide
  Seed: LQLFIKDYRY
LVLFIKDYRN

SEQ ID NO: 156348 - protein, 10 aa, Artificial Sequence
  Description of Artificial Sequence: Synthetic peptide
  Seed: LQLFIKDYRY
LVLFIKDYRP

SEQ ID NO: 156349 - protein, 10 aa, Artificial Sequence
  Description of Artificial Sequence: Synthetic peptide
  Seed: LQLFIKDYRY
LVLFIKDYRQ

SEQ ID NO: 156350 - protein, 10 aa, Artificial Sequence
  Description of Artificial Sequence: Synthetic peptide
  Seed: LQLFIKDYRY
LVLFIKDYRR

SEQ ID NO: 156351 - protein, 10 aa, Artificial Sequence
  Description of Artificial Sequence: Synthetic peptide
  Seed: LQLFIKDYRY
LVLFIKDYRS

SEQ ID NO: 156352 - protein, 10 aa, Artificial Sequence
  Description of Artificial Sequence: Synthetic peptide
  Seed: LQLFIKDYRY
LVLFIKDYRT

SEQ ID NO: 156353 - protein, 10 aa, Artificial Sequence
  Description of Artificial Sequence: Synthetic peptide
  Seed: LQLFIKDYRY
LVLFIKDYRV

SEQ ID NO: 156354 - protein, 10 aa, Artificial Sequence
  Description of Artificial Sequence: Synthetic peptide
  Seed: LQLFIKDYRY
LVLFIKDYRW

SEQ ID NO: 156355 - protein, 10 aa, Artificial Sequence
  Description of Artificial Sequence: Synthetic peptide
  Seed: LQLFIKDYRY
LVLFIKDYRY

SEQ ID NO: 156356 - protein, 9 aa, Artificial Sequence
  Description of Artificial Sequence: Synthetic peptide
  Seed: LQLFIKDYR
LVLFIKDYY

SEQ ID NO: 156357 - protein, 9 aa, Artificial Sequence
  Description of Artificial Sequence: Synthetic peptide
  Seed: LSPGMMMGM
LVPGMMMGL

SEQ ID NO: 156358 - protein, 9 aa, Artificial Sequence
  Description of Artificial Sequence: Synthetic peptide
  Seed: LSPGMMMGM
LVPGMMMGW

SEQ ID NO: 156359 - protein, 9 aa, Artificial Sequence
  Description of Artificial Sequence: Synthetic peptide
  Seed: LSPGMMMGM
LVPGMMMGY

SEQ ID NO: 156360 - protein, 9 aa, Artificial Sequence
  Description of Artificial Sequence: Synthetic peptide
  Seed: LQSSDDFAL
LVSSDDFAF

SEQ ID NO: 156361 - protein, 9 aa, Artificial Sequence
  Description of Artificial Sequence: Synthetic peptide
  Seed: LQSSDDFAL
LVSSDDFAI

SEQ ID NO: 156362 - protein, 9 aa, Artificial Sequence
  Description of Artificial Sequence: Synthetic peptide
  Seed: LQSSDDFAL
LVSSDDFAL

SEQ ID NO: 156363 - protein, 10 aa, Artificial Sequence
  Description of Artificial Sequence: Synthetic peptide
  Seed: LQSSDDFALI
LVSSDDFALA

SEQ ID NO: 156364 - protein, 10 aa, Artificial Sequence
  Description of Artificial Sequence: Synthetic peptide
  Seed: LQSSDDFALI
LVSSDDFALI

SEQ ID NO: 156365 - protein, 10 aa, Artificial Sequence
  Description of Artificial Sequence: Synthetic peptide
  Seed: LQSSDDFALI
LVSSDDFALL

SEQ ID NO: 156366 - protein, 10 aa, Artificial Sequence
  Description of Artificial Sequence: Synthetic peptide
  Seed: LQSSDDFALI
LVSSDDFALM

SEQ ID NO: 156367 - protein, 10 aa, Artificial Sequence
  Description of Artificial Sequence: Synthetic peptide
  Seed: LQSSDDFALI
LVSSDDFALV

SEQ ID NO: 156368 - protein, 9 aa, Artificial Sequence
  Description of Artificial Sequence: Synthetic peptide
  Seed: LQSSDDFAL
LVSSDDFAM

SEQ ID NO: 156369 - protein, 9 aa, Artificial Sequence
  Description of Artificial Sequence: Synthetic peptide
  Seed: LQSSDDFAL
LVSSDDFAV

SEQ ID NO: 156370 - protein, 9 aa, Artificial Sequence
  Description of Artificial Sequence: Synthetic peptide
  Seed: LQSSDDFAL
LVSSDDFAY

SEQ ID NO: 156371 - protein, 10 aa, Artificial Sequence
  Description of Artificial Sequence: Synthetic peptide
  Seed: LNTMTKDAER
LVTMTKDAEK

SEQ ID NO: 156372 - protein, 10 aa, Artificial Sequence
  Description of Artificial Sequence: Synthetic peptide
  Seed: LNTMTKDAER
LVTMTKDAER

SEQ ID NO: 156373 - protein, 9 aa, Artificial Sequence
  Description of Artificial Sequence: Synthetic peptide
  Seed: LSTVLGVSI
LVTVLGVSF

SEQ ID NO: 156374 - protein, 10 aa, Artificial Sequence
  Description of Artificial Sequence: Synthetic peptide
  Seed: LSTVLGVSIL
LVTVLGVSIF

SEQ ID NO: 156375 - protein, 10 aa, Artificial Sequence
  Description of Artificial Sequence: Synthetic peptide
  Seed: LSTVLGVSIL
LVTVLGVSIM

SEQ ID NO: 156376 - protein, 10 aa, Artificial Sequence
  Description of Artificial Sequence: Synthetic peptide
  Seed: LSTVLGVSIL
LVTVLGVSIW

SEQ ID NO: 156377 - protein, 10 aa, Artificial Sequence
  Description of Artificial Sequence: Synthetic peptide
  Seed: LSTVLGVSIL
LVTVLGVSIY

SEQ ID NO: 156378 - protein, 9 aa, Artificial Sequence
  Description of Artificial Sequence: Synthetic peptide
  Seed: LSTVLGVSI
LVTVLGVSL

SEQ ID NO: 156379 - protein, 9 aa, Artificial Sequence
  Description of Artificial Sequence: Synthetic peptide
  Seed: LSTVLGVSI
LVTVLGVSM

SEQ ID NO: 156380 - protein, 9 aa, Artificial Sequence
  Description of Artificial Sequence: Synthetic peptide
  Seed: LSTVLGVSI
LVTVLGVSW

SEQ ID NO: 156381 - protein, 9 aa, Artificial Sequence
  Description of Artificial Sequence: Synthetic peptide
  Seed: LSTVLGVSI
LVTVLGVSY

SEQ ID NO: 156382 - protein, 9 aa, Artificial Sequence
  Description of Artificial Sequence: Synthetic peptide
  Seed: LQLFIKDYR
LWLFIKDYK

SEQ ID NO: 156383 - protein, 9 aa, Artificial Sequence
  Description of Artificial Sequence: Synthetic peptide
  Seed: LQLFIKDYR
LWLFIKDYR

SEQ ID NO: 156384 - protein, 10 aa, Artificial Sequence
  Description of Artificial Sequence: Synthetic peptide
  Seed: LQLFIKDYRY
LWLFIKDYRF

SEQ ID NO: 156385 - protein, 10 aa, Artificial Sequence
  Description of Artificial Sequence: Synthetic peptide
  Seed: LQLFIKDYRY
LWLFIKDYRH

SEQ ID NO: 156386 - protein, 10 aa, Artificial Sequence
  Description of Artificial Sequence: Synthetic peptide
  Seed: LQLFIKDYRY
LWLFIKDYRK

SEQ ID NO: 156387 - protein, 10 aa, Artificial Sequence
  Description of Artificial Sequence: Synthetic peptide
  Seed: LQLFIKDYRY
LWLFIKDYRR

SEQ ID NO: 156388 - protein, 10 aa, Artificial Sequence
  Description of Artificial Sequence: Synthetic peptide
  Seed: LQLFIKDYRY
LWLFIKDYRY

SEQ ID NO: 156389 - protein, 10 aa, Artificial Sequence
  Description of Artificial Sequence: Synthetic peptide
  Seed: LQSSDDFALI
LWSSDDFALL

SEQ ID NO: 156390 - protein, 10 aa, Artificial Sequence
  Description of Artificial Sequence: Synthetic peptide
  Seed: LQSSDDFALI
LWSSDDFALV

SEQ ID NO: 156391 - protein, 10 aa, Artificial Sequence
  Description of Artificial Sequence: Synthetic peptide
  Seed: LNTMTKDAER
LWTMTKDAEK

SEQ ID NO: 156392 - protein, 10 aa, Artificial Sequence
  Description of Artificial Sequence: Synthetic peptide
  Seed: LNTMTKDAER
LWTMTKDAER

SEQ ID NO: 156393 - protein, 10 aa, Artificial Sequence
  Description of Artificial Sequence: Synthetic peptide
  Seed: LSTVLGVSIL
LWTVLGVSIF

SEQ ID NO: 156394 - protein, 10 aa, Artificial Sequence
  Description of Artificial Sequence: Synthetic peptide
  Seed: LSTVLGVSIL
LWTVLGVSIM

SEQ ID NO: 156395 - protein, 10 aa, Artificial Sequence
  Description of Artificial Sequence: Synthetic peptide
  Seed: LSTVLGVSIL
LWTVLGVSIW

SEQ ID NO: 156396 - protein, 10 aa, Artificial Sequence
  Description of Artificial Sequence: Synthetic peptide
  Seed: LSTVLGVSIL
LWTVLGVSIY

SEQ ID NO: 156397 - protein, 9 aa, Artificial Sequence
  Description of Artificial Sequence: Synthetic peptide
  Seed: LQLFIKDYR
LYLFIKDYK

SEQ ID NO: 156398 - protein, 9 aa, Artificial Sequence
  Description of Artificial Sequence: Synthetic peptide
  Seed: LQLFIKDYR
LYLFIKDYR

SEQ ID NO: 156399 - protein, 10 aa, Artificial Sequence
  Description of Artificial Sequence: Synthetic peptide
  Seed: LQLFIKDYRY
LYLFIKDYRA

SEQ ID NO: 156400 - protein, 10 aa, Artificial Sequence
  Description of Artificial Sequence: Synthetic peptide
  Seed: LQLFIKDYRY
LYLFIKDYRC

SEQ ID NO: 156401 - protein, 10 aa, Artificial Sequence
  Description of Artificial Sequence: Synthetic peptide
  Seed: LQLFIKDYRY
LYLFIKDYRD

SEQ ID NO: 156402 - protein, 10 aa, Artificial Sequence
  Description of Artificial Sequence: Synthetic peptide
  Seed: LQLFIKDYRY
LYLFIKDYRE

SEQ ID NO: 156403 - protein, 10 aa, Artificial Sequence
  Description of Artificial Sequence: Synthetic peptide
  Seed: LQLFIKDYRY
LYLFIKDYRF

SEQ ID NO: 156404 - protein, 10 aa, Artificial Sequence
  Description of Artificial Sequence: Synthetic peptide
  Seed: LQLFIKDYRY
LYLFIKDYRG

SEQ ID NO: 156405 - protein, 10 aa, Artificial Sequence
  Description of Artificial Sequence: Synthetic peptide
  Seed: LQLFIKDYRY
LYLFIKDYRH

SEQ ID NO: 156406 - protein, 10 aa, Artificial Sequence
  Description of Artificial Sequence: Synthetic peptide
  Seed: LQLFIKDYRY
LYLFIKDYRI

SEQ ID NO: 156407 - protein, 10 aa, Artificial Sequence
  Description of Artificial Sequence: Synthetic peptide
  Seed: LQLFIKDYRY
LYLFIKDYRK

SEQ ID NO: 156408 - protein, 10 aa, Artificial Sequence
  Description of Artificial Sequence: Synthetic peptide
  Seed: LQLFIKDYRY
LYLFIKDYRL

SEQ ID NO: 156409 - protein, 10 aa, Artificial Sequence
  Description of Artificial Sequence: Synthetic peptide
  Seed: LQLFIKDYRY
LYLFIKDYRM

SEQ ID NO: 156410 - protein, 10 aa, Artificial Sequence
  Description of Artificial Sequence: Synthetic peptide
  Seed: LQLFIKDYRY
LYLFIKDYRN

SEQ ID NO: 156411 - protein, 10 aa, Artificial Sequence
  Description of Artificial Sequence: Synthetic peptide
  Seed: LQLFIKDYRY
LYLFIKDYRP

SEQ ID NO: 156412 - protein, 10 aa, Artificial Sequence
  Description of Artificial Sequence: Synthetic peptide
  Seed: LQLFIKDYRY
LYLFIKDYRQ

SEQ ID NO: 156413 - protein, 10 aa, Artificial Sequence
  Description of Artificial Sequence: Synthetic peptide
  Seed: LQLFIKDYRY
LYLFIKDYRR

SEQ ID NO: 156414 - protein, 10 aa, Artificial Sequence
  Description of Artificial Sequence: Synthetic peptide
  Seed: LQLFIKDYRY
LYLFIKDYRS

SEQ ID NO: 156415 - protein, 10 aa, Artificial Sequence
  Description of Artificial Sequence: Synthetic peptide
  Seed: LQLFIKDYRY
LYLFIKDYRT

SEQ ID NO: 156416 - protein, 10 aa, Artificial Sequence
  Description of Artificial Sequence: Synthetic peptide
  Seed: LQLFIKDYRY
LYLFIKDYRV

SEQ ID NO: 156417 - protein, 10 aa, Artificial Sequence
  Description of Artificial Sequence: Synthetic peptide
  Seed: LQLFIKDYRY
LYLFIKDYRW

SEQ ID NO: 156418 - protein, 10 aa, Artificial Sequence
  Description of Artificial Sequence: Synthetic peptide
  Seed: LQLFIKDYRY
LYLFIKDYRY

SEQ ID NO: 156419 - protein, 9 aa, Artificial Sequence
  Description of Artificial Sequence: Synthetic peptide
  Seed: LQSSDDFAL
LYSSDDFAF

SEQ ID NO: 156420 - protein, 10 aa, Artificial Sequence
  Description of Artificial Sequence: Synthetic peptide
  Seed: LQSSDDFALI
LYSSDDFALI

SEQ ID NO: 156421 - protein, 10 aa, Artificial Sequence
  Description of Artificial Sequence: Synthetic peptide
  Seed: LQSSDDFALI
LYSSDDFALL

SEQ ID NO: 156422 - protein, 10 aa, Artificial Sequence
  Description of Artificial Sequence: Synthetic peptide
  Seed: LQSSDDFALI
LYSSDDFALV

SEQ ID NO: 156423 - protein, 10 aa, Artificial Sequence
  Description of Artificial Sequence: Synthetic peptide
  Seed: LNTMTKDAER
LYTMTKDAEK

SEQ ID NO: 156424 - protein, 10 aa, Artificial Sequence
  Description of Artificial Sequence: Synthetic peptide
  Seed: LNTMTKDAER
LYTMTKDAER

SEQ ID NO: 156425 - protein, 10 aa, Artificial Sequence
  Description of Artificial Sequence: Synthetic peptide
  Seed: LSTVLGVSIL
LYTVLGVSIF

SEQ ID NO: 156426 - protein, 10 aa, Artificial Sequence
  Description of Artificial Sequence: Synthetic peptide
  Seed: LSTVLGVSIL
LYTVLGVSIM

SEQ ID NO: 156427 - protein, 10 aa, Artificial Sequence
  Description of Artificial Sequence: Synthetic peptide
  Seed: LSTVLGVSIL
LYTVLGVSIW

SEQ ID NO: 156428 - protein, 10 aa, Artificial Sequence
  Description of Artificial Sequence: Synthetic peptide
  Seed: LSTVLGVSIL
LYTVLGVSIY

SEQ ID NO: 156429 - protein, 9 aa, Artificial Sequence
  Description of Artificial Sequence: Synthetic peptide
  Seed: MMGMFNMLS
MAGMFNMLA

SEQ ID NO: 156430 - protein, 9 aa, Artificial Sequence
  Description of Artificial Sequence: Synthetic peptide
  Seed: MMGMFNMLS
MAGMFNMLI

SEQ ID NO: 156431 - protein, 9 aa, Artificial Sequence
  Description of Artificial Sequence: Synthetic peptide
  Seed: MMGMFNMLS
MAGMFNMLL

SEQ ID NO: 156432 - protein, 10 aa, Artificial Sequence
  Description of Artificial Sequence: Synthetic peptide
  Seed: MMGMFNMLST
MAGMFNMLSA

SEQ ID NO: 156433 - protein, 10 aa, Artificial Sequence
  Description of Artificial Sequence: Synthetic peptide
  Seed: MMGMFNMLST
MAGMFNMLSI

SEQ ID NO: 156434 - protein, 10 aa, Artificial Sequence
  Description of Artificial Sequence: Synthetic peptide
  Seed: MMGMFNMLST
MAGMFNMLSL

SEQ ID NO: 156435 - protein, 11 aa, Artificial Sequence
  Description of Artificial Sequence: Synthetic peptide
  Seed: MMGMFNMLSTV
MAGMFNMLSTA

SEQ ID NO: 156436 - protein, 11 aa, Artificial Sequence
  Description of Artificial Sequence: Synthetic peptide
  Seed: MMGMFNMLSTV
MAGMFNMLSTI

SEQ ID NO: 156437 - protein, 11 aa, Artificial Sequence
  Description of Artificial Sequence: Synthetic peptide
  Seed: MMGMFNMLSTV
MAGMFNMLSTL

SEQ ID NO: 156438 - protein, 11 aa, Artificial Sequence
  Description of Artificial Sequence: Synthetic peptide
  Seed: MMGMFNMLSTV
MAGMFNMLSTM

SEQ ID NO: 156439 - protein, 11 aa, Artificial Sequence
  Description of Artificial Sequence: Synthetic peptide
  Seed: MMGMFNMLSTV
MAGMFNMLSTT

SEQ ID NO: 156440 - protein, 11 aa, Artificial Sequence
  Description of Artificial Sequence: Synthetic peptide
  Seed: MMGMFNMLSTV
MAGMFNMLSTV

SEQ ID NO: 156441 - protein, 10 aa, Artificial Sequence
  Description of Artificial Sequence: Synthetic peptide
  Seed: MMGMFNMLST
MAGMFNMLSV

SEQ ID NO: 156442 - protein, 9 aa, Artificial Sequence
  Description of Artificial Sequence: Synthetic peptide
  Seed: MMGMFNMLS
MAGMFNMLV

SEQ ID NO: 156443 - protein, 8 aa, Artificial Sequence
  Description of Artificial Sequence: Synthetic peptide
  Seed: MSIGVTVI
MAIGVTVF

SEQ ID NO: 156444 - protein, 8 aa, Artificial Sequence
  Description of Artificial Sequence: Synthetic peptide
  Seed: MSIGVTVI
MAIGVTVI

SEQ ID NO: 156445 - protein, 9 aa, Artificial Sequence
  Description of Artificial Sequence: Synthetic peptide
  Seed: MSIGVTVIK
MAIGVTVIA

SEQ ID NO: 156446 - protein, 9 aa, Artificial Sequence
  Description of Artificial Sequence: Synthetic peptide
  Seed: MSIGVTVIK
MAIGVTVIF

SEQ ID NO: 156447 - protein, 9 aa, Artificial Sequence
  Description of Artificial Sequence: Synthetic peptide
  Seed: MSIGVTVIK
MAIGVTVIH

SEQ ID NO: 156448 - protein, 9 aa, Artificial Sequence
  Description of Artificial Sequence: Synthetic peptide
  Seed: MSIGVTVIK
MAIGVTVII

SEQ ID NO: 156449 - protein, 9 aa, Artificial Sequence
  Description of Artificial Sequence: Synthetic peptide
  Seed: MSIGVTVIK
MAIGVTVIK

SEQ ID NO: 156450 - protein, 10 aa, Artificial Sequence
  Description of Artificial Sequence: Synthetic peptide
  Seed: MSIGVTVIKN
MAIGVTVIKA

SEQ ID NO: 156451 - protein, 10 aa, Artificial Sequence
  Description of Artificial Sequence: Synthetic peptide
  Seed: MSIGVTVIKN
MAIGVTVIKC

SEQ ID NO: 156452 - protein, 10 aa, Artificial Sequence
  Description of Artificial Sequence: Synthetic peptide
  Seed: MSIGVTVIKN
MAIGVTVIKD

SEQ ID NO: 156453 - protein, 10 aa, Artificial Sequence
  Description of Artificial Sequence: Synthetic peptide
  Seed: MSIGVTVIKN
MAIGVTVIKE

SEQ ID NO: 156454 - protein, 10 aa, Artificial Sequence
  Description of Artificial Sequence: Synthetic peptide
  Seed: MSIGVTVIKN
MAIGVTVIKF

SEQ ID NO: 156455 - protein, 10 aa, Artificial Sequence
  Description of Artificial Sequence: Synthetic peptide
  Seed: MSIGVTVIKN
MAIGVTVIKG

SEQ ID NO: 156456 - protein, 10 aa, Artificial Sequence
  Description of Artificial Sequence: Synthetic peptide
  Seed: MSIGVTVIKN
MAIGVTVIKH

SEQ ID NO: 156457 - protein, 10 aa, Artificial Sequence
  Description of Artificial Sequence: Synthetic peptide
  Seed: MSIGVTVIKN
MAIGVTVIKI

SEQ ID NO: 156458 - protein, 10 aa, Artificial Sequence
  Description of Artificial Sequence: Synthetic peptide
  Seed: MSIGVTVIKN
MAIGVTVIKK

SEQ ID NO: 156459 - protein, 10 aa, Artificial Sequence
  Description of Artificial Sequence: Synthetic peptide
  Seed: MSIGVTVIKN
MAIGVTVIKL

SEQ ID NO: 156460 - protein, 10 aa, Artificial Sequence
  Description of Artificial Sequence: Synthetic peptide
  Seed: MSIGVTVIKN
MAIGVTVIKM

SEQ ID NO: 156461 - protein, 10 aa, Artificial Sequence
  Description of Artificial Sequence: Synthetic peptide
  Seed: MSIGVTVIKN
MAIGVTVIKN

SEQ ID NO: 156462 - protein, 10 aa, Artificial Sequence
  Description of Artificial Sequence: Synthetic peptide
  Seed: MSIGVTVIKN
MAIGVTVIKP

SEQ ID NO: 156463 - protein, 10 aa, Artificial Sequence
  Description of Artificial Sequence: Synthetic peptide
  Seed: MSIGVTVIKN
MAIGVTVIKQ

SEQ ID NO: 156464 - protein, 10 aa, Artificial Sequence
  Description of Artificial Sequence: Synthetic peptide
  Seed: MSIGVTVIKN
MAIGVTVIKR

SEQ ID NO: 156465 - protein, 10 aa, Artificial Sequence
  Description of Artificial Sequence: Synthetic peptide
  Seed: MSIGVTVIKN
MAIGVTVIKS

SEQ ID NO: 156466 - protein, 10 aa, Artificial Sequence
  Description of Artificial Sequence: Synthetic peptide
  Seed: MSIGVTVIKN
MAIGVTVIKT

SEQ ID NO: 156467 - protein, 10 aa, Artificial Sequence
  Description of Artificial Sequence: Synthetic peptide
  Seed: MSIGVTVIKN
MAIGVTVIKV

SEQ ID NO: 156468 - protein, 10 aa, Artificial Sequence
  Description of Artificial Sequence: Synthetic peptide
  Seed: MSIGVTVIKN
MAIGVTVIKW

SEQ ID NO: 156469 - protein, 10 aa, Artificial Sequence
  Description of Artificial Sequence: Synthetic peptide
  Seed: MSIGVTVIKN
MAIGVTVIKY

SEQ ID NO: 156470 - protein, 9 aa, Artificial Sequence
  Description of Artificial Sequence: Synthetic peptide
  Seed: MSIGVTVIK
MAIGVTVIL

SEQ ID NO: 156471 - protein, 9 aa, Artificial Sequence
  Description of Artificial Sequence: Synthetic peptide
  Seed: MSIGVTVIK
MAIGVTVIM

SEQ ID NO: 156472 - protein, 9 aa, Artificial Sequence
  Description of Artificial Sequence: Synthetic peptide
  Seed: MSIGVTVIK
MAIGVTVIQ

SEQ ID NO: 156473 - protein, 9 aa, Artificial Sequence
  Description of Artificial Sequence: Synthetic peptide
  Seed: MSIGVTVIK
MAIGVTVIR

SEQ ID NO: 156474 - protein, 9 aa, Artificial Sequence
  Description of Artificial Sequence: Synthetic peptide
  Seed: MSIGVTVIK
MAIGVTVIV

SEQ ID NO: 156475 - protein, 9 aa, Artificial Sequence
  Description of Artificial Sequence: Synthetic peptide
  Seed: MSIGVTVIK
MAIGVTVIY

SEQ ID NO: 156476 - protein, 8 aa, Artificial Sequence
  Description of Artificial Sequence: Synthetic peptide
  Seed: MSIGVTVI
MAIGVTVL

SEQ ID NO: 156477 - protein, 8 aa, Artificial Sequence
  Description of Artificial Sequence: Synthetic peptide
  Seed: MSIGVTVI
MAIGVTVM

SEQ ID NO: 156478 - protein, 8 aa, Artificial Sequence
  Description of Artificial Sequence: Synthetic peptide
  Seed: MSIGVTVI
MAIGVTVV

SEQ ID NO: 156479 - protein, 8 aa, Artificial Sequence
  Description of Artificial Sequence: Synthetic peptide
  Seed: MSIGVTVI
MAIGVTVW

SEQ ID NO: 156480 - protein, 8 aa, Artificial Sequence
  Description of Artificial Sequence: Synthetic peptide
  Seed: MSIGVTVI
MAIGVTVY

SEQ ID NO: 156481 - protein, 9 aa, Artificial Sequence
  Description of Artificial Sequence: Synthetic peptide
  Seed: MTKDAERGK
MAKDAERGK

SEQ ID NO: 156482 - protein, 9 aa, Artificial Sequence
  Description of Artificial Sequence: Synthetic peptide
  Seed: MTKDAERGK
MAKDAERGR

SEQ ID NO: 156483 - protein, 10 aa, Artificial Sequence
  Description of Artificial Sequence: Synthetic peptide
  Seed: MGMFNMLSTV
MAMFNMLSTA

SEQ ID NO: 156484 - protein, 10 aa, Artificial Sequence
  Description of Artificial Sequence: Synthetic peptide
  Seed: MGMFNMLSTV
MAMFNMLSTC

SEQ ID NO: 156485 - protein, 10 aa, Artificial Sequence
  Description of Artificial Sequence: Synthetic peptide
  Seed: MGMFNMLSTV
MAMFNMLSTF

SEQ ID NO: 156486 - protein, 10 aa, Artificial Sequence
  Description of Artificial Sequence: Synthetic peptide
  Seed: MGMFNMLSTV
MAMFNMLSTG

SEQ ID NO: 156487 - protein, 10 aa, Artificial Sequence
  Description of Artificial Sequence: Synthetic peptide
  Seed: MGMFNMLSTV
MAMFNMLSTH

SEQ ID NO: 156488 - protein, 10 aa, Artificial Sequence
  Description of Artificial Sequence: Synthetic peptide
  Seed: MGMFNMLSTV
MAMFNMLSTI

SEQ ID NO: 156489 - protein, 10 aa, Artificial Sequence
  Description of Artificial Sequence: Synthetic peptide
  Seed: MGMFNMLSTV
MAMFNMLSTL

SEQ ID NO: 156490 - protein, 10 aa, Artificial Sequence
  Description of Artificial Sequence: Synthetic peptide
  Seed: MGMFNMLSTV
MAMFNMLSTM

SEQ ID NO: 156491 - protein, 10 aa, Artificial Sequence
  Description of Artificial Sequence: Synthetic peptide
  Seed: MGMFNMLSTV
MAMFNMLSTP

SEQ ID NO: 156492 - protein, 10 aa, Artificial Sequence
  Description of Artificial Sequence: Synthetic peptide
  Seed: MGMFNMLSTV
MAMFNMLSTS

SEQ ID NO: 156493 - protein, 10 aa, Artificial Sequence
  Description of Artificial Sequence: Synthetic peptide
  Seed: MGMFNMLSTV
MAMFNMLSTT

SEQ ID NO: 156494 - protein, 10 aa, Artificial Sequence
  Description of Artificial Sequence: Synthetic peptide
  Seed: MGMFNMLSTV
MAMFNMLSTV

SEQ ID NO: 156495 - protein, 11 aa, Artificial Sequence
  Description of Artificial Sequence: Synthetic peptide
  Seed: MGMFNMLSTVL
MAMFNMLSTVA

SEQ ID NO: 156496 - protein, 11 aa, Artificial Sequence
  Description of Artificial Sequence: Synthetic peptide
  Seed: MGMFNMLSTVL
MAMFNMLSTVC

SEQ ID NO: 156497 - protein, 11 aa, Artificial Sequence
  Description of Artificial Sequence: Synthetic peptide
  Seed: MGMFNMLSTVL
MAMFNMLSTVD

SEQ ID NO: 156498 - protein, 11 aa, Artificial Sequence
  Description of Artificial Sequence: Synthetic peptide
  Seed: MGMFNMLSTVL
MAMFNMLSTVE

SEQ ID NO: 156499 - protein, 11 aa, Artificial Sequence
  Description of Artificial Sequence: Synthetic peptide
  Seed: MGMFNMLSTVL
MAMFNMLSTVF

SEQ ID NO: 156500 - protein, 11 aa, Artificial Sequence
  Description of Artificial Sequence: Synthetic peptide
  Seed: MGMFNMLSTVL
MAMFNMLSTVG

SEQ ID NO: 156501 - protein, 11 aa, Artificial Sequence
  Description of Artificial Sequence: Synthetic peptide
  Seed: MGMFNMLSTVL
MAMFNMLSTVH

SEQ ID NO: 156502 - protein, 11 aa, Artificial Sequence
  Description of Artificial Sequence: Synthetic peptide
  Seed: MGMFNMLSTVL
MAMFNMLSTVI

SEQ ID NO: 156503 - protein, 11 aa, Artificial Sequence
  Description of Artificial Sequence: Synthetic peptide
  Seed: MGMFNMLSTVL
MAMFNMLSTVK

SEQ ID NO: 156504 - protein, 11 aa, Artificial Sequence
  Description of Artificial Sequence: Synthetic peptide
  Seed: MGMFNMLSTVL
MAMFNMLSTVL

SEQ ID NO: 156505 - protein, 11 aa, Artificial Sequence
  Description of Artificial Sequence: Synthetic peptide
  Seed: MGMFNMLSTVL
MAMFNMLSTVM

SEQ ID NO: 156506 - protein, 11 aa, Artificial Sequence
  Description of Artificial Sequence: Synthetic peptide
  Seed: MGMFNMLSTVL
MAMFNMLSTVN

SEQ ID NO: 156507 - protein, 11 aa, Artificial Sequence
  Description of Artificial Sequence: Synthetic peptide
  Seed: MGMFNMLSTVL
MAMFNMLSTVP

SEQ ID NO: 156508 - protein, 11 aa, Artificial Sequence
  Description of Artificial Sequence: Synthetic peptide
  Seed: MGMFNMLSTVL
MAMFNMLSTVQ

SEQ ID NO: 156509 - protein, 11 aa, Artificial Sequence
  Description of Artificial Sequence: Synthetic peptide
  Seed: MGMFNMLSTVL
MAMFNMLSTVR

SEQ ID NO: 156510 - protein, 11 aa, Artificial Sequence
  Description of Artificial Sequence: Synthetic peptide
  Seed: MGMFNMLSTVL
MAMFNMLSTVS

SEQ ID NO: 156511 - protein, 11 aa, Artificial Sequence
  Description of Artificial Sequence: Synthetic peptide
  Seed: MGMFNMLSTVL
MAMFNMLSTVT

SEQ ID NO: 156512 - protein, 11 aa, Artificial Sequence
  Description of Artificial Sequence: Synthetic peptide
  Seed: MGMFNMLSTVL
MAMFNMLSTVV

SEQ ID NO: 156513 - protein, 11 aa, Artificial Sequence
  Description of Artificial Sequence: Synthetic peptide
  Seed: MGMFNMLSTVL
MAMFNMLSTVW

SEQ ID NO: 156514 - protein, 11 aa, Artificial Sequence
  Description of Artificial Sequence: Synthetic peptide
  Seed: MGMFNMLSTVL
MAMFNMLSTVY

SEQ ID NO: 156515 - protein, 10 aa, Artificial Sequence
  Description of Artificial Sequence: Synthetic peptide
  Seed: MGMFNMLSTV
MAMFNMLSTW

SEQ ID NO: 156516 - protein, 10 aa, Artificial Sequence
  Description of Artificial Sequence: Synthetic peptide
  Seed: MGMFNMLSTV
MAMFNMLSTY

SEQ ID NO: 156517 - protein, 8 aa, Artificial Sequence
  Description of Artificial Sequence: Synthetic peptide
  Seed: MMMGMFNM
MAMGMFNF

SEQ ID NO: 156518 - protein, 8 aa, Artificial Sequence
  Description of Artificial Sequence: Synthetic peptide
  Seed: MMMGMFNM
MAMGMFNL

SEQ ID NO: 156519 - protein, 9 aa, Artificial Sequence
  Description of Artificial Sequence: Synthetic peptide
  Seed: MMMGMFNML
MAMGMFNMA

SEQ ID NO: 156520 - protein, 9 aa, Artificial Sequence
  Description of Artificial Sequence: Synthetic peptide
  Seed: MMMGMFNML
MAMGMFNMG

SEQ ID NO: 156521 - protein, 9 aa, Artificial Sequence
  Description of Artificial Sequence: Synthetic peptide
  Seed: MMMGMFNML
MAMGMFNMH

SEQ ID NO: 156522 - protein, 9 aa, Artificial Sequence
  Description of Artificial Sequence: Synthetic peptide
  Seed: MMMGMFNML
MAMGMFNMI

SEQ ID NO: 156523 - protein, 9 aa, Artificial Sequence
  Description of Artificial Sequence: Synthetic peptide
  Seed: MMMGMFNML
MAMGMFNMK

SEQ ID NO: 156524 - protein, 10 aa, Artificial Sequence
  Description of Artificial Sequence: Synthetic peptide
  Seed: MMMGMFNMLS
MAMGMFNMLA

SEQ ID NO: 156525 - protein, 10 aa, Artificial Sequence
  Description of Artificial Sequence: Synthetic peptide
  Seed: MMMGMFNMLS
MAMGMFNMLF

SEQ ID NO: 156526 - protein, 10 aa, Artificial Sequence
  Description of Artificial Sequence: Synthetic peptide
  Seed: MMMGMFNMLS
MAMGMFNMLI

SEQ ID NO: 156527 - protein, 10 aa, Artificial Sequence
  Description of Artificial Sequence: Synthetic peptide
  Seed: MMMGMFNMLS
MAMGMFNMLL

SEQ ID NO: 156528 - protein, 10 aa, Artificial Sequence
  Description of Artificial Sequence: Synthetic peptide
  Seed: MMMGMFNMLS
MAMGMFNMLM

SEQ ID NO: 156529 - protein, 10 aa, Artificial Sequence
  Description of Artificial Sequence: Synthetic peptide
  Seed: MMMGMFNMLS
MAMGMFNMLS

SEQ ID NO: 156530 - protein, 11 aa, Artificial Sequence
  Description of Artificial Sequence: Synthetic peptide
  Seed: MMMGMFNMLST
MAMGMFNMLSA

SEQ ID NO: 156531 - protein, 11 aa, Artificial Sequence
  Description of Artificial Sequence: Synthetic peptide
  Seed: MMMGMFNMLST
MAMGMFNMLSI

SEQ ID NO: 156532 - protein, 11 aa, Artificial Sequence
  Description of Artificial Sequence: Synthetic peptide
  Seed: MMMGMFNMLST
MAMGMFNMLSL

SEQ ID NO: 156533 - protein, 11 aa, Artificial Sequence
  Description of Artificial Sequence: Synthetic peptide
  Seed: MMMGMFNMLST
MAMGMFNMLSV

SEQ ID NO: 156534 - protein, 10 aa, Artificial Sequence
  Description of Artificial Sequence: Synthetic peptide
  Seed: MMMGMFNMLS
MAMGMFNMLT

SEQ ID NO: 156535 - protein, 10 aa, Artificial Sequence
  Description of Artificial Sequence: Synthetic peptide
  Seed: MMMGMFNMLS
MAMGMFNMLV

SEQ ID NO: 156536 - protein, 9 aa, Artificial Sequence
  Description of Artificial Sequence: Synthetic peptide
  Seed: MMMGMFNML
MAMGMFNMM

SEQ ID NO: 156537 - protein, 9 aa, Artificial Sequence
  Description of Artificial Sequence: Synthetic peptide
  Seed: MMMGMFNML
MAMGMFNMQ

SEQ ID NO: 156538 - protein, 9 aa, Artificial Sequence
  Description of Artificial Sequence: Synthetic peptide
  Seed: MMMGMFNML
MAMGMFNMR

SEQ ID NO: 156539 - protein, 9 aa, Artificial Sequence
  Description of Artificial Sequence: Synthetic peptide
  Seed: MMMGMFNML
MAMGMFNMS

SEQ ID NO: 156540 - protein, 9 aa, Artificial Sequence
  Description of Artificial Sequence: Synthetic peptide
  Seed: MMMGMFNML
MAMGMFNMT

SEQ ID NO: 156541 - protein, 9 aa, Artificial Sequence
  Description of Artificial Sequence: Synthetic peptide
  Seed: MMMGMFNML
MAMGMFNMV

SEQ ID NO: 156542 - protein, 9 aa, Artificial Sequence
  Description of Artificial Sequence: Synthetic peptide
  Seed: MMMGMFNML
MAMGMFNMW

SEQ ID NO: 156543 - protein, 9 aa, Artificial Sequence
  Description of Artificial Sequence: Synthetic peptide
  Seed: MMMGMFNML
MAMGMFNMY

SEQ ID NO: 156544 - protein, 8 aa, Artificial Sequence
  Description of Artificial Sequence: Synthetic peptide
  Seed: MMMGMFNM
MAMGMFNV

SEQ ID NO: 156545 - protein, 8 aa, Artificial Sequence
  Description of Artificial Sequence: Synthetic peptide
  Seed: MMMGMFNM
MAMGMFNY

SEQ ID NO: 156546 - protein, 8 aa, Artificial Sequence
  Description of Artificial Sequence: Synthetic peptide
  Seed: MFNMLSTV
MANMLSTV

SEQ ID NO: 156547 - protein, 9 aa, Artificial Sequence
  Description of Artificial Sequence: Synthetic peptide
  Seed: MFNMLSTVL
MANMLSTVA

SEQ ID NO: 156548 - protein, 9 aa, Artificial Sequence
  Description of Artificial Sequence: Synthetic peptide
  Seed: MFNMLSTVL
MANMLSTVC

SEQ ID NO: 156549 - protein, 9 aa, Artificial Sequence
  Description of Artificial Sequence: Synthetic peptide
  Seed: MFNMLSTVL
MANMLSTVE

SEQ ID NO: 156550 - protein, 9 aa, Artificial Sequence
  Description of Artificial Sequence: Synthetic peptide
  Seed: MFNMLSTVL
MANMLSTVF

SEQ ID NO: 156551 - protein, 9 aa, Artificial Sequence
  Description of Artificial Sequence: Synthetic peptide
  Seed: MFNMLSTVL
MANMLSTVG

SEQ ID NO: 156552 - protein, 9 aa, Artificial Sequence
  Description of Artificial Sequence: Synthetic peptide
  Seed: MFNMLSTVL
MANMLSTVH

SEQ ID NO: 156553 - protein, 9 aa, Artificial Sequence
  Description of Artificial Sequence: Synthetic peptide
  Seed: MFNMLSTVL
MANMLSTVI

SEQ ID NO: 156554 - protein, 9 aa, Artificial Sequence
  Description of Artificial Sequence: Synthetic peptide
  Seed: MFNMLSTVL
MANMLSTVL

SEQ ID NO: 156555 - protein, 11 aa, Artificial Sequence
  Description of Artificial Sequence: Synthetic peptide
  Seed: MFNMLSTVLGV
MANMLSTVLGA

SEQ ID NO: 156556 - protein, 11 aa, Artificial Sequence
  Description of Artificial Sequence: Synthetic peptide
  Seed: MFNMLSTVLGV
MANMLSTVLGI

SEQ ID NO: 156557 - protein, 11 aa, Artificial Sequence
  Description of Artificial Sequence: Synthetic peptide
  Seed: MFNMLSTVLGV
MANMLSTVLGL

SEQ ID NO: 156558 - protein, 11 aa, Artificial Sequence
  Description of Artificial Sequence: Synthetic peptide
  Seed: MFNMLSTVLGV
MANMLSTVLGM

SEQ ID NO: 156559 - protein, 11 aa, Artificial Sequence
  Description of Artificial Sequence: Synthetic peptide
  Seed: MFNMLSTVLGV
MANMLSTVLGT

SEQ ID NO: 156560 - protein, 11 aa, Artificial Sequence
  Description of Artificial Sequence: Synthetic peptide
  Seed: MFNMLSTVLGV
MANMLSTVLGV

SEQ ID NO: 156561 - protein, 9 aa, Artificial Sequence
  Description of Artificial Sequence: Synthetic peptide
  Seed: MFNMLSTVL
MANMLSTVM

SEQ ID NO: 156562 - protein, 9 aa, Artificial Sequence
  Description of Artificial Sequence: Synthetic peptide
  Seed: MFNMLSTVL
MANMLSTVN

SEQ ID NO: 156563 - protein, 9 aa, Artificial Sequence
  Description of Artificial Sequence: Synthetic peptide
  Seed: MFNMLSTVL
MANMLSTVQ

SEQ ID NO: 156564 - protein, 9 aa, Artificial Sequence
  Description of Artificial Sequence: Synthetic peptide
  Seed: MFNMLSTVL
MANMLSTVS

SEQ ID NO: 156565 - protein, 9 aa, Artificial Sequence
  Description of Artificial Sequence: Synthetic peptide
  Seed: MFNMLSTVL
MANMLSTVT

SEQ ID NO: 156566 - protein, 9 aa, Artificial Sequence
  Description of Artificial Sequence: Synthetic peptide
  Seed: MFNMLSTVL
MANMLSTVV

SEQ ID NO: 156567 - protein, 9 aa, Artificial Sequence
  Description of Artificial Sequence: Synthetic peptide
  Seed: MFNMLSTVL
MANMLSTVW

SEQ ID NO: 156568 - protein, 9 aa, Artificial Sequence
  Description of Artificial Sequence: Synthetic peptide
  Seed: MFNMLSTVL
MANMLSTVY

SEQ ID NO: 156569 - protein, 9 aa, Artificial Sequence
  Description of Artificial Sequence: Synthetic peptide
  Seed: MARLGKGYM
MARLGKGYA

SEQ ID NO: 156570 - protein, 9 aa, Artificial Sequence
  Description of Artificial Sequence: Synthetic peptide
  Seed: MARLGKGYM
MARLGKGYF

SEQ ID NO: 156571 - protein, 9 aa, Artificial Sequence
  Description of Artificial Sequence: Synthetic peptide
  Seed: MARLGKGYM
MARLGKGYG

SEQ ID NO: 156572 - protein, 9 aa, Artificial Sequence
  Description of Artificial Sequence: Synthetic peptide
  Seed: MARLGKGYM
MARLGKGYI

SEQ ID NO: 156573 - protein, 9 aa, Artificial Sequence
  Description of Artificial Sequence: Synthetic peptide
  Seed: MARLGKGYM
MARLGKGYK

SEQ ID NO: 156574 - protein, 9 aa, Artificial Sequence
  Description of Artificial Sequence: Synthetic peptide
  Seed: MARLGKGYM
MARLGKGYL

SEQ ID NO: 156575 - protein, 10 aa, Artificial Sequence
  Description of Artificial Sequence: Synthetic peptide
  Seed: MARLGKGYMF
MARLGKGYMA

SEQ ID NO: 156576 - protein, 10 aa, Artificial Sequence
  Description of Artificial Sequence: Synthetic peptide
  Seed: MARLGKGYMF
MARLGKGYMI

SEQ ID NO: 156577 - protein, 10 aa, Artificial Sequence
  Description of Artificial Sequence: Synthetic peptide
  Seed: MARLGKGYMF
MARLGKGYMK

SEQ ID NO: 156578 - protein, 10 aa, Artificial Sequence
  Description of Artificial Sequence: Synthetic peptide
  Seed: MARLGKGYMF
MARLGKGYML

SEQ ID NO: 156579 - protein, 10 aa, Artificial Sequence
  Description of Artificial Sequence: Synthetic peptide
  Seed: MARLGKGYMF
MARLGKGYMM

SEQ ID NO: 156580 - protein, 10 aa, Artificial Sequence
  Description of Artificial Sequence: Synthetic peptide
  Seed: MARLGKGYMF
MARLGKGYMR

SEQ ID NO: 156581 - protein, 10 aa, Artificial Sequence
  Description of Artificial Sequence: Synthetic peptide
  Seed: MARLGKGYMF
MARLGKGYMV

SEQ ID NO: 156582 - protein, 10 aa, Artificial Sequence
  Description of Artificial Sequence: Synthetic peptide
  Seed: MARLGKGYMF
MARLGKGYMW

SEQ ID NO: 156583 - protein, 10 aa, Artificial Sequence
  Description of Artificial Sequence: Synthetic peptide
  Seed: MARLGKGYMF
MARLGKGYMY

SEQ ID NO: 156584 - protein, 9 aa, Artificial Sequence
  Description of Artificial Sequence: Synthetic peptide
  Seed: MARLGKGYM
MARLGKGYR

SEQ ID NO: 156585 - protein, 9 aa, Artificial Sequence
  Description of Artificial Sequence: Synthetic peptide
  Seed: MARLGKGYM
MARLGKGYS

SEQ ID NO: 156586 - protein, 9 aa, Artificial Sequence
  Description of Artificial Sequence: Synthetic peptide
  Seed: MARLGKGYM
MARLGKGYV

SEQ ID NO: 156587 - protein, 9 aa, Artificial Sequence
  Description of Artificial Sequence: Synthetic peptide
  Seed: MARLGKGYM
MARLGKGYW

SEQ ID NO: 156588 - protein, 9 aa, Artificial Sequence
  Description of Artificial Sequence: Synthetic peptide
  Seed: MARLGKGYM
MARLGKGYY

SEQ ID NO: 156589 - protein, 11 aa, Artificial Sequence
  Description of Artificial Sequence: Synthetic peptide
  Seed: MFSNKMARLGK
MASNKMARLGK

SEQ ID NO: 156590 - protein, 11 aa, Artificial Sequence
  Description of Artificial Sequence: Synthetic peptide
  Seed: MFSNKMARLGK
MASNKMARLGR

SEQ ID NO: 156591 - protein, 8 aa, Artificial Sequence
  Description of Artificial Sequence: Synthetic peptide
  Seed: MLSTVLGV
MASTVLGV

SEQ ID NO: 156592 - protein, 9 aa, Artificial Sequence
  Description of Artificial Sequence: Synthetic peptide
  Seed: MLSTVLGVS
MASTVLGVA

SEQ ID NO: 156593 - protein, 9 aa, Artificial Sequence
  Description of Artificial Sequence: Synthetic peptide
  Seed: MLSTVLGVS
MASTVLGVI

SEQ ID NO: 156594 - protein, 10 aa, Artificial Sequence
  Description of Artificial Sequence: Synthetic peptide
  Seed: MLSTVLGVSI
MASTVLGVSA

SEQ ID NO: 156595 - protein, 10 aa, Artificial Sequence
  Description of Artificial Sequence: Synthetic peptide
  Seed: MLSTVLGVSI
MASTVLGVSF

SEQ ID NO: 156596 - protein, 10 aa, Artificial Sequence
  Description of Artificial Sequence: Synthetic peptide
  Seed: MLSTVLGVSI
MASTVLGVSI

SEQ ID NO: 156597 - protein, 10 aa, Artificial Sequence
  Description of Artificial Sequence: Synthetic peptide
  Seed: MLSTVLGVSI
MASTVLGVSL

SEQ ID NO: 156598 - protein, 10 aa, Artificial Sequence
  Description of Artificial Sequence: Synthetic peptide
  Seed: MLSTVLGVSI
MASTVLGVSM

SEQ ID NO: 156599 - protein, 10 aa, Artificial Sequence
  Description of Artificial Sequence: Synthetic peptide
  Seed: MLSTVLGVSI
MASTVLGVSV

SEQ ID NO: 156600 - protein, 10 aa, Artificial Sequence
  Description of Artificial Sequence: Synthetic peptide
  Seed: MLSTVLGVSI
MASTVLGVSW

SEQ ID NO: 156601 - protein, 10 aa, Artificial Sequence
  Description of Artificial Sequence: Synthetic peptide
  Seed: MLSTVLGVSI
MASTVLGVSY

SEQ ID NO: 156602 - protein, 9 aa, Artificial Sequence
  Description of Artificial Sequence: Synthetic peptide
  Seed: MLSTVLGVS
MASTVLGVV

SEQ ID NO: 156603 - protein, 11 aa, Artificial Sequence
  Description of Artificial Sequence: Synthetic peptide
  Seed: MMGMFNMLSTV
MCGMFNMLSTA

SEQ ID NO: 156604 - protein, 11 aa, Artificial Sequence
  Description of Artificial Sequence: Synthetic peptide
  Seed: MMGMFNMLSTV
MCGMFNMLSTI

SEQ ID NO: 156605 - protein, 11 aa, Artificial Sequence
  Description of Artificial Sequence: Synthetic peptide
  Seed: MMGMFNMLSTV
MCGMFNMLSTL

SEQ ID NO: 156606 - protein, 11 aa, Artificial Sequence
  Description of Artificial Sequence: Synthetic peptide
  Seed: MMGMFNMLSTV
MCGMFNMLSTM

SEQ ID NO: 156607 - protein, 11 aa, Artificial Sequence
  Description of Artificial Sequence: Synthetic peptide
  Seed: MMGMFNMLSTV
MCGMFNMLSTT

SEQ ID NO: 156608 - protein, 11 aa, Artificial Sequence
  Description of Artificial Sequence: Synthetic peptide
  Seed: MMGMFNMLSTV
MCGMFNMLSTV

SEQ ID NO: 156609 - protein, 10 aa, Artificial Sequence
  Description of Artificial Sequence: Synthetic peptide
  Seed: MMGMFNMLST
MCGMFNMLSV

SEQ ID NO: 156610 - protein, 9 aa, Artificial Sequence
  Description of Artificial Sequence: Synthetic peptide
  Seed: MSIGVTVIK
MCIGVTVIK

SEQ ID NO: 156611 - protein, 10 aa, Artificial Sequence
  Description of Artificial Sequence: Synthetic peptide
  Seed: MSIGVTVIKN
MCIGVTVIKK

SEQ ID NO: 156612 - protein, 10 aa, Artificial Sequence
  Description of Artificial Sequence: Synthetic peptide
  Seed: MSIGVTVIKN
MCIGVTVIKR

SEQ ID NO: 156613 - protein, 9 aa, Artificial Sequence
  Description of Artificial Sequence: Synthetic peptide
  Seed: MSIGVTVIK
MCIGVTVIR

SEQ ID NO: 156614 - protein, 10 aa, Artificial Sequence
  Description of Artificial Sequence: Synthetic peptide
  Seed: MGMFNMLSTV
MCMFNMLSTA

SEQ ID NO: 156615 - protein, 10 aa, Artificial Sequence
  Description of Artificial Sequence: Synthetic peptide
  Seed: MGMFNMLSTV
MCMFNMLSTC

SEQ ID NO: 156616 - protein, 10 aa, Artificial Sequence
  Description of Artificial Sequence: Synthetic peptide
  Seed: MGMFNMLSTV
MCMFNMLSTF

SEQ ID NO: 156617 - protein, 10 aa, Artificial Sequence
  Description of Artificial Sequence: Synthetic peptide
  Seed: MGMFNMLSTV
MCMFNMLSTG

SEQ ID NO: 156618 - protein, 10 aa, Artificial Sequence
  Description of Artificial Sequence: Synthetic peptide
  Seed: MGMFNMLSTV
MCMFNMLSTH

SEQ ID NO: 156619 - protein, 10 aa, Artificial Sequence
  Description of Artificial Sequence: Synthetic peptide
  Seed: MGMFNMLSTV
MCMFNMLSTI

SEQ ID NO: 156620 - protein, 10 aa, Artificial Sequence
  Description of Artificial Sequence: Synthetic peptide
  Seed: MGMFNMLSTV
MCMFNMLSTL

SEQ ID NO: 156621 - protein, 10 aa, Artificial Sequence
  Description of Artificial Sequence: Synthetic peptide
  Seed: MGMFNMLSTV
MCMFNMLSTM

SEQ ID NO: 156622 - protein, 10 aa, Artificial Sequence
  Description of Artificial Sequence: Synthetic peptide
  Seed: MGMFNMLSTV
MCMFNMLSTP

SEQ ID NO: 156623 - protein, 10 aa, Artificial Sequence
  Description of Artificial Sequence: Synthetic peptide
  Seed: MGMFNMLSTV
MCMFNMLSTS

SEQ ID NO: 156624 - protein, 10 aa, Artificial Sequence
  Description of Artificial Sequence: Synthetic peptide
  Seed: MGMFNMLSTV
MCMFNMLSTT

SEQ ID NO: 156625 - protein, 10 aa, Artificial Sequence
  Description of Artificial Sequence: Synthetic peptide
  Seed: MGMFNMLSTV
MCMFNMLSTV

SEQ ID NO: 156626 - protein, 11 aa, Artificial Sequence
  Description of Artificial Sequence: Synthetic peptide
  Seed: MGMFNMLSTVL
MCMFNMLSTVA

SEQ ID NO: 156627 - protein, 11 aa, Artificial Sequence
  Description of Artificial Sequence: Synthetic peptide
  Seed: MGMFNMLSTVL
MCMFNMLSTVC

SEQ ID NO: 156628 - protein, 11 aa, Artificial Sequence
  Description of Artificial Sequence: Synthetic peptide
  Seed: MGMFNMLSTVL
MCMFNMLSTVD

SEQ ID NO: 156629 - protein, 11 aa, Artificial Sequence
  Description of Artificial Sequence: Synthetic peptide
  Seed: MGMFNMLSTVL
MCMFNMLSTVE

SEQ ID NO: 156630 - protein, 11 aa, Artificial Sequence
  Description of Artificial Sequence: Synthetic peptide
  Seed: MGMFNMLSTVL
MCMFNMLSTVF

SEQ ID NO: 156631 - protein, 11 aa, Artificial Sequence
  Description of Artificial Sequence: Synthetic peptide
  Seed: MGMFNMLSTVL
MCMFNMLSTVG

SEQ ID NO: 156632 - protein, 11 aa, Artificial Sequence
  Description of Artificial Sequence: Synthetic peptide
  Seed: MGMFNMLSTVL
MCMFNMLSTVH

SEQ ID NO: 156633 - protein, 11 aa, Artificial Sequence
  Description of Artificial Sequence: Synthetic peptide
  Seed: MGMFNMLSTVL
MCMFNMLSTVI

SEQ ID NO: 156634 - protein, 11 aa, Artificial Sequence
  Description of Artificial Sequence: Synthetic peptide
  Seed: MGMFNMLSTVL
MCMFNMLSTVK

SEQ ID NO: 156635 - protein, 11 aa, Artificial Sequence
  Description of Artificial Sequence: Synthetic peptide
  Seed: MGMFNMLSTVL
MCMFNMLSTVL

SEQ ID NO: 156636 - protein, 11 aa, Artificial Sequence
  Description of Artificial Sequence: Synthetic peptide
  Seed: MGMFNMLSTVL
MCMFNMLSTVM

SEQ ID NO: 156637 - protein, 11 aa, Artificial Sequence
  Description of Artificial Sequence: Synthetic peptide
  Seed: MGMFNMLSTVL
MCMFNMLSTVN

SEQ ID NO: 156638 - protein, 11 aa, Artificial Sequence
  Description of Artificial Sequence: Synthetic peptide
  Seed: MGMFNMLSTVL
MCMFNMLSTVP

SEQ ID NO: 156639 - protein, 11 aa, Artificial Sequence
  Description of Artificial Sequence: Synthetic peptide
  Seed: MGMFNMLSTVL
MCMFNMLSTVQ

SEQ ID NO: 156640 - protein, 11 aa, Artificial Sequence
  Description of Artificial Sequence: Synthetic peptide
  Seed: MGMFNMLSTVL
MCMFNMLSTVR

SEQ ID NO: 156641 - protein, 11 aa, Artificial Sequence
  Description of Artificial Sequence: Synthetic peptide
  Seed: MGMFNMLSTVL
MCMFNMLSTVS

SEQ ID NO: 156642 - protein, 11 aa, Artificial Sequence
  Description of Artificial Sequence: Synthetic peptide
  Seed: MGMFNMLSTVL
MCMFNMLSTVT

SEQ ID NO: 156643 - protein, 11 aa, Artificial Sequence
  Description of Artificial Sequence: Synthetic peptide
  Seed: MGMFNMLSTVL
MCMFNMLSTVV

SEQ ID NO: 156644 - protein, 11 aa, Artificial Sequence
  Description of Artificial Sequence: Synthetic peptide
  Seed: MGMFNMLSTVL
MCMFNMLSTVW

SEQ ID NO: 156645 - protein, 11 aa, Artificial Sequence
  Description of Artificial Sequence: Synthetic peptide
  Seed: MGMFNMLSTVL
MCMFNMLSTVY

SEQ ID NO: 156646 - protein, 10 aa, Artificial Sequence
  Description of Artificial Sequence: Synthetic peptide
  Seed: MGMFNMLSTV
MCMFNMLSTW

SEQ ID NO: 156647 - protein, 10 aa, Artificial Sequence
  Description of Artificial Sequence: Synthetic peptide
  Seed: MGMFNMLSTV
MCMFNMLSTY

SEQ ID NO: 156648 - protein, 9 aa, Artificial Sequence
  Description of Artificial Sequence: Synthetic peptide
  Seed: MMMGMFNML
MCMGMFNMF

SEQ ID NO: 156649 - protein, 9 aa, Artificial Sequence
  Description of Artificial Sequence: Synthetic peptide
  Seed: MMMGMFNML
MCMGMFNMI

SEQ ID NO: 156650 - protein, 9 aa, Artificial Sequence
  Description of Artificial Sequence: Synthetic peptide
  Seed: MMMGMFNML
MCMGMFNML

SEQ ID NO: 156651 - protein, 10 aa, Artificial Sequence
  Description of Artificial Sequence: Synthetic peptide
  Seed: MMMGMFNMLS
MCMGMFNMLA

SEQ ID NO: 156652 - protein, 10 aa, Artificial Sequence
  Description of Artificial Sequence: Synthetic peptide
  Seed: MMMGMFNMLS
MCMGMFNMLI

SEQ ID NO: 156653 - protein, 10 aa, Artificial Sequence
  Description of Artificial Sequence: Synthetic peptide
  Seed: MMMGMFNMLS
MCMGMFNMLL

SEQ ID NO: 156654 - protein, 10 aa, Artificial Sequence
  Description of Artificial Sequence: Synthetic peptide
  Seed: MMMGMFNMLS
MCMGMFNMLM

SEQ ID NO: 156655 - protein, 10 aa, Artificial Sequence
  Description of Artificial Sequence: Synthetic peptide
  Seed: MMMGMFNMLS
MCMGMFNMLS

SEQ ID NO: 156656 - protein, 11 aa, Artificial Sequence
  Description of Artificial Sequence: Synthetic peptide
  Seed: MMMGMFNMLST
MCMGMFNMLSV

SEQ ID NO: 156657 - protein, 10 aa, Artificial Sequence
  Description of Artificial Sequence: Synthetic peptide
  Seed: MMMGMFNMLS
MCMGMFNMLT

SEQ ID NO: 156658 - protein, 10 aa, Artificial Sequence
  Description of Artificial Sequence: Synthetic peptide
  Seed: MMMGMFNMLS
MCMGMFNMLV

SEQ ID NO: 156659 - protein, 9 aa, Artificial Sequence
  Description of Artificial Sequence: Synthetic peptide
  Seed: MMMGMFNML
MCMGMFNMM

SEQ ID NO: 156660 - protein, 9 aa, Artificial Sequence
  Description of Artificial Sequence: Synthetic peptide
  Seed: MMMGMFNML
MCMGMFNMV

SEQ ID NO: 156661 - protein, 9 aa, Artificial Sequence
  Description of Artificial Sequence: Synthetic peptide
  Seed: MMMGMFNML
MCMGMFNMY

SEQ ID NO: 156662 - protein, 9 aa, Artificial Sequence
  Description of Artificial Sequence: Synthetic peptide
  Seed: MFNMLSTVL
MCNMLSTVF

SEQ ID NO: 156663 - protein, 9 aa, Artificial Sequence
  Description of Artificial Sequence: Synthetic peptide
  Seed: MFNMLSTVL
MCNMLSTVL

SEQ ID NO: 156664 - protein, 11 aa, Artificial Sequence
  Description of Artificial Sequence: Synthetic peptide
  Seed: MFNMLSTVLGV
MCNMLSTVLGA

SEQ ID NO: 156665 - protein, 11 aa, Artificial Sequence
  Description of Artificial Sequence: Synthetic peptide
  Seed: MFNMLSTVLGV
MCNMLSTVLGI

SEQ ID NO: 156666 - protein, 11 aa, Artificial Sequence
  Description of Artificial Sequence: Synthetic peptide
  Seed: MFNMLSTVLGV
MCNMLSTVLGL

SEQ ID NO: 156667 - protein, 11 aa, Artificial Sequence
  Description of Artificial Sequence: Synthetic peptide
  Seed: MFNMLSTVLGV
MCNMLSTVLGM

SEQ ID NO: 156668 - protein, 11 aa, Artificial Sequence
  Description of Artificial Sequence: Synthetic peptide
  Seed: MFNMLSTVLGV
MCNMLSTVLGT

SEQ ID NO: 156669 - protein, 11 aa, Artificial Sequence
  Description of Artificial Sequence: Synthetic peptide
  Seed: MFNMLSTVLGV
MCNMLSTVLGV

SEQ ID NO: 156670 - protein, 9 aa, Artificial Sequence
  Description of Artificial Sequence: Synthetic peptide
  Seed: MFNMLSTVL
MCNMLSTVM

SEQ ID NO: 156671 - protein, 9 aa, Artificial Sequence
  Description of Artificial Sequence: Synthetic peptide
  Seed: MFNMLSTVL
MCNMLSTVY

SEQ ID NO: 156672 - protein, 9 aa, Artificial Sequence
  Description of Artificial Sequence: Synthetic peptide
  Seed: MARLGKGYM
MCRLGKGYK

SEQ ID NO: 156673 - protein, 10 aa, Artificial Sequence
  Description of Artificial Sequence: Synthetic peptide
  Seed: MARLGKGYMF
MCRLGKGYMA

SEQ ID NO: 156674 - protein, 10 aa, Artificial Sequence
  Description of Artificial Sequence: Synthetic peptide
  Seed: MARLGKGYMF
MCRLGKGYMF

SEQ ID NO: 156675 - protein, 10 aa, Artificial Sequence
  Description of Artificial Sequence: Synthetic peptide
  Seed: MARLGKGYMF
MCRLGKGYMI

SEQ ID NO: 156676 - protein, 10 aa, Artificial Sequence
  Description of Artificial Sequence: Synthetic peptide
  Seed: MARLGKGYMF
MCRLGKGYMK

SEQ ID NO: 156677 - protein, 10 aa, Artificial Sequence
  Description of Artificial Sequence: Synthetic peptide
  Seed: MARLGKGYMF
MCRLGKGYML

SEQ ID NO: 156678 - protein, 10 aa, Artificial Sequence
  Description of Artificial Sequence: Synthetic peptide
  Seed: MARLGKGYMF
MCRLGKGYMM

SEQ ID NO: 156679 - protein, 10 aa, Artificial Sequence
  Description of Artificial Sequence: Synthetic peptide
  Seed: MARLGKGYMF
MCRLGKGYMR

SEQ ID NO: 156680 - protein, 10 aa, Artificial Sequence
  Description of Artificial Sequence: Synthetic peptide
  Seed: MARLGKGYMF
MCRLGKGYMV

SEQ ID NO: 156681 - protein, 10 aa, Artificial Sequence
  Description of Artificial Sequence: Synthetic peptide
  Seed: MARLGKGYMF
MCRLGKGYMW

SEQ ID NO: 156682 - protein, 10 aa, Artificial Sequence
  Description of Artificial Sequence: Synthetic peptide
  Seed: MARLGKGYMF
MCRLGKGYMY

SEQ ID NO: 156683 - protein, 10 aa, Artificial Sequence
  Description of Artificial Sequence: Synthetic peptide
  Seed: MLSTVLGVSI
MCSTVLGVSF

SEQ ID NO: 156684 - protein, 10 aa, Artificial Sequence
  Description of Artificial Sequence: Synthetic peptide
  Seed: MLSTVLGVSI
MCSTVLGVSI

SEQ ID NO: 156685 - protein, 10 aa, Artificial Sequence
  Description of Artificial Sequence: Synthetic peptide
  Seed: MLSTVLGVSI
MCSTVLGVSL

SEQ ID NO: 156686 - protein, 10 aa, Artificial Sequence
  Description of Artificial Sequence: Synthetic peptide
  Seed: MLSTVLGVSI
MCSTVLGVSM

SEQ ID NO: 156687 - protein, 10 aa, Artificial Sequence
  Description of Artificial Sequence: Synthetic peptide
  Seed: MLSTVLGVSI
MCSTVLGVSV

SEQ ID NO: 156688 - protein, 10 aa, Artificial Sequence
  Description of Artificial Sequence: Synthetic peptide
  Seed: MLSTVLGVSI
MCSTVLGVSW

SEQ ID NO: 156689 - protein, 10 aa, Artificial Sequence
  Description of Artificial Sequence: Synthetic peptide
  Seed: MLSTVLGVSI
MCSTVLGVSY

SEQ ID NO: 156690 - protein, 11 aa, Artificial Sequence
  Description of Artificial Sequence: Synthetic peptide
  Seed: MMGMFNMLSTV
MDGMFNMLSTA

SEQ ID NO: 156691 - protein, 11 aa, Artificial Sequence
  Description of Artificial Sequence: Synthetic peptide
  Seed: MMGMFNMLSTV
MDGMFNMLSTI

SEQ ID NO: 156692 - protein, 11 aa, Artificial Sequence
  Description of Artificial Sequence: Synthetic peptide
  Seed: MMGMFNMLSTV
MDGMFNMLSTL

SEQ ID NO: 156693 - protein, 11 aa, Artificial Sequence
  Description of Artificial Sequence: Synthetic peptide
  Seed: MMGMFNMLSTV
MDGMFNMLSTM

SEQ ID NO: 156694 - protein, 11 aa, Artificial Sequence
  Description of Artificial Sequence: Synthetic peptide
  Seed: MMGMFNMLSTV
MDGMFNMLSTT

SEQ ID NO: 156695 - protein, 11 aa, Artificial Sequence
  Description of Artificial Sequence: Synthetic peptide
  Seed: MMGMFNMLSTV
MDGMFNMLSTV

SEQ ID NO: 156696 - protein, 10 aa, Artificial Sequence
  Description of Artificial Sequence: Synthetic peptide
  Seed: MMGMFNMLST
MDGMFNMLSV

SEQ ID NO: 156697 - protein, 9 aa, Artificial Sequence
  Description of Artificial Sequence: Synthetic peptide
  Seed: MSIGVTVIK
MDIGVTVIK

SEQ ID NO: 156698 - protein, 10 aa, Artificial Sequence
  Description of Artificial Sequence: Synthetic peptide
  Seed: MSIGVTVIKN
MDIGVTVIKK

SEQ ID NO: 156699 - protein, 10 aa, Artificial Sequence
  Description of Artificial Sequence: Synthetic peptide
  Seed: MSIGVTVIKN
MDIGVTVIKR

SEQ ID NO: 156700 - protein, 9 aa, Artificial Sequence
  Description of Artificial Sequence: Synthetic peptide
  Seed: MSIGVTVIK
MDIGVTVIR

SEQ ID NO: 156701 - protein, 9 aa, Artificial Sequence
  Description of Artificial Sequence: Synthetic peptide
  Seed: MELPSFGVS
MDLPSFGVA

SEQ ID NO: 156702 - protein, 10 aa, Artificial Sequence
  Description of Artificial Sequence: Synthetic peptide
  Seed: MGMFNMLSTV
MDMFNMLSTA

SEQ ID NO: 156703 - protein, 10 aa, Artificial Sequence
  Description of Artificial Sequence: Synthetic peptide
  Seed: MGMFNMLSTV
MDMFNMLSTC

SEQ ID NO: 156704 - protein, 10 aa, Artificial Sequence
  Description of Artificial Sequence: Synthetic peptide
  Seed: MGMFNMLSTV
MDMFNMLSTF

SEQ ID NO: 156705 - protein, 10 aa, Artificial Sequence
  Description of Artificial Sequence: Synthetic peptide
  Seed: MGMFNMLSTV
MDMFNMLSTG

SEQ ID NO: 156706 - protein, 10 aa, Artificial Sequence
  Description of Artificial Sequence: Synthetic peptide
  Seed: MGMFNMLSTV
MDMFNMLSTH

SEQ ID NO: 156707 - protein, 10 aa, Artificial Sequence
  Description of Artificial Sequence: Synthetic peptide
  Seed: MGMFNMLSTV
MDMFNMLSTI

SEQ ID NO: 156708 - protein, 10 aa, Artificial Sequence
  Description of Artificial Sequence: Synthetic peptide
  Seed: MGMFNMLSTV
MDMFNMLSTL

SEQ ID NO: 156709 - protein, 10 aa, Artificial Sequence
  Description of Artificial Sequence: Synthetic peptide
  Seed: MGMFNMLSTV
MDMFNMLSTM

SEQ ID NO: 156710 - protein, 10 aa, Artificial Sequence
  Description of Artificial Sequence: Synthetic peptide
  Seed: MGMFNMLSTV
MDMFNMLSTP

SEQ ID NO: 156711 - protein, 10 aa, Artificial Sequence
  Description of Artificial Sequence: Synthetic peptide
  Seed: MGMFNMLSTV
MDMFNMLSTS

SEQ ID NO: 156712 - protein, 10 aa, Artificial Sequence
  Description of Artificial Sequence: Synthetic peptide
  Seed: MGMFNMLSTV
MDMFNMLSTT

SEQ ID NO: 156713 - protein, 10 aa, Artificial Sequence
  Description of Artificial Sequence: Synthetic peptide
  Seed: MGMFNMLSTV
MDMFNMLSTV

SEQ ID NO: 156714 - protein, 11 aa, Artificial Sequence
  Description of Artificial Sequence: Synthetic peptide
  Seed: MGMFNMLSTVL
MDMFNMLSTVA

SEQ ID NO: 156715 - protein, 11 aa, Artificial Sequence
  Description of Artificial Sequence: Synthetic peptide
  Seed: MGMFNMLSTVL
MDMFNMLSTVC

SEQ ID NO: 156716 - protein, 11 aa, Artificial Sequence
  Description of Artificial Sequence: Synthetic peptide
  Seed: MGMFNMLSTVL
MDMFNMLSTVD

SEQ ID NO: 156717 - protein, 11 aa, Artificial Sequence
  Description of Artificial Sequence: Synthetic peptide
  Seed: MGMFNMLSTVL
MDMFNMLSTVE

SEQ ID NO: 156718 - protein, 11 aa, Artificial Sequence
  Description of Artificial Sequence: Synthetic peptide
  Seed: MGMFNMLSTVL
MDMFNMLSTVF

SEQ ID NO: 156719 - protein, 11 aa, Artificial Sequence
  Description of Artificial Sequence: Synthetic peptide
  Seed: MGMFNMLSTVL
MDMFNMLSTVG

SEQ ID NO: 156720 - protein, 11 aa, Artificial Sequence
  Description of Artificial Sequence: Synthetic peptide
  Seed: MGMFNMLSTVL
MDMFNMLSTVH

SEQ ID NO: 156721 - protein, 11 aa, Artificial Sequence
  Description of Artificial Sequence: Synthetic peptide
  Seed: MGMFNMLSTVL
MDMFNMLSTVI

SEQ ID NO: 156722 - protein, 11 aa, Artificial Sequence
  Description of Artificial Sequence: Synthetic peptide
  Seed: MGMFNMLSTVL
MDMFNMLSTVK

SEQ ID NO: 156723 - protein, 11 aa, Artificial Sequence
  Description of Artificial Sequence: Synthetic peptide
  Seed: MGMFNMLSTVL
MDMFNMLSTVL

SEQ ID NO: 156724 - protein, 11 aa, Artificial Sequence
  Description of Artificial Sequence: Synthetic peptide
  Seed: MGMFNMLSTVL
MDMFNMLSTVM

SEQ ID NO: 156725 - protein, 11 aa, Artificial Sequence
  Description of Artificial Sequence: Synthetic peptide
  Seed: MGMFNMLSTVL
MDMFNMLSTVN

SEQ ID NO: 156726 - protein, 11 aa, Artificial Sequence
  Description of Artificial Sequence: Synthetic peptide
  Seed: MGMFNMLSTVL
MDMFNMLSTVP

SEQ ID NO: 156727 - protein, 11 aa, Artificial Sequence
  Description of Artificial Sequence: Synthetic peptide
  Seed: MGMFNMLSTVL
MDMFNMLSTVQ

SEQ ID NO: 156728 - protein, 11 aa, Artificial Sequence
  Description of Artificial Sequence: Synthetic peptide
  Seed: MGMFNMLSTVL
MDMFNMLSTVR

SEQ ID NO: 156729 - protein, 11 aa, Artificial Sequence
  Description of Artificial Sequence: Synthetic peptide
  Seed: MGMFNMLSTVL
MDMFNMLSTVS

SEQ ID NO: 156730 - protein, 11 aa, Artificial Sequence
  Description of Artificial Sequence: Synthetic peptide
  Seed: MGMFNMLSTVL
MDMFNMLSTVT

SEQ ID NO: 156731 - protein, 11 aa, Artificial Sequence
  Description of Artificial Sequence: Synthetic peptide
  Seed: MGMFNMLSTVL
MDMFNMLSTVV

SEQ ID NO: 156732 - protein, 11 aa, Artificial Sequence
  Description of Artificial Sequence: Synthetic peptide
  Seed: MGMFNMLSTVL
MDMFNMLSTVW

SEQ ID NO: 156733 - protein, 11 aa, Artificial Sequence
  Description of Artificial Sequence: Synthetic peptide
  Seed: MGMFNMLSTVL
MDMFNMLSTVY

SEQ ID NO: 156734 - protein, 10 aa, Artificial Sequence
  Description of Artificial Sequence: Synthetic peptide
  Seed: MGMFNMLSTV
MDMFNMLSTW

SEQ ID NO: 156735 - protein, 10 aa, Artificial Sequence
  Description of Artificial Sequence: Synthetic peptide
  Seed: MGMFNMLSTV
MDMFNMLSTY

SEQ ID NO: 156736 - protein, 9 aa, Artificial Sequence
  Description of Artificial Sequence: Synthetic peptide
  Seed: MMMGMFNML
MDMGMFNMF

SEQ ID NO: 156737 - protein, 9 aa, Artificial Sequence
  Description of Artificial Sequence: Synthetic peptide
  Seed: MMMGMFNML
MDMGMFNMI

SEQ ID NO: 156738 - protein, 9 aa, Artificial Sequence
  Description of Artificial Sequence: Synthetic peptide
  Seed: MMMGMFNML
MDMGMFNML

SEQ ID NO: 156739 - protein, 10 aa, Artificial Sequence
  Description of Artificial Sequence: Synthetic peptide
  Seed: MMMGMFNMLS
MDMGMFNMLA

SEQ ID NO: 156740 - protein, 10 aa, Artificial Sequence
  Description of Artificial Sequence: Synthetic peptide
  Seed: MMMGMFNMLS
MDMGMFNMLI

SEQ ID NO: 156741 - protein, 10 aa, Artificial Sequence
  Description of Artificial Sequence: Synthetic peptide
  Seed: MMMGMFNMLS
MDMGMFNMLL

SEQ ID NO: 156742 - protein, 10 aa, Artificial Sequence
  Description of Artificial Sequence: Synthetic peptide
  Seed: MMMGMFNMLS
MDMGMFNMLM

SEQ ID NO: 156743 - protein, 10 aa, Artificial Sequence
  Description of Artificial Sequence: Synthetic peptide
  Seed: MMMGMFNMLS
MDMGMFNMLS

SEQ ID NO: 156744 - protein, 10 aa, Artificial Sequence
  Description of Artificial Sequence: Synthetic peptide
  Seed: MMMGMFNMLS
MDMGMFNMLT

SEQ ID NO: 156745 - protein, 10 aa, Artificial Sequence
  Description of Artificial Sequence: Synthetic peptide
  Seed: MMMGMFNMLS
MDMGMFNMLV

SEQ ID NO: 156746 - protein, 9 aa, Artificial Sequence
  Description of Artificial Sequence: Synthetic peptide
  Seed: MMMGMFNML
MDMGMFNMV

SEQ ID NO: 156747 - protein, 9 aa, Artificial Sequence
  Description of Artificial Sequence: Synthetic peptide
  Seed: MMMGMFNML
MDMGMFNMY

SEQ ID NO: 156748 - protein, 9 aa, Artificial Sequence
  Description of Artificial Sequence: Synthetic peptide
  Seed: MFNMLSTVL
MDNMLSTVF

SEQ ID NO: 156749 - protein, 11 aa, Artificial Sequence
  Description of Artificial Sequence: Synthetic peptide
  Seed: MFNMLSTVLGV
MDNMLSTVLGA

SEQ ID NO: 156750 - protein, 11 aa, Artificial Sequence
  Description of Artificial Sequence: Synthetic peptide
  Seed: MFNMLSTVLGV
MDNMLSTVLGI

SEQ ID NO: 156751 - protein, 11 aa, Artificial Sequence
  Description of Artificial Sequence: Synthetic peptide
  Seed: MFNMLSTVLGV
MDNMLSTVLGL

SEQ ID NO: 156752 - protein, 11 aa, Artificial Sequence
  Description of Artificial Sequence: Synthetic peptide
  Seed: MFNMLSTVLGV
MDNMLSTVLGM

SEQ ID NO: 156753 - protein, 11 aa, Artificial Sequence
  Description of Artificial Sequence: Synthetic peptide
  Seed: MFNMLSTVLGV
MDNMLSTVLGT

SEQ ID NO: 156754 - protein, 11 aa, Artificial Sequence
  Description of Artificial Sequence: Synthetic peptide
  Seed: MFNMLSTVLGV
MDNMLSTVLGV

SEQ ID NO: 156755 - protein, 9 aa, Artificial Sequence
  Description of Artificial Sequence: Synthetic peptide
  Seed: MFNMLSTVL
MDNMLSTVM

SEQ ID NO: 156756 - protein, 9 aa, Artificial Sequence
  Description of Artificial Sequence: Synthetic peptide
  Seed: MFNMLSTVL
MDNMLSTVY

SEQ ID NO: 156757 - protein, 10 aa, Artificial Sequence
  Description of Artificial Sequence: Synthetic peptide
  Seed: MARLGKGYMF
MDRLGKGYMA

SEQ ID NO: 156758 - protein, 10 aa, Artificial Sequence
  Description of Artificial Sequence: Synthetic peptide
  Seed: MARLGKGYMF
MDRLGKGYMF

SEQ ID NO: 156759 - protein, 10 aa, Artificial Sequence
  Description of Artificial Sequence: Synthetic peptide
  Seed: MARLGKGYMF
MDRLGKGYMI

SEQ ID NO: 156760 - protein, 10 aa, Artificial Sequence
  Description of Artificial Sequence: Synthetic peptide
  Seed: MARLGKGYMF
MDRLGKGYMK

SEQ ID NO: 156761 - protein, 10 aa, Artificial Sequence
  Description of Artificial Sequence: Synthetic peptide
  Seed: MARLGKGYMF
MDRLGKGYML

SEQ ID NO: 156762 - protein, 10 aa, Artificial Sequence
  Description of Artificial Sequence: Synthetic peptide
  Seed: MARLGKGYMF
MDRLGKGYMM

SEQ ID NO: 156763 - protein, 10 aa, Artificial Sequence
  Description of Artificial Sequence: Synthetic peptide
  Seed: MARLGKGYMF
MDRLGKGYMR

SEQ ID NO: 156764 - protein, 10 aa, Artificial Sequence
  Description of Artificial Sequence: Synthetic peptide
  Seed: MARLGKGYMF
MDRLGKGYMV

SEQ ID NO: 156765 - protein, 10 aa, Artificial Sequence
  Description of Artificial Sequence: Synthetic peptide
  Seed: MARLGKGYMF
MDRLGKGYMW

SEQ ID NO: 156766 - protein, 10 aa, Artificial Sequence
  Description of Artificial Sequence: Synthetic peptide
  Seed: MARLGKGYMF
MDRLGKGYMY

SEQ ID NO: 156767 - protein, 10 aa, Artificial Sequence
  Description of Artificial Sequence: Synthetic peptide
  Seed: MLSTVLGVSI
MDSTVLGVSF

SEQ ID NO: 156768 - protein, 10 aa, Artificial Sequence
  Description of Artificial Sequence: Synthetic peptide
  Seed: MLSTVLGVSI
MDSTVLGVSI

SEQ ID NO: 156769 - protein, 10 aa, Artificial Sequence
  Description of Artificial Sequence: Synthetic peptide
  Seed: MLSTVLGVSI
MDSTVLGVSL

SEQ ID NO: 156770 - protein, 10 aa, Artificial Sequence
  Description of Artificial Sequence: Synthetic peptide
  Seed: MLSTVLGVSI
MDSTVLGVSM

SEQ ID NO: 156771 - protein, 10 aa, Artificial Sequence
  Description of Artificial Sequence: Synthetic peptide
  Seed: MLSTVLGVSI
MDSTVLGVSV

SEQ ID NO: 156772 - protein, 10 aa, Artificial Sequence
  Description of Artificial Sequence: Synthetic peptide
  Seed: MLSTVLGVSI
MDSTVLGVSW

SEQ ID NO: 156773 - protein, 10 aa, Artificial Sequence
  Description of Artificial Sequence: Synthetic peptide
  Seed: MLSTVLGVSI
MDSTVLGVSY

SEQ ID NO: 156774 - protein, 10 aa, Artificial Sequence
  Description of Artificial Sequence: Synthetic peptide
  Seed: MMGMFNMLST
MEGMFNMLSI

SEQ ID NO: 156775 - protein, 11 aa, Artificial Sequence
  Description of Artificial Sequence: Synthetic peptide
  Seed: MMGMFNMLSTV
MEGMFNMLSTA

SEQ ID NO: 156776 - protein, 11 aa, Artificial Sequence
  Description of Artificial Sequence: Synthetic peptide
  Seed: MMGMFNMLSTV
MEGMFNMLSTI

SEQ ID NO: 156777 - protein, 11 aa, Artificial Sequence
  Description of Artificial Sequence: Synthetic peptide
  Seed: MMGMFNMLSTV
MEGMFNMLSTL

SEQ ID NO: 156778 - protein, 11 aa, Artificial Sequence
  Description of Artificial Sequence: Synthetic peptide
  Seed: MMGMFNMLSTV
MEGMFNMLSTM

SEQ ID NO: 156779 - protein, 11 aa, Artificial Sequence
  Description of Artificial Sequence: Synthetic peptide
  Seed: MMGMFNMLSTV
MEGMFNMLSTT

SEQ ID NO: 156780 - protein, 11 aa, Artificial Sequence
  Description of Artificial Sequence: Synthetic peptide
  Seed: MMGMFNMLSTV
MEGMFNMLSTV

SEQ ID NO: 156781 - protein, 10 aa, Artificial Sequence
  Description of Artificial Sequence: Synthetic peptide
  Seed: MMGMFNMLST
MEGMFNMLSV

SEQ ID NO: 156782 - protein, 9 aa, Artificial Sequence
  Description of Artificial Sequence: Synthetic peptide
  Seed: MSIGVTVIK
MEIGVTVIK

SEQ ID NO: 156783 - protein, 10 aa, Artificial Sequence
  Description of Artificial Sequence: Synthetic peptide
  Seed: MSIGVTVIKN
MEIGVTVIKK

SEQ ID NO: 156784 - protein, 10 aa, Artificial Sequence
  Description of Artificial Sequence: Synthetic peptide
  Seed: MSIGVTVIKN
MEIGVTVIKR

SEQ ID NO: 156785 - protein, 9 aa, Artificial Sequence
  Description of Artificial Sequence: Synthetic peptide
  Seed: MSIGVTVIK
MEIGVTVIR

SEQ ID NO: 156786 - protein, 8 aa, Artificial Sequence
  Description of Artificial Sequence: Synthetic peptide
  Seed: MELPSFGV
MELPSFGA

SEQ ID NO: 156787 - protein, 8 aa, Artificial Sequence
  Description of Artificial Sequence: Synthetic peptide
  Seed: MELPSFGV
MELPSFGF

SEQ ID NO: 156788 - protein, 8 aa, Artificial Sequence
  Description of Artificial Sequence: Synthetic peptide
  Seed: MELPSFGV
MELPSFGI

SEQ ID NO: 156789 - protein, 8 aa, Artificial Sequence
  Description of Artificial Sequence: Synthetic peptide
  Seed: MELPSFGV
MELPSFGL

SEQ ID NO: 156790 - protein, 8 aa, Artificial Sequence
  Description of Artificial Sequence: Synthetic peptide
  Seed: MELPSFGV
MELPSFGM

SEQ ID NO: 156791 - protein, 9 aa, Artificial Sequence
  Description of Artificial Sequence: Synthetic peptide
  Seed: MELPSFGVS
MELPSFGVC

SEQ ID NO: 156792 - protein, 9 aa, Artificial Sequence
  Description of Artificial Sequence: Synthetic peptide
  Seed: MELPSFGVS
MELPSFGVF

SEQ ID NO: 156793 - protein, 9 aa, Artificial Sequence
  Description of Artificial Sequence: Synthetic peptide
  Seed: MELPSFGVS
MELPSFGVG

SEQ ID NO: 156794 - protein, 9 aa, Artificial Sequence
  Description of Artificial Sequence: Synthetic peptide
  Seed: MELPSFGVS
MELPSFGVI

SEQ ID NO: 156795 - protein, 9 aa, Artificial Sequence
  Description of Artificial Sequence: Synthetic peptide
  Seed: MELPSFGVS
MELPSFGVL

SEQ ID NO: 156796 - protein, 9 aa, Artificial Sequence
  Description of Artificial Sequence: Synthetic peptide
  Seed: MELPSFGVS
MELPSFGVM

SEQ ID NO: 156797 - protein, 9 aa, Artificial Sequence
  Description of Artificial Sequence: Synthetic peptide
  Seed: MELPSFGVS
MELPSFGVP

SEQ ID NO: 156798 - protein, 10 aa, Artificial Sequence
  Description of Artificial Sequence: Synthetic peptide
  Seed: MELPSFGVSG
MELPSFGVSA

SEQ ID NO: 156799 - protein, 10 aa, Artificial Sequence
  Description of Artificial Sequence: Synthetic peptide
  Seed: MELPSFGVSG
MELPSFGVSC

SEQ ID NO: 156800 - protein, 10 aa, Artificial Sequence
  Description of Artificial Sequence: Synthetic peptide
  Seed: MELPSFGVSG
MELPSFGVSF

SEQ ID NO: 156801 - protein, 10 aa, Artificial Sequence
  Description of Artificial Sequence: Synthetic peptide
  Seed: MELPSFGVSG
MELPSFGVSI

SEQ ID NO: 156802 - protein, 10 aa, Artificial Sequence
  Description of Artificial Sequence: Synthetic peptide
  Seed: MELPSFGVSG
MELPSFGVSL

SEQ ID NO: 156803 - protein, 10 aa, Artificial Sequence
  Description of Artificial Sequence: Synthetic peptide
  Seed: MELPSFGVSG
MELPSFGVSM

SEQ ID NO: 156804 - protein, 10 aa, Artificial Sequence
  Description of Artificial Sequence: Synthetic peptide
  Seed: MELPSFGVSG
MELPSFGVSP

SEQ ID NO: 156805 - protein, 10 aa, Artificial Sequence
  Description of Artificial Sequence: Synthetic peptide
  Seed: MELPSFGVSG
MELPSFGVSS

SEQ ID NO: 156806 - protein, 10 aa, Artificial Sequence
  Description of Artificial Sequence: Synthetic peptide
  Seed: MELPSFGVSG
MELPSFGVST

SEQ ID NO: 156807 - protein, 10 aa, Artificial Sequence
  Description of Artificial Sequence: Synthetic peptide
  Seed: MELPSFGVSG
MELPSFGVSV

SEQ ID NO: 156808 - protein, 9 aa, Artificial Sequence
  Description of Artificial Sequence: Synthetic peptide
  Seed: MELPSFGVS
MELPSFGVT

SEQ ID NO: 156809 - protein, 9 aa, Artificial Sequence
  Description of Artificial Sequence: Synthetic peptide
  Seed: MELPSFGVS
MELPSFGVV

SEQ ID NO: 156810 - protein, 10 aa, Artificial Sequence
  Description of Artificial Sequence: Synthetic peptide
  Seed: MGMFNMLSTV
MEMFNMLSTA

SEQ ID NO: 156811 - protein, 10 aa, Artificial Sequence
  Description of Artificial Sequence: Synthetic peptide
  Seed: MGMFNMLSTV
MEMFNMLSTC

SEQ ID NO: 156812 - protein, 10 aa, Artificial Sequence
  Description of Artificial Sequence: Synthetic peptide
  Seed: MGMFNMLSTV
MEMFNMLSTF

SEQ ID NO: 156813 - protein, 10 aa, Artificial Sequence
  Description of Artificial Sequence: Synthetic peptide
  Seed: MGMFNMLSTV
MEMFNMLSTG

SEQ ID NO: 156814 - protein, 10 aa, Artificial Sequence
  Description of Artificial Sequence: Synthetic peptide
  Seed: MGMFNMLSTV
MEMFNMLSTH

SEQ ID NO: 156815 - protein, 10 aa, Artificial Sequence
  Description of Artificial Sequence: Synthetic peptide
  Seed: MGMFNMLSTV
MEMFNMLSTI

SEQ ID NO: 156816 - protein, 10 aa, Artificial Sequence
  Description of Artificial Sequence: Synthetic peptide
  Seed: MGMFNMLSTV
MEMFNMLSTL

SEQ ID NO: 156817 - protein, 10 aa, Artificial Sequence
  Description of Artificial Sequence: Synthetic peptide
  Seed: MGMFNMLSTV
MEMFNMLSTM

SEQ ID NO: 156818 - protein, 10 aa, Artificial Sequence
  Description of Artificial Sequence: Synthetic peptide
  Seed: MGMFNMLSTV
MEMFNMLSTP

SEQ ID NO: 156819 - protein, 10 aa, Artificial Sequence
  Description of Artificial Sequence: Synthetic peptide
  Seed: MGMFNMLSTV
MEMFNMLSTS

SEQ ID NO: 156820 - protein, 10 aa, Artificial Sequence
  Description of Artificial Sequence: Synthetic peptide
  Seed: MGMFNMLSTV
MEMFNMLSTT

SEQ ID NO: 156821 - protein, 10 aa, Artificial Sequence
  Description of Artificial Sequence: Synthetic peptide
  Seed: MGMFNMLSTV
MEMFNMLSTV

SEQ ID NO: 156822 - protein, 11 aa, Artificial Sequence
  Description of Artificial Sequence: Synthetic peptide
  Seed: MGMFNMLSTVL
MEMFNMLSTVA

SEQ ID NO: 156823 - protein, 11 aa, Artificial Sequence
  Description of Artificial Sequence: Synthetic peptide
  Seed: MGMFNMLSTVL
MEMFNMLSTVC

SEQ ID NO: 156824 - protein, 11 aa, Artificial Sequence
  Description of Artificial Sequence: Synthetic peptide
  Seed: MGMFNMLSTVL
MEMFNMLSTVD

SEQ ID NO: 156825 - protein, 11 aa, Artificial Sequence
  Description of Artificial Sequence: Synthetic peptide
  Seed: MGMFNMLSTVL
MEMFNMLSTVE

SEQ ID NO: 156826 - protein, 11 aa, Artificial Sequence
  Description of Artificial Sequence: Synthetic peptide
  Seed: MGMFNMLSTVL
MEMFNMLSTVF

SEQ ID NO: 156827 - protein, 11 aa, Artificial Sequence
  Description of Artificial Sequence: Synthetic peptide
  Seed: MGMFNMLSTVL
MEMFNMLSTVG

SEQ ID NO: 156828 - protein, 11 aa, Artificial Sequence
  Description of Artificial Sequence: Synthetic peptide
  Seed: MGMFNMLSTVL
MEMFNMLSTVH

SEQ ID NO: 156829 - protein, 11 aa, Artificial Sequence
  Description of Artificial Sequence: Synthetic peptide
  Seed: MGMFNMLSTVL
MEMFNMLSTVI

SEQ ID NO: 156830 - protein, 11 aa, Artificial Sequence
  Description of Artificial Sequence: Synthetic peptide
  Seed: MGMFNMLSTVL
MEMFNMLSTVK

SEQ ID NO: 156831 - protein, 11 aa, Artificial Sequence
  Description of Artificial Sequence: Synthetic peptide
  Seed: MGMFNMLSTVL
MEMFNMLSTVL

SEQ ID NO: 156832 - protein, 11 aa, Artificial Sequence
  Description of Artificial Sequence: Synthetic peptide
  Seed: MGMFNMLSTVL
MEMFNMLSTVM

SEQ ID NO: 156833 - protein, 11 aa, Artificial Sequence
  Description of Artificial Sequence: Synthetic peptide
  Seed: MGMFNMLSTVL
MEMFNMLSTVN

SEQ ID NO: 156834 - protein, 11 aa, Artificial Sequence
  Description of Artificial Sequence: Synthetic peptide
  Seed: MGMFNMLSTVL
MEMFNMLSTVP

SEQ ID NO: 156835 - protein, 11 aa, Artificial Sequence
  Description of Artificial Sequence: Synthetic peptide
  Seed: MGMFNMLSTVL
MEMFNMLSTVQ

SEQ ID NO: 156836 - protein, 11 aa, Artificial Sequence
  Description of Artificial Sequence: Synthetic peptide
  Seed: MGMFNMLSTVL
MEMFNMLSTVR

SEQ ID NO: 156837 - protein, 11 aa, Artificial Sequence
  Description of Artificial Sequence: Synthetic peptide
  Seed: MGMFNMLSTVL
MEMFNMLSTVS

SEQ ID NO: 156838 - protein, 11 aa, Artificial Sequence
  Description of Artificial Sequence: Synthetic peptide
  Seed: MGMFNMLSTVL
MEMFNMLSTVT

SEQ ID NO: 156839 - protein, 11 aa, Artificial Sequence
  Description of Artificial Sequence: Synthetic peptide
  Seed: MGMFNMLSTVL
MEMFNMLSTVV

SEQ ID NO: 156840 - protein, 11 aa, Artificial Sequence
  Description of Artificial Sequence: Synthetic peptide
  Seed: MGMFNMLSTVL
MEMFNMLSTVW

SEQ ID NO: 156841 - protein, 11 aa, Artificial Sequence
  Description of Artificial Sequence: Synthetic peptide
  Seed: MGMFNMLSTVL
MEMFNMLSTVY

SEQ ID NO: 156842 - protein, 10 aa, Artificial Sequence
  Description of Artificial Sequence: Synthetic peptide
  Seed: MGMFNMLSTV
MEMFNMLSTW

SEQ ID NO: 156843 - protein, 10 aa, Artificial Sequence
  Description of Artificial Sequence: Synthetic peptide
  Seed: MGMFNMLSTV
MEMFNMLSTY

SEQ ID NO: 156844 - protein, 8 aa, Artificial Sequence
  Description of Artificial Sequence: Synthetic peptide
  Seed: MMMGMFNM
MEMGMFNF

SEQ ID NO: 156845 - protein, 9 aa, Artificial Sequence
  Description of Artificial Sequence: Synthetic peptide
  Seed: MMMGMFNML
MEMGMFNMF

SEQ ID NO: 156846 - protein, 9 aa, Artificial Sequence
  Description of Artificial Sequence: Synthetic peptide
  Seed: MMMGMFNML
MEMGMFNMH

SEQ ID NO: 156847 - protein, 9 aa, Artificial Sequence
  Description of Artificial Sequence: Synthetic peptide
  Seed: MMMGMFNML
MEMGMFNMI

SEQ ID NO: 156848 - protein, 9 aa, Artificial Sequence
  Description of Artificial Sequence: Synthetic peptide
  Seed: MMMGMFNML
MEMGMFNML

SEQ ID NO: 156849 - protein, 10 aa, Artificial Sequence
  Description of Artificial Sequence: Synthetic peptide
  Seed: MMMGMFNMLS
MEMGMFNMLA

SEQ ID NO: 156850 - protein, 10 aa, Artificial Sequence
  Description of Artificial Sequence: Synthetic peptide
  Seed: MMMGMFNMLS
MEMGMFNMLI

SEQ ID NO: 156851 - protein, 10 aa, Artificial Sequence
  Description of Artificial Sequence: Synthetic peptide
  Seed: MMMGMFNMLS
MEMGMFNMLL

SEQ ID NO: 156852 - protein, 10 aa, Artificial Sequence
  Description of Artificial Sequence: Synthetic peptide
  Seed: MMMGMFNMLS
MEMGMFNMLM

SEQ ID NO: 156853 - protein, 10 aa, Artificial Sequence
  Description of Artificial Sequence: Synthetic peptide
  Seed: MMMGMFNMLS
MEMGMFNMLS

SEQ ID NO: 156854 - protein, 11 aa, Artificial Sequence
  Description of Artificial Sequence: Synthetic peptide
  Seed: MMMGMFNMLST
MEMGMFNMLSV

SEQ ID NO: 156855 - protein, 10 aa, Artificial Sequence
  Description of Artificial Sequence: Synthetic peptide
  Seed: MMMGMFNMLS
MEMGMFNMLT

SEQ ID NO: 156856 - protein, 10 aa, Artificial Sequence
  Description of Artificial Sequence: Synthetic peptide
  Seed: MMMGMFNMLS
MEMGMFNMLV

SEQ ID NO: 156857 - protein, 9 aa, Artificial Sequence
  Description of Artificial Sequence: Synthetic peptide
  Seed: MMMGMFNML
MEMGMFNMM

SEQ ID NO: 156858 - protein, 9 aa, Artificial Sequence
  Description of Artificial Sequence: Synthetic peptide
  Seed: MMMGMFNML
MEMGMFNMV

SEQ ID NO: 156859 - protein, 9 aa, Artificial Sequence
  Description of Artificial Sequence: Synthetic peptide
  Seed: MMMGMFNML
MEMGMFNMW

SEQ ID NO: 156860 - protein, 9 aa, Artificial Sequence
  Description of Artificial Sequence: Synthetic peptide
  Seed: MMMGMFNML
MEMGMFNMY

SEQ ID NO: 156861 - protein, 8 aa, Artificial Sequence
  Description of Artificial Sequence: Synthetic peptide
  Seed: MMMGMFNM
MEMGMFNY

SEQ ID NO: 156862 - protein, 9 aa, Artificial Sequence
  Description of Artificial Sequence: Synthetic peptide
  Seed: MFNMLSTVL
MENMLSTVA

SEQ ID NO: 156863 - protein, 9 aa, Artificial Sequence
  Description of Artificial Sequence: Synthetic peptide
  Seed: MFNMLSTVL
MENMLSTVF

SEQ ID NO: 156864 - protein, 9 aa, Artificial Sequence
  Description of Artificial Sequence: Synthetic peptide
  Seed: MFNMLSTVL
MENMLSTVH

SEQ ID NO: 156865 - protein, 9 aa, Artificial Sequence
  Description of Artificial Sequence: Synthetic peptide
  Seed: MFNMLSTVL
MENMLSTVI

SEQ ID NO: 156866 - protein, 9 aa, Artificial Sequence
  Description of Artificial Sequence: Synthetic peptide
  Seed: MFNMLSTVL
MENMLSTVL

SEQ ID NO: 156867 - protein, 11 aa, Artificial Sequence
  Description of Artificial Sequence: Synthetic peptide
  Seed: MFNMLSTVLGV
MENMLSTVLGA

SEQ ID NO: 156868 - protein, 11 aa, Artificial Sequence
  Description of Artificial Sequence: Synthetic peptide
  Seed: MFNMLSTVLGV
MENMLSTVLGI

SEQ ID NO: 156869 - protein, 11 aa, Artificial Sequence
  Description of Artificial Sequence: Synthetic peptide
  Seed: MFNMLSTVLGV
MENMLSTVLGL

SEQ ID NO: 156870 - protein, 11 aa, Artificial Sequence
  Description of Artificial Sequence: Synthetic peptide
  Seed: MFNMLSTVLGV
MENMLSTVLGM

SEQ ID NO: 156871 - protein, 11 aa, Artificial Sequence
  Description of Artificial Sequence: Synthetic peptide
  Seed: MFNMLSTVLGV
MENMLSTVLGT

SEQ ID NO: 156872 - protein, 11 aa, Artificial Sequence
  Description of Artificial Sequence: Synthetic peptide
  Seed: MFNMLSTVLGV
MENMLSTVLGV

SEQ ID NO: 156873 - protein, 9 aa, Artificial Sequence
  Description of Artificial Sequence: Synthetic peptide
  Seed: MFNMLSTVL
MENMLSTVM

SEQ ID NO: 156874 - protein, 9 aa, Artificial Sequence
  Description of Artificial Sequence: Synthetic peptide
  Seed: MFNMLSTVL
MENMLSTVV

SEQ ID NO: 156875 - protein, 9 aa, Artificial Sequence
  Description of Artificial Sequence: Synthetic peptide
  Seed: MFNMLSTVL
MENMLSTVW

SEQ ID NO: 156876 - protein, 9 aa, Artificial Sequence
  Description of Artificial Sequence: Synthetic peptide
  Seed: MFNMLSTVL
MENMLSTVY

SEQ ID NO: 156877 - protein, 9 aa, Artificial Sequence
  Description of Artificial Sequence: Synthetic peptide
  Seed: MARLGKGYM
MERLGKGYF

SEQ ID NO: 156878 - protein, 9 aa, Artificial Sequence
  Description of Artificial Sequence: Synthetic peptide
  Seed: MARLGKGYM
MERLGKGYM

SEQ ID NO: 156879 - protein, 10 aa, Artificial Sequence
  Description of Artificial Sequence: Synthetic peptide
  Seed: MARLGKGYMF
MERLGKGYMA

SEQ ID NO: 156880 - protein, 10 aa, Artificial Sequence
  Description of Artificial Sequence: Synthetic peptide
  Seed: MARLGKGYMF
MERLGKGYMF

SEQ ID NO: 156881 - protein, 10 aa, Artificial Sequence
  Description of Artificial Sequence: Synthetic peptide
  Seed: MARLGKGYMF
MERLGKGYMI

SEQ ID NO: 156882 - protein, 10 aa, Artificial Sequence
  Description of Artificial Sequence: Synthetic peptide
  Seed: MARLGKGYMF
MERLGKGYMK

SEQ ID NO: 156883 - protein, 10 aa, Artificial Sequence
  Description of Artificial Sequence: Synthetic peptide
  Seed: MARLGKGYMF
MERLGKGYML

SEQ ID NO: 156884 - protein, 10 aa, Artificial Sequence
  Description of Artificial Sequence: Synthetic peptide
  Seed: MARLGKGYMF
MERLGKGYMM

SEQ ID NO: 156885 - protein, 10 aa, Artificial Sequence
  Description of Artificial Sequence: Synthetic peptide
  Seed: MARLGKGYMF
MERLGKGYMR

SEQ ID NO: 156886 - protein, 10 aa, Artificial Sequence
  Description of Artificial Sequence: Synthetic peptide
  Seed: MARLGKGYMF
MERLGKGYMV

SEQ ID NO: 156887 - protein, 10 aa, Artificial Sequence
  Description of Artificial Sequence: Synthetic peptide
  Seed: MARLGKGYMF
MERLGKGYMW

SEQ ID NO: 156888 - protein, 10 aa, Artificial Sequence
  Description of Artificial Sequence: Synthetic peptide
  Seed: MARLGKGYMF
MERLGKGYMY

SEQ ID NO: 156889 - protein, 9 aa, Artificial Sequence
  Description of Artificial Sequence: Synthetic peptide
  Seed: MARLGKGYM
MERLGKGYY

SEQ ID NO: 156890 - protein, 10 aa, Artificial Sequence
  Description of Artificial Sequence: Synthetic peptide
  Seed: MLSTVLGVSI
MESTVLGVSF

SEQ ID NO: 156891 - protein, 10 aa, Artificial Sequence
  Description of Artificial Sequence: Synthetic peptide
  Seed: MLSTVLGVSI
MESTVLGVSI

SEQ ID NO: 156892 - protein, 10 aa, Artificial Sequence
  Description of Artificial Sequence: Synthetic peptide
  Seed: MLSTVLGVSI
MESTVLGVSL

SEQ ID NO: 156893 - protein, 10 aa, Artificial Sequence
  Description of Artificial Sequence: Synthetic peptide
  Seed: MLSTVLGVSI
MESTVLGVSM

SEQ ID NO: 156894 - protein, 10 aa, Artificial Sequence
  Description of Artificial Sequence: Synthetic peptide
  Seed: MLSTVLGVSI
MESTVLGVSV

SEQ ID NO: 156895 - protein, 10 aa, Artificial Sequence
  Description of Artificial Sequence: Synthetic peptide
  Seed: MLSTVLGVSI
MESTVLGVSW

SEQ ID NO: 156896 - protein, 10 aa, Artificial Sequence
  Description of Artificial Sequence: Synthetic peptide
  Seed: MLSTVLGVSI
MESTVLGVSY

SEQ ID NO: 156897 - protein, 9 aa, Artificial Sequence
  Description of Artificial Sequence: Synthetic peptide
  Seed: MMGMFNMLS
MFGMFNMLI

SEQ ID NO: 156898 - protein, 9 aa, Artificial Sequence
  Description of Artificial Sequence: Synthetic peptide
  Seed: MMGMFNMLS
MFGMFNMLL

SEQ ID NO: 156899 - protein, 11 aa, Artificial Sequence
  Description of Artificial Sequence: Synthetic peptide
  Seed: MMGMFNMLSTV
MFGMFNMLSTA

SEQ ID NO: 156900 - protein, 11 aa, Artificial Sequence
  Description of Artificial Sequence: Synthetic peptide
  Seed: MMGMFNMLSTV
MFGMFNMLSTI

SEQ ID NO: 156901 - protein, 11 aa, Artificial Sequence
  Description of Artificial Sequence: Synthetic peptide
  Seed: MMGMFNMLSTV
MFGMFNMLSTL

SEQ ID NO: 156902 - protein, 11 aa, Artificial Sequence
  Description of Artificial Sequence: Synthetic peptide
  Seed: MMGMFNMLSTV
MFGMFNMLSTM

SEQ ID NO: 156903 - protein, 11 aa, Artificial Sequence
  Description of Artificial Sequence: Synthetic peptide
  Seed: MMGMFNMLSTV
MFGMFNMLSTT

SEQ ID NO: 156904 - protein, 11 aa, Artificial Sequence
  Description of Artificial Sequence: Synthetic peptide
  Seed: MMGMFNMLSTV
MFGMFNMLSTV

SEQ ID NO: 156905 - protein, 10 aa, Artificial Sequence
  Description of Artificial Sequence: Synthetic peptide
  Seed: MMGMFNMLST
MFGMFNMLSV

SEQ ID NO: 156906 - protein, 9 aa, Artificial Sequence
  Description of Artificial Sequence: Synthetic peptide
  Seed: MMGMFNMLS
MFGMFNMLV

SEQ ID NO: 156907 - protein, 9 aa, Artificial Sequence
  Description of Artificial Sequence: Synthetic peptide
  Seed: MSIGVTVIK
MFIGVTVIK

SEQ ID NO: 156908 - protein, 10 aa, Artificial Sequence
  Description of Artificial Sequence: Synthetic peptide
  Seed: MSIGVTVIKN
MFIGVTVIKK

SEQ ID NO: 156909 - protein, 10 aa, Artificial Sequence
  Description of Artificial Sequence: Synthetic peptide
  Seed: MSIGVTVIKN
MFIGVTVIKR

SEQ ID NO: 156910 - protein, 9 aa, Artificial Sequence
  Description of Artificial Sequence: Synthetic peptide
  Seed: MSIGVTVIK
MFIGVTVIR

SEQ ID NO: 156911 - protein, 10 aa, Artificial Sequence
  Description of Artificial Sequence: Synthetic peptide
  Seed: MGMFNMLSTV
MFMFNMLSTA

SEQ ID NO: 156912 - protein, 10 aa, Artificial Sequence
  Description of Artificial Sequence: Synthetic peptide
  Seed: MGMFNMLSTV
MFMFNMLSTC

SEQ ID NO: 156913 - protein, 10 aa, Artificial Sequence
  Description of Artificial Sequence: Synthetic peptide
  Seed: MGMFNMLSTV
MFMFNMLSTF

SEQ ID NO: 156914 - protein, 10 aa, Artificial Sequence
  Description of Artificial Sequence: Synthetic peptide
  Seed: MGMFNMLSTV
MFMFNMLSTG

SEQ ID NO: 156915 - protein, 10 aa, Artificial Sequence
  Description of Artificial Sequence: Synthetic peptide
  Seed: MGMFNMLSTV
MFMFNMLSTH

SEQ ID NO: 156916 - protein, 10 aa, Artificial Sequence
  Description of Artificial Sequence: Synthetic peptide
  Seed: MGMFNMLSTV
MFMFNMLSTI

SEQ ID NO: 156917 - protein, 10 aa, Artificial Sequence
  Description of Artificial Sequence: Synthetic peptide
  Seed: MGMFNMLSTV
MFMFNMLSTL

SEQ ID NO: 156918 - protein, 10 aa, Artificial Sequence
  Description of Artificial Sequence: Synthetic peptide
  Seed: MGMFNMLSTV
MFMFNMLSTM

SEQ ID NO: 156919 - protein, 10 aa, Artificial Sequence
  Description of Artificial Sequence: Synthetic peptide
  Seed: MGMFNMLSTV
MFMFNMLSTP

SEQ ID NO: 156920 - protein, 10 aa, Artificial Sequence
  Description of Artificial Sequence: Synthetic peptide
  Seed: MGMFNMLSTV
MFMFNMLSTS

SEQ ID NO: 156921 - protein, 10 aa, Artificial Sequence
  Description of Artificial Sequence: Synthetic peptide
  Seed: MGMFNMLSTV
MFMFNMLSTT

SEQ ID NO: 156922 - protein, 10 aa, Artificial Sequence
  Description of Artificial Sequence: Synthetic peptide
  Seed: MGMFNMLSTV
MFMFNMLSTV

SEQ ID NO: 156923 - protein, 11 aa, Artificial Sequence
  Description of Artificial Sequence: Synthetic peptide
  Seed: MGMFNMLSTVL
MFMFNMLSTVA

SEQ ID NO: 156924 - protein, 11 aa, Artificial Sequence
  Description of Artificial Sequence: Synthetic peptide
  Seed: MGMFNMLSTVL
MFMFNMLSTVC

SEQ ID NO: 156925 - protein, 11 aa, Artificial Sequence
  Description of Artificial Sequence: Synthetic peptide
  Seed: MGMFNMLSTVL
MFMFNMLSTVD

SEQ ID NO: 156926 - protein, 11 aa, Artificial Sequence
  Description of Artificial Sequence: Synthetic peptide
  Seed: MGMFNMLSTVL
MFMFNMLSTVE

SEQ ID NO: 156927 - protein, 11 aa, Artificial Sequence
  Description of Artificial Sequence: Synthetic peptide
  Seed: MGMFNMLSTVL
MFMFNMLSTVF

SEQ ID NO: 156928 - protein, 11 aa, Artificial Sequence
  Description of Artificial Sequence: Synthetic peptide
  Seed: MGMFNMLSTVL
MFMFNMLSTVG

SEQ ID NO: 156929 - protein, 11 aa, Artificial Sequence
  Description of Artificial Sequence: Synthetic peptide
  Seed: MGMFNMLSTVL
MFMFNMLSTVH

SEQ ID NO: 156930 - protein, 11 aa, Artificial Sequence
  Description of Artificial Sequence: Synthetic peptide
  Seed: MGMFNMLSTVL
MFMFNMLSTVI

SEQ ID NO: 156931 - protein, 11 aa, Artificial Sequence
  Description of Artificial Sequence: Synthetic peptide
  Seed: MGMFNMLSTVL
MFMFNMLSTVK

SEQ ID NO: 156932 - protein, 11 aa, Artificial Sequence
  Description of Artificial Sequence: Synthetic peptide
  Seed: MGMFNMLSTVL
MFMFNMLSTVL

SEQ ID NO: 156933 - protein, 11 aa, Artificial Sequence
  Description of Artificial Sequence: Synthetic peptide
  Seed: MGMFNMLSTVL
MFMFNMLSTVM

SEQ ID NO: 156934 - protein, 11 aa, Artificial Sequence
  Description of Artificial Sequence: Synthetic peptide
  Seed: MGMFNMLSTVL
MFMFNMLSTVN

SEQ ID NO: 156935 - protein, 11 aa, Artificial Sequence
  Description of Artificial Sequence: Synthetic peptide
  Seed: MGMFNMLSTVL
MFMFNMLSTVP

SEQ ID NO: 156936 - protein, 11 aa, Artificial Sequence
  Description of Artificial Sequence: Synthetic peptide
  Seed: MGMFNMLSTVL
MFMFNMLSTVQ

SEQ ID NO: 156937 - protein, 11 aa, Artificial Sequence
  Description of Artificial Sequence: Synthetic peptide
  Seed: MGMFNMLSTVL
MFMFNMLSTVR

SEQ ID NO: 156938 - protein, 11 aa, Artificial Sequence
  Description of Artificial Sequence: Synthetic peptide
  Seed: MGMFNMLSTVL
MFMFNMLSTVS

SEQ ID NO: 156939 - protein, 11 aa, Artificial Sequence
  Description of Artificial Sequence: Synthetic peptide
  Seed: MGMFNMLSTVL
MFMFNMLSTVT

SEQ ID NO: 156940 - protein, 11 aa, Artificial Sequence
  Description of Artificial Sequence: Synthetic peptide
  Seed: MGMFNMLSTVL
MFMFNMLSTVV

SEQ ID NO: 156941 - protein, 11 aa, Artificial Sequence
  Description of Artificial Sequence: Synthetic peptide
  Seed: MGMFNMLSTVL
MFMFNMLSTVW

SEQ ID NO: 156942 - protein, 11 aa, Artificial Sequence
  Description of Artificial Sequence: Synthetic peptide
  Seed: MGMFNMLSTVL
MFMFNMLSTVY

SEQ ID NO: 156943 - protein, 10 aa, Artificial Sequence
  Description of Artificial Sequence: Synthetic peptide
  Seed: MGMFNMLSTV
MFMFNMLSTW

SEQ ID NO: 156944 - protein, 10 aa, Artificial Sequence
  Description of Artificial Sequence: Synthetic peptide
  Seed: MGMFNMLSTV
MFMFNMLSTY

SEQ ID NO: 156945 - protein, 8 aa, Artificial Sequence
  Description of Artificial Sequence: Synthetic peptide
  Seed: MMMGMFNM
MFMGMFNL

SEQ ID NO: 156946 - protein, 9 aa, Artificial Sequence
  Description of Artificial Sequence: Synthetic peptide
  Seed: MMMGMFNML
MFMGMFNMF

SEQ ID NO: 156947 - protein, 9 aa, Artificial Sequence
  Description of Artificial Sequence: Synthetic peptide
  Seed: MMMGMFNML
MFMGMFNMH

SEQ ID NO: 156948 - protein, 9 aa, Artificial Sequence
  Description of Artificial Sequence: Synthetic peptide
  Seed: MMMGMFNML
MFMGMFNMI

SEQ ID NO: 156949 - protein, 9 aa, Artificial Sequence
  Description of Artificial Sequence: Synthetic peptide
  Seed: MMMGMFNML
MFMGMFNML

SEQ ID NO: 156950 - protein, 10 aa, Artificial Sequence
  Description of Artificial Sequence: Synthetic peptide
  Seed: MMMGMFNMLS
MFMGMFNMLA

SEQ ID NO: 156951 - protein, 10 aa, Artificial Sequence
  Description of Artificial Sequence: Synthetic peptide
  Seed: MMMGMFNMLS
MFMGMFNMLI

SEQ ID NO: 156952 - protein, 10 aa, Artificial Sequence
  Description of Artificial Sequence: Synthetic peptide
  Seed: MMMGMFNMLS
MFMGMFNMLL

SEQ ID NO: 156953 - protein, 10 aa, Artificial Sequence
  Description of Artificial Sequence: Synthetic peptide
  Seed: MMMGMFNMLS
MFMGMFNMLM

SEQ ID NO: 156954 - protein, 10 aa, Artificial Sequence
  Description of Artificial Sequence: Synthetic peptide
  Seed: MMMGMFNMLS
MFMGMFNMLS

SEQ ID NO: 156955 - protein, 11 aa, Artificial Sequence
  Description of Artificial Sequence: Synthetic peptide
  Seed: MMMGMFNMLST
MFMGMFNMLSA

SEQ ID NO: 156956 - protein, 11 aa, Artificial Sequence
  Description of Artificial Sequence: Synthetic peptide
  Seed: MMMGMFNMLST
MFMGMFNMLSI

SEQ ID NO: 156957 - protein, 11 aa, Artificial Sequence
  Description of Artificial Sequence: Synthetic peptide
  Seed: MMMGMFNMLST
MFMGMFNMLSL

SEQ ID NO: 156958 - protein, 11 aa, Artificial Sequence
  Description of Artificial Sequence: Synthetic peptide
  Seed: MMMGMFNMLST
MFMGMFNMLSV

SEQ ID NO: 156959 - protein, 10 aa, Artificial Sequence
  Description of Artificial Sequence: Synthetic peptide
  Seed: MMMGMFNMLS
MFMGMFNMLT

SEQ ID NO: 156960 - protein, 10 aa, Artificial Sequence
  Description of Artificial Sequence: Synthetic peptide
  Seed: MMMGMFNMLS
MFMGMFNMLV

SEQ ID NO: 156961 - protein, 9 aa, Artificial Sequence
  Description of Artificial Sequence: Synthetic peptide
  Seed: MMMGMFNML
MFMGMFNMM

SEQ ID NO: 156962 - protein, 9 aa, Artificial Sequence
  Description of Artificial Sequence: Synthetic peptide
  Seed: MMMGMFNML
MFMGMFNMV

SEQ ID NO: 156963 - protein, 9 aa, Artificial Sequence
  Description of Artificial Sequence: Synthetic peptide
  Seed: MMMGMFNML
MFMGMFNMW

SEQ ID NO: 156964 - protein, 9 aa, Artificial Sequence
  Description of Artificial Sequence: Synthetic peptide
  Seed: MMMGMFNML
MFMGMFNMY

SEQ ID NO: 156965 - protein, 8 aa, Artificial Sequence
  Description of Artificial Sequence: Synthetic peptide
  Seed: MMMGMFNM
MFMGMFNV

SEQ ID NO: 156966 - protein, 8 aa, Artificial Sequence
  Description of Artificial Sequence: Synthetic peptide
  Seed: MFNMLSTV
MFNMLSTF

SEQ ID NO: 156967 - protein, 8 aa, Artificial Sequence
  Description of Artificial Sequence: Synthetic peptide
  Seed: MFNMLSTV
MFNMLSTI

SEQ ID NO: 156968 - protein, 8 aa, Artificial Sequence
  Description of Artificial Sequence: Synthetic peptide
  Seed: MFNMLSTV
MFNMLSTL

SEQ ID NO: 156969 - protein, 8 aa, Artificial Sequence
  Description of Artificial Sequence: Synthetic peptide
  Seed: MFNMLSTV
MFNMLSTM

SEQ ID NO: 156970 - protein, 9 aa, Artificial Sequence
  Description of Artificial Sequence: Synthetic peptide
  Seed: MFNMLSTVL
MFNMLSTVA

SEQ ID NO: 156971 - protein, 9 aa, Artificial Sequence
  Description of Artificial Sequence: Synthetic peptide
  Seed: MFNMLSTVL
MFNMLSTVF

SEQ ID NO: 156972 - protein, 9 aa, Artificial Sequence
  Description of Artificial Sequence: Synthetic peptide
  Seed: MFNMLSTVL
MFNMLSTVH

SEQ ID NO: 156973 - protein, 9 aa, Artificial Sequence
  Description of Artificial Sequence: Synthetic peptide
  Seed: MFNMLSTVL
MFNMLSTVI

SEQ ID NO: 156974 - protein, 11 aa, Artificial Sequence
  Description of Artificial Sequence: Synthetic peptide
  Seed: MFNMLSTVLGV
MFNMLSTVLGA

SEQ ID NO: 156975 - protein, 11 aa, Artificial Sequence
  Description of Artificial Sequence: Synthetic peptide
  Seed: MFNMLSTVLGV
MFNMLSTVLGI

SEQ ID NO: 156976 - protein, 11 aa, Artificial Sequence
  Description of Artificial Sequence: Synthetic peptide
  Seed: MFNMLSTVLGV
MFNMLSTVLGL

SEQ ID NO: 156977 - protein, 11 aa, Artificial Sequence
  Description of Artificial Sequence: Synthetic peptide
  Seed: MFNMLSTVLGV
MFNMLSTVLGM

SEQ ID NO: 156978 - protein, 11 aa, Artificial Sequence
  Description of Artificial Sequence: Synthetic peptide
  Seed: MFNMLSTVLGV
MFNMLSTVLGT

SEQ ID NO: 156979 - protein, 9 aa, Artificial Sequence
  Description of Artificial Sequence: Synthetic peptide
  Seed: MFNMLSTVL
MFNMLSTVM

SEQ ID NO: 156980 - protein, 9 aa, Artificial Sequence
  Description of Artificial Sequence: Synthetic peptide
  Seed: MFNMLSTVL
MFNMLSTVT

SEQ ID NO: 156981 - protein, 9 aa, Artificial Sequence
  Description of Artificial Sequence: Synthetic peptide
  Seed: MFNMLSTVL
MFNMLSTVV

SEQ ID NO: 156982 - protein, 9 aa, Artificial Sequence
  Description of Artificial Sequence: Synthetic peptide
  Seed: MFNMLSTVL
MFNMLSTVW

SEQ ID NO: 156983 - protein, 9 aa, Artificial Sequence
  Description of Artificial Sequence: Synthetic peptide
  Seed: MFNMLSTVL
MFNMLSTVY

SEQ ID NO: 156984 - protein, 8 aa, Artificial Sequence
  Description of Artificial Sequence: Synthetic peptide
  Seed: MFNMLSTV
MFNMLSTY

SEQ ID NO: 156985 - protein, 9 aa, Artificial Sequence
  Description of Artificial Sequence: Synthetic peptide
  Seed: MARLGKGYM
MFRLGKGYA

SEQ ID NO: 156986 - protein, 9 aa, Artificial Sequence
  Description of Artificial Sequence: Synthetic peptide
  Seed: MARLGKGYM
MFRLGKGYF

SEQ ID NO: 156987 - protein, 9 aa, Artificial Sequence
  Description of Artificial Sequence: Synthetic peptide
  Seed: MARLGKGYM
MFRLGKGYG

SEQ ID NO: 156988 - protein, 9 aa, Artificial Sequence
  Description of Artificial Sequence: Synthetic peptide
  Seed: MARLGKGYM
MFRLGKGYI

SEQ ID NO: 156989 - protein, 9 aa, Artificial Sequence
  Description of Artificial Sequence: Synthetic peptide
  Seed: MARLGKGYM
MFRLGKGYK

SEQ ID NO: 156990 - protein, 9 aa, Artificial Sequence
  Description of Artificial Sequence: Synthetic peptide
  Seed: MARLGKGYM
MFRLGKGYL

SEQ ID NO: 156991 - protein, 9 aa, Artificial Sequence
  Description of Artificial Sequence: Synthetic peptide
  Seed: MARLGKGYM
MFRLGKGYM

SEQ ID NO: 156992 - protein, 10 aa, Artificial Sequence
  Description of Artificial Sequence: Synthetic peptide
  Seed: MARLGKGYMF
MFRLGKGYMA

SEQ ID NO: 156993 - protein, 10 aa, Artificial Sequence
  Description of Artificial Sequence: Synthetic peptide
  Seed: MARLGKGYMF
MFRLGKGYMF

SEQ ID NO: 156994 - protein, 10 aa, Artificial Sequence
  Description of Artificial Sequence: Synthetic peptide
  Seed: MARLGKGYMF
MFRLGKGYMI

SEQ ID NO: 156995 - protein, 10 aa, Artificial Sequence
  Description of Artificial Sequence: Synthetic peptide
  Seed: MARLGKGYMF
MFRLGKGYMK

SEQ ID NO: 156996 - protein, 10 aa, Artificial Sequence
  Description of Artificial Sequence: Synthetic peptide
  Seed: MARLGKGYMF
MFRLGKGYML

SEQ ID NO: 156997 - protein, 10 aa, Artificial Sequence
  Description of Artificial Sequence: Synthetic peptide
  Seed: MARLGKGYMF
MFRLGKGYMM

SEQ ID NO: 156998 - protein, 10 aa, Artificial Sequence
  Description of Artificial Sequence: Synthetic peptide
  Seed: MARLGKGYMF
MFRLGKGYMR

SEQ ID NO: 156999 - protein, 10 aa, Artificial Sequence
  Description of Artificial Sequence: Synthetic peptide
  Seed: MARLGKGYMF
MFRLGKGYMV

SEQ ID NO: 157000 - protein, 10 aa, Artificial Sequence
  Description of Artificial Sequence: Synthetic peptide
  Seed: MARLGKGYMF
MFRLGKGYMW

SEQ ID NO: 157001 - protein, 10 aa, Artificial Sequence
  Description of Artificial Sequence: Synthetic peptide
  Seed: MARLGKGYMF
MFRLGKGYMY

SEQ ID NO: 157002 - protein, 9 aa, Artificial Sequence
  Description of Artificial Sequence: Synthetic peptide
  Seed: MARLGKGYM
MFRLGKGYR

SEQ ID NO: 157003 - protein, 9 aa, Artificial Sequence
  Description of Artificial Sequence: Synthetic peptide
  Seed: MARLGKGYM
MFRLGKGYS

SEQ ID NO: 157004 - protein, 9 aa, Artificial Sequence
  Description of Artificial Sequence: Synthetic peptide
  Seed: MARLGKGYM
MFRLGKGYV

SEQ ID NO: 157005 - protein, 9 aa, Artificial Sequence
  Description of Artificial Sequence: Synthetic peptide
  Seed: MARLGKGYM
MFRLGKGYY

SEQ ID NO: 157006 - protein, 9 aa, Artificial Sequence
  Description of Artificial Sequence: Synthetic peptide
  Seed: MFSNKMARL
MFSNKMARF

SEQ ID NO: 157007 - protein, 9 aa, Artificial Sequence
  Description of Artificial Sequence: Synthetic peptide
  Seed: MFSNKMARL
MFSNKMARI

SEQ ID NO: 157008 - protein, 11 aa, Artificial Sequence
  Description of Artificial Sequence: Synthetic peptide
  Seed: MFSNKMARLGK
MFSNKMARLGR

SEQ ID NO: 157009 - protein, 9 aa, Artificial Sequence
  Description of Artificial Sequence: Synthetic peptide
  Seed: MFSNKMARL
MFSNKMARM

SEQ ID NO: 157010 - protein, 9 aa, Artificial Sequence
  Description of Artificial Sequence: Synthetic peptide
  Seed: MFSNKMARL
MFSNKMARV

SEQ ID NO: 157011 - protein, 9 aa, Artificial Sequence
  Description of Artificial Sequence: Synthetic peptide
  Seed: MFSNKMARL
MFSNKMARW

SEQ ID NO: 157012 - protein, 9 aa, Artificial Sequence
  Description of Artificial Sequence: Synthetic peptide
  Seed: MFSNKMARL
MFSNKMARY

SEQ ID NO: 157013 - protein, 8 aa, Artificial Sequence
  Description of Artificial Sequence: Synthetic peptide
  Seed: MLSTVLGV
MFSTVLGL

SEQ ID NO: 157014 - protein, 8 aa, Artificial Sequence
  Description of Artificial Sequence: Synthetic peptide
  Seed: MLSTVLGV
MFSTVLGV

SEQ ID NO: 157015 - protein, 10 aa, Artificial Sequence
  Description of Artificial Sequence: Synthetic peptide
  Seed: MLSTVLGVSI
MFSTVLGVSF

SEQ ID NO: 157016 - protein, 10 aa, Artificial Sequence
  Description of Artificial Sequence: Synthetic peptide
  Seed: MLSTVLGVSI
MFSTVLGVSI

SEQ ID NO: 157017 - protein, 10 aa, Artificial Sequence
  Description of Artificial Sequence: Synthetic peptide
  Seed: MLSTVLGVSI
MFSTVLGVSL

SEQ ID NO: 157018 - protein, 10 aa, Artificial Sequence
  Description of Artificial Sequence: Synthetic peptide
  Seed: MLSTVLGVSI
MFSTVLGVSM

SEQ ID NO: 157019 - protein, 10 aa, Artificial Sequence
  Description of Artificial Sequence: Synthetic peptide
  Seed: MLSTVLGVSI
MFSTVLGVSV

SEQ ID NO: 157020 - protein, 10 aa, Artificial Sequence
  Description of Artificial Sequence: Synthetic peptide
  Seed: MLSTVLGVSI
MFSTVLGVSW

SEQ ID NO: 157021 - protein, 10 aa, Artificial Sequence
  Description of Artificial Sequence: Synthetic peptide
  Seed: MLSTVLGVSI
MFSTVLGVSY

SEQ ID NO: 157022 - protein, 11 aa, Artificial Sequence
  Description of Artificial Sequence: Synthetic peptide
  Seed: MMGMFNMLSTV
MGGMFNMLSTA

SEQ ID NO: 157023 - protein, 11 aa, Artificial Sequence
  Description of Artificial Sequence: Synthetic peptide
  Seed: MMGMFNMLSTV
MGGMFNMLSTI

SEQ ID NO: 157024 - protein, 11 aa, Artificial Sequence
  Description of Artificial Sequence: Synthetic peptide
  Seed: MMGMFNMLSTV
MGGMFNMLSTL

SEQ ID NO: 157025 - protein, 11 aa, Artificial Sequence
  Description of Artificial Sequence: Synthetic peptide
  Seed: MMGMFNMLSTV
MGGMFNMLSTM

SEQ ID NO: 157026 - protein, 11 aa, Artificial Sequence
  Description of Artificial Sequence: Synthetic peptide
  Seed: MMGMFNMLSTV
MGGMFNMLSTT

SEQ ID NO: 157027 - protein, 11 aa, Artificial Sequence
  Description of Artificial Sequence: Synthetic peptide
  Seed: MMGMFNMLSTV
MGGMFNMLSTV

SEQ ID NO: 157028 - protein, 10 aa, Artificial Sequence
  Description of Artificial Sequence: Synthetic peptide
  Seed: MMGMFNMLST
MGGMFNMLSV

SEQ ID NO: 157029 - protein, 9 aa, Artificial Sequence
  Description of Artificial Sequence: Synthetic peptide
  Seed: MMGMFNMLS
MGGMFNMLV

SEQ ID NO: 157030 - protein, 9 aa, Artificial Sequence
  Description of Artificial Sequence: Synthetic peptide
  Seed: MSIGVTVIK
MGIGVTVIK

SEQ ID NO: 157031 - protein, 10 aa, Artificial Sequence
  Description of Artificial Sequence: Synthetic peptide
  Seed: MSIGVTVIKN
MGIGVTVIKK

SEQ ID NO: 157032 - protein, 10 aa, Artificial Sequence
  Description of Artificial Sequence: Synthetic peptide
  Seed: MSIGVTVIKN
MGIGVTVIKR

SEQ ID NO: 157033 - protein, 9 aa, Artificial Sequence
  Description of Artificial Sequence: Synthetic peptide
  Seed: MSIGVTVIK
MGIGVTVIR

SEQ ID NO: 157034 - protein, 9 aa, Artificial Sequence
  Description of Artificial Sequence: Synthetic peptide
  Seed: MSIGVTVIK
MGIGVTVIY

SEQ ID NO: 157035 - protein, 10 aa, Artificial Sequence
  Description of Artificial Sequence: Synthetic peptide
  Seed: MGMFNMLSTV
MGMFNMLSTA

SEQ ID NO: 157036 - protein, 10 aa, Artificial Sequence
  Description of Artificial Sequence: Synthetic peptide
  Seed: MGMFNMLSTV
MGMFNMLSTC

SEQ ID NO: 157037 - protein, 10 aa, Artificial Sequence
  Description of Artificial Sequence: Synthetic peptide
  Seed: MGMFNMLSTV
MGMFNMLSTF

SEQ ID NO: 157038 - protein, 10 aa, Artificial Sequence
  Description of Artificial Sequence: Synthetic peptide
  Seed: MGMFNMLSTV
MGMFNMLSTG

SEQ ID NO: 157039 - protein, 10 aa, Artificial Sequence
  Description of Artificial Sequence: Synthetic peptide
  Seed: MGMFNMLSTV
MGMFNMLSTH

SEQ ID NO: 157040 - protein, 10 aa, Artificial Sequence
  Description of Artificial Sequence: Synthetic peptide
  Seed: MGMFNMLSTV
MGMFNMLSTI

SEQ ID NO: 157041 - protein, 10 aa, Artificial Sequence
  Description of Artificial Sequence: Synthetic peptide
  Seed: MGMFNMLSTV
MGMFNMLSTL

SEQ ID NO: 157042 - protein, 10 aa, Artificial Sequence
  Description of Artificial Sequence: Synthetic peptide
  Seed: MGMFNMLSTV
MGMFNMLSTM

SEQ ID NO: 157043 - protein, 10 aa, Artificial Sequence
  Description of Artificial Sequence: Synthetic peptide
  Seed: MGMFNMLSTV
MGMFNMLSTP

SEQ ID NO: 157044 - protein, 10 aa, Artificial Sequence
  Description of Artificial Sequence: Synthetic peptide
  Seed: MGMFNMLSTV
MGMFNMLSTS

SEQ ID NO: 157045 - protein, 10 aa, Artificial Sequence
  Description of Artificial Sequence: Synthetic peptide
  Seed: MGMFNMLSTV
MGMFNMLSTT

SEQ ID NO: 157046 - protein, 11 aa, Artificial Sequence
  Description of Artificial Sequence: Synthetic peptide
  Seed: MGMFNMLSTVL
MGMFNMLSTVA

SEQ ID NO: 157047 - protein, 11 aa, Artificial Sequence
  Description of Artificial Sequence: Synthetic peptide
  Seed: MGMFNMLSTVL
MGMFNMLSTVC

SEQ ID NO: 157048 - protein, 11 aa, Artificial Sequence
  Description of Artificial Sequence: Synthetic peptide
  Seed: MGMFNMLSTVL
MGMFNMLSTVD

SEQ ID NO: 157049 - protein, 11 aa, Artificial Sequence
  Description of Artificial Sequence: Synthetic peptide
  Seed: MGMFNMLSTVL
MGMFNMLSTVE

SEQ ID NO: 157050 - protein, 11 aa, Artificial Sequence
  Description of Artificial Sequence: Synthetic peptide
  Seed: MGMFNMLSTVL
MGMFNMLSTVF

SEQ ID NO: 157051 - protein, 11 aa, Artificial Sequence
  Description of Artificial Sequence: Synthetic peptide
  Seed: MGMFNMLSTVL
MGMFNMLSTVG

SEQ ID NO: 157052 - protein, 11 aa, Artificial Sequence
  Description of Artificial Sequence: Synthetic peptide
  Seed: MGMFNMLSTVL
MGMFNMLSTVH

SEQ ID NO: 157053 - protein, 11 aa, Artificial Sequence
  Description of Artificial Sequence: Synthetic peptide
  Seed: MGMFNMLSTVL
MGMFNMLSTVI

SEQ ID NO: 157054 - protein, 11 aa, Artificial Sequence
  Description of Artificial Sequence: Synthetic peptide
  Seed: MGMFNMLSTVL
MGMFNMLSTVK

SEQ ID NO: 157055 - protein, 11 aa, Artificial Sequence
  Description of Artificial Sequence: Synthetic peptide
  Seed: MGMFNMLSTVL
MGMFNMLSTVM

SEQ ID NO: 157056 - protein, 11 aa, Artificial Sequence
  Description of Artificial Sequence: Synthetic peptide
  Seed: MGMFNMLSTVL
MGMFNMLSTVN

SEQ ID NO: 157057 - protein, 11 aa, Artificial Sequence
  Description of Artificial Sequence: Synthetic peptide
  Seed: MGMFNMLSTVL
MGMFNMLSTVP

SEQ ID NO: 157058 - protein, 11 aa, Artificial Sequence
  Description of Artificial Sequence: Synthetic peptide
  Seed: MGMFNMLSTVL
MGMFNMLSTVQ

SEQ ID NO: 157059 - protein, 11 aa, Artificial Sequence
  Description of Artificial Sequence: Synthetic peptide
  Seed: MGMFNMLSTVL
MGMFNMLSTVR

SEQ ID NO: 157060 - protein, 11 aa, Artificial Sequence
  Description of Artificial Sequence: Synthetic peptide
  Seed: MGMFNMLSTVL
MGMFNMLSTVS

SEQ ID NO: 157061 - protein, 11 aa, Artificial Sequence
  Description of Artificial Sequence: Synthetic peptide
  Seed: MGMFNMLSTVL
MGMFNMLSTVT

SEQ ID NO: 157062 - protein, 11 aa, Artificial Sequence
  Description of Artificial Sequence: Synthetic peptide
  Seed: MGMFNMLSTVL
MGMFNMLSTVV

SEQ ID NO: 157063 - protein, 11 aa, Artificial Sequence
  Description of Artificial Sequence: Synthetic peptide
  Seed: MGMFNMLSTVL
MGMFNMLSTVW

SEQ ID NO: 157064 - protein, 11 aa, Artificial Sequence
  Description of Artificial Sequence: Synthetic peptide
  Seed: MGMFNMLSTVL
MGMFNMLSTVY

SEQ ID NO: 157065 - protein, 10 aa, Artificial Sequence
  Description of Artificial Sequence: Synthetic peptide
  Seed: MGMFNMLSTV
MGMFNMLSTW

SEQ ID NO: 157066 - protein, 10 aa, Artificial Sequence
  Description of Artificial Sequence: Synthetic peptide
  Seed: MGMFNMLSTV
MGMFNMLSTY

SEQ ID NO: 157067 - protein, 9 aa, Artificial Sequence
  Description of Artificial Sequence: Synthetic peptide
  Seed: MMMGMFNML
MGMGMFNMA

SEQ ID NO: 157068 - protein, 9 aa, Artificial Sequence
  Description of Artificial Sequence: Synthetic peptide
  Seed: MMMGMFNML
MGMGMFNMF

SEQ ID NO: 157069 - protein, 9 aa, Artificial Sequence
  Description of Artificial Sequence: Synthetic peptide
  Seed: MMMGMFNML
MGMGMFNMI

SEQ ID NO: 157070 - protein, 9 aa, Artificial Sequence
  Description of Artificial Sequence: Synthetic peptide
  Seed: MMMGMFNML
MGMGMFNML

SEQ ID NO: 157071 - protein, 10 aa, Artificial Sequence
  Description of Artificial Sequence: Synthetic peptide
  Seed: MMMGMFNMLS
MGMGMFNMLA

SEQ ID NO: 157072 - protein, 10 aa, Artificial Sequence
  Description of Artificial Sequence: Synthetic peptide
  Seed: MMMGMFNMLS
MGMGMFNMLI

SEQ ID NO: 157073 - protein, 10 aa, Artificial Sequence
  Description of Artificial Sequence: Synthetic peptide
  Seed: MMMGMFNMLS
MGMGMFNMLL

SEQ ID NO: 157074 - protein, 10 aa, Artificial Sequence
  Description of Artificial Sequence: Synthetic peptide
  Seed: MMMGMFNMLS
MGMGMFNMLM

SEQ ID NO: 157075 - protein, 10 aa, Artificial Sequence
  Description of Artificial Sequence: Synthetic peptide
  Seed: MMMGMFNMLS
MGMGMFNMLS

SEQ ID NO: 157076 - protein, 11 aa, Artificial Sequence
  Description of Artificial Sequence: Synthetic peptide
  Seed: MMMGMFNMLST
MGMGMFNMLSV

SEQ ID NO: 157077 - protein, 10 aa, Artificial Sequence
  Description of Artificial Sequence: Synthetic peptide
  Seed: MMMGMFNMLS
MGMGMFNMLT

SEQ ID NO: 157078 - protein, 10 aa, Artificial Sequence
  Description of Artificial Sequence: Synthetic peptide
  Seed: MMMGMFNMLS
MGMGMFNMLV

SEQ ID NO: 157079 - protein, 9 aa, Artificial Sequence
  Description of Artificial Sequence: Synthetic peptide
  Seed: MMMGMFNML
MGMGMFNMM

SEQ ID NO: 157080 - protein, 9 aa, Artificial Sequence
  Description of Artificial Sequence: Synthetic peptide
  Seed: MMMGMFNML
MGMGMFNMV

SEQ ID NO: 157081 - protein, 9 aa, Artificial Sequence
  Description of Artificial Sequence: Synthetic peptide
  Seed: MMMGMFNML
MGMGMFNMW

SEQ ID NO: 157082 - protein, 9 aa, Artificial Sequence
  Description of Artificial Sequence: Synthetic peptide
  Seed: MMMGMFNML
MGMGMFNMY

SEQ ID NO: 157083 - protein, 9 aa, Artificial Sequence
  Description of Artificial Sequence: Synthetic peptide
  Seed: MFNMLSTVL
MGNMLSTVF

SEQ ID NO: 157084 - protein, 9 aa, Artificial Sequence
  Description of Artificial Sequence: Synthetic peptide
  Seed: MFNMLSTVL
MGNMLSTVI

SEQ ID NO: 157085 - protein, 9 aa, Artificial Sequence
  Description of Artificial Sequence: Synthetic peptide
  Seed: MFNMLSTVL
MGNMLSTVL

SEQ ID NO: 157086 - protein, 11 aa, Artificial Sequence
  Description of Artificial Sequence: Synthetic peptide
  Seed: MFNMLSTVLGV
MGNMLSTVLGA

SEQ ID NO: 157087 - protein, 11 aa, Artificial Sequence
  Description of Artificial Sequence: Synthetic peptide
  Seed: MFNMLSTVLGV
MGNMLSTVLGI

SEQ ID NO: 157088 - protein, 11 aa, Artificial Sequence
  Description of Artificial Sequence: Synthetic peptide
  Seed: MFNMLSTVLGV
MGNMLSTVLGL

SEQ ID NO: 157089 - protein, 11 aa, Artificial Sequence
  Description of Artificial Sequence: Synthetic peptide
  Seed: MFNMLSTVLGV
MGNMLSTVLGM

SEQ ID NO: 157090 - protein, 11 aa, Artificial Sequence
  Description of Artificial Sequence: Synthetic peptide
  Seed: MFNMLSTVLGV
MGNMLSTVLGT

SEQ ID NO: 157091 - protein, 11 aa, Artificial Sequence
  Description of Artificial Sequence: Synthetic peptide
  Seed: MFNMLSTVLGV
MGNMLSTVLGV

SEQ ID NO: 157092 - protein, 9 aa, Artificial Sequence
  Description of Artificial Sequence: Synthetic peptide
  Seed: MFNMLSTVL
MGNMLSTVM

SEQ ID NO: 157093 - protein, 9 aa, Artificial Sequence
  Description of Artificial Sequence: Synthetic peptide
  Seed: MFNMLSTVL
MGNMLSTVV

SEQ ID NO: 157094 - protein, 9 aa, Artificial Sequence
  Description of Artificial Sequence: Synthetic peptide
  Seed: MFNMLSTVL
MGNMLSTVW

SEQ ID NO: 157095 - protein, 9 aa, Artificial Sequence
  Description of Artificial Sequence: Synthetic peptide
  Seed: MFNMLSTVL
MGNMLSTVY

SEQ ID NO: 157096 - protein, 9 aa, Artificial Sequence
  Description of Artificial Sequence: Synthetic peptide
  Seed: MARLGKGYM
MGRLGKGYA

SEQ ID NO: 157097 - protein, 9 aa, Artificial Sequence
  Description of Artificial Sequence: Synthetic peptide
  Seed: MARLGKGYM
MGRLGKGYF

SEQ ID NO: 157098 - protein, 9 aa, Artificial Sequence
  Description of Artificial Sequence: Synthetic peptide
  Seed: MARLGKGYM
MGRLGKGYI

SEQ ID NO: 157099 - protein, 9 aa, Artificial Sequence
  Description of Artificial Sequence: Synthetic peptide
  Seed: MARLGKGYM
MGRLGKGYK

SEQ ID NO: 157100 - protein, 9 aa, Artificial Sequence
  Description of Artificial Sequence: Synthetic peptide
  Seed: MARLGKGYM
MGRLGKGYL

SEQ ID NO: 157101 - protein, 9 aa, Artificial Sequence
  Description of Artificial Sequence: Synthetic peptide
  Seed: MARLGKGYM
MGRLGKGYM

SEQ ID NO: 157102 - protein, 10 aa, Artificial Sequence
  Description of Artificial Sequence: Synthetic peptide
  Seed: MARLGKGYMF
MGRLGKGYMA

SEQ ID NO: 157103 - protein, 10 aa, Artificial Sequence
  Description of Artificial Sequence: Synthetic peptide
  Seed: MARLGKGYMF
MGRLGKGYMF

SEQ ID NO: 157104 - protein, 10 aa, Artificial Sequence
  Description of Artificial Sequence: Synthetic peptide
  Seed: MARLGKGYMF
MGRLGKGYMI

SEQ ID NO: 157105 - protein, 10 aa, Artificial Sequence
  Description of Artificial Sequence: Synthetic peptide
  Seed: MARLGKGYMF
MGRLGKGYMK

SEQ ID NO: 157106 - protein, 10 aa, Artificial Sequence
  Description of Artificial Sequence: Synthetic peptide
  Seed: MARLGKGYMF
MGRLGKGYML

SEQ ID NO: 157107 - protein, 10 aa, Artificial Sequence
  Description of Artificial Sequence: Synthetic peptide
  Seed: MARLGKGYMF
MGRLGKGYMM

SEQ ID NO: 157108 - protein, 10 aa, Artificial Sequence
  Description of Artificial Sequence: Synthetic peptide
  Seed: MARLGKGYMF
MGRLGKGYMR

SEQ ID NO: 157109 - protein, 10 aa, Artificial Sequence
  Description of Artificial Sequence: Synthetic peptide
  Seed: MARLGKGYMF
MGRLGKGYMV

SEQ ID NO: 157110 - protein, 10 aa, Artificial Sequence
  Description of Artificial Sequence: Synthetic peptide
  Seed: MARLGKGYMF
MGRLGKGYMW

SEQ ID NO: 157111 - protein, 10 aa, Artificial Sequence
  Description of Artificial Sequence: Synthetic peptide
  Seed: MARLGKGYMF
MGRLGKGYMY

SEQ ID NO: 157112 - protein, 9 aa, Artificial Sequence
  Description of Artificial Sequence: Synthetic peptide
  Seed: MARLGKGYM
MGRLGKGYR

SEQ ID NO: 157113 - protein, 9 aa, Artificial Sequence
  Description of Artificial Sequence: Synthetic peptide
  Seed: MARLGKGYM
MGRLGKGYS

SEQ ID NO: 157114 - protein, 9 aa, Artificial Sequence
  Description of Artificial Sequence: Synthetic peptide
  Seed: MARLGKGYM
MGRLGKGYV

SEQ ID NO: 157115 - protein, 9 aa, Artificial Sequence
  Description of Artificial Sequence: Synthetic peptide
  Seed: MARLGKGYM
MGRLGKGYW

SEQ ID NO: 157116 - protein, 9 aa, Artificial Sequence
  Description of Artificial Sequence: Synthetic peptide
  Seed: MARLGKGYM
MGRLGKGYY

SEQ ID NO: 157117 - protein, 11 aa, Artificial Sequence
  Description of Artificial Sequence: Synthetic peptide
  Seed: MFSNKMARLGK
MGSNKMARLGK

SEQ ID NO: 157118 - protein, 11 aa, Artificial Sequence
  Description of Artificial Sequence: Synthetic peptide
  Seed: MFSNKMARLGK
MGSNKMARLGR

SEQ ID NO: 157119 - protein, 10 aa, Artificial Sequence
  Description of Artificial Sequence: Synthetic peptide
  Seed: MLSTVLGVSI
MGSTVLGVSF

SEQ ID NO: 157120 - protein, 10 aa, Artificial Sequence
  Description of Artificial Sequence: Synthetic peptide
  Seed: MLSTVLGVSI
MGSTVLGVSI

SEQ ID NO: 157121 - protein, 10 aa, Artificial Sequence
  Description of Artificial Sequence: Synthetic peptide
  Seed: MLSTVLGVSI
MGSTVLGVSL

SEQ ID NO: 157122 - protein, 10 aa, Artificial Sequence
  Description of Artificial Sequence: Synthetic peptide
  Seed: MLSTVLGVSI
MGSTVLGVSM

SEQ ID NO: 157123 - protein, 10 aa, Artificial Sequence
  Description of Artificial Sequence: Synthetic peptide
  Seed: MLSTVLGVSI
MGSTVLGVSV

SEQ ID NO: 157124 - protein, 10 aa, Artificial Sequence
  Description of Artificial Sequence: Synthetic peptide
  Seed: MLSTVLGVSI
MGSTVLGVSW

SEQ ID NO: 157125 - protein, 10 aa, Artificial Sequence
  Description of Artificial Sequence: Synthetic peptide
  Seed: MLSTVLGVSI
MGSTVLGVSY

SEQ ID NO: 157126 - protein, 11 aa, Artificial Sequence
  Description of Artificial Sequence: Synthetic peptide
  Seed: MMGMFNMLSTV
MHGMFNMLSTA

SEQ ID NO: 157127 - protein, 11 aa, Artificial Sequence
  Description of Artificial Sequence: Synthetic peptide
  Seed: MMGMFNMLSTV
MHGMFNMLSTI

SEQ ID NO: 157128 - protein, 11 aa, Artificial Sequence
  Description of Artificial Sequence: Synthetic peptide
  Seed: MMGMFNMLSTV
MHGMFNMLSTL

SEQ ID NO: 157129 - protein, 11 aa, Artificial Sequence
  Description of Artificial Sequence: Synthetic peptide
  Seed: MMGMFNMLSTV
MHGMFNMLSTM

SEQ ID NO: 157130 - protein, 11 aa, Artificial Sequence
  Description of Artificial Sequence: Synthetic peptide
  Seed: MMGMFNMLSTV
MHGMFNMLSTT

SEQ ID NO: 157131 - protein, 11 aa, Artificial Sequence
  Description of Artificial Sequence: Synthetic peptide
  Seed: MMGMFNMLSTV
MHGMFNMLSTV

SEQ ID NO: 157132 - protein, 10 aa, Artificial Sequence
  Description of Artificial Sequence: Synthetic peptide
  Seed: MMGMFNMLST
MHGMFNMLSV

SEQ ID NO: 157133 - protein, 9 aa, Artificial Sequence
  Description of Artificial Sequence: Synthetic peptide
  Seed: MSIGVTVIK
MHIGVTVIK

SEQ ID NO: 157134 - protein, 10 aa, Artificial Sequence
  Description of Artificial Sequence: Synthetic peptide
  Seed: MSIGVTVIKN
MHIGVTVIKK

SEQ ID NO: 157135 - protein, 10 aa, Artificial Sequence
  Description of Artificial Sequence: Synthetic peptide
  Seed: MSIGVTVIKN
MHIGVTVIKR

SEQ ID NO: 157136 - protein, 9 aa, Artificial Sequence
  Description of Artificial Sequence: Synthetic peptide
  Seed: MSIGVTVIK
MHIGVTVIR

SEQ ID NO: 157137 - protein, 10 aa, Artificial Sequence
  Description of Artificial Sequence: Synthetic peptide
  Seed: MGMFNMLSTV
MHMFNMLSTA

SEQ ID NO: 157138 - protein, 10 aa, Artificial Sequence
  Description of Artificial Sequence: Synthetic peptide
  Seed: MGMFNMLSTV
MHMFNMLSTC

SEQ ID NO: 157139 - protein, 10 aa, Artificial Sequence
  Description of Artificial Sequence: Synthetic peptide
  Seed: MGMFNMLSTV
MHMFNMLSTF

SEQ ID NO: 157140 - protein, 10 aa, Artificial Sequence
  Description of Artificial Sequence: Synthetic peptide
  Seed: MGMFNMLSTV
MHMFNMLSTG

SEQ ID NO: 157141 - protein, 10 aa, Artificial Sequence
  Description of Artificial Sequence: Synthetic peptide
  Seed: MGMFNMLSTV
MHMFNMLSTH

SEQ ID NO: 157142 - protein, 10 aa, Artificial Sequence
  Description of Artificial Sequence: Synthetic peptide
  Seed: MGMFNMLSTV
MHMFNMLSTI

SEQ ID NO: 157143 - protein, 10 aa, Artificial Sequence
  Description of Artificial Sequence: Synthetic peptide
  Seed: MGMFNMLSTV
MHMFNMLSTL

SEQ ID NO: 157144 - protein, 10 aa, Artificial Sequence
  Description of Artificial Sequence: Synthetic peptide
  Seed: MGMFNMLSTV
MHMFNMLSTM

SEQ ID NO: 157145 - protein, 10 aa, Artificial Sequence
  Description of Artificial Sequence: Synthetic peptide
  Seed: MGMFNMLSTV
MHMFNMLSTP

SEQ ID NO: 157146 - protein, 10 aa, Artificial Sequence
  Description of Artificial Sequence: Synthetic peptide
  Seed: MGMFNMLSTV
MHMFNMLSTS

SEQ ID NO: 157147 - protein, 10 aa, Artificial Sequence
  Description of Artificial Sequence: Synthetic peptide
  Seed: MGMFNMLSTV
MHMFNMLSTT

SEQ ID NO: 157148 - protein, 10 aa, Artificial Sequence
  Description of Artificial Sequence: Synthetic peptide
  Seed: MGMFNMLSTV
MHMFNMLSTV

SEQ ID NO: 157149 - protein, 11 aa, Artificial Sequence
  Description of Artificial Sequence: Synthetic peptide
  Seed: MGMFNMLSTVL
MHMFNMLSTVA

SEQ ID NO: 157150 - protein, 11 aa, Artificial Sequence
  Description of Artificial Sequence: Synthetic peptide
  Seed: MGMFNMLSTVL
MHMFNMLSTVC

SEQ ID NO: 157151 - protein, 11 aa, Artificial Sequence
  Description of Artificial Sequence: Synthetic peptide
  Seed: MGMFNMLSTVL
MHMFNMLSTVD

SEQ ID NO: 157152 - protein, 11 aa, Artificial Sequence
  Description of Artificial Sequence: Synthetic peptide
  Seed: MGMFNMLSTVL
MHMFNMLSTVE

SEQ ID NO: 157153 - protein, 11 aa, Artificial Sequence
  Description of Artificial Sequence: Synthetic peptide
  Seed: MGMFNMLSTVL
MHMFNMLSTVF

SEQ ID NO: 157154 - protein, 11 aa, Artificial Sequence
  Description of Artificial Sequence: Synthetic peptide
  Seed: MGMFNMLSTVL
MHMFNMLSTVG

SEQ ID NO: 157155 - protein, 11 aa, Artificial Sequence
  Description of Artificial Sequence: Synthetic peptide
  Seed: MGMFNMLSTVL
MHMFNMLSTVH

SEQ ID NO: 157156 - protein, 11 aa, Artificial Sequence
  Description of Artificial Sequence: Synthetic peptide
  Seed: MGMFNMLSTVL
MHMFNMLSTVI

SEQ ID NO: 157157 - protein, 11 aa, Artificial Sequence
  Description of Artificial Sequence: Synthetic peptide
  Seed: MGMFNMLSTVL
MHMFNMLSTVK

SEQ ID NO: 157158 - protein, 11 aa, Artificial Sequence
  Description of Artificial Sequence: Synthetic peptide
  Seed: MGMFNMLSTVL
MHMFNMLSTVL

SEQ ID NO: 157159 - protein, 11 aa, Artificial Sequence
  Description of Artificial Sequence: Synthetic peptide
  Seed: MGMFNMLSTVL
MHMFNMLSTVM

SEQ ID NO: 157160 - protein, 11 aa, Artificial Sequence
  Description of Artificial Sequence: Synthetic peptide
  Seed: MGMFNMLSTVL
MHMFNMLSTVN

SEQ ID NO: 157161 - protein, 11 aa, Artificial Sequence
  Description of Artificial Sequence: Synthetic peptide
  Seed: MGMFNMLSTVL
MHMFNMLSTVP

SEQ ID NO: 157162 - protein, 11 aa, Artificial Sequence
  Description of Artificial Sequence: Synthetic peptide
  Seed: MGMFNMLSTVL
MHMFNMLSTVQ

SEQ ID NO: 157163 - protein, 11 aa, Artificial Sequence
  Description of Artificial Sequence: Synthetic peptide
  Seed: MGMFNMLSTVL
MHMFNMLSTVR

SEQ ID NO: 157164 - protein, 11 aa, Artificial Sequence
  Description of Artificial Sequence: Synthetic peptide
  Seed: MGMFNMLSTVL
MHMFNMLSTVS

SEQ ID NO: 157165 - protein, 11 aa, Artificial Sequence
  Description of Artificial Sequence: Synthetic peptide
  Seed: MGMFNMLSTVL
MHMFNMLSTVT

SEQ ID NO: 157166 - protein, 11 aa, Artificial Sequence
  Description of Artificial Sequence: Synthetic peptide
  Seed: MGMFNMLSTVL
MHMFNMLSTVV

SEQ ID NO: 157167 - protein, 11 aa, Artificial Sequence
  Description of Artificial Sequence: Synthetic peptide
  Seed: MGMFNMLSTVL
MHMFNMLSTVW

SEQ ID NO: 157168 - protein, 11 aa, Artificial Sequence
  Description of Artificial Sequence: Synthetic peptide
  Seed: MGMFNMLSTVL
MHMFNMLSTVY

SEQ ID NO: 157169 - protein, 10 aa, Artificial Sequence
  Description of Artificial Sequence: Synthetic peptide
  Seed: MGMFNMLSTV
MHMFNMLSTW

SEQ ID NO: 157170 - protein, 10 aa, Artificial Sequence
  Description of Artificial Sequence: Synthetic peptide
  Seed: MGMFNMLSTV
MHMFNMLSTY

SEQ ID NO: 157171 - protein, 8 aa, Artificial Sequence
  Description of Artificial Sequence: Synthetic peptide
  Seed: MMMGMFNM
MHMGMFNF

SEQ ID NO: 157172 - protein, 8 aa, Artificial Sequence
  Description of Artificial Sequence: Synthetic peptide
  Seed: MMMGMFNM
MHMGMFNM

SEQ ID NO: 157173 - protein, 9 aa, Artificial Sequence
  Description of Artificial Sequence: Synthetic peptide
  Seed: MMMGMFNML
MHMGMFNMA

SEQ ID NO: 157174 - protein, 9 aa, Artificial Sequence
  Description of Artificial Sequence: Synthetic peptide
  Seed: MMMGMFNML
MHMGMFNMC

SEQ ID NO: 157175 - protein, 9 aa, Artificial Sequence
  Description of Artificial Sequence: Synthetic peptide
  Seed: MMMGMFNML
MHMGMFNMF

SEQ ID NO: 157176 - protein, 9 aa, Artificial Sequence
  Description of Artificial Sequence: Synthetic peptide
  Seed: MMMGMFNML
MHMGMFNMG

SEQ ID NO: 157177 - protein, 9 aa, Artificial Sequence
  Description of Artificial Sequence: Synthetic peptide
  Seed: MMMGMFNML
MHMGMFNMH

SEQ ID NO: 157178 - protein, 9 aa, Artificial Sequence
  Description of Artificial Sequence: Synthetic peptide
  Seed: MMMGMFNML
MHMGMFNMI

SEQ ID NO: 157179 - protein, 9 aa, Artificial Sequence
  Description of Artificial Sequence: Synthetic peptide
  Seed: MMMGMFNML
MHMGMFNML

SEQ ID NO: 157180 - protein, 10 aa, Artificial Sequence
  Description of Artificial Sequence: Synthetic peptide
  Seed: MMMGMFNMLS
MHMGMFNMLA

SEQ ID NO: 157181 - protein, 10 aa, Artificial Sequence
  Description of Artificial Sequence: Synthetic peptide
  Seed: MMMGMFNMLS
MHMGMFNMLI

SEQ ID NO: 157182 - protein, 10 aa, Artificial Sequence
  Description of Artificial Sequence: Synthetic peptide
  Seed: MMMGMFNMLS
MHMGMFNMLL

SEQ ID NO: 157183 - protein, 10 aa, Artificial Sequence
  Description of Artificial Sequence: Synthetic peptide
  Seed: MMMGMFNMLS
MHMGMFNMLM

SEQ ID NO: 157184 - protein, 10 aa, Artificial Sequence
  Description of Artificial Sequence: Synthetic peptide
  Seed: MMMGMFNMLS
MHMGMFNMLS

SEQ ID NO: 157185 - protein, 11 aa, Artificial Sequence
  Description of Artificial Sequence: Synthetic peptide
  Seed: MMMGMFNMLST
MHMGMFNMLSV

SEQ ID NO: 157186 - protein, 10 aa, Artificial Sequence
  Description of Artificial Sequence: Synthetic peptide
  Seed: MMMGMFNMLS
MHMGMFNMLT

SEQ ID NO: 157187 - protein, 10 aa, Artificial Sequence
  Description of Artificial Sequence: Synthetic peptide
  Seed: MMMGMFNMLS
MHMGMFNMLV

SEQ ID NO: 157188 - protein, 9 aa, Artificial Sequence
  Description of Artificial Sequence: Synthetic peptide
  Seed: MMMGMFNML
MHMGMFNMM

SEQ ID NO: 157189 - protein, 9 aa, Artificial Sequence
  Description of Artificial Sequence: Synthetic peptide
  Seed: MMMGMFNML
MHMGMFNMS

SEQ ID NO: 157190 - protein, 9 aa, Artificial Sequence
  Description of Artificial Sequence: Synthetic peptide
  Seed: MMMGMFNML
MHMGMFNMT

SEQ ID NO: 157191 - protein, 9 aa, Artificial Sequence
  Description of Artificial Sequence: Synthetic peptide
  Seed: MMMGMFNML
MHMGMFNMV

SEQ ID NO: 157192 - protein, 9 aa, Artificial Sequence
  Description of Artificial Sequence: Synthetic peptide
  Seed: MMMGMFNML
MHMGMFNMW

SEQ ID NO: 157193 - protein, 9 aa, Artificial Sequence
  Description of Artificial Sequence: Synthetic peptide
  Seed: MMMGMFNML
MHMGMFNMY

SEQ ID NO: 157194 - protein, 8 aa, Artificial Sequence
  Description of Artificial Sequence: Synthetic peptide
  Seed: MMMGMFNM
MHMGMFNY

SEQ ID NO: 157195 - protein, 9 aa, Artificial Sequence
  Description of Artificial Sequence: Synthetic peptide
  Seed: MFNMLSTVL
MHNMLSTVA

SEQ ID NO: 157196 - protein, 9 aa, Artificial Sequence
  Description of Artificial Sequence: Synthetic peptide
  Seed: MFNMLSTVL
MHNMLSTVF

SEQ ID NO: 157197 - protein, 9 aa, Artificial Sequence
  Description of Artificial Sequence: Synthetic peptide
  Seed: MFNMLSTVL
MHNMLSTVH

SEQ ID NO: 157198 - protein, 9 aa, Artificial Sequence
  Description of Artificial Sequence: Synthetic peptide
  Seed: MFNMLSTVL
MHNMLSTVI

SEQ ID NO: 157199 - protein, 9 aa, Artificial Sequence
  Description of Artificial Sequence: Synthetic peptide
  Seed: MFNMLSTVL
MHNMLSTVL

SEQ ID NO: 157200 - protein, 11 aa, Artificial Sequence
  Description of Artificial Sequence: Synthetic peptide
  Seed: MFNMLSTVLGV
MHNMLSTVLGA

SEQ ID NO: 157201 - protein, 11 aa, Artificial Sequence
  Description of Artificial Sequence: Synthetic peptide
  Seed: MFNMLSTVLGV
MHNMLSTVLGI

SEQ ID NO: 157202 - protein, 11 aa, Artificial Sequence
  Description of Artificial Sequence: Synthetic peptide
  Seed: MFNMLSTVLGV
MHNMLSTVLGL

SEQ ID NO: 157203 - protein, 11 aa, Artificial Sequence
  Description of Artificial Sequence: Synthetic peptide
  Seed: MFNMLSTVLGV
MHNMLSTVLGM

SEQ ID NO: 157204 - protein, 11 aa, Artificial Sequence
  Description of Artificial Sequence: Synthetic peptide
  Seed: MFNMLSTVLGV
MHNMLSTVLGT

SEQ ID NO: 157205 - protein, 11 aa, Artificial Sequence
  Description of Artificial Sequence: Synthetic peptide
  Seed: MFNMLSTVLGV
MHNMLSTVLGV

SEQ ID NO: 157206 - protein, 9 aa, Artificial Sequence
  Description of Artificial Sequence: Synthetic peptide
  Seed: MFNMLSTVL
MHNMLSTVM

SEQ ID NO: 157207 - protein, 9 aa, Artificial Sequence
  Description of Artificial Sequence: Synthetic peptide
  Seed: MFNMLSTVL
MHNMLSTVV

SEQ ID NO: 157208 - protein, 9 aa, Artificial Sequence
  Description of Artificial Sequence: Synthetic peptide
  Seed: MFNMLSTVL
MHNMLSTVW

SEQ ID NO: 157209 - protein, 9 aa, Artificial Sequence
  Description of Artificial Sequence: Synthetic peptide
  Seed: MFNMLSTVL
MHNMLSTVY

SEQ ID NO: 157210 - protein, 9 aa, Artificial Sequence
  Description of Artificial Sequence: Synthetic peptide
  Seed: MARLGKGYM
MHRLGKGYF

SEQ ID NO: 157211 - protein, 9 aa, Artificial Sequence
  Description of Artificial Sequence: Synthetic peptide
  Seed: MARLGKGYM
MHRLGKGYK

SEQ ID NO: 157212 - protein, 9 aa, Artificial Sequence
  Description of Artificial Sequence: Synthetic peptide
  Seed: MARLGKGYM
MHRLGKGYM

SEQ ID NO: 157213 - protein, 10 aa, Artificial Sequence
  Description of Artificial Sequence: Synthetic peptide
  Seed: MARLGKGYMF
MHRLGKGYMA

SEQ ID NO: 157214 - protein, 10 aa, Artificial Sequence
  Description of Artificial Sequence: Synthetic peptide
  Seed: MARLGKGYMF
MHRLGKGYMF

SEQ ID NO: 157215 - protein, 10 aa, Artificial Sequence
  Description of Artificial Sequence: Synthetic peptide
  Seed: MARLGKGYMF
MHRLGKGYMI

SEQ ID NO: 157216 - protein, 10 aa, Artificial Sequence
  Description of Artificial Sequence: Synthetic peptide
  Seed: MARLGKGYMF
MHRLGKGYMK

SEQ ID NO: 157217 - protein, 10 aa, Artificial Sequence
  Description of Artificial Sequence: Synthetic peptide
  Seed: MARLGKGYMF
MHRLGKGYML

SEQ ID NO: 157218 - protein, 10 aa, Artificial Sequence
  Description of Artificial Sequence: Synthetic peptide
  Seed: MARLGKGYMF
MHRLGKGYMM

SEQ ID NO: 157219 - protein, 10 aa, Artificial Sequence
  Description of Artificial Sequence: Synthetic peptide
  Seed: MARLGKGYMF
MHRLGKGYMR

SEQ ID NO: 157220 - protein, 10 aa, Artificial Sequence
  Description of Artificial Sequence: Synthetic peptide
  Seed: MARLGKGYMF
MHRLGKGYMV

SEQ ID NO: 157221 - protein, 10 aa, Artificial Sequence
  Description of Artificial Sequence: Synthetic peptide
  Seed: MARLGKGYMF
MHRLGKGYMW

SEQ ID NO: 157222 - protein, 10 aa, Artificial Sequence
  Description of Artificial Sequence: Synthetic peptide
  Seed: MARLGKGYMF
MHRLGKGYMY

SEQ ID NO: 157223 - protein, 9 aa, Artificial Sequence
  Description of Artificial Sequence: Synthetic peptide
  Seed: MARLGKGYM
MHRLGKGYY

SEQ ID NO: 157224 - protein, 11 aa, Artificial Sequence
  Description of Artificial Sequence: Synthetic peptide
  Seed: MFSNKMARLGK
MHSNKMARLGR

SEQ ID NO: 157225 - protein, 10 aa, Artificial Sequence
  Description of Artificial Sequence: Synthetic peptide
  Seed: MLSTVLGVSI
MHSTVLGVSF

SEQ ID NO: 157226 - protein, 10 aa, Artificial Sequence
  Description of Artificial Sequence: Synthetic peptide
  Seed: MLSTVLGVSI
MHSTVLGVSI

SEQ ID NO: 157227 - protein, 10 aa, Artificial Sequence
  Description of Artificial Sequence: Synthetic peptide
  Seed: MLSTVLGVSI
MHSTVLGVSL

SEQ ID NO: 157228 - protein, 10 aa, Artificial Sequence
  Description of Artificial Sequence: Synthetic peptide
  Seed: MLSTVLGVSI
MHSTVLGVSM

SEQ ID NO: 157229 - protein, 10 aa, Artificial Sequence
  Description of Artificial Sequence: Synthetic peptide
  Seed: MLSTVLGVSI
MHSTVLGVSV

SEQ ID NO: 157230 - protein, 10 aa, Artificial Sequence
  Description of Artificial Sequence: Synthetic peptide
  Seed: MLSTVLGVSI
MHSTVLGVSW

SEQ ID NO: 157231 - protein, 10 aa, Artificial Sequence
  Description of Artificial Sequence: Synthetic peptide
  Seed: MLSTVLGVSI
MHSTVLGVSY

SEQ ID NO: 157232 - protein, 9 aa, Artificial Sequence
  Description of Artificial Sequence: Synthetic peptide
  Seed: MMGMFNMLS
MIGMFNMLA

SEQ ID NO: 157233 - protein, 9 aa, Artificial Sequence
  Description of Artificial Sequence: Synthetic peptide
  Seed: MMGMFNMLS
MIGMFNMLI

SEQ ID NO: 157234 - protein, 9 aa, Artificial Sequence
  Description of Artificial Sequence: Synthetic peptide
  Seed: MMGMFNMLS
MIGMFNMLL

SEQ ID NO: 157235 - protein, 9 aa, Artificial Sequence
  Description of Artificial Sequence: Synthetic peptide
  Seed: MMGMFNMLS
MIGMFNMLM

SEQ ID NO: 157236 - protein, 10 aa, Artificial Sequence
  Description of Artificial Sequence: Synthetic peptide
  Seed: MMGMFNMLST
MIGMFNMLSA

SEQ ID NO: 157237 - protein, 10 aa, Artificial Sequence
  Description of Artificial Sequence: Synthetic peptide
  Seed: MMGMFNMLST
MIGMFNMLSI

SEQ ID NO: 157238 - protein, 10 aa, Artificial Sequence
  Description of Artificial Sequence: Synthetic peptide
  Seed: MMGMFNMLST
MIGMFNMLSL

SEQ ID NO: 157239 - protein, 10 aa, Artificial Sequence
  Description of Artificial Sequence: Synthetic peptide
  Seed: MMGMFNMLST
MIGMFNMLSM

SEQ ID NO: 157240 - protein, 10 aa, Artificial Sequence
  Description of Artificial Sequence: Synthetic peptide
  Seed: MMGMFNMLST
MIGMFNMLST

SEQ ID NO: 157241 - protein, 11 aa, Artificial Sequence
  Description of Artificial Sequence: Synthetic peptide
  Seed: MMGMFNMLSTV
MIGMFNMLSTA

SEQ ID NO: 157242 - protein, 11 aa, Artificial Sequence
  Description of Artificial Sequence: Synthetic peptide
  Seed: MMGMFNMLSTV
MIGMFNMLSTI

SEQ ID NO: 157243 - protein, 11 aa, Artificial Sequence
  Description of Artificial Sequence: Synthetic peptide
  Seed: MMGMFNMLSTV
MIGMFNMLSTL

SEQ ID NO: 157244 - protein, 11 aa, Artificial Sequence
  Description of Artificial Sequence: Synthetic peptide
  Seed: MMGMFNMLSTV
MIGMFNMLSTM

SEQ ID NO: 157245 - protein, 11 aa, Artificial Sequence
  Description of Artificial Sequence: Synthetic peptide
  Seed: MMGMFNMLSTV
MIGMFNMLSTT

SEQ ID NO: 157246 - protein, 11 aa, Artificial Sequence
  Description of Artificial Sequence: Synthetic peptide
  Seed: MMGMFNMLSTV
MIGMFNMLSTV

SEQ ID NO: 157247 - protein, 10 aa, Artificial Sequence
  Description of Artificial Sequence: Synthetic peptide
  Seed: MMGMFNMLST
MIGMFNMLSV

SEQ ID NO: 157248 - protein, 9 aa, Artificial Sequence
  Description of Artificial Sequence: Synthetic peptide
  Seed: MMGMFNMLS
MIGMFNMLT

SEQ ID NO: 157249 - protein, 9 aa, Artificial Sequence
  Description of Artificial Sequence: Synthetic peptide
  Seed: MMGMFNMLS
MIGMFNMLV

SEQ ID NO: 157250 - protein, 9 aa, Artificial Sequence
  Description of Artificial Sequence: Synthetic peptide
  Seed: MSIGVTVIK
MIIGVTVIA

SEQ ID NO: 157251 - protein, 9 aa, Artificial Sequence
  Description of Artificial Sequence: Synthetic peptide
  Seed: MSIGVTVIK
MIIGVTVIF

SEQ ID NO: 157252 - protein, 9 aa, Artificial Sequence
  Description of Artificial Sequence: Synthetic peptide
  Seed: MSIGVTVIK
MIIGVTVIH

SEQ ID NO: 157253 - protein, 9 aa, Artificial Sequence
  Description of Artificial Sequence: Synthetic peptide
  Seed: MSIGVTVIK
MIIGVTVII

SEQ ID NO: 157254 - protein, 9 aa, Artificial Sequence
  Description of Artificial Sequence: Synthetic peptide
  Seed: MSIGVTVIK
MIIGVTVIK

SEQ ID NO: 157255 - protein, 10 aa, Artificial Sequence
  Description of Artificial Sequence: Synthetic peptide
  Seed: MSIGVTVIKN
MIIGVTVIKA

SEQ ID NO: 157256 - protein, 10 aa, Artificial Sequence
  Description of Artificial Sequence: Synthetic peptide
  Seed: MSIGVTVIKN
MIIGVTVIKC

SEQ ID NO: 157257 - protein, 10 aa, Artificial Sequence
  Description of Artificial Sequence: Synthetic peptide
  Seed: MSIGVTVIKN
MIIGVTVIKD

SEQ ID NO: 157258 - protein, 10 aa, Artificial Sequence
  Description of Artificial Sequence: Synthetic peptide
  Seed: MSIGVTVIKN
MIIGVTVIKE

SEQ ID NO: 157259 - protein, 10 aa, Artificial Sequence
  Description of Artificial Sequence: Synthetic peptide
  Seed: MSIGVTVIKN
MIIGVTVIKF

SEQ ID NO: 157260 - protein, 10 aa, Artificial Sequence
  Description of Artificial Sequence: Synthetic peptide
  Seed: MSIGVTVIKN
MIIGVTVIKG

SEQ ID NO: 157261 - protein, 10 aa, Artificial Sequence
  Description of Artificial Sequence: Synthetic peptide
  Seed: MSIGVTVIKN
MIIGVTVIKH

SEQ ID NO: 157262 - protein, 10 aa, Artificial Sequence
  Description of Artificial Sequence: Synthetic peptide
  Seed: MSIGVTVIKN
MIIGVTVIKI

SEQ ID NO: 157263 - protein, 10 aa, Artificial Sequence
  Description of Artificial Sequence: Synthetic peptide
  Seed: MSIGVTVIKN
MIIGVTVIKK

SEQ ID NO: 157264 - protein, 10 aa, Artificial Sequence
  Description of Artificial Sequence: Synthetic peptide
  Seed: MSIGVTVIKN
MIIGVTVIKL

SEQ ID NO: 157265 - protein, 10 aa, Artificial Sequence
  Description of Artificial Sequence: Synthetic peptide
  Seed: MSIGVTVIKN
MIIGVTVIKM

SEQ ID NO: 157266 - protein, 10 aa, Artificial Sequence
  Description of Artificial Sequence: Synthetic peptide
  Seed: MSIGVTVIKN
MIIGVTVIKN

SEQ ID NO: 157267 - protein, 10 aa, Artificial Sequence
  Description of Artificial Sequence: Synthetic peptide
  Seed: MSIGVTVIKN
MIIGVTVIKP

SEQ ID NO: 157268 - protein, 10 aa, Artificial Sequence
  Description of Artificial Sequence: Synthetic peptide
  Seed: MSIGVTVIKN
MIIGVTVIKQ

SEQ ID NO: 157269 - protein, 10 aa, Artificial Sequence
  Description of Artificial Sequence: Synthetic peptide
  Seed: MSIGVTVIKN
MIIGVTVIKR

SEQ ID NO: 157270 - protein, 10 aa, Artificial Sequence
  Description of Artificial Sequence: Synthetic peptide
  Seed: MSIGVTVIKN
MIIGVTVIKS

SEQ ID NO: 157271 - protein, 10 aa, Artificial Sequence
  Description of Artificial Sequence: Synthetic peptide
  Seed: MSIGVTVIKN
MIIGVTVIKT

SEQ ID NO: 157272 - protein, 10 aa, Artificial Sequence
  Description of Artificial Sequence: Synthetic peptide
  Seed: MSIGVTVIKN
MIIGVTVIKV

SEQ ID NO: 157273 - protein, 10 aa, Artificial Sequence
  Description of Artificial Sequence: Synthetic peptide
  Seed: MSIGVTVIKN
MIIGVTVIKW

SEQ ID NO: 157274 - protein, 10 aa, Artificial Sequence
  Description of Artificial Sequence: Synthetic peptide
  Seed: MSIGVTVIKN
MIIGVTVIKY

SEQ ID NO: 157275 - protein, 9 aa, Artificial Sequence
  Description of Artificial Sequence: Synthetic peptide
  Seed: MSIGVTVIK
MIIGVTVIL

SEQ ID NO: 157276 - protein, 9 aa, Artificial Sequence
  Description of Artificial Sequence: Synthetic peptide
  Seed: MSIGVTVIK
MIIGVTVIM

SEQ ID NO: 157277 - protein, 9 aa, Artificial Sequence
  Description of Artificial Sequence: Synthetic peptide
  Seed: MSIGVTVIK
MIIGVTVIQ

SEQ ID NO: 157278 - protein, 9 aa, Artificial Sequence
  Description of Artificial Sequence: Synthetic peptide
  Seed: MSIGVTVIK
MIIGVTVIR

SEQ ID NO: 157279 - protein, 9 aa, Artificial Sequence
  Description of Artificial Sequence: Synthetic peptide
  Seed: MSIGVTVIK
MIIGVTVIV

SEQ ID NO: 157280 - protein, 9 aa, Artificial Sequence
  Description of Artificial Sequence: Synthetic peptide
  Seed: MSIGVTVIK
MIIGVTVIY

SEQ ID NO: 157281 - protein, 8 aa, Artificial Sequence
  Description of Artificial Sequence: Synthetic peptide
  Seed: MSIGVTVI
MIIGVTVW

SEQ ID NO: 157282 - protein, 9 aa, Artificial Sequence
  Description of Artificial Sequence: Synthetic peptide
  Seed: MTKDAERGK
MIKDAERGK

SEQ ID NO: 157283 - protein, 9 aa, Artificial Sequence
  Description of Artificial Sequence: Synthetic peptide
  Seed: MTKDAERGK
MIKDAERGR

SEQ ID NO: 157284 - protein, 10 aa, Artificial Sequence
  Description of Artificial Sequence: Synthetic peptide
  Seed: MGMFNMLSTV
MIMFNMLSTA

SEQ ID NO: 157285 - protein, 10 aa, Artificial Sequence
  Description of Artificial Sequence: Synthetic peptide
  Seed: MGMFNMLSTV
MIMFNMLSTC

SEQ ID NO: 157286 - protein, 10 aa, Artificial Sequence
  Description of Artificial Sequence: Synthetic peptide
  Seed: MGMFNMLSTV
MIMFNMLSTF

SEQ ID NO: 157287 - protein, 10 aa, Artificial Sequence
  Description of Artificial Sequence: Synthetic peptide
  Seed: MGMFNMLSTV
MIMFNMLSTG

SEQ ID NO: 157288 - protein, 10 aa, Artificial Sequence
  Description of Artificial Sequence: Synthetic peptide
  Seed: MGMFNMLSTV
MIMFNMLSTH

SEQ ID NO: 157289 - protein, 10 aa, Artificial Sequence
  Description of Artificial Sequence: Synthetic peptide
  Seed: MGMFNMLSTV
MIMFNMLSTI

SEQ ID NO: 157290 - protein, 10 aa, Artificial Sequence
  Description of Artificial Sequence: Synthetic peptide
  Seed: MGMFNMLSTV
MIMFNMLSTL

SEQ ID NO: 157291 - protein, 10 aa, Artificial Sequence
  Description of Artificial Sequence: Synthetic peptide
  Seed: MGMFNMLSTV
MIMFNMLSTM

SEQ ID NO: 157292 - protein, 10 aa, Artificial Sequence
  Description of Artificial Sequence: Synthetic peptide
  Seed: MGMFNMLSTV
MIMFNMLSTP

SEQ ID NO: 157293 - protein, 10 aa, Artificial Sequence
  Description of Artificial Sequence: Synthetic peptide
  Seed: MGMFNMLSTV
MIMFNMLSTS

SEQ ID NO: 157294 - protein, 10 aa, Artificial Sequence
  Description of Artificial Sequence: Synthetic peptide
  Seed: MGMFNMLSTV
MIMFNMLSTT

SEQ ID NO: 157295 - protein, 10 aa, Artificial Sequence
  Description of Artificial Sequence: Synthetic peptide
  Seed: MGMFNMLSTV
MIMFNMLSTV

SEQ ID NO: 157296 - protein, 11 aa, Artificial Sequence
  Description of Artificial Sequence: Synthetic peptide
  Seed: MGMFNMLSTVL
MIMFNMLSTVA

SEQ ID NO: 157297 - protein, 11 aa, Artificial Sequence
  Description of Artificial Sequence: Synthetic peptide
  Seed: MGMFNMLSTVL
MIMFNMLSTVC

SEQ ID NO: 157298 - protein, 11 aa, Artificial Sequence
  Description of Artificial Sequence: Synthetic peptide
  Seed: MGMFNMLSTVL
MIMFNMLSTVD

SEQ ID NO: 157299 - protein, 11 aa, Artificial Sequence
  Description of Artificial Sequence: Synthetic peptide
  Seed: MGMFNMLSTVL
MIMFNMLSTVE

SEQ ID NO: 157300 - protein, 11 aa, Artificial Sequence
  Description of Artificial Sequence: Synthetic peptide
  Seed: MGMFNMLSTVL
MIMFNMLSTVF

SEQ ID NO: 157301 - protein, 11 aa, Artificial Sequence
  Description of Artificial Sequence: Synthetic peptide
  Seed: MGMFNMLSTVL
MIMFNMLSTVG

SEQ ID NO: 157302 - protein, 11 aa, Artificial Sequence
  Description of Artificial Sequence: Synthetic peptide
  Seed: MGMFNMLSTVL
MIMFNMLSTVH

SEQ ID NO: 157303 - protein, 11 aa, Artificial Sequence
  Description of Artificial Sequence: Synthetic peptide
  Seed: MGMFNMLSTVL
MIMFNMLSTVI

SEQ ID NO: 157304 - protein, 11 aa, Artificial Sequence
  Description of Artificial Sequence: Synthetic peptide
  Seed: MGMFNMLSTVL
MIMFNMLSTVK

SEQ ID NO: 157305 - protein, 11 aa, Artificial Sequence
  Description of Artificial Sequence: Synthetic peptide
  Seed: MGMFNMLSTVL
MIMFNMLSTVL

SEQ ID NO: 157306 - protein, 11 aa, Artificial Sequence
  Description of Artificial Sequence: Synthetic peptide
  Seed: MGMFNMLSTVL
MIMFNMLSTVM

SEQ ID NO: 157307 - protein, 11 aa, Artificial Sequence
  Description of Artificial Sequence: Synthetic peptide
  Seed: MGMFNMLSTVL
MIMFNMLSTVN

SEQ ID NO: 157308 - protein, 11 aa, Artificial Sequence
  Description of Artificial Sequence: Synthetic peptide
  Seed: MGMFNMLSTVL
MIMFNMLSTVP

SEQ ID NO: 157309 - protein, 11 aa, Artificial Sequence
  Description of Artificial Sequence: Synthetic peptide
  Seed: MGMFNMLSTVL
MIMFNMLSTVQ

SEQ ID NO: 157310 - protein, 11 aa, Artificial Sequence
  Description of Artificial Sequence: Synthetic peptide
  Seed: MGMFNMLSTVL
MIMFNMLSTVR

SEQ ID NO: 157311 - protein, 11 aa, Artificial Sequence
  Description of Artificial Sequence: Synthetic peptide
  Seed: MGMFNMLSTVL
MIMFNMLSTVS

SEQ ID NO: 157312 - protein, 11 aa, Artificial Sequence
  Description of Artificial Sequence: Synthetic peptide
  Seed: MGMFNMLSTVL
MIMFNMLSTVT

SEQ ID NO: 157313 - protein, 11 aa, Artificial Sequence
  Description of Artificial Sequence: Synthetic peptide
  Seed: MGMFNMLSTVL
MIMFNMLSTVV

SEQ ID NO: 157314 - protein, 11 aa, Artificial Sequence
  Description of Artificial Sequence: Synthetic peptide
  Seed: MGMFNMLSTVL
MIMFNMLSTVW

SEQ ID NO: 157315 - protein, 11 aa, Artificial Sequence
  Description of Artificial Sequence: Synthetic peptide
  Seed: MGMFNMLSTVL
MIMFNMLSTVY

SEQ ID NO: 157316 - protein, 10 aa, Artificial Sequence
  Description of Artificial Sequence: Synthetic peptide
  Seed: MGMFNMLSTV
MIMFNMLSTW

SEQ ID NO: 157317 - protein, 10 aa, Artificial Sequence
  Description of Artificial Sequence: Synthetic peptide
  Seed: MGMFNMLSTV
MIMFNMLSTY

SEQ ID NO: 157318 - protein, 8 aa, Artificial Sequence
  Description of Artificial Sequence: Synthetic peptide
  Seed: MMMGMFNM
MIMGMFNA

SEQ ID NO: 157319 - protein, 8 aa, Artificial Sequence
  Description of Artificial Sequence: Synthetic peptide
  Seed: MMMGMFNM
MIMGMFNF

SEQ ID NO: 157320 - protein, 8 aa, Artificial Sequence
  Description of Artificial Sequence: Synthetic peptide
  Seed: MMMGMFNM
MIMGMFNI

SEQ ID NO: 157321 - protein, 8 aa, Artificial Sequence
  Description of Artificial Sequence: Synthetic peptide
  Seed: MMMGMFNM
MIMGMFNL

SEQ ID NO: 157322 - protein, 9 aa, Artificial Sequence
  Description of Artificial Sequence: Synthetic peptide
  Seed: MMMGMFNML
MIMGMFNMA

SEQ ID NO: 157323 - protein, 9 aa, Artificial Sequence
  Description of Artificial Sequence: Synthetic peptide
  Seed: MMMGMFNML
MIMGMFNMC

SEQ ID NO: 157324 - protein, 9 aa, Artificial Sequence
  Description of Artificial Sequence: Synthetic peptide
  Seed: MMMGMFNML
MIMGMFNMF

SEQ ID NO: 157325 - protein, 9 aa, Artificial Sequence
  Description of Artificial Sequence: Synthetic peptide
  Seed: MMMGMFNML
MIMGMFNMG

SEQ ID NO: 157326 - protein, 9 aa, Artificial Sequence
  Description of Artificial Sequence: Synthetic peptide
  Seed: MMMGMFNML
MIMGMFNMI

SEQ ID NO: 157327 - protein, 9 aa, Artificial Sequence
  Description of Artificial Sequence: Synthetic peptide
  Seed: MMMGMFNML
MIMGMFNMK

SEQ ID NO: 157328 - protein, 9 aa, Artificial Sequence
  Description of Artificial Sequence: Synthetic peptide
  Seed: MMMGMFNML
MIMGMFNML

SEQ ID NO: 157329 - protein, 10 aa, Artificial Sequence
  Description of Artificial Sequence: Synthetic peptide
  Seed: MMMGMFNMLS
MIMGMFNMLA

SEQ ID NO: 157330 - protein, 10 aa, Artificial Sequence
  Description of Artificial Sequence: Synthetic peptide
  Seed: MMMGMFNMLS
MIMGMFNMLC

SEQ ID NO: 157331 - protein, 10 aa, Artificial Sequence
  Description of Artificial Sequence: Synthetic peptide
  Seed: MMMGMFNMLS
MIMGMFNMLD

SEQ ID NO: 157332 - protein, 10 aa, Artificial Sequence
  Description of Artificial Sequence: Synthetic peptide
  Seed: MMMGMFNMLS
MIMGMFNMLE

SEQ ID NO: 157333 - protein, 10 aa, Artificial Sequence
  Description of Artificial Sequence: Synthetic peptide
  Seed: MMMGMFNMLS
MIMGMFNMLF

SEQ ID NO: 157334 - protein, 10 aa, Artificial Sequence
  Description of Artificial Sequence: Synthetic peptide
  Seed: MMMGMFNMLS
MIMGMFNMLG

SEQ ID NO: 157335 - protein, 10 aa, Artificial Sequence
  Description of Artificial Sequence: Synthetic peptide
  Seed: MMMGMFNMLS
MIMGMFNMLI

SEQ ID NO: 157336 - protein, 10 aa, Artificial Sequence
  Description of Artificial Sequence: Synthetic peptide
  Seed: MMMGMFNMLS
MIMGMFNMLL

SEQ ID NO: 157337 - protein, 10 aa, Artificial Sequence
  Description of Artificial Sequence: Synthetic peptide
  Seed: MMMGMFNMLS
MIMGMFNMLM

SEQ ID NO: 157338 - protein, 10 aa, Artificial Sequence
  Description of Artificial Sequence: Synthetic peptide
  Seed: MMMGMFNMLS
MIMGMFNMLP

SEQ ID NO: 157339 - protein, 10 aa, Artificial Sequence
  Description of Artificial Sequence: Synthetic peptide
  Seed: MMMGMFNMLS
MIMGMFNMLS

SEQ ID NO: 157340 - protein, 11 aa, Artificial Sequence
  Description of Artificial Sequence: Synthetic peptide
  Seed: MMMGMFNMLST
MIMGMFNMLSA

SEQ ID NO: 157341 - protein, 11 aa, Artificial Sequence
  Description of Artificial Sequence: Synthetic peptide
  Seed: MMMGMFNMLST
MIMGMFNMLSI

SEQ ID NO: 157342 - protein, 11 aa, Artificial Sequence
  Description of Artificial Sequence: Synthetic peptide
  Seed: MMMGMFNMLST
MIMGMFNMLSL

SEQ ID NO: 157343 - protein, 11 aa, Artificial Sequence
  Description of Artificial Sequence: Synthetic peptide
  Seed: MMMGMFNMLST
MIMGMFNMLSV

SEQ ID NO: 157344 - protein, 10 aa, Artificial Sequence
  Description of Artificial Sequence: Synthetic peptide
  Seed: MMMGMFNMLS
MIMGMFNMLT

SEQ ID NO: 157345 - protein, 10 aa, Artificial Sequence
  Description of Artificial Sequence: Synthetic peptide
  Seed: MMMGMFNMLS
MIMGMFNMLV

SEQ ID NO: 157346 - protein, 9 aa, Artificial Sequence
  Description of Artificial Sequence: Synthetic peptide
  Seed: MMMGMFNML
MIMGMFNMM

SEQ ID NO: 157347 - protein, 9 aa, Artificial Sequence
  Description of Artificial Sequence: Synthetic peptide
  Seed: MMMGMFNML
MIMGMFNMP

SEQ ID NO: 157348 - protein, 9 aa, Artificial Sequence
  Description of Artificial Sequence: Synthetic peptide
  Seed: MMMGMFNML
MIMGMFNMR

SEQ ID NO: 157349 - protein, 9 aa, Artificial Sequence
  Description of Artificial Sequence: Synthetic peptide
  Seed: MMMGMFNML
MIMGMFNMS

SEQ ID NO: 157350 - protein, 9 aa, Artificial Sequence
  Description of Artificial Sequence: Synthetic peptide
  Seed: MMMGMFNML
MIMGMFNMT

SEQ ID NO: 157351 - protein, 9 aa, Artificial Sequence
  Description of Artificial Sequence: Synthetic peptide
  Seed: MMMGMFNML
MIMGMFNMV

SEQ ID NO: 157352 - protein, 9 aa, Artificial Sequence
  Description of Artificial Sequence: Synthetic peptide
  Seed: MMMGMFNML
MIMGMFNMW

SEQ ID NO: 157353 - protein, 9 aa, Artificial Sequence
  Description of Artificial Sequence: Synthetic peptide
  Seed: MMMGMFNML
MIMGMFNMY

SEQ ID NO: 157354 - protein, 8 aa, Artificial Sequence
  Description of Artificial Sequence: Synthetic peptide
  Seed: MMMGMFNM
MIMGMFNV

SEQ ID NO: 157355 - protein, 8 aa, Artificial Sequence
  Description of Artificial Sequence: Synthetic peptide
  Seed: MMMGMFNM
MIMGMFNY

SEQ ID NO: 157356 - protein, 8 aa, Artificial Sequence
  Description of Artificial Sequence: Synthetic peptide
  Seed: MFNMLSTV
MINMLSTV

SEQ ID NO: 157357 - protein, 9 aa, Artificial Sequence
  Description of Artificial Sequence: Synthetic peptide
  Seed: MFNMLSTVL
MINMLSTVA

SEQ ID NO: 157358 - protein, 9 aa, Artificial Sequence
  Description of Artificial Sequence: Synthetic peptide
  Seed: MFNMLSTVL
MINMLSTVF

SEQ ID NO: 157359 - protein, 9 aa, Artificial Sequence
  Description of Artificial Sequence: Synthetic peptide
  Seed: MFNMLSTVL
MINMLSTVH

SEQ ID NO: 157360 - protein, 9 aa, Artificial Sequence
  Description of Artificial Sequence: Synthetic peptide
  Seed: MFNMLSTVL
MINMLSTVI

SEQ ID NO: 157361 - protein, 9 aa, Artificial Sequence
  Description of Artificial Sequence: Synthetic peptide
  Seed: MFNMLSTVL
MINMLSTVL

SEQ ID NO: 157362 - protein, 11 aa, Artificial Sequence
  Description of Artificial Sequence: Synthetic peptide
  Seed: MFNMLSTVLGV
MINMLSTVLGA

SEQ ID NO: 157363 - protein, 11 aa, Artificial Sequence
  Description of Artificial Sequence: Synthetic peptide
  Seed: MFNMLSTVLGV
MINMLSTVLGI

SEQ ID NO: 157364 - protein, 11 aa, Artificial Sequence
  Description of Artificial Sequence: Synthetic peptide
  Seed: MFNMLSTVLGV
MINMLSTVLGL

SEQ ID NO: 157365 - protein, 11 aa, Artificial Sequence
  Description of Artificial Sequence: Synthetic peptide
  Seed: MFNMLSTVLGV
MINMLSTVLGM

SEQ ID NO: 157366 - protein, 11 aa, Artificial Sequence
  Description of Artificial Sequence: Synthetic peptide
  Seed: MFNMLSTVLGV
MINMLSTVLGT

SEQ ID NO: 157367 - protein, 11 aa, Artificial Sequence
  Description of Artificial Sequence: Synthetic peptide
  Seed: MFNMLSTVLGV
MINMLSTVLGV

SEQ ID NO: 157368 - protein, 9 aa, Artificial Sequence
  Description of Artificial Sequence: Synthetic peptide
  Seed: MFNMLSTVL
MINMLSTVM

SEQ ID NO: 157369 - protein, 9 aa, Artificial Sequence
  Description of Artificial Sequence: Synthetic peptide
  Seed: MFNMLSTVL
MINMLSTVV

SEQ ID NO: 157370 - protein, 9 aa, Artificial Sequence
  Description of Artificial Sequence: Synthetic peptide
  Seed: MFNMLSTVL
MINMLSTVW

SEQ ID NO: 157371 - protein, 9 aa, Artificial Sequence
  Description of Artificial Sequence: Synthetic peptide
  Seed: MFNMLSTVL
MINMLSTVY

SEQ ID NO: 157372 - protein, 9 aa, Artificial Sequence
  Description of Artificial Sequence: Synthetic peptide
  Seed: MARLGKGYM
MIRLGKGYA

SEQ ID NO: 157373 - protein, 9 aa, Artificial Sequence
  Description of Artificial Sequence: Synthetic peptide
  Seed: MARLGKGYM
MIRLGKGYF

SEQ ID NO: 157374 - protein, 9 aa, Artificial Sequence
  Description of Artificial Sequence: Synthetic peptide
  Seed: MARLGKGYM
MIRLGKGYG

SEQ ID NO: 157375 - protein, 9 aa, Artificial Sequence
  Description of Artificial Sequence: Synthetic peptide
  Seed: MARLGKGYM
MIRLGKGYI

SEQ ID NO: 157376 - protein, 9 aa, Artificial Sequence
  Description of Artificial Sequence: Synthetic peptide
  Seed: MARLGKGYM
MIRLGKGYK

SEQ ID NO: 157377 - protein, 9 aa, Artificial Sequence
  Description of Artificial Sequence: Synthetic peptide
  Seed: MARLGKGYM
MIRLGKGYL

SEQ ID NO: 157378 - protein, 9 aa, Artificial Sequence
  Description of Artificial Sequence: Synthetic peptide
  Seed: MARLGKGYM
MIRLGKGYM

SEQ ID NO: 157379 - protein, 10 aa, Artificial Sequence
  Description of Artificial Sequence: Synthetic peptide
  Seed: MARLGKGYMF
MIRLGKGYMA

SEQ ID NO: 157380 - protein, 10 aa, Artificial Sequence
  Description of Artificial Sequence: Synthetic peptide
  Seed: MARLGKGYMF
MIRLGKGYMF

SEQ ID NO: 157381 - protein, 10 aa, Artificial Sequence
  Description of Artificial Sequence: Synthetic peptide
  Seed: MARLGKGYMF
MIRLGKGYMI

SEQ ID NO: 157382 - protein, 10 aa, Artificial Sequence
  Description of Artificial Sequence: Synthetic peptide
  Seed: MARLGKGYMF
MIRLGKGYMK

SEQ ID NO: 157383 - protein, 10 aa, Artificial Sequence
  Description of Artificial Sequence: Synthetic peptide
  Seed: MARLGKGYMF
MIRLGKGYML

SEQ ID NO: 157384 - protein, 10 aa, Artificial Sequence
  Description of Artificial Sequence: Synthetic peptide
  Seed: MARLGKGYMF
MIRLGKGYMM

SEQ ID NO: 157385 - protein, 10 aa, Artificial Sequence
  Description of Artificial Sequence: Synthetic peptide
  Seed: MARLGKGYMF
MIRLGKGYMR

SEQ ID NO: 157386 - protein, 10 aa, Artificial Sequence
  Description of Artificial Sequence: Synthetic peptide
  Seed: MARLGKGYMF
MIRLGKGYMV

SEQ ID NO: 157387 - protein, 10 aa, Artificial Sequence
  Description of Artificial Sequence: Synthetic peptide
  Seed: MARLGKGYMF
MIRLGKGYMW

SEQ ID NO: 157388 - protein, 10 aa, Artificial Sequence
  Description of Artificial Sequence: Synthetic peptide
  Seed: MARLGKGYMF
MIRLGKGYMY

SEQ ID NO: 157389 - protein, 9 aa, Artificial Sequence
  Description of Artificial Sequence: Synthetic peptide
  Seed: MARLGKGYM
MIRLGKGYP

SEQ ID NO: 157390 - protein, 9 aa, Artificial Sequence
  Description of Artificial Sequence: Synthetic peptide
  Seed: MARLGKGYM
MIRLGKGYR

SEQ ID NO: 157391 - protein, 9 aa, Artificial Sequence
  Description of Artificial Sequence: Synthetic peptide
  Seed: MARLGKGYM
MIRLGKGYS

SEQ ID NO: 157392 - protein, 9 aa, Artificial Sequence
  Description of Artificial Sequence: Synthetic peptide
  Seed: MARLGKGYM
MIRLGKGYV

SEQ ID NO: 157393 - protein, 9 aa, Artificial Sequence
  Description of Artificial Sequence: Synthetic peptide
  Seed: MARLGKGYM
MIRLGKGYW

SEQ ID NO: 157394 - protein, 9 aa, Artificial Sequence
  Description of Artificial Sequence: Synthetic peptide
  Seed: MARLGKGYM
MIRLGKGYY

SEQ ID NO: 157395 - protein, 8 aa, Artificial Sequence
  Description of Artificial Sequence: Synthetic peptide
  Seed: MFSNKMAR
MISNKMAR

SEQ ID NO: 157396 - protein, 11 aa, Artificial Sequence
  Description of Artificial Sequence: Synthetic peptide
  Seed: MFSNKMARLGK
MISNKMARLGR

SEQ ID NO: 157397 - protein, 8 aa, Artificial Sequence
  Description of Artificial Sequence: Synthetic peptide
  Seed: MLSTVLGV
MISTVLGV

SEQ ID NO: 157398 - protein, 9 aa, Artificial Sequence
  Description of Artificial Sequence: Synthetic peptide
  Seed: MLSTVLGVS
MISTVLGVA

SEQ ID NO: 157399 - protein, 9 aa, Artificial Sequence
  Description of Artificial Sequence: Synthetic peptide
  Seed: MLSTVLGVS
MISTVLGVI

SEQ ID NO: 157400 - protein, 9 aa, Artificial Sequence
  Description of Artificial Sequence: Synthetic peptide
  Seed: MLSTVLGVS
MISTVLGVL

SEQ ID NO: 157401 - protein, 9 aa, Artificial Sequence
  Description of Artificial Sequence: Synthetic peptide
  Seed: MLSTVLGVS
MISTVLGVM

SEQ ID NO: 157402 - protein, 10 aa, Artificial Sequence
  Description of Artificial Sequence: Synthetic peptide
  Seed: MLSTVLGVSI
MISTVLGVSA

SEQ ID NO: 157403 - protein, 10 aa, Artificial Sequence
  Description of Artificial Sequence: Synthetic peptide
  Seed: MLSTVLGVSI
MISTVLGVSF

SEQ ID NO: 157404 - protein, 10 aa, Artificial Sequence
  Description of Artificial Sequence: Synthetic peptide
  Seed: MLSTVLGVSI
MISTVLGVSI

SEQ ID NO: 157405 - protein, 11 aa, Artificial Sequence
  Description of Artificial Sequence: Synthetic peptide
  Seed: MLSTVLGVSIL
MISTVLGVSIL

SEQ ID NO: 157406 - protein, 11 aa, Artificial Sequence
  Description of Artificial Sequence: Synthetic peptide
  Seed: MLSTVLGVSIL
MISTVLGVSIV

SEQ ID NO: 157407 - protein, 10 aa, Artificial Sequence
  Description of Artificial Sequence: Synthetic peptide
  Seed: MLSTVLGVSI
MISTVLGVSL

SEQ ID NO: 157408 - protein, 10 aa, Artificial Sequence
  Description of Artificial Sequence: Synthetic peptide
  Seed: MLSTVLGVSI
MISTVLGVSM

SEQ ID NO: 157409 - protein, 10 aa, Artificial Sequence
  Description of Artificial Sequence: Synthetic peptide
  Seed: MLSTVLGVSI
MISTVLGVST

SEQ ID NO: 157410 - protein, 10 aa, Artificial Sequence
  Description of Artificial Sequence: Synthetic peptide
  Seed: MLSTVLGVSI
MISTVLGVSV

SEQ ID NO: 157411 - protein, 10 aa, Artificial Sequence
  Description of Artificial Sequence: Synthetic peptide
  Seed: MLSTVLGVSI
MISTVLGVSW

SEQ ID NO: 157412 - protein, 10 aa, Artificial Sequence
  Description of Artificial Sequence: Synthetic peptide
  Seed: MLSTVLGVSI
MISTVLGVSY

SEQ ID NO: 157413 - protein, 9 aa, Artificial Sequence
  Description of Artificial Sequence: Synthetic peptide
  Seed: MLSTVLGVS
MISTVLGVT

SEQ ID NO: 157414 - protein, 9 aa, Artificial Sequence
  Description of Artificial Sequence: Synthetic peptide
  Seed: MLSTVLGVS
MISTVLGVV

SEQ ID NO: 157415 - protein, 11 aa, Artificial Sequence
  Description of Artificial Sequence: Synthetic peptide
  Seed: MMGMFNMLSTV
MKGMFNMLSTA

SEQ ID NO: 157416 - protein, 11 aa, Artificial Sequence
  Description of Artificial Sequence: Synthetic peptide
  Seed: MMGMFNMLSTV
MKGMFNMLSTI

SEQ ID NO: 157417 - protein, 11 aa, Artificial Sequence
  Description of Artificial Sequence: Synthetic peptide
  Seed: MMGMFNMLSTV
MKGMFNMLSTL

SEQ ID NO: 157418 - protein, 11 aa, Artificial Sequence
  Description of Artificial Sequence: Synthetic peptide
  Seed: MMGMFNMLSTV
MKGMFNMLSTM

SEQ ID NO: 157419 - protein, 11 aa, Artificial Sequence
  Description of Artificial Sequence: Synthetic peptide
  Seed: MMGMFNMLSTV
MKGMFNMLSTT

SEQ ID NO: 157420 - protein, 11 aa, Artificial Sequence
  Description of Artificial Sequence: Synthetic peptide
  Seed: MMGMFNMLSTV
MKGMFNMLSTV

SEQ ID NO: 157421 - protein, 10 aa, Artificial Sequence
  Description of Artificial Sequence: Synthetic peptide
  Seed: MMGMFNMLST
MKGMFNMLSV

SEQ ID NO: 157422 - protein, 10 aa, Artificial Sequence
  Description of Artificial Sequence: Synthetic peptide
  Seed: MSIGVTVIKN
MKIGVTVIKK

SEQ ID NO: 157423 - protein, 10 aa, Artificial Sequence
  Description of Artificial Sequence: Synthetic peptide
  Seed: MSIGVTVIKN
MKIGVTVIKR

SEQ ID NO: 157424 - protein, 10 aa, Artificial Sequence
  Description of Artificial Sequence: Synthetic peptide
  Seed: MGMFNMLSTV
MKMFNMLSTA

SEQ ID NO: 157425 - protein, 10 aa, Artificial Sequence
  Description of Artificial Sequence: Synthetic peptide
  Seed: MGMFNMLSTV
MKMFNMLSTC

SEQ ID NO: 157426 - protein, 10 aa, Artificial Sequence
  Description of Artificial Sequence: Synthetic peptide
  Seed: MGMFNMLSTV
MKMFNMLSTF

SEQ ID NO: 157427 - protein, 10 aa, Artificial Sequence
  Description of Artificial Sequence: Synthetic peptide
  Seed: MGMFNMLSTV
MKMFNMLSTG

SEQ ID NO: 157428 - protein, 10 aa, Artificial Sequence
  Description of Artificial Sequence: Synthetic peptide
  Seed: MGMFNMLSTV
MKMFNMLSTH

SEQ ID NO: 157429 - protein, 10 aa, Artificial Sequence
  Description of Artificial Sequence: Synthetic peptide
  Seed: MGMFNMLSTV
MKMFNMLSTI

SEQ ID NO: 157430 - protein, 10 aa, Artificial Sequence
  Description of Artificial Sequence: Synthetic peptide
  Seed: MGMFNMLSTV
MKMFNMLSTL

SEQ ID NO: 157431 - protein, 10 aa, Artificial Sequence
  Description of Artificial Sequence: Synthetic peptide
  Seed: MGMFNMLSTV
MKMFNMLSTM

SEQ ID NO: 157432 - protein, 10 aa, Artificial Sequence
  Description of Artificial Sequence: Synthetic peptide
  Seed: MGMFNMLSTV
MKMFNMLSTP

SEQ ID NO: 157433 - protein, 10 aa, Artificial Sequence
  Description of Artificial Sequence: Synthetic peptide
  Seed: MGMFNMLSTV
MKMFNMLSTS

SEQ ID NO: 157434 - protein, 10 aa, Artificial Sequence
  Description of Artificial Sequence: Synthetic peptide
  Seed: MGMFNMLSTV
MKMFNMLSTT

SEQ ID NO: 157435 - protein, 10 aa, Artificial Sequence
  Description of Artificial Sequence: Synthetic peptide
  Seed: MGMFNMLSTV
MKMFNMLSTV

SEQ ID NO: 157436 - protein, 11 aa, Artificial Sequence
  Description of Artificial Sequence: Synthetic peptide
  Seed: MGMFNMLSTVL
MKMFNMLSTVA

SEQ ID NO: 157437 - protein, 11 aa, Artificial Sequence
  Description of Artificial Sequence: Synthetic peptide
  Seed: MGMFNMLSTVL
MKMFNMLSTVC

SEQ ID NO: 157438 - protein, 11 aa, Artificial Sequence
  Description of Artificial Sequence: Synthetic peptide
  Seed: MGMFNMLSTVL
MKMFNMLSTVD

SEQ ID NO: 157439 - protein, 11 aa, Artificial Sequence
  Description of Artificial Sequence: Synthetic peptide
  Seed: MGMFNMLSTVL
MKMFNMLSTVE

SEQ ID NO: 157440 - protein, 11 aa, Artificial Sequence
  Description of Artificial Sequence: Synthetic peptide
  Seed: MGMFNMLSTVL
MKMFNMLSTVF

SEQ ID NO: 157441 - protein, 11 aa, Artificial Sequence
  Description of Artificial Sequence: Synthetic peptide
  Seed: MGMFNMLSTVL
MKMFNMLSTVG

SEQ ID NO: 157442 - protein, 11 aa, Artificial Sequence
  Description of Artificial Sequence: Synthetic peptide
  Seed: MGMFNMLSTVL
MKMFNMLSTVH

SEQ ID NO: 157443 - protein, 11 aa, Artificial Sequence
  Description of Artificial Sequence: Synthetic peptide
  Seed: MGMFNMLSTVL
MKMFNMLSTVI

SEQ ID NO: 157444 - protein, 11 aa, Artificial Sequence
  Description of Artificial Sequence: Synthetic peptide
  Seed: MGMFNMLSTVL
MKMFNMLSTVK

SEQ ID NO: 157445 - protein, 11 aa, Artificial Sequence
  Description of Artificial Sequence: Synthetic peptide
  Seed: MGMFNMLSTVL
MKMFNMLSTVL

SEQ ID NO: 157446 - protein, 11 aa, Artificial Sequence
  Description of Artificial Sequence: Synthetic peptide
  Seed: MGMFNMLSTVL
MKMFNMLSTVM

SEQ ID NO: 157447 - protein, 11 aa, Artificial Sequence
  Description of Artificial Sequence: Synthetic peptide
  Seed: MGMFNMLSTVL
MKMFNMLSTVN

SEQ ID NO: 157448 - protein, 11 aa, Artificial Sequence
  Description of Artificial Sequence: Synthetic peptide
  Seed: MGMFNMLSTVL
MKMFNMLSTVP

SEQ ID NO: 157449 - protein, 11 aa, Artificial Sequence
  Description of Artificial Sequence: Synthetic peptide
  Seed: MGMFNMLSTVL
MKMFNMLSTVQ

SEQ ID NO: 157450 - protein, 11 aa, Artificial Sequence
  Description of Artificial Sequence: Synthetic peptide
  Seed: MGMFNMLSTVL
MKMFNMLSTVR

SEQ ID NO: 157451 - protein, 11 aa, Artificial Sequence
  Description of Artificial Sequence: Synthetic peptide
  Seed: MGMFNMLSTVL
MKMFNMLSTVS

SEQ ID NO: 157452 - protein, 11 aa, Artificial Sequence
  Description of Artificial Sequence: Synthetic peptide
  Seed: MGMFNMLSTVL
MKMFNMLSTVT

SEQ ID NO: 157453 - protein, 11 aa, Artificial Sequence
  Description of Artificial Sequence: Synthetic peptide
  Seed: MGMFNMLSTVL
MKMFNMLSTVV

SEQ ID NO: 157454 - protein, 11 aa, Artificial Sequence
  Description of Artificial Sequence: Synthetic peptide
  Seed: MGMFNMLSTVL
MKMFNMLSTVW

SEQ ID NO: 157455 - protein, 11 aa, Artificial Sequence
  Description of Artificial Sequence: Synthetic peptide
  Seed: MGMFNMLSTVL
MKMFNMLSTVY

SEQ ID NO: 157456 - protein, 10 aa, Artificial Sequence
  Description of Artificial Sequence: Synthetic peptide
  Seed: MGMFNMLSTV
MKMFNMLSTW

SEQ ID NO: 157457 - protein, 10 aa, Artificial Sequence
  Description of Artificial Sequence: Synthetic peptide
  Seed: MGMFNMLSTV
MKMFNMLSTY

SEQ ID NO: 157458 - protein, 8 aa, Artificial Sequence
  Description of Artificial Sequence: Synthetic peptide
  Seed: MMMGMFNM
MKMGMFNF

SEQ ID NO: 157459 - protein, 8 aa, Artificial Sequence
  Description of Artificial Sequence: Synthetic peptide
  Seed: MMMGMFNM
MKMGMFNL

SEQ ID NO: 157460 - protein, 8 aa, Artificial Sequence
  Description of Artificial Sequence: Synthetic peptide
  Seed: MMMGMFNM
MKMGMFNM

SEQ ID NO: 157461 - protein, 9 aa, Artificial Sequence
  Description of Artificial Sequence: Synthetic peptide
  Seed: MMMGMFNML
MKMGMFNMA

SEQ ID NO: 157462 - protein, 9 aa, Artificial Sequence
  Description of Artificial Sequence: Synthetic peptide
  Seed: MMMGMFNML
MKMGMFNMF

SEQ ID NO: 157463 - protein, 9 aa, Artificial Sequence
  Description of Artificial Sequence: Synthetic peptide
  Seed: MMMGMFNML
MKMGMFNMH

SEQ ID NO: 157464 - protein, 9 aa, Artificial Sequence
  Description of Artificial Sequence: Synthetic peptide
  Seed: MMMGMFNML
MKMGMFNMI

SEQ ID NO: 157465 - protein, 9 aa, Artificial Sequence
  Description of Artificial Sequence: Synthetic peptide
  Seed: MMMGMFNML
MKMGMFNML

SEQ ID NO: 157466 - protein, 10 aa, Artificial Sequence
  Description of Artificial Sequence: Synthetic peptide
  Seed: MMMGMFNMLS
MKMGMFNMLA

SEQ ID NO: 157467 - protein, 10 aa, Artificial Sequence
  Description of Artificial Sequence: Synthetic peptide
  Seed: MMMGMFNMLS
MKMGMFNMLI

SEQ ID NO: 157468 - protein, 10 aa, Artificial Sequence
  Description of Artificial Sequence: Synthetic peptide
  Seed: MMMGMFNMLS
MKMGMFNMLL

SEQ ID NO: 157469 - protein, 10 aa, Artificial Sequence
  Description of Artificial Sequence: Synthetic peptide
  Seed: MMMGMFNMLS
MKMGMFNMLM

SEQ ID NO: 157470 - protein, 10 aa, Artificial Sequence
  Description of Artificial Sequence: Synthetic peptide
  Seed: MMMGMFNMLS
MKMGMFNMLS

SEQ ID NO: 157471 - protein, 11 aa, Artificial Sequence
  Description of Artificial Sequence: Synthetic peptide
  Seed: MMMGMFNMLST
MKMGMFNMLSV

SEQ ID NO: 157472 - protein, 10 aa, Artificial Sequence
  Description of Artificial Sequence: Synthetic peptide
  Seed: MMMGMFNMLS
MKMGMFNMLT

SEQ ID NO: 157473 - protein, 10 aa, Artificial Sequence
  Description of Artificial Sequence: Synthetic peptide
  Seed: MMMGMFNMLS
MKMGMFNMLV

SEQ ID NO: 157474 - protein, 9 aa, Artificial Sequence
  Description of Artificial Sequence: Synthetic peptide
  Seed: MMMGMFNML
MKMGMFNMM

SEQ ID NO: 157475 - protein, 9 aa, Artificial Sequence
  Description of Artificial Sequence: Synthetic peptide
  Seed: MMMGMFNML
MKMGMFNMV

SEQ ID NO: 157476 - protein, 9 aa, Artificial Sequence
  Description of Artificial Sequence: Synthetic peptide
  Seed: MMMGMFNML
MKMGMFNMW

SEQ ID NO: 157477 - protein, 9 aa, Artificial Sequence
  Description of Artificial Sequence: Synthetic peptide
  Seed: MMMGMFNML
MKMGMFNMY

SEQ ID NO: 157478 - protein, 8 aa, Artificial Sequence
  Description of Artificial Sequence: Synthetic peptide
  Seed: MMMGMFNM
MKMGMFNY

SEQ ID NO: 157479 - protein, 9 aa, Artificial Sequence
  Description of Artificial Sequence: Synthetic peptide
  Seed: MFNMLSTVL
MKNMLSTVA

SEQ ID NO: 157480 - protein, 9 aa, Artificial Sequence
  Description of Artificial Sequence: Synthetic peptide
  Seed: MFNMLSTVL
MKNMLSTVC

SEQ ID NO: 157481 - protein, 9 aa, Artificial Sequence
  Description of Artificial Sequence: Synthetic peptide
  Seed: MFNMLSTVL
MKNMLSTVF

SEQ ID NO: 157482 - protein, 9 aa, Artificial Sequence
  Description of Artificial Sequence: Synthetic peptide
  Seed: MFNMLSTVL
MKNMLSTVG

SEQ ID NO: 157483 - protein, 9 aa, Artificial Sequence
  Description of Artificial Sequence: Synthetic peptide
  Seed: MFNMLSTVL
MKNMLSTVH

SEQ ID NO: 157484 - protein, 9 aa, Artificial Sequence
  Description of Artificial Sequence: Synthetic peptide
  Seed: MFNMLSTVL
MKNMLSTVI

SEQ ID NO: 157485 - protein, 9 aa, Artificial Sequence
  Description of Artificial Sequence: Synthetic peptide
  Seed: MFNMLSTVL
MKNMLSTVL

SEQ ID NO: 157486 - protein, 11 aa, Artificial Sequence
  Description of Artificial Sequence: Synthetic peptide
  Seed: MFNMLSTVLGV
MKNMLSTVLGA

SEQ ID NO: 157487 - protein, 11 aa, Artificial Sequence
  Description of Artificial Sequence: Synthetic peptide
  Seed: MFNMLSTVLGV
MKNMLSTVLGI

SEQ ID NO: 157488 - protein, 11 aa, Artificial Sequence
  Description of Artificial Sequence: Synthetic peptide
  Seed: MFNMLSTVLGV
MKNMLSTVLGL

SEQ ID NO: 157489 - protein, 11 aa, Artificial Sequence
  Description of Artificial Sequence: Synthetic peptide
  Seed: MFNMLSTVLGV
MKNMLSTVLGM

SEQ ID NO: 157490 - protein, 11 aa, Artificial Sequence
  Description of Artificial Sequence: Synthetic peptide
  Seed: MFNMLSTVLGV
MKNMLSTVLGT

SEQ ID NO: 157491 - protein, 11 aa, Artificial Sequence
  Description of Artificial Sequence: Synthetic peptide
  Seed: MFNMLSTVLGV
MKNMLSTVLGV

SEQ ID NO: 157492 - protein, 9 aa, Artificial Sequence
  Description of Artificial Sequence: Synthetic peptide
  Seed: MFNMLSTVL
MKNMLSTVM

SEQ ID NO: 157493 - protein, 9 aa, Artificial Sequence
  Description of Artificial Sequence: Synthetic peptide
  Seed: MFNMLSTVL
MKNMLSTVN

SEQ ID NO: 157494 - protein, 9 aa, Artificial Sequence
  Description of Artificial Sequence: Synthetic peptide
  Seed: MFNMLSTVL
MKNMLSTVQ

SEQ ID NO: 157495 - protein, 9 aa, Artificial Sequence
  Description of Artificial Sequence: Synthetic peptide
  Seed: MFNMLSTVL
MKNMLSTVS

SEQ ID NO: 157496 - protein, 9 aa, Artificial Sequence
  Description of Artificial Sequence: Synthetic peptide
  Seed: MFNMLSTVL
MKNMLSTVT

SEQ ID NO: 157497 - protein, 9 aa, Artificial Sequence
  Description of Artificial Sequence: Synthetic peptide
  Seed: MFNMLSTVL
MKNMLSTVV

SEQ ID NO: 157498 - protein, 9 aa, Artificial Sequence
  Description of Artificial Sequence: Synthetic peptide
  Seed: MFNMLSTVL
MKNMLSTVW

SEQ ID NO: 157499 - protein, 9 aa, Artificial Sequence
  Description of Artificial Sequence: Synthetic peptide
  Seed: MFNMLSTVL
MKNMLSTVY

SEQ ID NO: 157500 - protein, 9 aa, Artificial Sequence
  Description of Artificial Sequence: Synthetic peptide
  Seed: MARLGKGYM
MKRLGKGYF

SEQ ID NO: 157501 - protein, 9 aa, Artificial Sequence
  Description of Artificial Sequence: Synthetic peptide
  Seed: MARLGKGYM
MKRLGKGYK

SEQ ID NO: 157502 - protein, 9 aa, Artificial Sequence
  Description of Artificial Sequence: Synthetic peptide
  Seed: MARLGKGYM
MKRLGKGYL

SEQ ID NO: 157503 - protein, 9 aa, Artificial Sequence
  Description of Artificial Sequence: Synthetic peptide
  Seed: MARLGKGYM
MKRLGKGYM

SEQ ID NO: 157504 - protein, 10 aa, Artificial Sequence
  Description of Artificial Sequence: Synthetic peptide
  Seed: MARLGKGYMF
MKRLGKGYMA

SEQ ID NO: 157505 - protein, 10 aa, Artificial Sequence
  Description of Artificial Sequence: Synthetic peptide
  Seed: MARLGKGYMF
MKRLGKGYMF

SEQ ID NO: 157506 - protein, 10 aa, Artificial Sequence
  Description of Artificial Sequence: Synthetic peptide
  Seed: MARLGKGYMF
MKRLGKGYMI

SEQ ID NO: 157507 - protein, 10 aa, Artificial Sequence
  Description of Artificial Sequence: Synthetic peptide
  Seed: MARLGKGYMF
MKRLGKGYMK

SEQ ID NO: 157508 - protein, 10 aa, Artificial Sequence
  Description of Artificial Sequence: Synthetic peptide
  Seed: MARLGKGYMF
MKRLGKGYML

SEQ ID NO: 157509 - protein, 10 aa, Artificial Sequence
  Description of Artificial Sequence: Synthetic peptide
  Seed: MARLGKGYMF
MKRLGKGYMM

SEQ ID NO: 157510 - protein, 10 aa, Artificial Sequence
  Description of Artificial Sequence: Synthetic peptide
  Seed: MARLGKGYMF
MKRLGKGYMR

SEQ ID NO: 157511 - protein, 10 aa, Artificial Sequence
  Description of Artificial Sequence: Synthetic peptide
  Seed: MARLGKGYMF
MKRLGKGYMV

SEQ ID NO: 157512 - protein, 10 aa, Artificial Sequence
  Description of Artificial Sequence: Synthetic peptide
  Seed: MARLGKGYMF
MKRLGKGYMW

SEQ ID NO: 157513 - protein, 10 aa, Artificial Sequence
  Description of Artificial Sequence: Synthetic peptide
  Seed: MARLGKGYMF
MKRLGKGYMY

SEQ ID NO: 157514 - protein, 9 aa, Artificial Sequence
  Description of Artificial Sequence: Synthetic peptide
  Seed: MARLGKGYM
MKRLGKGYY

SEQ ID NO: 157515 - protein, 10 aa, Artificial Sequence
  Description of Artificial Sequence: Synthetic peptide
  Seed: MLSTVLGVSI
MKSTVLGVSF

SEQ ID NO: 157516 - protein, 10 aa, Artificial Sequence
  Description of Artificial Sequence: Synthetic peptide
  Seed: MLSTVLGVSI
MKSTVLGVSI

SEQ ID NO: 157517 - protein, 10 aa, Artificial Sequence
  Description of Artificial Sequence: Synthetic peptide
  Seed: MLSTVLGVSI
MKSTVLGVSL

SEQ ID NO: 157518 - protein, 10 aa, Artificial Sequence
  Description of Artificial Sequence: Synthetic peptide
  Seed: MLSTVLGVSI
MKSTVLGVSM

SEQ ID NO: 157519 - protein, 10 aa, Artificial Sequence
  Description of Artificial Sequence: Synthetic peptide
  Seed: MLSTVLGVSI
MKSTVLGVSV

SEQ ID NO: 157520 - protein, 10 aa, Artificial Sequence
  Description of Artificial Sequence: Synthetic peptide
  Seed: MLSTVLGVSI
MKSTVLGVSW

SEQ ID NO: 157521 - protein, 10 aa, Artificial Sequence
  Description of Artificial Sequence: Synthetic peptide
  Seed: MLSTVLGVSI
MKSTVLGVSY

SEQ ID NO: 157522 - protein, 8 aa, Artificial Sequence
  Description of Artificial Sequence: Synthetic peptide
  Seed: MMGMFNML
MLGMFNMI

SEQ ID NO: 157523 - protein, 8 aa, Artificial Sequence
  Description of Artificial Sequence: Synthetic peptide
  Seed: MMGMFNML
MLGMFNML

SEQ ID NO: 157524 - protein, 9 aa, Artificial Sequence
  Description of Artificial Sequence: Synthetic peptide
  Seed: MMGMFNMLS
MLGMFNMLA

SEQ ID NO: 157525 - protein, 9 aa, Artificial Sequence
  Description of Artificial Sequence: Synthetic peptide
  Seed: MMGMFNMLS
MLGMFNMLC

SEQ ID NO: 157526 - protein, 9 aa, Artificial Sequence
  Description of Artificial Sequence: Synthetic peptide
  Seed: MMGMFNMLS
MLGMFNMLF

SEQ ID NO: 157527 - protein, 9 aa, Artificial Sequence
  Description of Artificial Sequence: Synthetic peptide
  Seed: MMGMFNMLS
MLGMFNMLG

SEQ ID NO: 157528 - protein, 9 aa, Artificial Sequence
  Description of Artificial Sequence: Synthetic peptide
  Seed: MMGMFNMLS
MLGMFNMLI

SEQ ID NO: 157529 - protein, 9 aa, Artificial Sequence
  Description of Artificial Sequence: Synthetic peptide
  Seed: MMGMFNMLS
MLGMFNMLL

SEQ ID NO: 157530 - protein, 9 aa, Artificial Sequence
  Description of Artificial Sequence: Synthetic peptide
  Seed: MMGMFNMLS
MLGMFNMLM

SEQ ID NO: 157531 - protein, 9 aa, Artificial Sequence
  Description of Artificial Sequence: Synthetic peptide
  Seed: MMGMFNMLS
MLGMFNMLP

SEQ ID NO: 157532 - protein, 9 aa, Artificial Sequence
  Description of Artificial Sequence: Synthetic peptide
  Seed: MMGMFNMLS
MLGMFNMLS

SEQ ID NO: 157533 - protein, 10 aa, Artificial Sequence
  Description of Artificial Sequence: Synthetic peptide
  Seed: MMGMFNMLST
MLGMFNMLSA

SEQ ID NO: 157534 - protein, 10 aa, Artificial Sequence
  Description of Artificial Sequence: Synthetic peptide
  Seed: MMGMFNMLST
MLGMFNMLSC

SEQ ID NO: 157535 - protein, 10 aa, Artificial Sequence
  Description of Artificial Sequence: Synthetic peptide
  Seed: MMGMFNMLST
MLGMFNMLSG

SEQ ID NO: 157536 - protein, 10 aa, Artificial Sequence
  Description of Artificial Sequence: Synthetic peptide
  Seed: MMGMFNMLST
MLGMFNMLSI

SEQ ID NO: 157537 - protein, 10 aa, Artificial Sequence
  Description of Artificial Sequence: Synthetic peptide
  Seed: MMGMFNMLST
MLGMFNMLSL

SEQ ID NO: 157538 - protein, 10 aa, Artificial Sequence
  Description of Artificial Sequence: Synthetic peptide
  Seed: MMGMFNMLST
MLGMFNMLSM

SEQ ID NO: 157539 - protein, 10 aa, Artificial Sequence
  Description of Artificial Sequence: Synthetic peptide
  Seed: MMGMFNMLST
MLGMFNMLSP

SEQ ID NO: 157540 - protein, 10 aa, Artificial Sequence
  Description of Artificial Sequence: Synthetic peptide
  Seed: MMGMFNMLST
MLGMFNMLSS

SEQ ID NO: 157541 - protein, 10 aa, Artificial Sequence
  Description of Artificial Sequence: Synthetic peptide
  Seed: MMGMFNMLST
MLGMFNMLST

SEQ ID NO: 157542 - protein, 11 aa, Artificial Sequence
  Description of Artificial Sequence: Synthetic peptide
  Seed: MMGMFNMLSTV
MLGMFNMLSTA

SEQ ID NO: 157543 - protein, 11 aa, Artificial Sequence
  Description of Artificial Sequence: Synthetic peptide
  Seed: MMGMFNMLSTV
MLGMFNMLSTI

SEQ ID NO: 157544 - protein, 11 aa, Artificial Sequence
  Description of Artificial Sequence: Synthetic peptide
  Seed: MMGMFNMLSTV
MLGMFNMLSTL

SEQ ID NO: 157545 - protein, 11 aa, Artificial Sequence
  Description of Artificial Sequence: Synthetic peptide
  Seed: MMGMFNMLSTV
MLGMFNMLSTM

SEQ ID NO: 157546 - protein, 11 aa, Artificial Sequence
  Description of Artificial Sequence: Synthetic peptide
  Seed: MMGMFNMLSTV
MLGMFNMLSTS

SEQ ID NO: 157547 - protein, 11 aa, Artificial Sequence
  Description of Artificial Sequence: Synthetic peptide
  Seed: MMGMFNMLSTV
MLGMFNMLSTT

SEQ ID NO: 157548 - protein, 11 aa, Artificial Sequence
  Description of Artificial Sequence: Synthetic peptide
  Seed: MMGMFNMLSTV
MLGMFNMLSTV

SEQ ID NO: 157549 - protein, 10 aa, Artificial Sequence
  Description of Artificial Sequence: Synthetic peptide
  Seed: MMGMFNMLST
MLGMFNMLSV

SEQ ID NO: 157550 - protein, 9 aa, Artificial Sequence
  Description of Artificial Sequence: Synthetic peptide
  Seed: MMGMFNMLS
MLGMFNMLT

SEQ ID NO: 157551 - protein, 9 aa, Artificial Sequence
  Description of Artificial Sequence: Synthetic peptide
  Seed: MMGMFNMLS
MLGMFNMLV

SEQ ID NO: 157552 - protein, 8 aa, Artificial Sequence
  Description of Artificial Sequence: Synthetic peptide
  Seed: MMGMFNML
MLGMFNMV

SEQ ID NO: 157553 - protein, 9 aa, Artificial Sequence
  Description of Artificial Sequence: Synthetic peptide
  Seed: MSIGVTVIK
MLIGVTVIK

SEQ ID NO: 157554 - protein, 10 aa, Artificial Sequence
  Description of Artificial Sequence: Synthetic peptide
  Seed: MSIGVTVIKN
MLIGVTVIKK

SEQ ID NO: 157555 - protein, 10 aa, Artificial Sequence
  Description of Artificial Sequence: Synthetic peptide
  Seed: MSIGVTVIKN
MLIGVTVIKR

SEQ ID NO: 157556 - protein, 9 aa, Artificial Sequence
  Description of Artificial Sequence: Synthetic peptide
  Seed: MSIGVTVIK
MLIGVTVIM

SEQ ID NO: 157557 - protein, 9 aa, Artificial Sequence
  Description of Artificial Sequence: Synthetic peptide
  Seed: MSIGVTVIK
MLIGVTVIR

SEQ ID NO: 157558 - protein, 9 aa, Artificial Sequence
  Description of Artificial Sequence: Synthetic peptide
  Seed: MSIGVTVIK
MLIGVTVIY

SEQ ID NO: 157559 - protein, 9 aa, Artificial Sequence
  Description of Artificial Sequence: Synthetic peptide
  Seed: MTKDAERGK
MLKDAERGR

SEQ ID NO: 157560 - protein, 10 aa, Artificial Sequence
  Description of Artificial Sequence: Synthetic peptide
  Seed: MGMFNMLSTV
MLMFNMLSTA

SEQ ID NO: 157561 - protein, 10 aa, Artificial Sequence
  Description of Artificial Sequence: Synthetic peptide
  Seed: MGMFNMLSTV
MLMFNMLSTC

SEQ ID NO: 157562 - protein, 10 aa, Artificial Sequence
  Description of Artificial Sequence: Synthetic peptide
  Seed: MGMFNMLSTV
MLMFNMLSTD

SEQ ID NO: 157563 - protein, 10 aa, Artificial Sequence
  Description of Artificial Sequence: Synthetic peptide
  Seed: MGMFNMLSTV
MLMFNMLSTE

SEQ ID NO: 157564 - protein, 10 aa, Artificial Sequence
  Description of Artificial Sequence: Synthetic peptide
  Seed: MGMFNMLSTV
MLMFNMLSTF

SEQ ID NO: 157565 - protein, 10 aa, Artificial Sequence
  Description of Artificial Sequence: Synthetic peptide
  Seed: MGMFNMLSTV
MLMFNMLSTG

SEQ ID NO: 157566 - protein, 10 aa, Artificial Sequence
  Description of Artificial Sequence: Synthetic peptide
  Seed: MGMFNMLSTV
MLMFNMLSTH

SEQ ID NO: 157567 - protein, 10 aa, Artificial Sequence
  Description of Artificial Sequence: Synthetic peptide
  Seed: MGMFNMLSTV
MLMFNMLSTI

SEQ ID NO: 157568 - protein, 10 aa, Artificial Sequence
  Description of Artificial Sequence: Synthetic peptide
  Seed: MGMFNMLSTV
MLMFNMLSTK

SEQ ID NO: 157569 - protein, 10 aa, Artificial Sequence
  Description of Artificial Sequence: Synthetic peptide
  Seed: MGMFNMLSTV
MLMFNMLSTL

SEQ ID NO: 157570 - protein, 10 aa, Artificial Sequence
  Description of Artificial Sequence: Synthetic peptide
  Seed: MGMFNMLSTV
MLMFNMLSTM

SEQ ID NO: 157571 - protein, 10 aa, Artificial Sequence
  Description of Artificial Sequence: Synthetic peptide
  Seed: MGMFNMLSTV
MLMFNMLSTN

SEQ ID NO: 157572 - protein, 10 aa, Artificial Sequence
  Description of Artificial Sequence: Synthetic peptide
  Seed: MGMFNMLSTV
MLMFNMLSTP

SEQ ID NO: 157573 - protein, 10 aa, Artificial Sequence
  Description of Artificial Sequence: Synthetic peptide
  Seed: MGMFNMLSTV
MLMFNMLSTQ

SEQ ID NO: 157574 - protein, 10 aa, Artificial Sequence
  Description of Artificial Sequence: Synthetic peptide
  Seed: MGMFNMLSTV
MLMFNMLSTR

SEQ ID NO: 157575 - protein, 10 aa, Artificial Sequence
  Description of Artificial Sequence: Synthetic peptide
  Seed: MGMFNMLSTV
MLMFNMLSTS

SEQ ID NO: 157576 - protein, 10 aa, Artificial Sequence
  Description of Artificial Sequence: Synthetic peptide
  Seed: MGMFNMLSTV
MLMFNMLSTT

SEQ ID NO: 157577 - protein, 10 aa, Artificial Sequence
  Description of Artificial Sequence: Synthetic peptide
  Seed: MGMFNMLSTV
MLMFNMLSTV

SEQ ID NO: 157578 - protein, 11 aa, Artificial Sequence
  Description of Artificial Sequence: Synthetic peptide
  Seed: MGMFNMLSTVL
MLMFNMLSTVA

SEQ ID NO: 157579 - protein, 11 aa, Artificial Sequence
  Description of Artificial Sequence: Synthetic peptide
  Seed: MGMFNMLSTVL
MLMFNMLSTVC

SEQ ID NO: 157580 - protein, 11 aa, Artificial Sequence
  Description of Artificial Sequence: Synthetic peptide
  Seed: MGMFNMLSTVL
MLMFNMLSTVD

SEQ ID NO: 157581 - protein, 11 aa, Artificial Sequence
  Description of Artificial Sequence: Synthetic peptide
  Seed: MGMFNMLSTVL
MLMFNMLSTVE

SEQ ID NO: 157582 - protein, 11 aa, Artificial Sequence
  Description of Artificial Sequence: Synthetic peptide
  Seed: MGMFNMLSTVL
MLMFNMLSTVF

SEQ ID NO: 157583 - protein, 11 aa, Artificial Sequence
  Description of Artificial Sequence: Synthetic peptide
  Seed: MGMFNMLSTVL
MLMFNMLSTVG

SEQ ID NO: 157584 - protein, 11 aa, Artificial Sequence
  Description of Artificial Sequence: Synthetic peptide
  Seed: MGMFNMLSTVL
MLMFNMLSTVH

SEQ ID NO: 157585 - protein, 11 aa, Artificial Sequence
  Description of Artificial Sequence: Synthetic peptide
  Seed: MGMFNMLSTVL
MLMFNMLSTVI

SEQ ID NO: 157586 - protein, 11 aa, Artificial Sequence
  Description of Artificial Sequence: Synthetic peptide
  Seed: MGMFNMLSTVL
MLMFNMLSTVK

SEQ ID NO: 157587 - protein, 11 aa, Artificial Sequence
  Description of Artificial Sequence: Synthetic peptide
  Seed: MGMFNMLSTVL
MLMFNMLSTVL

SEQ ID NO: 157588 - protein, 11 aa, Artificial Sequence
  Description of Artificial Sequence: Synthetic peptide
  Seed: MGMFNMLSTVL
MLMFNMLSTVM

SEQ ID NO: 157589 - protein, 11 aa, Artificial Sequence
  Description of Artificial Sequence: Synthetic peptide
  Seed: MGMFNMLSTVL
MLMFNMLSTVN

SEQ ID NO: 157590 - protein, 11 aa, Artificial Sequence
  Description of Artificial Sequence: Synthetic peptide
  Seed: MGMFNMLSTVL
MLMFNMLSTVP

SEQ ID NO: 157591 - protein, 11 aa, Artificial Sequence
  Description of Artificial Sequence: Synthetic peptide
  Seed: MGMFNMLSTVL
MLMFNMLSTVQ

SEQ ID NO: 157592 - protein, 11 aa, Artificial Sequence
  Description of Artificial Sequence: Synthetic peptide
  Seed: MGMFNMLSTVL
MLMFNMLSTVR

SEQ ID NO: 157593 - protein, 11 aa, Artificial Sequence
  Description of Artificial Sequence: Synthetic peptide
  Seed: MGMFNMLSTVL
MLMFNMLSTVS

SEQ ID NO: 157594 - protein, 11 aa, Artificial Sequence
  Description of Artificial Sequence: Synthetic peptide
  Seed: MGMFNMLSTVL
MLMFNMLSTVT

SEQ ID NO: 157595 - protein, 11 aa, Artificial Sequence
  Description of Artificial Sequence: Synthetic peptide
  Seed: MGMFNMLSTVL
MLMFNMLSTVV

SEQ ID NO: 157596 - protein, 11 aa, Artificial Sequence
  Description of Artificial Sequence: Synthetic peptide
  Seed: MGMFNMLSTVL
MLMFNMLSTVW

SEQ ID NO: 157597 - protein, 11 aa, Artificial Sequence
  Description of Artificial Sequence: Synthetic peptide
  Seed: MGMFNMLSTVL
MLMFNMLSTVY

SEQ ID NO: 157598 - protein, 10 aa, Artificial Sequence
  Description of Artificial Sequence: Synthetic peptide
  Seed: MGMFNMLSTV
MLMFNMLSTW

SEQ ID NO: 157599 - protein, 10 aa, Artificial Sequence
  Description of Artificial Sequence: Synthetic peptide
  Seed: MGMFNMLSTV
MLMFNMLSTY

SEQ ID NO: 157600 - protein, 8 aa, Artificial Sequence
  Description of Artificial Sequence: Synthetic peptide
  Seed: MMMGMFNM
MLMGMFNA

SEQ ID NO: 157601 - protein, 8 aa, Artificial Sequence
  Description of Artificial Sequence: Synthetic peptide
  Seed: MMMGMFNM
MLMGMFNF

SEQ ID NO: 157602 - protein, 8 aa, Artificial Sequence
  Description of Artificial Sequence: Synthetic peptide
  Seed: MMMGMFNM
MLMGMFNI

SEQ ID NO: 157603 - protein, 8 aa, Artificial Sequence
  Description of Artificial Sequence: Synthetic peptide
  Seed: MMMGMFNM
MLMGMFNL

SEQ ID NO: 157604 - protein, 8 aa, Artificial Sequence
  Description of Artificial Sequence: Synthetic peptide
  Seed: MMMGMFNM
MLMGMFNM

SEQ ID NO: 157605 - protein, 9 aa, Artificial Sequence
  Description of Artificial Sequence: Synthetic peptide
  Seed: MMMGMFNML
MLMGMFNMA

SEQ ID NO: 157606 - protein, 9 aa, Artificial Sequence
  Description of Artificial Sequence: Synthetic peptide
  Seed: MMMGMFNML
MLMGMFNMC

SEQ ID NO: 157607 - protein, 9 aa, Artificial Sequence
  Description of Artificial Sequence: Synthetic peptide
  Seed: MMMGMFNML
MLMGMFNMF

SEQ ID NO: 157608 - protein, 9 aa, Artificial Sequence
  Description of Artificial Sequence: Synthetic peptide
  Seed: MMMGMFNML
MLMGMFNMG

SEQ ID NO: 157609 - protein, 9 aa, Artificial Sequence
  Description of Artificial Sequence: Synthetic peptide
  Seed: MMMGMFNML
MLMGMFNMH

SEQ ID NO: 157610 - protein, 9 aa, Artificial Sequence
  Description of Artificial Sequence: Synthetic peptide
  Seed: MMMGMFNML
MLMGMFNMI

SEQ ID NO: 157611 - protein, 9 aa, Artificial Sequence
  Description of Artificial Sequence: Synthetic peptide
  Seed: MMMGMFNML
MLMGMFNMK

SEQ ID NO: 157612 - protein, 9 aa, Artificial Sequence
  Description of Artificial Sequence: Synthetic peptide
  Seed: MMMGMFNML
MLMGMFNML

SEQ ID NO: 157613 - protein, 10 aa, Artificial Sequence
  Description of Artificial Sequence: Synthetic peptide
  Seed: MMMGMFNMLS
MLMGMFNMLA

SEQ ID NO: 157614 - protein, 10 aa, Artificial Sequence
  Description of Artificial Sequence: Synthetic peptide
  Seed: MMMGMFNMLS
MLMGMFNMLC

SEQ ID NO: 157615 - protein, 10 aa, Artificial Sequence
  Description of Artificial Sequence: Synthetic peptide
  Seed: MMMGMFNMLS
MLMGMFNMLD

SEQ ID NO: 157616 - protein, 10 aa, Artificial Sequence
  Description of Artificial Sequence: Synthetic peptide
  Seed: MMMGMFNMLS
MLMGMFNMLE

SEQ ID NO: 157617 - protein, 10 aa, Artificial Sequence
  Description of Artificial Sequence: Synthetic peptide
  Seed: MMMGMFNMLS
MLMGMFNMLF

SEQ ID NO: 157618 - protein, 10 aa, Artificial Sequence
  Description of Artificial Sequence: Synthetic peptide
  Seed: MMMGMFNMLS
MLMGMFNMLG

SEQ ID NO: 157619 - protein, 10 aa, Artificial Sequence
  Description of Artificial Sequence: Synthetic peptide
  Seed: MMMGMFNMLS
MLMGMFNMLH

SEQ ID NO: 157620 - protein, 10 aa, Artificial Sequence
  Description of Artificial Sequence: Synthetic peptide
  Seed: MMMGMFNMLS
MLMGMFNMLI

SEQ ID NO: 157621 - protein, 10 aa, Artificial Sequence
  Description of Artificial Sequence: Synthetic peptide
  Seed: MMMGMFNMLS
MLMGMFNMLK

SEQ ID NO: 157622 - protein, 10 aa, Artificial Sequence
  Description of Artificial Sequence: Synthetic peptide
  Seed: MMMGMFNMLS
MLMGMFNMLL

SEQ ID NO: 157623 - protein, 10 aa, Artificial Sequence
  Description of Artificial Sequence: Synthetic peptide
  Seed: MMMGMFNMLS
MLMGMFNMLM

SEQ ID NO: 157624 - protein, 10 aa, Artificial Sequence
  Description of Artificial Sequence: Synthetic peptide
  Seed: MMMGMFNMLS
MLMGMFNMLN

SEQ ID NO: 157625 - protein, 10 aa, Artificial Sequence
  Description of Artificial Sequence: Synthetic peptide
  Seed: MMMGMFNMLS
MLMGMFNMLP

SEQ ID NO: 157626 - protein, 10 aa, Artificial Sequence
  Description of Artificial Sequence: Synthetic peptide
  Seed: MMMGMFNMLS
MLMGMFNMLQ

SEQ ID NO: 157627 - protein, 10 aa, Artificial Sequence
  Description of Artificial Sequence: Synthetic peptide
  Seed: MMMGMFNMLS
MLMGMFNMLR

SEQ ID NO: 157628 - protein, 10 aa, Artificial Sequence
  Description of Artificial Sequence: Synthetic peptide
  Seed: MMMGMFNMLS
MLMGMFNMLS

SEQ ID NO: 157629 - protein, 11 aa, Artificial Sequence
  Description of Artificial Sequence: Synthetic peptide
  Seed: MMMGMFNMLST
MLMGMFNMLSA

SEQ ID NO: 157630 - protein, 11 aa, Artificial Sequence
  Description of Artificial Sequence: Synthetic peptide
  Seed: MMMGMFNMLST
MLMGMFNMLSC

SEQ ID NO: 157631 - protein, 11 aa, Artificial Sequence
  Description of Artificial Sequence: Synthetic peptide
  Seed: MMMGMFNMLST
MLMGMFNMLSF

SEQ ID NO: 157632 - protein, 11 aa, Artificial Sequence
  Description of Artificial Sequence: Synthetic peptide
  Seed: MMMGMFNMLST
MLMGMFNMLSI

SEQ ID NO: 157633 - protein, 11 aa, Artificial Sequence
  Description of Artificial Sequence: Synthetic peptide
  Seed: MMMGMFNMLST
MLMGMFNMLSL

SEQ ID NO: 157634 - protein, 11 aa, Artificial Sequence
  Description of Artificial Sequence: Synthetic peptide
  Seed: MMMGMFNMLST
MLMGMFNMLSM

SEQ ID NO: 157635 - protein, 11 aa, Artificial Sequence
  Description of Artificial Sequence: Synthetic peptide
  Seed: MMMGMFNMLST
MLMGMFNMLSP

SEQ ID NO: 157636 - protein, 11 aa, Artificial Sequence
  Description of Artificial Sequence: Synthetic peptide
  Seed: MMMGMFNMLST
MLMGMFNMLSS

SEQ ID NO: 157637 - protein, 11 aa, Artificial Sequence
  Description of Artificial Sequence: Synthetic peptide
  Seed: MMMGMFNMLST
MLMGMFNMLST

SEQ ID NO: 157638 - protein, 11 aa, Artificial Sequence
  Description of Artificial Sequence: Synthetic peptide
  Seed: MMMGMFNMLST
MLMGMFNMLSV

SEQ ID NO: 157639 - protein, 10 aa, Artificial Sequence
  Description of Artificial Sequence: Synthetic peptide
  Seed: MMMGMFNMLS
MLMGMFNMLT

SEQ ID NO: 157640 - protein, 10 aa, Artificial Sequence
  Description of Artificial Sequence: Synthetic peptide
  Seed: MMMGMFNMLS
MLMGMFNMLV

SEQ ID NO: 157641 - protein, 10 aa, Artificial Sequence
  Description of Artificial Sequence: Synthetic peptide
  Seed: MMMGMFNMLS
MLMGMFNMLW

SEQ ID NO: 157642 - protein, 10 aa, Artificial Sequence
  Description of Artificial Sequence: Synthetic peptide
  Seed: MMMGMFNMLS
MLMGMFNMLY

SEQ ID NO: 157643 - protein, 9 aa, Artificial Sequence
  Description of Artificial Sequence: Synthetic peptide
  Seed: MMMGMFNML
MLMGMFNMM

SEQ ID NO: 157644 - protein, 9 aa, Artificial Sequence
  Description of Artificial Sequence: Synthetic peptide
  Seed: MMMGMFNML
MLMGMFNMP

SEQ ID NO: 157645 - protein, 9 aa, Artificial Sequence
  Description of Artificial Sequence: Synthetic peptide
  Seed: MMMGMFNML
MLMGMFNMR

SEQ ID NO: 157646 - protein, 9 aa, Artificial Sequence
  Description of Artificial Sequence: Synthetic peptide
  Seed: MMMGMFNML
MLMGMFNMS

SEQ ID NO: 157647 - protein, 9 aa, Artificial Sequence
  Description of Artificial Sequence: Synthetic peptide
  Seed: MMMGMFNML
MLMGMFNMT

SEQ ID NO: 157648 - protein, 9 aa, Artificial Sequence
  Description of Artificial Sequence: Synthetic peptide
  Seed: MMMGMFNML
MLMGMFNMV

SEQ ID NO: 157649 - protein, 9 aa, Artificial Sequence
  Description of Artificial Sequence: Synthetic peptide
  Seed: MMMGMFNML
MLMGMFNMW

SEQ ID NO: 157650 - protein, 9 aa, Artificial Sequence
  Description of Artificial Sequence: Synthetic peptide
  Seed: MMMGMFNML
MLMGMFNMY

SEQ ID NO: 157651 - protein, 8 aa, Artificial Sequence
  Description of Artificial Sequence: Synthetic peptide
  Seed: MMMGMFNM
MLMGMFNT

SEQ ID NO: 157652 - protein, 8 aa, Artificial Sequence
  Description of Artificial Sequence: Synthetic peptide
  Seed: MMMGMFNM
MLMGMFNV

SEQ ID NO: 157653 - protein, 8 aa, Artificial Sequence
  Description of Artificial Sequence: Synthetic peptide
  Seed: MMMGMFNM
MLMGMFNY

SEQ ID NO: 157654 - protein, 8 aa, Artificial Sequence
  Description of Artificial Sequence: Synthetic peptide
  Seed: MFNMLSTV
MLNMLSTA

SEQ ID NO: 157655 - protein, 8 aa, Artificial Sequence
  Description of Artificial Sequence: Synthetic peptide
  Seed: MFNMLSTV
MLNMLSTI

SEQ ID NO: 157656 - protein, 8 aa, Artificial Sequence
  Description of Artificial Sequence: Synthetic peptide
  Seed: MFNMLSTV
MLNMLSTL

SEQ ID NO: 157657 - protein, 8 aa, Artificial Sequence
  Description of Artificial Sequence: Synthetic peptide
  Seed: MFNMLSTV
MLNMLSTV

SEQ ID NO: 157658 - protein, 9 aa, Artificial Sequence
  Description of Artificial Sequence: Synthetic peptide
  Seed: MFNMLSTVL
MLNMLSTVA

SEQ ID NO: 157659 - protein, 9 aa, Artificial Sequence
  Description of Artificial Sequence: Synthetic peptide
  Seed: MFNMLSTVL
MLNMLSTVF

SEQ ID NO: 157660 - protein, 9 aa, Artificial Sequence
  Description of Artificial Sequence: Synthetic peptide
  Seed: MFNMLSTVL
MLNMLSTVG

SEQ ID NO: 157661 - protein, 9 aa, Artificial Sequence
  Description of Artificial Sequence: Synthetic peptide
  Seed: MFNMLSTVL
MLNMLSTVH

SEQ ID NO: 157662 - protein, 9 aa, Artificial Sequence
  Description of Artificial Sequence: Synthetic peptide
  Seed: MFNMLSTVL
MLNMLSTVI

SEQ ID NO: 157663 - protein, 9 aa, Artificial Sequence
  Description of Artificial Sequence: Synthetic peptide
  Seed: MFNMLSTVL
MLNMLSTVL

SEQ ID NO: 157664 - protein, 11 aa, Artificial Sequence
  Description of Artificial Sequence: Synthetic peptide
  Seed: MFNMLSTVLGV
MLNMLSTVLGA

SEQ ID NO: 157665 - protein, 11 aa, Artificial Sequence
  Description of Artificial Sequence: Synthetic peptide
  Seed: MFNMLSTVLGV
MLNMLSTVLGI

SEQ ID NO: 157666 - protein, 11 aa, Artificial Sequence
  Description of Artificial Sequence: Synthetic peptide
  Seed: MFNMLSTVLGV
MLNMLSTVLGL

SEQ ID NO: 157667 - protein, 11 aa, Artificial Sequence
  Description of Artificial Sequence: Synthetic peptide
  Seed: MFNMLSTVLGV
MLNMLSTVLGM

SEQ ID NO: 157668 - protein, 11 aa, Artificial Sequence
  Description of Artificial Sequence: Synthetic peptide
  Seed: MFNMLSTVLGV
MLNMLSTVLGT

SEQ ID NO: 157669 - protein, 11 aa, Artificial Sequence
  Description of Artificial Sequence: Synthetic peptide
  Seed: MFNMLSTVLGV
MLNMLSTVLGV

SEQ ID NO: 157670 - protein, 9 aa, Artificial Sequence
  Description of Artificial Sequence: Synthetic peptide
  Seed: MFNMLSTVL
MLNMLSTVM

SEQ ID NO: 157671 - protein, 9 aa, Artificial Sequence
  Description of Artificial Sequence: Synthetic peptide
  Seed: MFNMLSTVL
MLNMLSTVV

SEQ ID NO: 157672 - protein, 9 aa, Artificial Sequence
  Description of Artificial Sequence: Synthetic peptide
  Seed: MFNMLSTVL
MLNMLSTVW

SEQ ID NO: 157673 - protein, 9 aa, Artificial Sequence
  Description of Artificial Sequence: Synthetic peptide
  Seed: MFNMLSTVL
MLNMLSTVY

SEQ ID NO: 157674 - protein, 9 aa, Artificial Sequence
  Description of Artificial Sequence: Synthetic peptide
  Seed: MARLGKGYM
MLRLGKGYA

SEQ ID NO: 157675 - protein, 9 aa, Artificial Sequence
  Description of Artificial Sequence: Synthetic peptide
  Seed: MARLGKGYM
MLRLGKGYF

SEQ ID NO: 157676 - protein, 9 aa, Artificial Sequence
  Description of Artificial Sequence: Synthetic peptide
  Seed: MARLGKGYM
MLRLGKGYG

SEQ ID NO: 157677 - protein, 9 aa, Artificial Sequence
  Description of Artificial Sequence: Synthetic peptide
  Seed: MARLGKGYM
MLRLGKGYI

SEQ ID NO: 157678 - protein, 9 aa, Artificial Sequence
  Description of Artificial Sequence: Synthetic peptide
  Seed: MARLGKGYM
MLRLGKGYK

SEQ ID NO: 157679 - protein, 9 aa, Artificial Sequence
  Description of Artificial Sequence: Synthetic peptide
  Seed: MARLGKGYM
MLRLGKGYL

SEQ ID NO: 157680 - protein, 9 aa, Artificial Sequence
  Description of Artificial Sequence: Synthetic peptide
  Seed: MARLGKGYM
MLRLGKGYM

SEQ ID NO: 157681 - protein, 10 aa, Artificial Sequence
  Description of Artificial Sequence: Synthetic peptide
  Seed: MARLGKGYMF
MLRLGKGYMA

SEQ ID NO: 157682 - protein, 10 aa, Artificial Sequence
  Description of Artificial Sequence: Synthetic peptide
  Seed: MARLGKGYMF
MLRLGKGYMF

SEQ ID NO: 157683 - protein, 10 aa, Artificial Sequence
  Description of Artificial Sequence: Synthetic peptide
  Seed: MARLGKGYMF
MLRLGKGYMI

SEQ ID NO: 157684 - protein, 10 aa, Artificial Sequence
  Description of Artificial Sequence: Synthetic peptide
  Seed: MARLGKGYMF
MLRLGKGYMK

SEQ ID NO: 157685 - protein, 10 aa, Artificial Sequence
  Description of Artificial Sequence: Synthetic peptide
  Seed: MARLGKGYMF
MLRLGKGYML

SEQ ID NO: 157686 - protein, 10 aa, Artificial Sequence
  Description of Artificial Sequence: Synthetic peptide
  Seed: MARLGKGYMF
MLRLGKGYMM

SEQ ID NO: 157687 - protein, 10 aa, Artificial Sequence
  Description of Artificial Sequence: Synthetic peptide
  Seed: MARLGKGYMF
MLRLGKGYMR

SEQ ID NO: 157688 - protein, 10 aa, Artificial Sequence
  Description of Artificial Sequence: Synthetic peptide
  Seed: MARLGKGYMF
MLRLGKGYMV

SEQ ID NO: 157689 - protein, 10 aa, Artificial Sequence
  Description of Artificial Sequence: Synthetic peptide
  Seed: MARLGKGYMF
MLRLGKGYMW

SEQ ID NO: 157690 - protein, 10 aa, Artificial Sequence
  Description of Artificial Sequence: Synthetic peptide
  Seed: MARLGKGYMF
MLRLGKGYMY

SEQ ID NO: 157691 - protein, 9 aa, Artificial Sequence
  Description of Artificial Sequence: Synthetic peptide
  Seed: MARLGKGYM
MLRLGKGYV

SEQ ID NO: 157692 - protein, 9 aa, Artificial Sequence
  Description of Artificial Sequence: Synthetic peptide
  Seed: MARLGKGYM
MLRLGKGYW

SEQ ID NO: 157693 - protein, 9 aa, Artificial Sequence
  Description of Artificial Sequence: Synthetic peptide
  Seed: MARLGKGYM
MLRLGKGYY

SEQ ID NO: 157694 - protein, 8 aa, Artificial Sequence
  Description of Artificial Sequence: Synthetic peptide
  Seed: MFSNKMAR
MLSNKMAR

SEQ ID NO: 157695 - protein, 11 aa, Artificial Sequence
  Description of Artificial Sequence: Synthetic peptide
  Seed: MFSNKMARLGK
MLSNKMARLGR

SEQ ID NO: 157696 - protein, 8 aa, Artificial Sequence
  Description of Artificial Sequence: Synthetic peptide
  Seed: MLSTVLGV
MLSTVLGA

SEQ ID NO: 157697 - protein, 8 aa, Artificial Sequence
  Description of Artificial Sequence: Synthetic peptide
  Seed: MLSTVLGV
MLSTVLGI

SEQ ID NO: 157698 - protein, 8 aa, Artificial Sequence
  Description of Artificial Sequence: Synthetic peptide
  Seed: MLSTVLGV
MLSTVLGL

SEQ ID NO: 157699 - protein, 9 aa, Artificial Sequence
  Description of Artificial Sequence: Synthetic peptide
  Seed: MLSTVLGVS
MLSTVLGVA

SEQ ID NO: 157700 - protein, 9 aa, Artificial Sequence
  Description of Artificial Sequence: Synthetic peptide
  Seed: MLSTVLGVS
MLSTVLGVC

SEQ ID NO: 157701 - protein, 9 aa, Artificial Sequence
  Description of Artificial Sequence: Synthetic peptide
  Seed: MLSTVLGVS
MLSTVLGVF

SEQ ID NO: 157702 - protein, 9 aa, Artificial Sequence
  Description of Artificial Sequence: Synthetic peptide
  Seed: MLSTVLGVS
MLSTVLGVG

SEQ ID NO: 157703 - protein, 9 aa, Artificial Sequence
  Description of Artificial Sequence: Synthetic peptide
  Seed: MLSTVLGVS
MLSTVLGVI

SEQ ID NO: 157704 - protein, 9 aa, Artificial Sequence
  Description of Artificial Sequence: Synthetic peptide
  Seed: MLSTVLGVS
MLSTVLGVL

SEQ ID NO: 157705 - protein, 9 aa, Artificial Sequence
  Description of Artificial Sequence: Synthetic peptide
  Seed: MLSTVLGVS
MLSTVLGVM

SEQ ID NO: 157706 - protein, 9 aa, Artificial Sequence
  Description of Artificial Sequence: Synthetic peptide
  Seed: MLSTVLGVS
MLSTVLGVP

SEQ ID NO: 157707 - protein, 10 aa, Artificial Sequence
  Description of Artificial Sequence: Synthetic peptide
  Seed: MLSTVLGVSI
MLSTVLGVSA

SEQ ID NO: 157708 - protein, 10 aa, Artificial Sequence
  Description of Artificial Sequence: Synthetic peptide
  Seed: MLSTVLGVSI
MLSTVLGVSC

SEQ ID NO: 157709 - protein, 10 aa, Artificial Sequence
  Description of Artificial Sequence: Synthetic peptide
  Seed: MLSTVLGVSI
MLSTVLGVSF

SEQ ID NO: 157710 - protein, 10 aa, Artificial Sequence
  Description of Artificial Sequence: Synthetic peptide
  Seed: MLSTVLGVSI
MLSTVLGVSG

SEQ ID NO: 157711 - protein, 11 aa, Artificial Sequence
  Description of Artificial Sequence: Synthetic peptide
  Seed: MLSTVLGVSIL
MLSTVLGVSIA

SEQ ID NO: 157712 - protein, 11 aa, Artificial Sequence
  Description of Artificial Sequence: Synthetic peptide
  Seed: MLSTVLGVSIL
MLSTVLGVSIC

SEQ ID NO: 157713 - protein, 11 aa, Artificial Sequence
  Description of Artificial Sequence: Synthetic peptide
  Seed: MLSTVLGVSIL
MLSTVLGVSID

SEQ ID NO: 157714 - protein, 11 aa, Artificial Sequence
  Description of Artificial Sequence: Synthetic peptide
  Seed: MLSTVLGVSIL
MLSTVLGVSIE

SEQ ID NO: 157715 - protein, 11 aa, Artificial Sequence
  Description of Artificial Sequence: Synthetic peptide
  Seed: MLSTVLGVSIL
MLSTVLGVSIF

SEQ ID NO: 157716 - protein, 11 aa, Artificial Sequence
  Description of Artificial Sequence: Synthetic peptide
  Seed: MLSTVLGVSIL
MLSTVLGVSIG

SEQ ID NO: 157717 - protein, 11 aa, Artificial Sequence
  Description of Artificial Sequence: Synthetic peptide
  Seed: MLSTVLGVSIL
MLSTVLGVSIH

SEQ ID NO: 157718 - protein, 11 aa, Artificial Sequence
  Description of Artificial Sequence: Synthetic peptide
  Seed: MLSTVLGVSIL
MLSTVLGVSII

SEQ ID NO: 157719 - protein, 11 aa, Artificial Sequence
  Description of Artificial Sequence: Synthetic peptide
  Seed: MLSTVLGVSIL
MLSTVLGVSIK

SEQ ID NO: 157720 - protein, 11 aa, Artificial Sequence
  Description of Artificial Sequence: Synthetic peptide
  Seed: MLSTVLGVSIL
MLSTVLGVSIM

SEQ ID NO: 157721 - protein, 11 aa, Artificial Sequence
  Description of Artificial Sequence: Synthetic peptide
  Seed: MLSTVLGVSIL
MLSTVLGVSIN

SEQ ID NO: 157722 - protein, 11 aa, Artificial Sequence
  Description of Artificial Sequence: Synthetic peptide
  Seed: MLSTVLGVSIL
MLSTVLGVSIP

SEQ ID NO: 157723 - protein, 11 aa, Artificial Sequence
  Description of Artificial Sequence: Synthetic peptide
  Seed: MLSTVLGVSIL
MLSTVLGVSIQ

SEQ ID NO: 157724 - protein, 11 aa, Artificial Sequence
  Description of Artificial Sequence: Synthetic peptide
  Seed: MLSTVLGVSIL
MLSTVLGVSIR

SEQ ID NO: 157725 - protein, 11 aa, Artificial Sequence
  Description of Artificial Sequence: Synthetic peptide
  Seed: MLSTVLGVSIL
MLSTVLGVSIS

SEQ ID NO: 157726 - protein, 11 aa, Artificial Sequence
  Description of Artificial Sequence: Synthetic peptide
  Seed: MLSTVLGVSIL
MLSTVLGVSIT

SEQ ID NO: 157727 - protein, 11 aa, Artificial Sequence
  Description of Artificial Sequence: Synthetic peptide
  Seed: MLSTVLGVSIL
MLSTVLGVSIV

SEQ ID NO: 157728 - protein, 11 aa, Artificial Sequence
  Description of Artificial Sequence: Synthetic peptide
  Seed: MLSTVLGVSIL
MLSTVLGVSIW

SEQ ID NO: 157729 - protein, 11 aa, Artificial Sequence
  Description of Artificial Sequence: Synthetic peptide
  Seed: MLSTVLGVSIL
MLSTVLGVSIY

SEQ ID NO: 157730 - protein, 10 aa, Artificial Sequence
  Description of Artificial Sequence: Synthetic peptide
  Seed: MLSTVLGVSI
MLSTVLGVSL

SEQ ID NO: 157731 - protein, 10 aa, Artificial Sequence
  Description of Artificial Sequence: Synthetic peptide
  Seed: MLSTVLGVSI
MLSTVLGVSM

SEQ ID NO: 157732 - protein, 10 aa, Artificial Sequence
  Description of Artificial Sequence: Synthetic peptide
  Seed: MLSTVLGVSI
MLSTVLGVSP

SEQ ID NO: 157733 - protein, 10 aa, Artificial Sequence
  Description of Artificial Sequence: Synthetic peptide
  Seed: MLSTVLGVSI
MLSTVLGVSS

SEQ ID NO: 157734 - protein, 10 aa, Artificial Sequence
  Description of Artificial Sequence: Synthetic peptide
  Seed: MLSTVLGVSI
MLSTVLGVST

SEQ ID NO: 157735 - protein, 10 aa, Artificial Sequence
  Description of Artificial Sequence: Synthetic peptide
  Seed: MLSTVLGVSI
MLSTVLGVSV

SEQ ID NO: 157736 - protein, 10 aa, Artificial Sequence
  Description of Artificial Sequence: Synthetic peptide
  Seed: MLSTVLGVSI
MLSTVLGVSW

SEQ ID NO: 157737 - protein, 10 aa, Artificial Sequence
  Description of Artificial Sequence: Synthetic peptide
  Seed: MLSTVLGVSI
MLSTVLGVSY

SEQ ID NO: 157738 - protein, 9 aa, Artificial Sequence
  Description of Artificial Sequence: Synthetic peptide
  Seed: MLSTVLGVS
MLSTVLGVT

SEQ ID NO: 157739 - protein, 9 aa, Artificial Sequence
  Description of Artificial Sequence: Synthetic peptide
  Seed: MLSTVLGVS
MLSTVLGVV

SEQ ID NO: 157740 - protein, 8 aa, Artificial Sequence
  Description of Artificial Sequence: Synthetic peptide
  Seed: MMGMFNML
MMGMFNMI

SEQ ID NO: 157741 - protein, 9 aa, Artificial Sequence
  Description of Artificial Sequence: Synthetic peptide
  Seed: MMGMFNMLS
MMGMFNMLA

SEQ ID NO: 157742 - protein, 9 aa, Artificial Sequence
  Description of Artificial Sequence: Synthetic peptide
  Seed: MMGMFNMLS
MMGMFNMLC

SEQ ID NO: 157743 - protein, 9 aa, Artificial Sequence
  Description of Artificial Sequence: Synthetic peptide
  Seed: MMGMFNMLS
MMGMFNMLF

SEQ ID NO: 157744 - protein, 9 aa, Artificial Sequence
  Description of Artificial Sequence: Synthetic peptide
  Seed: MMGMFNMLS
MMGMFNMLG

SEQ ID NO: 157745 - protein, 9 aa, Artificial Sequence
  Description of Artificial Sequence: Synthetic peptide
  Seed: MMGMFNMLS
MMGMFNMLI

SEQ ID NO: 157746 - protein, 9 aa, Artificial Sequence
  Description of Artificial Sequence: Synthetic peptide
  Seed: MMGMFNMLS
MMGMFNMLL

SEQ ID NO: 157747 - protein, 9 aa, Artificial Sequence
  Description of Artificial Sequence: Synthetic peptide
  Seed: MMGMFNMLS
MMGMFNMLM

SEQ ID NO: 157748 - protein, 9 aa, Artificial Sequence
  Description of Artificial Sequence: Synthetic peptide
  Seed: MMGMFNMLS
MMGMFNMLP

SEQ ID NO: 157749 - protein, 10 aa, Artificial Sequence
  Description of Artificial Sequence: Synthetic peptide
  Seed: MMGMFNMLST
MMGMFNMLSA

SEQ ID NO: 157750 - protein, 10 aa, Artificial Sequence
  Description of Artificial Sequence: Synthetic peptide
  Seed: MMGMFNMLST
MMGMFNMLSC

SEQ ID NO: 157751 - protein, 10 aa, Artificial Sequence
  Description of Artificial Sequence: Synthetic peptide
  Seed: MMGMFNMLST
MMGMFNMLSF

SEQ ID NO: 157752 - protein, 10 aa, Artificial Sequence
  Description of Artificial Sequence: Synthetic peptide
  Seed: MMGMFNMLST
MMGMFNMLSG

SEQ ID NO: 157753 - protein, 10 aa, Artificial Sequence
  Description of Artificial Sequence: Synthetic peptide
  Seed: MMGMFNMLST
MMGMFNMLSI

SEQ ID NO: 157754 - protein, 10 aa, Artificial Sequence
  Description of Artificial Sequence: Synthetic peptide
  Seed: MMGMFNMLST
MMGMFNMLSL

SEQ ID NO: 157755 - protein, 10 aa, Artificial Sequence
  Description of Artificial Sequence: Synthetic peptide
  Seed: MMGMFNMLST
MMGMFNMLSM

SEQ ID NO: 157756 - protein, 10 aa, Artificial Sequence
  Description of Artificial Sequence: Synthetic peptide
  Seed: MMGMFNMLST
MMGMFNMLSP

SEQ ID NO: 157757 - protein, 10 aa, Artificial Sequence
  Description of Artificial Sequence: Synthetic peptide
  Seed: MMGMFNMLST
MMGMFNMLSS

SEQ ID NO: 157758 - protein, 11 aa, Artificial Sequence
  Description of Artificial Sequence: Synthetic peptide
  Seed: MMGMFNMLSTV
MMGMFNMLSTA

SEQ ID NO: 157759 - protein, 11 aa, Artificial Sequence
  Description of Artificial Sequence: Synthetic peptide
  Seed: MMGMFNMLSTV
MMGMFNMLSTI

SEQ ID NO: 157760 - protein, 11 aa, Artificial Sequence
  Description of Artificial Sequence: Synthetic peptide
  Seed: MMGMFNMLSTV
MMGMFNMLSTL

SEQ ID NO: 157761 - protein, 11 aa, Artificial Sequence
  Description of Artificial Sequence: Synthetic peptide
  Seed: MMGMFNMLSTV
MMGMFNMLSTM

SEQ ID NO: 157762 - protein, 11 aa, Artificial Sequence
  Description of Artificial Sequence: Synthetic peptide
  Seed: MMGMFNMLSTV
MMGMFNMLSTT

SEQ ID NO: 157763 - protein, 10 aa, Artificial Sequence
  Description of Artificial Sequence: Synthetic peptide
  Seed: MMGMFNMLST
MMGMFNMLSV

SEQ ID NO: 157764 - protein, 9 aa, Artificial Sequence
  Description of Artificial Sequence: Synthetic peptide
  Seed: MMGMFNMLS
MMGMFNMLT

SEQ ID NO: 157765 - protein, 9 aa, Artificial Sequence
  Description of Artificial Sequence: Synthetic peptide
  Seed: MMGMFNMLS
MMGMFNMLV

SEQ ID NO: 157766 - protein, 8 aa, Artificial Sequence
  Description of Artificial Sequence: Synthetic peptide
  Seed: MMGMFNML
MMGMFNMV

SEQ ID NO: 157767 - protein, 9 aa, Artificial Sequence
  Description of Artificial Sequence: Synthetic peptide
  Seed: MSIGVTVIK
MMIGVTVIH

SEQ ID NO: 157768 - protein, 10 aa, Artificial Sequence
  Description of Artificial Sequence: Synthetic peptide
  Seed: MSIGVTVIKN
MMIGVTVIKK

SEQ ID NO: 157769 - protein, 10 aa, Artificial Sequence
  Description of Artificial Sequence: Synthetic peptide
  Seed: MSIGVTVIKN
MMIGVTVIKR

SEQ ID NO: 157770 - protein, 10 aa, Artificial Sequence
  Description of Artificial Sequence: Synthetic peptide
  Seed: MSIGVTVIKN
MMIGVTVIKY

SEQ ID NO: 157771 - protein, 9 aa, Artificial Sequence
  Description of Artificial Sequence: Synthetic peptide
  Seed: MSIGVTVIK
MMIGVTVIL

SEQ ID NO: 157772 - protein, 9 aa, Artificial Sequence
  Description of Artificial Sequence: Synthetic peptide
  Seed: MSIGVTVIK
MMIGVTVIM

SEQ ID NO: 157773 - protein, 9 aa, Artificial Sequence
  Description of Artificial Sequence: Synthetic peptide
  Seed: MSIGVTVIK
MMIGVTVIR

SEQ ID NO: 157774 - protein, 9 aa, Artificial Sequence
  Description of Artificial Sequence: Synthetic peptide
  Seed: MSIGVTVIK
MMIGVTVIV

SEQ ID NO: 157775 - protein, 9 aa, Artificial Sequence
  Description of Artificial Sequence: Synthetic peptide
  Seed: MSIGVTVIK
MMIGVTVIY

SEQ ID NO: 157776 - protein, 8 aa, Artificial Sequence
  Description of Artificial Sequence: Synthetic peptide
  Seed: MSIGVTVI
MMIGVTVW

SEQ ID NO: 157777 - protein, 9 aa, Artificial Sequence
  Description of Artificial Sequence: Synthetic peptide
  Seed: MTKDAERGK
MMKDAERGK

SEQ ID NO: 157778 - protein, 9 aa, Artificial Sequence
  Description of Artificial Sequence: Synthetic peptide
  Seed: MTKDAERGK
MMKDAERGR

SEQ ID NO: 157779 - protein, 10 aa, Artificial Sequence
  Description of Artificial Sequence: Synthetic peptide
  Seed: MGMFNMLSTV
MMMFNMLSTA

SEQ ID NO: 157780 - protein, 10 aa, Artificial Sequence
  Description of Artificial Sequence: Synthetic peptide
  Seed: MGMFNMLSTV
MMMFNMLSTC

SEQ ID NO: 157781 - protein, 10 aa, Artificial Sequence
  Description of Artificial Sequence: Synthetic peptide
  Seed: MGMFNMLSTV
MMMFNMLSTD

SEQ ID NO: 157782 - protein, 10 aa, Artificial Sequence
  Description of Artificial Sequence: Synthetic peptide
  Seed: MGMFNMLSTV
MMMFNMLSTE

SEQ ID NO: 157783 - protein, 10 aa, Artificial Sequence
  Description of Artificial Sequence: Synthetic peptide
  Seed: MGMFNMLSTV
MMMFNMLSTF

SEQ ID NO: 157784 - protein, 10 aa, Artificial Sequence
  Description of Artificial Sequence: Synthetic peptide
  Seed: MGMFNMLSTV
MMMFNMLSTG

SEQ ID NO: 157785 - protein, 10 aa, Artificial Sequence
  Description of Artificial Sequence: Synthetic peptide
  Seed: MGMFNMLSTV
MMMFNMLSTH

SEQ ID NO: 157786 - protein, 10 aa, Artificial Sequence
  Description of Artificial Sequence: Synthetic peptide
  Seed: MGMFNMLSTV
MMMFNMLSTI

SEQ ID NO: 157787 - protein, 10 aa, Artificial Sequence
  Description of Artificial Sequence: Synthetic peptide
  Seed: MGMFNMLSTV
MMMFNMLSTL

SEQ ID NO: 157788 - protein, 10 aa, Artificial Sequence
  Description of Artificial Sequence: Synthetic peptide
  Seed: MGMFNMLSTV
MMMFNMLSTM

SEQ ID NO: 157789 - protein, 10 aa, Artificial Sequence
  Description of Artificial Sequence: Synthetic peptide
  Seed: MGMFNMLSTV
MMMFNMLSTP

SEQ ID NO: 157790 - protein, 10 aa, Artificial Sequence
  Description of Artificial Sequence: Synthetic peptide
  Seed: MGMFNMLSTV
MMMFNMLSTR

SEQ ID NO: 157791 - protein, 10 aa, Artificial Sequence
  Description of Artificial Sequence: Synthetic peptide
  Seed: MGMFNMLSTV
MMMFNMLSTS

SEQ ID NO: 157792 - protein, 10 aa, Artificial Sequence
  Description of Artificial Sequence: Synthetic peptide
  Seed: MGMFNMLSTV
MMMFNMLSTT

SEQ ID NO: 157793 - protein, 10 aa, Artificial Sequence
  Description of Artificial Sequence: Synthetic peptide
  Seed: MGMFNMLSTV
MMMFNMLSTV

SEQ ID NO: 157794 - protein, 11 aa, Artificial Sequence
  Description of Artificial Sequence: Synthetic peptide
  Seed: MGMFNMLSTVL
MMMFNMLSTVA

SEQ ID NO: 157795 - protein, 11 aa, Artificial Sequence
  Description of Artificial Sequence: Synthetic peptide
  Seed: MGMFNMLSTVL
MMMFNMLSTVC

SEQ ID NO: 157796 - protein, 11 aa, Artificial Sequence
  Description of Artificial Sequence: Synthetic peptide
  Seed: MGMFNMLSTVL
MMMFNMLSTVD

SEQ ID NO: 157797 - protein, 11 aa, Artificial Sequence
  Description of Artificial Sequence: Synthetic peptide
  Seed: MGMFNMLSTVL
MMMFNMLSTVE

SEQ ID NO: 157798 - protein, 11 aa, Artificial Sequence
  Description of Artificial Sequence: Synthetic peptide
  Seed: MGMFNMLSTVL
MMMFNMLSTVF

SEQ ID NO: 157799 - protein, 11 aa, Artificial Sequence
  Description of Artificial Sequence: Synthetic peptide
  Seed: MGMFNMLSTVL
MMMFNMLSTVG

SEQ ID NO: 157800 - protein, 11 aa, Artificial Sequence
  Description of Artificial Sequence: Synthetic peptide
  Seed: MGMFNMLSTVL
MMMFNMLSTVH

SEQ ID NO: 157801 - protein, 11 aa, Artificial Sequence
  Description of Artificial Sequence: Synthetic peptide
  Seed: MGMFNMLSTVL
MMMFNMLSTVI

SEQ ID NO: 157802 - protein, 11 aa, Artificial Sequence
  Description of Artificial Sequence: Synthetic peptide
  Seed: MGMFNMLSTVL
MMMFNMLSTVK

SEQ ID NO: 157803 - protein, 11 aa, Artificial Sequence
  Description of Artificial Sequence: Synthetic peptide
  Seed: MGMFNMLSTVL
MMMFNMLSTVL

SEQ ID NO: 157804 - protein, 11 aa, Artificial Sequence
  Description of Artificial Sequence: Synthetic peptide
  Seed: MGMFNMLSTVL
MMMFNMLSTVM

SEQ ID NO: 157805 - protein, 11 aa, Artificial Sequence
  Description of Artificial Sequence: Synthetic peptide
  Seed: MGMFNMLSTVL
MMMFNMLSTVN

SEQ ID NO: 157806 - protein, 11 aa, Artificial Sequence
  Description of Artificial Sequence: Synthetic peptide
  Seed: MGMFNMLSTVL
MMMFNMLSTVP

SEQ ID NO: 157807 - protein, 11 aa, Artificial Sequence
  Description of Artificial Sequence: Synthetic peptide
  Seed: MGMFNMLSTVL
MMMFNMLSTVQ

SEQ ID NO: 157808 - protein, 11 aa, Artificial Sequence
  Description of Artificial Sequence: Synthetic peptide
  Seed: MGMFNMLSTVL
MMMFNMLSTVR

SEQ ID NO: 157809 - protein, 11 aa, Artificial Sequence
  Description of Artificial Sequence: Synthetic peptide
  Seed: MGMFNMLSTVL
MMMFNMLSTVS

SEQ ID NO: 157810 - protein, 11 aa, Artificial Sequence
  Description of Artificial Sequence: Synthetic peptide
  Seed: MGMFNMLSTVL
MMMFNMLSTVT

SEQ ID NO: 157811 - protein, 11 aa, Artificial Sequence
  Description of Artificial Sequence: Synthetic peptide
  Seed: MGMFNMLSTVL
MMMFNMLSTVV

SEQ ID NO: 157812 - protein, 11 aa, Artificial Sequence
  Description of Artificial Sequence: Synthetic peptide
  Seed: MGMFNMLSTVL
MMMFNMLSTVW

SEQ ID NO: 157813 - protein, 11 aa, Artificial Sequence
  Description of Artificial Sequence: Synthetic peptide
  Seed: MGMFNMLSTVL
MMMFNMLSTVY

SEQ ID NO: 157814 - protein, 10 aa, Artificial Sequence
  Description of Artificial Sequence: Synthetic peptide
  Seed: MGMFNMLSTV
MMMFNMLSTW

SEQ ID NO: 157815 - protein, 10 aa, Artificial Sequence
  Description of Artificial Sequence: Synthetic peptide
  Seed: MGMFNMLSTV
MMMFNMLSTY

SEQ ID NO: 157816 - protein, 8 aa, Artificial Sequence
  Description of Artificial Sequence: Synthetic peptide
  Seed: MMMGMFNM
MMMGMFNA

SEQ ID NO: 157817 - protein, 8 aa, Artificial Sequence
  Description of Artificial Sequence: Synthetic peptide
  Seed: MMMGMFNM
MMMGMFNF

SEQ ID NO: 157818 - protein, 8 aa, Artificial Sequence
  Description of Artificial Sequence: Synthetic peptide
  Seed: MMMGMFNM
MMMGMFNI

SEQ ID NO: 157819 - protein, 8 aa, Artificial Sequence
  Description of Artificial Sequence: Synthetic peptide
  Seed: MMMGMFNM
MMMGMFNL

SEQ ID NO: 157820 - protein, 9 aa, Artificial Sequence
  Description of Artificial Sequence: Synthetic peptide
  Seed: MMMGMFNML
MMMGMFNMA

SEQ ID NO: 157821 - protein, 9 aa, Artificial Sequence
  Description of Artificial Sequence: Synthetic peptide
  Seed: MMMGMFNML
MMMGMFNMC

SEQ ID NO: 157822 - protein, 9 aa, Artificial Sequence
  Description of Artificial Sequence: Synthetic peptide
  Seed: MMMGMFNML
MMMGMFNMF

SEQ ID NO: 157823 - protein, 9 aa, Artificial Sequence
  Description of Artificial Sequence: Synthetic peptide
  Seed: MMMGMFNML
MMMGMFNMG

SEQ ID NO: 157824 - protein, 9 aa, Artificial Sequence
  Description of Artificial Sequence: Synthetic peptide
  Seed: MMMGMFNML
MMMGMFNMH

SEQ ID NO: 157825 - protein, 9 aa, Artificial Sequence
  Description of Artificial Sequence: Synthetic peptide
  Seed: MMMGMFNML
MMMGMFNMI

SEQ ID NO: 157826 - protein, 9 aa, Artificial Sequence
  Description of Artificial Sequence: Synthetic peptide
  Seed: MMMGMFNML
MMMGMFNMK

SEQ ID NO: 157827 - protein, 10 aa, Artificial Sequence
  Description of Artificial Sequence: Synthetic peptide
  Seed: MMMGMFNMLS
MMMGMFNMLA

SEQ ID NO: 157828 - protein, 10 aa, Artificial Sequence
  Description of Artificial Sequence: Synthetic peptide
  Seed: MMMGMFNMLS
MMMGMFNMLC

SEQ ID NO: 157829 - protein, 10 aa, Artificial Sequence
  Description of Artificial Sequence: Synthetic peptide
  Seed: MMMGMFNMLS
MMMGMFNMLD

SEQ ID NO: 157830 - protein, 10 aa, Artificial Sequence
  Description of Artificial Sequence: Synthetic peptide
  Seed: MMMGMFNMLS
MMMGMFNMLE

SEQ ID NO: 157831 - protein, 10 aa, Artificial Sequence
  Description of Artificial Sequence: Synthetic peptide
  Seed: MMMGMFNMLS
MMMGMFNMLF

SEQ ID NO: 157832 - protein, 10 aa, Artificial Sequence
  Description of Artificial Sequence: Synthetic peptide
  Seed: MMMGMFNMLS
MMMGMFNMLG

SEQ ID NO: 157833 - protein, 10 aa, Artificial Sequence
  Description of Artificial Sequence: Synthetic peptide
  Seed: MMMGMFNMLS
MMMGMFNMLH

SEQ ID NO: 157834 - protein, 10 aa, Artificial Sequence
  Description of Artificial Sequence: Synthetic peptide
  Seed: MMMGMFNMLS
MMMGMFNMLI

SEQ ID NO: 157835 - protein, 10 aa, Artificial Sequence
  Description of Artificial Sequence: Synthetic peptide
  Seed: MMMGMFNMLS
MMMGMFNMLK

SEQ ID NO: 157836 - protein, 10 aa, Artificial Sequence
  Description of Artificial Sequence: Synthetic peptide
  Seed: MMMGMFNMLS
MMMGMFNMLL

SEQ ID NO: 157837 - protein, 10 aa, Artificial Sequence
  Description of Artificial Sequence: Synthetic peptide
  Seed: MMMGMFNMLS
MMMGMFNMLM

SEQ ID NO: 157838 - protein, 10 aa, Artificial Sequence
  Description of Artificial Sequence: Synthetic peptide
  Seed: MMMGMFNMLS
MMMGMFNMLN

SEQ ID NO: 157839 - protein, 10 aa, Artificial Sequence
  Description of Artificial Sequence: Synthetic peptide
  Seed: MMMGMFNMLS
MMMGMFNMLP

SEQ ID NO: 157840 - protein, 10 aa, Artificial Sequence
  Description of Artificial Sequence: Synthetic peptide
  Seed: MMMGMFNMLS
MMMGMFNMLQ

SEQ ID NO: 157841 - protein, 10 aa, Artificial Sequence
  Description of Artificial Sequence: Synthetic peptide
  Seed: MMMGMFNMLS
MMMGMFNMLR

SEQ ID NO: 157842 - protein, 11 aa, Artificial Sequence
  Description of Artificial Sequence: Synthetic peptide
  Seed: MMMGMFNMLST
MMMGMFNMLSA

SEQ ID NO: 157843 - protein, 11 aa, Artificial Sequence
  Description of Artificial Sequence: Synthetic peptide
  Seed: MMMGMFNMLST
MMMGMFNMLSC

SEQ ID NO: 157844 - protein, 11 aa, Artificial Sequence
  Description of Artificial Sequence: Synthetic peptide
  Seed: MMMGMFNMLST
MMMGMFNMLSF

SEQ ID NO: 157845 - protein, 11 aa, Artificial Sequence
  Description of Artificial Sequence: Synthetic peptide
  Seed: MMMGMFNMLST
MMMGMFNMLSI

SEQ ID NO: 157846 - protein, 11 aa, Artificial Sequence
  Description of Artificial Sequence: Synthetic peptide
  Seed: MMMGMFNMLST
MMMGMFNMLSL

SEQ ID NO: 157847 - protein, 11 aa, Artificial Sequence
  Description of Artificial Sequence: Synthetic peptide
  Seed: MMMGMFNMLST
MMMGMFNMLSM

SEQ ID NO: 157848 - protein, 11 aa, Artificial Sequence
  Description of Artificial Sequence: Synthetic peptide
  Seed: MMMGMFNMLST
MMMGMFNMLSP

SEQ ID NO: 157849 - protein, 11 aa, Artificial Sequence
  Description of Artificial Sequence: Synthetic peptide
  Seed: MMMGMFNMLST
MMMGMFNMLSS

SEQ ID NO: 157850 - protein, 11 aa, Artificial Sequence
  Description of Artificial Sequence: Synthetic peptide
  Seed: MMMGMFNMLST
MMMGMFNMLSV

SEQ ID NO: 157851 - protein, 10 aa, Artificial Sequence
  Description of Artificial Sequence: Synthetic peptide
  Seed: MMMGMFNMLS
MMMGMFNMLT

SEQ ID NO: 157852 - protein, 10 aa, Artificial Sequence
  Description of Artificial Sequence: Synthetic peptide
  Seed: MMMGMFNMLS
MMMGMFNMLV

SEQ ID NO: 157853 - protein, 10 aa, Artificial Sequence
  Description of Artificial Sequence: Synthetic peptide
  Seed: MMMGMFNMLS
MMMGMFNMLW

SEQ ID NO: 157854 - protein, 10 aa, Artificial Sequence
  Description of Artificial Sequence: Synthetic peptide
  Seed: MMMGMFNMLS
MMMGMFNMLY

SEQ ID NO: 157855 - protein, 9 aa, Artificial Sequence
  Description of Artificial Sequence: Synthetic peptide
  Seed: MMMGMFNML
MMMGMFNMP

SEQ ID NO: 157856 - protein, 9 aa, Artificial Sequence
  Description of Artificial Sequence: Synthetic peptide
  Seed: MMMGMFNML
MMMGMFNMR

SEQ ID NO: 157857 - protein, 9 aa, Artificial Sequence
  Description of Artificial Sequence: Synthetic peptide
  Seed: MMMGMFNML
MMMGMFNMS

SEQ ID NO: 157858 - protein, 9 aa, Artificial Sequence
  Description of Artificial Sequence: Synthetic peptide
  Seed: MMMGMFNML
MMMGMFNMT

SEQ ID NO: 157859 - protein, 9 aa, Artificial Sequence
  Description of Artificial Sequence: Synthetic peptide
  Seed: MMMGMFNML
MMMGMFNMV

SEQ ID NO: 157860 - protein, 9 aa, Artificial Sequence
  Description of Artificial Sequence: Synthetic peptide
  Seed: MMMGMFNML
MMMGMFNMW

SEQ ID NO: 157861 - protein, 9 aa, Artificial Sequence
  Description of Artificial Sequence: Synthetic peptide
  Seed: MMMGMFNML
MMMGMFNMY

SEQ ID NO: 157862 - protein, 8 aa, Artificial Sequence
  Description of Artificial Sequence: Synthetic peptide
  Seed: MMMGMFNM
MMMGMFNT

SEQ ID NO: 157863 - protein, 8 aa, Artificial Sequence
  Description of Artificial Sequence: Synthetic peptide
  Seed: MMMGMFNM
MMMGMFNV

SEQ ID NO: 157864 - protein, 8 aa, Artificial Sequence
  Description of Artificial Sequence: Synthetic peptide
  Seed: MMMGMFNM
MMMGMFNY

SEQ ID NO: 157865 - protein, 8 aa, Artificial Sequence
  Description of Artificial Sequence: Synthetic peptide
  Seed: MFNMLSTV
MMNMLSTA

SEQ ID NO: 157866 - protein, 8 aa, Artificial Sequence
  Description of Artificial Sequence: Synthetic peptide
  Seed: MFNMLSTV
MMNMLSTI

SEQ ID NO: 157867 - protein, 8 aa, Artificial Sequence
  Description of Artificial Sequence: Synthetic peptide
  Seed: MFNMLSTV
MMNMLSTL

SEQ ID NO: 157868 - protein, 8 aa, Artificial Sequence
  Description of Artificial Sequence: Synthetic peptide
  Seed: MFNMLSTV
MMNMLSTM

SEQ ID NO: 157869 - protein, 8 aa, Artificial Sequence
  Description of Artificial Sequence: Synthetic peptide
  Seed: MFNMLSTV
MMNMLSTV

SEQ ID NO: 157870 - protein, 9 aa, Artificial Sequence
  Description of Artificial Sequence: Synthetic peptide
  Seed: MFNMLSTVL
MMNMLSTVA

SEQ ID NO: 157871 - protein, 9 aa, Artificial Sequence
  Description of Artificial Sequence: Synthetic peptide
  Seed: MFNMLSTVL
MMNMLSTVC

SEQ ID NO: 157872 - protein, 9 aa, Artificial Sequence
  Description of Artificial Sequence: Synthetic peptide
  Seed: MFNMLSTVL
MMNMLSTVE

SEQ ID NO: 157873 - protein, 9 aa, Artificial Sequence
  Description of Artificial Sequence: Synthetic peptide
  Seed: MFNMLSTVL
MMNMLSTVF

SEQ ID NO: 157874 - protein, 9 aa, Artificial Sequence
  Description of Artificial Sequence: Synthetic peptide
  Seed: MFNMLSTVL
MMNMLSTVG

SEQ ID NO: 157875 - protein, 9 aa, Artificial Sequence
  Description of Artificial Sequence: Synthetic peptide
  Seed: MFNMLSTVL
MMNMLSTVH

SEQ ID NO: 157876 - protein, 9 aa, Artificial Sequence
  Description of Artificial Sequence: Synthetic peptide
  Seed: MFNMLSTVL
MMNMLSTVI

SEQ ID NO: 157877 - protein, 11 aa, Artificial Sequence
  Description of Artificial Sequence: Synthetic peptide
  Seed: MFNMLSTVLGV
MMNMLSTVLGA

SEQ ID NO: 157878 - protein, 11 aa, Artificial Sequence
  Description of Artificial Sequence: Synthetic peptide
  Seed: MFNMLSTVLGV
MMNMLSTVLGI

SEQ ID NO: 157879 - protein, 11 aa, Artificial Sequence
  Description of Artificial Sequence: Synthetic peptide
  Seed: MFNMLSTVLGV
MMNMLSTVLGL

SEQ ID NO: 157880 - protein, 11 aa, Artificial Sequence
  Description of Artificial Sequence: Synthetic peptide
  Seed: MFNMLSTVLGV
MMNMLSTVLGM

SEQ ID NO: 157881 - protein, 11 aa, Artificial Sequence
  Description of Artificial Sequence: Synthetic peptide
  Seed: MFNMLSTVLGV
MMNMLSTVLGT

SEQ ID NO: 157882 - protein, 11 aa, Artificial Sequence
  Description of Artificial Sequence: Synthetic peptide
  Seed: MFNMLSTVLGV
MMNMLSTVLGV

SEQ ID NO: 157883 - protein, 9 aa, Artificial Sequence
  Description of Artificial Sequence: Synthetic peptide
  Seed: MFNMLSTVL
MMNMLSTVM

SEQ ID NO: 157884 - protein, 9 aa, Artificial Sequence
  Description of Artificial Sequence: Synthetic peptide
  Seed: MFNMLSTVL
MMNMLSTVN

SEQ ID NO: 157885 - protein, 9 aa, Artificial Sequence
  Description of Artificial Sequence: Synthetic peptide
  Seed: MFNMLSTVL
MMNMLSTVP

SEQ ID NO: 157886 - protein, 9 aa, Artificial Sequence
  Description of Artificial Sequence: Synthetic peptide
  Seed: MFNMLSTVL
MMNMLSTVQ

SEQ ID NO: 157887 - protein, 9 aa, Artificial Sequence
  Description of Artificial Sequence: Synthetic peptide
  Seed: MFNMLSTVL
MMNMLSTVS

SEQ ID NO: 157888 - protein, 9 aa, Artificial Sequence
  Description of Artificial Sequence: Synthetic peptide
  Seed: MFNMLSTVL
MMNMLSTVT

SEQ ID NO: 157889 - protein, 9 aa, Artificial Sequence
  Description of Artificial Sequence: Synthetic peptide
  Seed: MFNMLSTVL
MMNMLSTVV

SEQ ID NO: 157890 - protein, 9 aa, Artificial Sequence
  Description of Artificial Sequence: Synthetic peptide
  Seed: MFNMLSTVL
MMNMLSTVW

SEQ ID NO: 157891 - protein, 9 aa, Artificial Sequence
  Description of Artificial Sequence: Synthetic peptide
  Seed: MFNMLSTVL
MMNMLSTVY

SEQ ID NO: 157892 - protein, 9 aa, Artificial Sequence
  Description of Artificial Sequence: Synthetic peptide
  Seed: MARLGKGYM
MMRLGKGYA

SEQ ID NO: 157893 - protein, 9 aa, Artificial Sequence
  Description of Artificial Sequence: Synthetic peptide
  Seed: MARLGKGYM
MMRLGKGYF

SEQ ID NO: 157894 - protein, 9 aa, Artificial Sequence
  Description of Artificial Sequence: Synthetic peptide
  Seed: MARLGKGYM
MMRLGKGYG

SEQ ID NO: 157895 - protein, 9 aa, Artificial Sequence
  Description of Artificial Sequence: Synthetic peptide
  Seed: MARLGKGYM
MMRLGKGYI

SEQ ID NO: 157896 - protein, 9 aa, Artificial Sequence
  Description of Artificial Sequence: Synthetic peptide
  Seed: MARLGKGYM
MMRLGKGYK

SEQ ID NO: 157897 - protein, 9 aa, Artificial Sequence
  Description of Artificial Sequence: Synthetic peptide
  Seed: MARLGKGYM
MMRLGKGYL

SEQ ID NO: 157898 - protein, 9 aa, Artificial Sequence
  Description of Artificial Sequence: Synthetic peptide
  Seed: MARLGKGYM
MMRLGKGYM

SEQ ID NO: 157899 - protein, 10 aa, Artificial Sequence
  Description of Artificial Sequence: Synthetic peptide
  Seed: MARLGKGYMF
MMRLGKGYMA

SEQ ID NO: 157900 - protein, 10 aa, Artificial Sequence
  Description of Artificial Sequence: Synthetic peptide
  Seed: MARLGKGYMF
MMRLGKGYMC

SEQ ID NO: 157901 - protein, 10 aa, Artificial Sequence
  Description of Artificial Sequence: Synthetic peptide
  Seed: MARLGKGYMF
MMRLGKGYMF

SEQ ID NO: 157902 - protein, 10 aa, Artificial Sequence
  Description of Artificial Sequence: Synthetic peptide
  Seed: MARLGKGYMF
MMRLGKGYMI

SEQ ID NO: 157903 - protein, 10 aa, Artificial Sequence
  Description of Artificial Sequence: Synthetic peptide
  Seed: MARLGKGYMF
MMRLGKGYMK

SEQ ID NO: 157904 - protein, 10 aa, Artificial Sequence
  Description of Artificial Sequence: Synthetic peptide
  Seed: MARLGKGYMF
MMRLGKGYML

SEQ ID NO: 157905 - protein, 10 aa, Artificial Sequence
  Description of Artificial Sequence: Synthetic peptide
  Seed: MARLGKGYMF
MMRLGKGYMM

SEQ ID NO: 157906 - protein, 10 aa, Artificial Sequence
  Description of Artificial Sequence: Synthetic peptide
  Seed: MARLGKGYMF
MMRLGKGYMR

SEQ ID NO: 157907 - protein, 10 aa, Artificial Sequence
  Description of Artificial Sequence: Synthetic peptide
  Seed: MARLGKGYMF
MMRLGKGYMT

SEQ ID NO: 157908 - protein, 10 aa, Artificial Sequence
  Description of Artificial Sequence: Synthetic peptide
  Seed: MARLGKGYMF
MMRLGKGYMV

SEQ ID NO: 157909 - protein, 10 aa, Artificial Sequence
  Description of Artificial Sequence: Synthetic peptide
  Seed: MARLGKGYMF
MMRLGKGYMW

SEQ ID NO: 157910 - protein, 10 aa, Artificial Sequence
  Description of Artificial Sequence: Synthetic peptide
  Seed: MARLGKGYMF
MMRLGKGYMY

SEQ ID NO: 157911 - protein, 9 aa, Artificial Sequence
  Description of Artificial Sequence: Synthetic peptide
  Seed: MARLGKGYM
MMRLGKGYP

SEQ ID NO: 157912 - protein, 9 aa, Artificial Sequence
  Description of Artificial Sequence: Synthetic peptide
  Seed: MARLGKGYM
MMRLGKGYR

SEQ ID NO: 157913 - protein, 9 aa, Artificial Sequence
  Description of Artificial Sequence: Synthetic peptide
  Seed: MARLGKGYM
MMRLGKGYS

SEQ ID NO: 157914 - protein, 9 aa, Artificial Sequence
  Description of Artificial Sequence: Synthetic peptide
  Seed: MARLGKGYM
MMRLGKGYV

SEQ ID NO: 157915 - protein, 9 aa, Artificial Sequence
  Description of Artificial Sequence: Synthetic peptide
  Seed: MARLGKGYM
MMRLGKGYW

SEQ ID NO: 157916 - protein, 9 aa, Artificial Sequence
  Description of Artificial Sequence: Synthetic peptide
  Seed: MARLGKGYM
MMRLGKGYY

SEQ ID NO: 157917 - protein, 8 aa, Artificial Sequence
  Description of Artificial Sequence: Synthetic peptide
  Seed: MFSNKMAR
MMSNKMAR

SEQ ID NO: 157918 - protein, 9 aa, Artificial Sequence
  Description of Artificial Sequence: Synthetic peptide
  Seed: MFSNKMARL
MMSNKMARF

SEQ ID NO: 157919 - protein, 11 aa, Artificial Sequence
  Description of Artificial Sequence: Synthetic peptide
  Seed: MFSNKMARLGK
MMSNKMARLGK

SEQ ID NO: 157920 - protein, 11 aa, Artificial Sequence
  Description of Artificial Sequence: Synthetic peptide
  Seed: MFSNKMARLGK
MMSNKMARLGR

SEQ ID NO: 157921 - protein, 9 aa, Artificial Sequence
  Description of Artificial Sequence: Synthetic peptide
  Seed: MFSNKMARL
MMSNKMARM

SEQ ID NO: 157922 - protein, 9 aa, Artificial Sequence
  Description of Artificial Sequence: Synthetic peptide
  Seed: MFSNKMARL
MMSNKMARY

SEQ ID NO: 157923 - protein, 8 aa, Artificial Sequence
  Description of Artificial Sequence: Synthetic peptide
  Seed: MLSTVLGV
MMSTVLGA

SEQ ID NO: 157924 - protein, 8 aa, Artificial Sequence
  Description of Artificial Sequence: Synthetic peptide
  Seed: MLSTVLGV
MMSTVLGI

SEQ ID NO: 157925 - protein, 8 aa, Artificial Sequence
  Description of Artificial Sequence: Synthetic peptide
  Seed: MLSTVLGV
MMSTVLGL

SEQ ID NO: 157926 - protein, 8 aa, Artificial Sequence
  Description of Artificial Sequence: Synthetic peptide
  Seed: MLSTVLGV
MMSTVLGV

SEQ ID NO: 157927 - protein, 9 aa, Artificial Sequence
  Description of Artificial Sequence: Synthetic peptide
  Seed: MLSTVLGVS
MMSTVLGVA

SEQ ID NO: 157928 - protein, 9 aa, Artificial Sequence
  Description of Artificial Sequence: Synthetic peptide
  Seed: MLSTVLGVS
MMSTVLGVC

SEQ ID NO: 157929 - protein, 9 aa, Artificial Sequence
  Description of Artificial Sequence: Synthetic peptide
  Seed: MLSTVLGVS
MMSTVLGVF

SEQ ID NO: 157930 - protein, 9 aa, Artificial Sequence
  Description of Artificial Sequence: Synthetic peptide
  Seed: MLSTVLGVS
MMSTVLGVG

SEQ ID NO: 157931 - protein, 9 aa, Artificial Sequence
  Description of Artificial Sequence: Synthetic peptide
  Seed: MLSTVLGVS
MMSTVLGVI

SEQ ID NO: 157932 - protein, 9 aa, Artificial Sequence
  Description of Artificial Sequence: Synthetic peptide
  Seed: MLSTVLGVS
MMSTVLGVL

SEQ ID NO: 157933 - protein, 9 aa, Artificial Sequence
  Description of Artificial Sequence: Synthetic peptide
  Seed: MLSTVLGVS
MMSTVLGVM

SEQ ID NO: 157934 - protein, 9 aa, Artificial Sequence
  Description of Artificial Sequence: Synthetic peptide
  Seed: MLSTVLGVS
MMSTVLGVP

SEQ ID NO: 157935 - protein, 9 aa, Artificial Sequence
  Description of Artificial Sequence: Synthetic peptide
  Seed: MLSTVLGVS
MMSTVLGVS

SEQ ID NO: 157936 - protein, 10 aa, Artificial Sequence
  Description of Artificial Sequence: Synthetic peptide
  Seed: MLSTVLGVSI
MMSTVLGVSA

SEQ ID NO: 157937 - protein, 10 aa, Artificial Sequence
  Description of Artificial Sequence: Synthetic peptide
  Seed: MLSTVLGVSI
MMSTVLGVSC

SEQ ID NO: 157938 - protein, 10 aa, Artificial Sequence
  Description of Artificial Sequence: Synthetic peptide
  Seed: MLSTVLGVSI
MMSTVLGVSF

SEQ ID NO: 157939 - protein, 10 aa, Artificial Sequence
  Description of Artificial Sequence: Synthetic peptide
  Seed: MLSTVLGVSI
MMSTVLGVSG

SEQ ID NO: 157940 - protein, 10 aa, Artificial Sequence
  Description of Artificial Sequence: Synthetic peptide
  Seed: MLSTVLGVSI
MMSTVLGVSI

SEQ ID NO: 157941 - protein, 11 aa, Artificial Sequence
  Description of Artificial Sequence: Synthetic peptide
  Seed: MLSTVLGVSIL
MMSTVLGVSIA

SEQ ID NO: 157942 - protein, 11 aa, Artificial Sequence
  Description of Artificial Sequence: Synthetic peptide
  Seed: MLSTVLGVSIL
MMSTVLGVSIC

SEQ ID NO: 157943 - protein, 11 aa, Artificial Sequence
  Description of Artificial Sequence: Synthetic peptide
  Seed: MLSTVLGVSIL
MMSTVLGVSID

SEQ ID NO: 157944 - protein, 11 aa, Artificial Sequence
  Description of Artificial Sequence: Synthetic peptide
  Seed: MLSTVLGVSIL
MMSTVLGVSIE

SEQ ID NO: 157945 - protein, 11 aa, Artificial Sequence
  Description of Artificial Sequence: Synthetic peptide
  Seed: MLSTVLGVSIL
MMSTVLGVSIF

SEQ ID NO: 157946 - protein, 11 aa, Artificial Sequence
  Description of Artificial Sequence: Synthetic peptide
  Seed: MLSTVLGVSIL
MMSTVLGVSIG

SEQ ID NO: 157947 - protein, 11 aa, Artificial Sequence
  Description of Artificial Sequence: Synthetic peptide
  Seed: MLSTVLGVSIL
MMSTVLGVSIH

SEQ ID NO: 157948 - protein, 11 aa, Artificial Sequence
  Description of Artificial Sequence: Synthetic peptide
  Seed: MLSTVLGVSIL
MMSTVLGVSII

SEQ ID NO: 157949 - protein, 11 aa, Artificial Sequence
  Description of Artificial Sequence: Synthetic peptide
  Seed: MLSTVLGVSIL
MMSTVLGVSIK

SEQ ID NO: 157950 - protein, 11 aa, Artificial Sequence
  Description of Artificial Sequence: Synthetic peptide
  Seed: MLSTVLGVSIL
MMSTVLGVSIL

SEQ ID NO: 157951 - protein, 11 aa, Artificial Sequence
  Description of Artificial Sequence: Synthetic peptide
  Seed: MLSTVLGVSIL
MMSTVLGVSIM

SEQ ID NO: 157952 - protein, 11 aa, Artificial Sequence
  Description of Artificial Sequence: Synthetic peptide
  Seed: MLSTVLGVSIL
MMSTVLGVSIN

SEQ ID NO: 157953 - protein, 11 aa, Artificial Sequence
  Description of Artificial Sequence: Synthetic peptide
  Seed: MLSTVLGVSIL
MMSTVLGVSIP

SEQ ID NO: 157954 - protein, 11 aa, Artificial Sequence
  Description of Artificial Sequence: Synthetic peptide
  Seed: MLSTVLGVSIL
MMSTVLGVSIQ

SEQ ID NO: 157955 - protein, 11 aa, Artificial Sequence
  Description of Artificial Sequence: Synthetic peptide
  Seed: MLSTVLGVSIL
MMSTVLGVSIR

SEQ ID NO: 157956 - protein, 11 aa, Artificial Sequence
  Description of Artificial Sequence: Synthetic peptide
  Seed: MLSTVLGVSIL
MMSTVLGVSIS

SEQ ID NO: 157957 - protein, 11 aa, Artificial Sequence
  Description of Artificial Sequence: Synthetic peptide
  Seed: MLSTVLGVSIL
MMSTVLGVSIT

SEQ ID NO: 157958 - protein, 11 aa, Artificial Sequence
  Description of Artificial Sequence: Synthetic peptide
  Seed: MLSTVLGVSIL
MMSTVLGVSIV

SEQ ID NO: 157959 - protein, 11 aa, Artificial Sequence
  Description of Artificial Sequence: Synthetic peptide
  Seed: MLSTVLGVSIL
MMSTVLGVSIW

SEQ ID NO: 157960 - protein, 11 aa, Artificial Sequence
  Description of Artificial Sequence: Synthetic peptide
  Seed: MLSTVLGVSIL
MMSTVLGVSIY

SEQ ID NO: 157961 - protein, 10 aa, Artificial Sequence
  Description of Artificial Sequence: Synthetic peptide
  Seed: MLSTVLGVSI
MMSTVLGVSL

SEQ ID NO: 157962 - protein, 10 aa, Artificial Sequence
  Description of Artificial Sequence: Synthetic peptide
  Seed: MLSTVLGVSI
MMSTVLGVSM

SEQ ID NO: 157963 - protein, 10 aa, Artificial Sequence
  Description of Artificial Sequence: Synthetic peptide
  Seed: MLSTVLGVSI
MMSTVLGVSP

SEQ ID NO: 157964 - protein, 10 aa, Artificial Sequence
  Description of Artificial Sequence: Synthetic peptide
  Seed: MLSTVLGVSI
MMSTVLGVSS

SEQ ID NO: 157965 - protein, 10 aa, Artificial Sequence
  Description of Artificial Sequence: Synthetic peptide
  Seed: MLSTVLGVSI
MMSTVLGVST

SEQ ID NO: 157966 - protein, 10 aa, Artificial Sequence
  Description of Artificial Sequence: Synthetic peptide
  Seed: MLSTVLGVSI
MMSTVLGVSV

SEQ ID NO: 157967 - protein, 10 aa, Artificial Sequence
  Description of Artificial Sequence: Synthetic peptide
  Seed: MLSTVLGVSI
MMSTVLGVSW

SEQ ID NO: 157968 - protein, 10 aa, Artificial Sequence
  Description of Artificial Sequence: Synthetic peptide
  Seed: MLSTVLGVSI
MMSTVLGVSY

SEQ ID NO: 157969 - protein, 9 aa, Artificial Sequence
  Description of Artificial Sequence: Synthetic peptide
  Seed: MLSTVLGVS
MMSTVLGVT

SEQ ID NO: 157970 - protein, 9 aa, Artificial Sequence
  Description of Artificial Sequence: Synthetic peptide
  Seed: MLSTVLGVS
MMSTVLGVV

SEQ ID NO: 157971 - protein, 11 aa, Artificial Sequence
  Description of Artificial Sequence: Synthetic peptide
  Seed: MMGMFNMLSTV
MNGMFNMLSTA

SEQ ID NO: 157972 - protein, 11 aa, Artificial Sequence
  Description of Artificial Sequence: Synthetic peptide
  Seed: MMGMFNMLSTV
MNGMFNMLSTI

SEQ ID NO: 157973 - protein, 11 aa, Artificial Sequence
  Description of Artificial Sequence: Synthetic peptide
  Seed: MMGMFNMLSTV
MNGMFNMLSTL

SEQ ID NO: 157974 - protein, 11 aa, Artificial Sequence
  Description of Artificial Sequence: Synthetic peptide
  Seed: MMGMFNMLSTV
MNGMFNMLSTM

SEQ ID NO: 157975 - protein, 11 aa, Artificial Sequence
  Description of Artificial Sequence: Synthetic peptide
  Seed: MMGMFNMLSTV
MNGMFNMLSTT

SEQ ID NO: 157976 - protein, 11 aa, Artificial Sequence
  Description of Artificial Sequence: Synthetic peptide
  Seed: MMGMFNMLSTV
MNGMFNMLSTV

SEQ ID NO: 157977 - protein, 10 aa, Artificial Sequence
  Description of Artificial Sequence: Synthetic peptide
  Seed: MMGMFNMLST
MNGMFNMLSV

SEQ ID NO: 157978 - protein, 9 aa, Artificial Sequence
  Description of Artificial Sequence: Synthetic peptide
  Seed: MSIGVTVIK
MNIGVTVIK

SEQ ID NO: 157979 - protein, 10 aa, Artificial Sequence
  Description of Artificial Sequence: Synthetic peptide
  Seed: MSIGVTVIKN
MNIGVTVIKK

SEQ ID NO: 157980 - protein, 10 aa, Artificial Sequence
  Description of Artificial Sequence: Synthetic peptide
  Seed: MSIGVTVIKN
MNIGVTVIKR

SEQ ID NO: 157981 - protein, 9 aa, Artificial Sequence
  Description of Artificial Sequence: Synthetic peptide
  Seed: MSIGVTVIK
MNIGVTVIR

SEQ ID NO: 157982 - protein, 9 aa, Artificial Sequence
  Description of Artificial Sequence: Synthetic peptide
  Seed: MSIGVTVIK
MNIGVTVIY

SEQ ID NO: 157983 - protein, 10 aa, Artificial Sequence
  Description of Artificial Sequence: Synthetic peptide
  Seed: MGMFNMLSTV
MNMFNMLSTA

SEQ ID NO: 157984 - protein, 10 aa, Artificial Sequence
  Description of Artificial Sequence: Synthetic peptide
  Seed: MGMFNMLSTV
MNMFNMLSTC

SEQ ID NO: 157985 - protein, 10 aa, Artificial Sequence
  Description of Artificial Sequence: Synthetic peptide
  Seed: MGMFNMLSTV
MNMFNMLSTF

SEQ ID NO: 157986 - protein, 10 aa, Artificial Sequence
  Description of Artificial Sequence: Synthetic peptide
  Seed: MGMFNMLSTV
MNMFNMLSTG

SEQ ID NO: 157987 - protein, 10 aa, Artificial Sequence
  Description of Artificial Sequence: Synthetic peptide
  Seed: MGMFNMLSTV
MNMFNMLSTH

SEQ ID NO: 157988 - protein, 10 aa, Artificial Sequence
  Description of Artificial Sequence: Synthetic peptide
  Seed: MGMFNMLSTV
MNMFNMLSTI

SEQ ID NO: 157989 - protein, 10 aa, Artificial Sequence
  Description of Artificial Sequence: Synthetic peptide
  Seed: MGMFNMLSTV
MNMFNMLSTL

SEQ ID NO: 157990 - protein, 10 aa, Artificial Sequence
  Description of Artificial Sequence: Synthetic peptide
  Seed: MGMFNMLSTV
MNMFNMLSTM

SEQ ID NO: 157991 - protein, 10 aa, Artificial Sequence
  Description of Artificial Sequence: Synthetic peptide
  Seed: MGMFNMLSTV
MNMFNMLSTP

SEQ ID NO: 157992 - protein, 10 aa, Artificial Sequence
  Description of Artificial Sequence: Synthetic peptide
  Seed: MGMFNMLSTV
MNMFNMLSTS

SEQ ID NO: 157993 - protein, 10 aa, Artificial Sequence
  Description of Artificial Sequence: Synthetic peptide
  Seed: MGMFNMLSTV
MNMFNMLSTT

SEQ ID NO: 157994 - protein, 10 aa, Artificial Sequence
  Description of Artificial Sequence: Synthetic peptide
  Seed: MGMFNMLSTV
MNMFNMLSTV

SEQ ID NO: 157995 - protein, 11 aa, Artificial Sequence
  Description of Artificial Sequence: Synthetic peptide
  Seed: MGMFNMLSTVL
MNMFNMLSTVA

SEQ ID NO: 157996 - protein, 11 aa, Artificial Sequence
  Description of Artificial Sequence: Synthetic peptide
  Seed: MGMFNMLSTVL
MNMFNMLSTVC

SEQ ID NO: 157997 - protein, 11 aa, Artificial Sequence
  Description of Artificial Sequence: Synthetic peptide
  Seed: MGMFNMLSTVL
MNMFNMLSTVD

SEQ ID NO: 157998 - protein, 11 aa, Artificial Sequence
  Description of Artificial Sequence: Synthetic peptide
  Seed: MGMFNMLSTVL
MNMFNMLSTVE

SEQ ID NO: 157999 - protein, 11 aa, Artificial Sequence
  Description of Artificial Sequence: Synthetic peptide
  Seed: MGMFNMLSTVL
MNMFNMLSTVF

SEQ ID NO: 158000 - protein, 11 aa, Artificial Sequence
  Description of Artificial Sequence: Synthetic peptide
  Seed: MGMFNMLSTVL
MNMFNMLSTVG

SEQ ID NO: 158001 - protein, 11 aa, Artificial Sequence
  Description of Artificial Sequence: Synthetic peptide
  Seed: MGMFNMLSTVL
MNMFNMLSTVH

SEQ ID NO: 158002 - protein, 11 aa, Artificial Sequence
  Description of Artificial Sequence: Synthetic peptide
  Seed: MGMFNMLSTVL
MNMFNMLSTVI

SEQ ID NO: 158003 - protein, 11 aa, Artificial Sequence
  Description of Artificial Sequence: Synthetic peptide
  Seed: MGMFNMLSTVL
MNMFNMLSTVK

SEQ ID NO: 158004 - protein, 11 aa, Artificial Sequence
  Description of Artificial Sequence: Synthetic peptide
  Seed: MGMFNMLSTVL
MNMFNMLSTVL

SEQ ID NO: 158005 - protein, 11 aa, Artificial Sequence
  Description of Artificial Sequence: Synthetic peptide
  Seed: MGMFNMLSTVL
MNMFNMLSTVM

SEQ ID NO: 158006 - protein, 11 aa, Artificial Sequence
  Description of Artificial Sequence: Synthetic peptide
  Seed: MGMFNMLSTVL
MNMFNMLSTVN

SEQ ID NO: 158007 - protein, 11 aa, Artificial Sequence
  Description of Artificial Sequence: Synthetic peptide
  Seed: MGMFNMLSTVL
MNMFNMLSTVP

SEQ ID NO: 158008 - protein, 11 aa, Artificial Sequence
  Description of Artificial Sequence: Synthetic peptide
  Seed: MGMFNMLSTVL
MNMFNMLSTVQ

SEQ ID NO: 158009 - protein, 11 aa, Artificial Sequence
  Description of Artificial Sequence: Synthetic peptide
  Seed: MGMFNMLSTVL
MNMFNMLSTVR

SEQ ID NO: 158010 - protein, 11 aa, Artificial Sequence
  Description of Artificial Sequence: Synthetic peptide
  Seed: MGMFNMLSTVL
MNMFNMLSTVS

SEQ ID NO: 158011 - protein, 11 aa, Artificial Sequence
  Description of Artificial Sequence: Synthetic peptide
  Seed: MGMFNMLSTVL
MNMFNMLSTVT

SEQ ID NO: 158012 - protein, 11 aa, Artificial Sequence
  Description of Artificial Sequence: Synthetic peptide
  Seed: MGMFNMLSTVL
MNMFNMLSTVV

SEQ ID NO: 158013 - protein, 11 aa, Artificial Sequence
  Description of Artificial Sequence: Synthetic peptide
  Seed: MGMFNMLSTVL
MNMFNMLSTVW

SEQ ID NO: 158014 - protein, 11 aa, Artificial Sequence
  Description of Artificial Sequence: Synthetic peptide
  Seed: MGMFNMLSTVL
MNMFNMLSTVY

SEQ ID NO: 158015 - protein, 10 aa, Artificial Sequence
  Description of Artificial Sequence: Synthetic peptide
  Seed: MGMFNMLSTV
MNMFNMLSTW

SEQ ID NO: 158016 - protein, 10 aa, Artificial Sequence
  Description of Artificial Sequence: Synthetic peptide
  Seed: MGMFNMLSTV
MNMFNMLSTY

SEQ ID NO: 158017 - protein, 9 aa, Artificial Sequence
  Description of Artificial Sequence: Synthetic peptide
  Seed: MMMGMFNML
MNMGMFNMA

SEQ ID NO: 158018 - protein, 9 aa, Artificial Sequence
  Description of Artificial Sequence: Synthetic peptide
  Seed: MMMGMFNML
MNMGMFNMF

SEQ ID NO: 158019 - protein, 9 aa, Artificial Sequence
  Description of Artificial Sequence: Synthetic peptide
  Seed: MMMGMFNML
MNMGMFNMI

SEQ ID NO: 158020 - protein, 9 aa, Artificial Sequence
  Description of Artificial Sequence: Synthetic peptide
  Seed: MMMGMFNML
MNMGMFNML

SEQ ID NO: 158021 - protein, 10 aa, Artificial Sequence
  Description of Artificial Sequence: Synthetic peptide
  Seed: MMMGMFNMLS
MNMGMFNMLA

SEQ ID NO: 158022 - protein, 10 aa, Artificial Sequence
  Description of Artificial Sequence: Synthetic peptide
  Seed: MMMGMFNMLS
MNMGMFNMLI

SEQ ID NO: 158023 - protein, 10 aa, Artificial Sequence
  Description of Artificial Sequence: Synthetic peptide
  Seed: MMMGMFNMLS
MNMGMFNMLL

SEQ ID NO: 158024 - protein, 10 aa, Artificial Sequence
  Description of Artificial Sequence: Synthetic peptide
  Seed: MMMGMFNMLS
MNMGMFNMLM

SEQ ID NO: 158025 - protein, 10 aa, Artificial Sequence
  Description of Artificial Sequence: Synthetic peptide
  Seed: MMMGMFNMLS
MNMGMFNMLS

SEQ ID NO: 158026 - protein, 11 aa, Artificial Sequence
  Description of Artificial Sequence: Synthetic peptide
  Seed: MMMGMFNMLST
MNMGMFNMLSV

SEQ ID NO: 158027 - protein, 10 aa, Artificial Sequence
  Description of Artificial Sequence: Synthetic peptide
  Seed: MMMGMFNMLS
MNMGMFNMLT

SEQ ID NO: 158028 - protein, 10 aa, Artificial Sequence
  Description of Artificial Sequence: Synthetic peptide
  Seed: MMMGMFNMLS
MNMGMFNMLV

SEQ ID NO: 158029 - protein, 9 aa, Artificial Sequence
  Description of Artificial Sequence: Synthetic peptide
  Seed: MMMGMFNML
MNMGMFNMM

SEQ ID NO: 158030 - protein, 9 aa, Artificial Sequence
  Description of Artificial Sequence: Synthetic peptide
  Seed: MMMGMFNML
MNMGMFNMV

SEQ ID NO: 158031 - protein, 9 aa, Artificial Sequence
  Description of Artificial Sequence: Synthetic peptide
  Seed: MMMGMFNML
MNMGMFNMW

SEQ ID NO: 158032 - protein, 9 aa, Artificial Sequence
  Description of Artificial Sequence: Synthetic peptide
  Seed: MMMGMFNML
MNMGMFNMY

SEQ ID NO: 158033 - protein, 8 aa, Artificial Sequence
  Description of Artificial Sequence: Synthetic peptide
  Seed: MFNMLSTV
MNNMLSTV

SEQ ID NO: 158034 - protein, 9 aa, Artificial Sequence
  Description of Artificial Sequence: Synthetic peptide
  Seed: MFNMLSTVL
MNNMLSTVF

SEQ ID NO: 158035 - protein, 9 aa, Artificial Sequence
  Description of Artificial Sequence: Synthetic peptide
  Seed: MFNMLSTVL
MNNMLSTVH

SEQ ID NO: 158036 - protein, 9 aa, Artificial Sequence
  Description of Artificial Sequence: Synthetic peptide
  Seed: MFNMLSTVL
MNNMLSTVI

SEQ ID NO: 158037 - protein, 9 aa, Artificial Sequence
  Description of Artificial Sequence: Synthetic peptide
  Seed: MFNMLSTVL
MNNMLSTVL

SEQ ID NO: 158038 - protein, 11 aa, Artificial Sequence
  Description of Artificial Sequence: Synthetic peptide
  Seed: MFNMLSTVLGV
MNNMLSTVLGA

SEQ ID NO: 158039 - protein, 11 aa, Artificial Sequence
  Description of Artificial Sequence: Synthetic peptide
  Seed: MFNMLSTVLGV
MNNMLSTVLGI

SEQ ID NO: 158040 - protein, 11 aa, Artificial Sequence
  Description of Artificial Sequence: Synthetic peptide
  Seed: MFNMLSTVLGV
MNNMLSTVLGL

SEQ ID NO: 158041 - protein, 11 aa, Artificial Sequence
  Description of Artificial Sequence: Synthetic peptide
  Seed: MFNMLSTVLGV
MNNMLSTVLGM

SEQ ID NO: 158042 - protein, 11 aa, Artificial Sequence
  Description of Artificial Sequence: Synthetic peptide
  Seed: MFNMLSTVLGV
MNNMLSTVLGT

SEQ ID NO: 158043 - protein, 11 aa, Artificial Sequence
  Description of Artificial Sequence: Synthetic peptide
  Seed: MFNMLSTVLGV
MNNMLSTVLGV

SEQ ID NO: 158044 - protein, 9 aa, Artificial Sequence
  Description of Artificial Sequence: Synthetic peptide
  Seed: MFNMLSTVL
MNNMLSTVM

SEQ ID NO: 158045 - protein, 9 aa, Artificial Sequence
  Description of Artificial Sequence: Synthetic peptide
  Seed: MFNMLSTVL
MNNMLSTVV

SEQ ID NO: 158046 - protein, 9 aa, Artificial Sequence
  Description of Artificial Sequence: Synthetic peptide
  Seed: MFNMLSTVL
MNNMLSTVW

SEQ ID NO: 158047 - protein, 9 aa, Artificial Sequence
  Description of Artificial Sequence: Synthetic peptide
  Seed: MFNMLSTVL
MNNMLSTVY

SEQ ID NO: 158048 - protein, 9 aa, Artificial Sequence
  Description of Artificial Sequence: Synthetic peptide
  Seed: MARLGKGYM
MNRLGKGYA

SEQ ID NO: 158049 - protein, 9 aa, Artificial Sequence
  Description of Artificial Sequence: Synthetic peptide
  Seed: MARLGKGYM
MNRLGKGYF

SEQ ID NO: 158050 - protein, 9 aa, Artificial Sequence
  Description of Artificial Sequence: Synthetic peptide
  Seed: MARLGKGYM
MNRLGKGYI

SEQ ID NO: 158051 - protein, 9 aa, Artificial Sequence
  Description of Artificial Sequence: Synthetic peptide
  Seed: MARLGKGYM
MNRLGKGYK

SEQ ID NO: 158052 - protein, 10 aa, Artificial Sequence
  Description of Artificial Sequence: Synthetic peptide
  Seed: MARLGKGYMF
MNRLGKGYMA

SEQ ID NO: 158053 - protein, 10 aa, Artificial Sequence
  Description of Artificial Sequence: Synthetic peptide
  Seed: MARLGKGYMF
MNRLGKGYMF

SEQ ID NO: 158054 - protein, 10 aa, Artificial Sequence
  Description of Artificial Sequence: Synthetic peptide
  Seed: MARLGKGYMF
MNRLGKGYMI

SEQ ID NO: 158055 - protein, 10 aa, Artificial Sequence
  Description of Artificial Sequence: Synthetic peptide
  Seed: MARLGKGYMF
MNRLGKGYMK

SEQ ID NO: 158056 - protein, 10 aa, Artificial Sequence
  Description of Artificial Sequence: Synthetic peptide
  Seed: MARLGKGYMF
MNRLGKGYML

SEQ ID NO: 158057 - protein, 10 aa, Artificial Sequence
  Description of Artificial Sequence: Synthetic peptide
  Seed: MARLGKGYMF
MNRLGKGYMM

SEQ ID NO: 158058 - protein, 10 aa, Artificial Sequence
  Description of Artificial Sequence: Synthetic peptide
  Seed: MARLGKGYMF
MNRLGKGYMR

SEQ ID NO: 158059 - protein, 10 aa, Artificial Sequence
  Description of Artificial Sequence: Synthetic peptide
  Seed: MARLGKGYMF
MNRLGKGYMV

SEQ ID NO: 158060 - protein, 10 aa, Artificial Sequence
  Description of Artificial Sequence: Synthetic peptide
  Seed: MARLGKGYMF
MNRLGKGYMW

SEQ ID NO: 158061 - protein, 10 aa, Artificial Sequence
  Description of Artificial Sequence: Synthetic peptide
  Seed: MARLGKGYMF
MNRLGKGYMY

SEQ ID NO: 158062 - protein, 9 aa, Artificial Sequence
  Description of Artificial Sequence: Synthetic peptide
  Seed: MARLGKGYM
MNRLGKGYV

SEQ ID NO: 158063 - protein, 9 aa, Artificial Sequence
  Description of Artificial Sequence: Synthetic peptide
  Seed: MARLGKGYM
MNRLGKGYY

SEQ ID NO: 158064 - protein, 11 aa, Artificial Sequence
  Description of Artificial Sequence: Synthetic peptide
  Seed: MFSNKMARLGK
MNSNKMARLGR

SEQ ID NO: 158065 - protein, 10 aa, Artificial Sequence
  Description of Artificial Sequence: Synthetic peptide
  Seed: MLSTVLGVSI
MNSTVLGVSF

SEQ ID NO: 158066 - protein, 10 aa, Artificial Sequence
  Description of Artificial Sequence: Synthetic peptide
  Seed: MLSTVLGVSI
MNSTVLGVSI

SEQ ID NO: 158067 - protein, 10 aa, Artificial Sequence
  Description of Artificial Sequence: Synthetic peptide
  Seed: MLSTVLGVSI
MNSTVLGVSL

SEQ ID NO: 158068 - protein, 10 aa, Artificial Sequence
  Description of Artificial Sequence: Synthetic peptide
  Seed: MLSTVLGVSI
MNSTVLGVSM

SEQ ID NO: 158069 - protein, 10 aa, Artificial Sequence
  Description of Artificial Sequence: Synthetic peptide
  Seed: MLSTVLGVSI
MNSTVLGVSV

SEQ ID NO: 158070 - protein, 10 aa, Artificial Sequence
  Description of Artificial Sequence: Synthetic peptide
  Seed: MLSTVLGVSI
MNSTVLGVSW

SEQ ID NO: 158071 - protein, 10 aa, Artificial Sequence
  Description of Artificial Sequence: Synthetic peptide
  Seed: MLSTVLGVSI
MNSTVLGVSY

SEQ ID NO: 158072 - protein, 11 aa, Artificial Sequence
  Description of Artificial Sequence: Synthetic peptide
  Seed: MMGMFNMLSTV
MPGMFNMLSTA

SEQ ID NO: 158073 - protein, 11 aa, Artificial Sequence
  Description of Artificial Sequence: Synthetic peptide
  Seed: MMGMFNMLSTV
MPGMFNMLSTI

SEQ ID NO: 158074 - protein, 11 aa, Artificial Sequence
  Description of Artificial Sequence: Synthetic peptide
  Seed: MMGMFNMLSTV
MPGMFNMLSTL

SEQ ID NO: 158075 - protein, 11 aa, Artificial Sequence
  Description of Artificial Sequence: Synthetic peptide
  Seed: MMGMFNMLSTV
MPGMFNMLSTM

SEQ ID NO: 158076 - protein, 11 aa, Artificial Sequence
  Description of Artificial Sequence: Synthetic peptide
  Seed: MMGMFNMLSTV
MPGMFNMLSTT

SEQ ID NO: 158077 - protein, 11 aa, Artificial Sequence
  Description of Artificial Sequence: Synthetic peptide
  Seed: MMGMFNMLSTV
MPGMFNMLSTV

SEQ ID NO: 158078 - protein, 10 aa, Artificial Sequence
  Description of Artificial Sequence: Synthetic peptide
  Seed: MMGMFNMLST
MPGMFNMLSV

SEQ ID NO: 158079 - protein, 9 aa, Artificial Sequence
  Description of Artificial Sequence: Synthetic peptide
  Seed: MSIGVTVIK
MPIGVTVIK

SEQ ID NO: 158080 - protein, 10 aa, Artificial Sequence
  Description of Artificial Sequence: Synthetic peptide
  Seed: MSIGVTVIKN
MPIGVTVIKK

SEQ ID NO: 158081 - protein, 10 aa, Artificial Sequence
  Description of Artificial Sequence: Synthetic peptide
  Seed: MSIGVTVIKN
MPIGVTVIKR

SEQ ID NO: 158082 - protein, 9 aa, Artificial Sequence
  Description of Artificial Sequence: Synthetic peptide
  Seed: MSIGVTVIK
MPIGVTVIR

SEQ ID NO: 158083 - protein, 9 aa, Artificial Sequence
  Description of Artificial Sequence: Synthetic peptide
  Seed: MSIGVTVIK
MPIGVTVIY

SEQ ID NO: 158084 - protein, 10 aa, Artificial Sequence
  Description of Artificial Sequence: Synthetic peptide
  Seed: MGMFNMLSTV
MPMFNMLSTA

SEQ ID NO: 158085 - protein, 10 aa, Artificial Sequence
  Description of Artificial Sequence: Synthetic peptide
  Seed: MGMFNMLSTV
MPMFNMLSTC

SEQ ID NO: 158086 - protein, 10 aa, Artificial Sequence
  Description of Artificial Sequence: Synthetic peptide
  Seed: MGMFNMLSTV
MPMFNMLSTF

SEQ ID NO: 158087 - protein, 10 aa, Artificial Sequence
  Description of Artificial Sequence: Synthetic peptide
  Seed: MGMFNMLSTV
MPMFNMLSTG

SEQ ID NO: 158088 - protein, 10 aa, Artificial Sequence
  Description of Artificial Sequence: Synthetic peptide
  Seed: MGMFNMLSTV
MPMFNMLSTH

SEQ ID NO: 158089 - protein, 10 aa, Artificial Sequence
  Description of Artificial Sequence: Synthetic peptide
  Seed: MGMFNMLSTV
MPMFNMLSTI

SEQ ID NO: 158090 - protein, 10 aa, Artificial Sequence
  Description of Artificial Sequence: Synthetic peptide
  Seed: MGMFNMLSTV
MPMFNMLSTL

SEQ ID NO: 158091 - protein, 10 aa, Artificial Sequence
  Description of Artificial Sequence: Synthetic peptide
  Seed: MGMFNMLSTV
MPMFNMLSTM

SEQ ID NO: 158092 - protein, 10 aa, Artificial Sequence
  Description of Artificial Sequence: Synthetic peptide
  Seed: MGMFNMLSTV
MPMFNMLSTP

SEQ ID NO: 158093 - protein, 10 aa, Artificial Sequence
  Description of Artificial Sequence: Synthetic peptide
  Seed: MGMFNMLSTV
MPMFNMLSTS

SEQ ID NO: 158094 - protein, 10 aa, Artificial Sequence
  Description of Artificial Sequence: Synthetic peptide
  Seed: MGMFNMLSTV
MPMFNMLSTT

SEQ ID NO: 158095 - protein, 10 aa, Artificial Sequence
  Description of Artificial Sequence: Synthetic peptide
  Seed: MGMFNMLSTV
MPMFNMLSTV

SEQ ID NO: 158096 - protein, 11 aa, Artificial Sequence
  Description of Artificial Sequence: Synthetic peptide
  Seed: MGMFNMLSTVL
MPMFNMLSTVA

SEQ ID NO: 158097 - protein, 11 aa, Artificial Sequence
  Description of Artificial Sequence: Synthetic peptide
  Seed: MGMFNMLSTVL
MPMFNMLSTVC

SEQ ID NO: 158098 - protein, 11 aa, Artificial Sequence
  Description of Artificial Sequence: Synthetic peptide
  Seed: MGMFNMLSTVL
MPMFNMLSTVD

SEQ ID NO: 158099 - protein, 11 aa, Artificial Sequence
  Description of Artificial Sequence: Synthetic peptide
  Seed: MGMFNMLSTVL
MPMFNMLSTVE

SEQ ID NO: 158100 - protein, 11 aa, Artificial Sequence
  Description of Artificial Sequence: Synthetic peptide
  Seed: MGMFNMLSTVL
MPMFNMLSTVF

SEQ ID NO: 158101 - protein, 11 aa, Artificial Sequence
  Description of Artificial Sequence: Synthetic peptide
  Seed: MGMFNMLSTVL
MPMFNMLSTVG

SEQ ID NO: 158102 - protein, 11 aa, Artificial Sequence
  Description of Artificial Sequence: Synthetic peptide
  Seed: MGMFNMLSTVL
MPMFNMLSTVH

SEQ ID NO: 158103 - protein, 11 aa, Artificial Sequence
  Description of Artificial Sequence: Synthetic peptide
  Seed: MGMFNMLSTVL
MPMFNMLSTVI

SEQ ID NO: 158104 - protein, 11 aa, Artificial Sequence
  Description of Artificial Sequence: Synthetic peptide
  Seed: MGMFNMLSTVL
MPMFNMLSTVK

SEQ ID NO: 158105 - protein, 11 aa, Artificial Sequence
  Description of Artificial Sequence: Synthetic peptide
  Seed: MGMFNMLSTVL
MPMFNMLSTVL

SEQ ID NO: 158106 - protein, 11 aa, Artificial Sequence
  Description of Artificial Sequence: Synthetic peptide
  Seed: MGMFNMLSTVL
MPMFNMLSTVM

SEQ ID NO: 158107 - protein, 11 aa, Artificial Sequence
  Description of Artificial Sequence: Synthetic peptide
  Seed: MGMFNMLSTVL
MPMFNMLSTVN

SEQ ID NO: 158108 - protein, 11 aa, Artificial Sequence
  Description of Artificial Sequence: Synthetic peptide
  Seed: MGMFNMLSTVL
MPMFNMLSTVP

SEQ ID NO: 158109 - protein, 11 aa, Artificial Sequence
  Description of Artificial Sequence: Synthetic peptide
  Seed: MGMFNMLSTVL
MPMFNMLSTVQ

SEQ ID NO: 158110 - protein, 11 aa, Artificial Sequence
  Description of Artificial Sequence: Synthetic peptide
  Seed: MGMFNMLSTVL
MPMFNMLSTVR

SEQ ID NO: 158111 - protein, 11 aa, Artificial Sequence
  Description of Artificial Sequence: Synthetic peptide
  Seed: MGMFNMLSTVL
MPMFNMLSTVS

SEQ ID NO: 158112 - protein, 11 aa, Artificial Sequence
  Description of Artificial Sequence: Synthetic peptide
  Seed: MGMFNMLSTVL
MPMFNMLSTVT

SEQ ID NO: 158113 - protein, 11 aa, Artificial Sequence
  Description of Artificial Sequence: Synthetic peptide
  Seed: MGMFNMLSTVL
MPMFNMLSTVV

SEQ ID NO: 158114 - protein, 11 aa, Artificial Sequence
  Description of Artificial Sequence: Synthetic peptide
  Seed: MGMFNMLSTVL
MPMFNMLSTVW

SEQ ID NO: 158115 - protein, 11 aa, Artificial Sequence
  Description of Artificial Sequence: Synthetic peptide
  Seed: MGMFNMLSTVL
MPMFNMLSTVY

SEQ ID NO: 158116 - protein, 10 aa, Artificial Sequence
  Description of Artificial Sequence: Synthetic peptide
  Seed: MGMFNMLSTV
MPMFNMLSTW

SEQ ID NO: 158117 - protein, 10 aa, Artificial Sequence
  Description of Artificial Sequence: Synthetic peptide
  Seed: MGMFNMLSTV
MPMFNMLSTY

SEQ ID NO: 158118 - protein, 8 aa, Artificial Sequence
  Description of Artificial Sequence: Synthetic peptide
  Seed: MMMGMFNM
MPMGMFNL

SEQ ID NO: 158119 - protein, 8 aa, Artificial Sequence
  Description of Artificial Sequence: Synthetic peptide
  Seed: MMMGMFNM
MPMGMFNM

SEQ ID NO: 158120 - protein, 9 aa, Artificial Sequence
  Description of Artificial Sequence: Synthetic peptide
  Seed: MMMGMFNML
MPMGMFNMA

SEQ ID NO: 158121 - protein, 9 aa, Artificial Sequence
  Description of Artificial Sequence: Synthetic peptide
  Seed: MMMGMFNML
MPMGMFNMC

SEQ ID NO: 158122 - protein, 9 aa, Artificial Sequence
  Description of Artificial Sequence: Synthetic peptide
  Seed: MMMGMFNML
MPMGMFNMD

SEQ ID NO: 158123 - protein, 9 aa, Artificial Sequence
  Description of Artificial Sequence: Synthetic peptide
  Seed: MMMGMFNML
MPMGMFNME

SEQ ID NO: 158124 - protein, 9 aa, Artificial Sequence
  Description of Artificial Sequence: Synthetic peptide
  Seed: MMMGMFNML
MPMGMFNMF

SEQ ID NO: 158125 - protein, 9 aa, Artificial Sequence
  Description of Artificial Sequence: Synthetic peptide
  Seed: MMMGMFNML
MPMGMFNMG

SEQ ID NO: 158126 - protein, 9 aa, Artificial Sequence
  Description of Artificial Sequence: Synthetic peptide
  Seed: MMMGMFNML
MPMGMFNMH

SEQ ID NO: 158127 - protein, 9 aa, Artificial Sequence
  Description of Artificial Sequence: Synthetic peptide
  Seed: MMMGMFNML
MPMGMFNMI

SEQ ID NO: 158128 - protein, 9 aa, Artificial Sequence
  Description of Artificial Sequence: Synthetic peptide
  Seed: MMMGMFNML
MPMGMFNMK

SEQ ID NO: 158129 - protein, 9 aa, Artificial Sequence
  Description of Artificial Sequence: Synthetic peptide
  Seed: MMMGMFNML
MPMGMFNML

SEQ ID NO: 158130 - protein, 10 aa, Artificial Sequence
  Description of Artificial Sequence: Synthetic peptide
  Seed: MMMGMFNMLS
MPMGMFNMLA

SEQ ID NO: 158131 - protein, 10 aa, Artificial Sequence
  Description of Artificial Sequence: Synthetic peptide
  Seed: MMMGMFNMLS
MPMGMFNMLI

SEQ ID NO: 158132 - protein, 10 aa, Artificial Sequence
  Description of Artificial Sequence: Synthetic peptide
  Seed: MMMGMFNMLS
MPMGMFNMLL

SEQ ID NO: 158133 - protein, 10 aa, Artificial Sequence
  Description of Artificial Sequence: Synthetic peptide
  Seed: MMMGMFNMLS
MPMGMFNMLM

SEQ ID NO: 158134 - protein, 10 aa, Artificial Sequence
  Description of Artificial Sequence: Synthetic peptide
  Seed: MMMGMFNMLS
MPMGMFNMLS

SEQ ID NO: 158135 - protein, 10 aa, Artificial Sequence
  Description of Artificial Sequence: Synthetic peptide
  Seed: MMMGMFNMLS
MPMGMFNMLT

SEQ ID NO: 158136 - protein, 10 aa, Artificial Sequence
  Description of Artificial Sequence: Synthetic peptide
  Seed: MMMGMFNMLS
MPMGMFNMLV

SEQ ID NO: 158137 - protein, 9 aa, Artificial Sequence
  Description of Artificial Sequence: Synthetic peptide
  Seed: MMMGMFNML
MPMGMFNMM

SEQ ID NO: 158138 - protein, 9 aa, Artificial Sequence
  Description of Artificial Sequence: Synthetic peptide
  Seed: MMMGMFNML
MPMGMFNMN

SEQ ID NO: 158139 - protein, 9 aa, Artificial Sequence
  Description of Artificial Sequence: Synthetic peptide
  Seed: MMMGMFNML
MPMGMFNMP

SEQ ID NO: 158140 - protein, 9 aa, Artificial Sequence
  Description of Artificial Sequence: Synthetic peptide
  Seed: MMMGMFNML
MPMGMFNMQ

SEQ ID NO: 158141 - protein, 9 aa, Artificial Sequence
  Description of Artificial Sequence: Synthetic peptide
  Seed: MMMGMFNML
MPMGMFNMR

SEQ ID NO: 158142 - protein, 9 aa, Artificial Sequence
  Description of Artificial Sequence: Synthetic peptide
  Seed: MMMGMFNML
MPMGMFNMS

SEQ ID NO: 158143 - protein, 9 aa, Artificial Sequence
  Description of Artificial Sequence: Synthetic peptide
  Seed: MMMGMFNML
MPMGMFNMT

SEQ ID NO: 158144 - protein, 9 aa, Artificial Sequence
  Description of Artificial Sequence: Synthetic peptide
  Seed: MMMGMFNML
MPMGMFNMV

SEQ ID NO: 158145 - protein, 9 aa, Artificial Sequence
  Description of Artificial Sequence: Synthetic peptide
  Seed: MMMGMFNML
MPMGMFNMW

SEQ ID NO: 158146 - protein, 9 aa, Artificial Sequence
  Description of Artificial Sequence: Synthetic peptide
  Seed: MMMGMFNML
MPMGMFNMY

SEQ ID NO: 158147 - protein, 8 aa, Artificial Sequence
  Description of Artificial Sequence: Synthetic peptide
  Seed: MMMGMFNM
MPMGMFNY

SEQ ID NO: 158148 - protein, 9 aa, Artificial Sequence
  Description of Artificial Sequence: Synthetic peptide
  Seed: MFNMLSTVL
MPNMLSTVA

SEQ ID NO: 158149 - protein, 9 aa, Artificial Sequence
  Description of Artificial Sequence: Synthetic peptide
  Seed: MFNMLSTVL
MPNMLSTVC

SEQ ID NO: 158150 - protein, 9 aa, Artificial Sequence
  Description of Artificial Sequence: Synthetic peptide
  Seed: MFNMLSTVL
MPNMLSTVD

SEQ ID NO: 158151 - protein, 9 aa, Artificial Sequence
  Description of Artificial Sequence: Synthetic peptide
  Seed: MFNMLSTVL
MPNMLSTVE

SEQ ID NO: 158152 - protein, 9 aa, Artificial Sequence
  Description of Artificial Sequence: Synthetic peptide
  Seed: MFNMLSTVL
MPNMLSTVF

SEQ ID NO: 158153 - protein, 9 aa, Artificial Sequence
  Description of Artificial Sequence: Synthetic peptide
  Seed: MFNMLSTVL
MPNMLSTVG

SEQ ID NO: 158154 - protein, 9 aa, Artificial Sequence
  Description of Artificial Sequence: Synthetic peptide
  Seed: MFNMLSTVL
MPNMLSTVH

SEQ ID NO: 158155 - protein, 9 aa, Artificial Sequence
  Description of Artificial Sequence: Synthetic peptide
  Seed: MFNMLSTVL
MPNMLSTVI

SEQ ID NO: 158156 - protein, 9 aa, Artificial Sequence
  Description of Artificial Sequence: Synthetic peptide
  Seed: MFNMLSTVL
MPNMLSTVK

SEQ ID NO: 158157 - protein, 9 aa, Artificial Sequence
  Description of Artificial Sequence: Synthetic peptide
  Seed: MFNMLSTVL
MPNMLSTVL

SEQ ID NO: 158158 - protein, 11 aa, Artificial Sequence
  Description of Artificial Sequence: Synthetic peptide
  Seed: MFNMLSTVLGV
MPNMLSTVLGA

SEQ ID NO: 158159 - protein, 11 aa, Artificial Sequence
  Description of Artificial Sequence: Synthetic peptide
  Seed: MFNMLSTVLGV
MPNMLSTVLGI

SEQ ID NO: 158160 - protein, 11 aa, Artificial Sequence
  Description of Artificial Sequence: Synthetic peptide
  Seed: MFNMLSTVLGV
MPNMLSTVLGL

SEQ ID NO: 158161 - protein, 11 aa, Artificial Sequence
  Description of Artificial Sequence: Synthetic peptide
  Seed: MFNMLSTVLGV
MPNMLSTVLGM

SEQ ID NO: 158162 - protein, 11 aa, Artificial Sequence
  Description of Artificial Sequence: Synthetic peptide
  Seed: MFNMLSTVLGV
MPNMLSTVLGT

SEQ ID NO: 158163 - protein, 11 aa, Artificial Sequence
  Description of Artificial Sequence: Synthetic peptide
  Seed: MFNMLSTVLGV
MPNMLSTVLGV

SEQ ID NO: 158164 - protein, 9 aa, Artificial Sequence
  Description of Artificial Sequence: Synthetic peptide
  Seed: MFNMLSTVL
MPNMLSTVM

SEQ ID NO: 158165 - protein, 9 aa, Artificial Sequence
  Description of Artificial Sequence: Synthetic peptide
  Seed: MFNMLSTVL
MPNMLSTVN

SEQ ID NO: 158166 - protein, 9 aa, Artificial Sequence
  Description of Artificial Sequence: Synthetic peptide
  Seed: MFNMLSTVL
MPNMLSTVP

SEQ ID NO: 158167 - protein, 9 aa, Artificial Sequence
  Description of Artificial Sequence: Synthetic peptide
  Seed: MFNMLSTVL
MPNMLSTVQ

SEQ ID NO: 158168 - protein, 9 aa, Artificial Sequence
  Description of Artificial Sequence: Synthetic peptide
  Seed: MFNMLSTVL
MPNMLSTVR

SEQ ID NO: 158169 - protein, 9 aa, Artificial Sequence
  Description of Artificial Sequence: Synthetic peptide
  Seed: MFNMLSTVL
MPNMLSTVS

SEQ ID NO: 158170 - protein, 9 aa, Artificial Sequence
  Description of Artificial Sequence: Synthetic peptide
  Seed: MFNMLSTVL
MPNMLSTVT

SEQ ID NO: 158171 - protein, 9 aa, Artificial Sequence
  Description of Artificial Sequence: Synthetic peptide
  Seed: MFNMLSTVL
MPNMLSTVV

SEQ ID NO: 158172 - protein, 9 aa, Artificial Sequence
  Description of Artificial Sequence: Synthetic peptide
  Seed: MFNMLSTVL
MPNMLSTVW

SEQ ID NO: 158173 - protein, 9 aa, Artificial Sequence
  Description of Artificial Sequence: Synthetic peptide
  Seed: MFNMLSTVL
MPNMLSTVY

SEQ ID NO: 158174 - protein, 9 aa, Artificial Sequence
  Description of Artificial Sequence: Synthetic peptide
  Seed: MARLGKGYM
MPRLGKGYA

SEQ ID NO: 158175 - protein, 9 aa, Artificial Sequence
  Description of Artificial Sequence: Synthetic peptide
  Seed: MARLGKGYM
MPRLGKGYC

SEQ ID NO: 158176 - protein, 9 aa, Artificial Sequence
  Description of Artificial Sequence: Synthetic peptide
  Seed: MARLGKGYM
MPRLGKGYE

SEQ ID NO: 158177 - protein, 9 aa, Artificial Sequence
  Description of Artificial Sequence: Synthetic peptide
  Seed: MARLGKGYM
MPRLGKGYF

SEQ ID NO: 158178 - protein, 9 aa, Artificial Sequence
  Description of Artificial Sequence: Synthetic peptide
  Seed: MARLGKGYM
MPRLGKGYG

SEQ ID NO: 158179 - protein, 9 aa, Artificial Sequence
  Description of Artificial Sequence: Synthetic peptide
  Seed: MARLGKGYM
MPRLGKGYH

SEQ ID NO: 158180 - protein, 9 aa, Artificial Sequence
  Description of Artificial Sequence: Synthetic peptide
  Seed: MARLGKGYM
MPRLGKGYI

SEQ ID NO: 158181 - protein, 9 aa, Artificial Sequence
  Description of Artificial Sequence: Synthetic peptide
  Seed: MARLGKGYM
MPRLGKGYL

SEQ ID NO: 158182 - protein, 9 aa, Artificial Sequence
  Description of Artificial Sequence: Synthetic peptide
  Seed: MARLGKGYM
MPRLGKGYM

SEQ ID NO: 158183 - protein, 10 aa, Artificial Sequence
  Description of Artificial Sequence: Synthetic peptide
  Seed: MARLGKGYMF
MPRLGKGYMA

SEQ ID NO: 158184 - protein, 10 aa, Artificial Sequence
  Description of Artificial Sequence: Synthetic peptide
  Seed: MARLGKGYMF
MPRLGKGYMF

SEQ ID NO: 158185 - protein, 10 aa, Artificial Sequence
  Description of Artificial Sequence: Synthetic peptide
  Seed: MARLGKGYMF
MPRLGKGYMI

SEQ ID NO: 158186 - protein, 10 aa, Artificial Sequence
  Description of Artificial Sequence: Synthetic peptide
  Seed: MARLGKGYMF
MPRLGKGYMK

SEQ ID NO: 158187 - protein, 10 aa, Artificial Sequence
  Description of Artificial Sequence: Synthetic peptide
  Seed: MARLGKGYMF
MPRLGKGYMM

SEQ ID NO: 158188 - protein, 10 aa, Artificial Sequence
  Description of Artificial Sequence: Synthetic peptide
  Seed: MARLGKGYMF
MPRLGKGYMR

SEQ ID NO: 158189 - protein, 10 aa, Artificial Sequence
  Description of Artificial Sequence: Synthetic peptide
  Seed: MARLGKGYMF
MPRLGKGYMV

SEQ ID NO: 158190 - protein, 10 aa, Artificial Sequence
  Description of Artificial Sequence: Synthetic peptide
  Seed: MARLGKGYMF
MPRLGKGYMW

SEQ ID NO: 158191 - protein, 10 aa, Artificial Sequence
  Description of Artificial Sequence: Synthetic peptide
  Seed: MARLGKGYMF
MPRLGKGYMY

SEQ ID NO: 158192 - protein, 9 aa, Artificial Sequence
  Description of Artificial Sequence: Synthetic peptide
  Seed: MARLGKGYM
MPRLGKGYP

SEQ ID NO: 158193 - protein, 9 aa, Artificial Sequence
  Description of Artificial Sequence: Synthetic peptide
  Seed: MARLGKGYM
MPRLGKGYS

SEQ ID NO: 158194 - protein, 9 aa, Artificial Sequence
  Description of Artificial Sequence: Synthetic peptide
  Seed: MARLGKGYM
MPRLGKGYT

SEQ ID NO: 158195 - protein, 9 aa, Artificial Sequence
  Description of Artificial Sequence: Synthetic peptide
  Seed: MARLGKGYM
MPRLGKGYV

SEQ ID NO: 158196 - protein, 9 aa, Artificial Sequence
  Description of Artificial Sequence: Synthetic peptide
  Seed: MARLGKGYM
MPRLGKGYW

SEQ ID NO: 158197 - protein, 9 aa, Artificial Sequence
  Description of Artificial Sequence: Synthetic peptide
  Seed: MARLGKGYM
MPRLGKGYY

SEQ ID NO: 158198 - protein, 10 aa, Artificial Sequence
  Description of Artificial Sequence: Synthetic peptide
  Seed: MLSTVLGVSI
MPSTVLGVSF

SEQ ID NO: 158199 - protein, 10 aa, Artificial Sequence
  Description of Artificial Sequence: Synthetic peptide
  Seed: MLSTVLGVSI
MPSTVLGVSI

SEQ ID NO: 158200 - protein, 10 aa, Artificial Sequence
  Description of Artificial Sequence: Synthetic peptide
  Seed: MLSTVLGVSI
MPSTVLGVSL

SEQ ID NO: 158201 - protein, 10 aa, Artificial Sequence
  Description of Artificial Sequence: Synthetic peptide
  Seed: MLSTVLGVSI
MPSTVLGVSM

SEQ ID NO: 158202 - protein, 10 aa, Artificial Sequence
  Description of Artificial Sequence: Synthetic peptide
  Seed: MLSTVLGVSI
MPSTVLGVSV

SEQ ID NO: 158203 - protein, 10 aa, Artificial Sequence
  Description of Artificial Sequence: Synthetic peptide
  Seed: MLSTVLGVSI
MPSTVLGVSW

SEQ ID NO: 158204 - protein, 10 aa, Artificial Sequence
  Description of Artificial Sequence: Synthetic peptide
  Seed: MLSTVLGVSI
MPSTVLGVSY

SEQ ID NO: 158205 - protein, 9 aa, Artificial Sequence
  Description of Artificial Sequence: Synthetic peptide
  Seed: MMGMFNMLS
MQGMFNMLA

SEQ ID NO: 158206 - protein, 9 aa, Artificial Sequence
  Description of Artificial Sequence: Synthetic peptide
  Seed: MMGMFNMLS
MQGMFNMLF

SEQ ID NO: 158207 - protein, 9 aa, Artificial Sequence
  Description of Artificial Sequence: Synthetic peptide
  Seed: MMGMFNMLS
MQGMFNMLI

SEQ ID NO: 158208 - protein, 9 aa, Artificial Sequence
  Description of Artificial Sequence: Synthetic peptide
  Seed: MMGMFNMLS
MQGMFNMLL

SEQ ID NO: 158209 - protein, 9 aa, Artificial Sequence
  Description of Artificial Sequence: Synthetic peptide
  Seed: MMGMFNMLS
MQGMFNMLM

SEQ ID NO: 158210 - protein, 10 aa, Artificial Sequence
  Description of Artificial Sequence: Synthetic peptide
  Seed: MMGMFNMLST
MQGMFNMLSA

SEQ ID NO: 158211 - protein, 10 aa, Artificial Sequence
  Description of Artificial Sequence: Synthetic peptide
  Seed: MMGMFNMLST
MQGMFNMLSC

SEQ ID NO: 158212 - protein, 10 aa, Artificial Sequence
  Description of Artificial Sequence: Synthetic peptide
  Seed: MMGMFNMLST
MQGMFNMLSF

SEQ ID NO: 158213 - protein, 10 aa, Artificial Sequence
  Description of Artificial Sequence: Synthetic peptide
  Seed: MMGMFNMLST
MQGMFNMLSI

SEQ ID NO: 158214 - protein, 10 aa, Artificial Sequence
  Description of Artificial Sequence: Synthetic peptide
  Seed: MMGMFNMLST
MQGMFNMLSL

SEQ ID NO: 158215 - protein, 10 aa, Artificial Sequence
  Description of Artificial Sequence: Synthetic peptide
  Seed: MMGMFNMLST
MQGMFNMLSM

SEQ ID NO: 158216 - protein, 10 aa, Artificial Sequence
  Description of Artificial Sequence: Synthetic peptide
  Seed: MMGMFNMLST
MQGMFNMLSS

SEQ ID NO: 158217 - protein, 10 aa, Artificial Sequence
  Description of Artificial Sequence: Synthetic peptide
  Seed: MMGMFNMLST
MQGMFNMLST

SEQ ID NO: 158218 - protein, 11 aa, Artificial Sequence
  Description of Artificial Sequence: Synthetic peptide
  Seed: MMGMFNMLSTV
MQGMFNMLSTA

SEQ ID NO: 158219 - protein, 11 aa, Artificial Sequence
  Description of Artificial Sequence: Synthetic peptide
  Seed: MMGMFNMLSTV
MQGMFNMLSTI

SEQ ID NO: 158220 - protein, 11 aa, Artificial Sequence
  Description of Artificial Sequence: Synthetic peptide
  Seed: MMGMFNMLSTV
MQGMFNMLSTL

SEQ ID NO: 158221 - protein, 11 aa, Artificial Sequence
  Description of Artificial Sequence: Synthetic peptide
  Seed: MMGMFNMLSTV
MQGMFNMLSTM

SEQ ID NO: 158222 - protein, 11 aa, Artificial Sequence
  Description of Artificial Sequence: Synthetic peptide
  Seed: MMGMFNMLSTV
MQGMFNMLSTT

SEQ ID NO: 158223 - protein, 11 aa, Artificial Sequence
  Description of Artificial Sequence: Synthetic peptide
  Seed: MMGMFNMLSTV
MQGMFNMLSTV

SEQ ID NO: 158224 - protein, 10 aa, Artificial Sequence
  Description of Artificial Sequence: Synthetic peptide
  Seed: MMGMFNMLST
MQGMFNMLSV

SEQ ID NO: 158225 - protein, 9 aa, Artificial Sequence
  Description of Artificial Sequence: Synthetic peptide
  Seed: MMGMFNMLS
MQGMFNMLT

SEQ ID NO: 158226 - protein, 9 aa, Artificial Sequence
  Description of Artificial Sequence: Synthetic peptide
  Seed: MMGMFNMLS
MQGMFNMLV

SEQ ID NO: 158227 - protein, 9 aa, Artificial Sequence
  Description of Artificial Sequence: Synthetic peptide
  Seed: MSIGVTVIK
MQIGVTVIK

SEQ ID NO: 158228 - protein, 10 aa, Artificial Sequence
  Description of Artificial Sequence: Synthetic peptide
  Seed: MSIGVTVIKN
MQIGVTVIKK

SEQ ID NO: 158229 - protein, 10 aa, Artificial Sequence
  Description of Artificial Sequence: Synthetic peptide
  Seed: MSIGVTVIKN
MQIGVTVIKR

SEQ ID NO: 158230 - protein, 9 aa, Artificial Sequence
  Description of Artificial Sequence: Synthetic peptide
  Seed: MSIGVTVIK
MQIGVTVIR

SEQ ID NO: 158231 - protein, 9 aa, Artificial Sequence
  Description of Artificial Sequence: Synthetic peptide
  Seed: MTKDAERGK
MQKDAERGK

SEQ ID NO: 158232 - protein, 9 aa, Artificial Sequence
  Description of Artificial Sequence: Synthetic peptide
  Seed: MELPSFGVS
MQLPSFGVA

SEQ ID NO: 158233 - protein, 9 aa, Artificial Sequence
  Description of Artificial Sequence: Synthetic peptide
  Seed: MELPSFGVS
MQLPSFGVP

SEQ ID NO: 158234 - protein, 10 aa, Artificial Sequence
  Description of Artificial Sequence: Synthetic peptide
  Seed: MGMFNMLSTV
MQMFNMLSTA

SEQ ID NO: 158235 - protein, 10 aa, Artificial Sequence
  Description of Artificial Sequence: Synthetic peptide
  Seed: MGMFNMLSTV
MQMFNMLSTC

SEQ ID NO: 158236 - protein, 10 aa, Artificial Sequence
  Description of Artificial Sequence: Synthetic peptide
  Seed: MGMFNMLSTV
MQMFNMLSTF

SEQ ID NO: 158237 - protein, 10 aa, Artificial Sequence
  Description of Artificial Sequence: Synthetic peptide
  Seed: MGMFNMLSTV
MQMFNMLSTG

SEQ ID NO: 158238 - protein, 10 aa, Artificial Sequence
  Description of Artificial Sequence: Synthetic peptide
  Seed: MGMFNMLSTV
MQMFNMLSTH

SEQ ID NO: 158239 - protein, 10 aa, Artificial Sequence
  Description of Artificial Sequence: Synthetic peptide
  Seed: MGMFNMLSTV
MQMFNMLSTI

SEQ ID NO: 158240 - protein, 10 aa, Artificial Sequence
  Description of Artificial Sequence: Synthetic peptide
  Seed: MGMFNMLSTV
MQMFNMLSTL

SEQ ID NO: 158241 - protein, 10 aa, Artificial Sequence
  Description of Artificial Sequence: Synthetic peptide
  Seed: MGMFNMLSTV
MQMFNMLSTM

SEQ ID NO: 158242 - protein, 10 aa, Artificial Sequence
  Description of Artificial Sequence: Synthetic peptide
  Seed: MGMFNMLSTV
MQMFNMLSTP

SEQ ID NO: 158243 - protein, 10 aa, Artificial Sequence
  Description of Artificial Sequence: Synthetic peptide
  Seed: MGMFNMLSTV
MQMFNMLSTS

SEQ ID NO: 158244 - protein, 10 aa, Artificial Sequence
  Description of Artificial Sequence: Synthetic peptide
  Seed: MGMFNMLSTV
MQMFNMLSTT

SEQ ID NO: 158245 - protein, 10 aa, Artificial Sequence
  Description of Artificial Sequence: Synthetic peptide
  Seed: MGMFNMLSTV
MQMFNMLSTV

SEQ ID NO: 158246 - protein, 11 aa, Artificial Sequence
  Description of Artificial Sequence: Synthetic peptide
  Seed: MGMFNMLSTVL
MQMFNMLSTVA

SEQ ID NO: 158247 - protein, 11 aa, Artificial Sequence
  Description of Artificial Sequence: Synthetic peptide
  Seed: MGMFNMLSTVL
MQMFNMLSTVC

SEQ ID NO: 158248 - protein, 11 aa, Artificial Sequence
  Description of Artificial Sequence: Synthetic peptide
  Seed: MGMFNMLSTVL
MQMFNMLSTVD

SEQ ID NO: 158249 - protein, 11 aa, Artificial Sequence
  Description of Artificial Sequence: Synthetic peptide
  Seed: MGMFNMLSTVL
MQMFNMLSTVE

SEQ ID NO: 158250 - protein, 11 aa, Artificial Sequence
  Description of Artificial Sequence: Synthetic peptide
  Seed: MGMFNMLSTVL
MQMFNMLSTVF

SEQ ID NO: 158251 - protein, 11 aa, Artificial Sequence
  Description of Artificial Sequence: Synthetic peptide
  Seed: MGMFNMLSTVL
MQMFNMLSTVG

SEQ ID NO: 158252 - protein, 11 aa, Artificial Sequence
  Description of Artificial Sequence: Synthetic peptide
  Seed: MGMFNMLSTVL
MQMFNMLSTVH

SEQ ID NO: 158253 - protein, 11 aa, Artificial Sequence
  Description of Artificial Sequence: Synthetic peptide
  Seed: MGMFNMLSTVL
MQMFNMLSTVI

SEQ ID NO: 158254 - protein, 11 aa, Artificial Sequence
  Description of Artificial Sequence: Synthetic peptide
  Seed: MGMFNMLSTVL
MQMFNMLSTVK

SEQ ID NO: 158255 - protein, 11 aa, Artificial Sequence
  Description of Artificial Sequence: Synthetic peptide
  Seed: MGMFNMLSTVL
MQMFNMLSTVL

SEQ ID NO: 158256 - protein, 11 aa, Artificial Sequence
  Description of Artificial Sequence: Synthetic peptide
  Seed: MGMFNMLSTVL
MQMFNMLSTVM

SEQ ID NO: 158257 - protein, 11 aa, Artificial Sequence
  Description of Artificial Sequence: Synthetic peptide
  Seed: MGMFNMLSTVL
MQMFNMLSTVN

SEQ ID NO: 158258 - protein, 11 aa, Artificial Sequence
  Description of Artificial Sequence: Synthetic peptide
  Seed: MGMFNMLSTVL
MQMFNMLSTVP

SEQ ID NO: 158259 - protein, 11 aa, Artificial Sequence
  Description of Artificial Sequence: Synthetic peptide
  Seed: MGMFNMLSTVL
MQMFNMLSTVQ

SEQ ID NO: 158260 - protein, 11 aa, Artificial Sequence
  Description of Artificial Sequence: Synthetic peptide
  Seed: MGMFNMLSTVL
MQMFNMLSTVR

SEQ ID NO: 158261 - protein, 11 aa, Artificial Sequence
  Description of Artificial Sequence: Synthetic peptide
  Seed: MGMFNMLSTVL
MQMFNMLSTVS

SEQ ID NO: 158262 - protein, 11 aa, Artificial Sequence
  Description of Artificial Sequence: Synthetic peptide
  Seed: MGMFNMLSTVL
MQMFNMLSTVT

SEQ ID NO: 158263 - protein, 11 aa, Artificial Sequence
  Description of Artificial Sequence: Synthetic peptide
  Seed: MGMFNMLSTVL
MQMFNMLSTVV

SEQ ID NO: 158264 - protein, 11 aa, Artificial Sequence
  Description of Artificial Sequence: Synthetic peptide
  Seed: MGMFNMLSTVL
MQMFNMLSTVW

SEQ ID NO: 158265 - protein, 11 aa, Artificial Sequence
  Description of Artificial Sequence: Synthetic peptide
  Seed: MGMFNMLSTVL
MQMFNMLSTVY

SEQ ID NO: 158266 - protein, 10 aa, Artificial Sequence
  Description of Artificial Sequence: Synthetic peptide
  Seed: MGMFNMLSTV
MQMFNMLSTW

SEQ ID NO: 158267 - protein, 10 aa, Artificial Sequence
  Description of Artificial Sequence: Synthetic peptide
  Seed: MGMFNMLSTV
MQMFNMLSTY

SEQ ID NO: 158268 - protein, 8 aa, Artificial Sequence
  Description of Artificial Sequence: Synthetic peptide
  Seed: MMMGMFNM
MQMGMFNA

SEQ ID NO: 158269 - protein, 8 aa, Artificial Sequence
  Description of Artificial Sequence: Synthetic peptide
  Seed: MMMGMFNM
MQMGMFNF

SEQ ID NO: 158270 - protein, 8 aa, Artificial Sequence
  Description of Artificial Sequence: Synthetic peptide
  Seed: MMMGMFNM
MQMGMFNH

SEQ ID NO: 158271 - protein, 8 aa, Artificial Sequence
  Description of Artificial Sequence: Synthetic peptide
  Seed: MMMGMFNM
MQMGMFNI

SEQ ID NO: 158272 - protein, 8 aa, Artificial Sequence
  Description of Artificial Sequence: Synthetic peptide
  Seed: MMMGMFNM
MQMGMFNL

SEQ ID NO: 158273 - protein, 8 aa, Artificial Sequence
  Description of Artificial Sequence: Synthetic peptide
  Seed: MMMGMFNM
MQMGMFNM

SEQ ID NO: 158274 - protein, 9 aa, Artificial Sequence
  Description of Artificial Sequence: Synthetic peptide
  Seed: MMMGMFNML
MQMGMFNMA

SEQ ID NO: 158275 - protein, 9 aa, Artificial Sequence
  Description of Artificial Sequence: Synthetic peptide
  Seed: MMMGMFNML
MQMGMFNMC

SEQ ID NO: 158276 - protein, 9 aa, Artificial Sequence
  Description of Artificial Sequence: Synthetic peptide
  Seed: MMMGMFNML
MQMGMFNME

SEQ ID NO: 158277 - protein, 9 aa, Artificial Sequence
  Description of Artificial Sequence: Synthetic peptide
  Seed: MMMGMFNML
MQMGMFNMG

SEQ ID NO: 158278 - protein, 9 aa, Artificial Sequence
  Description of Artificial Sequence: Synthetic peptide
  Seed: MMMGMFNML
MQMGMFNMH

SEQ ID NO: 158279 - protein, 9 aa, Artificial Sequence
  Description of Artificial Sequence: Synthetic peptide
  Seed: MMMGMFNML
MQMGMFNMI

SEQ ID NO: 158280 - protein, 9 aa, Artificial Sequence
  Description of Artificial Sequence: Synthetic peptide
  Seed: MMMGMFNML
MQMGMFNMK

SEQ ID NO: 158281 - protein, 10 aa, Artificial Sequence
  Description of Artificial Sequence: Synthetic peptide
  Seed: MMMGMFNMLS
MQMGMFNMLA

SEQ ID NO: 158282 - protein, 10 aa, Artificial Sequence
  Description of Artificial Sequence: Synthetic peptide
  Seed: MMMGMFNMLS
MQMGMFNMLC

SEQ ID NO: 158283 - protein, 10 aa, Artificial Sequence
  Description of Artificial Sequence: Synthetic peptide
  Seed: MMMGMFNMLS
MQMGMFNMLD

SEQ ID NO: 158284 - protein, 10 aa, Artificial Sequence
  Description of Artificial Sequence: Synthetic peptide
  Seed: MMMGMFNMLS
MQMGMFNMLE

SEQ ID NO: 158285 - protein, 10 aa, Artificial Sequence
  Description of Artificial Sequence: Synthetic peptide
  Seed: MMMGMFNMLS
MQMGMFNMLF

SEQ ID NO: 158286 - protein, 10 aa, Artificial Sequence
  Description of Artificial Sequence: Synthetic peptide
  Seed: MMMGMFNMLS
MQMGMFNMLG

SEQ ID NO: 158287 - protein, 10 aa, Artificial Sequence
  Description of Artificial Sequence: Synthetic peptide
  Seed: MMMGMFNMLS
MQMGMFNMLH

SEQ ID NO: 158288 - protein, 10 aa, Artificial Sequence
  Description of Artificial Sequence: Synthetic peptide
  Seed: MMMGMFNMLS
MQMGMFNMLI

SEQ ID NO: 158289 - protein, 10 aa, Artificial Sequence
  Description of Artificial Sequence: Synthetic peptide
  Seed: MMMGMFNMLS
MQMGMFNMLK

SEQ ID NO: 158290 - protein, 10 aa, Artificial Sequence
  Description of Artificial Sequence: Synthetic peptide
  Seed: MMMGMFNMLS
MQMGMFNMLL

SEQ ID NO: 158291 - protein, 10 aa, Artificial Sequence
  Description of Artificial Sequence: Synthetic peptide
  Seed: MMMGMFNMLS
MQMGMFNMLM

SEQ ID NO: 158292 - protein, 10 aa, Artificial Sequence
  Description of Artificial Sequence: Synthetic peptide
  Seed: MMMGMFNMLS
MQMGMFNMLN

SEQ ID NO: 158293 - protein, 10 aa, Artificial Sequence
  Description of Artificial Sequence: Synthetic peptide
  Seed: MMMGMFNMLS
MQMGMFNMLP

SEQ ID NO: 158294 - protein, 10 aa, Artificial Sequence
  Description of Artificial Sequence: Synthetic peptide
  Seed: MMMGMFNMLS
MQMGMFNMLQ

SEQ ID NO: 158295 - protein, 10 aa, Artificial Sequence
  Description of Artificial Sequence: Synthetic peptide
  Seed: MMMGMFNMLS
MQMGMFNMLR

SEQ ID NO: 158296 - protein, 10 aa, Artificial Sequence
  Description of Artificial Sequence: Synthetic peptide
  Seed: MMMGMFNMLS
MQMGMFNMLS

SEQ ID NO: 158297 - protein, 11 aa, Artificial Sequence
  Description of Artificial Sequence: Synthetic peptide
  Seed: MMMGMFNMLST
MQMGMFNMLSA

SEQ ID NO: 158298 - protein, 11 aa, Artificial Sequence
  Description of Artificial Sequence: Synthetic peptide
  Seed: MMMGMFNMLST
MQMGMFNMLSC

SEQ ID NO: 158299 - protein, 11 aa, Artificial Sequence
  Description of Artificial Sequence: Synthetic peptide
  Seed: MMMGMFNMLST
MQMGMFNMLSF

SEQ ID NO: 158300 - protein, 11 aa, Artificial Sequence
  Description of Artificial Sequence: Synthetic peptide
  Seed: MMMGMFNMLST
MQMGMFNMLSI

SEQ ID NO: 158301 - protein, 11 aa, Artificial Sequence
  Description of Artificial Sequence: Synthetic peptide
  Seed: MMMGMFNMLST
MQMGMFNMLSL

SEQ ID NO: 158302 - protein, 11 aa, Artificial Sequence
  Description of Artificial Sequence: Synthetic peptide
  Seed: MMMGMFNMLST
MQMGMFNMLSM

SEQ ID NO: 158303 - protein, 11 aa, Artificial Sequence
  Description of Artificial Sequence: Synthetic peptide
  Seed: MMMGMFNMLST
MQMGMFNMLSS

SEQ ID NO: 158304 - protein, 11 aa, Artificial Sequence
  Description of Artificial Sequence: Synthetic peptide
  Seed: MMMGMFNMLST
MQMGMFNMLST

SEQ ID NO: 158305 - protein, 11 aa, Artificial Sequence
  Description of Artificial Sequence: Synthetic peptide
  Seed: MMMGMFNMLST
MQMGMFNMLSV

SEQ ID NO: 158306 - protein, 10 aa, Artificial Sequence
  Description of Artificial Sequence: Synthetic peptide
  Seed: MMMGMFNMLS
MQMGMFNMLT

SEQ ID NO: 158307 - protein, 10 aa, Artificial Sequence
  Description of Artificial Sequence: Synthetic peptide
  Seed: MMMGMFNMLS
MQMGMFNMLV

SEQ ID NO: 158308 - protein, 10 aa, Artificial Sequence
  Description of Artificial Sequence: Synthetic peptide
  Seed: MMMGMFNMLS
MQMGMFNMLW

SEQ ID NO: 158309 - protein, 10 aa, Artificial Sequence
  Description of Artificial Sequence: Synthetic peptide
  Seed: MMMGMFNMLS
MQMGMFNMLY

SEQ ID NO: 158310 - protein, 9 aa, Artificial Sequence
  Description of Artificial Sequence: Synthetic peptide
  Seed: MMMGMFNML
MQMGMFNMM

SEQ ID NO: 158311 - protein, 9 aa, Artificial Sequence
  Description of Artificial Sequence: Synthetic peptide
  Seed: MMMGMFNML
MQMGMFNMN

SEQ ID NO: 158312 - protein, 9 aa, Artificial Sequence
  Description of Artificial Sequence: Synthetic peptide
  Seed: MMMGMFNML
MQMGMFNMP

SEQ ID NO: 158313 - protein, 9 aa, Artificial Sequence
  Description of Artificial Sequence: Synthetic peptide
  Seed: MMMGMFNML
MQMGMFNMQ

SEQ ID NO: 158314 - protein, 9 aa, Artificial Sequence
  Description of Artificial Sequence: Synthetic peptide
  Seed: MMMGMFNML
MQMGMFNMR

SEQ ID NO: 158315 - protein, 9 aa, Artificial Sequence
  Description of Artificial Sequence: Synthetic peptide
  Seed: MMMGMFNML
MQMGMFNMS

SEQ ID NO: 158316 - protein, 9 aa, Artificial Sequence
  Description of Artificial Sequence: Synthetic peptide
  Seed: MMMGMFNML
MQMGMFNMT

SEQ ID NO: 158317 - protein, 9 aa, Artificial Sequence
  Description of Artificial Sequence: Synthetic peptide
  Seed: MMMGMFNML
MQMGMFNMV

SEQ ID NO: 158318 - protein, 9 aa, Artificial Sequence
  Description of Artificial Sequence: Synthetic peptide
  Seed: MMMGMFNML
MQMGMFNMW

SEQ ID NO: 158319 - protein, 9 aa, Artificial Sequence
  Description of Artificial Sequence: Synthetic peptide
  Seed: MMMGMFNML
MQMGMFNMY

SEQ ID NO: 158320 - protein, 8 aa, Artificial Sequence
  Description of Artificial Sequence: Synthetic peptide
  Seed: MMMGMFNM
MQMGMFNP

SEQ ID NO: 158321 - protein, 8 aa, Artificial Sequence
  Description of Artificial Sequence: Synthetic peptide
  Seed: MMMGMFNM
MQMGMFNS

SEQ ID NO: 158322 - protein, 8 aa, Artificial Sequence
  Description of Artificial Sequence: Synthetic peptide
  Seed: MMMGMFNM
MQMGMFNT

SEQ ID NO: 158323 - protein, 8 aa, Artificial Sequence
  Description of Artificial Sequence: Synthetic peptide
  Seed: MMMGMFNM
MQMGMFNV

SEQ ID NO: 158324 - protein, 8 aa, Artificial Sequence
  Description of Artificial Sequence: Synthetic peptide
  Seed: MMMGMFNM
MQMGMFNW

SEQ ID NO: 158325 - protein, 8 aa, Artificial Sequence
  Description of Artificial Sequence: Synthetic peptide
  Seed: MMMGMFNM
MQMGMFNY

SEQ ID NO: 158326 - protein, 8 aa, Artificial Sequence
  Description of Artificial Sequence: Synthetic peptide
  Seed: MFNMLSTV
MQNMLSTV

SEQ ID NO: 158327 - protein, 9 aa, Artificial Sequence
  Description of Artificial Sequence: Synthetic peptide
  Seed: MFNMLSTVL
MQNMLSTVA

SEQ ID NO: 158328 - protein, 9 aa, Artificial Sequence
  Description of Artificial Sequence: Synthetic peptide
  Seed: MFNMLSTVL
MQNMLSTVC

SEQ ID NO: 158329 - protein, 9 aa, Artificial Sequence
  Description of Artificial Sequence: Synthetic peptide
  Seed: MFNMLSTVL
MQNMLSTVD

SEQ ID NO: 158330 - protein, 9 aa, Artificial Sequence
  Description of Artificial Sequence: Synthetic peptide
  Seed: MFNMLSTVL
MQNMLSTVE

SEQ ID NO: 158331 - protein, 9 aa, Artificial Sequence
  Description of Artificial Sequence: Synthetic peptide
  Seed: MFNMLSTVL
MQNMLSTVF

SEQ ID NO: 158332 - protein, 9 aa, Artificial Sequence
  Description of Artificial Sequence: Synthetic peptide
  Seed: MFNMLSTVL
MQNMLSTVG

SEQ ID NO: 158333 - protein, 9 aa, Artificial Sequence
  Description of Artificial Sequence: Synthetic peptide
  Seed: MFNMLSTVL
MQNMLSTVH

SEQ ID NO: 158334 - protein, 9 aa, Artificial Sequence
  Description of Artificial Sequence: Synthetic peptide
  Seed: MFNMLSTVL
MQNMLSTVI

SEQ ID NO: 158335 - protein, 9 aa, Artificial Sequence
  Description of Artificial Sequence: Synthetic peptide
  Seed: MFNMLSTVL
MQNMLSTVK

SEQ ID NO: 158336 - protein, 9 aa, Artificial Sequence
  Description of Artificial Sequence: Synthetic peptide
  Seed: MFNMLSTVL
MQNMLSTVL

SEQ ID NO: 158337 - protein, 11 aa, Artificial Sequence
  Description of Artificial Sequence: Synthetic peptide
  Seed: MFNMLSTVLGV
MQNMLSTVLGA

SEQ ID NO: 158338 - protein, 11 aa, Artificial Sequence
  Description of Artificial Sequence: Synthetic peptide
  Seed: MFNMLSTVLGV
MQNMLSTVLGI

SEQ ID NO: 158339 - protein, 11 aa, Artificial Sequence
  Description of Artificial Sequence: Synthetic peptide
  Seed: MFNMLSTVLGV
MQNMLSTVLGL

SEQ ID NO: 158340 - protein, 11 aa, Artificial Sequence
  Description of Artificial Sequence: Synthetic peptide
  Seed: MFNMLSTVLGV
MQNMLSTVLGM

SEQ ID NO: 158341 - protein, 11 aa, Artificial Sequence
  Description of Artificial Sequence: Synthetic peptide
  Seed: MFNMLSTVLGV
MQNMLSTVLGT

SEQ ID NO: 158342 - protein, 11 aa, Artificial Sequence
  Description of Artificial Sequence: Synthetic peptide
  Seed: MFNMLSTVLGV
MQNMLSTVLGV

SEQ ID NO: 158343 - protein, 9 aa, Artificial Sequence
  Description of Artificial Sequence: Synthetic peptide
  Seed: MFNMLSTVL
MQNMLSTVM

SEQ ID NO: 158344 - protein, 9 aa, Artificial Sequence
  Description of Artificial Sequence: Synthetic peptide
  Seed: MFNMLSTVL
MQNMLSTVN

SEQ ID NO: 158345 - protein, 9 aa, Artificial Sequence
  Description of Artificial Sequence: Synthetic peptide
  Seed: MFNMLSTVL
MQNMLSTVP

SEQ ID NO: 158346 - protein, 9 aa, Artificial Sequence
  Description of Artificial Sequence: Synthetic peptide
  Seed: MFNMLSTVL
MQNMLSTVQ

SEQ ID NO: 158347 - protein, 9 aa, Artificial Sequence
  Description of Artificial Sequence: Synthetic peptide
  Seed: MFNMLSTVL
MQNMLSTVS

SEQ ID NO: 158348 - protein, 9 aa, Artificial Sequence
  Description of Artificial Sequence: Synthetic peptide
  Seed: MFNMLSTVL
MQNMLSTVT

SEQ ID NO: 158349 - protein, 9 aa, Artificial Sequence
  Description of Artificial Sequence: Synthetic peptide
  Seed: MFNMLSTVL
MQNMLSTVV

SEQ ID NO: 158350 - protein, 9 aa, Artificial Sequence
  Description of Artificial Sequence: Synthetic peptide
  Seed: MFNMLSTVL
MQNMLSTVW

SEQ ID NO: 158351 - protein, 9 aa, Artificial Sequence
  Description of Artificial Sequence: Synthetic peptide
  Seed: MFNMLSTVL
MQNMLSTVY

SEQ ID NO: 158352 - protein, 9 aa, Artificial Sequence
  Description of Artificial Sequence: Synthetic peptide
  Seed: MARLGKGYM
MQRLGKGYA

SEQ ID NO: 158353 - protein, 9 aa, Artificial Sequence
  Description of Artificial Sequence: Synthetic peptide
  Seed: MARLGKGYM
MQRLGKGYF

SEQ ID NO: 158354 - protein, 9 aa, Artificial Sequence
  Description of Artificial Sequence: Synthetic peptide
  Seed: MARLGKGYM
MQRLGKGYH

SEQ ID NO: 158355 - protein, 9 aa, Artificial Sequence
  Description of Artificial Sequence: Synthetic peptide
  Seed: MARLGKGYM
MQRLGKGYI

SEQ ID NO: 158356 - protein, 9 aa, Artificial Sequence
  Description of Artificial Sequence: Synthetic peptide
  Seed: MARLGKGYM
MQRLGKGYK

SEQ ID NO: 158357 - protein, 9 aa, Artificial Sequence
  Description of Artificial Sequence: Synthetic peptide
  Seed: MARLGKGYM
MQRLGKGYL

SEQ ID NO: 158358 - protein, 9 aa, Artificial Sequence
  Description of Artificial Sequence: Synthetic peptide
  Seed: MARLGKGYM
MQRLGKGYM

SEQ ID NO: 158359 - protein, 10 aa, Artificial Sequence
  Description of Artificial Sequence: Synthetic peptide
  Seed: MARLGKGYMF
MQRLGKGYMA

SEQ ID NO: 158360 - protein, 10 aa, Artificial Sequence
  Description of Artificial Sequence: Synthetic peptide
  Seed: MARLGKGYMF
MQRLGKGYMF

SEQ ID NO: 158361 - protein, 10 aa, Artificial Sequence
  Description of Artificial Sequence: Synthetic peptide
  Seed: MARLGKGYMF
MQRLGKGYMH

SEQ ID NO: 158362 - protein, 10 aa, Artificial Sequence
  Description of Artificial Sequence: Synthetic peptide
  Seed: MARLGKGYMF
MQRLGKGYMI

SEQ ID NO: 158363 - protein, 10 aa, Artificial Sequence
  Description of Artificial Sequence: Synthetic peptide
  Seed: MARLGKGYMF
MQRLGKGYMK

SEQ ID NO: 158364 - protein, 10 aa, Artificial Sequence
  Description of Artificial Sequence: Synthetic peptide
  Seed: MARLGKGYMF
MQRLGKGYML

SEQ ID NO: 158365 - protein, 10 aa, Artificial Sequence
  Description of Artificial Sequence: Synthetic peptide
  Seed: MARLGKGYMF
MQRLGKGYMM

SEQ ID NO: 158366 - protein, 10 aa, Artificial Sequence
  Description of Artificial Sequence: Synthetic peptide
  Seed: MARLGKGYMF
MQRLGKGYMR

SEQ ID NO: 158367 - protein, 10 aa, Artificial Sequence
  Description of Artificial Sequence: Synthetic peptide
  Seed: MARLGKGYMF
MQRLGKGYMV

SEQ ID NO: 158368 - protein, 10 aa, Artificial Sequence
  Description of Artificial Sequence: Synthetic peptide
  Seed: MARLGKGYMF
MQRLGKGYMW

SEQ ID NO: 158369 - protein, 10 aa, Artificial Sequence
  Description of Artificial Sequence: Synthetic peptide
  Seed: MARLGKGYMF
MQRLGKGYMY

SEQ ID NO: 158370 - protein, 9 aa, Artificial Sequence
  Description of Artificial Sequence: Synthetic peptide
  Seed: MARLGKGYM
MQRLGKGYR

SEQ ID NO: 158371 - protein, 9 aa, Artificial Sequence
  Description of Artificial Sequence: Synthetic peptide
  Seed: MARLGKGYM
MQRLGKGYS

SEQ ID NO: 158372 - protein, 9 aa, Artificial Sequence
  Description of Artificial Sequence: Synthetic peptide
  Seed: MARLGKGYM
MQRLGKGYV

SEQ ID NO: 158373 - protein, 9 aa, Artificial Sequence
  Description of Artificial Sequence: Synthetic peptide
  Seed: MARLGKGYM
MQRLGKGYW

SEQ ID NO: 158374 - protein, 9 aa, Artificial Sequence
  Description of Artificial Sequence: Synthetic peptide
  Seed: MARLGKGYM
MQRLGKGYY

SEQ ID NO: 158375 - protein, 8 aa, Artificial Sequence
  Description of Artificial Sequence: Synthetic peptide
  Seed: MFSNKMAR
MQSNKMAR

SEQ ID NO: 158376 - protein, 11 aa, Artificial Sequence
  Description of Artificial Sequence: Synthetic peptide
  Seed: MFSNKMARLGK
MQSNKMARLGK

SEQ ID NO: 158377 - protein, 11 aa, Artificial Sequence
  Description of Artificial Sequence: Synthetic peptide
  Seed: MFSNKMARLGK
MQSNKMARLGR

SEQ ID NO: 158378 - protein, 8 aa, Artificial Sequence
  Description of Artificial Sequence: Synthetic peptide
  Seed: MLSTVLGV
MQSTVLGV

SEQ ID NO: 158379 - protein, 9 aa, Artificial Sequence
  Description of Artificial Sequence: Synthetic peptide
  Seed: MLSTVLGVS
MQSTVLGVA

SEQ ID NO: 158380 - protein, 9 aa, Artificial Sequence
  Description of Artificial Sequence: Synthetic peptide
  Seed: MLSTVLGVS
MQSTVLGVI

SEQ ID NO: 158381 - protein, 9 aa, Artificial Sequence
  Description of Artificial Sequence: Synthetic peptide
  Seed: MLSTVLGVS
MQSTVLGVL

SEQ ID NO: 158382 - protein, 9 aa, Artificial Sequence
  Description of Artificial Sequence: Synthetic peptide
  Seed: MLSTVLGVS
MQSTVLGVM

SEQ ID NO: 158383 - protein, 10 aa, Artificial Sequence
  Description of Artificial Sequence: Synthetic peptide
  Seed: MLSTVLGVSI
MQSTVLGVSA

SEQ ID NO: 158384 - protein, 10 aa, Artificial Sequence
  Description of Artificial Sequence: Synthetic peptide
  Seed: MLSTVLGVSI
MQSTVLGVSF

SEQ ID NO: 158385 - protein, 10 aa, Artificial Sequence
  Description of Artificial Sequence: Synthetic peptide
  Seed: MLSTVLGVSI
MQSTVLGVSI

SEQ ID NO: 158386 - protein, 11 aa, Artificial Sequence
  Description of Artificial Sequence: Synthetic peptide
  Seed: MLSTVLGVSIL
MQSTVLGVSIV

SEQ ID NO: 158387 - protein, 10 aa, Artificial Sequence
  Description of Artificial Sequence: Synthetic peptide
  Seed: MLSTVLGVSI
MQSTVLGVSL

SEQ ID NO: 158388 - protein, 10 aa, Artificial Sequence
  Description of Artificial Sequence: Synthetic peptide
  Seed: MLSTVLGVSI
MQSTVLGVSM

SEQ ID NO: 158389 - protein, 10 aa, Artificial Sequence
  Description of Artificial Sequence: Synthetic peptide
  Seed: MLSTVLGVSI
MQSTVLGVST

SEQ ID NO: 158390 - protein, 10 aa, Artificial Sequence
  Description of Artificial Sequence: Synthetic peptide
  Seed: MLSTVLGVSI
MQSTVLGVSV

SEQ ID NO: 158391 - protein, 10 aa, Artificial Sequence
  Description of Artificial Sequence: Synthetic peptide
  Seed: MLSTVLGVSI
MQSTVLGVSW

SEQ ID NO: 158392 - protein, 10 aa, Artificial Sequence
  Description of Artificial Sequence: Synthetic peptide
  Seed: MLSTVLGVSI
MQSTVLGVSY

SEQ ID NO: 158393 - protein, 9 aa, Artificial Sequence
  Description of Artificial Sequence: Synthetic peptide
  Seed: MLSTVLGVS
MQSTVLGVV

SEQ ID NO: 158394 - protein, 11 aa, Artificial Sequence
  Description of Artificial Sequence: Synthetic peptide
  Seed: MMGMFNMLSTV
MRGMFNMLSTA

SEQ ID NO: 158395 - protein, 11 aa, Artificial Sequence
  Description of Artificial Sequence: Synthetic peptide
  Seed: MMGMFNMLSTV
MRGMFNMLSTI

SEQ ID NO: 158396 - protein, 11 aa, Artificial Sequence
  Description of Artificial Sequence: Synthetic peptide
  Seed: MMGMFNMLSTV
MRGMFNMLSTL

SEQ ID NO: 158397 - protein, 11 aa, Artificial Sequence
  Description of Artificial Sequence: Synthetic peptide
  Seed: MMGMFNMLSTV
MRGMFNMLSTM

SEQ ID NO: 158398 - protein, 11 aa, Artificial Sequence
  Description of Artificial Sequence: Synthetic peptide
  Seed: MMGMFNMLSTV
MRGMFNMLSTT

SEQ ID NO: 158399 - protein, 11 aa, Artificial Sequence
  Description of Artificial Sequence: Synthetic peptide
  Seed: MMGMFNMLSTV
MRGMFNMLSTV

SEQ ID NO: 158400 - protein, 10 aa, Artificial Sequence
  Description of Artificial Sequence: Synthetic peptide
  Seed: MMGMFNMLST
MRGMFNMLSV

SEQ ID NO: 158401 - protein, 10 aa, Artificial Sequence
  Description of Artificial Sequence: Synthetic peptide
  Seed: MSIGVTVIKN
MRIGVTVIKK

SEQ ID NO: 158402 - protein, 10 aa, Artificial Sequence
  Description of Artificial Sequence: Synthetic peptide
  Seed: MSIGVTVIKN
MRIGVTVIKR

SEQ ID NO: 158403 - protein, 10 aa, Artificial Sequence
  Description of Artificial Sequence: Synthetic peptide
  Seed: MGMFNMLSTV
MRMFNMLSTA

SEQ ID NO: 158404 - protein, 10 aa, Artificial Sequence
  Description of Artificial Sequence: Synthetic peptide
  Seed: MGMFNMLSTV
MRMFNMLSTC

SEQ ID NO: 158405 - protein, 10 aa, Artificial Sequence
  Description of Artificial Sequence: Synthetic peptide
  Seed: MGMFNMLSTV
MRMFNMLSTF

SEQ ID NO: 158406 - protein, 10 aa, Artificial Sequence
  Description of Artificial Sequence: Synthetic peptide
  Seed: MGMFNMLSTV
MRMFNMLSTG

SEQ ID NO: 158407 - protein, 10 aa, Artificial Sequence
  Description of Artificial Sequence: Synthetic peptide
  Seed: MGMFNMLSTV
MRMFNMLSTH

SEQ ID NO: 158408 - protein, 10 aa, Artificial Sequence
  Description of Artificial Sequence: Synthetic peptide
  Seed: MGMFNMLSTV
MRMFNMLSTI

SEQ ID NO: 158409 - protein, 10 aa, Artificial Sequence
  Description of Artificial Sequence: Synthetic peptide
  Seed: MGMFNMLSTV
MRMFNMLSTL

SEQ ID NO: 158410 - protein, 10 aa, Artificial Sequence
  Description of Artificial Sequence: Synthetic peptide
  Seed: MGMFNMLSTV
MRMFNMLSTM

SEQ ID NO: 158411 - protein, 10 aa, Artificial Sequence
  Description of Artificial Sequence: Synthetic peptide
  Seed: MGMFNMLSTV
MRMFNMLSTP

SEQ ID NO: 158412 - protein, 10 aa, Artificial Sequence
  Description of Artificial Sequence: Synthetic peptide
  Seed: MGMFNMLSTV
MRMFNMLSTS

SEQ ID NO: 158413 - protein, 10 aa, Artificial Sequence
  Description of Artificial Sequence: Synthetic peptide
  Seed: MGMFNMLSTV
MRMFNMLSTT

SEQ ID NO: 158414 - protein, 10 aa, Artificial Sequence
  Description of Artificial Sequence: Synthetic peptide
  Seed: MGMFNMLSTV
MRMFNMLSTV

SEQ ID NO: 158415 - protein, 11 aa, Artificial Sequence
  Description of Artificial Sequence: Synthetic peptide
  Seed: MGMFNMLSTVL
MRMFNMLSTVA

SEQ ID NO: 158416 - protein, 11 aa, Artificial Sequence
  Description of Artificial Sequence: Synthetic peptide
  Seed: MGMFNMLSTVL
MRMFNMLSTVC

SEQ ID NO: 158417 - protein, 11 aa, Artificial Sequence
  Description of Artificial Sequence: Synthetic peptide
  Seed: MGMFNMLSTVL
MRMFNMLSTVD

SEQ ID NO: 158418 - protein, 11 aa, Artificial Sequence
  Description of Artificial Sequence: Synthetic peptide
  Seed: MGMFNMLSTVL
MRMFNMLSTVE

SEQ ID NO: 158419 - protein, 11 aa, Artificial Sequence
  Description of Artificial Sequence: Synthetic peptide
  Seed: MGMFNMLSTVL
MRMFNMLSTVF

SEQ ID NO: 158420 - protein, 11 aa, Artificial Sequence
  Description of Artificial Sequence: Synthetic peptide
  Seed: MGMFNMLSTVL
MRMFNMLSTVG

SEQ ID NO: 158421 - protein, 11 aa, Artificial Sequence
  Description of Artificial Sequence: Synthetic peptide
  Seed: MGMFNMLSTVL
MRMFNMLSTVH

SEQ ID NO: 158422 - protein, 11 aa, Artificial Sequence
  Description of Artificial Sequence: Synthetic peptide
  Seed: MGMFNMLSTVL
MRMFNMLSTVI

SEQ ID NO: 158423 - protein, 11 aa, Artificial Sequence
  Description of Artificial Sequence: Synthetic peptide
  Seed: MGMFNMLSTVL
MRMFNMLSTVK

SEQ ID NO: 158424 - protein, 11 aa, Artificial Sequence
  Description of Artificial Sequence: Synthetic peptide
  Seed: MGMFNMLSTVL
MRMFNMLSTVL

SEQ ID NO: 158425 - protein, 11 aa, Artificial Sequence
  Description of Artificial Sequence: Synthetic peptide
  Seed: MGMFNMLSTVL
MRMFNMLSTVM

SEQ ID NO: 158426 - protein, 11 aa, Artificial Sequence
  Description of Artificial Sequence: Synthetic peptide
  Seed: MGMFNMLSTVL
MRMFNMLSTVN

SEQ ID NO: 158427 - protein, 11 aa, Artificial Sequence
  Description of Artificial Sequence: Synthetic peptide
  Seed: MGMFNMLSTVL
MRMFNMLSTVP

SEQ ID NO: 158428 - protein, 11 aa, Artificial Sequence
  Description of Artificial Sequence: Synthetic peptide
  Seed: MGMFNMLSTVL
MRMFNMLSTVQ

SEQ ID NO: 158429 - protein, 11 aa, Artificial Sequence
  Description of Artificial Sequence: Synthetic peptide
  Seed: MGMFNMLSTVL
MRMFNMLSTVR

SEQ ID NO: 158430 - protein, 11 aa, Artificial Sequence
  Description of Artificial Sequence: Synthetic peptide
  Seed: MGMFNMLSTVL
MRMFNMLSTVS

SEQ ID NO: 158431 - protein, 11 aa, Artificial Sequence
  Description of Artificial Sequence: Synthetic peptide
  Seed: MGMFNMLSTVL
MRMFNMLSTVT

SEQ ID NO: 158432 - protein, 11 aa, Artificial Sequence
  Description of Artificial Sequence: Synthetic peptide
  Seed: MGMFNMLSTVL
MRMFNMLSTVV

SEQ ID NO: 158433 - protein, 11 aa, Artificial Sequence
  Description of Artificial Sequence: Synthetic peptide
  Seed: MGMFNMLSTVL
MRMFNMLSTVW

SEQ ID NO: 158434 - protein, 11 aa, Artificial Sequence
  Description of Artificial Sequence: Synthetic peptide
  Seed: MGMFNMLSTVL
MRMFNMLSTVY

SEQ ID NO: 158435 - protein, 10 aa, Artificial Sequence
  Description of Artificial Sequence: Synthetic peptide
  Seed: MGMFNMLSTV
MRMFNMLSTW

SEQ ID NO: 158436 - protein, 10 aa, Artificial Sequence
  Description of Artificial Sequence: Synthetic peptide
  Seed: MGMFNMLSTV
MRMFNMLSTY

SEQ ID NO: 158437 - protein, 8 aa, Artificial Sequence
  Description of Artificial Sequence: Synthetic peptide
  Seed: MMMGMFNM
MRMGMFNF

SEQ ID NO: 158438 - protein, 9 aa, Artificial Sequence
  Description of Artificial Sequence: Synthetic peptide
  Seed: MMMGMFNML
MRMGMFNMA

SEQ ID NO: 158439 - protein, 9 aa, Artificial Sequence
  Description of Artificial Sequence: Synthetic peptide
  Seed: MMMGMFNML
MRMGMFNMC

SEQ ID NO: 158440 - protein, 9 aa, Artificial Sequence
  Description of Artificial Sequence: Synthetic peptide
  Seed: MMMGMFNML
MRMGMFNMF

SEQ ID NO: 158441 - protein, 9 aa, Artificial Sequence
  Description of Artificial Sequence: Synthetic peptide
  Seed: MMMGMFNML
MRMGMFNMG

SEQ ID NO: 158442 - protein, 9 aa, Artificial Sequence
  Description of Artificial Sequence: Synthetic peptide
  Seed: MMMGMFNML
MRMGMFNMH

SEQ ID NO: 158443 - protein, 9 aa, Artificial Sequence
  Description of Artificial Sequence: Synthetic peptide
  Seed: MMMGMFNML
MRMGMFNMI

SEQ ID NO: 158444 - protein, 9 aa, Artificial Sequence
  Description of Artificial Sequence: Synthetic peptide
  Seed: MMMGMFNML
MRMGMFNMK

SEQ ID NO: 158445 - protein, 9 aa, Artificial Sequence
  Description of Artificial Sequence: Synthetic peptide
  Seed: MMMGMFNML
MRMGMFNML

SEQ ID NO: 158446 - protein, 10 aa, Artificial Sequence
  Description of Artificial Sequence: Synthetic peptide
  Seed: MMMGMFNMLS
MRMGMFNMLA

SEQ ID NO: 158447 - protein, 10 aa, Artificial Sequence
  Description of Artificial Sequence: Synthetic peptide
  Seed: MMMGMFNMLS
MRMGMFNMLI

SEQ ID NO: 158448 - protein, 10 aa, Artificial Sequence
  Description of Artificial Sequence: Synthetic peptide
  Seed: MMMGMFNMLS
MRMGMFNMLL

SEQ ID NO: 158449 - protein, 10 aa, Artificial Sequence
  Description of Artificial Sequence: Synthetic peptide
  Seed: MMMGMFNMLS
MRMGMFNMLM

SEQ ID NO: 158450 - protein, 10 aa, Artificial Sequence
  Description of Artificial Sequence: Synthetic peptide
  Seed: MMMGMFNMLS
MRMGMFNMLS

SEQ ID NO: 158451 - protein, 11 aa, Artificial Sequence
  Description of Artificial Sequence: Synthetic peptide
  Seed: MMMGMFNMLST
MRMGMFNMLSV

SEQ ID NO: 158452 - protein, 10 aa, Artificial Sequence
  Description of Artificial Sequence: Synthetic peptide
  Seed: MMMGMFNMLS
MRMGMFNMLT

SEQ ID NO: 158453 - protein, 10 aa, Artificial Sequence
  Description of Artificial Sequence: Synthetic peptide
  Seed: MMMGMFNMLS
MRMGMFNMLV

SEQ ID NO: 158454 - protein, 9 aa, Artificial Sequence
  Description of Artificial Sequence: Synthetic peptide
  Seed: MMMGMFNML
MRMGMFNMM

SEQ ID NO: 158455 - protein, 9 aa, Artificial Sequence
  Description of Artificial Sequence: Synthetic peptide
  Seed: MMMGMFNML
MRMGMFNMP

SEQ ID NO: 158456 - protein, 9 aa, Artificial Sequence
  Description of Artificial Sequence: Synthetic peptide
  Seed: MMMGMFNML
MRMGMFNMR

SEQ ID NO: 158457 - protein, 9 aa, Artificial Sequence
  Description of Artificial Sequence: Synthetic peptide
  Seed: MMMGMFNML
MRMGMFNMS

SEQ ID NO: 158458 - protein, 9 aa, Artificial Sequence
  Description of Artificial Sequence: Synthetic peptide
  Seed: MMMGMFNML
MRMGMFNMT

SEQ ID NO: 158459 - protein, 9 aa, Artificial Sequence
  Description of Artificial Sequence: Synthetic peptide
  Seed: MMMGMFNML
MRMGMFNMV

SEQ ID NO: 158460 - protein, 9 aa, Artificial Sequence
  Description of Artificial Sequence: Synthetic peptide
  Seed: MMMGMFNML
MRMGMFNMW

SEQ ID NO: 158461 - protein, 9 aa, Artificial Sequence
  Description of Artificial Sequence: Synthetic peptide
  Seed: MMMGMFNML
MRMGMFNMY

SEQ ID NO: 158462 - protein, 8 aa, Artificial Sequence
  Description of Artificial Sequence: Synthetic peptide
  Seed: MMMGMFNM
MRMGMFNY

SEQ ID NO: 158463 - protein, 9 aa, Artificial Sequence
  Description of Artificial Sequence: Synthetic peptide
  Seed: MFNMLSTVL
MRNMLSTVA

SEQ ID NO: 158464 - protein, 9 aa, Artificial Sequence
  Description of Artificial Sequence: Synthetic peptide
  Seed: MFNMLSTVL
MRNMLSTVF

SEQ ID NO: 158465 - protein, 9 aa, Artificial Sequence
  Description of Artificial Sequence: Synthetic peptide
  Seed: MFNMLSTVL
MRNMLSTVH

SEQ ID NO: 158466 - protein, 9 aa, Artificial Sequence
  Description of Artificial Sequence: Synthetic peptide
  Seed: MFNMLSTVL
MRNMLSTVI

SEQ ID NO: 158467 - protein, 11 aa, Artificial Sequence
  Description of Artificial Sequence: Synthetic peptide
  Seed: MFNMLSTVLGV
MRNMLSTVLGA

SEQ ID NO: 158468 - protein, 11 aa, Artificial Sequence
  Description of Artificial Sequence: Synthetic peptide
  Seed: MFNMLSTVLGV
MRNMLSTVLGI

SEQ ID NO: 158469 - protein, 11 aa, Artificial Sequence
  Description of Artificial Sequence: Synthetic peptide
  Seed: MFNMLSTVLGV
MRNMLSTVLGL

SEQ ID NO: 158470 - protein, 11 aa, Artificial Sequence
  Description of Artificial Sequence: Synthetic peptide
  Seed: MFNMLSTVLGV
MRNMLSTVLGM

SEQ ID NO: 158471 - protein, 11 aa, Artificial Sequence
  Description of Artificial Sequence: Synthetic peptide
  Seed: MFNMLSTVLGV
MRNMLSTVLGT

SEQ ID NO: 158472 - protein, 11 aa, Artificial Sequence
  Description of Artificial Sequence: Synthetic peptide
  Seed: MFNMLSTVLGV
MRNMLSTVLGV

SEQ ID NO: 158473 - protein, 9 aa, Artificial Sequence
  Description of Artificial Sequence: Synthetic peptide
  Seed: MFNMLSTVL
MRNMLSTVV

SEQ ID NO: 158474 - protein, 9 aa, Artificial Sequence
  Description of Artificial Sequence: Synthetic peptide
  Seed: MFNMLSTVL
MRNMLSTVW

SEQ ID NO: 158475 - protein, 9 aa, Artificial Sequence
  Description of Artificial Sequence: Synthetic peptide
  Seed: MARLGKGYM
MRRLGKGYF

SEQ ID NO: 158476 - protein, 9 aa, Artificial Sequence
  Description of Artificial Sequence: Synthetic peptide
  Seed: MARLGKGYM
MRRLGKGYK

SEQ ID NO: 158477 - protein, 10 aa, Artificial Sequence
  Description of Artificial Sequence: Synthetic peptide
  Seed: MARLGKGYMF
MRRLGKGYMA

SEQ ID NO: 158478 - protein, 10 aa, Artificial Sequence
  Description of Artificial Sequence: Synthetic peptide
  Seed: MARLGKGYMF
MRRLGKGYMF

SEQ ID NO: 158479 - protein, 10 aa, Artificial Sequence
  Description of Artificial Sequence: Synthetic peptide
  Seed: MARLGKGYMF
MRRLGKGYMH

SEQ ID NO: 158480 - protein, 10 aa, Artificial Sequence
  Description of Artificial Sequence: Synthetic peptide
  Seed: MARLGKGYMF
MRRLGKGYMI

SEQ ID NO: 158481 - protein, 10 aa, Artificial Sequence
  Description of Artificial Sequence: Synthetic peptide
  Seed: MARLGKGYMF
MRRLGKGYMK

SEQ ID NO: 158482 - protein, 10 aa, Artificial Sequence
  Description of Artificial Sequence: Synthetic peptide
  Seed: MARLGKGYMF
MRRLGKGYML

SEQ ID NO: 158483 - protein, 10 aa, Artificial Sequence
  Description of Artificial Sequence: Synthetic peptide
  Seed: MARLGKGYMF
MRRLGKGYMM

SEQ ID NO: 158484 - protein, 10 aa, Artificial Sequence
  Description of Artificial Sequence: Synthetic peptide
  Seed: MARLGKGYMF
MRRLGKGYMR

SEQ ID NO: 158485 - protein, 10 aa, Artificial Sequence
  Description of Artificial Sequence: Synthetic peptide
  Seed: MARLGKGYMF
MRRLGKGYMV

SEQ ID NO: 158486 - protein, 10 aa, Artificial Sequence
  Description of Artificial Sequence: Synthetic peptide
  Seed: MARLGKGYMF
MRRLGKGYMW

SEQ ID NO: 158487 - protein, 10 aa, Artificial Sequence
  Description of Artificial Sequence: Synthetic peptide
  Seed: MARLGKGYMF
MRRLGKGYMY

SEQ ID NO: 158488 - protein, 9 aa, Artificial Sequence
  Description of Artificial Sequence: Synthetic peptide
  Seed: MARLGKGYM
MRRLGKGYY

SEQ ID NO: 158489 - protein, 11 aa, Artificial Sequence
  Description of Artificial Sequence: Synthetic peptide
  Seed: MFSNKMARLGK
MRSNKMARLGA

SEQ ID NO: 158490 - protein, 11 aa, Artificial Sequence
  Description of Artificial Sequence: Synthetic peptide
  Seed: MFSNKMARLGK
MRSNKMARLGK

SEQ ID NO: 158491 - protein, 11 aa, Artificial Sequence
  Description of Artificial Sequence: Synthetic peptide
  Seed: MFSNKMARLGK
MRSNKMARLGR

SEQ ID NO: 158492 - protein, 10 aa, Artificial Sequence
  Description of Artificial Sequence: Synthetic peptide
  Seed: MLSTVLGVSI
MRSTVLGVSF

SEQ ID NO: 158493 - protein, 10 aa, Artificial Sequence
  Description of Artificial Sequence: Synthetic peptide
  Seed: MLSTVLGVSI
MRSTVLGVSI

SEQ ID NO: 158494 - protein, 10 aa, Artificial Sequence
  Description of Artificial Sequence: Synthetic peptide
  Seed: MLSTVLGVSI
MRSTVLGVSL

SEQ ID NO: 158495 - protein, 10 aa, Artificial Sequence
  Description of Artificial Sequence: Synthetic peptide
  Seed: MLSTVLGVSI
MRSTVLGVSM

SEQ ID NO: 158496 - protein, 10 aa, Artificial Sequence
  Description of Artificial Sequence: Synthetic peptide
  Seed: MLSTVLGVSI
MRSTVLGVSV

SEQ ID NO: 158497 - protein, 10 aa, Artificial Sequence
  Description of Artificial Sequence: Synthetic peptide
  Seed: MLSTVLGVSI
MRSTVLGVSW

SEQ ID NO: 158498 - protein, 10 aa, Artificial Sequence
  Description of Artificial Sequence: Synthetic peptide
  Seed: MLSTVLGVSI
MRSTVLGVSY

SEQ ID NO: 158499 - protein, 9 aa, Artificial Sequence
  Description of Artificial Sequence: Synthetic peptide
  Seed: MMGMFNMLS
MSGMFNMLA

SEQ ID NO: 158500 - protein, 9 aa, Artificial Sequence
  Description of Artificial Sequence: Synthetic peptide
  Seed: MMGMFNMLS
MSGMFNMLI

SEQ ID NO: 158501 - protein, 9 aa, Artificial Sequence
  Description of Artificial Sequence: Synthetic peptide
  Seed: MMGMFNMLS
MSGMFNMLL

SEQ ID NO: 158502 - protein, 10 aa, Artificial Sequence
  Description of Artificial Sequence: Synthetic peptide
  Seed: MMGMFNMLST
MSGMFNMLSA

SEQ ID NO: 158503 - protein, 10 aa, Artificial Sequence
  Description of Artificial Sequence: Synthetic peptide
  Seed: MMGMFNMLST
MSGMFNMLSI

SEQ ID NO: 158504 - protein, 10 aa, Artificial Sequence
  Description of Artificial Sequence: Synthetic peptide
  Seed: MMGMFNMLST
MSGMFNMLSL

SEQ ID NO: 158505 - protein, 11 aa, Artificial Sequence
  Description of Artificial Sequence: Synthetic peptide
  Seed: MMGMFNMLSTV
MSGMFNMLSTA

SEQ ID NO: 158506 - protein, 11 aa, Artificial Sequence
  Description of Artificial Sequence: Synthetic peptide
  Seed: MMGMFNMLSTV
MSGMFNMLSTI

SEQ ID NO: 158507 - protein, 11 aa, Artificial Sequence
  Description of Artificial Sequence: Synthetic peptide
  Seed: MMGMFNMLSTV
MSGMFNMLSTL

SEQ ID NO: 158508 - protein, 11 aa, Artificial Sequence
  Description of Artificial Sequence: Synthetic peptide
  Seed: MMGMFNMLSTV
MSGMFNMLSTM

SEQ ID NO: 158509 - protein, 11 aa, Artificial Sequence
  Description of Artificial Sequence: Synthetic peptide
  Seed: MMGMFNMLSTV
MSGMFNMLSTT

SEQ ID NO: 158510 - protein, 11 aa, Artificial Sequence
  Description of Artificial Sequence: Synthetic peptide
  Seed: MMGMFNMLSTV
MSGMFNMLSTV

SEQ ID NO: 158511 - protein, 10 aa, Artificial Sequence
  Description of Artificial Sequence: Synthetic peptide
  Seed: MMGMFNMLST
MSGMFNMLSV

SEQ ID NO: 158512 - protein, 9 aa, Artificial Sequence
  Description of Artificial Sequence: Synthetic peptide
  Seed: MMGMFNMLS
MSGMFNMLV

SEQ ID NO: 158513 - protein, 8 aa, Artificial Sequence
  Description of Artificial Sequence: Synthetic peptide
  Seed: MSIGVTVI
MSIGVTVF

SEQ ID NO: 158514 - protein, 9 aa, Artificial Sequence
  Description of Artificial Sequence: Synthetic peptide
  Seed: MSIGVTVIK
MSIGVTVIA

SEQ ID NO: 158515 - protein, 9 aa, Artificial Sequence
  Description of Artificial Sequence: Synthetic peptide
  Seed: MSIGVTVIK
MSIGVTVIF

SEQ ID NO: 158516 - protein, 9 aa, Artificial Sequence
  Description of Artificial Sequence: Synthetic peptide
  Seed: MSIGVTVIK
MSIGVTVIH

SEQ ID NO: 158517 - protein, 9 aa, Artificial Sequence
  Description of Artificial Sequence: Synthetic peptide
  Seed: MSIGVTVIK
MSIGVTVII

SEQ ID NO: 158518 - protein, 10 aa, Artificial Sequence
  Description of Artificial Sequence: Synthetic peptide
  Seed: MSIGVTVIKN
MSIGVTVIKA

SEQ ID NO: 158519 - protein, 10 aa, Artificial Sequence
  Description of Artificial Sequence: Synthetic peptide
  Seed: MSIGVTVIKN
MSIGVTVIKC

SEQ ID NO: 158520 - protein, 10 aa, Artificial Sequence
  Description of Artificial Sequence: Synthetic peptide
  Seed: MSIGVTVIKN
MSIGVTVIKD

SEQ ID NO: 158521 - protein, 10 aa, Artificial Sequence
  Description of Artificial Sequence: Synthetic peptide
  Seed: MSIGVTVIKN
MSIGVTVIKE

SEQ ID NO: 158522 - protein, 10 aa, Artificial Sequence
  Description of Artificial Sequence: Synthetic peptide
  Seed: MSIGVTVIKN
MSIGVTVIKF

SEQ ID NO: 158523 - protein, 10 aa, Artificial Sequence
  Description of Artificial Sequence: Synthetic peptide
  Seed: MSIGVTVIKN
MSIGVTVIKG

SEQ ID NO: 158524 - protein, 10 aa, Artificial Sequence
  Description of Artificial Sequence: Synthetic peptide
  Seed: MSIGVTVIKN
MSIGVTVIKH

SEQ ID NO: 158525 - protein, 10 aa, Artificial Sequence
  Description of Artificial Sequence: Synthetic peptide
  Seed: MSIGVTVIKN
MSIGVTVIKI

SEQ ID NO: 158526 - protein, 10 aa, Artificial Sequence
  Description of Artificial Sequence: Synthetic peptide
  Seed: MSIGVTVIKN
MSIGVTVIKK

SEQ ID NO: 158527 - protein, 10 aa, Artificial Sequence
  Description of Artificial Sequence: Synthetic peptide
  Seed: MSIGVTVIKN
MSIGVTVIKL

SEQ ID NO: 158528 - protein, 10 aa, Artificial Sequence
  Description of Artificial Sequence: Synthetic peptide
  Seed: MSIGVTVIKN
MSIGVTVIKM

SEQ ID NO: 158529 - protein, 10 aa, Artificial Sequence
  Description of Artificial Sequence: Synthetic peptide
  Seed: MSIGVTVIKN
MSIGVTVIKP

SEQ ID NO: 158530 - protein, 10 aa, Artificial Sequence
  Description of Artificial Sequence: Synthetic peptide
  Seed: MSIGVTVIKN
MSIGVTVIKQ

SEQ ID NO: 158531 - protein, 10 aa, Artificial Sequence
  Description of Artificial Sequence: Synthetic peptide
  Seed: MSIGVTVIKN
MSIGVTVIKR

SEQ ID NO: 158532 - protein, 10 aa, Artificial Sequence
  Description of Artificial Sequence: Synthetic peptide
  Seed: MSIGVTVIKN
MSIGVTVIKS

SEQ ID NO: 158533 - protein, 10 aa, Artificial Sequence
  Description of Artificial Sequence: Synthetic peptide
  Seed: MSIGVTVIKN
MSIGVTVIKT

SEQ ID NO: 158534 - protein, 10 aa, Artificial Sequence
  Description of Artificial Sequence: Synthetic peptide
  Seed: MSIGVTVIKN
MSIGVTVIKV

SEQ ID NO: 158535 - protein, 10 aa, Artificial Sequence
  Description of Artificial Sequence: Synthetic peptide
  Seed: MSIGVTVIKN
MSIGVTVIKW

SEQ ID NO: 158536 - protein, 10 aa, Artificial Sequence
  Description of Artificial Sequence: Synthetic peptide
  Seed: MSIGVTVIKN
MSIGVTVIKY

SEQ ID NO: 158537 - protein, 9 aa, Artificial Sequence
  Description of Artificial Sequence: Synthetic peptide
  Seed: MSIGVTVIK
MSIGVTVIL

SEQ ID NO: 158538 - protein, 9 aa, Artificial Sequence
  Description of Artificial Sequence: Synthetic peptide
  Seed: MSIGVTVIK
MSIGVTVIM

SEQ ID NO: 158539 - protein, 9 aa, Artificial Sequence
  Description of Artificial Sequence: Synthetic peptide
  Seed: MSIGVTVIK
MSIGVTVIQ

SEQ ID NO: 158540 - protein, 9 aa, Artificial Sequence
  Description of Artificial Sequence: Synthetic peptide
  Seed: MSIGVTVIK
MSIGVTVIR

SEQ ID NO: 158541 - protein, 9 aa, Artificial Sequence
  Description of Artificial Sequence: Synthetic peptide
  Seed: MSIGVTVIK
MSIGVTVIV

SEQ ID NO: 158542 - protein, 9 aa, Artificial Sequence
  Description of Artificial Sequence: Synthetic peptide
  Seed: MSIGVTVIK
MSIGVTVIY

SEQ ID NO: 158543 - protein, 8 aa, Artificial Sequence
  Description of Artificial Sequence: Synthetic peptide
  Seed: MSIGVTVI
MSIGVTVL

SEQ ID NO: 158544 - protein, 8 aa, Artificial Sequence
  Description of Artificial Sequence: Synthetic peptide
  Seed: MSIGVTVI
MSIGVTVM

SEQ ID NO: 158545 - protein, 8 aa, Artificial Sequence
  Description of Artificial Sequence: Synthetic peptide
  Seed: MSIGVTVI
MSIGVTVV

SEQ ID NO: 158546 - protein, 8 aa, Artificial Sequence
  Description of Artificial Sequence: Synthetic peptide
  Seed: MSIGVTVI
MSIGVTVW

SEQ ID NO: 158547 - protein, 8 aa, Artificial Sequence
  Description of Artificial Sequence: Synthetic peptide
  Seed: MSIGVTVI
MSIGVTVY

SEQ ID NO: 158548 - protein, 9 aa, Artificial Sequence
  Description of Artificial Sequence: Synthetic peptide
  Seed: MTKDAERGK
MSKDAERGK

SEQ ID NO: 158549 - protein, 9 aa, Artificial Sequence
  Description of Artificial Sequence: Synthetic peptide
  Seed: MTKDAERGK
MSKDAERGR

SEQ ID NO: 158550 - protein, 10 aa, Artificial Sequence
  Description of Artificial Sequence: Synthetic peptide
  Seed: MGMFNMLSTV
MSMFNMLSTA

SEQ ID NO: 158551 - protein, 10 aa, Artificial Sequence
  Description of Artificial Sequence: Synthetic peptide
  Seed: MGMFNMLSTV
MSMFNMLSTC

SEQ ID NO: 158552 - protein, 10 aa, Artificial Sequence
  Description of Artificial Sequence: Synthetic peptide
  Seed: MGMFNMLSTV
MSMFNMLSTF

SEQ ID NO: 158553 - protein, 10 aa, Artificial Sequence
  Description of Artificial Sequence: Synthetic peptide
  Seed: MGMFNMLSTV
MSMFNMLSTG

SEQ ID NO: 158554 - protein, 10 aa, Artificial Sequence
  Description of Artificial Sequence: Synthetic peptide
  Seed: MGMFNMLSTV
MSMFNMLSTH

SEQ ID NO: 158555 - protein, 10 aa, Artificial Sequence
  Description of Artificial Sequence: Synthetic peptide
  Seed: MGMFNMLSTV
MSMFNMLSTI

SEQ ID NO: 158556 - protein, 10 aa, Artificial Sequence
  Description of Artificial Sequence: Synthetic peptide
  Seed: MGMFNMLSTV
MSMFNMLSTL

SEQ ID NO: 158557 - protein, 10 aa, Artificial Sequence
  Description of Artificial Sequence: Synthetic peptide
  Seed: MGMFNMLSTV
MSMFNMLSTM

SEQ ID NO: 158558 - protein, 10 aa, Artificial Sequence
  Description of Artificial Sequence: Synthetic peptide
  Seed: MGMFNMLSTV
MSMFNMLSTP

SEQ ID NO: 158559 - protein, 10 aa, Artificial Sequence
  Description of Artificial Sequence: Synthetic peptide
  Seed: MGMFNMLSTV
MSMFNMLSTS

SEQ ID NO: 158560 - protein, 10 aa, Artificial Sequence
  Description of Artificial Sequence: Synthetic peptide
  Seed: MGMFNMLSTV
MSMFNMLSTT

SEQ ID NO: 158561 - protein, 10 aa, Artificial Sequence
  Description of Artificial Sequence: Synthetic peptide
  Seed: MGMFNMLSTV
MSMFNMLSTV

SEQ ID NO: 158562 - protein, 11 aa, Artificial Sequence
  Description of Artificial Sequence: Synthetic peptide
  Seed: MGMFNMLSTVL
MSMFNMLSTVA

SEQ ID NO: 158563 - protein, 11 aa, Artificial Sequence
  Description of Artificial Sequence: Synthetic peptide
  Seed: MGMFNMLSTVL
MSMFNMLSTVC

SEQ ID NO: 158564 - protein, 11 aa, Artificial Sequence
  Description of Artificial Sequence: Synthetic peptide
  Seed: MGMFNMLSTVL
MSMFNMLSTVD

SEQ ID NO: 158565 - protein, 11 aa, Artificial Sequence
  Description of Artificial Sequence: Synthetic peptide
  Seed: MGMFNMLSTVL
MSMFNMLSTVE

SEQ ID NO: 158566 - protein, 11 aa, Artificial Sequence
  Description of Artificial Sequence: Synthetic peptide
  Seed: MGMFNMLSTVL
MSMFNMLSTVF

SEQ ID NO: 158567 - protein, 11 aa, Artificial Sequence
  Description of Artificial Sequence: Synthetic peptide
  Seed: MGMFNMLSTVL
MSMFNMLSTVG

SEQ ID NO: 158568 - protein, 11 aa, Artificial Sequence
  Description of Artificial Sequence: Synthetic peptide
  Seed: MGMFNMLSTVL
MSMFNMLSTVH

SEQ ID NO: 158569 - protein, 11 aa, Artificial Sequence
  Description of Artificial Sequence: Synthetic peptide
  Seed: MGMFNMLSTVL
MSMFNMLSTVI

SEQ ID NO: 158570 - protein, 11 aa, Artificial Sequence
  Description of Artificial Sequence: Synthetic peptide
  Seed: MGMFNMLSTVL
MSMFNMLSTVK

SEQ ID NO: 158571 - protein, 11 aa, Artificial Sequence
  Description of Artificial Sequence: Synthetic peptide
  Seed: MGMFNMLSTVL
MSMFNMLSTVL

SEQ ID NO: 158572 - protein, 11 aa, Artificial Sequence
  Description of Artificial Sequence: Synthetic peptide
  Seed: MGMFNMLSTVL
MSMFNMLSTVM

SEQ ID NO: 158573 - protein, 11 aa, Artificial Sequence
  Description of Artificial Sequence: Synthetic peptide
  Seed: MGMFNMLSTVL
MSMFNMLSTVN

SEQ ID NO: 158574 - protein, 11 aa, Artificial Sequence
  Description of Artificial Sequence: Synthetic peptide
  Seed: MGMFNMLSTVL
MSMFNMLSTVP

SEQ ID NO: 158575 - protein, 11 aa, Artificial Sequence
  Description of Artificial Sequence: Synthetic peptide
  Seed: MGMFNMLSTVL
MSMFNMLSTVQ

SEQ ID NO: 158576 - protein, 11 aa, Artificial Sequence
  Description of Artificial Sequence: Synthetic peptide
  Seed: MGMFNMLSTVL
MSMFNMLSTVR

SEQ ID NO: 158577 - protein, 11 aa, Artificial Sequence
  Description of Artificial Sequence: Synthetic peptide
  Seed: MGMFNMLSTVL
MSMFNMLSTVS

SEQ ID NO: 158578 - protein, 11 aa, Artificial Sequence
  Description of Artificial Sequence: Synthetic peptide
  Seed: MGMFNMLSTVL
MSMFNMLSTVT

SEQ ID NO: 158579 - protein, 11 aa, Artificial Sequence
  Description of Artificial Sequence: Synthetic peptide
  Seed: MGMFNMLSTVL
MSMFNMLSTVV

SEQ ID NO: 158580 - protein, 11 aa, Artificial Sequence
  Description of Artificial Sequence: Synthetic peptide
  Seed: MGMFNMLSTVL
MSMFNMLSTVW

SEQ ID NO: 158581 - protein, 11 aa, Artificial Sequence
  Description of Artificial Sequence: Synthetic peptide
  Seed: MGMFNMLSTVL
MSMFNMLSTVY

SEQ ID NO: 158582 - protein, 10 aa, Artificial Sequence
  Description of Artificial Sequence: Synthetic peptide
  Seed: MGMFNMLSTV
MSMFNMLSTW

SEQ ID NO: 158583 - protein, 10 aa, Artificial Sequence
  Description of Artificial Sequence: Synthetic peptide
  Seed: MGMFNMLSTV
MSMFNMLSTY

SEQ ID NO: 158584 - protein, 8 aa, Artificial Sequence
  Description of Artificial Sequence: Synthetic peptide
  Seed: MMMGMFNM
MSMGMFNF

SEQ ID NO: 158585 - protein, 9 aa, Artificial Sequence
  Description of Artificial Sequence: Synthetic peptide
  Seed: MMMGMFNML
MSMGMFNMA

SEQ ID NO: 158586 - protein, 9 aa, Artificial Sequence
  Description of Artificial Sequence: Synthetic peptide
  Seed: MMMGMFNML
MSMGMFNMF

SEQ ID NO: 158587 - protein, 9 aa, Artificial Sequence
  Description of Artificial Sequence: Synthetic peptide
  Seed: MMMGMFNML
MSMGMFNMH

SEQ ID NO: 158588 - protein, 9 aa, Artificial Sequence
  Description of Artificial Sequence: Synthetic peptide
  Seed: MMMGMFNML
MSMGMFNMI

SEQ ID NO: 158589 - protein, 9 aa, Artificial Sequence
  Description of Artificial Sequence: Synthetic peptide
  Seed: MMMGMFNML
MSMGMFNMK

SEQ ID NO: 158590 - protein, 9 aa, Artificial Sequence
  Description of Artificial Sequence: Synthetic peptide
  Seed: MMMGMFNML
MSMGMFNML

SEQ ID NO: 158591 - protein, 10 aa, Artificial Sequence
  Description of Artificial Sequence: Synthetic peptide
  Seed: MMMGMFNMLS
MSMGMFNMLA

SEQ ID NO: 158592 - protein, 10 aa, Artificial Sequence
  Description of Artificial Sequence: Synthetic peptide
  Seed: MMMGMFNMLS
MSMGMFNMLF

SEQ ID NO: 158593 - protein, 10 aa, Artificial Sequence
  Description of Artificial Sequence: Synthetic peptide
  Seed: MMMGMFNMLS
MSMGMFNMLI

SEQ ID NO: 158594 - protein, 10 aa, Artificial Sequence
  Description of Artificial Sequence: Synthetic peptide
  Seed: MMMGMFNMLS
MSMGMFNMLL

SEQ ID NO: 158595 - protein, 10 aa, Artificial Sequence
  Description of Artificial Sequence: Synthetic peptide
  Seed: MMMGMFNMLS
MSMGMFNMLM

SEQ ID NO: 158596 - protein, 10 aa, Artificial Sequence
  Description of Artificial Sequence: Synthetic peptide
  Seed: MMMGMFNMLS
MSMGMFNMLS

SEQ ID NO: 158597 - protein, 11 aa, Artificial Sequence
  Description of Artificial Sequence: Synthetic peptide
  Seed: MMMGMFNMLST
MSMGMFNMLSA

SEQ ID NO: 158598 - protein, 11 aa, Artificial Sequence
  Description of Artificial Sequence: Synthetic peptide
  Seed: MMMGMFNMLST
MSMGMFNMLSI

SEQ ID NO: 158599 - protein, 11 aa, Artificial Sequence
  Description of Artificial Sequence: Synthetic peptide
  Seed: MMMGMFNMLST
MSMGMFNMLSL

SEQ ID NO: 158600 - protein, 11 aa, Artificial Sequence
  Description of Artificial Sequence: Synthetic peptide
  Seed: MMMGMFNMLST
MSMGMFNMLSV

SEQ ID NO: 158601 - protein, 10 aa, Artificial Sequence
  Description of Artificial Sequence: Synthetic peptide
  Seed: MMMGMFNMLS
MSMGMFNMLT

SEQ ID NO: 158602 - protein, 10 aa, Artificial Sequence
  Description of Artificial Sequence: Synthetic peptide
  Seed: MMMGMFNMLS
MSMGMFNMLV

SEQ ID NO: 158603 - protein, 9 aa, Artificial Sequence
  Description of Artificial Sequence: Synthetic peptide
  Seed: MMMGMFNML
MSMGMFNMR

SEQ ID NO: 158604 - protein, 9 aa, Artificial Sequence
  Description of Artificial Sequence: Synthetic peptide
  Seed: MMMGMFNML
MSMGMFNMS

SEQ ID NO: 158605 - protein, 9 aa, Artificial Sequence
  Description of Artificial Sequence: Synthetic peptide
  Seed: MMMGMFNML
MSMGMFNMT

SEQ ID NO: 158606 - protein, 9 aa, Artificial Sequence
  Description of Artificial Sequence: Synthetic peptide
  Seed: MMMGMFNML
MSMGMFNMV

SEQ ID NO: 158607 - protein, 9 aa, Artificial Sequence
  Description of Artificial Sequence: Synthetic peptide
  Seed: MMMGMFNML
MSMGMFNMW

SEQ ID NO: 158608 - protein, 9 aa, Artificial Sequence
  Description of Artificial Sequence: Synthetic peptide
  Seed: MMMGMFNML
MSMGMFNMY

SEQ ID NO: 158609 - protein, 8 aa, Artificial Sequence
  Description of Artificial Sequence: Synthetic peptide
  Seed: MMMGMFNM
MSMGMFNV

SEQ ID NO: 158610 - protein, 8 aa, Artificial Sequence
  Description of Artificial Sequence: Synthetic peptide
  Seed: MMMGMFNM
MSMGMFNY

SEQ ID NO: 158611 - protein, 8 aa, Artificial Sequence
  Description of Artificial Sequence: Synthetic peptide
  Seed: MFNMLSTV
MSNMLSTV

SEQ ID NO: 158612 - protein, 9 aa, Artificial Sequence
  Description of Artificial Sequence: Synthetic peptide
  Seed: MFNMLSTVL
MSNMLSTVA

SEQ ID NO: 158613 - protein, 9 aa, Artificial Sequence
  Description of Artificial Sequence: Synthetic peptide
  Seed: MFNMLSTVL
MSNMLSTVF

SEQ ID NO: 158614 - protein, 9 aa, Artificial Sequence
  Description of Artificial Sequence: Synthetic peptide
  Seed: MFNMLSTVL
MSNMLSTVH

SEQ ID NO: 158615 - protein, 9 aa, Artificial Sequence
  Description of Artificial Sequence: Synthetic peptide
  Seed: MFNMLSTVL
MSNMLSTVI

SEQ ID NO: 158616 - protein, 9 aa, Artificial Sequence
  Description of Artificial Sequence: Synthetic peptide
  Seed: MFNMLSTVL
MSNMLSTVL

SEQ ID NO: 158617 - protein, 11 aa, Artificial Sequence
  Description of Artificial Sequence: Synthetic peptide
  Seed: MFNMLSTVLGV
MSNMLSTVLGA

SEQ ID NO: 158618 - protein, 11 aa, Artificial Sequence
  Description of Artificial Sequence: Synthetic peptide
  Seed: MFNMLSTVLGV
MSNMLSTVLGI

SEQ ID NO: 158619 - protein, 11 aa, Artificial Sequence
  Description of Artificial Sequence: Synthetic peptide
  Seed: MFNMLSTVLGV
MSNMLSTVLGL

SEQ ID NO: 158620 - protein, 11 aa, Artificial Sequence
  Description of Artificial Sequence: Synthetic peptide
  Seed: MFNMLSTVLGV
MSNMLSTVLGM

SEQ ID NO: 158621 - protein, 11 aa, Artificial Sequence
  Description of Artificial Sequence: Synthetic peptide
  Seed: MFNMLSTVLGV
MSNMLSTVLGT

SEQ ID NO: 158622 - protein, 11 aa, Artificial Sequence
  Description of Artificial Sequence: Synthetic peptide
  Seed: MFNMLSTVLGV
MSNMLSTVLGV

SEQ ID NO: 158623 - protein, 9 aa, Artificial Sequence
  Description of Artificial Sequence: Synthetic peptide
  Seed: MFNMLSTVL
MSNMLSTVM

SEQ ID NO: 158624 - protein, 9 aa, Artificial Sequence
  Description of Artificial Sequence: Synthetic peptide
  Seed: MFNMLSTVL
MSNMLSTVV

SEQ ID NO: 158625 - protein, 9 aa, Artificial Sequence
  Description of Artificial Sequence: Synthetic peptide
  Seed: MFNMLSTVL
MSNMLSTVW

SEQ ID NO: 158626 - protein, 9 aa, Artificial Sequence
  Description of Artificial Sequence: Synthetic peptide
  Seed: MFNMLSTVL
MSNMLSTVY

SEQ ID NO: 158627 - protein, 9 aa, Artificial Sequence
  Description of Artificial Sequence: Synthetic peptide
  Seed: MARLGKGYM
MSRLGKGYA

SEQ ID NO: 158628 - protein, 9 aa, Artificial Sequence
  Description of Artificial Sequence: Synthetic peptide
  Seed: MARLGKGYM
MSRLGKGYC

SEQ ID NO: 158629 - protein, 9 aa, Artificial Sequence
  Description of Artificial Sequence: Synthetic peptide
  Seed: MARLGKGYM
MSRLGKGYE

SEQ ID NO: 158630 - protein, 9 aa, Artificial Sequence
  Description of Artificial Sequence: Synthetic peptide
  Seed: MARLGKGYM
MSRLGKGYF

SEQ ID NO: 158631 - protein, 9 aa, Artificial Sequence
  Description of Artificial Sequence: Synthetic peptide
  Seed: MARLGKGYM
MSRLGKGYG

SEQ ID NO: 158632 - protein, 9 aa, Artificial Sequence
  Description of Artificial Sequence: Synthetic peptide
  Seed: MARLGKGYM
MSRLGKGYH

SEQ ID NO: 158633 - protein, 9 aa, Artificial Sequence
  Description of Artificial Sequence: Synthetic peptide
  Seed: MARLGKGYM
MSRLGKGYI

SEQ ID NO: 158634 - protein, 9 aa, Artificial Sequence
  Description of Artificial Sequence: Synthetic peptide
  Seed: MARLGKGYM
MSRLGKGYK

SEQ ID NO: 158635 - protein, 9 aa, Artificial Sequence
  Description of Artificial Sequence: Synthetic peptide
  Seed: MARLGKGYM
MSRLGKGYL

SEQ ID NO: 158636 - protein, 9 aa, Artificial Sequence
  Description of Artificial Sequence: Synthetic peptide
  Seed: MARLGKGYM
MSRLGKGYM

SEQ ID NO: 158637 - protein, 10 aa, Artificial Sequence
  Description of Artificial Sequence: Synthetic peptide
  Seed: MARLGKGYMF
MSRLGKGYMA

SEQ ID NO: 158638 - protein, 10 aa, Artificial Sequence
  Description of Artificial Sequence: Synthetic peptide
  Seed: MARLGKGYMF
MSRLGKGYMF

SEQ ID NO: 158639 - protein, 10 aa, Artificial Sequence
  Description of Artificial Sequence: Synthetic peptide
  Seed: MARLGKGYMF
MSRLGKGYMI

SEQ ID NO: 158640 - protein, 10 aa, Artificial Sequence
  Description of Artificial Sequence: Synthetic peptide
  Seed: MARLGKGYMF
MSRLGKGYMK

SEQ ID NO: 158641 - protein, 10 aa, Artificial Sequence
  Description of Artificial Sequence: Synthetic peptide
  Seed: MARLGKGYMF
MSRLGKGYML

SEQ ID NO: 158642 - protein, 10 aa, Artificial Sequence
  Description of Artificial Sequence: Synthetic peptide
  Seed: MARLGKGYMF
MSRLGKGYMM

SEQ ID NO: 158643 - protein, 10 aa, Artificial Sequence
  Description of Artificial Sequence: Synthetic peptide
  Seed: MARLGKGYMF
MSRLGKGYMR

SEQ ID NO: 158644 - protein, 10 aa, Artificial Sequence
  Description of Artificial Sequence: Synthetic peptide
  Seed: MARLGKGYMF
MSRLGKGYMV

SEQ ID NO: 158645 - protein, 10 aa, Artificial Sequence
  Description of Artificial Sequence: Synthetic peptide
  Seed: MARLGKGYMF
MSRLGKGYMW

SEQ ID NO: 158646 - protein, 10 aa, Artificial Sequence
  Description of Artificial Sequence: Synthetic peptide
  Seed: MARLGKGYMF
MSRLGKGYMY

SEQ ID NO: 158647 - protein, 9 aa, Artificial Sequence
  Description of Artificial Sequence: Synthetic peptide
  Seed: MARLGKGYM
MSRLGKGYN

SEQ ID NO: 158648 - protein, 9 aa, Artificial Sequence
  Description of Artificial Sequence: Synthetic peptide
  Seed: MARLGKGYM
MSRLGKGYP

SEQ ID NO: 158649 - protein, 9 aa, Artificial Sequence
  Description of Artificial Sequence: Synthetic peptide
  Seed: MARLGKGYM
MSRLGKGYQ

SEQ ID NO: 158650 - protein, 9 aa, Artificial Sequence
  Description of Artificial Sequence: Synthetic peptide
  Seed: MARLGKGYM
MSRLGKGYR

SEQ ID NO: 158651 - protein, 9 aa, Artificial Sequence
  Description of Artificial Sequence: Synthetic peptide
  Seed: MARLGKGYM
MSRLGKGYS

SEQ ID NO: 158652 - protein, 9 aa, Artificial Sequence
  Description of Artificial Sequence: Synthetic peptide
  Seed: MARLGKGYM
MSRLGKGYT

SEQ ID NO: 158653 - protein, 9 aa, Artificial Sequence
  Description of Artificial Sequence: Synthetic peptide
  Seed: MARLGKGYM
MSRLGKGYV

SEQ ID NO: 158654 - protein, 9 aa, Artificial Sequence
  Description of Artificial Sequence: Synthetic peptide
  Seed: MARLGKGYM
MSRLGKGYW

SEQ ID NO: 158655 - protein, 9 aa, Artificial Sequence
  Description of Artificial Sequence: Synthetic peptide
  Seed: MARLGKGYM
MSRLGKGYY

SEQ ID NO: 158656 - protein, 8 aa, Artificial Sequence
  Description of Artificial Sequence: Synthetic peptide
  Seed: MFSNKMAR
MSSNKMAR

SEQ ID NO: 158657 - protein, 11 aa, Artificial Sequence
  Description of Artificial Sequence: Synthetic peptide
  Seed: MFSNKMARLGK
MSSNKMARLGA

SEQ ID NO: 158658 - protein, 11 aa, Artificial Sequence
  Description of Artificial Sequence: Synthetic peptide
  Seed: MFSNKMARLGK
MSSNKMARLGK

SEQ ID NO: 158659 - protein, 11 aa, Artificial Sequence
  Description of Artificial Sequence: Synthetic peptide
  Seed: MFSNKMARLGK
MSSNKMARLGR

SEQ ID NO: 158660 - protein, 11 aa, Artificial Sequence
  Description of Artificial Sequence: Synthetic peptide
  Seed: MFSNKMARLGK
MSSNKMARLGV

SEQ ID NO: 158661 - protein, 8 aa, Artificial Sequence
  Description of Artificial Sequence: Synthetic peptide
  Seed: MLSTVLGV
MSSTVLGV

SEQ ID NO: 158662 - protein, 9 aa, Artificial Sequence
  Description of Artificial Sequence: Synthetic peptide
  Seed: MLSTVLGVS
MSSTVLGVA

SEQ ID NO: 158663 - protein, 9 aa, Artificial Sequence
  Description of Artificial Sequence: Synthetic peptide
  Seed: MLSTVLGVS
MSSTVLGVI

SEQ ID NO: 158664 - protein, 10 aa, Artificial Sequence
  Description of Artificial Sequence: Synthetic peptide
  Seed: MLSTVLGVSI
MSSTVLGVSA

SEQ ID NO: 158665 - protein, 10 aa, Artificial Sequence
  Description of Artificial Sequence: Synthetic peptide
  Seed: MLSTVLGVSI
MSSTVLGVSF

SEQ ID NO: 158666 - protein, 10 aa, Artificial Sequence
  Description of Artificial Sequence: Synthetic peptide
  Seed: MLSTVLGVSI
MSSTVLGVSG

SEQ ID NO: 158667 - protein, 10 aa, Artificial Sequence
  Description of Artificial Sequence: Synthetic peptide
  Seed: MLSTVLGVSI
MSSTVLGVSI

SEQ ID NO: 158668 - protein, 10 aa, Artificial Sequence
  Description of Artificial Sequence: Synthetic peptide
  Seed: MLSTVLGVSI
MSSTVLGVSL

SEQ ID NO: 158669 - protein, 10 aa, Artificial Sequence
  Description of Artificial Sequence: Synthetic peptide
  Seed: MLSTVLGVSI
MSSTVLGVSM

SEQ ID NO: 158670 - protein, 10 aa, Artificial Sequence
  Description of Artificial Sequence: Synthetic peptide
  Seed: MLSTVLGVSI
MSSTVLGVSN

SEQ ID NO: 158671 - protein, 10 aa, Artificial Sequence
  Description of Artificial Sequence: Synthetic peptide
  Seed: MLSTVLGVSI
MSSTVLGVSV

SEQ ID NO: 158672 - protein, 10 aa, Artificial Sequence
  Description of Artificial Sequence: Synthetic peptide
  Seed: MLSTVLGVSI
MSSTVLGVSW

SEQ ID NO: 158673 - protein, 10 aa, Artificial Sequence
  Description of Artificial Sequence: Synthetic peptide
  Seed: MLSTVLGVSI
MSSTVLGVSY

SEQ ID NO: 158674 - protein, 9 aa, Artificial Sequence
  Description of Artificial Sequence: Synthetic peptide
  Seed: MLSTVLGVS
MSSTVLGVV

SEQ ID NO: 158675 - protein, 9 aa, Artificial Sequence
  Description of Artificial Sequence: Synthetic peptide
  Seed: MMGMFNMLS
MTGMFNMLA

SEQ ID NO: 158676 - protein, 9 aa, Artificial Sequence
  Description of Artificial Sequence: Synthetic peptide
  Seed: MMGMFNMLS
MTGMFNMLI

SEQ ID NO: 158677 - protein, 9 aa, Artificial Sequence
  Description of Artificial Sequence: Synthetic peptide
  Seed: MMGMFNMLS
MTGMFNMLL

SEQ ID NO: 158678 - protein, 9 aa, Artificial Sequence
  Description of Artificial Sequence: Synthetic peptide
  Seed: MMGMFNMLS
MTGMFNMLM

SEQ ID NO: 158679 - protein, 10 aa, Artificial Sequence
  Description of Artificial Sequence: Synthetic peptide
  Seed: MMGMFNMLST
MTGMFNMLSA

SEQ ID NO: 158680 - protein, 10 aa, Artificial Sequence
  Description of Artificial Sequence: Synthetic peptide
  Seed: MMGMFNMLST
MTGMFNMLSI

SEQ ID NO: 158681 - protein, 10 aa, Artificial Sequence
  Description of Artificial Sequence: Synthetic peptide
  Seed: MMGMFNMLST
MTGMFNMLSL

SEQ ID NO: 158682 - protein, 10 aa, Artificial Sequence
  Description of Artificial Sequence: Synthetic peptide
  Seed: MMGMFNMLST
MTGMFNMLSM

SEQ ID NO: 158683 - protein, 11 aa, Artificial Sequence
  Description of Artificial Sequence: Synthetic peptide
  Seed: MMGMFNMLSTV
MTGMFNMLSTA

SEQ ID NO: 158684 - protein, 11 aa, Artificial Sequence
  Description of Artificial Sequence: Synthetic peptide
  Seed: MMGMFNMLSTV
MTGMFNMLSTI

SEQ ID NO: 158685 - protein, 11 aa, Artificial Sequence
  Description of Artificial Sequence: Synthetic peptide
  Seed: MMGMFNMLSTV
MTGMFNMLSTL

SEQ ID NO: 158686 - protein, 11 aa, Artificial Sequence
  Description of Artificial Sequence: Synthetic peptide
  Seed: MMGMFNMLSTV
MTGMFNMLSTM

SEQ ID NO: 158687 - protein, 11 aa, Artificial Sequence
  Description of Artificial Sequence: Synthetic peptide
  Seed: MMGMFNMLSTV
MTGMFNMLSTT

SEQ ID NO: 158688 - protein, 11 aa, Artificial Sequence
  Description of Artificial Sequence: Synthetic peptide
  Seed: MMGMFNMLSTV
MTGMFNMLSTV

SEQ ID NO: 158689 - protein, 10 aa, Artificial Sequence
  Description of Artificial Sequence: Synthetic peptide
  Seed: MMGMFNMLST
MTGMFNMLSV

SEQ ID NO: 158690 - protein, 9 aa, Artificial Sequence
  Description of Artificial Sequence: Synthetic peptide
  Seed: MMGMFNMLS
MTGMFNMLV

SEQ ID NO: 158691 - protein, 8 aa, Artificial Sequence
  Description of Artificial Sequence: Synthetic peptide
  Seed: MSIGVTVI
MTIGVTVF

SEQ ID NO: 158692 - protein, 8 aa, Artificial Sequence
  Description of Artificial Sequence: Synthetic peptide
  Seed: MSIGVTVI
MTIGVTVI

SEQ ID NO: 158693 - protein, 9 aa, Artificial Sequence
  Description of Artificial Sequence: Synthetic peptide
  Seed: MSIGVTVIK
MTIGVTVIA

SEQ ID NO: 158694 - protein, 9 aa, Artificial Sequence
  Description of Artificial Sequence: Synthetic peptide
  Seed: MSIGVTVIK
MTIGVTVIE

SEQ ID NO: 158695 - protein, 9 aa, Artificial Sequence
  Description of Artificial Sequence: Synthetic peptide
  Seed: MSIGVTVIK
MTIGVTVIF

SEQ ID NO: 158696 - protein, 9 aa, Artificial Sequence
  Description of Artificial Sequence: Synthetic peptide
  Seed: MSIGVTVIK
MTIGVTVIH

SEQ ID NO: 158697 - protein, 9 aa, Artificial Sequence
  Description of Artificial Sequence: Synthetic peptide
  Seed: MSIGVTVIK
MTIGVTVII

SEQ ID NO: 158698 - protein, 9 aa, Artificial Sequence
  Description of Artificial Sequence: Synthetic peptide
  Seed: MSIGVTVIK
MTIGVTVIK

SEQ ID NO: 158699 - protein, 10 aa, Artificial Sequence
  Description of Artificial Sequence: Synthetic peptide
  Seed: MSIGVTVIKN
MTIGVTVIKA

SEQ ID NO: 158700 - protein, 10 aa, Artificial Sequence
  Description of Artificial Sequence: Synthetic peptide
  Seed: MSIGVTVIKN
MTIGVTVIKC

SEQ ID NO: 158701 - protein, 10 aa, Artificial Sequence
  Description of Artificial Sequence: Synthetic peptide
  Seed: MSIGVTVIKN
MTIGVTVIKD

SEQ ID NO: 158702 - protein, 10 aa, Artificial Sequence
  Description of Artificial Sequence: Synthetic peptide
  Seed: MSIGVTVIKN
MTIGVTVIKE

SEQ ID NO: 158703 - protein, 10 aa, Artificial Sequence
  Description of Artificial Sequence: Synthetic peptide
  Seed: MSIGVTVIKN
MTIGVTVIKF

SEQ ID NO: 158704 - protein, 10 aa, Artificial Sequence
  Description of Artificial Sequence: Synthetic peptide
  Seed: MSIGVTVIKN
MTIGVTVIKG

SEQ ID NO: 158705 - protein, 10 aa, Artificial Sequence
  Description of Artificial Sequence: Synthetic peptide
  Seed: MSIGVTVIKN
MTIGVTVIKH

SEQ ID NO: 158706 - protein, 10 aa, Artificial Sequence
  Description of Artificial Sequence: Synthetic peptide
  Seed: MSIGVTVIKN
MTIGVTVIKI

SEQ ID NO: 158707 - protein, 10 aa, Artificial Sequence
  Description of Artificial Sequence: Synthetic peptide
  Seed: MSIGVTVIKN
MTIGVTVIKK

SEQ ID NO: 158708 - protein, 10 aa, Artificial Sequence
  Description of Artificial Sequence: Synthetic peptide
  Seed: MSIGVTVIKN
MTIGVTVIKL

SEQ ID NO: 158709 - protein, 10 aa, Artificial Sequence
  Description of Artificial Sequence: Synthetic peptide
  Seed: MSIGVTVIKN
MTIGVTVIKM

SEQ ID NO: 158710 - protein, 10 aa, Artificial Sequence
  Description of Artificial Sequence: Synthetic peptide
  Seed: MSIGVTVIKN
MTIGVTVIKN

SEQ ID NO: 158711 - protein, 10 aa, Artificial Sequence
  Description of Artificial Sequence: Synthetic peptide
  Seed: MSIGVTVIKN
MTIGVTVIKP

SEQ ID NO: 158712 - protein, 10 aa, Artificial Sequence
  Description of Artificial Sequence: Synthetic peptide
  Seed: MSIGVTVIKN
MTIGVTVIKQ

SEQ ID NO: 158713 - protein, 10 aa, Artificial Sequence
  Description of Artificial Sequence: Synthetic peptide
  Seed: MSIGVTVIKN
MTIGVTVIKR

SEQ ID NO: 158714 - protein, 10 aa, Artificial Sequence
  Description of Artificial Sequence: Synthetic peptide
  Seed: MSIGVTVIKN
MTIGVTVIKS

SEQ ID NO: 158715 - protein, 10 aa, Artificial Sequence
  Description of Artificial Sequence: Synthetic peptide
  Seed: MSIGVTVIKN
MTIGVTVIKT

SEQ ID NO: 158716 - protein, 10 aa, Artificial Sequence
  Description of Artificial Sequence: Synthetic peptide
  Seed: MSIGVTVIKN
MTIGVTVIKV

SEQ ID NO: 158717 - protein, 10 aa, Artificial Sequence
  Description of Artificial Sequence: Synthetic peptide
  Seed: MSIGVTVIKN
MTIGVTVIKW

SEQ ID NO: 158718 - protein, 10 aa, Artificial Sequence
  Description of Artificial Sequence: Synthetic peptide
  Seed: MSIGVTVIKN
MTIGVTVIKY

SEQ ID NO: 158719 - protein, 9 aa, Artificial Sequence
  Description of Artificial Sequence: Synthetic peptide
  Seed: MSIGVTVIK
MTIGVTVIL

SEQ ID NO: 158720 - protein, 9 aa, Artificial Sequence
  Description of Artificial Sequence: Synthetic peptide
  Seed: MSIGVTVIK
MTIGVTVIM

SEQ ID NO: 158721 - protein, 9 aa, Artificial Sequence
  Description of Artificial Sequence: Synthetic peptide
  Seed: MSIGVTVIK
MTIGVTVIQ

SEQ ID NO: 158722 - protein, 9 aa, Artificial Sequence
  Description of Artificial Sequence: Synthetic peptide
  Seed: MSIGVTVIK
MTIGVTVIS

SEQ ID NO: 158723 - protein, 9 aa, Artificial Sequence
  Description of Artificial Sequence: Synthetic peptide
  Seed: MSIGVTVIK
MTIGVTVIT

SEQ ID NO: 158724 - protein, 9 aa, Artificial Sequence
  Description of Artificial Sequence: Synthetic peptide
  Seed: MSIGVTVIK
MTIGVTVIV

SEQ ID NO: 158725 - protein, 9 aa, Artificial Sequence
  Description of Artificial Sequence: Synthetic peptide
  Seed: MSIGVTVIK
MTIGVTVIY

SEQ ID NO: 158726 - protein, 8 aa, Artificial Sequence
  Description of Artificial Sequence: Synthetic peptide
  Seed: MSIGVTVI
MTIGVTVL

SEQ ID NO: 158727 - protein, 8 aa, Artificial Sequence
  Description of Artificial Sequence: Synthetic peptide
  Seed: MSIGVTVI
MTIGVTVM

SEQ ID NO: 158728 - protein, 8 aa, Artificial Sequence
  Description of Artificial Sequence: Synthetic peptide
  Seed: MSIGVTVI
MTIGVTVW

SEQ ID NO: 158729 - protein, 8 aa, Artificial Sequence
  Description of Artificial Sequence: Synthetic peptide
  Seed: MSIGVTVI
MTIGVTVY

SEQ ID NO: 158730 - protein, 9 aa, Artificial Sequence
  Description of Artificial Sequence: Synthetic peptide
  Seed: MTKDAERGK
MTKDAERGA

SEQ ID NO: 158731 - protein, 9 aa, Artificial Sequence
  Description of Artificial Sequence: Synthetic peptide
  Seed: MTKDAERGK
MTKDAERGR

SEQ ID NO: 158732 - protein, 10 aa, Artificial Sequence
  Description of Artificial Sequence: Synthetic peptide
  Seed: MGMFNMLSTV
MTMFNMLSTA

SEQ ID NO: 158733 - protein, 10 aa, Artificial Sequence
  Description of Artificial Sequence: Synthetic peptide
  Seed: MGMFNMLSTV
MTMFNMLSTC

SEQ ID NO: 158734 - protein, 10 aa, Artificial Sequence
  Description of Artificial Sequence: Synthetic peptide
  Seed: MGMFNMLSTV
MTMFNMLSTF

SEQ ID NO: 158735 - protein, 10 aa, Artificial Sequence
  Description of Artificial Sequence: Synthetic peptide
  Seed: MGMFNMLSTV
MTMFNMLSTG

SEQ ID NO: 158736 - protein, 10 aa, Artificial Sequence
  Description of Artificial Sequence: Synthetic peptide
  Seed: MGMFNMLSTV
MTMFNMLSTH

SEQ ID NO: 158737 - protein, 10 aa, Artificial Sequence
  Description of Artificial Sequence: Synthetic peptide
  Seed: MGMFNMLSTV
MTMFNMLSTI

SEQ ID NO: 158738 - protein, 10 aa, Artificial Sequence
  Description of Artificial Sequence: Synthetic peptide
  Seed: MGMFNMLSTV
MTMFNMLSTL

SEQ ID NO: 158739 - protein, 10 aa, Artificial Sequence
  Description of Artificial Sequence: Synthetic peptide
  Seed: MGMFNMLSTV
MTMFNMLSTM

SEQ ID NO: 158740 - protein, 10 aa, Artificial Sequence
  Description of Artificial Sequence: Synthetic peptide
  Seed: MGMFNMLSTV
MTMFNMLSTP

SEQ ID NO: 158741 - protein, 10 aa, Artificial Sequence
  Description of Artificial Sequence: Synthetic peptide
  Seed: MGMFNMLSTV
MTMFNMLSTS

SEQ ID NO: 158742 - protein, 10 aa, Artificial Sequence
  Description of Artificial Sequence: Synthetic peptide
  Seed: MGMFNMLSTV
MTMFNMLSTT

SEQ ID NO: 158743 - protein, 10 aa, Artificial Sequence
  Description of Artificial Sequence: Synthetic peptide
  Seed: MGMFNMLSTV
MTMFNMLSTV

SEQ ID NO: 158744 - protein, 11 aa, Artificial Sequence
  Description of Artificial Sequence: Synthetic peptide
  Seed: MGMFNMLSTVL
MTMFNMLSTVA

SEQ ID NO: 158745 - protein, 11 aa, Artificial Sequence
  Description of Artificial Sequence: Synthetic peptide
  Seed: MGMFNMLSTVL
MTMFNMLSTVC

SEQ ID NO: 158746 - protein, 11 aa, Artificial Sequence
  Description of Artificial Sequence: Synthetic peptide
  Seed: MGMFNMLSTVL
MTMFNMLSTVD

SEQ ID NO: 158747 - protein, 11 aa, Artificial Sequence
  Description of Artificial Sequence: Synthetic peptide
  Seed: MGMFNMLSTVL
MTMFNMLSTVE

SEQ ID NO: 158748 - protein, 11 aa, Artificial Sequence
  Description of Artificial Sequence: Synthetic peptide
  Seed: MGMFNMLSTVL
MTMFNMLSTVF

SEQ ID NO: 158749 - protein, 11 aa, Artificial Sequence
  Description of Artificial Sequence: Synthetic peptide
  Seed: MGMFNMLSTVL
MTMFNMLSTVG

SEQ ID NO: 158750 - protein, 11 aa, Artificial Sequence
  Description of Artificial Sequence: Synthetic peptide
  Seed: MGMFNMLSTVL
MTMFNMLSTVH

SEQ ID NO: 158751 - protein, 11 aa, Artificial Sequence
  Description of Artificial Sequence: Synthetic peptide
  Seed: MGMFNMLSTVL
MTMFNMLSTVI

SEQ ID NO: 158752 - protein, 11 aa, Artificial Sequence
  Description of Artificial Sequence: Synthetic peptide
  Seed: MGMFNMLSTVL
MTMFNMLSTVK

SEQ ID NO: 158753 - protein, 11 aa, Artificial Sequence
  Description of Artificial Sequence: Synthetic peptide
  Seed: MGMFNMLSTVL
MTMFNMLSTVL

SEQ ID NO: 158754 - protein, 11 aa, Artificial Sequence
  Description of Artificial Sequence: Synthetic peptide
  Seed: MGMFNMLSTVL
MTMFNMLSTVM

SEQ ID NO: 158755 - protein, 11 aa, Artificial Sequence
  Description of Artificial Sequence: Synthetic peptide
  Seed: MGMFNMLSTVL
MTMFNMLSTVN

SEQ ID NO: 158756 - protein, 11 aa, Artificial Sequence
  Description of Artificial Sequence: Synthetic peptide
  Seed: MGMFNMLSTVL
MTMFNMLSTVP

SEQ ID NO: 158757 - protein, 11 aa, Artificial Sequence
  Description of Artificial Sequence: Synthetic peptide
  Seed: MGMFNMLSTVL
MTMFNMLSTVQ

SEQ ID NO: 158758 - protein, 11 aa, Artificial Sequence
  Description of Artificial Sequence: Synthetic peptide
  Seed: MGMFNMLSTVL
MTMFNMLSTVR

SEQ ID NO: 158759 - protein, 11 aa, Artificial Sequence
  Description of Artificial Sequence: Synthetic peptide
  Seed: MGMFNMLSTVL
MTMFNMLSTVS

SEQ ID NO: 158760 - protein, 11 aa, Artificial Sequence
  Description of Artificial Sequence: Synthetic peptide
  Seed: MGMFNMLSTVL
MTMFNMLSTVT

SEQ ID NO: 158761 - protein, 11 aa, Artificial Sequence
  Description of Artificial Sequence: Synthetic peptide
  Seed: MGMFNMLSTVL
MTMFNMLSTVV

SEQ ID NO: 158762 - protein, 11 aa, Artificial Sequence
  Description of Artificial Sequence: Synthetic peptide
  Seed: MGMFNMLSTVL
MTMFNMLSTVW

SEQ ID NO: 158763 - protein, 11 aa, Artificial Sequence
  Description of Artificial Sequence: Synthetic peptide
  Seed: MGMFNMLSTVL
MTMFNMLSTVY

SEQ ID NO: 158764 - protein, 10 aa, Artificial Sequence
  Description of Artificial Sequence: Synthetic peptide
  Seed: MGMFNMLSTV
MTMFNMLSTW

SEQ ID NO: 158765 - protein, 10 aa, Artificial Sequence
  Description of Artificial Sequence: Synthetic peptide
  Seed: MGMFNMLSTV
MTMFNMLSTY

SEQ ID NO: 158766 - protein, 8 aa, Artificial Sequence
  Description of Artificial Sequence: Synthetic peptide
  Seed: MMMGMFNM
MTMGMFNF

SEQ ID NO: 158767 - protein, 8 aa, Artificial Sequence
  Description of Artificial Sequence: Synthetic peptide
  Seed: MMMGMFNM
MTMGMFNI

SEQ ID NO: 158768 - protein, 9 aa, Artificial Sequence
  Description of Artificial Sequence: Synthetic peptide
  Seed: MMMGMFNML
MTMGMFNMA

SEQ ID NO: 158769 - protein, 9 aa, Artificial Sequence
  Description of Artificial Sequence: Synthetic peptide
  Seed: MMMGMFNML
MTMGMFNMC

SEQ ID NO: 158770 - protein, 9 aa, Artificial Sequence
  Description of Artificial Sequence: Synthetic peptide
  Seed: MMMGMFNML
MTMGMFNME

SEQ ID NO: 158771 - protein, 9 aa, Artificial Sequence
  Description of Artificial Sequence: Synthetic peptide
  Seed: MMMGMFNML
MTMGMFNMF

SEQ ID NO: 158772 - protein, 9 aa, Artificial Sequence
  Description of Artificial Sequence: Synthetic peptide
  Seed: MMMGMFNML
MTMGMFNMG

SEQ ID NO: 158773 - protein, 9 aa, Artificial Sequence
  Description of Artificial Sequence: Synthetic peptide
  Seed: MMMGMFNML
MTMGMFNMH

SEQ ID NO: 158774 - protein, 9 aa, Artificial Sequence
  Description of Artificial Sequence: Synthetic peptide
  Seed: MMMGMFNML
MTMGMFNMI

SEQ ID NO: 158775 - protein, 9 aa, Artificial Sequence
  Description of Artificial Sequence: Synthetic peptide
  Seed: MMMGMFNML
MTMGMFNMK

SEQ ID NO: 158776 - protein, 9 aa, Artificial Sequence
  Description of Artificial Sequence: Synthetic peptide
  Seed: MMMGMFNML
MTMGMFNML

SEQ ID NO: 158777 - protein, 10 aa, Artificial Sequence
  Description of Artificial Sequence: Synthetic peptide
  Seed: MMMGMFNMLS
MTMGMFNMLA

SEQ ID NO: 158778 - protein, 10 aa, Artificial Sequence
  Description of Artificial Sequence: Synthetic peptide
  Seed: MMMGMFNMLS
MTMGMFNMLC

SEQ ID NO: 158779 - protein, 10 aa, Artificial Sequence
  Description of Artificial Sequence: Synthetic peptide
  Seed: MMMGMFNMLS
MTMGMFNMLD

SEQ ID NO: 158780 - protein, 10 aa, Artificial Sequence
  Description of Artificial Sequence: Synthetic peptide
  Seed: MMMGMFNMLS
MTMGMFNMLE

SEQ ID NO: 158781 - protein, 10 aa, Artificial Sequence
  Description of Artificial Sequence: Synthetic peptide
  Seed: MMMGMFNMLS
MTMGMFNMLF

SEQ ID NO: 158782 - protein, 10 aa, Artificial Sequence
  Description of Artificial Sequence: Synthetic peptide
  Seed: MMMGMFNMLS
MTMGMFNMLG

SEQ ID NO: 158783 - protein, 10 aa, Artificial Sequence
  Description of Artificial Sequence: Synthetic peptide
  Seed: MMMGMFNMLS
MTMGMFNMLI

SEQ ID NO: 158784 - protein, 10 aa, Artificial Sequence
  Description of Artificial Sequence: Synthetic peptide
  Seed: MMMGMFNMLS
MTMGMFNMLL

SEQ ID NO: 158785 - protein, 10 aa, Artificial Sequence
  Description of Artificial Sequence: Synthetic peptide
  Seed: MMMGMFNMLS
MTMGMFNMLM

SEQ ID NO: 158786 - protein, 10 aa, Artificial Sequence
  Description of Artificial Sequence: Synthetic peptide
  Seed: MMMGMFNMLS
MTMGMFNMLP

SEQ ID NO: 158787 - protein, 10 aa, Artificial Sequence
  Description of Artificial Sequence: Synthetic peptide
  Seed: MMMGMFNMLS
MTMGMFNMLR

SEQ ID NO: 158788 - protein, 10 aa, Artificial Sequence
  Description of Artificial Sequence: Synthetic peptide
  Seed: MMMGMFNMLS
MTMGMFNMLS

SEQ ID NO: 158789 - protein, 11 aa, Artificial Sequence
  Description of Artificial Sequence: Synthetic peptide
  Seed: MMMGMFNMLST
MTMGMFNMLSA

SEQ ID NO: 158790 - protein, 11 aa, Artificial Sequence
  Description of Artificial Sequence: Synthetic peptide
  Seed: MMMGMFNMLST
MTMGMFNMLSI

SEQ ID NO: 158791 - protein, 11 aa, Artificial Sequence
  Description of Artificial Sequence: Synthetic peptide
  Seed: MMMGMFNMLST
MTMGMFNMLSL

SEQ ID NO: 158792 - protein, 11 aa, Artificial Sequence
  Description of Artificial Sequence: Synthetic peptide
  Seed: MMMGMFNMLST
MTMGMFNMLSM

SEQ ID NO: 158793 - protein, 11 aa, Artificial Sequence
  Description of Artificial Sequence: Synthetic peptide
  Seed: MMMGMFNMLST
MTMGMFNMLSV

SEQ ID NO: 158794 - protein, 10 aa, Artificial Sequence
  Description of Artificial Sequence: Synthetic peptide
  Seed: MMMGMFNMLS
MTMGMFNMLT

SEQ ID NO: 158795 - protein, 10 aa, Artificial Sequence
  Description of Artificial Sequence: Synthetic peptide
  Seed: MMMGMFNMLS
MTMGMFNMLV

SEQ ID NO: 158796 - protein, 10 aa, Artificial Sequence
  Description of Artificial Sequence: Synthetic peptide
  Seed: MMMGMFNMLS
MTMGMFNMLW

SEQ ID NO: 158797 - protein, 9 aa, Artificial Sequence
  Description of Artificial Sequence: Synthetic peptide
  Seed: MMMGMFNML
MTMGMFNMM

SEQ ID NO: 158798 - protein, 9 aa, Artificial Sequence
  Description of Artificial Sequence: Synthetic peptide
  Seed: MMMGMFNML
MTMGMFNMP

SEQ ID NO: 158799 - protein, 9 aa, Artificial Sequence
  Description of Artificial Sequence: Synthetic peptide
  Seed: MMMGMFNML
MTMGMFNMQ

SEQ ID NO: 158800 - protein, 9 aa, Artificial Sequence
  Description of Artificial Sequence: Synthetic peptide
  Seed: MMMGMFNML
MTMGMFNMR

SEQ ID NO: 158801 - protein, 9 aa, Artificial Sequence
  Description of Artificial Sequence: Synthetic peptide
  Seed: MMMGMFNML
MTMGMFNMS

SEQ ID NO: 158802 - protein, 9 aa, Artificial Sequence
  Description of Artificial Sequence: Synthetic peptide
  Seed: MMMGMFNML
MTMGMFNMT

SEQ ID NO: 158803 - protein, 9 aa, Artificial Sequence
  Description of Artificial Sequence: Synthetic peptide
  Seed: MMMGMFNML
MTMGMFNMV

SEQ ID NO: 158804 - protein, 9 aa, Artificial Sequence
  Description of Artificial Sequence: Synthetic peptide
  Seed: MMMGMFNML
MTMGMFNMW

SEQ ID NO: 158805 - protein, 9 aa, Artificial Sequence
  Description of Artificial Sequence: Synthetic peptide
  Seed: MMMGMFNML
MTMGMFNMY

SEQ ID NO: 158806 - protein, 8 aa, Artificial Sequence
  Description of Artificial Sequence: Synthetic peptide
  Seed: MMMGMFNM
MTMGMFNV

SEQ ID NO: 158807 - protein, 8 aa, Artificial Sequence
  Description of Artificial Sequence: Synthetic peptide
  Seed: MMMGMFNM
MTMGMFNY

SEQ ID NO: 158808 - protein, 9 aa, Artificial Sequence
  Description of Artificial Sequence: Synthetic peptide
  Seed: MFNMLSTVL
MTNMLSTVA

SEQ ID NO: 158809 - protein, 9 aa, Artificial Sequence
  Description of Artificial Sequence: Synthetic peptide
  Seed: MFNMLSTVL
MTNMLSTVF

SEQ ID NO: 158810 - protein, 9 aa, Artificial Sequence
  Description of Artificial Sequence: Synthetic peptide
  Seed: MFNMLSTVL
MTNMLSTVH

SEQ ID NO: 158811 - protein, 9 aa, Artificial Sequence
  Description of Artificial Sequence: Synthetic peptide
  Seed: MFNMLSTVL
MTNMLSTVI

SEQ ID NO: 158812 - protein, 9 aa, Artificial Sequence
  Description of Artificial Sequence: Synthetic peptide
  Seed: MFNMLSTVL
MTNMLSTVL

SEQ ID NO: 158813 - protein, 11 aa, Artificial Sequence
  Description of Artificial Sequence: Synthetic peptide
  Seed: MFNMLSTVLGV
MTNMLSTVLGA

SEQ ID NO: 158814 - protein, 11 aa, Artificial Sequence
  Description of Artificial Sequence: Synthetic peptide
  Seed: MFNMLSTVLGV
MTNMLSTVLGI

SEQ ID NO: 158815 - protein, 11 aa, Artificial Sequence
  Description of Artificial Sequence: Synthetic peptide
  Seed: MFNMLSTVLGV
MTNMLSTVLGL

SEQ ID NO: 158816 - protein, 11 aa, Artificial Sequence
  Description of Artificial Sequence: Synthetic peptide
  Seed: MFNMLSTVLGV
MTNMLSTVLGM

SEQ ID NO: 158817 - protein, 11 aa, Artificial Sequence
  Description of Artificial Sequence: Synthetic peptide
  Seed: MFNMLSTVLGV
MTNMLSTVLGT

SEQ ID NO: 158818 - protein, 11 aa, Artificial Sequence
  Description of Artificial Sequence: Synthetic peptide
  Seed: MFNMLSTVLGV
MTNMLSTVLGV

SEQ ID NO: 158819 - protein, 9 aa, Artificial Sequence
  Description of Artificial Sequence: Synthetic peptide
  Seed: MFNMLSTVL
MTNMLSTVM

SEQ ID NO: 158820 - protein, 9 aa, Artificial Sequence
  Description of Artificial Sequence: Synthetic peptide
  Seed: MFNMLSTVL
MTNMLSTVV

SEQ ID NO: 158821 - protein, 9 aa, Artificial Sequence
  Description of Artificial Sequence: Synthetic peptide
  Seed: MFNMLSTVL
MTNMLSTVW

SEQ ID NO: 158822 - protein, 9 aa, Artificial Sequence
  Description of Artificial Sequence: Synthetic peptide
  Seed: MFNMLSTVL
MTNMLSTVY

SEQ ID NO: 158823 - protein, 9 aa, Artificial Sequence
  Description of Artificial Sequence: Synthetic peptide
  Seed: MARLGKGYM
MTRLGKGYA

SEQ ID NO: 158824 - protein, 9 aa, Artificial Sequence
  Description of Artificial Sequence: Synthetic peptide
  Seed: MARLGKGYM
MTRLGKGYC

SEQ ID NO: 158825 - protein, 9 aa, Artificial Sequence
  Description of Artificial Sequence: Synthetic peptide
  Seed: MARLGKGYM
MTRLGKGYE

SEQ ID NO: 158826 - protein, 9 aa, Artificial Sequence
  Description of Artificial Sequence: Synthetic peptide
  Seed: MARLGKGYM
MTRLGKGYF

SEQ ID NO: 158827 - protein, 9 aa, Artificial Sequence
  Description of Artificial Sequence: Synthetic peptide
  Seed: MARLGKGYM
MTRLGKGYG

SEQ ID NO: 158828 - protein, 9 aa, Artificial Sequence
  Description of Artificial Sequence: Synthetic peptide
  Seed: MARLGKGYM
MTRLGKGYH

SEQ ID NO: 158829 - protein, 9 aa, Artificial Sequence
  Description of Artificial Sequence: Synthetic peptide
  Seed: MARLGKGYM
MTRLGKGYI

SEQ ID NO: 158830 - protein, 9 aa, Artificial Sequence
  Description of Artificial Sequence: Synthetic peptide
  Seed: MARLGKGYM
MTRLGKGYK

SEQ ID NO: 158831 - protein, 9 aa, Artificial Sequence
  Description of Artificial Sequence: Synthetic peptide
  Seed: MARLGKGYM
MTRLGKGYL

SEQ ID NO: 158832 - protein, 9 aa, Artificial Sequence
  Description of Artificial Sequence: Synthetic peptide
  Seed: MARLGKGYM
MTRLGKGYM

SEQ ID NO: 158833 - protein, 10 aa, Artificial Sequence
  Description of Artificial Sequence: Synthetic peptide
  Seed: MARLGKGYMF
MTRLGKGYMA

SEQ ID NO: 158834 - protein, 10 aa, Artificial Sequence
  Description of Artificial Sequence: Synthetic peptide
  Seed: MARLGKGYMF
MTRLGKGYMF

SEQ ID NO: 158835 - protein, 10 aa, Artificial Sequence
  Description of Artificial Sequence: Synthetic peptide
  Seed: MARLGKGYMF
MTRLGKGYMI

SEQ ID NO: 158836 - protein, 10 aa, Artificial Sequence
  Description of Artificial Sequence: Synthetic peptide
  Seed: MARLGKGYMF
MTRLGKGYMK

SEQ ID NO: 158837 - protein, 10 aa, Artificial Sequence
  Description of Artificial Sequence: Synthetic peptide
  Seed: MARLGKGYMF
MTRLGKGYML

SEQ ID NO: 158838 - protein, 10 aa, Artificial Sequence
  Description of Artificial Sequence: Synthetic peptide
  Seed: MARLGKGYMF
MTRLGKGYMM

SEQ ID NO: 158839 - protein, 10 aa, Artificial Sequence
  Description of Artificial Sequence: Synthetic peptide
  Seed: MARLGKGYMF
MTRLGKGYMR

SEQ ID NO: 158840 - protein, 10 aa, Artificial Sequence
  Description of Artificial Sequence: Synthetic peptide
  Seed: MARLGKGYMF
MTRLGKGYMV

SEQ ID NO: 158841 - protein, 10 aa, Artificial Sequence
  Description of Artificial Sequence: Synthetic peptide
  Seed: MARLGKGYMF
MTRLGKGYMY

SEQ ID NO: 158842 - protein, 9 aa, Artificial Sequence
  Description of Artificial Sequence: Synthetic peptide
  Seed: MARLGKGYM
MTRLGKGYN

SEQ ID NO: 158843 - protein, 9 aa, Artificial Sequence
  Description of Artificial Sequence: Synthetic peptide
  Seed: MARLGKGYM
MTRLGKGYP

SEQ ID NO: 158844 - protein, 9 aa, Artificial Sequence
  Description of Artificial Sequence: Synthetic peptide
  Seed: MARLGKGYM
MTRLGKGYQ

SEQ ID NO: 158845 - protein, 9 aa, Artificial Sequence
  Description of Artificial Sequence: Synthetic peptide
  Seed: MARLGKGYM
MTRLGKGYR

SEQ ID NO: 158846 - protein, 9 aa, Artificial Sequence
  Description of Artificial Sequence: Synthetic peptide
  Seed: MARLGKGYM
MTRLGKGYS

SEQ ID NO: 158847 - protein, 9 aa, Artificial Sequence
  Description of Artificial Sequence: Synthetic peptide
  Seed: MARLGKGYM
MTRLGKGYT

SEQ ID NO: 158848 - protein, 9 aa, Artificial Sequence
  Description of Artificial Sequence: Synthetic peptide
  Seed: MARLGKGYM
MTRLGKGYV

SEQ ID NO: 158849 - protein, 9 aa, Artificial Sequence
  Description of Artificial Sequence: Synthetic peptide
  Seed: MARLGKGYM
MTRLGKGYW

SEQ ID NO: 158850 - protein, 9 aa, Artificial Sequence
  Description of Artificial Sequence: Synthetic peptide
  Seed: MARLGKGYM
MTRLGKGYY

SEQ ID NO: 158851 - protein, 8 aa, Artificial Sequence
  Description of Artificial Sequence: Synthetic peptide
  Seed: MFSNKMAR
MTSNKMAR

SEQ ID NO: 158852 - protein, 11 aa, Artificial Sequence
  Description of Artificial Sequence: Synthetic peptide
  Seed: MFSNKMARLGK
MTSNKMARLGA

SEQ ID NO: 158853 - protein, 11 aa, Artificial Sequence
  Description of Artificial Sequence: Synthetic peptide
  Seed: MFSNKMARLGK
MTSNKMARLGI

SEQ ID NO: 158854 - protein, 11 aa, Artificial Sequence
  Description of Artificial Sequence: Synthetic peptide
  Seed: MFSNKMARLGK
MTSNKMARLGK

SEQ ID NO: 158855 - protein, 11 aa, Artificial Sequence
  Description of Artificial Sequence: Synthetic peptide
  Seed: MFSNKMARLGK
MTSNKMARLGR

SEQ ID NO: 158856 - protein, 11 aa, Artificial Sequence
  Description of Artificial Sequence: Synthetic peptide
  Seed: MFSNKMARLGK
MTSNKMARLGV

SEQ ID NO: 158857 - protein, 9 aa, Artificial Sequence
  Description of Artificial Sequence: Synthetic peptide
  Seed: MLSTVLGVS
MTSTVLGVA

SEQ ID NO: 158858 - protein, 9 aa, Artificial Sequence
  Description of Artificial Sequence: Synthetic peptide
  Seed: MLSTVLGVS
MTSTVLGVI

SEQ ID NO: 158859 - protein, 9 aa, Artificial Sequence
  Description of Artificial Sequence: Synthetic peptide
  Seed: MLSTVLGVS
MTSTVLGVL

SEQ ID NO: 158860 - protein, 10 aa, Artificial Sequence
  Description of Artificial Sequence: Synthetic peptide
  Seed: MLSTVLGVSI
MTSTVLGVSA

SEQ ID NO: 158861 - protein, 10 aa, Artificial Sequence
  Description of Artificial Sequence: Synthetic peptide
  Seed: MLSTVLGVSI
MTSTVLGVSF

SEQ ID NO: 158862 - protein, 10 aa, Artificial Sequence
  Description of Artificial Sequence: Synthetic peptide
  Seed: MLSTVLGVSI
MTSTVLGVSI

SEQ ID NO: 158863 - protein, 10 aa, Artificial Sequence
  Description of Artificial Sequence: Synthetic peptide
  Seed: MLSTVLGVSI
MTSTVLGVSL

SEQ ID NO: 158864 - protein, 10 aa, Artificial Sequence
  Description of Artificial Sequence: Synthetic peptide
  Seed: MLSTVLGVSI
MTSTVLGVSM

SEQ ID NO: 158865 - protein, 10 aa, Artificial Sequence
  Description of Artificial Sequence: Synthetic peptide
  Seed: MLSTVLGVSI
MTSTVLGVSS

SEQ ID NO: 158866 - protein, 10 aa, Artificial Sequence
  Description of Artificial Sequence: Synthetic peptide
  Seed: MLSTVLGVSI
MTSTVLGVST

SEQ ID NO: 158867 - protein, 10 aa, Artificial Sequence
  Description of Artificial Sequence: Synthetic peptide
  Seed: MLSTVLGVSI
MTSTVLGVSV

SEQ ID NO: 158868 - protein, 10 aa, Artificial Sequence
  Description of Artificial Sequence: Synthetic peptide
  Seed: MLSTVLGVSI
MTSTVLGVSW

SEQ ID NO: 158869 - protein, 10 aa, Artificial Sequence
  Description of Artificial Sequence: Synthetic peptide
  Seed: MLSTVLGVSI
MTSTVLGVSY

SEQ ID NO: 158870 - protein, 9 aa, Artificial Sequence
  Description of Artificial Sequence: Synthetic peptide
  Seed: MLSTVLGVS
MTSTVLGVV

SEQ ID NO: 158871 - protein, 9 aa, Artificial Sequence
  Description of Artificial Sequence: Synthetic peptide
  Seed: MMGMFNMLS
MVGMFNMLA

SEQ ID NO: 158872 - protein, 9 aa, Artificial Sequence
  Description of Artificial Sequence: Synthetic peptide
  Seed: MMGMFNMLS
MVGMFNMLI

SEQ ID NO: 158873 - protein, 9 aa, Artificial Sequence
  Description of Artificial Sequence: Synthetic peptide
  Seed: MMGMFNMLS
MVGMFNMLL

SEQ ID NO: 158874 - protein, 9 aa, Artificial Sequence
  Description of Artificial Sequence: Synthetic peptide
  Seed: MMGMFNMLS
MVGMFNMLM

SEQ ID NO: 158875 - protein, 10 aa, Artificial Sequence
  Description of Artificial Sequence: Synthetic peptide
  Seed: MMGMFNMLST
MVGMFNMLSA

SEQ ID NO: 158876 - protein, 10 aa, Artificial Sequence
  Description of Artificial Sequence: Synthetic peptide
  Seed: MMGMFNMLST
MVGMFNMLSI

SEQ ID NO: 158877 - protein, 10 aa, Artificial Sequence
  Description of Artificial Sequence: Synthetic peptide
  Seed: MMGMFNMLST
MVGMFNMLSL

SEQ ID NO: 158878 - protein, 10 aa, Artificial Sequence
  Description of Artificial Sequence: Synthetic peptide
  Seed: MMGMFNMLST
MVGMFNMLSM

SEQ ID NO: 158879 - protein, 11 aa, Artificial Sequence
  Description of Artificial Sequence: Synthetic peptide
  Seed: MMGMFNMLSTV
MVGMFNMLSTA

SEQ ID NO: 158880 - protein, 11 aa, Artificial Sequence
  Description of Artificial Sequence: Synthetic peptide
  Seed: MMGMFNMLSTV
MVGMFNMLSTI

SEQ ID NO: 158881 - protein, 11 aa, Artificial Sequence
  Description of Artificial Sequence: Synthetic peptide
  Seed: MMGMFNMLSTV
MVGMFNMLSTL

SEQ ID NO: 158882 - protein, 11 aa, Artificial Sequence
  Description of Artificial Sequence: Synthetic peptide
  Seed: MMGMFNMLSTV
MVGMFNMLSTM

SEQ ID NO: 158883 - protein, 11 aa, Artificial Sequence
  Description of Artificial Sequence: Synthetic peptide
  Seed: MMGMFNMLSTV
MVGMFNMLSTT

SEQ ID NO: 158884 - protein, 11 aa, Artificial Sequence
  Description of Artificial Sequence: Synthetic peptide
  Seed: MMGMFNMLSTV
MVGMFNMLSTV

SEQ ID NO: 158885 - protein, 10 aa, Artificial Sequence
  Description of Artificial Sequence: Synthetic peptide
  Seed: MMGMFNMLST
MVGMFNMLSV

SEQ ID NO: 158886 - protein, 9 aa, Artificial Sequence
  Description of Artificial Sequence: Synthetic peptide
  Seed: MMGMFNMLS
MVGMFNMLV

SEQ ID NO: 158887 - protein, 9 aa, Artificial Sequence
  Description of Artificial Sequence: Synthetic peptide
  Seed: MSIGVTVIK
MVIGVTVIA

SEQ ID NO: 158888 - protein, 9 aa, Artificial Sequence
  Description of Artificial Sequence: Synthetic peptide
  Seed: MSIGVTVIK
MVIGVTVIE

SEQ ID NO: 158889 - protein, 9 aa, Artificial Sequence
  Description of Artificial Sequence: Synthetic peptide
  Seed: MSIGVTVIK
MVIGVTVIF

SEQ ID NO: 158890 - protein, 9 aa, Artificial Sequence
  Description of Artificial Sequence: Synthetic peptide
  Seed: MSIGVTVIK
MVIGVTVIH

SEQ ID NO: 158891 - protein, 9 aa, Artificial Sequence
  Description of Artificial Sequence: Synthetic peptide
  Seed: MSIGVTVIK
MVIGVTVII

SEQ ID NO: 158892 - protein, 9 aa, Artificial Sequence
  Description of Artificial Sequence: Synthetic peptide
  Seed: MSIGVTVIK
MVIGVTVIK

SEQ ID NO: 158893 - protein, 10 aa, Artificial Sequence
  Description of Artificial Sequence: Synthetic peptide
  Seed: MSIGVTVIKN
MVIGVTVIKA

SEQ ID NO: 158894 - protein, 10 aa, Artificial Sequence
  Description of Artificial Sequence: Synthetic peptide
  Seed: MSIGVTVIKN
MVIGVTVIKC

SEQ ID NO: 158895 - protein, 10 aa, Artificial Sequence
  Description of Artificial Sequence: Synthetic peptide
  Seed: MSIGVTVIKN
MVIGVTVIKD

SEQ ID NO: 158896 - protein, 10 aa, Artificial Sequence
  Description of Artificial Sequence: Synthetic peptide
  Seed: MSIGVTVIKN
MVIGVTVIKE

SEQ ID NO: 158897 - protein, 10 aa, Artificial Sequence
  Description of Artificial Sequence: Synthetic peptide
  Seed: MSIGVTVIKN
MVIGVTVIKF

SEQ ID NO: 158898 - protein, 10 aa, Artificial Sequence
  Description of Artificial Sequence: Synthetic peptide
  Seed: MSIGVTVIKN
MVIGVTVIKG

SEQ ID NO: 158899 - protein, 10 aa, Artificial Sequence
  Description of Artificial Sequence: Synthetic peptide
  Seed: MSIGVTVIKN
MVIGVTVIKH

SEQ ID NO: 158900 - protein, 10 aa, Artificial Sequence
  Description of Artificial Sequence: Synthetic peptide
  Seed: MSIGVTVIKN
MVIGVTVIKI

SEQ ID NO: 158901 - protein, 10 aa, Artificial Sequence
  Description of Artificial Sequence: Synthetic peptide
  Seed: MSIGVTVIKN
MVIGVTVIKK

SEQ ID NO: 158902 - protein, 10 aa, Artificial Sequence
  Description of Artificial Sequence: Synthetic peptide
  Seed: MSIGVTVIKN
MVIGVTVIKL

SEQ ID NO: 158903 - protein, 10 aa, Artificial Sequence
  Description of Artificial Sequence: Synthetic peptide
  Seed: MSIGVTVIKN
MVIGVTVIKM

SEQ ID NO: 158904 - protein, 10 aa, Artificial Sequence
  Description of Artificial Sequence: Synthetic peptide
  Seed: MSIGVTVIKN
MVIGVTVIKN

SEQ ID NO: 158905 - protein, 10 aa, Artificial Sequence
  Description of Artificial Sequence: Synthetic peptide
  Seed: MSIGVTVIKN
MVIGVTVIKP

SEQ ID NO: 158906 - protein, 10 aa, Artificial Sequence
  Description of Artificial Sequence: Synthetic peptide
  Seed: MSIGVTVIKN
MVIGVTVIKQ

SEQ ID NO: 158907 - protein, 10 aa, Artificial Sequence
  Description of Artificial Sequence: Synthetic peptide
  Seed: MSIGVTVIKN
MVIGVTVIKR

SEQ ID NO: 158908 - protein, 10 aa, Artificial Sequence
  Description of Artificial Sequence: Synthetic peptide
  Seed: MSIGVTVIKN
MVIGVTVIKS

SEQ ID NO: 158909 - protein, 10 aa, Artificial Sequence
  Description of Artificial Sequence: Synthetic peptide
  Seed: MSIGVTVIKN
MVIGVTVIKT

SEQ ID NO: 158910 - protein, 10 aa, Artificial Sequence
  Description of Artificial Sequence: Synthetic peptide
  Seed: MSIGVTVIKN
MVIGVTVIKV

SEQ ID NO: 158911 - protein, 10 aa, Artificial Sequence
  Description of Artificial Sequence: Synthetic peptide
  Seed: MSIGVTVIKN
MVIGVTVIKW

SEQ ID NO: 158912 - protein, 10 aa, Artificial Sequence
  Description of Artificial Sequence: Synthetic peptide
  Seed: MSIGVTVIKN
MVIGVTVIKY

SEQ ID NO: 158913 - protein, 9 aa, Artificial Sequence
  Description of Artificial Sequence: Synthetic peptide
  Seed: MSIGVTVIK
MVIGVTVIL

SEQ ID NO: 158914 - protein, 9 aa, Artificial Sequence
  Description of Artificial Sequence: Synthetic peptide
  Seed: MSIGVTVIK
MVIGVTVIM

SEQ ID NO: 158915 - protein, 9 aa, Artificial Sequence
  Description of Artificial Sequence: Synthetic peptide
  Seed: MSIGVTVIK
MVIGVTVIQ

SEQ ID NO: 158916 - protein, 9 aa, Artificial Sequence
  Description of Artificial Sequence: Synthetic peptide
  Seed: MSIGVTVIK
MVIGVTVIR

SEQ ID NO: 158917 - protein, 9 aa, Artificial Sequence
  Description of Artificial Sequence: Synthetic peptide
  Seed: MSIGVTVIK
MVIGVTVIS

SEQ ID NO: 158918 - protein, 9 aa, Artificial Sequence
  Description of Artificial Sequence: Synthetic peptide
  Seed: MSIGVTVIK
MVIGVTVIT

SEQ ID NO: 158919 - protein, 9 aa, Artificial Sequence
  Description of Artificial Sequence: Synthetic peptide
  Seed: MSIGVTVIK
MVIGVTVIV

SEQ ID NO: 158920 - protein, 9 aa, Artificial Sequence
  Description of Artificial Sequence: Synthetic peptide
  Seed: MSIGVTVIK
MVIGVTVIY

SEQ ID NO: 158921 - protein, 8 aa, Artificial Sequence
  Description of Artificial Sequence: Synthetic peptide
  Seed: MSIGVTVI
MVIGVTVW

SEQ ID NO: 158922 - protein, 9 aa, Artificial Sequence
  Description of Artificial Sequence: Synthetic peptide
  Seed: MTKDAERGK
MVKDAERGK

SEQ ID NO: 158923 - protein, 9 aa, Artificial Sequence
  Description of Artificial Sequence: Synthetic peptide
  Seed: MTKDAERGK
MVKDAERGR

SEQ ID NO: 158924 - protein, 10 aa, Artificial Sequence
  Description of Artificial Sequence: Synthetic peptide
  Seed: MGMFNMLSTV
MVMFNMLSTA

SEQ ID NO: 158925 - protein, 10 aa, Artificial Sequence
  Description of Artificial Sequence: Synthetic peptide
  Seed: MGMFNMLSTV
MVMFNMLSTC

SEQ ID NO: 158926 - protein, 10 aa, Artificial Sequence
  Description of Artificial Sequence: Synthetic peptide
  Seed: MGMFNMLSTV
MVMFNMLSTF

SEQ ID NO: 158927 - protein, 10 aa, Artificial Sequence
  Description of Artificial Sequence: Synthetic peptide
  Seed: MGMFNMLSTV
MVMFNMLSTG

SEQ ID NO: 158928 - protein, 10 aa, Artificial Sequence
  Description of Artificial Sequence: Synthetic peptide
  Seed: MGMFNMLSTV
MVMFNMLSTH

SEQ ID NO: 158929 - protein, 10 aa, Artificial Sequence
  Description of Artificial Sequence: Synthetic peptide
  Seed: MGMFNMLSTV
MVMFNMLSTI

SEQ ID NO: 158930 - protein, 10 aa, Artificial Sequence
  Description of Artificial Sequence: Synthetic peptide
  Seed: MGMFNMLSTV
MVMFNMLSTL

SEQ ID NO: 158931 - protein, 10 aa, Artificial Sequence
  Description of Artificial Sequence: Synthetic peptide
  Seed: MGMFNMLSTV
MVMFNMLSTM

SEQ ID NO: 158932 - protein, 10 aa, Artificial Sequence
  Description of Artificial Sequence: Synthetic peptide
  Seed: MGMFNMLSTV
MVMFNMLSTP

SEQ ID NO: 158933 - protein, 10 aa, Artificial Sequence
  Description of Artificial Sequence: Synthetic peptide
  Seed: MGMFNMLSTV
MVMFNMLSTS

SEQ ID NO: 158934 - protein, 10 aa, Artificial Sequence
  Description of Artificial Sequence: Synthetic peptide
  Seed: MGMFNMLSTV
MVMFNMLSTT

SEQ ID NO: 158935 - protein, 10 aa, Artificial Sequence
  Description of Artificial Sequence: Synthetic peptide
  Seed: MGMFNMLSTV
MVMFNMLSTV

SEQ ID NO: 158936 - protein, 11 aa, Artificial Sequence
  Description of Artificial Sequence: Synthetic peptide
  Seed: MGMFNMLSTVL
MVMFNMLSTVA

SEQ ID NO: 158937 - protein, 11 aa, Artificial Sequence
  Description of Artificial Sequence: Synthetic peptide
  Seed: MGMFNMLSTVL
MVMFNMLSTVC

SEQ ID NO: 158938 - protein, 11 aa, Artificial Sequence
  Description of Artificial Sequence: Synthetic peptide
  Seed: MGMFNMLSTVL
MVMFNMLSTVD

SEQ ID NO: 158939 - protein, 11 aa, Artificial Sequence
  Description of Artificial Sequence: Synthetic peptide
  Seed: MGMFNMLSTVL
MVMFNMLSTVE

SEQ ID NO: 158940 - protein, 11 aa, Artificial Sequence
  Description of Artificial Sequence: Synthetic peptide
  Seed: MGMFNMLSTVL
MVMFNMLSTVF

SEQ ID NO: 158941 - protein, 11 aa, Artificial Sequence
  Description of Artificial Sequence: Synthetic peptide
  Seed: MGMFNMLSTVL
MVMFNMLSTVG

SEQ ID NO: 158942 - protein, 11 aa, Artificial Sequence
  Description of Artificial Sequence: Synthetic peptide
  Seed: MGMFNMLSTVL
MVMFNMLSTVH

SEQ ID NO: 158943 - protein, 11 aa, Artificial Sequence
  Description of Artificial Sequence: Synthetic peptide
  Seed: MGMFNMLSTVL
MVMFNMLSTVI

SEQ ID NO: 158944 - protein, 11 aa, Artificial Sequence
  Description of Artificial Sequence: Synthetic peptide
  Seed: MGMFNMLSTVL
MVMFNMLSTVK

SEQ ID NO: 158945 - protein, 11 aa, Artificial Sequence
  Description of Artificial Sequence: Synthetic peptide
  Seed: MGMFNMLSTVL
MVMFNMLSTVL

SEQ ID NO: 158946 - protein, 11 aa, Artificial Sequence
  Description of Artificial Sequence: Synthetic peptide
  Seed: MGMFNMLSTVL
MVMFNMLSTVM

SEQ ID NO: 158947 - protein, 11 aa, Artificial Sequence
  Description of Artificial Sequence: Synthetic peptide
  Seed: MGMFNMLSTVL
MVMFNMLSTVN

SEQ ID NO: 158948 - protein, 11 aa, Artificial Sequence
  Description of Artificial Sequence: Synthetic peptide
  Seed: MGMFNMLSTVL
MVMFNMLSTVP

SEQ ID NO: 158949 - protein, 11 aa, Artificial Sequence
  Description of Artificial Sequence: Synthetic peptide
  Seed: MGMFNMLSTVL
MVMFNMLSTVQ

SEQ ID NO: 158950 - protein, 11 aa, Artificial Sequence
  Description of Artificial Sequence: Synthetic peptide
  Seed: MGMFNMLSTVL
MVMFNMLSTVR

SEQ ID NO: 158951 - protein, 11 aa, Artificial Sequence
  Description of Artificial Sequence: Synthetic peptide
  Seed: MGMFNMLSTVL
MVMFNMLSTVS

SEQ ID NO: 158952 - protein, 11 aa, Artificial Sequence
  Description of Artificial Sequence: Synthetic peptide
  Seed: MGMFNMLSTVL
MVMFNMLSTVT

SEQ ID NO: 158953 - protein, 11 aa, Artificial Sequence
  Description of Artificial Sequence: Synthetic peptide
  Seed: MGMFNMLSTVL
MVMFNMLSTVV

SEQ ID NO: 158954 - protein, 11 aa, Artificial Sequence
  Description of Artificial Sequence: Synthetic peptide
  Seed: MGMFNMLSTVL
MVMFNMLSTVW

SEQ ID NO: 158955 - protein, 11 aa, Artificial Sequence
  Description of Artificial Sequence: Synthetic peptide
  Seed: MGMFNMLSTVL
MVMFNMLSTVY

SEQ ID NO: 158956 - protein, 10 aa, Artificial Sequence
  Description of Artificial Sequence: Synthetic peptide
  Seed: MGMFNMLSTV
MVMFNMLSTW

SEQ ID NO: 158957 - protein, 10 aa, Artificial Sequence
  Description of Artificial Sequence: Synthetic peptide
  Seed: MGMFNMLSTV
MVMFNMLSTY

SEQ ID NO: 158958 - protein, 8 aa, Artificial Sequence
  Description of Artificial Sequence: Synthetic peptide
  Seed: MMMGMFNM
MVMGMFNF

SEQ ID NO: 158959 - protein, 8 aa, Artificial Sequence
  Description of Artificial Sequence: Synthetic peptide
  Seed: MMMGMFNM
MVMGMFNI

SEQ ID NO: 158960 - protein, 8 aa, Artificial Sequence
  Description of Artificial Sequence: Synthetic peptide
  Seed: MMMGMFNM
MVMGMFNL

SEQ ID NO: 158961 - protein, 9 aa, Artificial Sequence
  Description of Artificial Sequence: Synthetic peptide
  Seed: MMMGMFNML
MVMGMFNMA

SEQ ID NO: 158962 - protein, 9 aa, Artificial Sequence
  Description of Artificial Sequence: Synthetic peptide
  Seed: MMMGMFNML
MVMGMFNMC

SEQ ID NO: 158963 - protein, 9 aa, Artificial Sequence
  Description of Artificial Sequence: Synthetic peptide
  Seed: MMMGMFNML
MVMGMFNMF

SEQ ID NO: 158964 - protein, 9 aa, Artificial Sequence
  Description of Artificial Sequence: Synthetic peptide
  Seed: MMMGMFNML
MVMGMFNMG

SEQ ID NO: 158965 - protein, 9 aa, Artificial Sequence
  Description of Artificial Sequence: Synthetic peptide
  Seed: MMMGMFNML
MVMGMFNMH

SEQ ID NO: 158966 - protein, 9 aa, Artificial Sequence
  Description of Artificial Sequence: Synthetic peptide
  Seed: MMMGMFNML
MVMGMFNMI

SEQ ID NO: 158967 - protein, 9 aa, Artificial Sequence
  Description of Artificial Sequence: Synthetic peptide
  Seed: MMMGMFNML
MVMGMFNMK

SEQ ID NO: 158968 - protein, 9 aa, Artificial Sequence
  Description of Artificial Sequence: Synthetic peptide
  Seed: MMMGMFNML
MVMGMFNML

SEQ ID NO: 158969 - protein, 10 aa, Artificial Sequence
  Description of Artificial Sequence: Synthetic peptide
  Seed: MMMGMFNMLS
MVMGMFNMLA

SEQ ID NO: 158970 - protein, 10 aa, Artificial Sequence
  Description of Artificial Sequence: Synthetic peptide
  Seed: MMMGMFNMLS
MVMGMFNMLC

SEQ ID NO: 158971 - protein, 10 aa, Artificial Sequence
  Description of Artificial Sequence: Synthetic peptide
  Seed: MMMGMFNMLS
MVMGMFNMLD

SEQ ID NO: 158972 - protein, 10 aa, Artificial Sequence
  Description of Artificial Sequence: Synthetic peptide
  Seed: MMMGMFNMLS
MVMGMFNMLE

SEQ ID NO: 158973 - protein, 10 aa, Artificial Sequence
  Description of Artificial Sequence: Synthetic peptide
  Seed: MMMGMFNMLS
MVMGMFNMLF

SEQ ID NO: 158974 - protein, 10 aa, Artificial Sequence
  Description of Artificial Sequence: Synthetic peptide
  Seed: MMMGMFNMLS
MVMGMFNMLG

SEQ ID NO: 158975 - protein, 10 aa, Artificial Sequence
  Description of Artificial Sequence: Synthetic peptide
  Seed: MMMGMFNMLS
MVMGMFNMLI

SEQ ID NO: 158976 - protein, 10 aa, Artificial Sequence
  Description of Artificial Sequence: Synthetic peptide
  Seed: MMMGMFNMLS
MVMGMFNMLK

SEQ ID NO: 158977 - protein, 10 aa, Artificial Sequence
  Description of Artificial Sequence: Synthetic peptide
  Seed: MMMGMFNMLS
MVMGMFNMLL

SEQ ID NO: 158978 - protein, 10 aa, Artificial Sequence
  Description of Artificial Sequence: Synthetic peptide
  Seed: MMMGMFNMLS
MVMGMFNMLM

SEQ ID NO: 158979 - protein, 10 aa, Artificial Sequence
  Description of Artificial Sequence: Synthetic peptide
  Seed: MMMGMFNMLS
MVMGMFNMLN

SEQ ID NO: 158980 - protein, 10 aa, Artificial Sequence
  Description of Artificial Sequence: Synthetic peptide
  Seed: MMMGMFNMLS
MVMGMFNMLP

SEQ ID NO: 158981 - protein, 10 aa, Artificial Sequence
  Description of Artificial Sequence: Synthetic peptide
  Seed: MMMGMFNMLS
MVMGMFNMLR

SEQ ID NO: 158982 - protein, 10 aa, Artificial Sequence
  Description of Artificial Sequence: Synthetic peptide
  Seed: MMMGMFNMLS
MVMGMFNMLS

SEQ ID NO: 158983 - protein, 11 aa, Artificial Sequence
  Description of Artificial Sequence: Synthetic peptide
  Seed: MMMGMFNMLST
MVMGMFNMLSA

SEQ ID NO: 158984 - protein, 11 aa, Artificial Sequence
  Description of Artificial Sequence: Synthetic peptide
  Seed: MMMGMFNMLST
MVMGMFNMLSI

SEQ ID NO: 158985 - protein, 11 aa, Artificial Sequence
  Description of Artificial Sequence: Synthetic peptide
  Seed: MMMGMFNMLST
MVMGMFNMLSL

SEQ ID NO: 158986 - protein, 11 aa, Artificial Sequence
  Description of Artificial Sequence: Synthetic peptide
  Seed: MMMGMFNMLST
MVMGMFNMLSM

SEQ ID NO: 158987 - protein, 11 aa, Artificial Sequence
  Description of Artificial Sequence: Synthetic peptide
  Seed: MMMGMFNMLST
MVMGMFNMLSV

SEQ ID NO: 158988 - protein, 10 aa, Artificial Sequence
  Description of Artificial Sequence: Synthetic peptide
  Seed: MMMGMFNMLS
MVMGMFNMLT

SEQ ID NO: 158989 - protein, 10 aa, Artificial Sequence
  Description of Artificial Sequence: Synthetic peptide
  Seed: MMMGMFNMLS
MVMGMFNMLV

SEQ ID NO: 158990 - protein, 10 aa, Artificial Sequence
  Description of Artificial Sequence: Synthetic peptide
  Seed: MMMGMFNMLS
MVMGMFNMLW

SEQ ID NO: 158991 - protein, 10 aa, Artificial Sequence
  Description of Artificial Sequence: Synthetic peptide
  Seed: MMMGMFNMLS
MVMGMFNMLY

SEQ ID NO: 158992 - protein, 9 aa, Artificial Sequence
  Description of Artificial Sequence: Synthetic peptide
  Seed: MMMGMFNML
MVMGMFNMM

SEQ ID NO: 158993 - protein, 9 aa, Artificial Sequence
  Description of Artificial Sequence: Synthetic peptide
  Seed: MMMGMFNML
MVMGMFNMP

SEQ ID NO: 158994 - protein, 9 aa, Artificial Sequence
  Description of Artificial Sequence: Synthetic peptide
  Seed: MMMGMFNML
MVMGMFNMQ

SEQ ID NO: 158995 - protein, 9 aa, Artificial Sequence
  Description of Artificial Sequence: Synthetic peptide
  Seed: MMMGMFNML
MVMGMFNMR

SEQ ID NO: 158996 - protein, 9 aa, Artificial Sequence
  Description of Artificial Sequence: Synthetic peptide
  Seed: MMMGMFNML
MVMGMFNMS

SEQ ID NO: 158997 - protein, 9 aa, Artificial Sequence
  Description of Artificial Sequence: Synthetic peptide
  Seed: MMMGMFNML
MVMGMFNMT

SEQ ID NO: 158998 - protein, 9 aa, Artificial Sequence
  Description of Artificial Sequence: Synthetic peptide
  Seed: MMMGMFNML
MVMGMFNMV

SEQ ID NO: 158999 - protein, 9 aa, Artificial Sequence
  Description of Artificial Sequence: Synthetic peptide
  Seed: MMMGMFNML
MVMGMFNMW

SEQ ID NO: 159000 - protein, 9 aa, Artificial Sequence
  Description of Artificial Sequence: Synthetic peptide
  Seed: MMMGMFNML
MVMGMFNMY

SEQ ID NO: 159001 - protein, 8 aa, Artificial Sequence
  Description of Artificial Sequence: Synthetic peptide
  Seed: MMMGMFNM
MVMGMFNV

SEQ ID NO: 159002 - protein, 8 aa, Artificial Sequence
  Description of Artificial Sequence: Synthetic peptide
  Seed: MMMGMFNM
MVMGMFNY

SEQ ID NO: 159003 - protein, 8 aa, Artificial Sequence
  Description of Artificial Sequence: Synthetic peptide
  Seed: MFNMLSTV
MVNMLSTV

SEQ ID NO: 159004 - protein, 9 aa, Artificial Sequence
  Description of Artificial Sequence: Synthetic peptide
  Seed: MFNMLSTVL
MVNMLSTVA

SEQ ID NO: 159005 - protein, 9 aa, Artificial Sequence
  Description of Artificial Sequence: Synthetic peptide
  Seed: MFNMLSTVL
MVNMLSTVF

SEQ ID NO: 159006 - protein, 9 aa, Artificial Sequence
  Description of Artificial Sequence: Synthetic peptide
  Seed: MFNMLSTVL
MVNMLSTVH

SEQ ID NO: 159007 - protein, 9 aa, Artificial Sequence
  Description of Artificial Sequence: Synthetic peptide
  Seed: MFNMLSTVL
MVNMLSTVI

SEQ ID NO: 159008 - protein, 9 aa, Artificial Sequence
  Description of Artificial Sequence: Synthetic peptide
  Seed: MFNMLSTVL
MVNMLSTVL

SEQ ID NO: 159009 - protein, 11 aa, Artificial Sequence
  Description of Artificial Sequence: Synthetic peptide
  Seed: MFNMLSTVLGV
MVNMLSTVLGA

SEQ ID NO: 159010 - protein, 11 aa, Artificial Sequence
  Description of Artificial Sequence: Synthetic peptide
  Seed: MFNMLSTVLGV
MVNMLSTVLGI

SEQ ID NO: 159011 - protein, 11 aa, Artificial Sequence
  Description of Artificial Sequence: Synthetic peptide
  Seed: MFNMLSTVLGV
MVNMLSTVLGL

SEQ ID NO: 159012 - protein, 11 aa, Artificial Sequence
  Description of Artificial Sequence: Synthetic peptide
  Seed: MFNMLSTVLGV
MVNMLSTVLGM

SEQ ID NO: 159013 - protein, 11 aa, Artificial Sequence
  Description of Artificial Sequence: Synthetic peptide
  Seed: MFNMLSTVLGV
MVNMLSTVLGT

SEQ ID NO: 159014 - protein, 11 aa, Artificial Sequence
  Description of Artificial Sequence: Synthetic peptide
  Seed: MFNMLSTVLGV
MVNMLSTVLGV

SEQ ID NO: 159015 - protein, 9 aa, Artificial Sequence
  Description of Artificial Sequence: Synthetic peptide
  Seed: MFNMLSTVL
MVNMLSTVM

SEQ ID NO: 159016 - protein, 9 aa, Artificial Sequence
  Description of Artificial Sequence: Synthetic peptide
  Seed: MFNMLSTVL
MVNMLSTVV

SEQ ID NO: 159017 - protein, 9 aa, Artificial Sequence
  Description of Artificial Sequence: Synthetic peptide
  Seed: MFNMLSTVL
MVNMLSTVW

SEQ ID NO: 159018 - protein, 9 aa, Artificial Sequence
  Description of Artificial Sequence: Synthetic peptide
  Seed: MFNMLSTVL
MVNMLSTVY

SEQ ID NO: 159019 - protein, 9 aa, Artificial Sequence
  Description of Artificial Sequence: Synthetic peptide
  Seed: MARLGKGYM
MVRLGKGYA

SEQ ID NO: 159020 - protein, 9 aa, Artificial Sequence
  Description of Artificial Sequence: Synthetic peptide
  Seed: MARLGKGYM
MVRLGKGYC

SEQ ID NO: 159021 - protein, 9 aa, Artificial Sequence
  Description of Artificial Sequence: Synthetic peptide
  Seed: MARLGKGYM
MVRLGKGYF

SEQ ID NO: 159022 - protein, 9 aa, Artificial Sequence
  Description of Artificial Sequence: Synthetic peptide
  Seed: MARLGKGYM
MVRLGKGYG

SEQ ID NO: 159023 - protein, 9 aa, Artificial Sequence
  Description of Artificial Sequence: Synthetic peptide
  Seed: MARLGKGYM
MVRLGKGYI

SEQ ID NO: 159024 - protein, 9 aa, Artificial Sequence
  Description of Artificial Sequence: Synthetic peptide
  Seed: MARLGKGYM
MVRLGKGYK

SEQ ID NO: 159025 - protein, 9 aa, Artificial Sequence
  Description of Artificial Sequence: Synthetic peptide
  Seed: MARLGKGYM
MVRLGKGYL

SEQ ID NO: 159026 - protein, 9 aa, Artificial Sequence
  Description of Artificial Sequence: Synthetic peptide
  Seed: MARLGKGYM
MVRLGKGYM

SEQ ID NO: 159027 - protein, 10 aa, Artificial Sequence
  Description of Artificial Sequence: Synthetic peptide
  Seed: MARLGKGYMF
MVRLGKGYMA

SEQ ID NO: 159028 - protein, 10 aa, Artificial Sequence
  Description of Artificial Sequence: Synthetic peptide
  Seed: MARLGKGYMF
MVRLGKGYMF

SEQ ID NO: 159029 - protein, 10 aa, Artificial Sequence
  Description of Artificial Sequence: Synthetic peptide
  Seed: MARLGKGYMF
MVRLGKGYMI

SEQ ID NO: 159030 - protein, 10 aa, Artificial Sequence
  Description of Artificial Sequence: Synthetic peptide
  Seed: MARLGKGYMF
MVRLGKGYMK

SEQ ID NO: 159031 - protein, 10 aa, Artificial Sequence
  Description of Artificial Sequence: Synthetic peptide
  Seed: MARLGKGYMF
MVRLGKGYML

SEQ ID NO: 159032 - protein, 10 aa, Artificial Sequence
  Description of Artificial Sequence: Synthetic peptide
  Seed: MARLGKGYMF
MVRLGKGYMM

SEQ ID NO: 159033 - protein, 10 aa, Artificial Sequence
  Description of Artificial Sequence: Synthetic peptide
  Seed: MARLGKGYMF
MVRLGKGYMR

SEQ ID NO: 159034 - protein, 10 aa, Artificial Sequence
  Description of Artificial Sequence: Synthetic peptide
  Seed: MARLGKGYMF
MVRLGKGYMV

SEQ ID NO: 159035 - protein, 10 aa, Artificial Sequence
  Description of Artificial Sequence: Synthetic peptide
  Seed: MARLGKGYMF
MVRLGKGYMW

SEQ ID NO: 159036 - protein, 10 aa, Artificial Sequence
  Description of Artificial Sequence: Synthetic peptide
  Seed: MARLGKGYMF
MVRLGKGYMY

SEQ ID NO: 159037 - protein, 9 aa, Artificial Sequence
  Description of Artificial Sequence: Synthetic peptide
  Seed: MARLGKGYM
MVRLGKGYN

SEQ ID NO: 159038 - protein, 9 aa, Artificial Sequence
  Description of Artificial Sequence: Synthetic peptide
  Seed: MARLGKGYM
MVRLGKGYP

SEQ ID NO: 159039 - protein, 9 aa, Artificial Sequence
  Description of Artificial Sequence: Synthetic peptide
  Seed: MARLGKGYM
MVRLGKGYQ

SEQ ID NO: 159040 - protein, 9 aa, Artificial Sequence
  Description of Artificial Sequence: Synthetic peptide
  Seed: MARLGKGYM
MVRLGKGYR

SEQ ID NO: 159041 - protein, 9 aa, Artificial Sequence
  Description of Artificial Sequence: Synthetic peptide
  Seed: MARLGKGYM
MVRLGKGYS

SEQ ID NO: 159042 - protein, 9 aa, Artificial Sequence
  Description of Artificial Sequence: Synthetic peptide
  Seed: MARLGKGYM
MVRLGKGYT

SEQ ID NO: 159043 - protein, 9 aa, Artificial Sequence
  Description of Artificial Sequence: Synthetic peptide
  Seed: MARLGKGYM
MVRLGKGYV

SEQ ID NO: 159044 - protein, 9 aa, Artificial Sequence
  Description of Artificial Sequence: Synthetic peptide
  Seed: MARLGKGYM
MVRLGKGYW

SEQ ID NO: 159045 - protein, 9 aa, Artificial Sequence
  Description of Artificial Sequence: Synthetic peptide
  Seed: MARLGKGYM
MVRLGKGYY

SEQ ID NO: 159046 - protein, 8 aa, Artificial Sequence
  Description of Artificial Sequence: Synthetic peptide
  Seed: MFSNKMAR
MVSNKMAR

SEQ ID NO: 159047 - protein, 11 aa, Artificial Sequence
  Description of Artificial Sequence: Synthetic peptide
  Seed: MFSNKMARLGK
MVSNKMARLGK

SEQ ID NO: 159048 - protein, 11 aa, Artificial Sequence
  Description of Artificial Sequence: Synthetic peptide
  Seed: MFSNKMARLGK
MVSNKMARLGR

SEQ ID NO: 159049 - protein, 8 aa, Artificial Sequence
  Description of Artificial Sequence: Synthetic peptide
  Seed: MLSTVLGV
MVSTVLGV

SEQ ID NO: 159050 - protein, 9 aa, Artificial Sequence
  Description of Artificial Sequence: Synthetic peptide
  Seed: MLSTVLGVS
MVSTVLGVA

SEQ ID NO: 159051 - protein, 9 aa, Artificial Sequence
  Description of Artificial Sequence: Synthetic peptide
  Seed: MLSTVLGVS
MVSTVLGVI

SEQ ID NO: 159052 - protein, 9 aa, Artificial Sequence
  Description of Artificial Sequence: Synthetic peptide
  Seed: MLSTVLGVS
MVSTVLGVL

SEQ ID NO: 159053 - protein, 9 aa, Artificial Sequence
  Description of Artificial Sequence: Synthetic peptide
  Seed: MLSTVLGVS
MVSTVLGVM

SEQ ID NO: 159054 - protein, 10 aa, Artificial Sequence
  Description of Artificial Sequence: Synthetic peptide
  Seed: MLSTVLGVSI
MVSTVLGVSA

SEQ ID NO: 159055 - protein, 10 aa, Artificial Sequence
  Description of Artificial Sequence: Synthetic peptide
  Seed: MLSTVLGVSI
MVSTVLGVSF

SEQ ID NO: 159056 - protein, 10 aa, Artificial Sequence
  Description of Artificial Sequence: Synthetic peptide
  Seed: MLSTVLGVSI
MVSTVLGVSI

SEQ ID NO: 159057 - protein, 11 aa, Artificial Sequence
  Description of Artificial Sequence: Synthetic peptide
  Seed: MLSTVLGVSIL
MVSTVLGVSIV

SEQ ID NO: 159058 - protein, 10 aa, Artificial Sequence
  Description of Artificial Sequence: Synthetic peptide
  Seed: MLSTVLGVSI
MVSTVLGVSL

SEQ ID NO: 159059 - protein, 10 aa, Artificial Sequence
  Description of Artificial Sequence: Synthetic peptide
  Seed: MLSTVLGVSI
MVSTVLGVSM

SEQ ID NO: 159060 - protein, 10 aa, Artificial Sequence
  Description of Artificial Sequence: Synthetic peptide
  Seed: MLSTVLGVSI
MVSTVLGVST

SEQ ID NO: 159061 - protein, 10 aa, Artificial Sequence
  Description of Artificial Sequence: Synthetic peptide
  Seed: MLSTVLGVSI
MVSTVLGVSV

SEQ ID NO: 159062 - protein, 10 aa, Artificial Sequence
  Description of Artificial Sequence: Synthetic peptide
  Seed: MLSTVLGVSI
MVSTVLGVSW

SEQ ID NO: 159063 - protein, 10 aa, Artificial Sequence
  Description of Artificial Sequence: Synthetic peptide
  Seed: MLSTVLGVSI
MVSTVLGVSY

SEQ ID NO: 159064 - protein, 9 aa, Artificial Sequence
  Description of Artificial Sequence: Synthetic peptide
  Seed: MLSTVLGVS
MVSTVLGVT

SEQ ID NO: 159065 - protein, 9 aa, Artificial Sequence
  Description of Artificial Sequence: Synthetic peptide
  Seed: MLSTVLGVS
MVSTVLGVV

SEQ ID NO: 159066 - protein, 11 aa, Artificial Sequence
  Description of Artificial Sequence: Synthetic peptide
  Seed: MMGMFNMLSTV
MWGMFNMLSTA

SEQ ID NO: 159067 - protein, 11 aa, Artificial Sequence
  Description of Artificial Sequence: Synthetic peptide
  Seed: MMGMFNMLSTV
MWGMFNMLSTI

SEQ ID NO: 159068 - protein, 11 aa, Artificial Sequence
  Description of Artificial Sequence: Synthetic peptide
  Seed: MMGMFNMLSTV
MWGMFNMLSTL

SEQ ID NO: 159069 - protein, 11 aa, Artificial Sequence
  Description of Artificial Sequence: Synthetic peptide
  Seed: MMGMFNMLSTV
MWGMFNMLSTM

SEQ ID NO: 159070 - protein, 11 aa, Artificial Sequence
  Description of Artificial Sequence: Synthetic peptide
  Seed: MMGMFNMLSTV
MWGMFNMLSTT

SEQ ID NO: 159071 - protein, 11 aa, Artificial Sequence
  Description of Artificial Sequence: Synthetic peptide
  Seed: MMGMFNMLSTV
MWGMFNMLSTV

SEQ ID NO: 159072 - protein, 10 aa, Artificial Sequence
  Description of Artificial Sequence: Synthetic peptide
  Seed: MMGMFNMLST
MWGMFNMLSV

SEQ ID NO: 159073 - protein, 9 aa, Artificial Sequence
  Description of Artificial Sequence: Synthetic peptide
  Seed: MSIGVTVIK
MWIGVTVIK

SEQ ID NO: 159074 - protein, 10 aa, Artificial Sequence
  Description of Artificial Sequence: Synthetic peptide
  Seed: MSIGVTVIKN
MWIGVTVIKK

SEQ ID NO: 159075 - protein, 10 aa, Artificial Sequence
  Description of Artificial Sequence: Synthetic peptide
  Seed: MSIGVTVIKN
MWIGVTVIKR

SEQ ID NO: 159076 - protein, 9 aa, Artificial Sequence
  Description of Artificial Sequence: Synthetic peptide
  Seed: MSIGVTVIK
MWIGVTVIR

SEQ ID NO: 159077 - protein, 10 aa, Artificial Sequence
  Description of Artificial Sequence: Synthetic peptide
  Seed: MGMFNMLSTV
MWMFNMLSTA

SEQ ID NO: 159078 - protein, 10 aa, Artificial Sequence
  Description of Artificial Sequence: Synthetic peptide
  Seed: MGMFNMLSTV
MWMFNMLSTC

SEQ ID NO: 159079 - protein, 10 aa, Artificial Sequence
  Description of Artificial Sequence: Synthetic peptide
  Seed: MGMFNMLSTV
MWMFNMLSTF

SEQ ID NO: 159080 - protein, 10 aa, Artificial Sequence
  Description of Artificial Sequence: Synthetic peptide
  Seed: MGMFNMLSTV
MWMFNMLSTG

SEQ ID NO: 159081 - protein, 10 aa, Artificial Sequence
  Description of Artificial Sequence: Synthetic peptide
  Seed: MGMFNMLSTV
MWMFNMLSTH

SEQ ID NO: 159082 - protein, 10 aa, Artificial Sequence
  Description of Artificial Sequence: Synthetic peptide
  Seed: MGMFNMLSTV
MWMFNMLSTI

SEQ ID NO: 159083 - protein, 10 aa, Artificial Sequence
  Description of Artificial Sequence: Synthetic peptide
  Seed: MGMFNMLSTV
MWMFNMLSTL

SEQ ID NO: 159084 - protein, 10 aa, Artificial Sequence
  Description of Artificial Sequence: Synthetic peptide
  Seed: MGMFNMLSTV
MWMFNMLSTM

SEQ ID NO: 159085 - protein, 10 aa, Artificial Sequence
  Description of Artificial Sequence: Synthetic peptide
  Seed: MGMFNMLSTV
MWMFNMLSTP

SEQ ID NO: 159086 - protein, 10 aa, Artificial Sequence
  Description of Artificial Sequence: Synthetic peptide
  Seed: MGMFNMLSTV
MWMFNMLSTS

SEQ ID NO: 159087 - protein, 10 aa, Artificial Sequence
  Description of Artificial Sequence: Synthetic peptide
  Seed: MGMFNMLSTV
MWMFNMLSTT

SEQ ID NO: 159088 - protein, 10 aa, Artificial Sequence
  Description of Artificial Sequence: Synthetic peptide
  Seed: MGMFNMLSTV
MWMFNMLSTV

SEQ ID NO: 159089 - protein, 11 aa, Artificial Sequence
  Description of Artificial Sequence: Synthetic peptide
  Seed: MGMFNMLSTVL
MWMFNMLSTVA

SEQ ID NO: 159090 - protein, 11 aa, Artificial Sequence
  Description of Artificial Sequence: Synthetic peptide
  Seed: MGMFNMLSTVL
MWMFNMLSTVC

SEQ ID NO: 159091 - protein, 11 aa, Artificial Sequence
  Description of Artificial Sequence: Synthetic peptide
  Seed: MGMFNMLSTVL
MWMFNMLSTVD

SEQ ID NO: 159092 - protein, 11 aa, Artificial Sequence
  Description of Artificial Sequence: Synthetic peptide
  Seed: MGMFNMLSTVL
MWMFNMLSTVE

SEQ ID NO: 159093 - protein, 11 aa, Artificial Sequence
  Description of Artificial Sequence: Synthetic peptide
  Seed: MGMFNMLSTVL
MWMFNMLSTVF

SEQ ID NO: 159094 - protein, 11 aa, Artificial Sequence
  Description of Artificial Sequence: Synthetic peptide
  Seed: MGMFNMLSTVL
MWMFNMLSTVG

SEQ ID NO: 159095 - protein, 11 aa, Artificial Sequence
  Description of Artificial Sequence: Synthetic peptide
  Seed: MGMFNMLSTVL
MWMFNMLSTVH

SEQ ID NO: 159096 - protein, 11 aa, Artificial Sequence
  Description of Artificial Sequence: Synthetic peptide
  Seed: MGMFNMLSTVL
MWMFNMLSTVI

SEQ ID NO: 159097 - protein, 11 aa, Artificial Sequence
  Description of Artificial Sequence: Synthetic peptide
  Seed: MGMFNMLSTVL
MWMFNMLSTVK

SEQ ID NO: 159098 - protein, 11 aa, Artificial Sequence
  Description of Artificial Sequence: Synthetic peptide
  Seed: MGMFNMLSTVL
MWMFNMLSTVL

SEQ ID NO: 159099 - protein, 11 aa, Artificial Sequence
  Description of Artificial Sequence: Synthetic peptide
  Seed: MGMFNMLSTVL
MWMFNMLSTVM

SEQ ID NO: 159100 - protein, 11 aa, Artificial Sequence
  Description of Artificial Sequence: Synthetic peptide
  Seed: MGMFNMLSTVL
MWMFNMLSTVN

SEQ ID NO: 159101 - protein, 11 aa, Artificial Sequence
  Description of Artificial Sequence: Synthetic peptide
  Seed: MGMFNMLSTVL
MWMFNMLSTVP

SEQ ID NO: 159102 - protein, 11 aa, Artificial Sequence
  Description of Artificial Sequence: Synthetic peptide
  Seed: MGMFNMLSTVL
MWMFNMLSTVQ

SEQ ID NO: 159103 - protein, 11 aa, Artificial Sequence
  Description of Artificial Sequence: Synthetic peptide
  Seed: MGMFNMLSTVL
MWMFNMLSTVR

SEQ ID NO: 159104 - protein, 11 aa, Artificial Sequence
  Description of Artificial Sequence: Synthetic peptide
  Seed: MGMFNMLSTVL
MWMFNMLSTVS

SEQ ID NO: 159105 - protein, 11 aa, Artificial Sequence
  Description of Artificial Sequence: Synthetic peptide
  Seed: MGMFNMLSTVL
MWMFNMLSTVT

SEQ ID NO: 159106 - protein, 11 aa, Artificial Sequence
  Description of Artificial Sequence: Synthetic peptide
  Seed: MGMFNMLSTVL
MWMFNMLSTVV

SEQ ID NO: 159107 - protein, 11 aa, Artificial Sequence
  Description of Artificial Sequence: Synthetic peptide
  Seed: MGMFNMLSTVL
MWMFNMLSTVW

SEQ ID NO: 159108 - protein, 11 aa, Artificial Sequence
  Description of Artificial Sequence: Synthetic peptide
  Seed: MGMFNMLSTVL
MWMFNMLSTVY

SEQ ID NO: 159109 - protein, 10 aa, Artificial Sequence
  Description of Artificial Sequence: Synthetic peptide
  Seed: MGMFNMLSTV
MWMFNMLSTW

SEQ ID NO: 159110 - protein, 10 aa, Artificial Sequence
  Description of Artificial Sequence: Synthetic peptide
  Seed: MGMFNMLSTV
MWMFNMLSTY

SEQ ID NO: 159111 - protein, 9 aa, Artificial Sequence
  Description of Artificial Sequence: Synthetic peptide
  Seed: MMMGMFNML
MWMGMFNMF

SEQ ID NO: 159112 - protein, 9 aa, Artificial Sequence
  Description of Artificial Sequence: Synthetic peptide
  Seed: MMMGMFNML
MWMGMFNMI

SEQ ID NO: 159113 - protein, 9 aa, Artificial Sequence
  Description of Artificial Sequence: Synthetic peptide
  Seed: MMMGMFNML
MWMGMFNML

SEQ ID NO: 159114 - protein, 10 aa, Artificial Sequence
  Description of Artificial Sequence: Synthetic peptide
  Seed: MMMGMFNMLS
MWMGMFNMLA

SEQ ID NO: 159115 - protein, 10 aa, Artificial Sequence
  Description of Artificial Sequence: Synthetic peptide
  Seed: MMMGMFNMLS
MWMGMFNMLI

SEQ ID NO: 159116 - protein, 10 aa, Artificial Sequence
  Description of Artificial Sequence: Synthetic peptide
  Seed: MMMGMFNMLS
MWMGMFNMLL

SEQ ID NO: 159117 - protein, 10 aa, Artificial Sequence
  Description of Artificial Sequence: Synthetic peptide
  Seed: MMMGMFNMLS
MWMGMFNMLM

SEQ ID NO: 159118 - protein, 10 aa, Artificial Sequence
  Description of Artificial Sequence: Synthetic peptide
  Seed: MMMGMFNMLS
MWMGMFNMLS

SEQ ID NO: 159119 - protein, 11 aa, Artificial Sequence
  Description of Artificial Sequence: Synthetic peptide
  Seed: MMMGMFNMLST
MWMGMFNMLSV

SEQ ID NO: 159120 - protein, 10 aa, Artificial Sequence
  Description of Artificial Sequence: Synthetic peptide
  Seed: MMMGMFNMLS
MWMGMFNMLT

SEQ ID NO: 159121 - protein, 10 aa, Artificial Sequence
  Description of Artificial Sequence: Synthetic peptide
  Seed: MMMGMFNMLS
MWMGMFNMLV

SEQ ID NO: 159122 - protein, 9 aa, Artificial Sequence
  Description of Artificial Sequence: Synthetic peptide
  Seed: MMMGMFNML
MWMGMFNMM

SEQ ID NO: 159123 - protein, 9 aa, Artificial Sequence
  Description of Artificial Sequence: Synthetic peptide
  Seed: MMMGMFNML
MWMGMFNMV

SEQ ID NO: 159124 - protein, 9 aa, Artificial Sequence
  Description of Artificial Sequence: Synthetic peptide
  Seed: MMMGMFNML
MWMGMFNMW

SEQ ID NO: 159125 - protein, 9 aa, Artificial Sequence
  Description of Artificial Sequence: Synthetic peptide
  Seed: MMMGMFNML
MWMGMFNMY

SEQ ID NO: 159126 - protein, 8 aa, Artificial Sequence
  Description of Artificial Sequence: Synthetic peptide
  Seed: MMMGMFNM
MWMGMFNV

SEQ ID NO: 159127 - protein, 8 aa, Artificial Sequence
  Description of Artificial Sequence: Synthetic peptide
  Seed: MFNMLSTV
MWNMLSTF

SEQ ID NO: 159128 - protein, 8 aa, Artificial Sequence
  Description of Artificial Sequence: Synthetic peptide
  Seed: MFNMLSTV
MWNMLSTL

SEQ ID NO: 159129 - protein, 8 aa, Artificial Sequence
  Description of Artificial Sequence: Synthetic peptide
  Seed: MFNMLSTV
MWNMLSTM

SEQ ID NO: 159130 - protein, 8 aa, Artificial Sequence
  Description of Artificial Sequence: Synthetic peptide
  Seed: MFNMLSTV
MWNMLSTV

SEQ ID NO: 159131 - protein, 9 aa, Artificial Sequence
  Description of Artificial Sequence: Synthetic peptide
  Seed: MFNMLSTVL
MWNMLSTVF

SEQ ID NO: 159132 - protein, 9 aa, Artificial Sequence
  Description of Artificial Sequence: Synthetic peptide
  Seed: MFNMLSTVL
MWNMLSTVI

SEQ ID NO: 159133 - protein, 9 aa, Artificial Sequence
  Description of Artificial Sequence: Synthetic peptide
  Seed: MFNMLSTVL
MWNMLSTVL

SEQ ID NO: 159134 - protein, 11 aa, Artificial Sequence
  Description of Artificial Sequence: Synthetic peptide
  Seed: MFNMLSTVLGV
MWNMLSTVLGA

SEQ ID NO: 159135 - protein, 11 aa, Artificial Sequence
  Description of Artificial Sequence: Synthetic peptide
  Seed: MFNMLSTVLGV
MWNMLSTVLGI

SEQ ID NO: 159136 - protein, 11 aa, Artificial Sequence
  Description of Artificial Sequence: Synthetic peptide
  Seed: MFNMLSTVLGV
MWNMLSTVLGL

SEQ ID NO: 159137 - protein, 11 aa, Artificial Sequence
  Description of Artificial Sequence: Synthetic peptide
  Seed: MFNMLSTVLGV
MWNMLSTVLGM

SEQ ID NO: 159138 - protein, 11 aa, Artificial Sequence
  Description of Artificial Sequence: Synthetic peptide
  Seed: MFNMLSTVLGV
MWNMLSTVLGT

SEQ ID NO: 159139 - protein, 11 aa, Artificial Sequence
  Description of Artificial Sequence: Synthetic peptide
  Seed: MFNMLSTVLGV
MWNMLSTVLGV

SEQ ID NO: 159140 - protein, 9 aa, Artificial Sequence
  Description of Artificial Sequence: Synthetic peptide
  Seed: MFNMLSTVL
MWNMLSTVM

SEQ ID NO: 159141 - protein, 9 aa, Artificial Sequence
  Description of Artificial Sequence: Synthetic peptide
  Seed: MFNMLSTVL
MWNMLSTVV

SEQ ID NO: 159142 - protein, 9 aa, Artificial Sequence
  Description of Artificial Sequence: Synthetic peptide
  Seed: MFNMLSTVL
MWNMLSTVW

SEQ ID NO: 159143 - protein, 9 aa, Artificial Sequence
  Description of Artificial Sequence: Synthetic peptide
  Seed: MFNMLSTVL
MWNMLSTVY

SEQ ID NO: 159144 - protein, 8 aa, Artificial Sequence
  Description of Artificial Sequence: Synthetic peptide
  Seed: MFNMLSTV
MWNMLSTY

SEQ ID NO: 159145 - protein, 9 aa, Artificial Sequence
  Description of Artificial Sequence: Synthetic peptide
  Seed: MARLGKGYM
MWRLGKGYA

SEQ ID NO: 159146 - protein, 9 aa, Artificial Sequence
  Description of Artificial Sequence: Synthetic peptide
  Seed: MARLGKGYM
MWRLGKGYF

SEQ ID NO: 159147 - protein, 9 aa, Artificial Sequence
  Description of Artificial Sequence: Synthetic peptide
  Seed: MARLGKGYM
MWRLGKGYI

SEQ ID NO: 159148 - protein, 9 aa, Artificial Sequence
  Description of Artificial Sequence: Synthetic peptide
  Seed: MARLGKGYM
MWRLGKGYK

SEQ ID NO: 159149 - protein, 9 aa, Artificial Sequence
  Description of Artificial Sequence: Synthetic peptide
  Seed: MARLGKGYM
MWRLGKGYL

SEQ ID NO: 159150 - protein, 9 aa, Artificial Sequence
  Description of Artificial Sequence: Synthetic peptide
  Seed: MARLGKGYM
MWRLGKGYM

SEQ ID NO: 159151 - protein, 10 aa, Artificial Sequence
  Description of Artificial Sequence: Synthetic peptide
  Seed: MARLGKGYMF
MWRLGKGYMA

SEQ ID NO: 159152 - protein, 10 aa, Artificial Sequence
  Description of Artificial Sequence: Synthetic peptide
  Seed: MARLGKGYMF
MWRLGKGYMF

SEQ ID NO: 159153 - protein, 10 aa, Artificial Sequence
  Description of Artificial Sequence: Synthetic peptide
  Seed: MARLGKGYMF
MWRLGKGYMI

SEQ ID NO: 159154 - protein, 10 aa, Artificial Sequence
  Description of Artificial Sequence: Synthetic peptide
  Seed: MARLGKGYMF
MWRLGKGYMK

SEQ ID NO: 159155 - protein, 10 aa, Artificial Sequence
  Description of Artificial Sequence: Synthetic peptide
  Seed: MARLGKGYMF
MWRLGKGYML

SEQ ID NO: 159156 - protein, 10 aa, Artificial Sequence
  Description of Artificial Sequence: Synthetic peptide
  Seed: MARLGKGYMF
MWRLGKGYMM

SEQ ID NO: 159157 - protein, 10 aa, Artificial Sequence
  Description of Artificial Sequence: Synthetic peptide
  Seed: MARLGKGYMF
MWRLGKGYMR

SEQ ID NO: 159158 - protein, 10 aa, Artificial Sequence
  Description of Artificial Sequence: Synthetic peptide
  Seed: MARLGKGYMF
MWRLGKGYMV

SEQ ID NO: 159159 - protein, 10 aa, Artificial Sequence
  Description of Artificial Sequence: Synthetic peptide
  Seed: MARLGKGYMF
MWRLGKGYMW

SEQ ID NO: 159160 - protein, 10 aa, Artificial Sequence
  Description of Artificial Sequence: Synthetic peptide
  Seed: MARLGKGYMF
MWRLGKGYMY

SEQ ID NO: 159161 - protein, 9 aa, Artificial Sequence
  Description of Artificial Sequence: Synthetic peptide
  Seed: MARLGKGYM
MWRLGKGYV

SEQ ID NO: 159162 - protein, 9 aa, Artificial Sequence
  Description of Artificial Sequence: Synthetic peptide
  Seed: MARLGKGYM
MWRLGKGYY

SEQ ID NO: 159163 - protein, 8 aa, Artificial Sequence
  Description of Artificial Sequence: Synthetic peptide
  Seed: MFSNKMAR
MWSNKMAR

SEQ ID NO: 159164 - protein, 9 aa, Artificial Sequence
  Description of Artificial Sequence: Synthetic peptide
  Seed: MFSNKMARL
MWSNKMARF

SEQ ID NO: 159165 - protein, 9 aa, Artificial Sequence
  Description of Artificial Sequence: Synthetic peptide
  Seed: MFSNKMARL
MWSNKMARI

SEQ ID NO: 159166 - protein, 9 aa, Artificial Sequence
  Description of Artificial Sequence: Synthetic peptide
  Seed: MFSNKMARL
MWSNKMARL

SEQ ID NO: 159167 - protein, 11 aa, Artificial Sequence
  Description of Artificial Sequence: Synthetic peptide
  Seed: MFSNKMARLGK
MWSNKMARLGK

SEQ ID NO: 159168 - protein, 11 aa, Artificial Sequence
  Description of Artificial Sequence: Synthetic peptide
  Seed: MFSNKMARLGK
MWSNKMARLGR

SEQ ID NO: 159169 - protein, 9 aa, Artificial Sequence
  Description of Artificial Sequence: Synthetic peptide
  Seed: MFSNKMARL
MWSNKMARM

SEQ ID NO: 159170 - protein, 9 aa, Artificial Sequence
  Description of Artificial Sequence: Synthetic peptide
  Seed: MFSNKMARL
MWSNKMARW

SEQ ID NO: 159171 - protein, 9 aa, Artificial Sequence
  Description of Artificial Sequence: Synthetic peptide
  Seed: MFSNKMARL
MWSNKMARY

SEQ ID NO: 159172 - protein, 8 aa, Artificial Sequence
  Description of Artificial Sequence: Synthetic peptide
  Seed: MLSTVLGV
MWSTVLGI

SEQ ID NO: 159173 - protein, 8 aa, Artificial Sequence
  Description of Artificial Sequence: Synthetic peptide
  Seed: MLSTVLGV
MWSTVLGL

SEQ ID NO: 159174 - protein, 8 aa, Artificial Sequence
  Description of Artificial Sequence: Synthetic peptide
  Seed: MLSTVLGV
MWSTVLGV

SEQ ID NO: 159175 - protein, 10 aa, Artificial Sequence
  Description of Artificial Sequence: Synthetic peptide
  Seed: MLSTVLGVSI
MWSTVLGVSF

SEQ ID NO: 159176 - protein, 10 aa, Artificial Sequence
  Description of Artificial Sequence: Synthetic peptide
  Seed: MLSTVLGVSI
MWSTVLGVSI

SEQ ID NO: 159177 - protein, 10 aa, Artificial Sequence
  Description of Artificial Sequence: Synthetic peptide
  Seed: MLSTVLGVSI
MWSTVLGVSL

SEQ ID NO: 159178 - protein, 10 aa, Artificial Sequence
  Description of Artificial Sequence: Synthetic peptide
  Seed: MLSTVLGVSI
MWSTVLGVSM

SEQ ID NO: 159179 - protein, 10 aa, Artificial Sequence
  Description of Artificial Sequence: Synthetic peptide
  Seed: MLSTVLGVSI
MWSTVLGVSV

SEQ ID NO: 159180 - protein, 10 aa, Artificial Sequence
  Description of Artificial Sequence: Synthetic peptide
  Seed: MLSTVLGVSI
MWSTVLGVSW

SEQ ID NO: 159181 - protein, 10 aa, Artificial Sequence
  Description of Artificial Sequence: Synthetic peptide
  Seed: MLSTVLGVSI
MWSTVLGVSY

SEQ ID NO: 159182 - protein, 11 aa, Artificial Sequence
  Description of Artificial Sequence: Synthetic peptide
  Seed: MMGMFNMLSTV
MYGMFNMLSTA

SEQ ID NO: 159183 - protein, 11 aa, Artificial Sequence
  Description of Artificial Sequence: Synthetic peptide
  Seed: MMGMFNMLSTV
MYGMFNMLSTI

SEQ ID NO: 159184 - protein, 11 aa, Artificial Sequence
  Description of Artificial Sequence: Synthetic peptide
  Seed: MMGMFNMLSTV
MYGMFNMLSTL

SEQ ID NO: 159185 - protein, 11 aa, Artificial Sequence
  Description of Artificial Sequence: Synthetic peptide
  Seed: MMGMFNMLSTV
MYGMFNMLSTM

SEQ ID NO: 159186 - protein, 11 aa, Artificial Sequence
  Description of Artificial Sequence: Synthetic peptide
  Seed: MMGMFNMLSTV
MYGMFNMLSTT

SEQ ID NO: 159187 - protein, 11 aa, Artificial Sequence
  Description of Artificial Sequence: Synthetic peptide
  Seed: MMGMFNMLSTV
MYGMFNMLSTV

SEQ ID NO: 159188 - protein, 10 aa, Artificial Sequence
  Description of Artificial Sequence: Synthetic peptide
  Seed: MMGMFNMLST
MYGMFNMLSV

SEQ ID NO: 159189 - protein, 9 aa, Artificial Sequence
  Description of Artificial Sequence: Synthetic peptide
  Seed: MSIGVTVIK
MYIGVTVIK

SEQ ID NO: 159190 - protein, 10 aa, Artificial Sequence
  Description of Artificial Sequence: Synthetic peptide
  Seed: MSIGVTVIKN
MYIGVTVIKK

SEQ ID NO: 159191 - protein, 10 aa, Artificial Sequence
  Description of Artificial Sequence: Synthetic peptide
  Seed: MSIGVTVIKN
MYIGVTVIKR

SEQ ID NO: 159192 - protein, 9 aa, Artificial Sequence
  Description of Artificial Sequence: Synthetic peptide
  Seed: MSIGVTVIK
MYIGVTVIR

SEQ ID NO: 159193 - protein, 9 aa, Artificial Sequence
  Description of Artificial Sequence: Synthetic peptide
  Seed: MTKDAERGK
MYKDAERGK

SEQ ID NO: 159194 - protein, 10 aa, Artificial Sequence
  Description of Artificial Sequence: Synthetic peptide
  Seed: MGMFNMLSTV
MYMFNMLSTA

SEQ ID NO: 159195 - protein, 10 aa, Artificial Sequence
  Description of Artificial Sequence: Synthetic peptide
  Seed: MGMFNMLSTV
MYMFNMLSTC

SEQ ID NO: 159196 - protein, 10 aa, Artificial Sequence
  Description of Artificial Sequence: Synthetic peptide
  Seed: MGMFNMLSTV
MYMFNMLSTF

SEQ ID NO: 159197 - protein, 10 aa, Artificial Sequence
  Description of Artificial Sequence: Synthetic peptide
  Seed: MGMFNMLSTV
MYMFNMLSTG

SEQ ID NO: 159198 - protein, 10 aa, Artificial Sequence
  Description of Artificial Sequence: Synthetic peptide
  Seed: MGMFNMLSTV
MYMFNMLSTH

SEQ ID NO: 159199 - protein, 10 aa, Artificial Sequence
  Description of Artificial Sequence: Synthetic peptide
  Seed: MGMFNMLSTV
MYMFNMLSTI

SEQ ID NO: 159200 - protein, 10 aa, Artificial Sequence
  Description of Artificial Sequence: Synthetic peptide
  Seed: MGMFNMLSTV
MYMFNMLSTL

SEQ ID NO: 159201 - protein, 10 aa, Artificial Sequence
  Description of Artificial Sequence: Synthetic peptide
  Seed: MGMFNMLSTV
MYMFNMLSTM

SEQ ID NO: 159202 - protein, 10 aa, Artificial Sequence
  Description of Artificial Sequence: Synthetic peptide
  Seed: MGMFNMLSTV
MYMFNMLSTP

SEQ ID NO: 159203 - protein, 10 aa, Artificial Sequence
  Description of Artificial Sequence: Synthetic peptide
  Seed: MGMFNMLSTV
MYMFNMLSTS

SEQ ID NO: 159204 - protein, 10 aa, Artificial Sequence
  Description of Artificial Sequence: Synthetic peptide
  Seed: MGMFNMLSTV
MYMFNMLSTT

SEQ ID NO: 159205 - protein, 10 aa, Artificial Sequence
  Description of Artificial Sequence: Synthetic peptide
  Seed: MGMFNMLSTV
MYMFNMLSTV

SEQ ID NO: 159206 - protein, 11 aa, Artificial Sequence
  Description of Artificial Sequence: Synthetic peptide
  Seed: MGMFNMLSTVL
MYMFNMLSTVA

SEQ ID NO: 159207 - protein, 11 aa, Artificial Sequence
  Description of Artificial Sequence: Synthetic peptide
  Seed: MGMFNMLSTVL
MYMFNMLSTVC

SEQ ID NO: 159208 - protein, 11 aa, Artificial Sequence
  Description of Artificial Sequence: Synthetic peptide
  Seed: MGMFNMLSTVL
MYMFNMLSTVD

SEQ ID NO: 159209 - protein, 11 aa, Artificial Sequence
  Description of Artificial Sequence: Synthetic peptide
  Seed: MGMFNMLSTVL
MYMFNMLSTVE

SEQ ID NO: 159210 - protein, 11 aa, Artificial Sequence
  Description of Artificial Sequence: Synthetic peptide
  Seed: MGMFNMLSTVL
MYMFNMLSTVF

SEQ ID NO: 159211 - protein, 11 aa, Artificial Sequence
  Description of Artificial Sequence: Synthetic peptide
  Seed: MGMFNMLSTVL
MYMFNMLSTVG

SEQ ID NO: 159212 - protein, 11 aa, Artificial Sequence
  Description of Artificial Sequence: Synthetic peptide
  Seed: MGMFNMLSTVL
MYMFNMLSTVH

SEQ ID NO: 159213 - protein, 11 aa, Artificial Sequence
  Description of Artificial Sequence: Synthetic peptide
  Seed: MGMFNMLSTVL
MYMFNMLSTVI

SEQ ID NO: 159214 - protein, 11 aa, Artificial Sequence
  Description of Artificial Sequence: Synthetic peptide
  Seed: MGMFNMLSTVL
MYMFNMLSTVK

SEQ ID NO: 159215 - protein, 11 aa, Artificial Sequence
  Description of Artificial Sequence: Synthetic peptide
  Seed: MGMFNMLSTVL
MYMFNMLSTVL

SEQ ID NO: 159216 - protein, 11 aa, Artificial Sequence
  Description of Artificial Sequence: Synthetic peptide
  Seed: MGMFNMLSTVL
MYMFNMLSTVM

SEQ ID NO: 159217 - protein, 11 aa, Artificial Sequence
  Description of Artificial Sequence: Synthetic peptide
  Seed: MGMFNMLSTVL
MYMFNMLSTVN

SEQ ID NO: 159218 - protein, 11 aa, Artificial Sequence
  Description of Artificial Sequence: Synthetic peptide
  Seed: MGMFNMLSTVL
MYMFNMLSTVP

SEQ ID NO: 159219 - protein, 11 aa, Artificial Sequence
  Description of Artificial Sequence: Synthetic peptide
  Seed: MGMFNMLSTVL
MYMFNMLSTVQ

SEQ ID NO: 159220 - protein, 11 aa, Artificial Sequence
  Description of Artificial Sequence: Synthetic peptide
  Seed: MGMFNMLSTVL
MYMFNMLSTVR

SEQ ID NO: 159221 - protein, 11 aa, Artificial Sequence
  Description of Artificial Sequence: Synthetic peptide
  Seed: MGMFNMLSTVL
MYMFNMLSTVS

SEQ ID NO: 159222 - protein, 11 aa, Artificial Sequence
  Description of Artificial Sequence: Synthetic peptide
  Seed: MGMFNMLSTVL
MYMFNMLSTVT

SEQ ID NO: 159223 - protein, 11 aa, Artificial Sequence
  Description of Artificial Sequence: Synthetic peptide
  Seed: MGMFNMLSTVL
MYMFNMLSTVV

SEQ ID NO: 159224 - protein, 11 aa, Artificial Sequence
  Description of Artificial Sequence: Synthetic peptide
  Seed: MGMFNMLSTVL
MYMFNMLSTVW

SEQ ID NO: 159225 - protein, 11 aa, Artificial Sequence
  Description of Artificial Sequence: Synthetic peptide
  Seed: MGMFNMLSTVL
MYMFNMLSTVY

SEQ ID NO: 159226 - protein, 10 aa, Artificial Sequence
  Description of Artificial Sequence: Synthetic peptide
  Seed: MGMFNMLSTV
MYMFNMLSTW

SEQ ID NO: 159227 - protein, 10 aa, Artificial Sequence
  Description of Artificial Sequence: Synthetic peptide
  Seed: MGMFNMLSTV
MYMFNMLSTY

SEQ ID NO: 159228 - protein, 9 aa, Artificial Sequence
  Description of Artificial Sequence: Synthetic peptide
  Seed: MMMGMFNML
MYMGMFNMA

SEQ ID NO: 159229 - protein, 9 aa, Artificial Sequence
  Description of Artificial Sequence: Synthetic peptide
  Seed: MMMGMFNML
MYMGMFNMC

SEQ ID NO: 159230 - protein, 9 aa, Artificial Sequence
  Description of Artificial Sequence: Synthetic peptide
  Seed: MMMGMFNML
MYMGMFNMF

SEQ ID NO: 159231 - protein, 9 aa, Artificial Sequence
  Description of Artificial Sequence: Synthetic peptide
  Seed: MMMGMFNML
MYMGMFNMG

SEQ ID NO: 159232 - protein, 9 aa, Artificial Sequence
  Description of Artificial Sequence: Synthetic peptide
  Seed: MMMGMFNML
MYMGMFNMH

SEQ ID NO: 159233 - protein, 9 aa, Artificial Sequence
  Description of Artificial Sequence: Synthetic peptide
  Seed: MMMGMFNML
MYMGMFNMI

SEQ ID NO: 159234 - protein, 9 aa, Artificial Sequence
  Description of Artificial Sequence: Synthetic peptide
  Seed: MMMGMFNML
MYMGMFNMK

SEQ ID NO: 159235 - protein, 9 aa, Artificial Sequence
  Description of Artificial Sequence: Synthetic peptide
  Seed: MMMGMFNML
MYMGMFNML

SEQ ID NO: 159236 - protein, 10 aa, Artificial Sequence
  Description of Artificial Sequence: Synthetic peptide
  Seed: MMMGMFNMLS
MYMGMFNMLA

SEQ ID NO: 159237 - protein, 10 aa, Artificial Sequence
  Description of Artificial Sequence: Synthetic peptide
  Seed: MMMGMFNMLS
MYMGMFNMLI

SEQ ID NO: 159238 - protein, 10 aa, Artificial Sequence
  Description of Artificial Sequence: Synthetic peptide
  Seed: MMMGMFNMLS
MYMGMFNMLL

SEQ ID NO: 159239 - protein, 10 aa, Artificial Sequence
  Description of Artificial Sequence: Synthetic peptide
  Seed: MMMGMFNMLS
MYMGMFNMLM

SEQ ID NO: 159240 - protein, 10 aa, Artificial Sequence
  Description of Artificial Sequence: Synthetic peptide
  Seed: MMMGMFNMLS
MYMGMFNMLS

SEQ ID NO: 159241 - protein, 11 aa, Artificial Sequence
  Description of Artificial Sequence: Synthetic peptide
  Seed: MMMGMFNMLST
MYMGMFNMLSA

SEQ ID NO: 159242 - protein, 11 aa, Artificial Sequence
  Description of Artificial Sequence: Synthetic peptide
  Seed: MMMGMFNMLST
MYMGMFNMLSI

SEQ ID NO: 159243 - protein, 11 aa, Artificial Sequence
  Description of Artificial Sequence: Synthetic peptide
  Seed: MMMGMFNMLST
MYMGMFNMLSL

SEQ ID NO: 159244 - protein, 11 aa, Artificial Sequence
  Description of Artificial Sequence: Synthetic peptide
  Seed: MMMGMFNMLST
MYMGMFNMLSV

SEQ ID NO: 159245 - protein, 10 aa, Artificial Sequence
  Description of Artificial Sequence: Synthetic peptide
  Seed: MMMGMFNMLS
MYMGMFNMLT

SEQ ID NO: 159246 - protein, 10 aa, Artificial Sequence
  Description of Artificial Sequence: Synthetic peptide
  Seed: MMMGMFNMLS
MYMGMFNMLV

SEQ ID NO: 159247 - protein, 9 aa, Artificial Sequence
  Description of Artificial Sequence: Synthetic peptide
  Seed: MMMGMFNML
MYMGMFNMN

SEQ ID NO: 159248 - protein, 9 aa, Artificial Sequence
  Description of Artificial Sequence: Synthetic peptide
  Seed: MMMGMFNML
MYMGMFNMP

SEQ ID NO: 159249 - protein, 9 aa, Artificial Sequence
  Description of Artificial Sequence: Synthetic peptide
  Seed: MMMGMFNML
MYMGMFNMS

SEQ ID NO: 159250 - protein, 9 aa, Artificial Sequence
  Description of Artificial Sequence: Synthetic peptide
  Seed: MMMGMFNML
MYMGMFNMT

SEQ ID NO: 159251 - protein, 9 aa, Artificial Sequence
  Description of Artificial Sequence: Synthetic peptide
  Seed: MMMGMFNML
MYMGMFNMW

SEQ ID NO: 159252 - protein, 9 aa, Artificial Sequence
  Description of Artificial Sequence: Synthetic peptide
  Seed: MMMGMFNML
MYMGMFNMY

SEQ ID NO: 159253 - protein, 8 aa, Artificial Sequence
  Description of Artificial Sequence: Synthetic peptide
  Seed: MMMGMFNM
MYMGMFNV

SEQ ID NO: 159254 - protein, 8 aa, Artificial Sequence
  Description of Artificial Sequence: Synthetic peptide
  Seed: MFNMLSTV
MYNMLSTF

SEQ ID NO: 159255 - protein, 8 aa, Artificial Sequence
  Description of Artificial Sequence: Synthetic peptide
  Seed: MFNMLSTV
MYNMLSTI

SEQ ID NO: 159256 - protein, 8 aa, Artificial Sequence
  Description of Artificial Sequence: Synthetic peptide
  Seed: MFNMLSTV
MYNMLSTL

SEQ ID NO: 159257 - protein, 8 aa, Artificial Sequence
  Description of Artificial Sequence: Synthetic peptide
  Seed: MFNMLSTV
MYNMLSTM

SEQ ID NO: 159258 - protein, 8 aa, Artificial Sequence
  Description of Artificial Sequence: Synthetic peptide
  Seed: MFNMLSTV
MYNMLSTV

SEQ ID NO: 159259 - protein, 9 aa, Artificial Sequence
  Description of Artificial Sequence: Synthetic peptide
  Seed: MFNMLSTVL
MYNMLSTVA

SEQ ID NO: 159260 - protein, 9 aa, Artificial Sequence
  Description of Artificial Sequence: Synthetic peptide
  Seed: MFNMLSTVL
MYNMLSTVC

SEQ ID NO: 159261 - protein, 9 aa, Artificial Sequence
  Description of Artificial Sequence: Synthetic peptide
  Seed: MFNMLSTVL
MYNMLSTVF

SEQ ID NO: 159262 - protein, 9 aa, Artificial Sequence
  Description of Artificial Sequence: Synthetic peptide
  Seed: MFNMLSTVL
MYNMLSTVG

SEQ ID NO: 159263 - protein, 9 aa, Artificial Sequence
  Description of Artificial Sequence: Synthetic peptide
  Seed: MFNMLSTVL
MYNMLSTVH

SEQ ID NO: 159264 - protein, 9 aa, Artificial Sequence
  Description of Artificial Sequence: Synthetic peptide
  Seed: MFNMLSTVL
MYNMLSTVI

SEQ ID NO: 159265 - protein, 9 aa, Artificial Sequence
  Description of Artificial Sequence: Synthetic peptide
  Seed: MFNMLSTVL
MYNMLSTVL

SEQ ID NO: 159266 - protein, 11 aa, Artificial Sequence
  Description of Artificial Sequence: Synthetic peptide
  Seed: MFNMLSTVLGV
MYNMLSTVLGA

SEQ ID NO: 159267 - protein, 11 aa, Artificial Sequence
  Description of Artificial Sequence: Synthetic peptide
  Seed: MFNMLSTVLGV
MYNMLSTVLGI

SEQ ID NO: 159268 - protein, 11 aa, Artificial Sequence
  Description of Artificial Sequence: Synthetic peptide
  Seed: MFNMLSTVLGV
MYNMLSTVLGL

SEQ ID NO: 159269 - protein, 11 aa, Artificial Sequence
  Description of Artificial Sequence: Synthetic peptide
  Seed: MFNMLSTVLGV
MYNMLSTVLGM

SEQ ID NO: 159270 - protein, 11 aa, Artificial Sequence
  Description of Artificial Sequence: Synthetic peptide
  Seed: MFNMLSTVLGV
MYNMLSTVLGT

SEQ ID NO: 159271 - protein, 11 aa, Artificial Sequence
  Description of Artificial Sequence: Synthetic peptide
  Seed: MFNMLSTVLGV
MYNMLSTVLGV

SEQ ID NO: 159272 - protein, 9 aa, Artificial Sequence
  Description of Artificial Sequence: Synthetic peptide
  Seed: MFNMLSTVL
MYNMLSTVM

SEQ ID NO: 159273 - protein, 9 aa, Artificial Sequence
  Description of Artificial Sequence: Synthetic peptide
  Seed: MFNMLSTVL
MYNMLSTVQ

SEQ ID NO: 159274 - protein, 9 aa, Artificial Sequence
  Description of Artificial Sequence: Synthetic peptide
  Seed: MFNMLSTVL
MYNMLSTVS

SEQ ID NO: 159275 - protein, 9 aa, Artificial Sequence
  Description of Artificial Sequence: Synthetic peptide
  Seed: MFNMLSTVL
MYNMLSTVT

SEQ ID NO: 159276 - protein, 9 aa, Artificial Sequence
  Description of Artificial Sequence: Synthetic peptide
  Seed: MFNMLSTVL
MYNMLSTVV

SEQ ID NO: 159277 - protein, 9 aa, Artificial Sequence
  Description of Artificial Sequence: Synthetic peptide
  Seed: MFNMLSTVL
MYNMLSTVW

SEQ ID NO: 159278 - protein, 9 aa, Artificial Sequence
  Description of Artificial Sequence: Synthetic peptide
  Seed: MFNMLSTVL
MYNMLSTVY

SEQ ID NO: 159279 - protein, 8 aa, Artificial Sequence
  Description of Artificial Sequence: Synthetic peptide
  Seed: MFNMLSTV
MYNMLSTY

SEQ ID NO: 159280 - protein, 9 aa, Artificial Sequence
  Description of Artificial Sequence: Synthetic peptide
  Seed: MARLGKGYM
MYRLGKGYA

SEQ ID NO: 159281 - protein, 9 aa, Artificial Sequence
  Description of Artificial Sequence: Synthetic peptide
  Seed: MARLGKGYM
MYRLGKGYF

SEQ ID NO: 159282 - protein, 9 aa, Artificial Sequence
  Description of Artificial Sequence: Synthetic peptide
  Seed: MARLGKGYM
MYRLGKGYG

SEQ ID NO: 159283 - protein, 9 aa, Artificial Sequence
  Description of Artificial Sequence: Synthetic peptide
  Seed: MARLGKGYM
MYRLGKGYI

SEQ ID NO: 159284 - protein, 9 aa, Artificial Sequence
  Description of Artificial Sequence: Synthetic peptide
  Seed: MARLGKGYM
MYRLGKGYK

SEQ ID NO: 159285 - protein, 9 aa, Artificial Sequence
  Description of Artificial Sequence: Synthetic peptide
  Seed: MARLGKGYM
MYRLGKGYL

SEQ ID NO: 159286 - protein, 9 aa, Artificial Sequence
  Description of Artificial Sequence: Synthetic peptide
  Seed: MARLGKGYM
MYRLGKGYM

SEQ ID NO: 159287 - protein, 10 aa, Artificial Sequence
  Description of Artificial Sequence: Synthetic peptide
  Seed: MARLGKGYMF
MYRLGKGYMA

SEQ ID NO: 159288 - protein, 10 aa, Artificial Sequence
  Description of Artificial Sequence: Synthetic peptide
  Seed: MARLGKGYMF
MYRLGKGYMF

SEQ ID NO: 159289 - protein, 10 aa, Artificial Sequence
  Description of Artificial Sequence: Synthetic peptide
  Seed: MARLGKGYMF
MYRLGKGYMI

SEQ ID NO: 159290 - protein, 10 aa, Artificial Sequence
  Description of Artificial Sequence: Synthetic peptide
  Seed: MARLGKGYMF
MYRLGKGYMK

SEQ ID NO: 159291 - protein, 10 aa, Artificial Sequence
  Description of Artificial Sequence: Synthetic peptide
  Seed: MARLGKGYMF
MYRLGKGYML

SEQ ID NO: 159292 - protein, 10 aa, Artificial Sequence
  Description of Artificial Sequence: Synthetic peptide
  Seed: MARLGKGYMF
MYRLGKGYMM

SEQ ID NO: 159293 - protein, 10 aa, Artificial Sequence
  Description of Artificial Sequence: Synthetic peptide
  Seed: MARLGKGYMF
MYRLGKGYMR

SEQ ID NO: 159294 - protein, 10 aa, Artificial Sequence
  Description of Artificial Sequence: Synthetic peptide
  Seed: MARLGKGYMF
MYRLGKGYMV

SEQ ID NO: 159295 - protein, 10 aa, Artificial Sequence
  Description of Artificial Sequence: Synthetic peptide
  Seed: MARLGKGYMF
MYRLGKGYMW

SEQ ID NO: 159296 - protein, 10 aa, Artificial Sequence
  Description of Artificial Sequence: Synthetic peptide
  Seed: MARLGKGYMF
MYRLGKGYMY

SEQ ID NO: 159297 - protein, 9 aa, Artificial Sequence
  Description of Artificial Sequence: Synthetic peptide
  Seed: MARLGKGYM
MYRLGKGYP

SEQ ID NO: 159298 - protein, 9 aa, Artificial Sequence
  Description of Artificial Sequence: Synthetic peptide
  Seed: MARLGKGYM
MYRLGKGYR

SEQ ID NO: 159299 - protein, 9 aa, Artificial Sequence
  Description of Artificial Sequence: Synthetic peptide
  Seed: MARLGKGYM
MYRLGKGYS

SEQ ID NO: 159300 - protein, 9 aa, Artificial Sequence
  Description of Artificial Sequence: Synthetic peptide
  Seed: MARLGKGYM
MYRLGKGYV

SEQ ID NO: 159301 - protein, 9 aa, Artificial Sequence
  Description of Artificial Sequence: Synthetic peptide
  Seed: MARLGKGYM
MYRLGKGYW

SEQ ID NO: 159302 - protein, 9 aa, Artificial Sequence
  Description of Artificial Sequence: Synthetic peptide
  Seed: MARLGKGYM
MYRLGKGYY

SEQ ID NO: 159303 - protein, 8 aa, Artificial Sequence
  Description of Artificial Sequence: Synthetic peptide
  Seed: MFSNKMAR
MYSNKMAR

SEQ ID NO: 159304 - protein, 9 aa, Artificial Sequence
  Description of Artificial Sequence: Synthetic peptide
  Seed: MFSNKMARL
MYSNKMARF

SEQ ID NO: 159305 - protein, 9 aa, Artificial Sequence
  Description of Artificial Sequence: Synthetic peptide
  Seed: MFSNKMARL
MYSNKMARI

SEQ ID NO: 159306 - protein, 9 aa, Artificial Sequence
  Description of Artificial Sequence: Synthetic peptide
  Seed: MFSNKMARL
MYSNKMARL

SEQ ID NO: 159307 - protein, 11 aa, Artificial Sequence
  Description of Artificial Sequence: Synthetic peptide
  Seed: MFSNKMARLGK
MYSNKMARLGK

SEQ ID NO: 159308 - protein, 11 aa, Artificial Sequence
  Description of Artificial Sequence: Synthetic peptide
  Seed: MFSNKMARLGK
MYSNKMARLGR

SEQ ID NO: 159309 - protein, 9 aa, Artificial Sequence
  Description of Artificial Sequence: Synthetic peptide
  Seed: MFSNKMARL
MYSNKMARM

SEQ ID NO: 159310 - protein, 9 aa, Artificial Sequence
  Description of Artificial Sequence: Synthetic peptide
  Seed: MFSNKMARL
MYSNKMARV

SEQ ID NO: 159311 - protein, 9 aa, Artificial Sequence
  Description of Artificial Sequence: Synthetic peptide
  Seed: MFSNKMARL
MYSNKMARW

SEQ ID NO: 159312 - protein, 9 aa, Artificial Sequence
  Description of Artificial Sequence: Synthetic peptide
  Seed: MFSNKMARL
MYSNKMARY

SEQ ID NO: 159313 - protein, 8 aa, Artificial Sequence
  Description of Artificial Sequence: Synthetic peptide
  Seed: MLSTVLGV
MYSTVLGV

SEQ ID NO: 159314 - protein, 10 aa, Artificial Sequence
  Description of Artificial Sequence: Synthetic peptide
  Seed: MLSTVLGVSI
MYSTVLGVSF

SEQ ID NO: 159315 - protein, 10 aa, Artificial Sequence
  Description of Artificial Sequence: Synthetic peptide
  Seed: MLSTVLGVSI
MYSTVLGVSI

SEQ ID NO: 159316 - protein, 10 aa, Artificial Sequence
  Description of Artificial Sequence: Synthetic peptide
  Seed: MLSTVLGVSI
MYSTVLGVSL

SEQ ID NO: 159317 - protein, 10 aa, Artificial Sequence
  Description of Artificial Sequence: Synthetic peptide
  Seed: MLSTVLGVSI
MYSTVLGVSM

SEQ ID NO: 159318 - protein, 10 aa, Artificial Sequence
  Description of Artificial Sequence: Synthetic peptide
  Seed: MLSTVLGVSI
MYSTVLGVSV

SEQ ID NO: 159319 - protein, 10 aa, Artificial Sequence
  Description of Artificial Sequence: Synthetic peptide
  Seed: MLSTVLGVSI
MYSTVLGVSW

SEQ ID NO: 159320 - protein, 10 aa, Artificial Sequence
  Description of Artificial Sequence: Synthetic peptide
  Seed: MLSTVLGVSI
MYSTVLGVSY

SEQ ID NO: 159321 - protein, 9 aa, Artificial Sequence
  Description of Artificial Sequence: Synthetic peptide
  Seed: NAISTTFPY
NAISTTFPA

SEQ ID NO: 159322 - protein, 9 aa, Artificial Sequence
  Description of Artificial Sequence: Synthetic peptide
  Seed: NAISTTFPY
NAISTTFPC

SEQ ID NO: 159323 - protein, 9 aa, Artificial Sequence
  Description of Artificial Sequence: Synthetic peptide
  Seed: NAISTTFPY
NAISTTFPF

SEQ ID NO: 159324 - protein, 9 aa, Artificial Sequence
  Description of Artificial Sequence: Synthetic peptide
  Seed: NAISTTFPY
NAISTTFPG

SEQ ID NO: 159325 - protein, 9 aa, Artificial Sequence
  Description of Artificial Sequence: Synthetic peptide
  Seed: NAISTTFPY
NAISTTFPH

SEQ ID NO: 159326 - protein, 9 aa, Artificial Sequence
  Description of Artificial Sequence: Synthetic peptide
  Seed: NAISTTFPY
NAISTTFPI

SEQ ID NO: 159327 - protein, 9 aa, Artificial Sequence
  Description of Artificial Sequence: Synthetic peptide
  Seed: NAISTTFPY
NAISTTFPK

SEQ ID NO: 159328 - protein, 9 aa, Artificial Sequence
  Description of Artificial Sequence: Synthetic peptide
  Seed: NAISTTFPY
NAISTTFPL

SEQ ID NO: 159329 - protein, 9 aa, Artificial Sequence
  Description of Artificial Sequence: Synthetic peptide
  Seed: NAISTTFPY
NAISTTFPM

SEQ ID NO: 159330 - protein, 9 aa, Artificial Sequence
  Description of Artificial Sequence: Synthetic peptide
  Seed: NAISTTFPY
NAISTTFPN

SEQ ID NO: 159331 - protein, 9 aa, Artificial Sequence
  Description of Artificial Sequence: Synthetic peptide
  Seed: NAISTTFPY
NAISTTFPQ

SEQ ID NO: 159332 - protein, 9 aa, Artificial Sequence
  Description of Artificial Sequence: Synthetic peptide
  Seed: NAISTTFPY
NAISTTFPR

SEQ ID NO: 159333 - protein, 9 aa, Artificial Sequence
  Description of Artificial Sequence: Synthetic peptide
  Seed: NAISTTFPY
NAISTTFPS

SEQ ID NO: 159334 - protein, 9 aa, Artificial Sequence
  Description of Artificial Sequence: Synthetic peptide
  Seed: NAISTTFPY
NAISTTFPT

SEQ ID NO: 159335 - protein, 9 aa, Artificial Sequence
  Description of Artificial Sequence: Synthetic peptide
  Seed: NAISTTFPY
NAISTTFPV

SEQ ID NO: 159336 - protein, 9 aa, Artificial Sequence
  Description of Artificial Sequence: Synthetic peptide
  Seed: NAISTTFPY
NAISTTFPW

SEQ ID NO: 159337 - protein, 10 aa, Artificial Sequence
  Description of Artificial Sequence: Synthetic peptide
  Seed: NAISTTFPYT
NAISTTFPYA

SEQ ID NO: 159338 - protein, 10 aa, Artificial Sequence
  Description of Artificial Sequence: Synthetic peptide
  Seed: NAISTTFPYT
NAISTTFPYC

SEQ ID NO: 159339 - protein, 10 aa, Artificial Sequence
  Description of Artificial Sequence: Synthetic peptide
  Seed: NAISTTFPYT
NAISTTFPYD

SEQ ID NO: 159340 - protein, 10 aa, Artificial Sequence
  Description of Artificial Sequence: Synthetic peptide
  Seed: NAISTTFPYT
NAISTTFPYE

SEQ ID NO: 159341 - protein, 10 aa, Artificial Sequence
  Description of Artificial Sequence: Synthetic peptide
  Seed: NAISTTFPYT
NAISTTFPYF

SEQ ID NO: 159342 - protein, 10 aa, Artificial Sequence
  Description of Artificial Sequence: Synthetic peptide
  Seed: NAISTTFPYT
NAISTTFPYG

SEQ ID NO: 159343 - protein, 10 aa, Artificial Sequence
  Description of Artificial Sequence: Synthetic peptide
  Seed: NAISTTFPYT
NAISTTFPYH

SEQ ID NO: 159344 - protein, 10 aa, Artificial Sequence
  Description of Artificial Sequence: Synthetic peptide
  Seed: NAISTTFPYT
NAISTTFPYI

SEQ ID NO: 159345 - protein, 10 aa, Artificial Sequence
  Description of Artificial Sequence: Synthetic peptide
  Seed: NAISTTFPYT
NAISTTFPYK

SEQ ID NO: 159346 - protein, 10 aa, Artificial Sequence
  Description of Artificial Sequence: Synthetic peptide
  Seed: NAISTTFPYT
NAISTTFPYL

SEQ ID NO: 159347 - protein, 10 aa, Artificial Sequence
  Description of Artificial Sequence: Synthetic peptide
  Seed: NAISTTFPYT
NAISTTFPYM

SEQ ID NO: 159348 - protein, 10 aa, Artificial Sequence
  Description of Artificial Sequence: Synthetic peptide
  Seed: NAISTTFPYT
NAISTTFPYN

SEQ ID NO: 159349 - protein, 10 aa, Artificial Sequence
  Description of Artificial Sequence: Synthetic peptide
  Seed: NAISTTFPYT
NAISTTFPYP

SEQ ID NO: 159350 - protein, 10 aa, Artificial Sequence
  Description of Artificial Sequence: Synthetic peptide
  Seed: NAISTTFPYT
NAISTTFPYQ

SEQ ID NO: 159351 - protein, 10 aa, Artificial Sequence
  Description of Artificial Sequence: Synthetic peptide
  Seed: NAISTTFPYT
NAISTTFPYR

SEQ ID NO: 159352 - protein, 10 aa, Artificial Sequence
  Description of Artificial Sequence: Synthetic peptide
  Seed: NAISTTFPYT
NAISTTFPYS

SEQ ID NO: 159353 - protein, 10 aa, Artificial Sequence
  Description of Artificial Sequence: Synthetic peptide
  Seed: NAISTTFPYT
NAISTTFPYV

SEQ ID NO: 159354 - protein, 10 aa, Artificial Sequence
  Description of Artificial Sequence: Synthetic peptide
  Seed: NAISTTFPYT
NAISTTFPYW

SEQ ID NO: 159355 - protein, 10 aa, Artificial Sequence
  Description of Artificial Sequence: Synthetic peptide
  Seed: NAISTTFPYT
NAISTTFPYY

SEQ ID NO: 159356 - protein, 9 aa, Artificial Sequence
  Description of Artificial Sequence: Synthetic peptide
  Seed: NMLSTVLGV
NALSTVLGI

SEQ ID NO: 159357 - protein, 9 aa, Artificial Sequence
  Description of Artificial Sequence: Synthetic peptide
  Seed: NMLSTVLGV
NALSTVLGL

SEQ ID NO: 159358 - protein, 9 aa, Artificial Sequence
  Description of Artificial Sequence: Synthetic peptide
  Seed: NMLSTVLGV
NALSTVLGV

SEQ ID NO: 159359 - protein, 10 aa, Artificial Sequence
  Description of Artificial Sequence: Synthetic peptide
  Seed: NMLSTVLGVS
NALSTVLGVA

SEQ ID NO: 159360 - protein, 10 aa, Artificial Sequence
  Description of Artificial Sequence: Synthetic peptide
  Seed: NMLSTVLGVS
NALSTVLGVI

SEQ ID NO: 159361 - protein, 10 aa, Artificial Sequence
  Description of Artificial Sequence: Synthetic peptide
  Seed: NMLSTVLGVS
NALSTVLGVL

SEQ ID NO: 159362 - protein, 11 aa, Artificial Sequence
  Description of Artificial Sequence: Synthetic peptide
  Seed: NMLSTVLGVSI
NALSTVLGVSL

SEQ ID NO: 159363 - protein, 11 aa, Artificial Sequence
  Description of Artificial Sequence: Synthetic peptide
  Seed: NMLSTVLGVSI
NALSTVLGVSV

SEQ ID NO: 159364 - protein, 10 aa, Artificial Sequence
  Description of Artificial Sequence: Synthetic peptide
  Seed: NMLSTVLGVS
NALSTVLGVV

SEQ ID NO: 159365 - protein, 10 aa, Artificial Sequence
  Description of Artificial Sequence: Synthetic peptide
  Seed: NKMARLGKGY
NAMARLGKGY

SEQ ID NO: 159366 - protein, 9 aa, Artificial Sequence
  Description of Artificial Sequence: Synthetic peptide
  Seed: NTMTKDAER
NAMTKDAEK

SEQ ID NO: 159367 - protein, 9 aa, Artificial Sequence
  Description of Artificial Sequence: Synthetic peptide
  Seed: NTMTKDAER
NAMTKDAER

SEQ ID NO: 159368 - protein, 11 aa, Artificial Sequence
  Description of Artificial Sequence: Synthetic peptide
  Seed: NTMTKDAERGK
NAMTKDAERGR

SEQ ID NO: 159369 - protein, 9 aa, Artificial Sequence
  Description of Artificial Sequence: Synthetic peptide
  Seed: NAISTTFPY
NCISTTFPF

SEQ ID NO: 159370 - protein, 9 aa, Artificial Sequence
  Description of Artificial Sequence: Synthetic peptide
  Seed: NAISTTFPY
NCISTTFPK

SEQ ID NO: 159371 - protein, 9 aa, Artificial Sequence
  Description of Artificial Sequence: Synthetic peptide
  Seed: NAISTTFPY
NCISTTFPL

SEQ ID NO: 159372 - protein, 9 aa, Artificial Sequence
  Description of Artificial Sequence: Synthetic peptide
  Seed: NAISTTFPY
NCISTTFPM

SEQ ID NO: 159373 - protein, 9 aa, Artificial Sequence
  Description of Artificial Sequence: Synthetic peptide
  Seed: NAISTTFPY
NCISTTFPR

SEQ ID NO: 159374 - protein, 9 aa, Artificial Sequence
  Description of Artificial Sequence: Synthetic peptide
  Seed: NAISTTFPY
NCISTTFPW

SEQ ID NO: 159375 - protein, 9 aa, Artificial Sequence
  Description of Artificial Sequence: Synthetic peptide
  Seed: NAISTTFPY
NCISTTFPY

SEQ ID NO: 159376 - protein, 10 aa, Artificial Sequence
  Description of Artificial Sequence: Synthetic peptide
  Seed: NAISTTFPYT
NCISTTFPYI

SEQ ID NO: 159377 - protein, 10 aa, Artificial Sequence
  Description of Artificial Sequence: Synthetic peptide
  Seed: NAISTTFPYT
NCISTTFPYV

SEQ ID NO: 159378 - protein, 10 aa, Artificial Sequence
  Description of Artificial Sequence: Synthetic peptide
  Seed: NAISTTFPYT
NCISTTFPYY

SEQ ID NO: 159379 - protein, 10 aa, Artificial Sequence
  Description of Artificial Sequence: Synthetic peptide
  Seed: NMLSTVLGVS
NCLSTVLGVA

SEQ ID NO: 159380 - protein, 10 aa, Artificial Sequence
  Description of Artificial Sequence: Synthetic peptide
  Seed: NMLSTVLGVS
NCLSTVLGVI

SEQ ID NO: 159381 - protein, 10 aa, Artificial Sequence
  Description of Artificial Sequence: Synthetic peptide
  Seed: NMLSTVLGVS
NCLSTVLGVL

SEQ ID NO: 159382 - protein, 10 aa, Artificial Sequence
  Description of Artificial Sequence: Synthetic peptide
  Seed: NMLSTVLGVS
NCLSTVLGVV

SEQ ID NO: 159383 - protein, 9 aa, Artificial Sequence
  Description of Artificial Sequence: Synthetic peptide
  Seed: NTMTKDAER
NCMTKDAER

SEQ ID NO: 159384 - protein, 9 aa, Artificial Sequence
  Description of Artificial Sequence: Synthetic peptide
  Seed: NAISTTFPY
NDISTTFPF

SEQ ID NO: 159385 - protein, 9 aa, Artificial Sequence
  Description of Artificial Sequence: Synthetic peptide
  Seed: NAISTTFPY
NDISTTFPK

SEQ ID NO: 159386 - protein, 9 aa, Artificial Sequence
  Description of Artificial Sequence: Synthetic peptide
  Seed: NAISTTFPY
NDISTTFPM

SEQ ID NO: 159387 - protein, 9 aa, Artificial Sequence
  Description of Artificial Sequence: Synthetic peptide
  Seed: NAISTTFPY
NDISTTFPR

SEQ ID NO: 159388 - protein, 9 aa, Artificial Sequence
  Description of Artificial Sequence: Synthetic peptide
  Seed: NAISTTFPY
NDISTTFPY

SEQ ID NO: 159389 - protein, 10 aa, Artificial Sequence
  Description of Artificial Sequence: Synthetic peptide
  Seed: NAISTTFPYT
NDISTTFPYV

SEQ ID NO: 159390 - protein, 10 aa, Artificial Sequence
  Description of Artificial Sequence: Synthetic peptide
  Seed: NMLSTVLGVS
NDLSTVLGVA

SEQ ID NO: 159391 - protein, 10 aa, Artificial Sequence
  Description of Artificial Sequence: Synthetic peptide
  Seed: NMLSTVLGVS
NDLSTVLGVI

SEQ ID NO: 159392 - protein, 10 aa, Artificial Sequence
  Description of Artificial Sequence: Synthetic peptide
  Seed: NMLSTVLGVS
NDLSTVLGVL

SEQ ID NO: 159393 - protein, 10 aa, Artificial Sequence
  Description of Artificial Sequence: Synthetic peptide
  Seed: NMLSTVLGVS
NDLSTVLGVV

SEQ ID NO: 159394 - protein, 9 aa, Artificial Sequence
  Description of Artificial Sequence: Synthetic peptide
  Seed: NAISTTFPY
NEISTTFPA

SEQ ID NO: 159395 - protein, 9 aa, Artificial Sequence
  Description of Artificial Sequence: Synthetic peptide
  Seed: NAISTTFPY
NEISTTFPC

SEQ ID NO: 159396 - protein, 9 aa, Artificial Sequence
  Description of Artificial Sequence: Synthetic peptide
  Seed: NAISTTFPY
NEISTTFPE

SEQ ID NO: 159397 - protein, 9 aa, Artificial Sequence
  Description of Artificial Sequence: Synthetic peptide
  Seed: NAISTTFPY
NEISTTFPF

SEQ ID NO: 159398 - protein, 9 aa, Artificial Sequence
  Description of Artificial Sequence: Synthetic peptide
  Seed: NAISTTFPY
NEISTTFPG

SEQ ID NO: 159399 - protein, 9 aa, Artificial Sequence
  Description of Artificial Sequence: Synthetic peptide
  Seed: NAISTTFPY
NEISTTFPH

SEQ ID NO: 159400 - protein, 9 aa, Artificial Sequence
  Description of Artificial Sequence: Synthetic peptide
  Seed: NAISTTFPY
NEISTTFPI

SEQ ID NO: 159401 - protein, 9 aa, Artificial Sequence
  Description of Artificial Sequence: Synthetic peptide
  Seed: NAISTTFPY
NEISTTFPL

SEQ ID NO: 159402 - protein, 9 aa, Artificial Sequence
  Description of Artificial Sequence: Synthetic peptide
  Seed: NAISTTFPY
NEISTTFPN

SEQ ID NO: 159403 - protein, 9 aa, Artificial Sequence
  Description of Artificial Sequence: Synthetic peptide
  Seed: NAISTTFPY
NEISTTFPP

SEQ ID NO: 159404 - protein, 9 aa, Artificial Sequence
  Description of Artificial Sequence: Synthetic peptide
  Seed: NAISTTFPY
NEISTTFPQ

SEQ ID NO: 159405 - protein, 9 aa, Artificial Sequence
  Description of Artificial Sequence: Synthetic peptide
  Seed: NAISTTFPY
NEISTTFPR

SEQ ID NO: 159406 - protein, 9 aa, Artificial Sequence
  Description of Artificial Sequence: Synthetic peptide
  Seed: NAISTTFPY
NEISTTFPS

SEQ ID NO: 159407 - protein, 9 aa, Artificial Sequence
  Description of Artificial Sequence: Synthetic peptide
  Seed: NAISTTFPY
NEISTTFPT

SEQ ID NO: 159408 - protein, 9 aa, Artificial Sequence
  Description of Artificial Sequence: Synthetic peptide
  Seed: NAISTTFPY
NEISTTFPV

SEQ ID NO: 159409 - protein, 9 aa, Artificial Sequence
  Description of Artificial Sequence: Synthetic peptide
  Seed: NAISTTFPY
NEISTTFPW

SEQ ID NO: 159410 - protein, 10 aa, Artificial Sequence
  Description of Artificial Sequence: Synthetic peptide
  Seed: NAISTTFPYT
NEISTTFPYI

SEQ ID NO: 159411 - protein, 10 aa, Artificial Sequence
  Description of Artificial Sequence: Synthetic peptide
  Seed: NAISTTFPYT
NEISTTFPYV

SEQ ID NO: 159412 - protein, 10 aa, Artificial Sequence
  Description of Artificial Sequence: Synthetic peptide
  Seed: NMLSTVLGVS
NELSTVLGVA

SEQ ID NO: 159413 - protein, 10 aa, Artificial Sequence
  Description of Artificial Sequence: Synthetic peptide
  Seed: NMLSTVLGVS
NELSTVLGVI

SEQ ID NO: 159414 - protein, 10 aa, Artificial Sequence
  Description of Artificial Sequence: Synthetic peptide
  Seed: NMLSTVLGVS
NELSTVLGVL

SEQ ID NO: 159415 - protein, 10 aa, Artificial Sequence
  Description of Artificial Sequence: Synthetic peptide
  Seed: NMLSTVLGVS
NELSTVLGVV

SEQ ID NO: 159416 - protein, 11 aa, Artificial Sequence
  Description of Artificial Sequence: Synthetic peptide
  Seed: NFSMELPSFGV
NESMELPSFGV

SEQ ID NO: 159417 - protein, 9 aa, Artificial Sequence
  Description of Artificial Sequence: Synthetic peptide
  Seed: NAISTTFPY
NFISTTFPA

SEQ ID NO: 159418 - protein, 9 aa, Artificial Sequence
  Description of Artificial Sequence: Synthetic peptide
  Seed: NAISTTFPY
NFISTTFPF

SEQ ID NO: 159419 - protein, 9 aa, Artificial Sequence
  Description of Artificial Sequence: Synthetic peptide
  Seed: NAISTTFPY
NFISTTFPH

SEQ ID NO: 159420 - protein, 9 aa, Artificial Sequence
  Description of Artificial Sequence: Synthetic peptide
  Seed: NAISTTFPY
NFISTTFPI

SEQ ID NO: 159421 - protein, 9 aa, Artificial Sequence
  Description of Artificial Sequence: Synthetic peptide
  Seed: NAISTTFPY
NFISTTFPK

SEQ ID NO: 159422 - protein, 9 aa, Artificial Sequence
  Description of Artificial Sequence: Synthetic peptide
  Seed: NAISTTFPY
NFISTTFPL

SEQ ID NO: 159423 - protein, 9 aa, Artificial Sequence
  Description of Artificial Sequence: Synthetic peptide
  Seed: NAISTTFPY
NFISTTFPM

SEQ ID NO: 159424 - protein, 9 aa, Artificial Sequence
  Description of Artificial Sequence: Synthetic peptide
  Seed: NAISTTFPY
NFISTTFPR

SEQ ID NO: 159425 - protein, 9 aa, Artificial Sequence
  Description of Artificial Sequence: Synthetic peptide
  Seed: NAISTTFPY
NFISTTFPV

SEQ ID NO: 159426 - protein, 9 aa, Artificial Sequence
  Description of Artificial Sequence: Synthetic peptide
  Seed: NAISTTFPY
NFISTTFPW

SEQ ID NO: 159427 - protein, 9 aa, Artificial Sequence
  Description of Artificial Sequence: Synthetic peptide
  Seed: NAISTTFPY
NFISTTFPY

SEQ ID NO: 159428 - protein, 10 aa, Artificial Sequence
  Description of Artificial Sequence: Synthetic peptide
  Seed: NAISTTFPYT
NFISTTFPYF

SEQ ID NO: 159429 - protein, 10 aa, Artificial Sequence
  Description of Artificial Sequence: Synthetic peptide
  Seed: NAISTTFPYT
NFISTTFPYI

SEQ ID NO: 159430 - protein, 10 aa, Artificial Sequence
  Description of Artificial Sequence: Synthetic peptide
  Seed: NAISTTFPYT
NFISTTFPYV

SEQ ID NO: 159431 - protein, 10 aa, Artificial Sequence
  Description of Artificial Sequence: Synthetic peptide
  Seed: NAISTTFPYT
NFISTTFPYY

SEQ ID NO: 159432 - protein, 11 aa, Artificial Sequence
  Description of Artificial Sequence: Synthetic peptide
  Seed: NTKWNENQNPR
NFKWNENQNPR

SEQ ID NO: 159433 - protein, 9 aa, Artificial Sequence
  Description of Artificial Sequence: Synthetic peptide
  Seed: NMLSTVLGV
NFLSTVLGV

SEQ ID NO: 159434 - protein, 10 aa, Artificial Sequence
  Description of Artificial Sequence: Synthetic peptide
  Seed: NMLSTVLGVS
NFLSTVLGVA

SEQ ID NO: 159435 - protein, 10 aa, Artificial Sequence
  Description of Artificial Sequence: Synthetic peptide
  Seed: NMLSTVLGVS
NFLSTVLGVI

SEQ ID NO: 159436 - protein, 10 aa, Artificial Sequence
  Description of Artificial Sequence: Synthetic peptide
  Seed: NMLSTVLGVS
NFLSTVLGVL

SEQ ID NO: 159437 - protein, 10 aa, Artificial Sequence
  Description of Artificial Sequence: Synthetic peptide
  Seed: NMLSTVLGVS
NFLSTVLGVM

SEQ ID NO: 159438 - protein, 11 aa, Artificial Sequence
  Description of Artificial Sequence: Synthetic peptide
  Seed: NMLSTVLGVSI
NFLSTVLGVSA

SEQ ID NO: 159439 - protein, 11 aa, Artificial Sequence
  Description of Artificial Sequence: Synthetic peptide
  Seed: NMLSTVLGVSI
NFLSTVLGVSI

SEQ ID NO: 159440 - protein, 11 aa, Artificial Sequence
  Description of Artificial Sequence: Synthetic peptide
  Seed: NMLSTVLGVSI
NFLSTVLGVSL

SEQ ID NO: 159441 - protein, 11 aa, Artificial Sequence
  Description of Artificial Sequence: Synthetic peptide
  Seed: NMLSTVLGVSI
NFLSTVLGVSM

SEQ ID NO: 159442 - protein, 11 aa, Artificial Sequence
  Description of Artificial Sequence: Synthetic peptide
  Seed: NMLSTVLGVSI
NFLSTVLGVSV

SEQ ID NO: 159443 - protein, 10 aa, Artificial Sequence
  Description of Artificial Sequence: Synthetic peptide
  Seed: NMLSTVLGVS
NFLSTVLGVT

SEQ ID NO: 159444 - protein, 10 aa, Artificial Sequence
  Description of Artificial Sequence: Synthetic peptide
  Seed: NMLSTVLGVS
NFLSTVLGVV

SEQ ID NO: 159445 - protein, 9 aa, Artificial Sequence
  Description of Artificial Sequence: Synthetic peptide
  Seed: NTMTKDAER
NFMTKDAEK

SEQ ID NO: 159446 - protein, 9 aa, Artificial Sequence
  Description of Artificial Sequence: Synthetic peptide
  Seed: NTMTKDAER
NFMTKDAER

SEQ ID NO: 159447 - protein, 11 aa, Artificial Sequence
  Description of Artificial Sequence: Synthetic peptide
  Seed: NFSMELPSFGV
NFSMELPSFGL

SEQ ID NO: 159448 - protein, 9 aa, Artificial Sequence
  Description of Artificial Sequence: Synthetic peptide
  Seed: NFSMELPSF
NFSMELPSI

SEQ ID NO: 159449 - protein, 9 aa, Artificial Sequence
  Description of Artificial Sequence: Synthetic peptide
  Seed: NFSMELPSF
NFSMELPSL

SEQ ID NO: 159450 - protein, 9 aa, Artificial Sequence
  Description of Artificial Sequence: Synthetic peptide
  Seed: NFSMELPSF
NFSMELPSM

SEQ ID NO: 159451 - protein, 9 aa, Artificial Sequence
  Description of Artificial Sequence: Synthetic peptide
  Seed: NFSMELPSF
NFSMELPSW

SEQ ID NO: 159452 - protein, 9 aa, Artificial Sequence
  Description of Artificial Sequence: Synthetic peptide
  Seed: NFSMELPSF
NFSMELPSY

SEQ ID NO: 159453 - protein, 9 aa, Artificial Sequence
  Description of Artificial Sequence: Synthetic peptide
  Seed: NAISTTFPY
NGISTTFPF

SEQ ID NO: 159454 - protein, 9 aa, Artificial Sequence
  Description of Artificial Sequence: Synthetic peptide
  Seed: NAISTTFPY
NGISTTFPK

SEQ ID NO: 159455 - protein, 9 aa, Artificial Sequence
  Description of Artificial Sequence: Synthetic peptide
  Seed: NAISTTFPY
NGISTTFPL

SEQ ID NO: 159456 - protein, 9 aa, Artificial Sequence
  Description of Artificial Sequence: Synthetic peptide
  Seed: NAISTTFPY
NGISTTFPM

SEQ ID NO: 159457 - protein, 9 aa, Artificial Sequence
  Description of Artificial Sequence: Synthetic peptide
  Seed: NAISTTFPY
NGISTTFPR

SEQ ID NO: 159458 - protein, 9 aa, Artificial Sequence
  Description of Artificial Sequence: Synthetic peptide
  Seed: NAISTTFPY
NGISTTFPW

SEQ ID NO: 159459 - protein, 9 aa, Artificial Sequence
  Description of Artificial Sequence: Synthetic peptide
  Seed: NAISTTFPY
NGISTTFPY

SEQ ID NO: 159460 - protein, 10 aa, Artificial Sequence
  Description of Artificial Sequence: Synthetic peptide
  Seed: NAISTTFPYT
NGISTTFPYI

SEQ ID NO: 159461 - protein, 10 aa, Artificial Sequence
  Description of Artificial Sequence: Synthetic peptide
  Seed: NAISTTFPYT
NGISTTFPYV

SEQ ID NO: 159462 - protein, 10 aa, Artificial Sequence
  Description of Artificial Sequence: Synthetic peptide
  Seed: NAISTTFPYT
NGISTTFPYY

SEQ ID NO: 159463 - protein, 10 aa, Artificial Sequence
  Description of Artificial Sequence: Synthetic peptide
  Seed: NMLSTVLGVS
NGLSTVLGVA

SEQ ID NO: 159464 - protein, 10 aa, Artificial Sequence
  Description of Artificial Sequence: Synthetic peptide
  Seed: NMLSTVLGVS
NGLSTVLGVI

SEQ ID NO: 159465 - protein, 10 aa, Artificial Sequence
  Description of Artificial Sequence: Synthetic peptide
  Seed: NMLSTVLGVS
NGLSTVLGVL

SEQ ID NO: 159466 - protein, 11 aa, Artificial Sequence
  Description of Artificial Sequence: Synthetic peptide
  Seed: NMLSTVLGVSI
NGLSTVLGVSL

SEQ ID NO: 159467 - protein, 11 aa, Artificial Sequence
  Description of Artificial Sequence: Synthetic peptide
  Seed: NMLSTVLGVSI
NGLSTVLGVSV

SEQ ID NO: 159468 - protein, 10 aa, Artificial Sequence
  Description of Artificial Sequence: Synthetic peptide
  Seed: NMLSTVLGVS
NGLSTVLGVV

SEQ ID NO: 159469 - protein, 9 aa, Artificial Sequence
  Description of Artificial Sequence: Synthetic peptide
  Seed: NTMTKDAER
NGMTKDAER

SEQ ID NO: 159470 - protein, 9 aa, Artificial Sequence
  Description of Artificial Sequence: Synthetic peptide
  Seed: NAISTTFPY
NHISTTFPA

SEQ ID NO: 159471 - protein, 9 aa, Artificial Sequence
  Description of Artificial Sequence: Synthetic peptide
  Seed: NAISTTFPY
NHISTTFPF

SEQ ID NO: 159472 - protein, 9 aa, Artificial Sequence
  Description of Artificial Sequence: Synthetic peptide
  Seed: NAISTTFPY
NHISTTFPH

SEQ ID NO: 159473 - protein, 9 aa, Artificial Sequence
  Description of Artificial Sequence: Synthetic peptide
  Seed: NAISTTFPY
NHISTTFPI

SEQ ID NO: 159474 - protein, 9 aa, Artificial Sequence
  Description of Artificial Sequence: Synthetic peptide
  Seed: NAISTTFPY
NHISTTFPL

SEQ ID NO: 159475 - protein, 9 aa, Artificial Sequence
  Description of Artificial Sequence: Synthetic peptide
  Seed: NAISTTFPY
NHISTTFPM

SEQ ID NO: 159476 - protein, 9 aa, Artificial Sequence
  Description of Artificial Sequence: Synthetic peptide
  Seed: NAISTTFPY
NHISTTFPR

SEQ ID NO: 159477 - protein, 9 aa, Artificial Sequence
  Description of Artificial Sequence: Synthetic peptide
  Seed: NAISTTFPY
NHISTTFPV

SEQ ID NO: 159478 - protein, 9 aa, Artificial Sequence
  Description of Artificial Sequence: Synthetic peptide
  Seed: NAISTTFPY
NHISTTFPW

SEQ ID NO: 159479 - protein, 9 aa, Artificial Sequence
  Description of Artificial Sequence: Synthetic peptide
  Seed: NAISTTFPY
NHISTTFPY

SEQ ID NO: 159480 - protein, 10 aa, Artificial Sequence
  Description of Artificial Sequence: Synthetic peptide
  Seed: NAISTTFPYT
NHISTTFPYV

SEQ ID NO: 159481 - protein, 10 aa, Artificial Sequence
  Description of Artificial Sequence: Synthetic peptide
  Seed: NMLSTVLGVS
NHLSTVLGVA

SEQ ID NO: 159482 - protein, 10 aa, Artificial Sequence
  Description of Artificial Sequence: Synthetic peptide
  Seed: NMLSTVLGVS
NHLSTVLGVI

SEQ ID NO: 159483 - protein, 10 aa, Artificial Sequence
  Description of Artificial Sequence: Synthetic peptide
  Seed: NMLSTVLGVS
NHLSTVLGVL

SEQ ID NO: 159484 - protein, 11 aa, Artificial Sequence
  Description of Artificial Sequence: Synthetic peptide
  Seed: NMLSTVLGVSI
NHLSTVLGVSL

SEQ ID NO: 159485 - protein, 11 aa, Artificial Sequence
  Description of Artificial Sequence: Synthetic peptide
  Seed: NMLSTVLGVSI
NHLSTVLGVSV

SEQ ID NO: 159486 - protein, 10 aa, Artificial Sequence
  Description of Artificial Sequence: Synthetic peptide
  Seed: NMLSTVLGVS
NHLSTVLGVV

SEQ ID NO: 159487 - protein, 9 aa, Artificial Sequence
  Description of Artificial Sequence: Synthetic peptide
  Seed: NAISTTFPY
NIISTTFPA

SEQ ID NO: 159488 - protein, 9 aa, Artificial Sequence
  Description of Artificial Sequence: Synthetic peptide
  Seed: NAISTTFPY
NIISTTFPF

SEQ ID NO: 159489 - protein, 9 aa, Artificial Sequence
  Description of Artificial Sequence: Synthetic peptide
  Seed: NAISTTFPY
NIISTTFPH

SEQ ID NO: 159490 - protein, 9 aa, Artificial Sequence
  Description of Artificial Sequence: Synthetic peptide
  Seed: NAISTTFPY
NIISTTFPI

SEQ ID NO: 159491 - protein, 9 aa, Artificial Sequence
  Description of Artificial Sequence: Synthetic peptide
  Seed: NAISTTFPY
NIISTTFPK

SEQ ID NO: 159492 - protein, 9 aa, Artificial Sequence
  Description of Artificial Sequence: Synthetic peptide
  Seed: NAISTTFPY
NIISTTFPL

SEQ ID NO: 159493 - protein, 9 aa, Artificial Sequence
  Description of Artificial Sequence: Synthetic peptide
  Seed: NAISTTFPY
NIISTTFPM

SEQ ID NO: 159494 - protein, 9 aa, Artificial Sequence
  Description of Artificial Sequence: Synthetic peptide
  Seed: NAISTTFPY
NIISTTFPQ

SEQ ID NO: 159495 - protein, 9 aa, Artificial Sequence
  Description of Artificial Sequence: Synthetic peptide
  Seed: NAISTTFPY
NIISTTFPR

SEQ ID NO: 159496 - protein, 9 aa, Artificial Sequence
  Description of Artificial Sequence: Synthetic peptide
  Seed: NAISTTFPY
NIISTTFPV

SEQ ID NO: 159497 - protein, 9 aa, Artificial Sequence
  Description of Artificial Sequence: Synthetic peptide
  Seed: NAISTTFPY
NIISTTFPW

SEQ ID NO: 159498 - protein, 9 aa, Artificial Sequence
  Description of Artificial Sequence: Synthetic peptide
  Seed: NAISTTFPY
NIISTTFPY

SEQ ID NO: 159499 - protein, 10 aa, Artificial Sequence
  Description of Artificial Sequence: Synthetic peptide
  Seed: NAISTTFPYT
NIISTTFPYA

SEQ ID NO: 159500 - protein, 10 aa, Artificial Sequence
  Description of Artificial Sequence: Synthetic peptide
  Seed: NAISTTFPYT
NIISTTFPYF

SEQ ID NO: 159501 - protein, 10 aa, Artificial Sequence
  Description of Artificial Sequence: Synthetic peptide
  Seed: NAISTTFPYT
NIISTTFPYI

SEQ ID NO: 159502 - protein, 10 aa, Artificial Sequence
  Description of Artificial Sequence: Synthetic peptide
  Seed: NAISTTFPYT
NIISTTFPYL

SEQ ID NO: 159503 - protein, 10 aa, Artificial Sequence
  Description of Artificial Sequence: Synthetic peptide
  Seed: NAISTTFPYT
NIISTTFPYM

SEQ ID NO: 159504 - protein, 10 aa, Artificial Sequence
  Description of Artificial Sequence: Synthetic peptide
  Seed: NAISTTFPYT
NIISTTFPYV

SEQ ID NO: 159505 - protein, 10 aa, Artificial Sequence
  Description of Artificial Sequence: Synthetic peptide
  Seed: NAISTTFPYT
NIISTTFPYY

SEQ ID NO: 159506 - protein, 11 aa, Artificial Sequence
  Description of Artificial Sequence: Synthetic peptide
  Seed: NTKWNENQNPR
NIKWNENQNPR

SEQ ID NO: 159507 - protein, 9 aa, Artificial Sequence
  Description of Artificial Sequence: Synthetic peptide
  Seed: NMLSTVLGV
NILSTVLGA

SEQ ID NO: 159508 - protein, 9 aa, Artificial Sequence
  Description of Artificial Sequence: Synthetic peptide
  Seed: NMLSTVLGV
NILSTVLGI

SEQ ID NO: 159509 - protein, 9 aa, Artificial Sequence
  Description of Artificial Sequence: Synthetic peptide
  Seed: NMLSTVLGV
NILSTVLGL

SEQ ID NO: 159510 - protein, 9 aa, Artificial Sequence
  Description of Artificial Sequence: Synthetic peptide
  Seed: NMLSTVLGV
NILSTVLGM

SEQ ID NO: 159511 - protein, 9 aa, Artificial Sequence
  Description of Artificial Sequence: Synthetic peptide
  Seed: NMLSTVLGV
NILSTVLGV

SEQ ID NO: 159512 - protein, 10 aa, Artificial Sequence
  Description of Artificial Sequence: Synthetic peptide
  Seed: NMLSTVLGVS
NILSTVLGVA

SEQ ID NO: 159513 - protein, 10 aa, Artificial Sequence
  Description of Artificial Sequence: Synthetic peptide
  Seed: NMLSTVLGVS
NILSTVLGVI

SEQ ID NO: 159514 - protein, 10 aa, Artificial Sequence
  Description of Artificial Sequence: Synthetic peptide
  Seed: NMLSTVLGVS
NILSTVLGVL

SEQ ID NO: 159515 - protein, 11 aa, Artificial Sequence
  Description of Artificial Sequence: Synthetic peptide
  Seed: NMLSTVLGVSI
NILSTVLGVSI

SEQ ID NO: 159516 - protein, 11 aa, Artificial Sequence
  Description of Artificial Sequence: Synthetic peptide
  Seed: NMLSTVLGVSI
NILSTVLGVSL

SEQ ID NO: 159517 - protein, 11 aa, Artificial Sequence
  Description of Artificial Sequence: Synthetic peptide
  Seed: NMLSTVLGVSI
NILSTVLGVSV

SEQ ID NO: 159518 - protein, 10 aa, Artificial Sequence
  Description of Artificial Sequence: Synthetic peptide
  Seed: NMLSTVLGVS
NILSTVLGVV

SEQ ID NO: 159519 - protein, 10 aa, Artificial Sequence
  Description of Artificial Sequence: Synthetic peptide
  Seed: NKMARLGKGY
NIMARLGKGY

SEQ ID NO: 159520 - protein, 9 aa, Artificial Sequence
  Description of Artificial Sequence: Synthetic peptide
  Seed: NTMTKDAER
NIMTKDAEK

SEQ ID NO: 159521 - protein, 9 aa, Artificial Sequence
  Description of Artificial Sequence: Synthetic peptide
  Seed: NTMTKDAER
NIMTKDAER

SEQ ID NO: 159522 - protein, 9 aa, Artificial Sequence
  Description of Artificial Sequence: Synthetic peptide
  Seed: NAISTTFPY
NKISTTFPF

SEQ ID NO: 159523 - protein, 9 aa, Artificial Sequence
  Description of Artificial Sequence: Synthetic peptide
  Seed: NAISTTFPY
NKISTTFPH

SEQ ID NO: 159524 - protein, 9 aa, Artificial Sequence
  Description of Artificial Sequence: Synthetic peptide
  Seed: NAISTTFPY
NKISTTFPI

SEQ ID NO: 159525 - protein, 9 aa, Artificial Sequence
  Description of Artificial Sequence: Synthetic peptide
  Seed: NAISTTFPY
NKISTTFPL

SEQ ID NO: 159526 - protein, 9 aa, Artificial Sequence
  Description of Artificial Sequence: Synthetic peptide
  Seed: NAISTTFPY
NKISTTFPM

SEQ ID NO: 159527 - protein, 9 aa, Artificial Sequence
  Description of Artificial Sequence: Synthetic peptide
  Seed: NAISTTFPY
NKISTTFPV

SEQ ID NO: 159528 - protein, 9 aa, Artificial Sequence
  Description of Artificial Sequence: Synthetic peptide
  Seed: NAISTTFPY
NKISTTFPW

SEQ ID NO: 159529 - protein, 9 aa, Artificial Sequence
  Description of Artificial Sequence: Synthetic peptide
  Seed: NAISTTFPY
NKISTTFPY

SEQ ID NO: 159530 - protein, 10 aa, Artificial Sequence
  Description of Artificial Sequence: Synthetic peptide
  Seed: NAISTTFPYT
NKISTTFPYV

SEQ ID NO: 159531 - protein, 10 aa, Artificial Sequence
  Description of Artificial Sequence: Synthetic peptide
  Seed: NMLSTVLGVS
NKLSTVLGVA

SEQ ID NO: 159532 - protein, 10 aa, Artificial Sequence
  Description of Artificial Sequence: Synthetic peptide
  Seed: NMLSTVLGVS
NKLSTVLGVI

SEQ ID NO: 159533 - protein, 10 aa, Artificial Sequence
  Description of Artificial Sequence: Synthetic peptide
  Seed: NMLSTVLGVS
NKLSTVLGVL

SEQ ID NO: 159534 - protein, 11 aa, Artificial Sequence
  Description of Artificial Sequence: Synthetic peptide
  Seed: NMLSTVLGVSI
NKLSTVLGVSL

SEQ ID NO: 159535 - protein, 11 aa, Artificial Sequence
  Description of Artificial Sequence: Synthetic peptide
  Seed: NMLSTVLGVSI
NKLSTVLGVSV

SEQ ID NO: 159536 - protein, 10 aa, Artificial Sequence
  Description of Artificial Sequence: Synthetic peptide
  Seed: NMLSTVLGVS
NKLSTVLGVV

SEQ ID NO: 159537 - protein, 9 aa, Artificial Sequence
  Description of Artificial Sequence: Synthetic peptide
  Seed: NAISTTFPY
NLISTTFPF

SEQ ID NO: 159538 - protein, 9 aa, Artificial Sequence
  Description of Artificial Sequence: Synthetic peptide
  Seed: NAISTTFPY
NLISTTFPH

SEQ ID NO: 159539 - protein, 9 aa, Artificial Sequence
  Description of Artificial Sequence: Synthetic peptide
  Seed: NAISTTFPY
NLISTTFPI

SEQ ID NO: 159540 - protein, 9 aa, Artificial Sequence
  Description of Artificial Sequence: Synthetic peptide
  Seed: NAISTTFPY
NLISTTFPK

SEQ ID NO: 159541 - protein, 9 aa, Artificial Sequence
  Description of Artificial Sequence: Synthetic peptide
  Seed: NAISTTFPY
NLISTTFPL

SEQ ID NO: 159542 - protein, 9 aa, Artificial Sequence
  Description of Artificial Sequence: Synthetic peptide
  Seed: NAISTTFPY
NLISTTFPM

SEQ ID NO: 159543 - protein, 9 aa, Artificial Sequence
  Description of Artificial Sequence: Synthetic peptide
  Seed: NAISTTFPY
NLISTTFPR

SEQ ID NO: 159544 - protein, 9 aa, Artificial Sequence
  Description of Artificial Sequence: Synthetic peptide
  Seed: NAISTTFPY
NLISTTFPV

SEQ ID NO: 159545 - protein, 9 aa, Artificial Sequence
  Description of Artificial Sequence: Synthetic peptide
  Seed: NAISTTFPY
NLISTTFPW

SEQ ID NO: 159546 - protein, 9 aa, Artificial Sequence
  Description of Artificial Sequence: Synthetic peptide
  Seed: NAISTTFPY
NLISTTFPY

SEQ ID NO: 159547 - protein, 10 aa, Artificial Sequence
  Description of Artificial Sequence: Synthetic peptide
  Seed: NAISTTFPYT
NLISTTFPYA

SEQ ID NO: 159548 - protein, 10 aa, Artificial Sequence
  Description of Artificial Sequence: Synthetic peptide
  Seed: NAISTTFPYT
NLISTTFPYC

SEQ ID NO: 159549 - protein, 10 aa, Artificial Sequence
  Description of Artificial Sequence: Synthetic peptide
  Seed: NAISTTFPYT
NLISTTFPYD

SEQ ID NO: 159550 - protein, 10 aa, Artificial Sequence
  Description of Artificial Sequence: Synthetic peptide
  Seed: NAISTTFPYT
NLISTTFPYE

SEQ ID NO: 159551 - protein, 10 aa, Artificial Sequence
  Description of Artificial Sequence: Synthetic peptide
  Seed: NAISTTFPYT
NLISTTFPYF

SEQ ID NO: 159552 - protein, 10 aa, Artificial Sequence
  Description of Artificial Sequence: Synthetic peptide
  Seed: NAISTTFPYT
NLISTTFPYG

SEQ ID NO: 159553 - protein, 10 aa, Artificial Sequence
  Description of Artificial Sequence: Synthetic peptide
  Seed: NAISTTFPYT
NLISTTFPYH

SEQ ID NO: 159554 - protein, 10 aa, Artificial Sequence
  Description of Artificial Sequence: Synthetic peptide
  Seed: NAISTTFPYT
NLISTTFPYI

SEQ ID NO: 159555 - protein, 10 aa, Artificial Sequence
  Description of Artificial Sequence: Synthetic peptide
  Seed: NAISTTFPYT
NLISTTFPYK

SEQ ID NO: 159556 - protein, 10 aa, Artificial Sequence
  Description of Artificial Sequence: Synthetic peptide
  Seed: NAISTTFPYT
NLISTTFPYL

SEQ ID NO: 159557 - protein, 10 aa, Artificial Sequence
  Description of Artificial Sequence: Synthetic peptide
  Seed: NAISTTFPYT
NLISTTFPYM

SEQ ID NO: 159558 - protein, 10 aa, Artificial Sequence
  Description of Artificial Sequence: Synthetic peptide
  Seed: NAISTTFPYT
NLISTTFPYN

SEQ ID NO: 159559 - protein, 10 aa, Artificial Sequence
  Description of Artificial Sequence: Synthetic peptide
  Seed: NAISTTFPYT
NLISTTFPYP

SEQ ID NO: 159560 - protein, 10 aa, Artificial Sequence
  Description of Artificial Sequence: Synthetic peptide
  Seed: NAISTTFPYT
NLISTTFPYQ

SEQ ID NO: 159561 - protein, 10 aa, Artificial Sequence
  Description of Artificial Sequence: Synthetic peptide
  Seed: NAISTTFPYT
NLISTTFPYR

SEQ ID NO: 159562 - protein, 10 aa, Artificial Sequence
  Description of Artificial Sequence: Synthetic peptide
  Seed: NAISTTFPYT
NLISTTFPYS

SEQ ID NO: 159563 - protein, 10 aa, Artificial Sequence
  Description of Artificial Sequence: Synthetic peptide
  Seed: NAISTTFPYT
NLISTTFPYT

SEQ ID NO: 159564 - protein, 10 aa, Artificial Sequence
  Description of Artificial Sequence: Synthetic peptide
  Seed: NAISTTFPYT
NLISTTFPYV

SEQ ID NO: 159565 - protein, 10 aa, Artificial Sequence
  Description of Artificial Sequence: Synthetic peptide
  Seed: NAISTTFPYT
NLISTTFPYW

SEQ ID NO: 159566 - protein, 10 aa, Artificial Sequence
  Description of Artificial Sequence: Synthetic peptide
  Seed: NAISTTFPYT
NLISTTFPYY

SEQ ID NO: 159567 - protein, 9 aa, Artificial Sequence
  Description of Artificial Sequence: Synthetic peptide
  Seed: NMLSTVLGV
NLLSTVLGA

SEQ ID NO: 159568 - protein, 9 aa, Artificial Sequence
  Description of Artificial Sequence: Synthetic peptide
  Seed: NMLSTVLGV
NLLSTVLGC

SEQ ID NO: 159569 - protein, 9 aa, Artificial Sequence
  Description of Artificial Sequence: Synthetic peptide
  Seed: NMLSTVLGV
NLLSTVLGI

SEQ ID NO: 159570 - protein, 9 aa, Artificial Sequence
  Description of Artificial Sequence: Synthetic peptide
  Seed: NMLSTVLGV
NLLSTVLGL

SEQ ID NO: 159571 - protein, 9 aa, Artificial Sequence
  Description of Artificial Sequence: Synthetic peptide
  Seed: NMLSTVLGV
NLLSTVLGM

SEQ ID NO: 159572 - protein, 9 aa, Artificial Sequence
  Description of Artificial Sequence: Synthetic peptide
  Seed: NMLSTVLGV
NLLSTVLGS

SEQ ID NO: 159573 - protein, 9 aa, Artificial Sequence
  Description of Artificial Sequence: Synthetic peptide
  Seed: NMLSTVLGV
NLLSTVLGT

SEQ ID NO: 159574 - protein, 9 aa, Artificial Sequence
  Description of Artificial Sequence: Synthetic peptide
  Seed: NMLSTVLGV
NLLSTVLGV

SEQ ID NO: 159575 - protein, 10 aa, Artificial Sequence
  Description of Artificial Sequence: Synthetic peptide
  Seed: NMLSTVLGVS
NLLSTVLGVA

SEQ ID NO: 159576 - protein, 10 aa, Artificial Sequence
  Description of Artificial Sequence: Synthetic peptide
  Seed: NMLSTVLGVS
NLLSTVLGVC

SEQ ID NO: 159577 - protein, 10 aa, Artificial Sequence
  Description of Artificial Sequence: Synthetic peptide
  Seed: NMLSTVLGVS
NLLSTVLGVD

SEQ ID NO: 159578 - protein, 10 aa, Artificial Sequence
  Description of Artificial Sequence: Synthetic peptide
  Seed: NMLSTVLGVS
NLLSTVLGVE

SEQ ID NO: 159579 - protein, 10 aa, Artificial Sequence
  Description of Artificial Sequence: Synthetic peptide
  Seed: NMLSTVLGVS
NLLSTVLGVF

SEQ ID NO: 159580 - protein, 10 aa, Artificial Sequence
  Description of Artificial Sequence: Synthetic peptide
  Seed: NMLSTVLGVS
NLLSTVLGVG

SEQ ID NO: 159581 - protein, 10 aa, Artificial Sequence
  Description of Artificial Sequence: Synthetic peptide
  Seed: NMLSTVLGVS
NLLSTVLGVH

SEQ ID NO: 159582 - protein, 10 aa, Artificial Sequence
  Description of Artificial Sequence: Synthetic peptide
  Seed: NMLSTVLGVS
NLLSTVLGVI

SEQ ID NO: 159583 - protein, 10 aa, Artificial Sequence
  Description of Artificial Sequence: Synthetic peptide
  Seed: NMLSTVLGVS
NLLSTVLGVK

SEQ ID NO: 159584 - protein, 10 aa, Artificial Sequence
  Description of Artificial Sequence: Synthetic peptide
  Seed: NMLSTVLGVS
NLLSTVLGVL

SEQ ID NO: 159585 - protein, 10 aa, Artificial Sequence
  Description of Artificial Sequence: Synthetic peptide
  Seed: NMLSTVLGVS
NLLSTVLGVM

SEQ ID NO: 159586 - protein, 10 aa, Artificial Sequence
  Description of Artificial Sequence: Synthetic peptide
  Seed: NMLSTVLGVS
NLLSTVLGVN

SEQ ID NO: 159587 - protein, 10 aa, Artificial Sequence
  Description of Artificial Sequence: Synthetic peptide
  Seed: NMLSTVLGVS
NLLSTVLGVP

SEQ ID NO: 159588 - protein, 10 aa, Artificial Sequence
  Description of Artificial Sequence: Synthetic peptide
  Seed: NMLSTVLGVS
NLLSTVLGVQ

SEQ ID NO: 159589 - protein, 10 aa, Artificial Sequence
  Description of Artificial Sequence: Synthetic peptide
  Seed: NMLSTVLGVS
NLLSTVLGVR

SEQ ID NO: 159590 - protein, 10 aa, Artificial Sequence
  Description of Artificial Sequence: Synthetic peptide
  Seed: NMLSTVLGVS
NLLSTVLGVS

SEQ ID NO: 159591 - protein, 11 aa, Artificial Sequence
  Description of Artificial Sequence: Synthetic peptide
  Seed: NMLSTVLGVSI
NLLSTVLGVSA

SEQ ID NO: 159592 - protein, 11 aa, Artificial Sequence
  Description of Artificial Sequence: Synthetic peptide
  Seed: NMLSTVLGVSI
NLLSTVLGVSI

SEQ ID NO: 159593 - protein, 11 aa, Artificial Sequence
  Description of Artificial Sequence: Synthetic peptide
  Seed: NMLSTVLGVSI
NLLSTVLGVSL

SEQ ID NO: 159594 - protein, 11 aa, Artificial Sequence
  Description of Artificial Sequence: Synthetic peptide
  Seed: NMLSTVLGVSI
NLLSTVLGVSM

SEQ ID NO: 159595 - protein, 11 aa, Artificial Sequence
  Description of Artificial Sequence: Synthetic peptide
  Seed: NMLSTVLGVSI
NLLSTVLGVSV

SEQ ID NO: 159596 - protein, 10 aa, Artificial Sequence
  Description of Artificial Sequence: Synthetic peptide
  Seed: NMLSTVLGVS
NLLSTVLGVT

SEQ ID NO: 159597 - protein, 10 aa, Artificial Sequence
  Description of Artificial Sequence: Synthetic peptide
  Seed: NMLSTVLGVS
NLLSTVLGVV

SEQ ID NO: 159598 - protein, 10 aa, Artificial Sequence
  Description of Artificial Sequence: Synthetic peptide
  Seed: NMLSTVLGVS
NLLSTVLGVW

SEQ ID NO: 159599 - protein, 10 aa, Artificial Sequence
  Description of Artificial Sequence: Synthetic peptide
  Seed: NMLSTVLGVS
NLLSTVLGVY

SEQ ID NO: 159600 - protein, 9 aa, Artificial Sequence
  Description of Artificial Sequence: Synthetic peptide
  Seed: NTMTKDAER
NLMTKDAEK

SEQ ID NO: 159601 - protein, 9 aa, Artificial Sequence
  Description of Artificial Sequence: Synthetic peptide
  Seed: NTMTKDAER
NLMTKDAER

SEQ ID NO: 159602 - protein, 11 aa, Artificial Sequence
  Description of Artificial Sequence: Synthetic peptide
  Seed: NFSMELPSFGV
NLSMELPSFGI

SEQ ID NO: 159603 - protein, 11 aa, Artificial Sequence
  Description of Artificial Sequence: Synthetic peptide
  Seed: NFSMELPSFGV
NLSMELPSFGL

SEQ ID NO: 159604 - protein, 11 aa, Artificial Sequence
  Description of Artificial Sequence: Synthetic peptide
  Seed: NFSMELPSFGV
NLSMELPSFGV

SEQ ID NO: 159605 - protein, 9 aa, Artificial Sequence
  Description of Artificial Sequence: Synthetic peptide
  Seed: NAISTTFPY
NMISTTFPA

SEQ ID NO: 159606 - protein, 9 aa, Artificial Sequence
  Description of Artificial Sequence: Synthetic peptide
  Seed: NAISTTFPY
NMISTTFPF

SEQ ID NO: 159607 - protein, 9 aa, Artificial Sequence
  Description of Artificial Sequence: Synthetic peptide
  Seed: NAISTTFPY
NMISTTFPH

SEQ ID NO: 159608 - protein, 9 aa, Artificial Sequence
  Description of Artificial Sequence: Synthetic peptide
  Seed: NAISTTFPY
NMISTTFPI

SEQ ID NO: 159609 - protein, 9 aa, Artificial Sequence
  Description of Artificial Sequence: Synthetic peptide
  Seed: NAISTTFPY
NMISTTFPK

SEQ ID NO: 159610 - protein, 9 aa, Artificial Sequence
  Description of Artificial Sequence: Synthetic peptide
  Seed: NAISTTFPY
NMISTTFPL

SEQ ID NO: 159611 - protein, 9 aa, Artificial Sequence
  Description of Artificial Sequence: Synthetic peptide
  Seed: NAISTTFPY
NMISTTFPM

SEQ ID NO: 159612 - protein, 9 aa, Artificial Sequence
  Description of Artificial Sequence: Synthetic peptide
  Seed: NAISTTFPY
NMISTTFPR

SEQ ID NO: 159613 - protein, 9 aa, Artificial Sequence
  Description of Artificial Sequence: Synthetic peptide
  Seed: NAISTTFPY
NMISTTFPV

SEQ ID NO: 159614 - protein, 9 aa, Artificial Sequence
  Description of Artificial Sequence: Synthetic peptide
  Seed: NAISTTFPY
NMISTTFPW

SEQ ID NO: 159615 - protein, 10 aa, Artificial Sequence
  Description of Artificial Sequence: Synthetic peptide
  Seed: NAISTTFPYT
NMISTTFPYA

SEQ ID NO: 159616 - protein, 10 aa, Artificial Sequence
  Description of Artificial Sequence: Synthetic peptide
  Seed: NAISTTFPYT
NMISTTFPYC

SEQ ID NO: 159617 - protein, 10 aa, Artificial Sequence
  Description of Artificial Sequence: Synthetic peptide
  Seed: NAISTTFPYT
NMISTTFPYD

SEQ ID NO: 159618 - protein, 10 aa, Artificial Sequence
  Description of Artificial Sequence: Synthetic peptide
  Seed: NAISTTFPYT
NMISTTFPYE

SEQ ID NO: 159619 - protein, 10 aa, Artificial Sequence
  Description of Artificial Sequence: Synthetic peptide
  Seed: NAISTTFPYT
NMISTTFPYF

SEQ ID NO: 159620 - protein, 10 aa, Artificial Sequence
  Description of Artificial Sequence: Synthetic peptide
  Seed: NAISTTFPYT
NMISTTFPYG

SEQ ID NO: 159621 - protein, 10 aa, Artificial Sequence
  Description of Artificial Sequence: Synthetic peptide
  Seed: NAISTTFPYT
NMISTTFPYH

SEQ ID NO: 159622 - protein, 10 aa, Artificial Sequence
  Description of Artificial Sequence: Synthetic peptide
  Seed: NAISTTFPYT
NMISTTFPYI

SEQ ID NO: 159623 - protein, 10 aa, Artificial Sequence
  Description of Artificial Sequence: Synthetic peptide
  Seed: NAISTTFPYT
NMISTTFPYK

SEQ ID NO: 159624 - protein, 10 aa, Artificial Sequence
  Description of Artificial Sequence: Synthetic peptide
  Seed: NAISTTFPYT
NMISTTFPYL

SEQ ID NO: 159625 - protein, 10 aa, Artificial Sequence
  Description of Artificial Sequence: Synthetic peptide
  Seed: NAISTTFPYT
NMISTTFPYM

SEQ ID NO: 159626 - protein, 10 aa, Artificial Sequence
  Description of Artificial Sequence: Synthetic peptide
  Seed: NAISTTFPYT
NMISTTFPYN

SEQ ID NO: 159627 - protein, 10 aa, Artificial Sequence
  Description of Artificial Sequence: Synthetic peptide
  Seed: NAISTTFPYT
NMISTTFPYP

SEQ ID NO: 159628 - protein, 10 aa, Artificial Sequence
  Description of Artificial Sequence: Synthetic peptide
  Seed: NAISTTFPYT
NMISTTFPYQ

SEQ ID NO: 159629 - protein, 10 aa, Artificial Sequence
  Description of Artificial Sequence: Synthetic peptide
  Seed: NAISTTFPYT
NMISTTFPYR

SEQ ID NO: 159630 - protein, 10 aa, Artificial Sequence
  Description of Artificial Sequence: Synthetic peptide
  Seed: NAISTTFPYT
NMISTTFPYS

SEQ ID NO: 159631 - protein, 10 aa, Artificial Sequence
  Description of Artificial Sequence: Synthetic peptide
  Seed: NAISTTFPYT
NMISTTFPYT

SEQ ID NO: 159632 - protein, 10 aa, Artificial Sequence
  Description of Artificial Sequence: Synthetic peptide
  Seed: NAISTTFPYT
NMISTTFPYV

SEQ ID NO: 159633 - protein, 10 aa, Artificial Sequence
  Description of Artificial Sequence: Synthetic peptide
  Seed: NAISTTFPYT
NMISTTFPYW

SEQ ID NO: 159634 - protein, 10 aa, Artificial Sequence
  Description of Artificial Sequence: Synthetic peptide
  Seed: NAISTTFPYT
NMISTTFPYY

SEQ ID NO: 159635 - protein, 11 aa, Artificial Sequence
  Description of Artificial Sequence: Synthetic peptide
  Seed: NTKWNENQNPR
NMKWNENQNPR

SEQ ID NO: 159636 - protein, 9 aa, Artificial Sequence
  Description of Artificial Sequence: Synthetic peptide
  Seed: NMLSTVLGV
NMLSTVLGA

SEQ ID NO: 159637 - protein, 9 aa, Artificial Sequence
  Description of Artificial Sequence: Synthetic peptide
  Seed: NMLSTVLGV
NMLSTVLGC

SEQ ID NO: 159638 - protein, 9 aa, Artificial Sequence
  Description of Artificial Sequence: Synthetic peptide
  Seed: NMLSTVLGV
NMLSTVLGF

SEQ ID NO: 159639 - protein, 9 aa, Artificial Sequence
  Description of Artificial Sequence: Synthetic peptide
  Seed: NMLSTVLGV
NMLSTVLGI

SEQ ID NO: 159640 - protein, 9 aa, Artificial Sequence
  Description of Artificial Sequence: Synthetic peptide
  Seed: NMLSTVLGV
NMLSTVLGL

SEQ ID NO: 159641 - protein, 9 aa, Artificial Sequence
  Description of Artificial Sequence: Synthetic peptide
  Seed: NMLSTVLGV
NMLSTVLGM

SEQ ID NO: 159642 - protein, 9 aa, Artificial Sequence
  Description of Artificial Sequence: Synthetic peptide
  Seed: NMLSTVLGV
NMLSTVLGS

SEQ ID NO: 159643 - protein, 9 aa, Artificial Sequence
  Description of Artificial Sequence: Synthetic peptide
  Seed: NMLSTVLGV
NMLSTVLGT

SEQ ID NO: 159644 - protein, 10 aa, Artificial Sequence
  Description of Artificial Sequence: Synthetic peptide
  Seed: NMLSTVLGVS
NMLSTVLGVA

SEQ ID NO: 159645 - protein, 10 aa, Artificial Sequence
  Description of Artificial Sequence: Synthetic peptide
  Seed: NMLSTVLGVS
NMLSTVLGVC

SEQ ID NO: 159646 - protein, 10 aa, Artificial Sequence
  Description of Artificial Sequence: Synthetic peptide
  Seed: NMLSTVLGVS
NMLSTVLGVD

SEQ ID NO: 159647 - protein, 10 aa, Artificial Sequence
  Description of Artificial Sequence: Synthetic peptide
  Seed: NMLSTVLGVS
NMLSTVLGVE

SEQ ID NO: 159648 - protein, 10 aa, Artificial Sequence
  Description of Artificial Sequence: Synthetic peptide
  Seed: NMLSTVLGVS
NMLSTVLGVF

SEQ ID NO: 159649 - protein, 10 aa, Artificial Sequence
  Description of Artificial Sequence: Synthetic peptide
  Seed: NMLSTVLGVS
NMLSTVLGVG

SEQ ID NO: 159650 - protein, 10 aa, Artificial Sequence
  Description of Artificial Sequence: Synthetic peptide
  Seed: NMLSTVLGVS
NMLSTVLGVH

SEQ ID NO: 159651 - protein, 10 aa, Artificial Sequence
  Description of Artificial Sequence: Synthetic peptide
  Seed: NMLSTVLGVS
NMLSTVLGVI

SEQ ID NO: 159652 - protein, 10 aa, Artificial Sequence
  Description of Artificial Sequence: Synthetic peptide
  Seed: NMLSTVLGVS
NMLSTVLGVK

SEQ ID NO: 159653 - protein, 10 aa, Artificial Sequence
  Description of Artificial Sequence: Synthetic peptide
  Seed: NMLSTVLGVS
NMLSTVLGVL

SEQ ID NO: 159654 - protein, 10 aa, Artificial Sequence
  Description of Artificial Sequence: Synthetic peptide
  Seed: NMLSTVLGVS
NMLSTVLGVM

SEQ ID NO: 159655 - protein, 10 aa, Artificial Sequence
  Description of Artificial Sequence: Synthetic peptide
  Seed: NMLSTVLGVS
NMLSTVLGVN

SEQ ID NO: 159656 - protein, 10 aa, Artificial Sequence
  Description of Artificial Sequence: Synthetic peptide
  Seed: NMLSTVLGVS
NMLSTVLGVP

SEQ ID NO: 159657 - protein, 10 aa, Artificial Sequence
  Description of Artificial Sequence: Synthetic peptide
  Seed: NMLSTVLGVS
NMLSTVLGVQ

SEQ ID NO: 159658 - protein, 10 aa, Artificial Sequence
  Description of Artificial Sequence: Synthetic peptide
  Seed: NMLSTVLGVS
NMLSTVLGVR

SEQ ID NO: 159659 - protein, 11 aa, Artificial Sequence
  Description of Artificial Sequence: Synthetic peptide
  Seed: NMLSTVLGVSI
NMLSTVLGVSA

SEQ ID NO: 159660 - protein, 11 aa, Artificial Sequence
  Description of Artificial Sequence: Synthetic peptide
  Seed: NMLSTVLGVSI
NMLSTVLGVSL

SEQ ID NO: 159661 - protein, 11 aa, Artificial Sequence
  Description of Artificial Sequence: Synthetic peptide
  Seed: NMLSTVLGVSI
NMLSTVLGVSV

SEQ ID NO: 159662 - protein, 10 aa, Artificial Sequence
  Description of Artificial Sequence: Synthetic peptide
  Seed: NMLSTVLGVS
NMLSTVLGVT

SEQ ID NO: 159663 - protein, 10 aa, Artificial Sequence
  Description of Artificial Sequence: Synthetic peptide
  Seed: NMLSTVLGVS
NMLSTVLGVV

SEQ ID NO: 159664 - protein, 10 aa, Artificial Sequence
  Description of Artificial Sequence: Synthetic peptide
  Seed: NMLSTVLGVS
NMLSTVLGVW

SEQ ID NO: 159665 - protein, 10 aa, Artificial Sequence
  Description of Artificial Sequence: Synthetic peptide
  Seed: NMLSTVLGVS
NMLSTVLGVY

SEQ ID NO: 159666 - protein, 10 aa, Artificial Sequence
  Description of Artificial Sequence: Synthetic peptide
  Seed: NKMARLGKGY
NMMARLGKGY

SEQ ID NO: 159667 - protein, 9 aa, Artificial Sequence
  Description of Artificial Sequence: Synthetic peptide
  Seed: NTMTKDAER
NMMTKDAEK

SEQ ID NO: 159668 - protein, 9 aa, Artificial Sequence
  Description of Artificial Sequence: Synthetic peptide
  Seed: NTMTKDAER
NMMTKDAER

SEQ ID NO: 159669 - protein, 11 aa, Artificial Sequence
  Description of Artificial Sequence: Synthetic peptide
  Seed: NFSMELPSFGV
NMSMELPSFGI

SEQ ID NO: 159670 - protein, 11 aa, Artificial Sequence
  Description of Artificial Sequence: Synthetic peptide
  Seed: NFSMELPSFGV
NMSMELPSFGL

SEQ ID NO: 159671 - protein, 11 aa, Artificial Sequence
  Description of Artificial Sequence: Synthetic peptide
  Seed: NFSMELPSFGV
NMSMELPSFGV

SEQ ID NO: 159672 - protein, 9 aa, Artificial Sequence
  Description of Artificial Sequence: Synthetic peptide
  Seed: NAISTTFPY
NNISTTFPF

SEQ ID NO: 159673 - protein, 9 aa, Artificial Sequence
  Description of Artificial Sequence: Synthetic peptide
  Seed: NAISTTFPY
NNISTTFPK

SEQ ID NO: 159674 - protein, 9 aa, Artificial Sequence
  Description of Artificial Sequence: Synthetic peptide
  Seed: NAISTTFPY
NNISTTFPM

SEQ ID NO: 159675 - protein, 9 aa, Artificial Sequence
  Description of Artificial Sequence: Synthetic peptide
  Seed: NAISTTFPY
NNISTTFPR

SEQ ID NO: 159676 - protein, 9 aa, Artificial Sequence
  Description of Artificial Sequence: Synthetic peptide
  Seed: NAISTTFPY
NNISTTFPW

SEQ ID NO: 159677 - protein, 9 aa, Artificial Sequence
  Description of Artificial Sequence: Synthetic peptide
  Seed: NAISTTFPY
NNISTTFPY

SEQ ID NO: 159678 - protein, 10 aa, Artificial Sequence
  Description of Artificial Sequence: Synthetic peptide
  Seed: NAISTTFPYT
NNISTTFPYI

SEQ ID NO: 159679 - protein, 10 aa, Artificial Sequence
  Description of Artificial Sequence: Synthetic peptide
  Seed: NAISTTFPYT
NNISTTFPYV

SEQ ID NO: 159680 - protein, 10 aa, Artificial Sequence
  Description of Artificial Sequence: Synthetic peptide
  Seed: NMLSTVLGVS
NNLSTVLGVA

SEQ ID NO: 159681 - protein, 10 aa, Artificial Sequence
  Description of Artificial Sequence: Synthetic peptide
  Seed: NMLSTVLGVS
NNLSTVLGVI

SEQ ID NO: 159682 - protein, 10 aa, Artificial Sequence
  Description of Artificial Sequence: Synthetic peptide
  Seed: NMLSTVLGVS
NNLSTVLGVL

SEQ ID NO: 159683 - protein, 10 aa, Artificial Sequence
  Description of Artificial Sequence: Synthetic peptide
  Seed: NMLSTVLGVS
NNLSTVLGVV

SEQ ID NO: 159684 - protein, 9 aa, Artificial Sequence
  Description of Artificial Sequence: Synthetic peptide
  Seed: NTMTKDAER
NNMTKDAER

SEQ ID NO: 159685 - protein, 9 aa, Artificial Sequence
  Description of Artificial Sequence: Synthetic peptide
  Seed: NAISTTFPY
NPISTTFPA

SEQ ID NO: 159686 - protein, 9 aa, Artificial Sequence
  Description of Artificial Sequence: Synthetic peptide
  Seed: NAISTTFPY
NPISTTFPC

SEQ ID NO: 159687 - protein, 9 aa, Artificial Sequence
  Description of Artificial Sequence: Synthetic peptide
  Seed: NAISTTFPY
NPISTTFPD

SEQ ID NO: 159688 - protein, 9 aa, Artificial Sequence
  Description of Artificial Sequence: Synthetic peptide
  Seed: NAISTTFPY
NPISTTFPE

SEQ ID NO: 159689 - protein, 9 aa, Artificial Sequence
  Description of Artificial Sequence: Synthetic peptide
  Seed: NAISTTFPY
NPISTTFPF

SEQ ID NO: 159690 - protein, 9 aa, Artificial Sequence
  Description of Artificial Sequence: Synthetic peptide
  Seed: NAISTTFPY
NPISTTFPG

SEQ ID NO: 159691 - protein, 9 aa, Artificial Sequence
  Description of Artificial Sequence: Synthetic peptide
  Seed: NAISTTFPY
NPISTTFPH

SEQ ID NO: 159692 - protein, 9 aa, Artificial Sequence
  Description of Artificial Sequence: Synthetic peptide
  Seed: NAISTTFPY
NPISTTFPI

SEQ ID NO: 159693 - protein, 9 aa, Artificial Sequence
  Description of Artificial Sequence: Synthetic peptide
  Seed: NAISTTFPY
NPISTTFPK

SEQ ID NO: 159694 - protein, 9 aa, Artificial Sequence
  Description of Artificial Sequence: Synthetic peptide
  Seed: NAISTTFPY
NPISTTFPL

SEQ ID NO: 159695 - protein, 9 aa, Artificial Sequence
  Description of Artificial Sequence: Synthetic peptide
  Seed: NAISTTFPY
NPISTTFPM

SEQ ID NO: 159696 - protein, 9 aa, Artificial Sequence
  Description of Artificial Sequence: Synthetic peptide
  Seed: NAISTTFPY
NPISTTFPN

SEQ ID NO: 159697 - protein, 9 aa, Artificial Sequence
  Description of Artificial Sequence: Synthetic peptide
  Seed: NAISTTFPY
NPISTTFPP

SEQ ID NO: 159698 - protein, 9 aa, Artificial Sequence
  Description of Artificial Sequence: Synthetic peptide
  Seed: NAISTTFPY
NPISTTFPQ

SEQ ID NO: 159699 - protein, 9 aa, Artificial Sequence
  Description of Artificial Sequence: Synthetic peptide
  Seed: NAISTTFPY
NPISTTFPR

SEQ ID NO: 159700 - protein, 9 aa, Artificial Sequence
  Description of Artificial Sequence: Synthetic peptide
  Seed: NAISTTFPY
NPISTTFPS

SEQ ID NO: 159701 - protein, 9 aa, Artificial Sequence
  Description of Artificial Sequence: Synthetic peptide
  Seed: NAISTTFPY
NPISTTFPT

SEQ ID NO: 159702 - protein, 9 aa, Artificial Sequence
  Description of Artificial Sequence: Synthetic peptide
  Seed: NAISTTFPY
NPISTTFPV

SEQ ID NO: 159703 - protein, 9 aa, Artificial Sequence
  Description of Artificial Sequence: Synthetic peptide
  Seed: NAISTTFPY
NPISTTFPW

SEQ ID NO: 159704 - protein, 9 aa, Artificial Sequence
  Description of Artificial Sequence: Synthetic peptide
  Seed: NAISTTFPY
NPISTTFPY

SEQ ID NO: 159705 - protein, 10 aa, Artificial Sequence
  Description of Artificial Sequence: Synthetic peptide
  Seed: NAISTTFPYT
NPISTTFPYA

SEQ ID NO: 159706 - protein, 10 aa, Artificial Sequence
  Description of Artificial Sequence: Synthetic peptide
  Seed: NAISTTFPYT
NPISTTFPYC

SEQ ID NO: 159707 - protein, 10 aa, Artificial Sequence
  Description of Artificial Sequence: Synthetic peptide
  Seed: NAISTTFPYT
NPISTTFPYD

SEQ ID NO: 159708 - protein, 10 aa, Artificial Sequence
  Description of Artificial Sequence: Synthetic peptide
  Seed: NAISTTFPYT
NPISTTFPYE

SEQ ID NO: 159709 - protein, 10 aa, Artificial Sequence
  Description of Artificial Sequence: Synthetic peptide
  Seed: NAISTTFPYT
NPISTTFPYF

SEQ ID NO: 159710 - protein, 10 aa, Artificial Sequence
  Description of Artificial Sequence: Synthetic peptide
  Seed: NAISTTFPYT
NPISTTFPYG

SEQ ID NO: 159711 - protein, 10 aa, Artificial Sequence
  Description of Artificial Sequence: Synthetic peptide
  Seed: NAISTTFPYT
NPISTTFPYH

SEQ ID NO: 159712 - protein, 10 aa, Artificial Sequence
  Description of Artificial Sequence: Synthetic peptide
  Seed: NAISTTFPYT
NPISTTFPYI

SEQ ID NO: 159713 - protein, 10 aa, Artificial Sequence
  Description of Artificial Sequence: Synthetic peptide
  Seed: NAISTTFPYT
NPISTTFPYK

SEQ ID NO: 159714 - protein, 10 aa, Artificial Sequence
  Description of Artificial Sequence: Synthetic peptide
  Seed: NAISTTFPYT
NPISTTFPYL

SEQ ID NO: 159715 - protein, 10 aa, Artificial Sequence
  Description of Artificial Sequence: Synthetic peptide
  Seed: NAISTTFPYT
NPISTTFPYM

SEQ ID NO: 159716 - protein, 10 aa, Artificial Sequence
  Description of Artificial Sequence: Synthetic peptide
  Seed: NAISTTFPYT
NPISTTFPYN

SEQ ID NO: 159717 - protein, 10 aa, Artificial Sequence
  Description of Artificial Sequence: Synthetic peptide
  Seed: NAISTTFPYT
NPISTTFPYP

SEQ ID NO: 159718 - protein, 10 aa, Artificial Sequence
  Description of Artificial Sequence: Synthetic peptide
  Seed: NAISTTFPYT
NPISTTFPYQ

SEQ ID NO: 159719 - protein, 10 aa, Artificial Sequence
  Description of Artificial Sequence: Synthetic peptide
  Seed: NAISTTFPYT
NPISTTFPYR

SEQ ID NO: 159720 - protein, 10 aa, Artificial Sequence
  Description of Artificial Sequence: Synthetic peptide
  Seed: NAISTTFPYT
NPISTTFPYS

SEQ ID NO: 159721 - protein, 10 aa, Artificial Sequence
  Description of Artificial Sequence: Synthetic peptide
  Seed: NAISTTFPYT
NPISTTFPYT

SEQ ID NO: 159722 - protein, 10 aa, Artificial Sequence
  Description of Artificial Sequence: Synthetic peptide
  Seed: NAISTTFPYT
NPISTTFPYV

SEQ ID NO: 159723 - protein, 10 aa, Artificial Sequence
  Description of Artificial Sequence: Synthetic peptide
  Seed: NAISTTFPYT
NPISTTFPYW

SEQ ID NO: 159724 - protein, 10 aa, Artificial Sequence
  Description of Artificial Sequence: Synthetic peptide
  Seed: NAISTTFPYT
NPISTTFPYY

SEQ ID NO: 159725 - protein, 10 aa, Artificial Sequence
  Description of Artificial Sequence: Synthetic peptide
  Seed: NMLSTVLGVS
NPLSTVLGVA

SEQ ID NO: 159726 - protein, 10 aa, Artificial Sequence
  Description of Artificial Sequence: Synthetic peptide
  Seed: NMLSTVLGVS
NPLSTVLGVI

SEQ ID NO: 159727 - protein, 10 aa, Artificial Sequence
  Description of Artificial Sequence: Synthetic peptide
  Seed: NMLSTVLGVS
NPLSTVLGVL

SEQ ID NO: 159728 - protein, 10 aa, Artificial Sequence
  Description of Artificial Sequence: Synthetic peptide
  Seed: NMLSTVLGVS
NPLSTVLGVV

SEQ ID NO: 159729 - protein, 9 aa, Artificial Sequence
  Description of Artificial Sequence: Synthetic peptide
  Seed: NAISTTFPY
NQISTTFPA

SEQ ID NO: 159730 - protein, 9 aa, Artificial Sequence
  Description of Artificial Sequence: Synthetic peptide
  Seed: NAISTTFPY
NQISTTFPC

SEQ ID NO: 159731 - protein, 9 aa, Artificial Sequence
  Description of Artificial Sequence: Synthetic peptide
  Seed: NAISTTFPY
NQISTTFPF

SEQ ID NO: 159732 - protein, 9 aa, Artificial Sequence
  Description of Artificial Sequence: Synthetic peptide
  Seed: NAISTTFPY
NQISTTFPG

SEQ ID NO: 159733 - protein, 9 aa, Artificial Sequence
  Description of Artificial Sequence: Synthetic peptide
  Seed: NAISTTFPY
NQISTTFPH

SEQ ID NO: 159734 - protein, 9 aa, Artificial Sequence
  Description of Artificial Sequence: Synthetic peptide
  Seed: NAISTTFPY
NQISTTFPI

SEQ ID NO: 159735 - protein, 9 aa, Artificial Sequence
  Description of Artificial Sequence: Synthetic peptide
  Seed: NAISTTFPY
NQISTTFPK

SEQ ID NO: 159736 - protein, 9 aa, Artificial Sequence
  Description of Artificial Sequence: Synthetic peptide
  Seed: NAISTTFPY
NQISTTFPL

SEQ ID NO: 159737 - protein, 9 aa, Artificial Sequence
  Description of Artificial Sequence: Synthetic peptide
  Seed: NAISTTFPY
NQISTTFPM

SEQ ID NO: 159738 - protein, 9 aa, Artificial Sequence
  Description of Artificial Sequence: Synthetic peptide
  Seed: NAISTTFPY
NQISTTFPR

SEQ ID NO: 159739 - protein, 9 aa, Artificial Sequence
  Description of Artificial Sequence: Synthetic peptide
  Seed: NAISTTFPY
NQISTTFPT

SEQ ID NO: 159740 - protein, 9 aa, Artificial Sequence
  Description of Artificial Sequence: Synthetic peptide
  Seed: NAISTTFPY
NQISTTFPV

SEQ ID NO: 159741 - protein, 9 aa, Artificial Sequence
  Description of Artificial Sequence: Synthetic peptide
  Seed: NAISTTFPY
NQISTTFPW

SEQ ID NO: 159742 - protein, 9 aa, Artificial Sequence
  Description of Artificial Sequence: Synthetic peptide
  Seed: NAISTTFPY
NQISTTFPY

SEQ ID NO: 159743 - protein, 10 aa, Artificial Sequence
  Description of Artificial Sequence: Synthetic peptide
  Seed: NAISTTFPYT
NQISTTFPYA

SEQ ID NO: 159744 - protein, 10 aa, Artificial Sequence
  Description of Artificial Sequence: Synthetic peptide
  Seed: NAISTTFPYT
NQISTTFPYC

SEQ ID NO: 159745 - protein, 10 aa, Artificial Sequence
  Description of Artificial Sequence: Synthetic peptide
  Seed: NAISTTFPYT
NQISTTFPYD

SEQ ID NO: 159746 - protein, 10 aa, Artificial Sequence
  Description of Artificial Sequence: Synthetic peptide
  Seed: NAISTTFPYT
NQISTTFPYE

SEQ ID NO: 159747 - protein, 10 aa, Artificial Sequence
  Description of Artificial Sequence: Synthetic peptide
  Seed: NAISTTFPYT
NQISTTFPYF

SEQ ID NO: 159748 - protein, 10 aa, Artificial Sequence
  Description of Artificial Sequence: Synthetic peptide
  Seed: NAISTTFPYT
NQISTTFPYG

SEQ ID NO: 159749 - protein, 10 aa, Artificial Sequence
  Description of Artificial Sequence: Synthetic peptide
  Seed: NAISTTFPYT
NQISTTFPYH

SEQ ID NO: 159750 - protein, 10 aa, Artificial Sequence
  Description of Artificial Sequence: Synthetic peptide
  Seed: NAISTTFPYT
NQISTTFPYI

SEQ ID NO: 159751 - protein, 10 aa, Artificial Sequence
  Description of Artificial Sequence: Synthetic peptide
  Seed: NAISTTFPYT
NQISTTFPYK

SEQ ID NO: 159752 - protein, 10 aa, Artificial Sequence
  Description of Artificial Sequence: Synthetic peptide
  Seed: NAISTTFPYT
NQISTTFPYL

SEQ ID NO: 159753 - protein, 10 aa, Artificial Sequence
  Description of Artificial Sequence: Synthetic peptide
  Seed: NAISTTFPYT
NQISTTFPYM

SEQ ID NO: 159754 - protein, 10 aa, Artificial Sequence
  Description of Artificial Sequence: Synthetic peptide
  Seed: NAISTTFPYT
NQISTTFPYN

SEQ ID NO: 159755 - protein, 10 aa, Artificial Sequence
  Description of Artificial Sequence: Synthetic peptide
  Seed: NAISTTFPYT
NQISTTFPYP

SEQ ID NO: 159756 - protein, 10 aa, Artificial Sequence
  Description of Artificial Sequence: Synthetic peptide
  Seed: NAISTTFPYT
NQISTTFPYQ

SEQ ID NO: 159757 - protein, 10 aa, Artificial Sequence
  Description of Artificial Sequence: Synthetic peptide
  Seed: NAISTTFPYT
NQISTTFPYR

SEQ ID NO: 159758 - protein, 10 aa, Artificial Sequence
  Description of Artificial Sequence: Synthetic peptide
  Seed: NAISTTFPYT
NQISTTFPYS

SEQ ID NO: 159759 - protein, 10 aa, Artificial Sequence
  Description of Artificial Sequence: Synthetic peptide
  Seed: NAISTTFPYT
NQISTTFPYT

SEQ ID NO: 159760 - protein, 10 aa, Artificial Sequence
  Description of Artificial Sequence: Synthetic peptide
  Seed: NAISTTFPYT
NQISTTFPYV

SEQ ID NO: 159761 - protein, 10 aa, Artificial Sequence
  Description of Artificial Sequence: Synthetic peptide
  Seed: NAISTTFPYT
NQISTTFPYW

SEQ ID NO: 159762 - protein, 10 aa, Artificial Sequence
  Description of Artificial Sequence: Synthetic peptide
  Seed: NAISTTFPYT
NQISTTFPYY

SEQ ID NO: 159763 - protein, 9 aa, Artificial Sequence
  Description of Artificial Sequence: Synthetic peptide
  Seed: NMLSTVLGV
NQLSTVLGA

SEQ ID NO: 159764 - protein, 9 aa, Artificial Sequence
  Description of Artificial Sequence: Synthetic peptide
  Seed: NMLSTVLGV
NQLSTVLGC

SEQ ID NO: 159765 - protein, 9 aa, Artificial Sequence
  Description of Artificial Sequence: Synthetic peptide
  Seed: NMLSTVLGV
NQLSTVLGF

SEQ ID NO: 159766 - protein, 9 aa, Artificial Sequence
  Description of Artificial Sequence: Synthetic peptide
  Seed: NMLSTVLGV
NQLSTVLGI

SEQ ID NO: 159767 - protein, 9 aa, Artificial Sequence
  Description of Artificial Sequence: Synthetic peptide
  Seed: NMLSTVLGV
NQLSTVLGL

SEQ ID NO: 159768 - protein, 9 aa, Artificial Sequence
  Description of Artificial Sequence: Synthetic peptide
  Seed: NMLSTVLGV
NQLSTVLGM

SEQ ID NO: 159769 - protein, 9 aa, Artificial Sequence
  Description of Artificial Sequence: Synthetic peptide
  Seed: NMLSTVLGV
NQLSTVLGT

SEQ ID NO: 159770 - protein, 9 aa, Artificial Sequence
  Description of Artificial Sequence: Synthetic peptide
  Seed: NMLSTVLGV
NQLSTVLGV

SEQ ID NO: 159771 - protein, 10 aa, Artificial Sequence
  Description of Artificial Sequence: Synthetic peptide
  Seed: NMLSTVLGVS
NQLSTVLGVA

SEQ ID NO: 159772 - protein, 10 aa, Artificial Sequence
  Description of Artificial Sequence: Synthetic peptide
  Seed: NMLSTVLGVS
NQLSTVLGVI

SEQ ID NO: 159773 - protein, 10 aa, Artificial Sequence
  Description of Artificial Sequence: Synthetic peptide
  Seed: NMLSTVLGVS
NQLSTVLGVL

SEQ ID NO: 159774 - protein, 11 aa, Artificial Sequence
  Description of Artificial Sequence: Synthetic peptide
  Seed: NMLSTVLGVSI
NQLSTVLGVSV

SEQ ID NO: 159775 - protein, 10 aa, Artificial Sequence
  Description of Artificial Sequence: Synthetic peptide
  Seed: NMLSTVLGVS
NQLSTVLGVV

SEQ ID NO: 159776 - protein, 10 aa, Artificial Sequence
  Description of Artificial Sequence: Synthetic peptide
  Seed: NKMARLGKGY
NQMARLGKGY

SEQ ID NO: 159777 - protein, 9 aa, Artificial Sequence
  Description of Artificial Sequence: Synthetic peptide
  Seed: NTMTKDAER
NQMTKDAER

SEQ ID NO: 159778 - protein, 9 aa, Artificial Sequence
  Description of Artificial Sequence: Synthetic peptide
  Seed: NAISTTFPY
NRISTTFPF

SEQ ID NO: 159779 - protein, 9 aa, Artificial Sequence
  Description of Artificial Sequence: Synthetic peptide
  Seed: NAISTTFPY
NRISTTFPI

SEQ ID NO: 159780 - protein, 9 aa, Artificial Sequence
  Description of Artificial Sequence: Synthetic peptide
  Seed: NAISTTFPY
NRISTTFPL

SEQ ID NO: 159781 - protein, 9 aa, Artificial Sequence
  Description of Artificial Sequence: Synthetic peptide
  Seed: NAISTTFPY
NRISTTFPM

SEQ ID NO: 159782 - protein, 9 aa, Artificial Sequence
  Description of Artificial Sequence: Synthetic peptide
  Seed: NAISTTFPY
NRISTTFPW

SEQ ID NO: 159783 - protein, 9 aa, Artificial Sequence
  Description of Artificial Sequence: Synthetic peptide
  Seed: NAISTTFPY
NRISTTFPY

SEQ ID NO: 159784 - protein, 10 aa, Artificial Sequence
  Description of Artificial Sequence: Synthetic peptide
  Seed: NAISTTFPYT
NRISTTFPYV

SEQ ID NO: 159785 - protein, 10 aa, Artificial Sequence
  Description of Artificial Sequence: Synthetic peptide
  Seed: NMLSTVLGVS
NRLSTVLGVA

SEQ ID NO: 159786 - protein, 10 aa, Artificial Sequence
  Description of Artificial Sequence: Synthetic peptide
  Seed: NMLSTVLGVS
NRLSTVLGVI

SEQ ID NO: 159787 - protein, 10 aa, Artificial Sequence
  Description of Artificial Sequence: Synthetic peptide
  Seed: NMLSTVLGVS
NRLSTVLGVL

SEQ ID NO: 159788 - protein, 11 aa, Artificial Sequence
  Description of Artificial Sequence: Synthetic peptide
  Seed: NMLSTVLGVSI
NRLSTVLGVSL

SEQ ID NO: 159789 - protein, 11 aa, Artificial Sequence
  Description of Artificial Sequence: Synthetic peptide
  Seed: NMLSTVLGVSI
NRLSTVLGVSV

SEQ ID NO: 159790 - protein, 10 aa, Artificial Sequence
  Description of Artificial Sequence: Synthetic peptide
  Seed: NMLSTVLGVS
NRLSTVLGVV

SEQ ID NO: 159791 - protein, 10 aa, Artificial Sequence
  Description of Artificial Sequence: Synthetic peptide
  Seed: NKMARLGKGY
NRMARLGKGY

SEQ ID NO: 159792 - protein, 9 aa, Artificial Sequence
  Description of Artificial Sequence: Synthetic peptide
  Seed: NAISTTFPY
NSISTTFPA

SEQ ID NO: 159793 - protein, 9 aa, Artificial Sequence
  Description of Artificial Sequence: Synthetic peptide
  Seed: NAISTTFPY
NSISTTFPF

SEQ ID NO: 159794 - protein, 9 aa, Artificial Sequence
  Description of Artificial Sequence: Synthetic peptide
  Seed: NAISTTFPY
NSISTTFPH

SEQ ID NO: 159795 - protein, 9 aa, Artificial Sequence
  Description of Artificial Sequence: Synthetic peptide
  Seed: NAISTTFPY
NSISTTFPI

SEQ ID NO: 159796 - protein, 9 aa, Artificial Sequence
  Description of Artificial Sequence: Synthetic peptide
  Seed: NAISTTFPY
NSISTTFPK

SEQ ID NO: 159797 - protein, 9 aa, Artificial Sequence
  Description of Artificial Sequence: Synthetic peptide
  Seed: NAISTTFPY
NSISTTFPL

SEQ ID NO: 159798 - protein, 9 aa, Artificial Sequence
  Description of Artificial Sequence: Synthetic peptide
  Seed: NAISTTFPY
NSISTTFPM

SEQ ID NO: 159799 - protein, 9 aa, Artificial Sequence
  Description of Artificial Sequence: Synthetic peptide
  Seed: NAISTTFPY
NSISTTFPQ

SEQ ID NO: 159800 - protein, 9 aa, Artificial Sequence
  Description of Artificial Sequence: Synthetic peptide
  Seed: NAISTTFPY
NSISTTFPR

SEQ ID NO: 159801 - protein, 9 aa, Artificial Sequence
  Description of Artificial Sequence: Synthetic peptide
  Seed: NAISTTFPY
NSISTTFPV

SEQ ID NO: 159802 - protein, 9 aa, Artificial Sequence
  Description of Artificial Sequence: Synthetic peptide
  Seed: NAISTTFPY
NSISTTFPW

SEQ ID NO: 159803 - protein, 9 aa, Artificial Sequence
  Description of Artificial Sequence: Synthetic peptide
  Seed: NAISTTFPY
NSISTTFPY

SEQ ID NO: 159804 - protein, 10 aa, Artificial Sequence
  Description of Artificial Sequence: Synthetic peptide
  Seed: NAISTTFPYT
NSISTTFPYA

SEQ ID NO: 159805 - protein, 10 aa, Artificial Sequence
  Description of Artificial Sequence: Synthetic peptide
  Seed: NAISTTFPYT
NSISTTFPYF

SEQ ID NO: 159806 - protein, 10 aa, Artificial Sequence
  Description of Artificial Sequence: Synthetic peptide
  Seed: NAISTTFPYT
NSISTTFPYI

SEQ ID NO: 159807 - protein, 10 aa, Artificial Sequence
  Description of Artificial Sequence: Synthetic peptide
  Seed: NAISTTFPYT
NSISTTFPYL

SEQ ID NO: 159808 - protein, 10 aa, Artificial Sequence
  Description of Artificial Sequence: Synthetic peptide
  Seed: NAISTTFPYT
NSISTTFPYM

SEQ ID NO: 159809 - protein, 10 aa, Artificial Sequence
  Description of Artificial Sequence: Synthetic peptide
  Seed: NAISTTFPYT
NSISTTFPYT

SEQ ID NO: 159810 - protein, 10 aa, Artificial Sequence
  Description of Artificial Sequence: Synthetic peptide
  Seed: NAISTTFPYT
NSISTTFPYV

SEQ ID NO: 159811 - protein, 10 aa, Artificial Sequence
  Description of Artificial Sequence: Synthetic peptide
  Seed: NAISTTFPYT
NSISTTFPYY

SEQ ID NO: 159812 - protein, 9 aa, Artificial Sequence
  Description of Artificial Sequence: Synthetic peptide
  Seed: NMLSTVLGV
NSLSTVLGI

SEQ ID NO: 159813 - protein, 9 aa, Artificial Sequence
  Description of Artificial Sequence: Synthetic peptide
  Seed: NMLSTVLGV
NSLSTVLGL

SEQ ID NO: 159814 - protein, 9 aa, Artificial Sequence
  Description of Artificial Sequence: Synthetic peptide
  Seed: NMLSTVLGV
NSLSTVLGV

SEQ ID NO: 159815 - protein, 10 aa, Artificial Sequence
  Description of Artificial Sequence: Synthetic peptide
  Seed: NMLSTVLGVS
NSLSTVLGVA

SEQ ID NO: 159816 - protein, 10 aa, Artificial Sequence
  Description of Artificial Sequence: Synthetic peptide
  Seed: NMLSTVLGVS
NSLSTVLGVI

SEQ ID NO: 159817 - protein, 10 aa, Artificial Sequence
  Description of Artificial Sequence: Synthetic peptide
  Seed: NMLSTVLGVS
NSLSTVLGVL

SEQ ID NO: 159818 - protein, 10 aa, Artificial Sequence
  Description of Artificial Sequence: Synthetic peptide
  Seed: NMLSTVLGVS
NSLSTVLGVM

SEQ ID NO: 159819 - protein, 11 aa, Artificial Sequence
  Description of Artificial Sequence: Synthetic peptide
  Seed: NMLSTVLGVSI
NSLSTVLGVSI

SEQ ID NO: 159820 - protein, 11 aa, Artificial Sequence
  Description of Artificial Sequence: Synthetic peptide
  Seed: NMLSTVLGVSI
NSLSTVLGVSL

SEQ ID NO: 159821 - protein, 11 aa, Artificial Sequence
  Description of Artificial Sequence: Synthetic peptide
  Seed: NMLSTVLGVSI
NSLSTVLGVSV

SEQ ID NO: 159822 - protein, 10 aa, Artificial Sequence
  Description of Artificial Sequence: Synthetic peptide
  Seed: NMLSTVLGVS
NSLSTVLGVV

SEQ ID NO: 159823 - protein, 10 aa, Artificial Sequence
  Description of Artificial Sequence: Synthetic peptide
  Seed: NKMARLGKGY
NSMARLGKGY

SEQ ID NO: 159824 - protein, 9 aa, Artificial Sequence
  Description of Artificial Sequence: Synthetic peptide
  Seed: NTMTKDAER
NSMTKDAEK

SEQ ID NO: 159825 - protein, 9 aa, Artificial Sequence
  Description of Artificial Sequence: Synthetic peptide
  Seed: NTMTKDAER
NSMTKDAER

SEQ ID NO: 159826 - protein, 11 aa, Artificial Sequence
  Description of Artificial Sequence: Synthetic peptide
  Seed: NTMTKDAERGK
NSMTKDAERGR

SEQ ID NO: 159827 - protein, 11 aa, Artificial Sequence
  Description of Artificial Sequence: Synthetic peptide
  Seed: NFSMELPSFGV
NSSMELPSFGV

SEQ ID NO: 159828 - protein, 9 aa, Artificial Sequence
  Description of Artificial Sequence: Synthetic peptide
  Seed: NAISTTFPY
NTISTTFPA

SEQ ID NO: 159829 - protein, 9 aa, Artificial Sequence
  Description of Artificial Sequence: Synthetic peptide
  Seed: NAISTTFPY
NTISTTFPE

SEQ ID NO: 159830 - protein, 9 aa, Artificial Sequence
  Description of Artificial Sequence: Synthetic peptide
  Seed: NAISTTFPY
NTISTTFPF

SEQ ID NO: 159831 - protein, 9 aa, Artificial Sequence
  Description of Artificial Sequence: Synthetic peptide
  Seed: NAISTTFPY
NTISTTFPH

SEQ ID NO: 159832 - protein, 9 aa, Artificial Sequence
  Description of Artificial Sequence: Synthetic peptide
  Seed: NAISTTFPY
NTISTTFPI

SEQ ID NO: 159833 - protein, 9 aa, Artificial Sequence
  Description of Artificial Sequence: Synthetic peptide
  Seed: NAISTTFPY
NTISTTFPK

SEQ ID NO: 159834 - protein, 9 aa, Artificial Sequence
  Description of Artificial Sequence: Synthetic peptide
  Seed: NAISTTFPY
NTISTTFPL

SEQ ID NO: 159835 - protein, 9 aa, Artificial Sequence
  Description of Artificial Sequence: Synthetic peptide
  Seed: NAISTTFPY
NTISTTFPQ

SEQ ID NO: 159836 - protein, 9 aa, Artificial Sequence
  Description of Artificial Sequence: Synthetic peptide
  Seed: NAISTTFPY
NTISTTFPR

SEQ ID NO: 159837 - protein, 9 aa, Artificial Sequence
  Description of Artificial Sequence: Synthetic peptide
  Seed: NAISTTFPY
NTISTTFPS

SEQ ID NO: 159838 - protein, 9 aa, Artificial Sequence
  Description of Artificial Sequence: Synthetic peptide
  Seed: NAISTTFPY
NTISTTFPT

SEQ ID NO: 159839 - protein, 9 aa, Artificial Sequence
  Description of Artificial Sequence: Synthetic peptide
  Seed: NAISTTFPY
NTISTTFPV

SEQ ID NO: 159840 - protein, 9 aa, Artificial Sequence
  Description of Artificial Sequence: Synthetic peptide
  Seed: NAISTTFPY
NTISTTFPW

SEQ ID NO: 159841 - protein, 10 aa, Artificial Sequence
  Description of Artificial Sequence: Synthetic peptide
  Seed: NAISTTFPYT
NTISTTFPYA

SEQ ID NO: 159842 - protein, 10 aa, Artificial Sequence
  Description of Artificial Sequence: Synthetic peptide
  Seed: NAISTTFPYT
NTISTTFPYC

SEQ ID NO: 159843 - protein, 10 aa, Artificial Sequence
  Description of Artificial Sequence: Synthetic peptide
  Seed: NAISTTFPYT
NTISTTFPYF

SEQ ID NO: 159844 - protein, 10 aa, Artificial Sequence
  Description of Artificial Sequence: Synthetic peptide
  Seed: NAISTTFPYT
NTISTTFPYI

SEQ ID NO: 159845 - protein, 10 aa, Artificial Sequence
  Description of Artificial Sequence: Synthetic peptide
  Seed: NAISTTFPYT
NTISTTFPYL

SEQ ID NO: 159846 - protein, 10 aa, Artificial Sequence
  Description of Artificial Sequence: Synthetic peptide
  Seed: NAISTTFPYT
NTISTTFPYM

SEQ ID NO: 159847 - protein, 10 aa, Artificial Sequence
  Description of Artificial Sequence: Synthetic peptide
  Seed: NAISTTFPYT
NTISTTFPYS

SEQ ID NO: 159848 - protein, 10 aa, Artificial Sequence
  Description of Artificial Sequence: Synthetic peptide
  Seed: NAISTTFPYT
NTISTTFPYT

SEQ ID NO: 159849 - protein, 10 aa, Artificial Sequence
  Description of Artificial Sequence: Synthetic peptide
  Seed: NAISTTFPYT
NTISTTFPYV

SEQ ID NO: 159850 - protein, 10 aa, Artificial Sequence
  Description of Artificial Sequence: Synthetic peptide
  Seed: NAISTTFPYT
NTISTTFPYY

SEQ ID NO: 159851 - protein, 11 aa, Artificial Sequence
  Description of Artificial Sequence: Synthetic peptide
  Seed: NTKWNENQNPR
NTKWNENQNPK

SEQ ID NO: 159852 - protein, 9 aa, Artificial Sequence
  Description of Artificial Sequence: Synthetic peptide
  Seed: NMLSTVLGV
NTLSTVLGA

SEQ ID NO: 159853 - protein, 9 aa, Artificial Sequence
  Description of Artificial Sequence: Synthetic peptide
  Seed: NMLSTVLGV
NTLSTVLGI

SEQ ID NO: 159854 - protein, 9 aa, Artificial Sequence
  Description of Artificial Sequence: Synthetic peptide
  Seed: NMLSTVLGV
NTLSTVLGL

SEQ ID NO: 159855 - protein, 9 aa, Artificial Sequence
  Description of Artificial Sequence: Synthetic peptide
  Seed: NMLSTVLGV
NTLSTVLGM

SEQ ID NO: 159856 - protein, 9 aa, Artificial Sequence
  Description of Artificial Sequence: Synthetic peptide
  Seed: NMLSTVLGV
NTLSTVLGT

SEQ ID NO: 159857 - protein, 9 aa, Artificial Sequence
  Description of Artificial Sequence: Synthetic peptide
  Seed: NMLSTVLGV
NTLSTVLGV

SEQ ID NO: 159858 - protein, 10 aa, Artificial Sequence
  Description of Artificial Sequence: Synthetic peptide
  Seed: NMLSTVLGVS
NTLSTVLGVA

SEQ ID NO: 159859 - protein, 10 aa, Artificial Sequence
  Description of Artificial Sequence: Synthetic peptide
  Seed: NMLSTVLGVS
NTLSTVLGVI

SEQ ID NO: 159860 - protein, 10 aa, Artificial Sequence
  Description of Artificial Sequence: Synthetic peptide
  Seed: NMLSTVLGVS
NTLSTVLGVL

SEQ ID NO: 159861 - protein, 11 aa, Artificial Sequence
  Description of Artificial Sequence: Synthetic peptide
  Seed: NMLSTVLGVSI
NTLSTVLGVSL

SEQ ID NO: 159862 - protein, 11 aa, Artificial Sequence
  Description of Artificial Sequence: Synthetic peptide
  Seed: NMLSTVLGVSI
NTLSTVLGVSV

SEQ ID NO: 159863 - protein, 10 aa, Artificial Sequence
  Description of Artificial Sequence: Synthetic peptide
  Seed: NMLSTVLGVS
NTLSTVLGVV

SEQ ID NO: 159864 - protein, 10 aa, Artificial Sequence
  Description of Artificial Sequence: Synthetic peptide
  Seed: NKMARLGKGY
NTMARLGKGY

SEQ ID NO: 159865 - protein, 9 aa, Artificial Sequence
  Description of Artificial Sequence: Synthetic peptide
  Seed: NTMTKDAER
NTMTKDAEK

SEQ ID NO: 159866 - protein, 11 aa, Artificial Sequence
  Description of Artificial Sequence: Synthetic peptide
  Seed: NTMTKDAERGK
NTMTKDAERGR

SEQ ID NO: 159867 - protein, 9 aa, Artificial Sequence
  Description of Artificial Sequence: Synthetic peptide
  Seed: NTMTKDAER
NTMTKDAEY

SEQ ID NO: 159868 - protein, 11 aa, Artificial Sequence
  Description of Artificial Sequence: Synthetic peptide
  Seed: NFSMELPSFGV
NTSMELPSFGI

SEQ ID NO: 159869 - protein, 11 aa, Artificial Sequence
  Description of Artificial Sequence: Synthetic peptide
  Seed: NFSMELPSFGV
NTSMELPSFGV

SEQ ID NO: 159870 - protein, 9 aa, Artificial Sequence
  Description of Artificial Sequence: Synthetic peptide
  Seed: NAISTTFPY
NVISTTFPA

SEQ ID NO: 159871 - protein, 9 aa, Artificial Sequence
  Description of Artificial Sequence: Synthetic peptide
  Seed: NAISTTFPY
NVISTTFPE

SEQ ID NO: 159872 - protein, 9 aa, Artificial Sequence
  Description of Artificial Sequence: Synthetic peptide
  Seed: NAISTTFPY
NVISTTFPF

SEQ ID NO: 159873 - protein, 9 aa, Artificial Sequence
  Description of Artificial Sequence: Synthetic peptide
  Seed: NAISTTFPY
NVISTTFPH

SEQ ID NO: 159874 - protein, 9 aa, Artificial Sequence
  Description of Artificial Sequence: Synthetic peptide
  Seed: NAISTTFPY
NVISTTFPI

SEQ ID NO: 159875 - protein, 9 aa, Artificial Sequence
  Description of Artificial Sequence: Synthetic peptide
  Seed: NAISTTFPY
NVISTTFPK

SEQ ID NO: 159876 - protein, 9 aa, Artificial Sequence
  Description of Artificial Sequence: Synthetic peptide
  Seed: NAISTTFPY
NVISTTFPL

SEQ ID NO: 159877 - protein, 9 aa, Artificial Sequence
  Description of Artificial Sequence: Synthetic peptide
  Seed: NAISTTFPY
NVISTTFPM

SEQ ID NO: 159878 - protein, 9 aa, Artificial Sequence
  Description of Artificial Sequence: Synthetic peptide
  Seed: NAISTTFPY
NVISTTFPQ

SEQ ID NO: 159879 - protein, 9 aa, Artificial Sequence
  Description of Artificial Sequence: Synthetic peptide
  Seed: NAISTTFPY
NVISTTFPR

SEQ ID NO: 159880 - protein, 9 aa, Artificial Sequence
  Description of Artificial Sequence: Synthetic peptide
  Seed: NAISTTFPY
NVISTTFPS

SEQ ID NO: 159881 - protein, 9 aa, Artificial Sequence
  Description of Artificial Sequence: Synthetic peptide
  Seed: NAISTTFPY
NVISTTFPT

SEQ ID NO: 159882 - protein, 9 aa, Artificial Sequence
  Description of Artificial Sequence: Synthetic peptide
  Seed: NAISTTFPY
NVISTTFPV

SEQ ID NO: 159883 - protein, 9 aa, Artificial Sequence
  Description of Artificial Sequence: Synthetic peptide
  Seed: NAISTTFPY
NVISTTFPW

SEQ ID NO: 159884 - protein, 10 aa, Artificial Sequence
  Description of Artificial Sequence: Synthetic peptide
  Seed: NAISTTFPYT
NVISTTFPYA

SEQ ID NO: 159885 - protein, 10 aa, Artificial Sequence
  Description of Artificial Sequence: Synthetic peptide
  Seed: NAISTTFPYT
NVISTTFPYC

SEQ ID NO: 159886 - protein, 10 aa, Artificial Sequence
  Description of Artificial Sequence: Synthetic peptide
  Seed: NAISTTFPYT
NVISTTFPYD

SEQ ID NO: 159887 - protein, 10 aa, Artificial Sequence
  Description of Artificial Sequence: Synthetic peptide
  Seed: NAISTTFPYT
NVISTTFPYE

SEQ ID NO: 159888 - protein, 10 aa, Artificial Sequence
  Description of Artificial Sequence: Synthetic peptide
  Seed: NAISTTFPYT
NVISTTFPYF

SEQ ID NO: 159889 - protein, 10 aa, Artificial Sequence
  Description of Artificial Sequence: Synthetic peptide
  Seed: NAISTTFPYT
NVISTTFPYG

SEQ ID NO: 159890 - protein, 10 aa, Artificial Sequence
  Description of Artificial Sequence: Synthetic peptide
  Seed: NAISTTFPYT
NVISTTFPYH

SEQ ID NO: 159891 - protein, 10 aa, Artificial Sequence
  Description of Artificial Sequence: Synthetic peptide
  Seed: NAISTTFPYT
NVISTTFPYI

SEQ ID NO: 159892 - protein, 10 aa, Artificial Sequence
  Description of Artificial Sequence: Synthetic peptide
  Seed: NAISTTFPYT
NVISTTFPYK

SEQ ID NO: 159893 - protein, 10 aa, Artificial Sequence
  Description of Artificial Sequence: Synthetic peptide
  Seed: NAISTTFPYT
NVISTTFPYL

SEQ ID NO: 159894 - protein, 10 aa, Artificial Sequence
  Description of Artificial Sequence: Synthetic peptide
  Seed: NAISTTFPYT
NVISTTFPYM

SEQ ID NO: 159895 - protein, 10 aa, Artificial Sequence
  Description of Artificial Sequence: Synthetic peptide
  Seed: NAISTTFPYT
NVISTTFPYN

SEQ ID NO: 159896 - protein, 10 aa, Artificial Sequence
  Description of Artificial Sequence: Synthetic peptide
  Seed: NAISTTFPYT
NVISTTFPYP

SEQ ID NO: 159897 - protein, 10 aa, Artificial Sequence
  Description of Artificial Sequence: Synthetic peptide
  Seed: NAISTTFPYT
NVISTTFPYQ

SEQ ID NO: 159898 - protein, 10 aa, Artificial Sequence
  Description of Artificial Sequence: Synthetic peptide
  Seed: NAISTTFPYT
NVISTTFPYR

SEQ ID NO: 159899 - protein, 10 aa, Artificial Sequence
  Description of Artificial Sequence: Synthetic peptide
  Seed: NAISTTFPYT
NVISTTFPYS

SEQ ID NO: 159900 - protein, 10 aa, Artificial Sequence
  Description of Artificial Sequence: Synthetic peptide
  Seed: NAISTTFPYT
NVISTTFPYT

SEQ ID NO: 159901 - protein, 10 aa, Artificial Sequence
  Description of Artificial Sequence: Synthetic peptide
  Seed: NAISTTFPYT
NVISTTFPYV

SEQ ID NO: 159902 - protein, 10 aa, Artificial Sequence
  Description of Artificial Sequence: Synthetic peptide
  Seed: NAISTTFPYT
NVISTTFPYW

SEQ ID NO: 159903 - protein, 10 aa, Artificial Sequence
  Description of Artificial Sequence: Synthetic peptide
  Seed: NAISTTFPYT
NVISTTFPYY

SEQ ID NO: 159904 - protein, 11 aa, Artificial Sequence
  Description of Artificial Sequence: Synthetic peptide
  Seed: NTKWNENQNPR
NVKWNENQNPR

SEQ ID NO: 159905 - protein, 9 aa, Artificial Sequence
  Description of Artificial Sequence: Synthetic peptide
  Seed: NMLSTVLGV
NVLSTVLGA

SEQ ID NO: 159906 - protein, 9 aa, Artificial Sequence
  Description of Artificial Sequence: Synthetic peptide
  Seed: NMLSTVLGV
NVLSTVLGI

SEQ ID NO: 159907 - protein, 9 aa, Artificial Sequence
  Description of Artificial Sequence: Synthetic peptide
  Seed: NMLSTVLGV
NVLSTVLGL

SEQ ID NO: 159908 - protein, 9 aa, Artificial Sequence
  Description of Artificial Sequence: Synthetic peptide
  Seed: NMLSTVLGV
NVLSTVLGM

SEQ ID NO: 159909 - protein, 9 aa, Artificial Sequence
  Description of Artificial Sequence: Synthetic peptide
  Seed: NMLSTVLGV
NVLSTVLGV

SEQ ID NO: 159910 - protein, 10 aa, Artificial Sequence
  Description of Artificial Sequence: Synthetic peptide
  Seed: NMLSTVLGVS
NVLSTVLGVA

SEQ ID NO: 159911 - protein, 10 aa, Artificial Sequence
  Description of Artificial Sequence: Synthetic peptide
  Seed: NMLSTVLGVS
NVLSTVLGVI

SEQ ID NO: 159912 - protein, 10 aa, Artificial Sequence
  Description of Artificial Sequence: Synthetic peptide
  Seed: NMLSTVLGVS
NVLSTVLGVL

SEQ ID NO: 159913 - protein, 11 aa, Artificial Sequence
  Description of Artificial Sequence: Synthetic peptide
  Seed: NMLSTVLGVSI
NVLSTVLGVSV

SEQ ID NO: 159914 - protein, 10 aa, Artificial Sequence
  Description of Artificial Sequence: Synthetic peptide
  Seed: NMLSTVLGVS
NVLSTVLGVV

SEQ ID NO: 159915 - protein, 10 aa, Artificial Sequence
  Description of Artificial Sequence: Synthetic peptide
  Seed: NKMARLGKGY
NVMARLGKGY

SEQ ID NO: 159916 - protein, 9 aa, Artificial Sequence
  Description of Artificial Sequence: Synthetic peptide
  Seed: NTMTKDAER
NVMTKDAEK

SEQ ID NO: 159917 - protein, 9 aa, Artificial Sequence
  Description of Artificial Sequence: Synthetic peptide
  Seed: NTMTKDAER
NVMTKDAER

SEQ ID NO: 159918 - protein, 11 aa, Artificial Sequence
  Description of Artificial Sequence: Synthetic peptide
  Seed: NTMTKDAERGK
NVMTKDAERGR

SEQ ID NO: 159919 - protein, 11 aa, Artificial Sequence
  Description of Artificial Sequence: Synthetic peptide
  Seed: NFSMELPSFGV
NVSMELPSFGV

SEQ ID NO: 159920 - protein, 9 aa, Artificial Sequence
  Description of Artificial Sequence: Synthetic peptide
  Seed: NAISTTFPY
NWISTTFPF

SEQ ID NO: 159921 - protein, 9 aa, Artificial Sequence
  Description of Artificial Sequence: Synthetic peptide
  Seed: NAISTTFPY
NWISTTFPI

SEQ ID NO: 159922 - protein, 9 aa, Artificial Sequence
  Description of Artificial Sequence: Synthetic peptide
  Seed: NAISTTFPY
NWISTTFPK

SEQ ID NO: 159923 - protein, 9 aa, Artificial Sequence
  Description of Artificial Sequence: Synthetic peptide
  Seed: NAISTTFPY
NWISTTFPL

SEQ ID NO: 159924 - protein, 9 aa, Artificial Sequence
  Description of Artificial Sequence: Synthetic peptide
  Seed: NAISTTFPY
NWISTTFPM

SEQ ID NO: 159925 - protein, 9 aa, Artificial Sequence
  Description of Artificial Sequence: Synthetic peptide
  Seed: NAISTTFPY
NWISTTFPR

SEQ ID NO: 159926 - protein, 9 aa, Artificial Sequence
  Description of Artificial Sequence: Synthetic peptide
  Seed: NAISTTFPY
NWISTTFPV

SEQ ID NO: 159927 - protein, 9 aa, Artificial Sequence
  Description of Artificial Sequence: Synthetic peptide
  Seed: NAISTTFPY
NWISTTFPW

SEQ ID NO: 159928 - protein, 9 aa, Artificial Sequence
  Description of Artificial Sequence: Synthetic peptide
  Seed: NAISTTFPY
NWISTTFPY

SEQ ID NO: 159929 - protein, 10 aa, Artificial Sequence
  Description of Artificial Sequence: Synthetic peptide
  Seed: NAISTTFPYT
NWISTTFPYV

SEQ ID NO: 159930 - protein, 10 aa, Artificial Sequence
  Description of Artificial Sequence: Synthetic peptide
  Seed: NMLSTVLGVS
NWLSTVLGVA

SEQ ID NO: 159931 - protein, 10 aa, Artificial Sequence
  Description of Artificial Sequence: Synthetic peptide
  Seed: NMLSTVLGVS
NWLSTVLGVI

SEQ ID NO: 159932 - protein, 10 aa, Artificial Sequence
  Description of Artificial Sequence: Synthetic peptide
  Seed: NMLSTVLGVS
NWLSTVLGVL

SEQ ID NO: 159933 - protein, 11 aa, Artificial Sequence
  Description of Artificial Sequence: Synthetic peptide
  Seed: NMLSTVLGVSI
NWLSTVLGVSL

SEQ ID NO: 159934 - protein, 11 aa, Artificial Sequence
  Description of Artificial Sequence: Synthetic peptide
  Seed: NMLSTVLGVSI
NWLSTVLGVSV

SEQ ID NO: 159935 - protein, 10 aa, Artificial Sequence
  Description of Artificial Sequence: Synthetic peptide
  Seed: NMLSTVLGVS
NWLSTVLGVV

SEQ ID NO: 159936 - protein, 9 aa, Artificial Sequence
  Description of Artificial Sequence: Synthetic peptide
  Seed: NTMTKDAER
NWMTKDAER

SEQ ID NO: 159937 - protein, 9 aa, Artificial Sequence
  Description of Artificial Sequence: Synthetic peptide
  Seed: NFSMELPSF
NWSMELPSF

SEQ ID NO: 159938 - protein, 9 aa, Artificial Sequence
  Description of Artificial Sequence: Synthetic peptide
  Seed: NFSMELPSF
NWSMELPSI

SEQ ID NO: 159939 - protein, 9 aa, Artificial Sequence
  Description of Artificial Sequence: Synthetic peptide
  Seed: NFSMELPSF
NWSMELPSL

SEQ ID NO: 159940 - protein, 9 aa, Artificial Sequence
  Description of Artificial Sequence: Synthetic peptide
  Seed: NFSMELPSF
NWSMELPSM

SEQ ID NO: 159941 - protein, 9 aa, Artificial Sequence
  Description of Artificial Sequence: Synthetic peptide
  Seed: NFSMELPSF
NWSMELPSW

SEQ ID NO: 159942 - protein, 9 aa, Artificial Sequence
  Description of Artificial Sequence: Synthetic peptide
  Seed: NFSMELPSF
NWSMELPSY

SEQ ID NO: 159943 - protein, 9 aa, Artificial Sequence
  Description of Artificial Sequence: Synthetic peptide
  Seed: NAISTTFPY
NYISTTFPA

SEQ ID NO: 159944 - protein, 9 aa, Artificial Sequence
  Description of Artificial Sequence: Synthetic peptide
  Seed: NAISTTFPY
NYISTTFPC

SEQ ID NO: 159945 - protein, 9 aa, Artificial Sequence
  Description of Artificial Sequence: Synthetic peptide
  Seed: NAISTTFPY
NYISTTFPF

SEQ ID NO: 159946 - protein, 9 aa, Artificial Sequence
  Description of Artificial Sequence: Synthetic peptide
  Seed: NAISTTFPY
NYISTTFPH

SEQ ID NO: 159947 - protein, 9 aa, Artificial Sequence
  Description of Artificial Sequence: Synthetic peptide
  Seed: NAISTTFPY
NYISTTFPI

SEQ ID NO: 159948 - protein, 9 aa, Artificial Sequence
  Description of Artificial Sequence: Synthetic peptide
  Seed: NAISTTFPY
NYISTTFPK

SEQ ID NO: 159949 - protein, 9 aa, Artificial Sequence
  Description of Artificial Sequence: Synthetic peptide
  Seed: NAISTTFPY
NYISTTFPL

SEQ ID NO: 159950 - protein, 9 aa, Artificial Sequence
  Description of Artificial Sequence: Synthetic peptide
  Seed: NAISTTFPY
NYISTTFPM

SEQ ID NO: 159951 - protein, 9 aa, Artificial Sequence
  Description of Artificial Sequence: Synthetic peptide
  Seed: NAISTTFPY
NYISTTFPR

SEQ ID NO: 159952 - protein, 9 aa, Artificial Sequence
  Description of Artificial Sequence: Synthetic peptide
  Seed: NAISTTFPY
NYISTTFPT

SEQ ID NO: 159953 - protein, 9 aa, Artificial Sequence
  Description of Artificial Sequence: Synthetic peptide
  Seed: NAISTTFPY
NYISTTFPV

SEQ ID NO: 159954 - protein, 9 aa, Artificial Sequence
  Description of Artificial Sequence: Synthetic peptide
  Seed: NAISTTFPY
NYISTTFPW

SEQ ID NO: 159955 - protein, 9 aa, Artificial Sequence
  Description of Artificial Sequence: Synthetic peptide
  Seed: NAISTTFPY
NYISTTFPY

SEQ ID NO: 159956 - protein, 10 aa, Artificial Sequence
  Description of Artificial Sequence: Synthetic peptide
  Seed: NAISTTFPYT
NYISTTFPYI

SEQ ID NO: 159957 - protein, 10 aa, Artificial Sequence
  Description of Artificial Sequence: Synthetic peptide
  Seed: NAISTTFPYT
NYISTTFPYV

SEQ ID NO: 159958 - protein, 10 aa, Artificial Sequence
  Description of Artificial Sequence: Synthetic peptide
  Seed: NAISTTFPYT
NYISTTFPYY

SEQ ID NO: 159959 - protein, 11 aa, Artificial Sequence
  Description of Artificial Sequence: Synthetic peptide
  Seed: NTKWNENQNPR
NYKWNENQNPR

SEQ ID NO: 159960 - protein, 10 aa, Artificial Sequence
  Description of Artificial Sequence: Synthetic peptide
  Seed: NMLSTVLGVS
NYLSTVLGVA

SEQ ID NO: 159961 - protein, 10 aa, Artificial Sequence
  Description of Artificial Sequence: Synthetic peptide
  Seed: NMLSTVLGVS
NYLSTVLGVI

SEQ ID NO: 159962 - protein, 10 aa, Artificial Sequence
  Description of Artificial Sequence: Synthetic peptide
  Seed: NMLSTVLGVS
NYLSTVLGVL

SEQ ID NO: 159963 - protein, 10 aa, Artificial Sequence
  Description of Artificial Sequence: Synthetic peptide
  Seed: NMLSTVLGVS
NYLSTVLGVM

SEQ ID NO: 159964 - protein, 11 aa, Artificial Sequence
  Description of Artificial Sequence: Synthetic peptide
  Seed: NMLSTVLGVSI
NYLSTVLGVSA

SEQ ID NO: 159965 - protein, 11 aa, Artificial Sequence
  Description of Artificial Sequence: Synthetic peptide
  Seed: NMLSTVLGVSI
NYLSTVLGVSI

SEQ ID NO: 159966 - protein, 11 aa, Artificial Sequence
  Description of Artificial Sequence: Synthetic peptide
  Seed: NMLSTVLGVSI
NYLSTVLGVSL

SEQ ID NO: 159967 - protein, 11 aa, Artificial Sequence
  Description of Artificial Sequence: Synthetic peptide
  Seed: NMLSTVLGVSI
NYLSTVLGVSM

SEQ ID NO: 159968 - protein, 11 aa, Artificial Sequence
  Description of Artificial Sequence: Synthetic peptide
  Seed: NMLSTVLGVSI
NYLSTVLGVSV

SEQ ID NO: 159969 - protein, 10 aa, Artificial Sequence
  Description of Artificial Sequence: Synthetic peptide
  Seed: NMLSTVLGVS
NYLSTVLGVT

SEQ ID NO: 159970 - protein, 10 aa, Artificial Sequence
  Description of Artificial Sequence: Synthetic peptide
  Seed: NMLSTVLGVS
NYLSTVLGVV

SEQ ID NO: 159971 - protein, 10 aa, Artificial Sequence
  Description of Artificial Sequence: Synthetic peptide
  Seed: NKMARLGKGY
NYMARLGKGY

SEQ ID NO: 159972 - protein, 9 aa, Artificial Sequence
  Description of Artificial Sequence: Synthetic peptide
  Seed: NTMTKDAER
NYMTKDAEK

SEQ ID NO: 159973 - protein, 9 aa, Artificial Sequence
  Description of Artificial Sequence: Synthetic peptide
  Seed: NTMTKDAER
NYMTKDAER

SEQ ID NO: 159974 - protein, 9 aa, Artificial Sequence
  Description of Artificial Sequence: Synthetic peptide
  Seed: NFSMELPSF
NYSMELPSF

SEQ ID NO: 159975 - protein, 11 aa, Artificial Sequence
  Description of Artificial Sequence: Synthetic peptide
  Seed: NFSMELPSFGV
NYSMELPSFGL

SEQ ID NO: 159976 - protein, 11 aa, Artificial Sequence
  Description of Artificial Sequence: Synthetic peptide
  Seed: NFSMELPSFGV
NYSMELPSFGV

SEQ ID NO: 159977 - protein, 9 aa, Artificial Sequence
  Description of Artificial Sequence: Synthetic peptide
  Seed: NFSMELPSF
NYSMELPSI

SEQ ID NO: 159978 - protein, 9 aa, Artificial Sequence
  Description of Artificial Sequence: Synthetic peptide
  Seed: NFSMELPSF
NYSMELPSL

SEQ ID NO: 159979 - protein, 9 aa, Artificial Sequence
  Description of Artificial Sequence: Synthetic peptide
  Seed: NFSMELPSF
NYSMELPSM

SEQ ID NO: 159980 - protein, 9 aa, Artificial Sequence
  Description of Artificial Sequence: Synthetic peptide
  Seed: NFSMELPSF
NYSMELPSV

SEQ ID NO: 159981 - protein, 9 aa, Artificial Sequence
  Description of Artificial Sequence: Synthetic peptide
  Seed: NFSMELPSF
NYSMELPSW

SEQ ID NO: 159982 - protein, 9 aa, Artificial Sequence
  Description of Artificial Sequence: Synthetic peptide
  Seed: NFSMELPSF
NYSMELPSY

SEQ ID NO: 159983 - protein, 11 aa, Artificial Sequence
  Description of Artificial Sequence: Synthetic peptide
  Seed: PGMMMGMFNML
PAMMMGMFNMI

SEQ ID NO: 159984 - protein, 11 aa, Artificial Sequence
  Description of Artificial Sequence: Synthetic peptide
  Seed: PGMMMGMFNML
PAMMMGMFNML

SEQ ID NO: 159985 - protein, 11 aa, Artificial Sequence
  Description of Artificial Sequence: Synthetic peptide
  Seed: PGMMMGMFNML
PAMMMGMFNMV

SEQ ID NO: 159986 - protein, 11 aa, Artificial Sequence
  Description of Artificial Sequence: Synthetic peptide
  Seed: PGMMMGMFNML
PCMMMGMFNMV

SEQ ID NO: 159987 - protein, 11 aa, Artificial Sequence
  Description of Artificial Sequence: Synthetic peptide
  Seed: PGMMMGMFNML
PDMMMGMFNMV

SEQ ID NO: 159988 - protein, 11 aa, Artificial Sequence
  Description of Artificial Sequence: Synthetic peptide
  Seed: PGMMMGMFNML
PEMMMGMFNMV

SEQ ID NO: 159989 - protein, 11 aa, Artificial Sequence
  Description of Artificial Sequence: Synthetic peptide
  Seed: PGMMMGMFNML
PFMMMGMFNMA

SEQ ID NO: 159990 - protein, 11 aa, Artificial Sequence
  Description of Artificial Sequence: Synthetic peptide
  Seed: PGMMMGMFNML
PFMMMGMFNMI

SEQ ID NO: 159991 - protein, 11 aa, Artificial Sequence
  Description of Artificial Sequence: Synthetic peptide
  Seed: PGMMMGMFNML
PFMMMGMFNML

SEQ ID NO: 159992 - protein, 11 aa, Artificial Sequence
  Description of Artificial Sequence: Synthetic peptide
  Seed: PGMMMGMFNML
PFMMMGMFNMV

SEQ ID NO: 159993 - protein, 8 aa, Artificial Sequence
  Description of Artificial Sequence: Synthetic peptide
  Seed: PYTGDPPY
PFTGDPPY

SEQ ID NO: 159994 - protein, 11 aa, Artificial Sequence
  Description of Artificial Sequence: Synthetic peptide
  Seed: PGMMMGMFNML
PGMMMGMFNMI

SEQ ID NO: 159995 - protein, 11 aa, Artificial Sequence
  Description of Artificial Sequence: Synthetic peptide
  Seed: PGMMMGMFNML
PGMMMGMFNMV

SEQ ID NO: 159996 - protein, 11 aa, Artificial Sequence
  Description of Artificial Sequence: Synthetic peptide
  Seed: PGMMMGMFNML
PHMMMGMFNMI

SEQ ID NO: 159997 - protein, 11 aa, Artificial Sequence
  Description of Artificial Sequence: Synthetic peptide
  Seed: PGMMMGMFNML
PHMMMGMFNML

SEQ ID NO: 159998 - protein, 11 aa, Artificial Sequence
  Description of Artificial Sequence: Synthetic peptide
  Seed: PGMMMGMFNML
PHMMMGMFNMV

SEQ ID NO: 159999 - protein, 11 aa, Artificial Sequence
  Description of Artificial Sequence: Synthetic peptide
  Seed: PGMMMGMFNML
PIMMMGMFNMI

SEQ ID NO: 160000 - protein, 11 aa, Artificial Sequence
  Description of Artificial Sequence: Synthetic peptide
  Seed: PGMMMGMFNML
PIMMMGMFNML

SEQ ID NO: 160001 - protein, 11 aa, Artificial Sequence
  Description of Artificial Sequence: Synthetic peptide
  Seed: PGMMMGMFNML
PIMMMGMFNMV

SEQ ID NO: 160002 - protein, 8 aa, Artificial Sequence
  Description of Artificial Sequence: Synthetic peptide
  Seed: PYTGDPPY
PITGDPPY

SEQ ID NO: 160003 - protein, 11 aa, Artificial Sequence
  Description of Artificial Sequence: Synthetic peptide
  Seed: PGMMMGMFNML
PKMMMGMFNMI

SEQ ID NO: 160004 - protein, 11 aa, Artificial Sequence
  Description of Artificial Sequence: Synthetic peptide
  Seed: PGMMMGMFNML
PKMMMGMFNML

SEQ ID NO: 160005 - protein, 11 aa, Artificial Sequence
  Description of Artificial Sequence: Synthetic peptide
  Seed: PGMMMGMFNML
PKMMMGMFNMV

SEQ ID NO: 160006 - protein, 11 aa, Artificial Sequence
  Description of Artificial Sequence: Synthetic peptide
  Seed: PGMMMGMFNML
PLMMMGMFNMI

SEQ ID NO: 160007 - protein, 11 aa, Artificial Sequence
  Description of Artificial Sequence: Synthetic peptide
  Seed: PGMMMGMFNML
PLMMMGMFNML

SEQ ID NO: 160008 - protein, 11 aa, Artificial Sequence
  Description of Artificial Sequence: Synthetic peptide
  Seed: PGMMMGMFNML
PLMMMGMFNMV

SEQ ID NO: 160009 - protein, 11 aa, Artificial Sequence
  Description of Artificial Sequence: Synthetic peptide
  Seed: PGMMMGMFNML
PMMMMGMFNMA

SEQ ID NO: 160010 - protein, 11 aa, Artificial Sequence
  Description of Artificial Sequence: Synthetic peptide
  Seed: PGMMMGMFNML
PMMMMGMFNMI

SEQ ID NO: 160011 - protein, 11 aa, Artificial Sequence
  Description of Artificial Sequence: Synthetic peptide
  Seed: PGMMMGMFNML
PMMMMGMFNML

SEQ ID NO: 160012 - protein, 11 aa, Artificial Sequence
  Description of Artificial Sequence: Synthetic peptide
  Seed: PGMMMGMFNML
PMMMMGMFNMV

SEQ ID NO: 160013 - protein, 8 aa, Artificial Sequence
  Description of Artificial Sequence: Synthetic peptide
  Seed: PYTGDPPY
PMTGDPPY

SEQ ID NO: 160014 - protein, 11 aa, Artificial Sequence
  Description of Artificial Sequence: Synthetic peptide
  Seed: PGMMMGMFNML
PNMMMGMFNMV

SEQ ID NO: 160015 - protein, 11 aa, Artificial Sequence
  Description of Artificial Sequence: Synthetic peptide
  Seed: PGMMMGMFNML
PPMMMGMFNMV

SEQ ID NO: 160016 - protein, 11 aa, Artificial Sequence
  Description of Artificial Sequence: Synthetic peptide
  Seed: PGMMMGMFNML
PQMMMGMFNMV

SEQ ID NO: 160017 - protein, 11 aa, Artificial Sequence
  Description of Artificial Sequence: Synthetic peptide
  Seed: PGMMMGMFNML
PRMMMGMFNMI

SEQ ID NO: 160018 - protein, 11 aa, Artificial Sequence
  Description of Artificial Sequence: Synthetic peptide
  Seed: PGMMMGMFNML
PRMMMGMFNML

SEQ ID NO: 160019 - protein, 11 aa, Artificial Sequence
  Description of Artificial Sequence: Synthetic peptide
  Seed: PGMMMGMFNML
PRMMMGMFNMV

SEQ ID NO: 160020 - protein, 11 aa, Artificial Sequence
  Description of Artificial Sequence: Synthetic peptide
  Seed: PGMMMGMFNML
PSMMMGMFNMA

SEQ ID NO: 160021 - protein, 11 aa, Artificial Sequence
  Description of Artificial Sequence: Synthetic peptide
  Seed: PGMMMGMFNML
PSMMMGMFNMI

SEQ ID NO: 160022 - protein, 11 aa, Artificial Sequence
  Description of Artificial Sequence: Synthetic peptide
  Seed: PGMMMGMFNML
PSMMMGMFNML

SEQ ID NO: 160023 - protein, 11 aa, Artificial Sequence
  Description of Artificial Sequence: Synthetic peptide
  Seed: PGMMMGMFNML
PSMMMGMFNMV

SEQ ID NO: 160024 - protein, 11 aa, Artificial Sequence
  Description of Artificial Sequence: Synthetic peptide
  Seed: PGMMMGMFNML
PTMMMGMFNMI

SEQ ID NO: 160025 - protein, 11 aa, Artificial Sequence
  Description of Artificial Sequence: Synthetic peptide
  Seed: PGMMMGMFNML
PTMMMGMFNML

SEQ ID NO: 160026 - protein, 11 aa, Artificial Sequence
  Description of Artificial Sequence: Synthetic peptide
  Seed: PGMMMGMFNML
PTMMMGMFNMV

SEQ ID NO: 160027 - protein, 11 aa, Artificial Sequence
  Description of Artificial Sequence: Synthetic peptide
  Seed: PGMMMGMFNML
PVMMMGMFNMI

SEQ ID NO: 160028 - protein, 11 aa, Artificial Sequence
  Description of Artificial Sequence: Synthetic peptide
  Seed: PGMMMGMFNML
PVMMMGMFNML

SEQ ID NO: 160029 - protein, 11 aa, Artificial Sequence
  Description of Artificial Sequence: Synthetic peptide
  Seed: PGMMMGMFNML
PVMMMGMFNMV

SEQ ID NO: 160030 - protein, 11 aa, Artificial Sequence
  Description of Artificial Sequence: Synthetic peptide
  Seed: PGMMMGMFNML
PWMMMGMFNMI

SEQ ID NO: 160031 - protein, 11 aa, Artificial Sequence
  Description of Artificial Sequence: Synthetic peptide
  Seed: PGMMMGMFNML
PWMMMGMFNML

SEQ ID NO: 160032 - protein, 11 aa, Artificial Sequence
  Description of Artificial Sequence: Synthetic peptide
  Seed: PGMMMGMFNML
PWMMMGMFNMV

SEQ ID NO: 160033 - protein, 11 aa, Artificial Sequence
  Description of Artificial Sequence: Synthetic peptide
  Seed: PGMMMGMFNML
PYMMMGMFNMA

SEQ ID NO: 160034 - protein, 11 aa, Artificial Sequence
  Description of Artificial Sequence: Synthetic peptide
  Seed: PGMMMGMFNML
PYMMMGMFNMI

SEQ ID NO: 160035 - protein, 11 aa, Artificial Sequence
  Description of Artificial Sequence: Synthetic peptide
  Seed: PGMMMGMFNML
PYMMMGMFNML

SEQ ID NO: 160036 - protein, 11 aa, Artificial Sequence
  Description of Artificial Sequence: Synthetic peptide
  Seed: PGMMMGMFNML
PYMMMGMFNMM

SEQ ID NO: 160037 - protein, 11 aa, Artificial Sequence
  Description of Artificial Sequence: Synthetic peptide
  Seed: PGMMMGMFNML
PYMMMGMFNMV

SEQ ID NO: 160038 - protein, 8 aa, Artificial Sequence
  Description of Artificial Sequence: Synthetic peptide
  Seed: QNAISTTF
QAAISTTF

SEQ ID NO: 160039 - protein, 10 aa, Artificial Sequence
  Description of Artificial Sequence: Synthetic peptide
  Seed: QNAISTTFPY
QAAISTTFPF

SEQ ID NO: 160040 - protein, 10 aa, Artificial Sequence
  Description of Artificial Sequence: Synthetic peptide
  Seed: QNAISTTFPY
QAAISTTFPK

SEQ ID NO: 160041 - protein, 10 aa, Artificial Sequence
  Description of Artificial Sequence: Synthetic peptide
  Seed: QNAISTTFPY
QAAISTTFPM

SEQ ID NO: 160042 - protein, 10 aa, Artificial Sequence
  Description of Artificial Sequence: Synthetic peptide
  Seed: QNAISTTFPY
QAAISTTFPR

SEQ ID NO: 160043 - protein, 10 aa, Artificial Sequence
  Description of Artificial Sequence: Synthetic peptide
  Seed: QNAISTTFPY
QAAISTTFPW

SEQ ID NO: 160044 - protein, 10 aa, Artificial Sequence
  Description of Artificial Sequence: Synthetic peptide
  Seed: QNAISTTFPY
QAAISTTFPY

SEQ ID NO: 160045 - protein, 8 aa, Artificial Sequence
  Description of Artificial Sequence: Synthetic peptide
  Seed: QNAISTTF
QAAISTTY

SEQ ID NO: 160046 - protein, 9 aa, Artificial Sequence
  Description of Artificial Sequence: Synthetic peptide
  Seed: QLFIKDYRY
QAFIKDYRF

SEQ ID NO: 160047 - protein, 9 aa, Artificial Sequence
  Description of Artificial Sequence: Synthetic peptide
  Seed: QLFIKDYRY
QAFIKDYRY

SEQ ID NO: 160048 - protein, 9 aa, Artificial Sequence
  Description of Artificial Sequence: Synthetic peptide
  Seed: QSSDDFALI
QASDDFALA

SEQ ID NO: 160049 - protein, 9 aa, Artificial Sequence
  Description of Artificial Sequence: Synthetic peptide
  Seed: QSSDDFALI
QASDDFALF

SEQ ID NO: 160050 - protein, 9 aa, Artificial Sequence
  Description of Artificial Sequence: Synthetic peptide
  Seed: QSSDDFALI
QASDDFALI

SEQ ID NO: 160051 - protein, 9 aa, Artificial Sequence
  Description of Artificial Sequence: Synthetic peptide
  Seed: QSSDDFALI
QASDDFALL

SEQ ID NO: 160052 - protein, 9 aa, Artificial Sequence
  Description of Artificial Sequence: Synthetic peptide
  Seed: QSSDDFALI
QASDDFALM

SEQ ID NO: 160053 - protein, 9 aa, Artificial Sequence
  Description of Artificial Sequence: Synthetic peptide
  Seed: QSSDDFALI
QASDDFALV

SEQ ID NO: 160054 - protein, 9 aa, Artificial Sequence
  Description of Artificial Sequence: Synthetic peptide
  Seed: QSSDDFALI
QASDDFALW

SEQ ID NO: 160055 - protein, 9 aa, Artificial Sequence
  Description of Artificial Sequence: Synthetic peptide
  Seed: QSSDDFALI
QASDDFALY

SEQ ID NO: 160056 - protein, 10 aa, Artificial Sequence
  Description of Artificial Sequence: Synthetic peptide
  Seed: QNAISTTFPY
QCAISTTFPF

SEQ ID NO: 160057 - protein, 10 aa, Artificial Sequence
  Description of Artificial Sequence: Synthetic peptide
  Seed: QNAISTTFPY
QCAISTTFPK

SEQ ID NO: 160058 - protein, 10 aa, Artificial Sequence
  Description of Artificial Sequence: Synthetic peptide
  Seed: QNAISTTFPY
QCAISTTFPM

SEQ ID NO: 160059 - protein, 10 aa, Artificial Sequence
  Description of Artificial Sequence: Synthetic peptide
  Seed: QNAISTTFPY
QCAISTTFPR

SEQ ID NO: 160060 - protein, 10 aa, Artificial Sequence
  Description of Artificial Sequence: Synthetic peptide
  Seed: QNAISTTFPY
QCAISTTFPW

SEQ ID NO: 160061 - protein, 10 aa, Artificial Sequence
  Description of Artificial Sequence: Synthetic peptide
  Seed: QNAISTTFPY
QCAISTTFPY

SEQ ID NO: 160062 - protein, 9 aa, Artificial Sequence
  Description of Artificial Sequence: Synthetic peptide
  Seed: QSSDDFALI
QCSDDFALW

SEQ ID NO: 160063 - protein, 10 aa, Artificial Sequence
  Description of Artificial Sequence: Synthetic peptide
  Seed: QNAISTTFPY
QDAISTTFPF

SEQ ID NO: 160064 - protein, 10 aa, Artificial Sequence
  Description of Artificial Sequence: Synthetic peptide
  Seed: QNAISTTFPY
QDAISTTFPK

SEQ ID NO: 160065 - protein, 10 aa, Artificial Sequence
  Description of Artificial Sequence: Synthetic peptide
  Seed: QNAISTTFPY
QDAISTTFPM

SEQ ID NO: 160066 - protein, 10 aa, Artificial Sequence
  Description of Artificial Sequence: Synthetic peptide
  Seed: QNAISTTFPY
QDAISTTFPR

SEQ ID NO: 160067 - protein, 10 aa, Artificial Sequence
  Description of Artificial Sequence: Synthetic peptide
  Seed: QNAISTTFPY
QDAISTTFPW

SEQ ID NO: 160068 - protein, 10 aa, Artificial Sequence
  Description of Artificial Sequence: Synthetic peptide
  Seed: QNAISTTFPY
QDAISTTFPY

SEQ ID NO: 160069 - protein, 10 aa, Artificial Sequence
  Description of Artificial Sequence: Synthetic peptide
  Seed: QNAISTTFPY
QEAISTTFPF

SEQ ID NO: 160070 - protein, 10 aa, Artificial Sequence
  Description of Artificial Sequence: Synthetic peptide
  Seed: QNAISTTFPY
QEAISTTFPK

SEQ ID NO: 160071 - protein, 10 aa, Artificial Sequence
  Description of Artificial Sequence: Synthetic peptide
  Seed: QNAISTTFPY
QEAISTTFPM

SEQ ID NO: 160072 - protein, 10 aa, Artificial Sequence
  Description of Artificial Sequence: Synthetic peptide
  Seed: QNAISTTFPY
QEAISTTFPR

SEQ ID NO: 160073 - protein, 10 aa, Artificial Sequence
  Description of Artificial Sequence: Synthetic peptide
  Seed: QNAISTTFPY
QEAISTTFPW

SEQ ID NO: 160074 - protein, 10 aa, Artificial Sequence
  Description of Artificial Sequence: Synthetic peptide
  Seed: QNAISTTFPY
QEAISTTFPY

SEQ ID NO: 160075 - protein, 8 aa, Artificial Sequence
  Description of Artificial Sequence: Synthetic peptide
  Seed: QNAISTTF
QFAISTTF

SEQ ID NO: 160076 - protein, 10 aa, Artificial Sequence
  Description of Artificial Sequence: Synthetic peptide
  Seed: QNAISTTFPY
QFAISTTFPF

SEQ ID NO: 160077 - protein, 10 aa, Artificial Sequence
  Description of Artificial Sequence: Synthetic peptide
  Seed: QNAISTTFPY
QFAISTTFPK

SEQ ID NO: 160078 - protein, 10 aa, Artificial Sequence
  Description of Artificial Sequence: Synthetic peptide
  Seed: QNAISTTFPY
QFAISTTFPL

SEQ ID NO: 160079 - protein, 10 aa, Artificial Sequence
  Description of Artificial Sequence: Synthetic peptide
  Seed: QNAISTTFPY
QFAISTTFPM

SEQ ID NO: 160080 - protein, 10 aa, Artificial Sequence
  Description of Artificial Sequence: Synthetic peptide
  Seed: QNAISTTFPY
QFAISTTFPR

SEQ ID NO: 160081 - protein, 10 aa, Artificial Sequence
  Description of Artificial Sequence: Synthetic peptide
  Seed: QNAISTTFPY
QFAISTTFPW

SEQ ID NO: 160082 - protein, 10 aa, Artificial Sequence
  Description of Artificial Sequence: Synthetic peptide
  Seed: QNAISTTFPY
QFAISTTFPY

SEQ ID NO: 160083 - protein, 8 aa, Artificial Sequence
  Description of Artificial Sequence: Synthetic peptide
  Seed: QNAISTTF
QFAISTTM

SEQ ID NO: 160084 - protein, 8 aa, Artificial Sequence
  Description of Artificial Sequence: Synthetic peptide
  Seed: QNAISTTF
QFAISTTY

SEQ ID NO: 160085 - protein, 8 aa, Artificial Sequence
  Description of Artificial Sequence: Synthetic peptide
  Seed: QLFIKDYR
QFFIKDYK

SEQ ID NO: 160086 - protein, 8 aa, Artificial Sequence
  Description of Artificial Sequence: Synthetic peptide
  Seed: QLFIKDYR
QFFIKDYR

SEQ ID NO: 160087 - protein, 9 aa, Artificial Sequence
  Description of Artificial Sequence: Synthetic peptide
  Seed: QLFIKDYRY
QFFIKDYRF

SEQ ID NO: 160088 - protein, 9 aa, Artificial Sequence
  Description of Artificial Sequence: Synthetic peptide
  Seed: QLFIKDYRY
QFFIKDYRY

SEQ ID NO: 160089 - protein, 9 aa, Artificial Sequence
  Description of Artificial Sequence: Synthetic peptide
  Seed: QSSDDFALI
QFSDDFALW

SEQ ID NO: 160090 - protein, 10 aa, Artificial Sequence
  Description of Artificial Sequence: Synthetic peptide
  Seed: QNAISTTFPY
QGAISTTFPF

SEQ ID NO: 160091 - protein, 10 aa, Artificial Sequence
  Description of Artificial Sequence: Synthetic peptide
  Seed: QNAISTTFPY
QGAISTTFPK

SEQ ID NO: 160092 - protein, 10 aa, Artificial Sequence
  Description of Artificial Sequence: Synthetic peptide
  Seed: QNAISTTFPY
QGAISTTFPM

SEQ ID NO: 160093 - protein, 10 aa, Artificial Sequence
  Description of Artificial Sequence: Synthetic peptide
  Seed: QNAISTTFPY
QGAISTTFPR

SEQ ID NO: 160094 - protein, 10 aa, Artificial Sequence
  Description of Artificial Sequence: Synthetic peptide
  Seed: QNAISTTFPY
QGAISTTFPW

SEQ ID NO: 160095 - protein, 10 aa, Artificial Sequence
  Description of Artificial Sequence: Synthetic peptide
  Seed: QNAISTTFPY
QGAISTTFPY

SEQ ID NO: 160096 - protein, 9 aa, Artificial Sequence
  Description of Artificial Sequence: Synthetic peptide
  Seed: QLFIKDYRY
QGFIKDYRY

SEQ ID NO: 160097 - protein, 9 aa, Artificial Sequence
  Description of Artificial Sequence: Synthetic peptide
  Seed: QSSDDFALI
QGSDDFALV

SEQ ID NO: 160098 - protein, 9 aa, Artificial Sequence
  Description of Artificial Sequence: Synthetic peptide
  Seed: QSSDDFALI
QGSDDFALW

SEQ ID NO: 160099 - protein, 8 aa, Artificial Sequence
  Description of Artificial Sequence: Synthetic peptide
  Seed: QNAISTTF
QHAISTTF

SEQ ID NO: 160100 - protein, 10 aa, Artificial Sequence
  Description of Artificial Sequence: Synthetic peptide
  Seed: QNAISTTFPY
QHAISTTFPF

SEQ ID NO: 160101 - protein, 10 aa, Artificial Sequence
  Description of Artificial Sequence: Synthetic peptide
  Seed: QNAISTTFPY
QHAISTTFPK

SEQ ID NO: 160102 - protein, 10 aa, Artificial Sequence
  Description of Artificial Sequence: Synthetic peptide
  Seed: QNAISTTFPY
QHAISTTFPL

SEQ ID NO: 160103 - protein, 10 aa, Artificial Sequence
  Description of Artificial Sequence: Synthetic peptide
  Seed: QNAISTTFPY
QHAISTTFPM

SEQ ID NO: 160104 - protein, 10 aa, Artificial Sequence
  Description of Artificial Sequence: Synthetic peptide
  Seed: QNAISTTFPY
QHAISTTFPR

SEQ ID NO: 160105 - protein, 10 aa, Artificial Sequence
  Description of Artificial Sequence: Synthetic peptide
  Seed: QNAISTTFPY
QHAISTTFPW

SEQ ID NO: 160106 - protein, 10 aa, Artificial Sequence
  Description of Artificial Sequence: Synthetic peptide
  Seed: QNAISTTFPY
QHAISTTFPY

SEQ ID NO: 160107 - protein, 8 aa, Artificial Sequence
  Description of Artificial Sequence: Synthetic peptide
  Seed: QNAISTTF
QHAISTTM

SEQ ID NO: 160108 - protein, 8 aa, Artificial Sequence
  Description of Artificial Sequence: Synthetic peptide
  Seed: QNAISTTF
QHAISTTY

SEQ ID NO: 160109 - protein, 9 aa, Artificial Sequence
  Description of Artificial Sequence: Synthetic peptide
  Seed: QLFIKDYRY
QHFIKDYRY

SEQ ID NO: 160110 - protein, 8 aa, Artificial Sequence
  Description of Artificial Sequence: Synthetic peptide
  Seed: QNAISTTF
QIAISTTF

SEQ ID NO: 160111 - protein, 10 aa, Artificial Sequence
  Description of Artificial Sequence: Synthetic peptide
  Seed: QNAISTTFPY
QIAISTTFPF

SEQ ID NO: 160112 - protein, 10 aa, Artificial Sequence
  Description of Artificial Sequence: Synthetic peptide
  Seed: QNAISTTFPY
QIAISTTFPK

SEQ ID NO: 160113 - protein, 10 aa, Artificial Sequence
  Description of Artificial Sequence: Synthetic peptide
  Seed: QNAISTTFPY
QIAISTTFPM

SEQ ID NO: 160114 - protein, 10 aa, Artificial Sequence
  Description of Artificial Sequence: Synthetic peptide
  Seed: QNAISTTFPY
QIAISTTFPR

SEQ ID NO: 160115 - protein, 10 aa, Artificial Sequence
  Description of Artificial Sequence: Synthetic peptide
  Seed: QNAISTTFPY
QIAISTTFPW

SEQ ID NO: 160116 - protein, 10 aa, Artificial Sequence
  Description of Artificial Sequence: Synthetic peptide
  Seed: QNAISTTFPY
QIAISTTFPY

SEQ ID NO: 160117 - protein, 8 aa, Artificial Sequence
  Description of Artificial Sequence: Synthetic peptide
  Seed: QNAISTTF
QIAISTTM

SEQ ID NO: 160118 - protein, 8 aa, Artificial Sequence
  Description of Artificial Sequence: Synthetic peptide
  Seed: QNAISTTF
QIAISTTY

SEQ ID NO: 160119 - protein, 8 aa, Artificial Sequence
  Description of Artificial Sequence: Synthetic peptide
  Seed: QLFIKDYR
QIFIKDYR

SEQ ID NO: 160120 - protein, 9 aa, Artificial Sequence
  Description of Artificial Sequence: Synthetic peptide
  Seed: QLFIKDYRY
QIFIKDYRY

SEQ ID NO: 160121 - protein, 9 aa, Artificial Sequence
  Description of Artificial Sequence: Synthetic peptide
  Seed: QLNPIDGPL
QINPIDGPL

SEQ ID NO: 160122 - protein, 9 aa, Artificial Sequence
  Description of Artificial Sequence: Synthetic peptide
  Seed: QLNPIDGPL
QINPIDGPV

SEQ ID NO: 160123 - protein, 9 aa, Artificial Sequence
  Description of Artificial Sequence: Synthetic peptide
  Seed: QSSDDFALI
QISDDFALA

SEQ ID NO: 160124 - protein, 9 aa, Artificial Sequence
  Description of Artificial Sequence: Synthetic peptide
  Seed: QSSDDFALI
QISDDFALF

SEQ ID NO: 160125 - protein, 9 aa, Artificial Sequence
  Description of Artificial Sequence: Synthetic peptide
  Seed: QSSDDFALI
QISDDFALI

SEQ ID NO: 160126 - protein, 9 aa, Artificial Sequence
  Description of Artificial Sequence: Synthetic peptide
  Seed: QSSDDFALI
QISDDFALL

SEQ ID NO: 160127 - protein, 9 aa, Artificial Sequence
  Description of Artificial Sequence: Synthetic peptide
  Seed: QSSDDFALI
QISDDFALM

SEQ ID NO: 160128 - protein, 9 aa, Artificial Sequence
  Description of Artificial Sequence: Synthetic peptide
  Seed: QSSDDFALI
QISDDFALT

SEQ ID NO: 160129 - protein, 9 aa, Artificial Sequence
  Description of Artificial Sequence: Synthetic peptide
  Seed: QSSDDFALI
QISDDFALV

SEQ ID NO: 160130 - protein, 9 aa, Artificial Sequence
  Description of Artificial Sequence: Synthetic peptide
  Seed: QSSDDFALI
QISDDFALW

SEQ ID NO: 160131 - protein, 9 aa, Artificial Sequence
  Description of Artificial Sequence: Synthetic peptide
  Seed: QSSDDFALI
QISDDFALY

SEQ ID NO: 160132 - protein, 8 aa, Artificial Sequence
  Description of Artificial Sequence: Synthetic peptide
  Seed: QNAISTTF
QKAISTTF

SEQ ID NO: 160133 - protein, 10 aa, Artificial Sequence
  Description of Artificial Sequence: Synthetic peptide
  Seed: QNAISTTFPY
QKAISTTFPF

SEQ ID NO: 160134 - protein, 10 aa, Artificial Sequence
  Description of Artificial Sequence: Synthetic peptide
  Seed: QNAISTTFPY
QKAISTTFPK

SEQ ID NO: 160135 - protein, 10 aa, Artificial Sequence
  Description of Artificial Sequence: Synthetic peptide
  Seed: QNAISTTFPY
QKAISTTFPL

SEQ ID NO: 160136 - protein, 10 aa, Artificial Sequence
  Description of Artificial Sequence: Synthetic peptide
  Seed: QNAISTTFPY
QKAISTTFPM

SEQ ID NO: 160137 - protein, 10 aa, Artificial Sequence
  Description of Artificial Sequence: Synthetic peptide
  Seed: QNAISTTFPY
QKAISTTFPR

SEQ ID NO: 160138 - protein, 10 aa, Artificial Sequence
  Description of Artificial Sequence: Synthetic peptide
  Seed: QNAISTTFPY
QKAISTTFPW

SEQ ID NO: 160139 - protein, 10 aa, Artificial Sequence
  Description of Artificial Sequence: Synthetic peptide
  Seed: QNAISTTFPY
QKAISTTFPY

SEQ ID NO: 160140 - protein, 8 aa, Artificial Sequence
  Description of Artificial Sequence: Synthetic peptide
  Seed: QNAISTTF
QKAISTTM

SEQ ID NO: 160141 - protein, 8 aa, Artificial Sequence
  Description of Artificial Sequence: Synthetic peptide
  Seed: QNAISTTF
QKAISTTY

SEQ ID NO: 160142 - protein, 9 aa, Artificial Sequence
  Description of Artificial Sequence: Synthetic peptide
  Seed: QLFIKDYRY
QKFIKDYRF

SEQ ID NO: 160143 - protein, 9 aa, Artificial Sequence
  Description of Artificial Sequence: Synthetic peptide
  Seed: QLFIKDYRY
QKFIKDYRM

SEQ ID NO: 160144 - protein, 9 aa, Artificial Sequence
  Description of Artificial Sequence: Synthetic peptide
  Seed: QLFIKDYRY
QKFIKDYRY

SEQ ID NO: 160145 - protein, 8 aa, Artificial Sequence
  Description of Artificial Sequence: Synthetic peptide
  Seed: QNAISTTF
QLAISTTF

SEQ ID NO: 160146 - protein, 10 aa, Artificial Sequence
  Description of Artificial Sequence: Synthetic peptide
  Seed: QNAISTTFPY
QLAISTTFPF

SEQ ID NO: 160147 - protein, 10 aa, Artificial Sequence
  Description of Artificial Sequence: Synthetic peptide
  Seed: QNAISTTFPY
QLAISTTFPK

SEQ ID NO: 160148 - protein, 10 aa, Artificial Sequence
  Description of Artificial Sequence: Synthetic peptide
  Seed: QNAISTTFPY
QLAISTTFPL

SEQ ID NO: 160149 - protein, 10 aa, Artificial Sequence
  Description of Artificial Sequence: Synthetic peptide
  Seed: QNAISTTFPY
QLAISTTFPM

SEQ ID NO: 160150 - protein, 10 aa, Artificial Sequence
  Description of Artificial Sequence: Synthetic peptide
  Seed: QNAISTTFPY
QLAISTTFPR

SEQ ID NO: 160151 - protein, 10 aa, Artificial Sequence
  Description of Artificial Sequence: Synthetic peptide
  Seed: QNAISTTFPY
QLAISTTFPW

SEQ ID NO: 160152 - protein, 10 aa, Artificial Sequence
  Description of Artificial Sequence: Synthetic peptide
  Seed: QNAISTTFPY
QLAISTTFPY

SEQ ID NO: 160153 - protein, 8 aa, Artificial Sequence
  Description of Artificial Sequence: Synthetic peptide
  Seed: QNAISTTF
QLAISTTY

SEQ ID NO: 160154 - protein, 9 aa, Artificial Sequence
  Description of Artificial Sequence: Synthetic peptide
  Seed: QLFIKDYRY
QLFIKDYRF

SEQ ID NO: 160155 - protein, 9 aa, Artificial Sequence
  Description of Artificial Sequence: Synthetic peptide
  Seed: QLNPIDGPL
QLNPIDGPA

SEQ ID NO: 160156 - protein, 9 aa, Artificial Sequence
  Description of Artificial Sequence: Synthetic peptide
  Seed: QLNPIDGPL
QLNPIDGPI

SEQ ID NO: 160157 - protein, 9 aa, Artificial Sequence
  Description of Artificial Sequence: Synthetic peptide
  Seed: QLNPIDGPL
QLNPIDGPM

SEQ ID NO: 160158 - protein, 9 aa, Artificial Sequence
  Description of Artificial Sequence: Synthetic peptide
  Seed: QLNPIDGPL
QLNPIDGPV

SEQ ID NO: 160159 - protein, 9 aa, Artificial Sequence
  Description of Artificial Sequence: Synthetic peptide
  Seed: QSSDDFALI
QLSDDFALA

SEQ ID NO: 160160 - protein, 9 aa, Artificial Sequence
  Description of Artificial Sequence: Synthetic peptide
  Seed: QSSDDFALI
QLSDDFALC

SEQ ID NO: 160161 - protein, 9 aa, Artificial Sequence
  Description of Artificial Sequence: Synthetic peptide
  Seed: QSSDDFALI
QLSDDFALF

SEQ ID NO: 160162 - protein, 9 aa, Artificial Sequence
  Description of Artificial Sequence: Synthetic peptide
  Seed: QSSDDFALI
QLSDDFALI

SEQ ID NO: 160163 - protein, 9 aa, Artificial Sequence
  Description of Artificial Sequence: Synthetic peptide
  Seed: QSSDDFALI
QLSDDFALL

SEQ ID NO: 160164 - protein, 9 aa, Artificial Sequence
  Description of Artificial Sequence: Synthetic peptide
  Seed: QSSDDFALI
QLSDDFALM

SEQ ID NO: 160165 - protein, 9 aa, Artificial Sequence
  Description of Artificial Sequence: Synthetic peptide
  Seed: QSSDDFALI
QLSDDFALS

SEQ ID NO: 160166 - protein, 9 aa, Artificial Sequence
  Description of Artificial Sequence: Synthetic peptide
  Seed: QSSDDFALI
QLSDDFALT

SEQ ID NO: 160167 - protein, 9 aa, Artificial Sequence
  Description of Artificial Sequence: Synthetic peptide
  Seed: QSSDDFALI
QLSDDFALV

SEQ ID NO: 160168 - protein, 9 aa, Artificial Sequence
  Description of Artificial Sequence: Synthetic peptide
  Seed: QSSDDFALI
QLSDDFALW

SEQ ID NO: 160169 - protein, 8 aa, Artificial Sequence
  Description of Artificial Sequence: Synthetic peptide
  Seed: QNAISTTF
QMAISTTF

SEQ ID NO: 160170 - protein, 10 aa, Artificial Sequence
  Description of Artificial Sequence: Synthetic peptide
  Seed: QNAISTTFPY
QMAISTTFPF

SEQ ID NO: 160171 - protein, 10 aa, Artificial Sequence
  Description of Artificial Sequence: Synthetic peptide
  Seed: QNAISTTFPY
QMAISTTFPH

SEQ ID NO: 160172 - protein, 10 aa, Artificial Sequence
  Description of Artificial Sequence: Synthetic peptide
  Seed: QNAISTTFPY
QMAISTTFPI

SEQ ID NO: 160173 - protein, 10 aa, Artificial Sequence
  Description of Artificial Sequence: Synthetic peptide
  Seed: QNAISTTFPY
QMAISTTFPK

SEQ ID NO: 160174 - protein, 10 aa, Artificial Sequence
  Description of Artificial Sequence: Synthetic peptide
  Seed: QNAISTTFPY
QMAISTTFPL

SEQ ID NO: 160175 - protein, 10 aa, Artificial Sequence
  Description of Artificial Sequence: Synthetic peptide
  Seed: QNAISTTFPY
QMAISTTFPM

SEQ ID NO: 160176 - protein, 10 aa, Artificial Sequence
  Description of Artificial Sequence: Synthetic peptide
  Seed: QNAISTTFPY
QMAISTTFPR

SEQ ID NO: 160177 - protein, 10 aa, Artificial Sequence
  Description of Artificial Sequence: Synthetic peptide
  Seed: QNAISTTFPY
QMAISTTFPW

SEQ ID NO: 160178 - protein, 10 aa, Artificial Sequence
  Description of Artificial Sequence: Synthetic peptide
  Seed: QNAISTTFPY
QMAISTTFPY

SEQ ID NO: 160179 - protein, 8 aa, Artificial Sequence
  Description of Artificial Sequence: Synthetic peptide
  Seed: QNAISTTF
QMAISTTM

SEQ ID NO: 160180 - protein, 8 aa, Artificial Sequence
  Description of Artificial Sequence: Synthetic peptide
  Seed: QNAISTTF
QMAISTTY

SEQ ID NO: 160181 - protein, 8 aa, Artificial Sequence
  Description of Artificial Sequence: Synthetic peptide
  Seed: QLFIKDYR
QMFIKDYK

SEQ ID NO: 160182 - protein, 8 aa, Artificial Sequence
  Description of Artificial Sequence: Synthetic peptide
  Seed: QLFIKDYR
QMFIKDYR

SEQ ID NO: 160183 - protein, 9 aa, Artificial Sequence
  Description of Artificial Sequence: Synthetic peptide
  Seed: QLFIKDYRY
QMFIKDYRF

SEQ ID NO: 160184 - protein, 9 aa, Artificial Sequence
  Description of Artificial Sequence: Synthetic peptide
  Seed: QLFIKDYRY
QMFIKDYRM

SEQ ID NO: 160185 - protein, 9 aa, Artificial Sequence
  Description of Artificial Sequence: Synthetic peptide
  Seed: QLFIKDYRY
QMFIKDYRY

SEQ ID NO: 160186 - protein, 9 aa, Artificial Sequence
  Description of Artificial Sequence: Synthetic peptide
  Seed: QLNPIDGPL
QMNPIDGPA

SEQ ID NO: 160187 - protein, 9 aa, Artificial Sequence
  Description of Artificial Sequence: Synthetic peptide
  Seed: QLNPIDGPL
QMNPIDGPI

SEQ ID NO: 160188 - protein, 9 aa, Artificial Sequence
  Description of Artificial Sequence: Synthetic peptide
  Seed: QLNPIDGPL
QMNPIDGPL

SEQ ID NO: 160189 - protein, 9 aa, Artificial Sequence
  Description of Artificial Sequence: Synthetic peptide
  Seed: QLNPIDGPL
QMNPIDGPM

SEQ ID NO: 160190 - protein, 9 aa, Artificial Sequence
  Description of Artificial Sequence: Synthetic peptide
  Seed: QLNPIDGPL
QMNPIDGPV

SEQ ID NO: 160191 - protein, 9 aa, Artificial Sequence
  Description of Artificial Sequence: Synthetic peptide
  Seed: QSSDDFALI
QMSDDFALA

SEQ ID NO: 160192 - protein, 9 aa, Artificial Sequence
  Description of Artificial Sequence: Synthetic peptide
  Seed: QSSDDFALI
QMSDDFALC

SEQ ID NO: 160193 - protein, 9 aa, Artificial Sequence
  Description of Artificial Sequence: Synthetic peptide
  Seed: QSSDDFALI
QMSDDFALF

SEQ ID NO: 160194 - protein, 9 aa, Artificial Sequence
  Description of Artificial Sequence: Synthetic peptide
  Seed: QSSDDFALI
QMSDDFALG

SEQ ID NO: 160195 - protein, 9 aa, Artificial Sequence
  Description of Artificial Sequence: Synthetic peptide
  Seed: QSSDDFALI
QMSDDFALI

SEQ ID NO: 160196 - protein, 9 aa, Artificial Sequence
  Description of Artificial Sequence: Synthetic peptide
  Seed: QSSDDFALI
QMSDDFALL

SEQ ID NO: 160197 - protein, 9 aa, Artificial Sequence
  Description of Artificial Sequence: Synthetic peptide
  Seed: QSSDDFALI
QMSDDFALM

SEQ ID NO: 160198 - protein, 9 aa, Artificial Sequence
  Description of Artificial Sequence: Synthetic peptide
  Seed: QSSDDFALI
QMSDDFALS

SEQ ID NO: 160199 - protein, 9 aa, Artificial Sequence
  Description of Artificial Sequence: Synthetic peptide
  Seed: QSSDDFALI
QMSDDFALT

SEQ ID NO: 160200 - protein, 9 aa, Artificial Sequence
  Description of Artificial Sequence: Synthetic peptide
  Seed: QSSDDFALI
QMSDDFALV

SEQ ID NO: 160201 - protein, 9 aa, Artificial Sequence
  Description of Artificial Sequence: Synthetic peptide
  Seed: QSSDDFALI
QMSDDFALW

SEQ ID NO: 160202 - protein, 9 aa, Artificial Sequence
  Description of Artificial Sequence: Synthetic peptide
  Seed: QSSDDFALI
QMSDDFALY

SEQ ID NO: 160203 - protein, 10 aa, Artificial Sequence
  Description of Artificial Sequence: Synthetic peptide
  Seed: QNAISTTFPY
QNAISTTFPF

SEQ ID NO: 160204 - protein, 10 aa, Artificial Sequence
  Description of Artificial Sequence: Synthetic peptide
  Seed: QNAISTTFPY
QNAISTTFPK

SEQ ID NO: 160205 - protein, 10 aa, Artificial Sequence
  Description of Artificial Sequence: Synthetic peptide
  Seed: QNAISTTFPY
QNAISTTFPM

SEQ ID NO: 160206 - protein, 10 aa, Artificial Sequence
  Description of Artificial Sequence: Synthetic peptide
  Seed: QNAISTTFPY
QNAISTTFPR

SEQ ID NO: 160207 - protein, 10 aa, Artificial Sequence
  Description of Artificial Sequence: Synthetic peptide
  Seed: QNAISTTFPY
QNAISTTFPW

SEQ ID NO: 160208 - protein, 8 aa, Artificial Sequence
  Description of Artificial Sequence: Synthetic peptide
  Seed: QNAISTTF
QNAISTTY

SEQ ID NO: 160209 - protein, 9 aa, Artificial Sequence
  Description of Artificial Sequence: Synthetic peptide
  Seed: QLFIKDYRY
QNFIKDYRY

SEQ ID NO: 160210 - protein, 9 aa, Artificial Sequence
  Description of Artificial Sequence: Synthetic peptide
  Seed: QSSDDFALI
QNSDDFALV

SEQ ID NO: 160211 - protein, 9 aa, Artificial Sequence
  Description of Artificial Sequence: Synthetic peptide
  Seed: QSSDDFALI
QNSDDFALW

SEQ ID NO: 160212 - protein, 11 aa, Artificial Sequence
  Description of Artificial Sequence: Synthetic peptide
  Seed: QPAATALANTI
QPAATALANTF

SEQ ID NO: 160213 - protein, 11 aa, Artificial Sequence
  Description of Artificial Sequence: Synthetic peptide
  Seed: QPAATALANTI
QPAATALANTL

SEQ ID NO: 160214 - protein, 11 aa, Artificial Sequence
  Description of Artificial Sequence: Synthetic peptide
  Seed: QPAATALANTI
QPAATALANTM

SEQ ID NO: 160215 - protein, 11 aa, Artificial Sequence
  Description of Artificial Sequence: Synthetic peptide
  Seed: QPAATALANTI
QPAATALANTV

SEQ ID NO: 160216 - protein, 10 aa, Artificial Sequence
  Description of Artificial Sequence: Synthetic peptide
  Seed: QNAISTTFPY
QPAISTTFPF

SEQ ID NO: 160217 - protein, 10 aa, Artificial Sequence
  Description of Artificial Sequence: Synthetic peptide
  Seed: QNAISTTFPY
QPAISTTFPH

SEQ ID NO: 160218 - protein, 10 aa, Artificial Sequence
  Description of Artificial Sequence: Synthetic peptide
  Seed: QNAISTTFPY
QPAISTTFPK

SEQ ID NO: 160219 - protein, 10 aa, Artificial Sequence
  Description of Artificial Sequence: Synthetic peptide
  Seed: QNAISTTFPY
QPAISTTFPL

SEQ ID NO: 160220 - protein, 10 aa, Artificial Sequence
  Description of Artificial Sequence: Synthetic peptide
  Seed: QNAISTTFPY
QPAISTTFPM

SEQ ID NO: 160221 - protein, 10 aa, Artificial Sequence
  Description of Artificial Sequence: Synthetic peptide
  Seed: QNAISTTFPY
QPAISTTFPR

SEQ ID NO: 160222 - protein, 10 aa, Artificial Sequence
  Description of Artificial Sequence: Synthetic peptide
  Seed: QNAISTTFPY
QPAISTTFPW

SEQ ID NO: 160223 - protein, 10 aa, Artificial Sequence
  Description of Artificial Sequence: Synthetic peptide
  Seed: QNAISTTFPY
QPAISTTFPY

SEQ ID NO: 160224 - protein, 9 aa, Artificial Sequence
  Description of Artificial Sequence: Synthetic peptide
  Seed: QSSDDFALI
QPSDDFALV

SEQ ID NO: 160225 - protein, 8 aa, Artificial Sequence
  Description of Artificial Sequence: Synthetic peptide
  Seed: QNAISTTF
QQAISTTF

SEQ ID NO: 160226 - protein, 10 aa, Artificial Sequence
  Description of Artificial Sequence: Synthetic peptide
  Seed: QNAISTTFPY
QQAISTTFPF

SEQ ID NO: 160227 - protein, 10 aa, Artificial Sequence
  Description of Artificial Sequence: Synthetic peptide
  Seed: QNAISTTFPY
QQAISTTFPH

SEQ ID NO: 160228 - protein, 10 aa, Artificial Sequence
  Description of Artificial Sequence: Synthetic peptide
  Seed: QNAISTTFPY
QQAISTTFPI

SEQ ID NO: 160229 - protein, 10 aa, Artificial Sequence
  Description of Artificial Sequence: Synthetic peptide
  Seed: QNAISTTFPY
QQAISTTFPK

SEQ ID NO: 160230 - protein, 10 aa, Artificial Sequence
  Description of Artificial Sequence: Synthetic peptide
  Seed: QNAISTTFPY
QQAISTTFPL

SEQ ID NO: 160231 - protein, 10 aa, Artificial Sequence
  Description of Artificial Sequence: Synthetic peptide
  Seed: QNAISTTFPY
QQAISTTFPM

SEQ ID NO: 160232 - protein, 10 aa, Artificial Sequence
  Description of Artificial Sequence: Synthetic peptide
  Seed: QNAISTTFPY
QQAISTTFPR

SEQ ID NO: 160233 - protein, 10 aa, Artificial Sequence
  Description of Artificial Sequence: Synthetic peptide
  Seed: QNAISTTFPY
QQAISTTFPV

SEQ ID NO: 160234 - protein, 10 aa, Artificial Sequence
  Description of Artificial Sequence: Synthetic peptide
  Seed: QNAISTTFPY
QQAISTTFPW

SEQ ID NO: 160235 - protein, 10 aa, Artificial Sequence
  Description of Artificial Sequence: Synthetic peptide
  Seed: QNAISTTFPY
QQAISTTFPY

SEQ ID NO: 160236 - protein, 8 aa, Artificial Sequence
  Description of Artificial Sequence: Synthetic peptide
  Seed: QNAISTTF
QQAISTTL

SEQ ID NO: 160237 - protein, 8 aa, Artificial Sequence
  Description of Artificial Sequence: Synthetic peptide
  Seed: QNAISTTF
QQAISTTM

SEQ ID NO: 160238 - protein, 8 aa, Artificial Sequence
  Description of Artificial Sequence: Synthetic peptide
  Seed: QNAISTTF
QQAISTTY

SEQ ID NO: 160239 - protein, 9 aa, Artificial Sequence
  Description of Artificial Sequence: Synthetic peptide
  Seed: QLFIKDYRY
QQFIKDYRF

SEQ ID NO: 160240 - protein, 9 aa, Artificial Sequence
  Description of Artificial Sequence: Synthetic peptide
  Seed: QLFIKDYRY
QQFIKDYRL

SEQ ID NO: 160241 - protein, 9 aa, Artificial Sequence
  Description of Artificial Sequence: Synthetic peptide
  Seed: QLFIKDYRY
QQFIKDYRM

SEQ ID NO: 160242 - protein, 9 aa, Artificial Sequence
  Description of Artificial Sequence: Synthetic peptide
  Seed: QLFIKDYRY
QQFIKDYRY

SEQ ID NO: 160243 - protein, 9 aa, Artificial Sequence
  Description of Artificial Sequence: Synthetic peptide
  Seed: QLNPIDGPL
QQNPIDGPL

SEQ ID NO: 160244 - protein, 9 aa, Artificial Sequence
  Description of Artificial Sequence: Synthetic peptide
  Seed: QLNPIDGPL
QQNPIDGPV

SEQ ID NO: 160245 - protein, 9 aa, Artificial Sequence
  Description of Artificial Sequence: Synthetic peptide
  Seed: QSSDDFALI
QQSDDFALA

SEQ ID NO: 160246 - protein, 9 aa, Artificial Sequence
  Description of Artificial Sequence: Synthetic peptide
  Seed: QSSDDFALI
QQSDDFALC

SEQ ID NO: 160247 - protein, 9 aa, Artificial Sequence
  Description of Artificial Sequence: Synthetic peptide
  Seed: QSSDDFALI
QQSDDFALF

SEQ ID NO: 160248 - protein, 9 aa, Artificial Sequence
  Description of Artificial Sequence: Synthetic peptide
  Seed: QSSDDFALI
QQSDDFALI

SEQ ID NO: 160249 - protein, 9 aa, Artificial Sequence
  Description of Artificial Sequence: Synthetic peptide
  Seed: QSSDDFALI
QQSDDFALL

SEQ ID NO: 160250 - protein, 9 aa, Artificial Sequence
  Description of Artificial Sequence: Synthetic peptide
  Seed: QSSDDFALI
QQSDDFALM

SEQ ID NO: 160251 - protein, 9 aa, Artificial Sequence
  Description of Artificial Sequence: Synthetic peptide
  Seed: QSSDDFALI
QQSDDFALT

SEQ ID NO: 160252 - protein, 9 aa, Artificial Sequence
  Description of Artificial Sequence: Synthetic peptide
  Seed: QSSDDFALI
QQSDDFALV

SEQ ID NO: 160253 - protein, 9 aa, Artificial Sequence
  Description of Artificial Sequence: Synthetic peptide
  Seed: QSSDDFALI
QQSDDFALW

SEQ ID NO: 160254 - protein, 8 aa, Artificial Sequence
  Description of Artificial Sequence: Synthetic peptide
  Seed: QNAISTTF
QRAISTTF

SEQ ID NO: 160255 - protein, 10 aa, Artificial Sequence
  Description of Artificial Sequence: Synthetic peptide
  Seed: QNAISTTFPY
QRAISTTFPF

SEQ ID NO: 160256 - protein, 10 aa, Artificial Sequence
  Description of Artificial Sequence: Synthetic peptide
  Seed: QNAISTTFPY
QRAISTTFPK

SEQ ID NO: 160257 - protein, 10 aa, Artificial Sequence
  Description of Artificial Sequence: Synthetic peptide
  Seed: QNAISTTFPY
QRAISTTFPM

SEQ ID NO: 160258 - protein, 10 aa, Artificial Sequence
  Description of Artificial Sequence: Synthetic peptide
  Seed: QNAISTTFPY
QRAISTTFPR

SEQ ID NO: 160259 - protein, 10 aa, Artificial Sequence
  Description of Artificial Sequence: Synthetic peptide
  Seed: QNAISTTFPY
QRAISTTFPW

SEQ ID NO: 160260 - protein, 10 aa, Artificial Sequence
  Description of Artificial Sequence: Synthetic peptide
  Seed: QNAISTTFPY
QRAISTTFPY

SEQ ID NO: 160261 - protein, 8 aa, Artificial Sequence
  Description of Artificial Sequence: Synthetic peptide
  Seed: QNAISTTF
QRAISTTM

SEQ ID NO: 160262 - protein, 8 aa, Artificial Sequence
  Description of Artificial Sequence: Synthetic peptide
  Seed: QNAISTTF
QRAISTTY

SEQ ID NO: 160263 - protein, 8 aa, Artificial Sequence
  Description of Artificial Sequence: Synthetic peptide
  Seed: QNAISTTF
QSAISTTF

SEQ ID NO: 160264 - protein, 10 aa, Artificial Sequence
  Description of Artificial Sequence: Synthetic peptide
  Seed: QNAISTTFPY
QSAISTTFPF

SEQ ID NO: 160265 - protein, 10 aa, Artificial Sequence
  Description of Artificial Sequence: Synthetic peptide
  Seed: QNAISTTFPY
QSAISTTFPI

SEQ ID NO: 160266 - protein, 10 aa, Artificial Sequence
  Description of Artificial Sequence: Synthetic peptide
  Seed: QNAISTTFPY
QSAISTTFPK

SEQ ID NO: 160267 - protein, 10 aa, Artificial Sequence
  Description of Artificial Sequence: Synthetic peptide
  Seed: QNAISTTFPY
QSAISTTFPL

SEQ ID NO: 160268 - protein, 10 aa, Artificial Sequence
  Description of Artificial Sequence: Synthetic peptide
  Seed: QNAISTTFPY
QSAISTTFPM

SEQ ID NO: 160269 - protein, 10 aa, Artificial Sequence
  Description of Artificial Sequence: Synthetic peptide
  Seed: QNAISTTFPY
QSAISTTFPR

SEQ ID NO: 160270 - protein, 10 aa, Artificial Sequence
  Description of Artificial Sequence: Synthetic peptide
  Seed: QNAISTTFPY
QSAISTTFPW

SEQ ID NO: 160271 - protein, 10 aa, Artificial Sequence
  Description of Artificial Sequence: Synthetic peptide
  Seed: QNAISTTFPY
QSAISTTFPY

SEQ ID NO: 160272 - protein, 8 aa, Artificial Sequence
  Description of Artificial Sequence: Synthetic peptide
  Seed: QNAISTTF
QSAISTTY

SEQ ID NO: 160273 - protein, 8 aa, Artificial Sequence
  Description of Artificial Sequence: Synthetic peptide
  Seed: QLFIKDYR
QSFIKDYR

SEQ ID NO: 160274 - protein, 9 aa, Artificial Sequence
  Description of Artificial Sequence: Synthetic peptide
  Seed: QLFIKDYRY
QSFIKDYRF

SEQ ID NO: 160275 - protein, 9 aa, Artificial Sequence
  Description of Artificial Sequence: Synthetic peptide
  Seed: QLFIKDYRY
QSFIKDYRY

SEQ ID NO: 160276 - protein, 9 aa, Artificial Sequence
  Description of Artificial Sequence: Synthetic peptide
  Seed: QSSDDFALI
QSSDDFALA

SEQ ID NO: 160277 - protein, 9 aa, Artificial Sequence
  Description of Artificial Sequence: Synthetic peptide
  Seed: QSSDDFALI
QSSDDFALF

SEQ ID NO: 160278 - protein, 9 aa, Artificial Sequence
  Description of Artificial Sequence: Synthetic peptide
  Seed: QSSDDFALI
QSSDDFALL

SEQ ID NO: 160279 - protein, 9 aa, Artificial Sequence
  Description of Artificial Sequence: Synthetic peptide
  Seed: QSSDDFALI
QSSDDFALM

SEQ ID NO: 160280 - protein, 9 aa, Artificial Sequence
  Description of Artificial Sequence: Synthetic peptide
  Seed: QSSDDFALI
QSSDDFALV

SEQ ID NO: 160281 - protein, 9 aa, Artificial Sequence
  Description of Artificial Sequence: Synthetic peptide
  Seed: QSSDDFALI
QSSDDFALW

SEQ ID NO: 160282 - protein, 9 aa, Artificial Sequence
  Description of Artificial Sequence: Synthetic peptide
  Seed: QSSDDFALI
QSSDDFALY

SEQ ID NO: 160283 - protein, 8 aa, Artificial Sequence
  Description of Artificial Sequence: Synthetic peptide
  Seed: QNAISTTF
QTAISTTF

SEQ ID NO: 160284 - protein, 10 aa, Artificial Sequence
  Description of Artificial Sequence: Synthetic peptide
  Seed: QNAISTTFPY
QTAISTTFPF

SEQ ID NO: 160285 - protein, 10 aa, Artificial Sequence
  Description of Artificial Sequence: Synthetic peptide
  Seed: QNAISTTFPY
QTAISTTFPH

SEQ ID NO: 160286 - protein, 10 aa, Artificial Sequence
  Description of Artificial Sequence: Synthetic peptide
  Seed: QNAISTTFPY
QTAISTTFPI

SEQ ID NO: 160287 - protein, 10 aa, Artificial Sequence
  Description of Artificial Sequence: Synthetic peptide
  Seed: QNAISTTFPY
QTAISTTFPK

SEQ ID NO: 160288 - protein, 10 aa, Artificial Sequence
  Description of Artificial Sequence: Synthetic peptide
  Seed: QNAISTTFPY
QTAISTTFPL

SEQ ID NO: 160289 - protein, 10 aa, Artificial Sequence
  Description of Artificial Sequence: Synthetic peptide
  Seed: QNAISTTFPY
QTAISTTFPM

SEQ ID NO: 160290 - protein, 10 aa, Artificial Sequence
  Description of Artificial Sequence: Synthetic peptide
  Seed: QNAISTTFPY
QTAISTTFPR

SEQ ID NO: 160291 - protein, 10 aa, Artificial Sequence
  Description of Artificial Sequence: Synthetic peptide
  Seed: QNAISTTFPY
QTAISTTFPW

SEQ ID NO: 160292 - protein, 10 aa, Artificial Sequence
  Description of Artificial Sequence: Synthetic peptide
  Seed: QNAISTTFPY
QTAISTTFPY

SEQ ID NO: 160293 - protein, 8 aa, Artificial Sequence
  Description of Artificial Sequence: Synthetic peptide
  Seed: QNAISTTF
QTAISTTY

SEQ ID NO: 160294 - protein, 8 aa, Artificial Sequence
  Description of Artificial Sequence: Synthetic peptide
  Seed: QLFIKDYR
QTFIKDYR

SEQ ID NO: 160295 - protein, 9 aa, Artificial Sequence
  Description of Artificial Sequence: Synthetic peptide
  Seed: QLFIKDYRY
QTFIKDYRF

SEQ ID NO: 160296 - protein, 9 aa, Artificial Sequence
  Description of Artificial Sequence: Synthetic peptide
  Seed: QLFIKDYRY
QTFIKDYRY

SEQ ID NO: 160297 - protein, 9 aa, Artificial Sequence
  Description of Artificial Sequence: Synthetic peptide
  Seed: QLNPIDGPL
QTNPIDGPV

SEQ ID NO: 160298 - protein, 9 aa, Artificial Sequence
  Description of Artificial Sequence: Synthetic peptide
  Seed: QSSDDFALI
QTSDDFALA

SEQ ID NO: 160299 - protein, 9 aa, Artificial Sequence
  Description of Artificial Sequence: Synthetic peptide
  Seed: QSSDDFALI
QTSDDFALC

SEQ ID NO: 160300 - protein, 9 aa, Artificial Sequence
  Description of Artificial Sequence: Synthetic peptide
  Seed: QSSDDFALI
QTSDDFALF

SEQ ID NO: 160301 - protein, 9 aa, Artificial Sequence
  Description of Artificial Sequence: Synthetic peptide
  Seed: QSSDDFALI
QTSDDFALI

SEQ ID NO: 160302 - protein, 9 aa, Artificial Sequence
  Description of Artificial Sequence: Synthetic peptide
  Seed: QSSDDFALI
QTSDDFALL

SEQ ID NO: 160303 - protein, 9 aa, Artificial Sequence
  Description of Artificial Sequence: Synthetic peptide
  Seed: QSSDDFALI
QTSDDFALM

SEQ ID NO: 160304 - protein, 9 aa, Artificial Sequence
  Description of Artificial Sequence: Synthetic peptide
  Seed: QSSDDFALI
QTSDDFALS

SEQ ID NO: 160305 - protein, 9 aa, Artificial Sequence
  Description of Artificial Sequence: Synthetic peptide
  Seed: QSSDDFALI
QTSDDFALT

SEQ ID NO: 160306 - protein, 9 aa, Artificial Sequence
  Description of Artificial Sequence: Synthetic peptide
  Seed: QSSDDFALI
QTSDDFALV

SEQ ID NO: 160307 - protein, 9 aa, Artificial Sequence
  Description of Artificial Sequence: Synthetic peptide
  Seed: QSSDDFALI
QTSDDFALW

SEQ ID NO: 160308 - protein, 9 aa, Artificial Sequence
  Description of Artificial Sequence: Synthetic peptide
  Seed: QSSDDFALI
QTSDDFALY

SEQ ID NO: 160309 - protein, 8 aa, Artificial Sequence
  Description of Artificial Sequence: Synthetic peptide
  Seed: QNAISTTF
QVAISTTF

SEQ ID NO: 160310 - protein, 10 aa, Artificial Sequence
  Description of Artificial Sequence: Synthetic peptide
  Seed: QNAISTTFPY
QVAISTTFPF

SEQ ID NO: 160311 - protein, 10 aa, Artificial Sequence
  Description of Artificial Sequence: Synthetic peptide
  Seed: QNAISTTFPY
QVAISTTFPK

SEQ ID NO: 160312 - protein, 10 aa, Artificial Sequence
  Description of Artificial Sequence: Synthetic peptide
  Seed: QNAISTTFPY
QVAISTTFPM

SEQ ID NO: 160313 - protein, 10 aa, Artificial Sequence
  Description of Artificial Sequence: Synthetic peptide
  Seed: QNAISTTFPY
QVAISTTFPR

SEQ ID NO: 160314 - protein, 10 aa, Artificial Sequence
  Description of Artificial Sequence: Synthetic peptide
  Seed: QNAISTTFPY
QVAISTTFPW

SEQ ID NO: 160315 - protein, 10 aa, Artificial Sequence
  Description of Artificial Sequence: Synthetic peptide
  Seed: QNAISTTFPY
QVAISTTFPY

SEQ ID NO: 160316 - protein, 8 aa, Artificial Sequence
  Description of Artificial Sequence: Synthetic peptide
  Seed: QNAISTTF
QVAISTTY

SEQ ID NO: 160317 - protein, 8 aa, Artificial Sequence
  Description of Artificial Sequence: Synthetic peptide
  Seed: QLFIKDYR
QVFIKDYR

SEQ ID NO: 160318 - protein, 9 aa, Artificial Sequence
  Description of Artificial Sequence: Synthetic peptide
  Seed: QLFIKDYRY
QVFIKDYRY

SEQ ID NO: 160319 - protein, 9 aa, Artificial Sequence
  Description of Artificial Sequence: Synthetic peptide
  Seed: QLNPIDGPL
QVNPIDGPL

SEQ ID NO: 160320 - protein, 9 aa, Artificial Sequence
  Description of Artificial Sequence: Synthetic peptide
  Seed: QLNPIDGPL
QVNPIDGPV

SEQ ID NO: 160321 - protein, 9 aa, Artificial Sequence
  Description of Artificial Sequence: Synthetic peptide
  Seed: QSSDDFALI
QVSDDFALA

SEQ ID NO: 160322 - protein, 9 aa, Artificial Sequence
  Description of Artificial Sequence: Synthetic peptide
  Seed: QSSDDFALI
QVSDDFALF

SEQ ID NO: 160323 - protein, 9 aa, Artificial Sequence
  Description of Artificial Sequence: Synthetic peptide
  Seed: QSSDDFALI
QVSDDFALI

SEQ ID NO: 160324 - protein, 9 aa, Artificial Sequence
  Description of Artificial Sequence: Synthetic peptide
  Seed: QSSDDFALI
QVSDDFALL

SEQ ID NO: 160325 - protein, 9 aa, Artificial Sequence
  Description of Artificial Sequence: Synthetic peptide
  Seed: QSSDDFALI
QVSDDFALM

SEQ ID NO: 160326 - protein, 9 aa, Artificial Sequence
  Description of Artificial Sequence: Synthetic peptide
  Seed: QSSDDFALI
QVSDDFALT

SEQ ID NO: 160327 - protein, 9 aa, Artificial Sequence
  Description of Artificial Sequence: Synthetic peptide
  Seed: QSSDDFALI
QVSDDFALV

SEQ ID NO: 160328 - protein, 9 aa, Artificial Sequence
  Description of Artificial Sequence: Synthetic peptide
  Seed: QSSDDFALI
QVSDDFALW

SEQ ID NO: 160329 - protein, 9 aa, Artificial Sequence
  Description of Artificial Sequence: Synthetic peptide
  Seed: QSSDDFALI
QVSDDFALY

SEQ ID NO: 160330 - protein, 8 aa, Artificial Sequence
  Description of Artificial Sequence: Synthetic peptide
  Seed: QNAISTTF
QWAISTTF

SEQ ID NO: 160331 - protein, 10 aa, Artificial Sequence
  Description of Artificial Sequence: Synthetic peptide
  Seed: QNAISTTFPY
QWAISTTFPF

SEQ ID NO: 160332 - protein, 10 aa, Artificial Sequence
  Description of Artificial Sequence: Synthetic peptide
  Seed: QNAISTTFPY
QWAISTTFPK

SEQ ID NO: 160333 - protein, 10 aa, Artificial Sequence
  Description of Artificial Sequence: Synthetic peptide
  Seed: QNAISTTFPY
QWAISTTFPL

SEQ ID NO: 160334 - protein, 10 aa, Artificial Sequence
  Description of Artificial Sequence: Synthetic peptide
  Seed: QNAISTTFPY
QWAISTTFPM

SEQ ID NO: 160335 - protein, 10 aa, Artificial Sequence
  Description of Artificial Sequence: Synthetic peptide
  Seed: QNAISTTFPY
QWAISTTFPR

SEQ ID NO: 160336 - protein, 10 aa, Artificial Sequence
  Description of Artificial Sequence: Synthetic peptide
  Seed: QNAISTTFPY
QWAISTTFPW

SEQ ID NO: 160337 - protein, 10 aa, Artificial Sequence
  Description of Artificial Sequence: Synthetic peptide
  Seed: QNAISTTFPY
QWAISTTFPY

SEQ ID NO: 160338 - protein, 8 aa, Artificial Sequence
  Description of Artificial Sequence: Synthetic peptide
  Seed: QNAISTTF
QWAISTTM

SEQ ID NO: 160339 - protein, 8 aa, Artificial Sequence
  Description of Artificial Sequence: Synthetic peptide
  Seed: QNAISTTF
QWAISTTY

SEQ ID NO: 160340 - protein, 8 aa, Artificial Sequence
  Description of Artificial Sequence: Synthetic peptide
  Seed: QLFIKDYR
QWFIKDYR

SEQ ID NO: 160341 - protein, 9 aa, Artificial Sequence
  Description of Artificial Sequence: Synthetic peptide
  Seed: QLFIKDYRY
QWFIKDYRF

SEQ ID NO: 160342 - protein, 9 aa, Artificial Sequence
  Description of Artificial Sequence: Synthetic peptide
  Seed: QLFIKDYRY
QWFIKDYRY

SEQ ID NO: 160343 - protein, 8 aa, Artificial Sequence
  Description of Artificial Sequence: Synthetic peptide
  Seed: QNAISTTF
QYAISTTF

SEQ ID NO: 160344 - protein, 10 aa, Artificial Sequence
  Description of Artificial Sequence: Synthetic peptide
  Seed: QNAISTTFPY
QYAISTTFPF

SEQ ID NO: 160345 - protein, 10 aa, Artificial Sequence
  Description of Artificial Sequence: Synthetic peptide
  Seed: QNAISTTFPY
QYAISTTFPK

SEQ ID NO: 160346 - protein, 10 aa, Artificial Sequence
  Description of Artificial Sequence: Synthetic peptide
  Seed: QNAISTTFPY
QYAISTTFPL

SEQ ID NO: 160347 - protein, 10 aa, Artificial Sequence
  Description of Artificial Sequence: Synthetic peptide
  Seed: QNAISTTFPY
QYAISTTFPM

SEQ ID NO: 160348 - protein, 10 aa, Artificial Sequence
  Description of Artificial Sequence: Synthetic peptide
  Seed: QNAISTTFPY
QYAISTTFPR

SEQ ID NO: 160349 - protein, 10 aa, Artificial Sequence
  Description of Artificial Sequence: Synthetic peptide
  Seed: QNAISTTFPY
QYAISTTFPW

SEQ ID NO: 160350 - protein, 10 aa, Artificial Sequence
  Description of Artificial Sequence: Synthetic peptide
  Seed: QNAISTTFPY
QYAISTTFPY

SEQ ID NO: 160351 - protein, 8 aa, Artificial Sequence
  Description of Artificial Sequence: Synthetic peptide
  Seed: QNAISTTF
QYAISTTM

SEQ ID NO: 160352 - protein, 8 aa, Artificial Sequence
  Description of Artificial Sequence: Synthetic peptide
  Seed: QNAISTTF
QYAISTTY

SEQ ID NO: 160353 - protein, 8 aa, Artificial Sequence
  Description of Artificial Sequence: Synthetic peptide
  Seed: QLFIKDYR
QYFIKDYR

SEQ ID NO: 160354 - protein, 9 aa, Artificial Sequence
  Description of Artificial Sequence: Synthetic peptide
  Seed: QLFIKDYRY
QYFIKDYRF

SEQ ID NO: 160355 - protein, 9 aa, Artificial Sequence
  Description of Artificial Sequence: Synthetic peptide
  Seed: QLFIKDYRY
QYFIKDYRY

SEQ ID NO: 160356 - protein, 9 aa, Artificial Sequence
  Description of Artificial Sequence: Synthetic peptide
  Seed: RRAIATPGM
RAAIATPGF

SEQ ID NO: 160357 - protein, 9 aa, Artificial Sequence
  Description of Artificial Sequence: Synthetic peptide
  Seed: RRAIATPGM
RAAIATPGL

SEQ ID NO: 160358 - protein, 9 aa, Artificial Sequence
  Description of Artificial Sequence: Synthetic peptide
  Seed: RRAIATPGM
RAAIATPGM

SEQ ID NO: 160359 - protein, 9 aa, Artificial Sequence
  Description of Artificial Sequence: Synthetic peptide
  Seed: RRAIATPGM
RAAIATPGY

SEQ ID NO: 160360 - protein, 10 aa, Artificial Sequence
  Description of Artificial Sequence: Synthetic peptide
  Seed: RAIATPGMQI
RAIATPGMQF

SEQ ID NO: 160361 - protein, 10 aa, Artificial Sequence
  Description of Artificial Sequence: Synthetic peptide
  Seed: RAIATPGMQI
RAIATPGMQL

SEQ ID NO: 160362 - protein, 10 aa, Artificial Sequence
  Description of Artificial Sequence: Synthetic peptide
  Seed: RAIATPGMQI
RAIATPGMQM

SEQ ID NO: 160363 - protein, 10 aa, Artificial Sequence
  Description of Artificial Sequence: Synthetic peptide
  Seed: RAIATPGMQI
RAIATPGMQV

SEQ ID NO: 160364 - protein, 10 aa, Artificial Sequence
  Description of Artificial Sequence: Synthetic peptide
  Seed: RAIATPGMQI
RAIATPGMQW

SEQ ID NO: 160365 - protein, 10 aa, Artificial Sequence
  Description of Artificial Sequence: Synthetic peptide
  Seed: RAIATPGMQI
RAIATPGMQY

SEQ ID NO: 160366 - protein, 10 aa, Artificial Sequence
  Description of Artificial Sequence: Synthetic peptide
  Seed: RALTLNTMTK
RALTLNTMTA

SEQ ID NO: 160367 - protein, 10 aa, Artificial Sequence
  Description of Artificial Sequence: Synthetic peptide
  Seed: RALTLNTMTK
RALTLNTMTR

SEQ ID NO: 160368 - protein, 9 aa, Artificial Sequence
  Description of Artificial Sequence: Synthetic peptide
  Seed: RRPVGISSM
RAPVGISSF

SEQ ID NO: 160369 - protein, 9 aa, Artificial Sequence
  Description of Artificial Sequence: Synthetic peptide
  Seed: RRPVGISSM
RAPVGISSL

SEQ ID NO: 160370 - protein, 9 aa, Artificial Sequence
  Description of Artificial Sequence: Synthetic peptide
  Seed: RRPVGISSM
RAPVGISSM

SEQ ID NO: 160371 - protein, 9 aa, Artificial Sequence
  Description of Artificial Sequence: Synthetic peptide
  Seed: RRPVGISSM
RAPVGISSY

SEQ ID NO: 160372 - protein, 9 aa, Artificial Sequence
  Description of Artificial Sequence: Synthetic peptide
  Seed: RNQPAATAL
RAQPAATAF

SEQ ID NO: 160373 - protein, 9 aa, Artificial Sequence
  Description of Artificial Sequence: Synthetic peptide
  Seed: RNQPAATAL
RAQPAATAH

SEQ ID NO: 160374 - protein, 9 aa, Artificial Sequence
  Description of Artificial Sequence: Synthetic peptide
  Seed: RNQPAATAL
RAQPAATAI

SEQ ID NO: 160375 - protein, 9 aa, Artificial Sequence
  Description of Artificial Sequence: Synthetic peptide
  Seed: RNQPAATAL
RAQPAATAL

SEQ ID NO: 160376 - protein, 9 aa, Artificial Sequence
  Description of Artificial Sequence: Synthetic peptide
  Seed: RNQPAATAL
RAQPAATAM

SEQ ID NO: 160377 - protein, 9 aa, Artificial Sequence
  Description of Artificial Sequence: Synthetic peptide
  Seed: RNQPAATAL
RAQPAATAV

SEQ ID NO: 160378 - protein, 9 aa, Artificial Sequence
  Description of Artificial Sequence: Synthetic peptide
  Seed: RNQPAATAL
RAQPAATAW

SEQ ID NO: 160379 - protein, 9 aa, Artificial Sequence
  Description of Artificial Sequence: Synthetic peptide
  Seed: RNQPAATAL
RAQPAATAY

SEQ ID NO: 160380 - protein, 9 aa, Artificial Sequence
  Description of Artificial Sequence: Synthetic peptide
  Seed: RRAIATPGM
RCAIATPGF

SEQ ID NO: 160381 - protein, 9 aa, Artificial Sequence
  Description of Artificial Sequence: Synthetic peptide
  Seed: RRAIATPGM
RCAIATPGY

SEQ ID NO: 160382 - protein, 10 aa, Artificial Sequence
  Description of Artificial Sequence: Synthetic peptide
  Seed: RAIATPGMQI
RCIATPGMQF

SEQ ID NO: 160383 - protein, 10 aa, Artificial Sequence
  Description of Artificial Sequence: Synthetic peptide
  Seed: RAIATPGMQI
RCIATPGMQW

SEQ ID NO: 160384 - protein, 10 aa, Artificial Sequence
  Description of Artificial Sequence: Synthetic peptide
  Seed: RAIATPGMQI
RCIATPGMQY

SEQ ID NO: 160385 - protein, 10 aa, Artificial Sequence
  Description of Artificial Sequence: Synthetic peptide
  Seed: RALTLNTMTK
RCLTLNTMTK

SEQ ID NO: 160386 - protein, 10 aa, Artificial Sequence
  Description of Artificial Sequence: Synthetic peptide
  Seed: RALTLNTMTK
RCLTLNTMTR

SEQ ID NO: 160387 - protein, 9 aa, Artificial Sequence
  Description of Artificial Sequence: Synthetic peptide
  Seed: RNQPAATAL
RCQPAATAF

SEQ ID NO: 160388 - protein, 9 aa, Artificial Sequence
  Description of Artificial Sequence: Synthetic peptide
  Seed: RNQPAATAL
RCQPAATAM

SEQ ID NO: 160389 - protein, 9 aa, Artificial Sequence
  Description of Artificial Sequence: Synthetic peptide
  Seed: RNQPAATAL
RCQPAATAY

SEQ ID NO: 160390 - protein, 10 aa, Artificial Sequence
  Description of Artificial Sequence: Synthetic peptide
  Seed: RAIATPGMQI
RDIATPGMQF

SEQ ID NO: 160391 - protein, 10 aa, Artificial Sequence
  Description of Artificial Sequence: Synthetic peptide
  Seed: RAIATPGMQI
RDIATPGMQW

SEQ ID NO: 160392 - protein, 10 aa, Artificial Sequence
  Description of Artificial Sequence: Synthetic peptide
  Seed: RAIATPGMQI
RDIATPGMQY

SEQ ID NO: 160393 - protein, 10 aa, Artificial Sequence
  Description of Artificial Sequence: Synthetic peptide
  Seed: RALTLNTMTK
RDLTLNTMTK

SEQ ID NO: 160394 - protein, 10 aa, Artificial Sequence
  Description of Artificial Sequence: Synthetic peptide
  Seed: RALTLNTMTK
RDLTLNTMTR

SEQ ID NO: 160395 - protein, 9 aa, Artificial Sequence
  Description of Artificial Sequence: Synthetic peptide
  Seed: RRAIATPGM
REAIATPGF

SEQ ID NO: 160396 - protein, 9 aa, Artificial Sequence
  Description of Artificial Sequence: Synthetic peptide
  Seed: RRAIATPGM
REAIATPGL

SEQ ID NO: 160397 - protein, 9 aa, Artificial Sequence
  Description of Artificial Sequence: Synthetic peptide
  Seed: RRAIATPGM
REAIATPGM

SEQ ID NO: 160398 - protein, 9 aa, Artificial Sequence
  Description of Artificial Sequence: Synthetic peptide
  Seed: RRAIATPGM
REAIATPGY

SEQ ID NO: 160399 - protein, 10 aa, Artificial Sequence
  Description of Artificial Sequence: Synthetic peptide
  Seed: RAIATPGMQI
REIATPGMQF

SEQ ID NO: 160400 - protein, 10 aa, Artificial Sequence
  Description of Artificial Sequence: Synthetic peptide
  Seed: RAIATPGMQI
REIATPGMQW

SEQ ID NO: 160401 - protein, 10 aa, Artificial Sequence
  Description of Artificial Sequence: Synthetic peptide
  Seed: RAIATPGMQI
REIATPGMQY

SEQ ID NO: 160402 - protein, 10 aa, Artificial Sequence
  Description of Artificial Sequence: Synthetic peptide
  Seed: RALTLNTMTK
RELTLNTMTK

SEQ ID NO: 160403 - protein, 10 aa, Artificial Sequence
  Description of Artificial Sequence: Synthetic peptide
  Seed: RALTLNTMTK
RELTLNTMTR

SEQ ID NO: 160404 - protein, 9 aa, Artificial Sequence
  Description of Artificial Sequence: Synthetic peptide
  Seed: RRPVGISSM
REPVGISSF

SEQ ID NO: 160405 - protein, 9 aa, Artificial Sequence
  Description of Artificial Sequence: Synthetic peptide
  Seed: RRPVGISSM
REPVGISSM

SEQ ID NO: 160406 - protein, 9 aa, Artificial Sequence
  Description of Artificial Sequence: Synthetic peptide
  Seed: RRPVGISSM
REPVGISSY

SEQ ID NO: 160407 - protein, 9 aa, Artificial Sequence
  Description of Artificial Sequence: Synthetic peptide
  Seed: RNQPAATAL
REQPAATAF

SEQ ID NO: 160408 - protein, 9 aa, Artificial Sequence
  Description of Artificial Sequence: Synthetic peptide
  Seed: RNQPAATAL
REQPAATAH

SEQ ID NO: 160409 - protein, 9 aa, Artificial Sequence
  Description of Artificial Sequence: Synthetic peptide
  Seed: RNQPAATAL
REQPAATAI

SEQ ID NO: 160410 - protein, 9 aa, Artificial Sequence
  Description of Artificial Sequence: Synthetic peptide
  Seed: RNQPAATAL
REQPAATAL

SEQ ID NO: 160411 - protein, 9 aa, Artificial Sequence
  Description of Artificial Sequence: Synthetic peptide
  Seed: RNQPAATAL
REQPAATAM

SEQ ID NO: 160412 - protein, 9 aa, Artificial Sequence
  Description of Artificial Sequence: Synthetic peptide
  Seed: RNQPAATAL
REQPAATAW

SEQ ID NO: 160413 - protein, 9 aa, Artificial Sequence
  Description of Artificial Sequence: Synthetic peptide
  Seed: RNQPAATAL
REQPAATAY

SEQ ID NO: 160414 - protein, 9 aa, Artificial Sequence
  Description of Artificial Sequence: Synthetic peptide
  Seed: RRAIATPGM
RFAIATPGF

SEQ ID NO: 160415 - protein, 9 aa, Artificial Sequence
  Description of Artificial Sequence: Synthetic peptide
  Seed: RRAIATPGM
RFAIATPGY

SEQ ID NO: 160416 - protein, 10 aa, Artificial Sequence
  Description of Artificial Sequence: Synthetic peptide
  Seed: RAIATPGMQI
RFIATPGMQF

SEQ ID NO: 160417 - protein, 11 aa, Artificial Sequence
  Description of Artificial Sequence: Synthetic peptide
  Seed: RAIATPGMQIR
RFIATPGMQIK

SEQ ID NO: 160418 - protein, 11 aa, Artificial Sequence
  Description of Artificial Sequence: Synthetic peptide
  Seed: RAIATPGMQIR
RFIATPGMQIR

SEQ ID NO: 160419 - protein, 10 aa, Artificial Sequence
  Description of Artificial Sequence: Synthetic peptide
  Seed: RAIATPGMQI
RFIATPGMQW

SEQ ID NO: 160420 - protein, 10 aa, Artificial Sequence
  Description of Artificial Sequence: Synthetic peptide
  Seed: RAIATPGMQI
RFIATPGMQY

SEQ ID NO: 160421 - protein, 10 aa, Artificial Sequence
  Description of Artificial Sequence: Synthetic peptide
  Seed: RALTLNTMTK
RFLTLNTMTA

SEQ ID NO: 160422 - protein, 10 aa, Artificial Sequence
  Description of Artificial Sequence: Synthetic peptide
  Seed: RALTLNTMTK
RFLTLNTMTH

SEQ ID NO: 160423 - protein, 10 aa, Artificial Sequence
  Description of Artificial Sequence: Synthetic peptide
  Seed: RALTLNTMTK
RFLTLNTMTK

SEQ ID NO: 160424 - protein, 10 aa, Artificial Sequence
  Description of Artificial Sequence: Synthetic peptide
  Seed: RALTLNTMTK
RFLTLNTMTR

SEQ ID NO: 160425 - protein, 9 aa, Artificial Sequence
  Description of Artificial Sequence: Synthetic peptide
  Seed: RRPVGISSM
RFPVGISSA

SEQ ID NO: 160426 - protein, 9 aa, Artificial Sequence
  Description of Artificial Sequence: Synthetic peptide
  Seed: RRPVGISSM
RFPVGISSC

SEQ ID NO: 160427 - protein, 9 aa, Artificial Sequence
  Description of Artificial Sequence: Synthetic peptide
  Seed: RRPVGISSM
RFPVGISSF

SEQ ID NO: 160428 - protein, 9 aa, Artificial Sequence
  Description of Artificial Sequence: Synthetic peptide
  Seed: RRPVGISSM
RFPVGISSH

SEQ ID NO: 160429 - protein, 9 aa, Artificial Sequence
  Description of Artificial Sequence: Synthetic peptide
  Seed: RRPVGISSM
RFPVGISSI

SEQ ID NO: 160430 - protein, 9 aa, Artificial Sequence
  Description of Artificial Sequence: Synthetic peptide
  Seed: RRPVGISSM
RFPVGISSL

SEQ ID NO: 160431 - protein, 9 aa, Artificial Sequence
  Description of Artificial Sequence: Synthetic peptide
  Seed: RRPVGISSM
RFPVGISSM

SEQ ID NO: 160432 - protein, 9 aa, Artificial Sequence
  Description of Artificial Sequence: Synthetic peptide
  Seed: RRPVGISSM
RFPVGISST

SEQ ID NO: 160433 - protein, 9 aa, Artificial Sequence
  Description of Artificial Sequence: Synthetic peptide
  Seed: RRPVGISSM
RFPVGISSV

SEQ ID NO: 160434 - protein, 9 aa, Artificial Sequence
  Description of Artificial Sequence: Synthetic peptide
  Seed: RRPVGISSM
RFPVGISSW

SEQ ID NO: 160435 - protein, 9 aa, Artificial Sequence
  Description of Artificial Sequence: Synthetic peptide
  Seed: RRPVGISSM
RFPVGISSY

SEQ ID NO: 160436 - protein, 9 aa, Artificial Sequence
  Description of Artificial Sequence: Synthetic peptide
  Seed: RNQPAATAL
RFQPAATAF

SEQ ID NO: 160437 - protein, 9 aa, Artificial Sequence
  Description of Artificial Sequence: Synthetic peptide
  Seed: RNQPAATAL
RFQPAATAL

SEQ ID NO: 160438 - protein, 9 aa, Artificial Sequence
  Description of Artificial Sequence: Synthetic peptide
  Seed: RNQPAATAL
RFQPAATAM

SEQ ID NO: 160439 - protein, 9 aa, Artificial Sequence
  Description of Artificial Sequence: Synthetic peptide
  Seed: RNQPAATAL
RFQPAATAY

SEQ ID NO: 160440 - protein, 8 aa, Artificial Sequence
  Description of Artificial Sequence: Synthetic peptide
  Seed: RFYRTCKL
RFYRTCKF

SEQ ID NO: 160441 - protein, 8 aa, Artificial Sequence
  Description of Artificial Sequence: Synthetic peptide
  Seed: RFYRTCKL
RFYRTCKM

SEQ ID NO: 160442 - protein, 8 aa, Artificial Sequence
  Description of Artificial Sequence: Synthetic peptide
  Seed: RFYRTCKL
RFYRTCKY

SEQ ID NO: 160443 - protein, 9 aa, Artificial Sequence
  Description of Artificial Sequence: Synthetic peptide
  Seed: RRAIATPGM
RGAIATPGF

SEQ ID NO: 160444 - protein, 9 aa, Artificial Sequence
  Description of Artificial Sequence: Synthetic peptide
  Seed: RRAIATPGM
RGAIATPGY

SEQ ID NO: 160445 - protein, 10 aa, Artificial Sequence
  Description of Artificial Sequence: Synthetic peptide
  Seed: RAIATPGMQI
RGIATPGMQF

SEQ ID NO: 160446 - protein, 11 aa, Artificial Sequence
  Description of Artificial Sequence: Synthetic peptide
  Seed: RAIATPGMQIR
RGIATPGMQIR

SEQ ID NO: 160447 - protein, 10 aa, Artificial Sequence
  Description of Artificial Sequence: Synthetic peptide
  Seed: RAIATPGMQI
RGIATPGMQW

SEQ ID NO: 160448 - protein, 10 aa, Artificial Sequence
  Description of Artificial Sequence: Synthetic peptide
  Seed: RAIATPGMQI
RGIATPGMQY

SEQ ID NO: 160449 - protein, 10 aa, Artificial Sequence
  Description of Artificial Sequence: Synthetic peptide
  Seed: RALTLNTMTK
RGLTLNTMTK

SEQ ID NO: 160450 - protein, 10 aa, Artificial Sequence
  Description of Artificial Sequence: Synthetic peptide
  Seed: RALTLNTMTK
RGLTLNTMTR

SEQ ID NO: 160451 - protein, 9 aa, Artificial Sequence
  Description of Artificial Sequence: Synthetic peptide
  Seed: RRPVGISSM
RGPVGISSF

SEQ ID NO: 160452 - protein, 9 aa, Artificial Sequence
  Description of Artificial Sequence: Synthetic peptide
  Seed: RRPVGISSM
RGPVGISSM

SEQ ID NO: 160453 - protein, 9 aa, Artificial Sequence
  Description of Artificial Sequence: Synthetic peptide
  Seed: RRPVGISSM
RGPVGISSY

SEQ ID NO: 160454 - protein, 9 aa, Artificial Sequence
  Description of Artificial Sequence: Synthetic peptide
  Seed: RNQPAATAL
RGQPAATAF

SEQ ID NO: 160455 - protein, 9 aa, Artificial Sequence
  Description of Artificial Sequence: Synthetic peptide
  Seed: RNQPAATAL
RGQPAATAM

SEQ ID NO: 160456 - protein, 9 aa, Artificial Sequence
  Description of Artificial Sequence: Synthetic peptide
  Seed: RNQPAATAL
RGQPAATAY

SEQ ID NO: 160457 - protein, 9 aa, Artificial Sequence
  Description of Artificial Sequence: Synthetic peptide
  Seed: RRAIATPGM
RHAIATPGF

SEQ ID NO: 160458 - protein, 9 aa, Artificial Sequence
  Description of Artificial Sequence: Synthetic peptide
  Seed: RRAIATPGM
RHAIATPGL

SEQ ID NO: 160459 - protein, 9 aa, Artificial Sequence
  Description of Artificial Sequence: Synthetic peptide
  Seed: RRAIATPGM
RHAIATPGM

SEQ ID NO: 160460 - protein, 9 aa, Artificial Sequence
  Description of Artificial Sequence: Synthetic peptide
  Seed: RRAIATPGM
RHAIATPGY

SEQ ID NO: 160461 - protein, 10 aa, Artificial Sequence
  Description of Artificial Sequence: Synthetic peptide
  Seed: RAIATPGMQI
RHIATPGMQF

SEQ ID NO: 160462 - protein, 10 aa, Artificial Sequence
  Description of Artificial Sequence: Synthetic peptide
  Seed: RAIATPGMQI
RHIATPGMQW

SEQ ID NO: 160463 - protein, 10 aa, Artificial Sequence
  Description of Artificial Sequence: Synthetic peptide
  Seed: RAIATPGMQI
RHIATPGMQY

SEQ ID NO: 160464 - protein, 10 aa, Artificial Sequence
  Description of Artificial Sequence: Synthetic peptide
  Seed: RALTLNTMTK
RHLTLNTMTK

SEQ ID NO: 160465 - protein, 10 aa, Artificial Sequence
  Description of Artificial Sequence: Synthetic peptide
  Seed: RALTLNTMTK
RHLTLNTMTR

SEQ ID NO: 160466 - protein, 9 aa, Artificial Sequence
  Description of Artificial Sequence: Synthetic peptide
  Seed: RRPVGISSM
RHPVGISSF

SEQ ID NO: 160467 - protein, 9 aa, Artificial Sequence
  Description of Artificial Sequence: Synthetic peptide
  Seed: RRPVGISSM
RHPVGISSL

SEQ ID NO: 160468 - protein, 9 aa, Artificial Sequence
  Description of Artificial Sequence: Synthetic peptide
  Seed: RRPVGISSM
RHPVGISSM

SEQ ID NO: 160469 - protein, 9 aa, Artificial Sequence
  Description of Artificial Sequence: Synthetic peptide
  Seed: RRPVGISSM
RHPVGISSY

SEQ ID NO: 160470 - protein, 9 aa, Artificial Sequence
  Description of Artificial Sequence: Synthetic peptide
  Seed: RNQPAATAL
RHQPAATAF

SEQ ID NO: 160471 - protein, 9 aa, Artificial Sequence
  Description of Artificial Sequence: Synthetic peptide
  Seed: RNQPAATAL
RHQPAATAH

SEQ ID NO: 160472 - protein, 9 aa, Artificial Sequence
  Description of Artificial Sequence: Synthetic peptide
  Seed: RNQPAATAL
RHQPAATAI

SEQ ID NO: 160473 - protein, 9 aa, Artificial Sequence
  Description of Artificial Sequence: Synthetic peptide
  Seed: RNQPAATAL
RHQPAATAL

SEQ ID NO: 160474 - protein, 9 aa, Artificial Sequence
  Description of Artificial Sequence: Synthetic peptide
  Seed: RNQPAATAL
RHQPAATAM

SEQ ID NO: 160475 - protein, 9 aa, Artificial Sequence
  Description of Artificial Sequence: Synthetic peptide
  Seed: RNQPAATAL
RHQPAATAV

SEQ ID NO: 160476 - protein, 9 aa, Artificial Sequence
  Description of Artificial Sequence: Synthetic peptide
  Seed: RNQPAATAL
RHQPAATAW

SEQ ID NO: 160477 - protein, 9 aa, Artificial Sequence
  Description of Artificial Sequence: Synthetic peptide
  Seed: RNQPAATAL
RHQPAATAY

SEQ ID NO: 160478 - protein, 9 aa, Artificial Sequence
  Description of Artificial Sequence: Synthetic peptide
  Seed: RRAIATPGM
RIAIATPGF

SEQ ID NO: 160479 - protein, 9 aa, Artificial Sequence
  Description of Artificial Sequence: Synthetic peptide
  Seed: RRAIATPGM
RIAIATPGM

SEQ ID NO: 160480 - protein, 9 aa, Artificial Sequence
  Description of Artificial Sequence: Synthetic peptide
  Seed: RRAIATPGM
RIAIATPGY

SEQ ID NO: 160481 - protein, 10 aa, Artificial Sequence
  Description of Artificial Sequence: Synthetic peptide
  Seed: RAIATPGMQI
RIIATPGMQF

SEQ ID NO: 160482 - protein, 11 aa, Artificial Sequence
  Description of Artificial Sequence: Synthetic peptide
  Seed: RAIATPGMQIR
RIIATPGMQIR

SEQ ID NO: 160483 - protein, 10 aa, Artificial Sequence
  Description of Artificial Sequence: Synthetic peptide
  Seed: RAIATPGMQI
RIIATPGMQL

SEQ ID NO: 160484 - protein, 10 aa, Artificial Sequence
  Description of Artificial Sequence: Synthetic peptide
  Seed: RAIATPGMQI
RIIATPGMQM

SEQ ID NO: 160485 - protein, 10 aa, Artificial Sequence
  Description of Artificial Sequence: Synthetic peptide
  Seed: RAIATPGMQI
RIIATPGMQW

SEQ ID NO: 160486 - protein, 10 aa, Artificial Sequence
  Description of Artificial Sequence: Synthetic peptide
  Seed: RAIATPGMQI
RIIATPGMQY

SEQ ID NO: 160487 - protein, 10 aa, Artificial Sequence
  Description of Artificial Sequence: Synthetic peptide
  Seed: RALTLNTMTK
RILTLNTMTA

SEQ ID NO: 160488 - protein, 10 aa, Artificial Sequence
  Description of Artificial Sequence: Synthetic peptide
  Seed: RALTLNTMTK
RILTLNTMTK

SEQ ID NO: 160489 - protein, 10 aa, Artificial Sequence
  Description of Artificial Sequence: Synthetic peptide
  Seed: RALTLNTMTK
RILTLNTMTR

SEQ ID NO: 160490 - protein, 10 aa, Artificial Sequence
  Description of Artificial Sequence: Synthetic peptide
  Seed: RALTLNTMTK
RILTLNTMTY

SEQ ID NO: 160491 - protein, 9 aa, Artificial Sequence
  Description of Artificial Sequence: Synthetic peptide
  Seed: RRPVGISSM
RIPVGISSF

SEQ ID NO: 160492 - protein, 9 aa, Artificial Sequence
  Description of Artificial Sequence: Synthetic peptide
  Seed: RRPVGISSM
RIPVGISSL

SEQ ID NO: 160493 - protein, 9 aa, Artificial Sequence
  Description of Artificial Sequence: Synthetic peptide
  Seed: RRPVGISSM
RIPVGISSM

SEQ ID NO: 160494 - protein, 9 aa, Artificial Sequence
  Description of Artificial Sequence: Synthetic peptide
  Seed: RRPVGISSM
RIPVGISSY

SEQ ID NO: 160495 - protein, 9 aa, Artificial Sequence
  Description of Artificial Sequence: Synthetic peptide
  Seed: RNQPAATAL
RIQPAATAF

SEQ ID NO: 160496 - protein, 9 aa, Artificial Sequence
  Description of Artificial Sequence: Synthetic peptide
  Seed: RNQPAATAL
RIQPAATAL

SEQ ID NO: 160497 - protein, 9 aa, Artificial Sequence
  Description of Artificial Sequence: Synthetic peptide
  Seed: RNQPAATAL
RIQPAATAM

SEQ ID NO: 160498 - protein, 9 aa, Artificial Sequence
  Description of Artificial Sequence: Synthetic peptide
  Seed: RNQPAATAL
RIQPAATAW

SEQ ID NO: 160499 - protein, 9 aa, Artificial Sequence
  Description of Artificial Sequence: Synthetic peptide
  Seed: RNQPAATAL
RIQPAATAY

SEQ ID NO: 160500 - protein, 9 aa, Artificial Sequence
  Description of Artificial Sequence: Synthetic peptide
  Seed: RRAIATPGM
RKAIATPGF

SEQ ID NO: 160501 - protein, 9 aa, Artificial Sequence
  Description of Artificial Sequence: Synthetic peptide
  Seed: RRAIATPGM
RKAIATPGH

SEQ ID NO: 160502 - protein, 9 aa, Artificial Sequence
  Description of Artificial Sequence: Synthetic peptide
  Seed: RRAIATPGM
RKAIATPGI

SEQ ID NO: 160503 - protein, 9 aa, Artificial Sequence
  Description of Artificial Sequence: Synthetic peptide
  Seed: RRAIATPGM
RKAIATPGL

SEQ ID NO: 160504 - protein, 9 aa, Artificial Sequence
  Description of Artificial Sequence: Synthetic peptide
  Seed: RRAIATPGM
RKAIATPGM

SEQ ID NO: 160505 - protein, 9 aa, Artificial Sequence
  Description of Artificial Sequence: Synthetic peptide
  Seed: RRAIATPGM
RKAIATPGW

SEQ ID NO: 160506 - protein, 9 aa, Artificial Sequence
  Description of Artificial Sequence: Synthetic peptide
  Seed: RRAIATPGM
RKAIATPGY

SEQ ID NO: 160507 - protein, 10 aa, Artificial Sequence
  Description of Artificial Sequence: Synthetic peptide
  Seed: RAIATPGMQI
RKIATPGMQF

SEQ ID NO: 160508 - protein, 10 aa, Artificial Sequence
  Description of Artificial Sequence: Synthetic peptide
  Seed: RAIATPGMQI
RKIATPGMQW

SEQ ID NO: 160509 - protein, 10 aa, Artificial Sequence
  Description of Artificial Sequence: Synthetic peptide
  Seed: RAIATPGMQI
RKIATPGMQY

SEQ ID NO: 160510 - protein, 10 aa, Artificial Sequence
  Description of Artificial Sequence: Synthetic peptide
  Seed: RALTLNTMTK
RKLTLNTMTK

SEQ ID NO: 160511 - protein, 10 aa, Artificial Sequence
  Description of Artificial Sequence: Synthetic peptide
  Seed: RALTLNTMTK
RKLTLNTMTR

SEQ ID NO: 160512 - protein, 9 aa, Artificial Sequence
  Description of Artificial Sequence: Synthetic peptide
  Seed: RRPVGISSM
RKPVGISSF

SEQ ID NO: 160513 - protein, 9 aa, Artificial Sequence
  Description of Artificial Sequence: Synthetic peptide
  Seed: RRPVGISSM
RKPVGISSL

SEQ ID NO: 160514 - protein, 9 aa, Artificial Sequence
  Description of Artificial Sequence: Synthetic peptide
  Seed: RRPVGISSM
RKPVGISSM

SEQ ID NO: 160515 - protein, 9 aa, Artificial Sequence
  Description of Artificial Sequence: Synthetic peptide
  Seed: RRPVGISSM
RKPVGISSY

SEQ ID NO: 160516 - protein, 9 aa, Artificial Sequence
  Description of Artificial Sequence: Synthetic peptide
  Seed: RNQPAATAL
RKQPAATAA

SEQ ID NO: 160517 - protein, 9 aa, Artificial Sequence
  Description of Artificial Sequence: Synthetic peptide
  Seed: RNQPAATAL
RKQPAATAF

SEQ ID NO: 160518 - protein, 9 aa, Artificial Sequence
  Description of Artificial Sequence: Synthetic peptide
  Seed: RNQPAATAL
RKQPAATAH

SEQ ID NO: 160519 - protein, 9 aa, Artificial Sequence
  Description of Artificial Sequence: Synthetic peptide
  Seed: RNQPAATAL
RKQPAATAI

SEQ ID NO: 160520 - protein, 9 aa, Artificial Sequence
  Description of Artificial Sequence: Synthetic peptide
  Seed: RNQPAATAL
RKQPAATAL

SEQ ID NO: 160521 - protein, 9 aa, Artificial Sequence
  Description of Artificial Sequence: Synthetic peptide
  Seed: RNQPAATAL
RKQPAATAM

SEQ ID NO: 160522 - protein, 9 aa, Artificial Sequence
  Description of Artificial Sequence: Synthetic peptide
  Seed: RNQPAATAL
RKQPAATAV

SEQ ID NO: 160523 - protein, 9 aa, Artificial Sequence
  Description of Artificial Sequence: Synthetic peptide
  Seed: RNQPAATAL
RKQPAATAW

SEQ ID NO: 160524 - protein, 9 aa, Artificial Sequence
  Description of Artificial Sequence: Synthetic peptide
  Seed: RNQPAATAL
RKQPAATAY

SEQ ID NO: 160525 - protein, 9 aa, Artificial Sequence
  Description of Artificial Sequence: Synthetic peptide
  Seed: RRAIATPGM
RLAIATPGF

SEQ ID NO: 160526 - protein, 9 aa, Artificial Sequence
  Description of Artificial Sequence: Synthetic peptide
  Seed: RRAIATPGM
RLAIATPGL

SEQ ID NO: 160527 - protein, 9 aa, Artificial Sequence
  Description of Artificial Sequence: Synthetic peptide
  Seed: RRAIATPGM
RLAIATPGM

SEQ ID NO: 160528 - protein, 9 aa, Artificial Sequence
  Description of Artificial Sequence: Synthetic peptide
  Seed: RRAIATPGM
RLAIATPGY

SEQ ID NO: 160529 - protein, 10 aa, Artificial Sequence
  Description of Artificial Sequence: Synthetic peptide
  Seed: RAIATPGMQI
RLIATPGMQF

SEQ ID NO: 160530 - protein, 11 aa, Artificial Sequence
  Description of Artificial Sequence: Synthetic peptide
  Seed: RAIATPGMQIR
RLIATPGMQIR

SEQ ID NO: 160531 - protein, 10 aa, Artificial Sequence
  Description of Artificial Sequence: Synthetic peptide
  Seed: RAIATPGMQI
RLIATPGMQW

SEQ ID NO: 160532 - protein, 10 aa, Artificial Sequence
  Description of Artificial Sequence: Synthetic peptide
  Seed: RAIATPGMQI
RLIATPGMQY

SEQ ID NO: 160533 - protein, 10 aa, Artificial Sequence
  Description of Artificial Sequence: Synthetic peptide
  Seed: RALTLNTMTK
RLLTLNTMTH

SEQ ID NO: 160534 - protein, 10 aa, Artificial Sequence
  Description of Artificial Sequence: Synthetic peptide
  Seed: RALTLNTMTK
RLLTLNTMTK

SEQ ID NO: 160535 - protein, 10 aa, Artificial Sequence
  Description of Artificial Sequence: Synthetic peptide
  Seed: RALTLNTMTK
RLLTLNTMTR

SEQ ID NO: 160536 - protein, 10 aa, Artificial Sequence
  Description of Artificial Sequence: Synthetic peptide
  Seed: RALTLNTMTK
RLLTLNTMTY

SEQ ID NO: 160537 - protein, 9 aa, Artificial Sequence
  Description of Artificial Sequence: Synthetic peptide
  Seed: RRPVGISSM
RLPVGISSF

SEQ ID NO: 160538 - protein, 9 aa, Artificial Sequence
  Description of Artificial Sequence: Synthetic peptide
  Seed: RRPVGISSM
RLPVGISSL

SEQ ID NO: 160539 - protein, 9 aa, Artificial Sequence
  Description of Artificial Sequence: Synthetic peptide
  Seed: RRPVGISSM
RLPVGISSM

SEQ ID NO: 160540 - protein, 9 aa, Artificial Sequence
  Description of Artificial Sequence: Synthetic peptide
  Seed: RRPVGISSM
RLPVGISSY

SEQ ID NO: 160541 - protein, 9 aa, Artificial Sequence
  Description of Artificial Sequence: Synthetic peptide
  Seed: RNQPAATAL
RLQPAATAF

SEQ ID NO: 160542 - protein, 9 aa, Artificial Sequence
  Description of Artificial Sequence: Synthetic peptide
  Seed: RNQPAATAL
RLQPAATAH

SEQ ID NO: 160543 - protein, 9 aa, Artificial Sequence
  Description of Artificial Sequence: Synthetic peptide
  Seed: RNQPAATAL
RLQPAATAI

SEQ ID NO: 160544 - protein, 9 aa, Artificial Sequence
  Description of Artificial Sequence: Synthetic peptide
  Seed: RNQPAATAL
RLQPAATAL

SEQ ID NO: 160545 - protein, 9 aa, Artificial Sequence
  Description of Artificial Sequence: Synthetic peptide
  Seed: RNQPAATAL
RLQPAATAM

SEQ ID NO: 160546 - protein, 9 aa, Artificial Sequence
  Description of Artificial Sequence: Synthetic peptide
  Seed: RNQPAATAL
RLQPAATAV

SEQ ID NO: 160547 - protein, 9 aa, Artificial Sequence
  Description of Artificial Sequence: Synthetic peptide
  Seed: RNQPAATAL
RLQPAATAW

SEQ ID NO: 160548 - protein, 9 aa, Artificial Sequence
  Description of Artificial Sequence: Synthetic peptide
  Seed: RNQPAATAL
RLQPAATAY

SEQ ID NO: 160549 - protein, 9 aa, Artificial Sequence
  Description of Artificial Sequence: Synthetic peptide
  Seed: RRAIATPGM
RMAIATPGA

SEQ ID NO: 160550 - protein, 9 aa, Artificial Sequence
  Description of Artificial Sequence: Synthetic peptide
  Seed: RRAIATPGM
RMAIATPGF

SEQ ID NO: 160551 - protein, 9 aa, Artificial Sequence
  Description of Artificial Sequence: Synthetic peptide
  Seed: RRAIATPGM
RMAIATPGH

SEQ ID NO: 160552 - protein, 9 aa, Artificial Sequence
  Description of Artificial Sequence: Synthetic peptide
  Seed: RRAIATPGM
RMAIATPGI

SEQ ID NO: 160553 - protein, 9 aa, Artificial Sequence
  Description of Artificial Sequence: Synthetic peptide
  Seed: RRAIATPGM
RMAIATPGL

SEQ ID NO: 160554 - protein, 9 aa, Artificial Sequence
  Description of Artificial Sequence: Synthetic peptide
  Seed: RRAIATPGM
RMAIATPGM

SEQ ID NO: 160555 - protein, 9 aa, Artificial Sequence
  Description of Artificial Sequence: Synthetic peptide
  Seed: RRAIATPGM
RMAIATPGV

SEQ ID NO: 160556 - protein, 9 aa, Artificial Sequence
  Description of Artificial Sequence: Synthetic peptide
  Seed: RRAIATPGM
RMAIATPGW

SEQ ID NO: 160557 - protein, 9 aa, Artificial Sequence
  Description of Artificial Sequence: Synthetic peptide
  Seed: RRAIATPGM
RMAIATPGY

SEQ ID NO: 160558 - protein, 10 aa, Artificial Sequence
  Description of Artificial Sequence: Synthetic peptide
  Seed: RAIATPGMQI
RMIATPGMQF

SEQ ID NO: 160559 - protein, 11 aa, Artificial Sequence
  Description of Artificial Sequence: Synthetic peptide
  Seed: RAIATPGMQIR
RMIATPGMQIK

SEQ ID NO: 160560 - protein, 11 aa, Artificial Sequence
  Description of Artificial Sequence: Synthetic peptide
  Seed: RAIATPGMQIR
RMIATPGMQIR

SEQ ID NO: 160561 - protein, 10 aa, Artificial Sequence
  Description of Artificial Sequence: Synthetic peptide
  Seed: RAIATPGMQI
RMIATPGMQL

SEQ ID NO: 160562 - protein, 10 aa, Artificial Sequence
  Description of Artificial Sequence: Synthetic peptide
  Seed: RAIATPGMQI
RMIATPGMQM

SEQ ID NO: 160563 - protein, 10 aa, Artificial Sequence
  Description of Artificial Sequence: Synthetic peptide
  Seed: RAIATPGMQI
RMIATPGMQW

SEQ ID NO: 160564 - protein, 10 aa, Artificial Sequence
  Description of Artificial Sequence: Synthetic peptide
  Seed: RAIATPGMQI
RMIATPGMQY

SEQ ID NO: 160565 - protein, 10 aa, Artificial Sequence
  Description of Artificial Sequence: Synthetic peptide
  Seed: RALTLNTMTK
RMLTLNTMTA

SEQ ID NO: 160566 - protein, 10 aa, Artificial Sequence
  Description of Artificial Sequence: Synthetic peptide
  Seed: RALTLNTMTK
RMLTLNTMTH

SEQ ID NO: 160567 - protein, 10 aa, Artificial Sequence
  Description of Artificial Sequence: Synthetic peptide
  Seed: RALTLNTMTK
RMLTLNTMTR

SEQ ID NO: 160568 - protein, 10 aa, Artificial Sequence
  Description of Artificial Sequence: Synthetic peptide
  Seed: RALTLNTMTK
RMLTLNTMTY

SEQ ID NO: 160569 - protein, 9 aa, Artificial Sequence
  Description of Artificial Sequence: Synthetic peptide
  Seed: RRPVGISSM
RMPVGISSF

SEQ ID NO: 160570 - protein, 9 aa, Artificial Sequence
  Description of Artificial Sequence: Synthetic peptide
  Seed: RRPVGISSM
RMPVGISSH

SEQ ID NO: 160571 - protein, 9 aa, Artificial Sequence
  Description of Artificial Sequence: Synthetic peptide
  Seed: RRPVGISSM
RMPVGISSI

SEQ ID NO: 160572 - protein, 9 aa, Artificial Sequence
  Description of Artificial Sequence: Synthetic peptide
  Seed: RRPVGISSM
RMPVGISSL

SEQ ID NO: 160573 - protein, 9 aa, Artificial Sequence
  Description of Artificial Sequence: Synthetic peptide
  Seed: RRPVGISSM
RMPVGISSM

SEQ ID NO: 160574 - protein, 9 aa, Artificial Sequence
  Description of Artificial Sequence: Synthetic peptide
  Seed: RRPVGISSM
RMPVGISSV

SEQ ID NO: 160575 - protein, 9 aa, Artificial Sequence
  Description of Artificial Sequence: Synthetic peptide
  Seed: RRPVGISSM
RMPVGISSW

SEQ ID NO: 160576 - protein, 9 aa, Artificial Sequence
  Description of Artificial Sequence: Synthetic peptide
  Seed: RRPVGISSM
RMPVGISSY

SEQ ID NO: 160577 - protein, 9 aa, Artificial Sequence
  Description of Artificial Sequence: Synthetic peptide
  Seed: RNQPAATAL
RMQPAATAA

SEQ ID NO: 160578 - protein, 9 aa, Artificial Sequence
  Description of Artificial Sequence: Synthetic peptide
  Seed: RNQPAATAL
RMQPAATAC

SEQ ID NO: 160579 - protein, 9 aa, Artificial Sequence
  Description of Artificial Sequence: Synthetic peptide
  Seed: RNQPAATAL
RMQPAATAF

SEQ ID NO: 160580 - protein, 9 aa, Artificial Sequence
  Description of Artificial Sequence: Synthetic peptide
  Seed: RNQPAATAL
RMQPAATAG

SEQ ID NO: 160581 - protein, 9 aa, Artificial Sequence
  Description of Artificial Sequence: Synthetic peptide
  Seed: RNQPAATAL
RMQPAATAH

SEQ ID NO: 160582 - protein, 9 aa, Artificial Sequence
  Description of Artificial Sequence: Synthetic peptide
  Seed: RNQPAATAL
RMQPAATAI

SEQ ID NO: 160583 - protein, 9 aa, Artificial Sequence
  Description of Artificial Sequence: Synthetic peptide
  Seed: RNQPAATAL
RMQPAATAL

SEQ ID NO: 160584 - protein, 9 aa, Artificial Sequence
  Description of Artificial Sequence: Synthetic peptide
  Seed: RNQPAATAL
RMQPAATAM

SEQ ID NO: 160585 - protein, 9 aa, Artificial Sequence
  Description of Artificial Sequence: Synthetic peptide
  Seed: RNQPAATAL
RMQPAATAS

SEQ ID NO: 160586 - protein, 9 aa, Artificial Sequence
  Description of Artificial Sequence: Synthetic peptide
  Seed: RNQPAATAL
RMQPAATAT

SEQ ID NO: 160587 - protein, 9 aa, Artificial Sequence
  Description of Artificial Sequence: Synthetic peptide
  Seed: RNQPAATAL
RMQPAATAV

SEQ ID NO: 160588 - protein, 9 aa, Artificial Sequence
  Description of Artificial Sequence: Synthetic peptide
  Seed: RNQPAATAL
RMQPAATAW

SEQ ID NO: 160589 - protein, 9 aa, Artificial Sequence
  Description of Artificial Sequence: Synthetic peptide
  Seed: RNQPAATAL
RMQPAATAY

SEQ ID NO: 160590 - protein, 9 aa, Artificial Sequence
  Description of Artificial Sequence: Synthetic peptide
  Seed: RRAIATPGM
RNAIATPGF

SEQ ID NO: 160591 - protein, 9 aa, Artificial Sequence
  Description of Artificial Sequence: Synthetic peptide
  Seed: RRAIATPGM
RNAIATPGM

SEQ ID NO: 160592 - protein, 9 aa, Artificial Sequence
  Description of Artificial Sequence: Synthetic peptide
  Seed: RRAIATPGM
RNAIATPGY

SEQ ID NO: 160593 - protein, 10 aa, Artificial Sequence
  Description of Artificial Sequence: Synthetic peptide
  Seed: RAIATPGMQI
RNIATPGMQF

SEQ ID NO: 160594 - protein, 10 aa, Artificial Sequence
  Description of Artificial Sequence: Synthetic peptide
  Seed: RAIATPGMQI
RNIATPGMQW

SEQ ID NO: 160595 - protein, 10 aa, Artificial Sequence
  Description of Artificial Sequence: Synthetic peptide
  Seed: RAIATPGMQI
RNIATPGMQY

SEQ ID NO: 160596 - protein, 10 aa, Artificial Sequence
  Description of Artificial Sequence: Synthetic peptide
  Seed: RALTLNTMTK
RNLTLNTMTK

SEQ ID NO: 160597 - protein, 10 aa, Artificial Sequence
  Description of Artificial Sequence: Synthetic peptide
  Seed: RALTLNTMTK
RNLTLNTMTR

SEQ ID NO: 160598 - protein, 9 aa, Artificial Sequence
  Description of Artificial Sequence: Synthetic peptide
  Seed: RRPVGISSM
RNPVGISSF

SEQ ID NO: 160599 - protein, 9 aa, Artificial Sequence
  Description of Artificial Sequence: Synthetic peptide
  Seed: RRPVGISSM
RNPVGISSY

SEQ ID NO: 160600 - protein, 9 aa, Artificial Sequence
  Description of Artificial Sequence: Synthetic peptide
  Seed: RNQPAATAL
RNQPAATAF

SEQ ID NO: 160601 - protein, 9 aa, Artificial Sequence
  Description of Artificial Sequence: Synthetic peptide
  Seed: RNQPAATAL
RNQPAATAM

SEQ ID NO: 160602 - protein, 9 aa, Artificial Sequence
  Description of Artificial Sequence: Synthetic peptide
  Seed: RNQPAATAL
RNQPAATAY

SEQ ID NO: 160603 - protein, 10 aa, Artificial Sequence
  Description of Artificial Sequence: Synthetic peptide
  Seed: RAIATPGMQI
RPIATPGMQF

SEQ ID NO: 160604 - protein, 10 aa, Artificial Sequence
  Description of Artificial Sequence: Synthetic peptide
  Seed: RAIATPGMQI
RPIATPGMQW

SEQ ID NO: 160605 - protein, 10 aa, Artificial Sequence
  Description of Artificial Sequence: Synthetic peptide
  Seed: RAIATPGMQI
RPIATPGMQY

SEQ ID NO: 160606 - protein, 10 aa, Artificial Sequence
  Description of Artificial Sequence: Synthetic peptide
  Seed: RALTLNTMTK
RPLTLNTMTK

SEQ ID NO: 160607 - protein, 10 aa, Artificial Sequence
  Description of Artificial Sequence: Synthetic peptide
  Seed: RALTLNTMTK
RPLTLNTMTR

SEQ ID NO: 160608 - protein, 9 aa, Artificial Sequence
  Description of Artificial Sequence: Synthetic peptide
  Seed: RNQPAATAL
RPQPAATAF

SEQ ID NO: 160609 - protein, 9 aa, Artificial Sequence
  Description of Artificial Sequence: Synthetic peptide
  Seed: RNQPAATAL
RPQPAATAY

SEQ ID NO: 160610 - protein, 8 aa, Artificial Sequence
  Description of Artificial Sequence: Synthetic peptide
  Seed: RPVGISSM
RPVGISSA

SEQ ID NO: 160611 - protein, 8 aa, Artificial Sequence
  Description of Artificial Sequence: Synthetic peptide
  Seed: RPVGISSM
RPVGISSF

SEQ ID NO: 160612 - protein, 8 aa, Artificial Sequence
  Description of Artificial Sequence: Synthetic peptide
  Seed: RPVGISSM
RPVGISSI

SEQ ID NO: 160613 - protein, 8 aa, Artificial Sequence
  Description of Artificial Sequence: Synthetic peptide
  Seed: RPVGISSM
RPVGISSL

SEQ ID NO: 160614 - protein, 8 aa, Artificial Sequence
  Description of Artificial Sequence: Synthetic peptide
  Seed: RPVGISSM
RPVGISSP

SEQ ID NO: 160615 - protein, 8 aa, Artificial Sequence
  Description of Artificial Sequence: Synthetic peptide
  Seed: RPVGISSM
RPVGISSV

SEQ ID NO: 160616 - protein, 9 aa, Artificial Sequence
  Description of Artificial Sequence: Synthetic peptide
  Seed: RRAIATPGM
RQAIATPGA

SEQ ID NO: 160617 - protein, 9 aa, Artificial Sequence
  Description of Artificial Sequence: Synthetic peptide
  Seed: RRAIATPGM
RQAIATPGF

SEQ ID NO: 160618 - protein, 9 aa, Artificial Sequence
  Description of Artificial Sequence: Synthetic peptide
  Seed: RRAIATPGM
RQAIATPGG

SEQ ID NO: 160619 - protein, 9 aa, Artificial Sequence
  Description of Artificial Sequence: Synthetic peptide
  Seed: RRAIATPGM
RQAIATPGH

SEQ ID NO: 160620 - protein, 9 aa, Artificial Sequence
  Description of Artificial Sequence: Synthetic peptide
  Seed: RRAIATPGM
RQAIATPGI

SEQ ID NO: 160621 - protein, 9 aa, Artificial Sequence
  Description of Artificial Sequence: Synthetic peptide
  Seed: RRAIATPGM
RQAIATPGL

SEQ ID NO: 160622 - protein, 9 aa, Artificial Sequence
  Description of Artificial Sequence: Synthetic peptide
  Seed: RRAIATPGM
RQAIATPGM

SEQ ID NO: 160623 - protein, 9 aa, Artificial Sequence
  Description of Artificial Sequence: Synthetic peptide
  Seed: RRAIATPGM
RQAIATPGV

SEQ ID NO: 160624 - protein, 9 aa, Artificial Sequence
  Description of Artificial Sequence: Synthetic peptide
  Seed: RRAIATPGM
RQAIATPGW

SEQ ID NO: 160625 - protein, 9 aa, Artificial Sequence
  Description of Artificial Sequence: Synthetic peptide
  Seed: RRAIATPGM
RQAIATPGY

SEQ ID NO: 160626 - protein, 10 aa, Artificial Sequence
  Description of Artificial Sequence: Synthetic peptide
  Seed: RAIATPGMQI
RQIATPGMQF

SEQ ID NO: 160627 - protein, 11 aa, Artificial Sequence
  Description of Artificial Sequence: Synthetic peptide
  Seed: RAIATPGMQIR
RQIATPGMQIR

SEQ ID NO: 160628 - protein, 10 aa, Artificial Sequence
  Description of Artificial Sequence: Synthetic peptide
  Seed: RAIATPGMQI
RQIATPGMQW

SEQ ID NO: 160629 - protein, 10 aa, Artificial Sequence
  Description of Artificial Sequence: Synthetic peptide
  Seed: RAIATPGMQI
RQIATPGMQY

SEQ ID NO: 160630 - protein, 10 aa, Artificial Sequence
  Description of Artificial Sequence: Synthetic peptide
  Seed: RALTLNTMTK
RQLTLNTMTK

SEQ ID NO: 160631 - protein, 10 aa, Artificial Sequence
  Description of Artificial Sequence: Synthetic peptide
  Seed: RALTLNTMTK
RQLTLNTMTR

SEQ ID NO: 160632 - protein, 9 aa, Artificial Sequence
  Description of Artificial Sequence: Synthetic peptide
  Seed: RRPVGISSM
RQPVGISSA

SEQ ID NO: 160633 - protein, 9 aa, Artificial Sequence
  Description of Artificial Sequence: Synthetic peptide
  Seed: RRPVGISSM
RQPVGISSF

SEQ ID NO: 160634 - protein, 9 aa, Artificial Sequence
  Description of Artificial Sequence: Synthetic peptide
  Seed: RRPVGISSM
RQPVGISSH

SEQ ID NO: 160635 - protein, 9 aa, Artificial Sequence
  Description of Artificial Sequence: Synthetic peptide
  Seed: RRPVGISSM
RQPVGISSI

SEQ ID NO: 160636 - protein, 9 aa, Artificial Sequence
  Description of Artificial Sequence: Synthetic peptide
  Seed: RRPVGISSM
RQPVGISSL

SEQ ID NO: 160637 - protein, 9 aa, Artificial Sequence
  Description of Artificial Sequence: Synthetic peptide
  Seed: RRPVGISSM
RQPVGISSM

SEQ ID NO: 160638 - protein, 9 aa, Artificial Sequence
  Description of Artificial Sequence: Synthetic peptide
  Seed: RRPVGISSM
RQPVGISSV

SEQ ID NO: 160639 - protein, 9 aa, Artificial Sequence
  Description of Artificial Sequence: Synthetic peptide
  Seed: RRPVGISSM
RQPVGISSW

SEQ ID NO: 160640 - protein, 9 aa, Artificial Sequence
  Description of Artificial Sequence: Synthetic peptide
  Seed: RRPVGISSM
RQPVGISSY

SEQ ID NO: 160641 - protein, 9 aa, Artificial Sequence
  Description of Artificial Sequence: Synthetic peptide
  Seed: RNQPAATAL
RQQPAATAA

SEQ ID NO: 160642 - protein, 9 aa, Artificial Sequence
  Description of Artificial Sequence: Synthetic peptide
  Seed: RNQPAATAL
RQQPAATAC

SEQ ID NO: 160643 - protein, 9 aa, Artificial Sequence
  Description of Artificial Sequence: Synthetic peptide
  Seed: RNQPAATAL
RQQPAATAF

SEQ ID NO: 160644 - protein, 9 aa, Artificial Sequence
  Description of Artificial Sequence: Synthetic peptide
  Seed: RNQPAATAL
RQQPAATAG

SEQ ID NO: 160645 - protein, 9 aa, Artificial Sequence
  Description of Artificial Sequence: Synthetic peptide
  Seed: RNQPAATAL
RQQPAATAH

SEQ ID NO: 160646 - protein, 9 aa, Artificial Sequence
  Description of Artificial Sequence: Synthetic peptide
  Seed: RNQPAATAL
RQQPAATAI

SEQ ID NO: 160647 - protein, 9 aa, Artificial Sequence
  Description of Artificial Sequence: Synthetic peptide
  Seed: RNQPAATAL
RQQPAATAL

SEQ ID NO: 160648 - protein, 9 aa, Artificial Sequence
  Description of Artificial Sequence: Synthetic peptide
  Seed: RNQPAATAL
RQQPAATAM

SEQ ID NO: 160649 - protein, 9 aa, Artificial Sequence
  Description of Artificial Sequence: Synthetic peptide
  Seed: RNQPAATAL
RQQPAATAN

SEQ ID NO: 160650 - protein, 9 aa, Artificial Sequence
  Description of Artificial Sequence: Synthetic peptide
  Seed: RNQPAATAL
RQQPAATAP

SEQ ID NO: 160651 - protein, 9 aa, Artificial Sequence
  Description of Artificial Sequence: Synthetic peptide
  Seed: RNQPAATAL
RQQPAATAQ

SEQ ID NO: 160652 - protein, 9 aa, Artificial Sequence
  Description of Artificial Sequence: Synthetic peptide
  Seed: RNQPAATAL
RQQPAATAS

SEQ ID NO: 160653 - protein, 9 aa, Artificial Sequence
  Description of Artificial Sequence: Synthetic peptide
  Seed: RNQPAATAL
RQQPAATAT

SEQ ID NO: 160654 - protein, 9 aa, Artificial Sequence
  Description of Artificial Sequence: Synthetic peptide
  Seed: RNQPAATAL
RQQPAATAV

SEQ ID NO: 160655 - protein, 9 aa, Artificial Sequence
  Description of Artificial Sequence: Synthetic peptide
  Seed: RNQPAATAL
RQQPAATAW

SEQ ID NO: 160656 - protein, 9 aa, Artificial Sequence
  Description of Artificial Sequence: Synthetic peptide
  Seed: RNQPAATAL
RQQPAATAY

SEQ ID NO: 160657 - protein, 9 aa, Artificial Sequence
  Description of Artificial Sequence: Synthetic peptide
  Seed: RRAIATPGM
RRAIATPGA

SEQ ID NO: 160658 - protein, 9 aa, Artificial Sequence
  Description of Artificial Sequence: Synthetic peptide
  Seed: RRAIATPGM
RRAIATPGC

SEQ ID NO: 160659 - protein, 9 aa, Artificial Sequence
  Description of Artificial Sequence: Synthetic peptide
  Seed: RRAIATPGM
RRAIATPGF

SEQ ID NO: 160660 - protein, 9 aa, Artificial Sequence
  Description of Artificial Sequence: Synthetic peptide
  Seed: RRAIATPGM
RRAIATPGH

SEQ ID NO: 160661 - protein, 9 aa, Artificial Sequence
  Description of Artificial Sequence: Synthetic peptide
  Seed: RRAIATPGM
RRAIATPGI

SEQ ID NO: 160662 - protein, 9 aa, Artificial Sequence
  Description of Artificial Sequence: Synthetic peptide
  Seed: RRAIATPGM
RRAIATPGK

SEQ ID NO: 160663 - protein, 9 aa, Artificial Sequence
  Description of Artificial Sequence: Synthetic peptide
  Seed: RRAIATPGM
RRAIATPGL

SEQ ID NO: 160664 - protein, 11 aa, Artificial Sequence
  Description of Artificial Sequence: Synthetic peptide
  Seed: RRAIATPGMQI
RRAIATPGMQF

SEQ ID NO: 160665 - protein, 11 aa, Artificial Sequence
  Description of Artificial Sequence: Synthetic peptide
  Seed: RRAIATPGMQI
RRAIATPGMQK

SEQ ID NO: 160666 - protein, 11 aa, Artificial Sequence
  Description of Artificial Sequence: Synthetic peptide
  Seed: RRAIATPGMQI
RRAIATPGMQL

SEQ ID NO: 160667 - protein, 11 aa, Artificial Sequence
  Description of Artificial Sequence: Synthetic peptide
  Seed: RRAIATPGMQI
RRAIATPGMQM

SEQ ID NO: 160668 - protein, 11 aa, Artificial Sequence
  Description of Artificial Sequence: Synthetic peptide
  Seed: RRAIATPGMQI
RRAIATPGMQR

SEQ ID NO: 160669 - protein, 11 aa, Artificial Sequence
  Description of Artificial Sequence: Synthetic peptide
  Seed: RRAIATPGMQI
RRAIATPGMQV

SEQ ID NO: 160670 - protein, 11 aa, Artificial Sequence
  Description of Artificial Sequence: Synthetic peptide
  Seed: RRAIATPGMQI
RRAIATPGMQY

SEQ ID NO: 160671 - protein, 9 aa, Artificial Sequence
  Description of Artificial Sequence: Synthetic peptide
  Seed: RRAIATPGM
RRAIATPGR

SEQ ID NO: 160672 - protein, 9 aa, Artificial Sequence
  Description of Artificial Sequence: Synthetic peptide
  Seed: RRAIATPGM
RRAIATPGT

SEQ ID NO: 160673 - protein, 9 aa, Artificial Sequence
  Description of Artificial Sequence: Synthetic peptide
  Seed: RRAIATPGM
RRAIATPGV

SEQ ID NO: 160674 - protein, 9 aa, Artificial Sequence
  Description of Artificial Sequence: Synthetic peptide
  Seed: RRAIATPGM
RRAIATPGW

SEQ ID NO: 160675 - protein, 9 aa, Artificial Sequence
  Description of Artificial Sequence: Synthetic peptide
  Seed: RRAIATPGM
RRAIATPGY

SEQ ID NO: 160676 - protein, 10 aa, Artificial Sequence
  Description of Artificial Sequence: Synthetic peptide
  Seed: RAIATPGMQI
RRIATPGMQF

SEQ ID NO: 160677 - protein, 11 aa, Artificial Sequence
  Description of Artificial Sequence: Synthetic peptide
  Seed: RAIATPGMQIR
RRIATPGMQIR

SEQ ID NO: 160678 - protein, 10 aa, Artificial Sequence
  Description of Artificial Sequence: Synthetic peptide
  Seed: RAIATPGMQI
RRIATPGMQW

SEQ ID NO: 160679 - protein, 10 aa, Artificial Sequence
  Description of Artificial Sequence: Synthetic peptide
  Seed: RAIATPGMQI
RRIATPGMQY

SEQ ID NO: 160680 - protein, 10 aa, Artificial Sequence
  Description of Artificial Sequence: Synthetic peptide
  Seed: RALTLNTMTK
RRLTLNTMTK

SEQ ID NO: 160681 - protein, 10 aa, Artificial Sequence
  Description of Artificial Sequence: Synthetic peptide
  Seed: RALTLNTMTK
RRLTLNTMTR

SEQ ID NO: 160682 - protein, 9 aa, Artificial Sequence
  Description of Artificial Sequence: Synthetic peptide
  Seed: RRPVGISSM
RRPVGISSF

SEQ ID NO: 160683 - protein, 9 aa, Artificial Sequence
  Description of Artificial Sequence: Synthetic peptide
  Seed: RRPVGISSM
RRPVGISSI

SEQ ID NO: 160684 - protein, 9 aa, Artificial Sequence
  Description of Artificial Sequence: Synthetic peptide
  Seed: RRPVGISSM
RRPVGISSL

SEQ ID NO: 160685 - protein, 9 aa, Artificial Sequence
  Description of Artificial Sequence: Synthetic peptide
  Seed: RRPVGISSM
RRPVGISSV

SEQ ID NO: 160686 - protein, 9 aa, Artificial Sequence
  Description of Artificial Sequence: Synthetic peptide
  Seed: RRPVGISSM
RRPVGISSY

SEQ ID NO: 160687 - protein, 9 aa, Artificial Sequence
  Description of Artificial Sequence: Synthetic peptide
  Seed: RNQPAATAL
RRQPAATAF

SEQ ID NO: 160688 - protein, 9 aa, Artificial Sequence
  Description of Artificial Sequence: Synthetic peptide
  Seed: RNQPAATAL
RRQPAATAH

SEQ ID NO: 160689 - protein, 9 aa, Artificial Sequence
  Description of Artificial Sequence: Synthetic peptide
  Seed: RNQPAATAL
RRQPAATAI

SEQ ID NO: 160690 - protein, 9 aa, Artificial Sequence
  Description of Artificial Sequence: Synthetic peptide
  Seed: RNQPAATAL
RRQPAATAL

SEQ ID NO: 160691 - protein, 9 aa, Artificial Sequence
  Description of Artificial Sequence: Synthetic peptide
  Seed: RNQPAATAL
RRQPAATAM

SEQ ID NO: 160692 - protein, 9 aa, Artificial Sequence
  Description of Artificial Sequence: Synthetic peptide
  Seed: RNQPAATAL
RRQPAATAW

SEQ ID NO: 160693 - protein, 9 aa, Artificial Sequence
  Description of Artificial Sequence: Synthetic peptide
  Seed: RNQPAATAL
RRQPAATAY

SEQ ID NO: 160694 - protein, 9 aa, Artificial Sequence
  Description of Artificial Sequence: Synthetic peptide
  Seed: RRAIATPGM
RSAIATPGF

SEQ ID NO: 160695 - protein, 9 aa, Artificial Sequence
  Description of Artificial Sequence: Synthetic peptide
  Seed: RRAIATPGM
RSAIATPGM

SEQ ID NO: 160696 - protein, 9 aa, Artificial Sequence
  Description of Artificial Sequence: Synthetic peptide
  Seed: RRAIATPGM
RSAIATPGY

SEQ ID NO: 160697 - protein, 10 aa, Artificial Sequence
  Description of Artificial Sequence: Synthetic peptide
  Seed: RAIATPGMQI
RSIATPGMQF

SEQ ID NO: 160698 - protein, 10 aa, Artificial Sequence
  Description of Artificial Sequence: Synthetic peptide
  Seed: RAIATPGMQI
RSIATPGMQI

SEQ ID NO: 160699 - protein, 11 aa, Artificial Sequence
  Description of Artificial Sequence: Synthetic peptide
  Seed: RAIATPGMQIR
RSIATPGMQIR

SEQ ID NO: 160700 - protein, 10 aa, Artificial Sequence
  Description of Artificial Sequence: Synthetic peptide
  Seed: RAIATPGMQI
RSIATPGMQL

SEQ ID NO: 160701 - protein, 10 aa, Artificial Sequence
  Description of Artificial Sequence: Synthetic peptide
  Seed: RAIATPGMQI
RSIATPGMQM

SEQ ID NO: 160702 - protein, 10 aa, Artificial Sequence
  Description of Artificial Sequence: Synthetic peptide
  Seed: RAIATPGMQI
RSIATPGMQV

SEQ ID NO: 160703 - protein, 10 aa, Artificial Sequence
  Description of Artificial Sequence: Synthetic peptide
  Seed: RAIATPGMQI
RSIATPGMQW

SEQ ID NO: 160704 - protein, 10 aa, Artificial Sequence
  Description of Artificial Sequence: Synthetic peptide
  Seed: RAIATPGMQI
RSIATPGMQY

SEQ ID NO: 160705 - protein, 10 aa, Artificial Sequence
  Description of Artificial Sequence: Synthetic peptide
  Seed: RALTLNTMTK
RSLTLNTMTA

SEQ ID NO: 160706 - protein, 10 aa, Artificial Sequence
  Description of Artificial Sequence: Synthetic peptide
  Seed: RALTLNTMTK
RSLTLNTMTI

SEQ ID NO: 160707 - protein, 10 aa, Artificial Sequence
  Description of Artificial Sequence: Synthetic peptide
  Seed: RALTLNTMTK
RSLTLNTMTL

SEQ ID NO: 160708 - protein, 10 aa, Artificial Sequence
  Description of Artificial Sequence: Synthetic peptide
  Seed: RALTLNTMTK
RSLTLNTMTM

SEQ ID NO: 160709 - protein, 10 aa, Artificial Sequence
  Description of Artificial Sequence: Synthetic peptide
  Seed: RALTLNTMTK
RSLTLNTMTR

SEQ ID NO: 160710 - protein, 10 aa, Artificial Sequence
  Description of Artificial Sequence: Synthetic peptide
  Seed: RALTLNTMTK
RSLTLNTMTV

SEQ ID NO: 160711 - protein, 10 aa, Artificial Sequence
  Description of Artificial Sequence: Synthetic peptide
  Seed: RALTLNTMTK
RSLTLNTMTY

SEQ ID NO: 160712 - protein, 9 aa, Artificial Sequence
  Description of Artificial Sequence: Synthetic peptide
  Seed: RRPVGISSM
RSPVGISSF

SEQ ID NO: 160713 - protein, 9 aa, Artificial Sequence
  Description of Artificial Sequence: Synthetic peptide
  Seed: RRPVGISSM
RSPVGISSL

SEQ ID NO: 160714 - protein, 9 aa, Artificial Sequence
  Description of Artificial Sequence: Synthetic peptide
  Seed: RRPVGISSM
RSPVGISSM

SEQ ID NO: 160715 - protein, 9 aa, Artificial Sequence
  Description of Artificial Sequence: Synthetic peptide
  Seed: RRPVGISSM
RSPVGISSY

SEQ ID NO: 160716 - protein, 9 aa, Artificial Sequence
  Description of Artificial Sequence: Synthetic peptide
  Seed: RNQPAATAL
RSQPAATAF

SEQ ID NO: 160717 - protein, 9 aa, Artificial Sequence
  Description of Artificial Sequence: Synthetic peptide
  Seed: RNQPAATAL
RSQPAATAH

SEQ ID NO: 160718 - protein, 9 aa, Artificial Sequence
  Description of Artificial Sequence: Synthetic peptide
  Seed: RNQPAATAL
RSQPAATAI

SEQ ID NO: 160719 - protein, 9 aa, Artificial Sequence
  Description of Artificial Sequence: Synthetic peptide
  Seed: RNQPAATAL
RSQPAATAL

SEQ ID NO: 160720 - protein, 9 aa, Artificial Sequence
  Description of Artificial Sequence: Synthetic peptide
  Seed: RNQPAATAL
RSQPAATAM

SEQ ID NO: 160721 - protein, 9 aa, Artificial Sequence
  Description of Artificial Sequence: Synthetic peptide
  Seed: RNQPAATAL
RSQPAATAV

SEQ ID NO: 160722 - protein, 9 aa, Artificial Sequence
  Description of Artificial Sequence: Synthetic peptide
  Seed: RNQPAATAL
RSQPAATAW

SEQ ID NO: 160723 - protein, 9 aa, Artificial Sequence
  Description of Artificial Sequence: Synthetic peptide
  Seed: RNQPAATAL
RSQPAATAY

SEQ ID NO: 160724 - protein, 9 aa, Artificial Sequence
  Description of Artificial Sequence: Synthetic peptide
  Seed: RRAIATPGM
RTAIATPGF

SEQ ID NO: 160725 - protein, 9 aa, Artificial Sequence
  Description of Artificial Sequence: Synthetic peptide
  Seed: RRAIATPGM
RTAIATPGM

SEQ ID NO: 160726 - protein, 9 aa, Artificial Sequence
  Description of Artificial Sequence: Synthetic peptide
  Seed: RRAIATPGM
RTAIATPGY

SEQ ID NO: 160727 - protein, 10 aa, Artificial Sequence
  Description of Artificial Sequence: Synthetic peptide
  Seed: RAIATPGMQI
RTIATPGMQF

SEQ ID NO: 160728 - protein, 10 aa, Artificial Sequence
  Description of Artificial Sequence: Synthetic peptide
  Seed: RAIATPGMQI
RTIATPGMQI

SEQ ID NO: 160729 - protein, 11 aa, Artificial Sequence
  Description of Artificial Sequence: Synthetic peptide
  Seed: RAIATPGMQIR
RTIATPGMQIK

SEQ ID NO: 160730 - protein, 11 aa, Artificial Sequence
  Description of Artificial Sequence: Synthetic peptide
  Seed: RAIATPGMQIR
RTIATPGMQIR

SEQ ID NO: 160731 - protein, 10 aa, Artificial Sequence
  Description of Artificial Sequence: Synthetic peptide
  Seed: RAIATPGMQI
RTIATPGMQL

SEQ ID NO: 160732 - protein, 10 aa, Artificial Sequence
  Description of Artificial Sequence: Synthetic peptide
  Seed: RAIATPGMQI
RTIATPGMQM

SEQ ID NO: 160733 - protein, 10 aa, Artificial Sequence
  Description of Artificial Sequence: Synthetic peptide
  Seed: RAIATPGMQI
RTIATPGMQV

SEQ ID NO: 160734 - protein, 10 aa, Artificial Sequence
  Description of Artificial Sequence: Synthetic peptide
  Seed: RAIATPGMQI
RTIATPGMQW

SEQ ID NO: 160735 - protein, 10 aa, Artificial Sequence
  Description of Artificial Sequence: Synthetic peptide
  Seed: RAIATPGMQI
RTIATPGMQY

SEQ ID NO: 160736 - protein, 10 aa, Artificial Sequence
  Description of Artificial Sequence: Synthetic peptide
  Seed: RALTLNTMTK
RTLTLNTMTA

SEQ ID NO: 160737 - protein, 10 aa, Artificial Sequence
  Description of Artificial Sequence: Synthetic peptide
  Seed: RALTLNTMTK
RTLTLNTMTI

SEQ ID NO: 160738 - protein, 10 aa, Artificial Sequence
  Description of Artificial Sequence: Synthetic peptide
  Seed: RALTLNTMTK
RTLTLNTMTK

SEQ ID NO: 160739 - protein, 10 aa, Artificial Sequence
  Description of Artificial Sequence: Synthetic peptide
  Seed: RALTLNTMTK
RTLTLNTMTL

SEQ ID NO: 160740 - protein, 10 aa, Artificial Sequence
  Description of Artificial Sequence: Synthetic peptide
  Seed: RALTLNTMTK
RTLTLNTMTM

SEQ ID NO: 160741 - protein, 10 aa, Artificial Sequence
  Description of Artificial Sequence: Synthetic peptide
  Seed: RALTLNTMTK
RTLTLNTMTR

SEQ ID NO: 160742 - protein, 10 aa, Artificial Sequence
  Description of Artificial Sequence: Synthetic peptide
  Seed: RALTLNTMTK
RTLTLNTMTS

SEQ ID NO: 160743 - protein, 10 aa, Artificial Sequence
  Description of Artificial Sequence: Synthetic peptide
  Seed: RALTLNTMTK
RTLTLNTMTV

SEQ ID NO: 160744 - protein, 10 aa, Artificial Sequence
  Description of Artificial Sequence: Synthetic peptide
  Seed: RALTLNTMTK
RTLTLNTMTY

SEQ ID NO: 160745 - protein, 9 aa, Artificial Sequence
  Description of Artificial Sequence: Synthetic peptide
  Seed: RRPVGISSM
RTPVGISSF

SEQ ID NO: 160746 - protein, 9 aa, Artificial Sequence
  Description of Artificial Sequence: Synthetic peptide
  Seed: RRPVGISSM
RTPVGISSL

SEQ ID NO: 160747 - protein, 9 aa, Artificial Sequence
  Description of Artificial Sequence: Synthetic peptide
  Seed: RRPVGISSM
RTPVGISSM

SEQ ID NO: 160748 - protein, 9 aa, Artificial Sequence
  Description of Artificial Sequence: Synthetic peptide
  Seed: RRPVGISSM
RTPVGISSY

SEQ ID NO: 160749 - protein, 9 aa, Artificial Sequence
  Description of Artificial Sequence: Synthetic peptide
  Seed: RNQPAATAL
RTQPAATAF

SEQ ID NO: 160750 - protein, 9 aa, Artificial Sequence
  Description of Artificial Sequence: Synthetic peptide
  Seed: RNQPAATAL
RTQPAATAH

SEQ ID NO: 160751 - protein, 9 aa, Artificial Sequence
  Description of Artificial Sequence: Synthetic peptide
  Seed: RNQPAATAL
RTQPAATAL

SEQ ID NO: 160752 - protein, 9 aa, Artificial Sequence
  Description of Artificial Sequence: Synthetic peptide
  Seed: RNQPAATAL
RTQPAATAM

SEQ ID NO: 160753 - protein, 9 aa, Artificial Sequence
  Description of Artificial Sequence: Synthetic peptide
  Seed: RNQPAATAL
RTQPAATAY

SEQ ID NO: 160754 - protein, 9 aa, Artificial Sequence
  Description of Artificial Sequence: Synthetic peptide
  Seed: RRAIATPGM
RVAIATPGF

SEQ ID NO: 160755 - protein, 9 aa, Artificial Sequence
  Description of Artificial Sequence: Synthetic peptide
  Seed: RRAIATPGM
RVAIATPGM

SEQ ID NO: 160756 - protein, 9 aa, Artificial Sequence
  Description of Artificial Sequence: Synthetic peptide
  Seed: RRAIATPGM
RVAIATPGY

SEQ ID NO: 160757 - protein, 10 aa, Artificial Sequence
  Description of Artificial Sequence: Synthetic peptide
  Seed: RAIATPGMQI
RVIATPGMQF

SEQ ID NO: 160758 - protein, 10 aa, Artificial Sequence
  Description of Artificial Sequence: Synthetic peptide
  Seed: RAIATPGMQI
RVIATPGMQI

SEQ ID NO: 160759 - protein, 11 aa, Artificial Sequence
  Description of Artificial Sequence: Synthetic peptide
  Seed: RAIATPGMQIR
RVIATPGMQIR

SEQ ID NO: 160760 - protein, 10 aa, Artificial Sequence
  Description of Artificial Sequence: Synthetic peptide
  Seed: RAIATPGMQI
RVIATPGMQL

SEQ ID NO: 160761 - protein, 10 aa, Artificial Sequence
  Description of Artificial Sequence: Synthetic peptide
  Seed: RAIATPGMQI
RVIATPGMQM

SEQ ID NO: 160762 - protein, 10 aa, Artificial Sequence
  Description of Artificial Sequence: Synthetic peptide
  Seed: RAIATPGMQI
RVIATPGMQV

SEQ ID NO: 160763 - protein, 10 aa, Artificial Sequence
  Description of Artificial Sequence: Synthetic peptide
  Seed: RAIATPGMQI
RVIATPGMQW

SEQ ID NO: 160764 - protein, 10 aa, Artificial Sequence
  Description of Artificial Sequence: Synthetic peptide
  Seed: RAIATPGMQI
RVIATPGMQY

SEQ ID NO: 160765 - protein, 10 aa, Artificial Sequence
  Description of Artificial Sequence: Synthetic peptide
  Seed: RALTLNTMTK
RVLTLNTMTA

SEQ ID NO: 160766 - protein, 10 aa, Artificial Sequence
  Description of Artificial Sequence: Synthetic peptide
  Seed: RALTLNTMTK
RVLTLNTMTI

SEQ ID NO: 160767 - protein, 10 aa, Artificial Sequence
  Description of Artificial Sequence: Synthetic peptide
  Seed: RALTLNTMTK
RVLTLNTMTL

SEQ ID NO: 160768 - protein, 10 aa, Artificial Sequence
  Description of Artificial Sequence: Synthetic peptide
  Seed: RALTLNTMTK
RVLTLNTMTM

SEQ ID NO: 160769 - protein, 10 aa, Artificial Sequence
  Description of Artificial Sequence: Synthetic peptide
  Seed: RALTLNTMTK
RVLTLNTMTR

SEQ ID NO: 160770 - protein, 10 aa, Artificial Sequence
  Description of Artificial Sequence: Synthetic peptide
  Seed: RALTLNTMTK
RVLTLNTMTV

SEQ ID NO: 160771 - protein, 10 aa, Artificial Sequence
  Description of Artificial Sequence: Synthetic peptide
  Seed: RALTLNTMTK
RVLTLNTMTY

SEQ ID NO: 160772 - protein, 9 aa, Artificial Sequence
  Description of Artificial Sequence: Synthetic peptide
  Seed: RRPVGISSM
RVPVGISSF

SEQ ID NO: 160773 - protein, 9 aa, Artificial Sequence
  Description of Artificial Sequence: Synthetic peptide
  Seed: RRPVGISSM
RVPVGISSL

SEQ ID NO: 160774 - protein, 9 aa, Artificial Sequence
  Description of Artificial Sequence: Synthetic peptide
  Seed: RRPVGISSM
RVPVGISSM

SEQ ID NO: 160775 - protein, 9 aa, Artificial Sequence
  Description of Artificial Sequence: Synthetic peptide
  Seed: RRPVGISSM
RVPVGISSY

SEQ ID NO: 160776 - protein, 9 aa, Artificial Sequence
  Description of Artificial Sequence: Synthetic peptide
  Seed: RNQPAATAL
RVQPAATAF

SEQ ID NO: 160777 - protein, 9 aa, Artificial Sequence
  Description of Artificial Sequence: Synthetic peptide
  Seed: RNQPAATAL
RVQPAATAH

SEQ ID NO: 160778 - protein, 9 aa, Artificial Sequence
  Description of Artificial Sequence: Synthetic peptide
  Seed: RNQPAATAL
RVQPAATAI

SEQ ID NO: 160779 - protein, 9 aa, Artificial Sequence
  Description of Artificial Sequence: Synthetic peptide
  Seed: RNQPAATAL
RVQPAATAL

SEQ ID NO: 160780 - protein, 9 aa, Artificial Sequence
  Description of Artificial Sequence: Synthetic peptide
  Seed: RNQPAATAL
RVQPAATAM

SEQ ID NO: 160781 - protein, 9 aa, Artificial Sequence
  Description of Artificial Sequence: Synthetic peptide
  Seed: RNQPAATAL
RVQPAATAW

SEQ ID NO: 160782 - protein, 9 aa, Artificial Sequence
  Description of Artificial Sequence: Synthetic peptide
  Seed: RNQPAATAL
RVQPAATAY

SEQ ID NO: 160783 - protein, 9 aa, Artificial Sequence
  Description of Artificial Sequence: Synthetic peptide
  Seed: RRAIATPGM
RWAIATPGF

SEQ ID NO: 160784 - protein, 10 aa, Artificial Sequence
  Description of Artificial Sequence: Synthetic peptide
  Seed: RAIATPGMQI
RWIATPGMQF

SEQ ID NO: 160785 - protein, 11 aa, Artificial Sequence
  Description of Artificial Sequence: Synthetic peptide
  Seed: RAIATPGMQIR
RWIATPGMQIK

SEQ ID NO: 160786 - protein, 11 aa, Artificial Sequence
  Description of Artificial Sequence: Synthetic peptide
  Seed: RAIATPGMQIR
RWIATPGMQIR

SEQ ID NO: 160787 - protein, 10 aa, Artificial Sequence
  Description of Artificial Sequence: Synthetic peptide
  Seed: RAIATPGMQI
RWIATPGMQW

SEQ ID NO: 160788 - protein, 10 aa, Artificial Sequence
  Description of Artificial Sequence: Synthetic peptide
  Seed: RAIATPGMQI
RWIATPGMQY

SEQ ID NO: 160789 - protein, 10 aa, Artificial Sequence
  Description of Artificial Sequence: Synthetic peptide
  Seed: RALTLNTMTK
RWLTLNTMTH

SEQ ID NO: 160790 - protein, 10 aa, Artificial Sequence
  Description of Artificial Sequence: Synthetic peptide
  Seed: RALTLNTMTK
RWLTLNTMTK

SEQ ID NO: 160791 - protein, 10 aa, Artificial Sequence
  Description of Artificial Sequence: Synthetic peptide
  Seed: RALTLNTMTK
RWLTLNTMTR

SEQ ID NO: 160792 - protein, 10 aa, Artificial Sequence
  Description of Artificial Sequence: Synthetic peptide
  Seed: RALTLNTMTK
RWLTLNTMTY

SEQ ID NO: 160793 - protein, 9 aa, Artificial Sequence
  Description of Artificial Sequence: Synthetic peptide
  Seed: RRPVGISSM
RWPVGISSF

SEQ ID NO: 160794 - protein, 9 aa, Artificial Sequence
  Description of Artificial Sequence: Synthetic peptide
  Seed: RRPVGISSM
RWPVGISSI

SEQ ID NO: 160795 - protein, 9 aa, Artificial Sequence
  Description of Artificial Sequence: Synthetic peptide
  Seed: RRPVGISSM
RWPVGISSL

SEQ ID NO: 160796 - protein, 9 aa, Artificial Sequence
  Description of Artificial Sequence: Synthetic peptide
  Seed: RRPVGISSM
RWPVGISSM

SEQ ID NO: 160797 - protein, 9 aa, Artificial Sequence
  Description of Artificial Sequence: Synthetic peptide
  Seed: RRPVGISSM
RWPVGISSV

SEQ ID NO: 160798 - protein, 9 aa, Artificial Sequence
  Description of Artificial Sequence: Synthetic peptide
  Seed: RRPVGISSM
RWPVGISSW

SEQ ID NO: 160799 - protein, 9 aa, Artificial Sequence
  Description of Artificial Sequence: Synthetic peptide
  Seed: RRPVGISSM
RWPVGISSY

SEQ ID NO: 160800 - protein, 9 aa, Artificial Sequence
  Description of Artificial Sequence: Synthetic peptide
  Seed: RNQPAATAL
RWQPAATAF

SEQ ID NO: 160801 - protein, 9 aa, Artificial Sequence
  Description of Artificial Sequence: Synthetic peptide
  Seed: RNQPAATAL
RWQPAATAM

SEQ ID NO: 160802 - protein, 9 aa, Artificial Sequence
  Description of Artificial Sequence: Synthetic peptide
  Seed: RNQPAATAL
RWQPAATAY

SEQ ID NO: 160803 - protein, 9 aa, Artificial Sequence
  Description of Artificial Sequence: Synthetic peptide
  Seed: RRAIATPGM
RYAIATPGF

SEQ ID NO: 160804 - protein, 9 aa, Artificial Sequence
  Description of Artificial Sequence: Synthetic peptide
  Seed: RRAIATPGM
RYAIATPGY

SEQ ID NO: 160805 - protein, 10 aa, Artificial Sequence
  Description of Artificial Sequence: Synthetic peptide
  Seed: RAIATPGMQI
RYIATPGMQF

SEQ ID NO: 160806 - protein, 11 aa, Artificial Sequence
  Description of Artificial Sequence: Synthetic peptide
  Seed: RAIATPGMQIR
RYIATPGMQIK

SEQ ID NO: 160807 - protein, 11 aa, Artificial Sequence
  Description of Artificial Sequence: Synthetic peptide
  Seed: RAIATPGMQIR
RYIATPGMQIR

SEQ ID NO: 160808 - protein, 10 aa, Artificial Sequence
  Description of Artificial Sequence: Synthetic peptide
  Seed: RAIATPGMQI
RYIATPGMQW

SEQ ID NO: 160809 - protein, 10 aa, Artificial Sequence
  Description of Artificial Sequence: Synthetic peptide
  Seed: RAIATPGMQI
RYIATPGMQY

SEQ ID NO: 160810 - protein, 10 aa, Artificial Sequence
  Description of Artificial Sequence: Synthetic peptide
  Seed: RALTLNTMTK
RYLTLNTMTA

SEQ ID NO: 160811 - protein, 10 aa, Artificial Sequence
  Description of Artificial Sequence: Synthetic peptide
  Seed: RALTLNTMTK
RYLTLNTMTH

SEQ ID NO: 160812 - protein, 10 aa, Artificial Sequence
  Description of Artificial Sequence: Synthetic peptide
  Seed: RALTLNTMTK
RYLTLNTMTI

SEQ ID NO: 160813 - protein, 10 aa, Artificial Sequence
  Description of Artificial Sequence: Synthetic peptide
  Seed: RALTLNTMTK
RYLTLNTMTK

SEQ ID NO: 160814 - protein, 10 aa, Artificial Sequence
  Description of Artificial Sequence: Synthetic peptide
  Seed: RALTLNTMTK
RYLTLNTMTM

SEQ ID NO: 160815 - protein, 10 aa, Artificial Sequence
  Description of Artificial Sequence: Synthetic peptide
  Seed: RALTLNTMTK
RYLTLNTMTR

SEQ ID NO: 160816 - protein, 10 aa, Artificial Sequence
  Description of Artificial Sequence: Synthetic peptide
  Seed: RALTLNTMTK
RYLTLNTMTV

SEQ ID NO: 160817 - protein, 9 aa, Artificial Sequence
  Description of Artificial Sequence: Synthetic peptide
  Seed: RRPVGISSM
RYPVGISSA

SEQ ID NO: 160818 - protein, 9 aa, Artificial Sequence
  Description of Artificial Sequence: Synthetic peptide
  Seed: RRPVGISSM
RYPVGISSC

SEQ ID NO: 160819 - protein, 9 aa, Artificial Sequence
  Description of Artificial Sequence: Synthetic peptide
  Seed: RRPVGISSM
RYPVGISSF

SEQ ID NO: 160820 - protein, 9 aa, Artificial Sequence
  Description of Artificial Sequence: Synthetic peptide
  Seed: RRPVGISSM
RYPVGISSH

SEQ ID NO: 160821 - protein, 9 aa, Artificial Sequence
  Description of Artificial Sequence: Synthetic peptide
  Seed: RRPVGISSM
RYPVGISSI

SEQ ID NO: 160822 - protein, 9 aa, Artificial Sequence
  Description of Artificial Sequence: Synthetic peptide
  Seed: RRPVGISSM
RYPVGISSL

SEQ ID NO: 160823 - protein, 9 aa, Artificial Sequence
  Description of Artificial Sequence: Synthetic peptide
  Seed: RRPVGISSM
RYPVGISSM

SEQ ID NO: 160824 - protein, 9 aa, Artificial Sequence
  Description of Artificial Sequence: Synthetic peptide
  Seed: RRPVGISSM
RYPVGISST

SEQ ID NO: 160825 - protein, 9 aa, Artificial Sequence
  Description of Artificial Sequence: Synthetic peptide
  Seed: RRPVGISSM
RYPVGISSV

SEQ ID NO: 160826 - protein, 9 aa, Artificial Sequence
  Description of Artificial Sequence: Synthetic peptide
  Seed: RRPVGISSM
RYPVGISSW

SEQ ID NO: 160827 - protein, 9 aa, Artificial Sequence
  Description of Artificial Sequence: Synthetic peptide
  Seed: RRPVGISSM
RYPVGISSY

SEQ ID NO: 160828 - protein, 9 aa, Artificial Sequence
  Description of Artificial Sequence: Synthetic peptide
  Seed: RNQPAATAL
RYQPAATAF

SEQ ID NO: 160829 - protein, 9 aa, Artificial Sequence
  Description of Artificial Sequence: Synthetic peptide
  Seed: RNQPAATAL
RYQPAATAL

SEQ ID NO: 160830 - protein, 9 aa, Artificial Sequence
  Description of Artificial Sequence: Synthetic peptide
  Seed: RNQPAATAL
RYQPAATAM

SEQ ID NO: 160831 - protein, 9 aa, Artificial Sequence
  Description of Artificial Sequence: Synthetic peptide
  Seed: RNQPAATAL
RYQPAATAY

SEQ ID NO: 160832 - protein, 8 aa, Artificial Sequence
  Description of Artificial Sequence: Synthetic peptide
  Seed: RFYRTCKL
RYYRTCKF

SEQ ID NO: 160833 - protein, 8 aa, Artificial Sequence
  Description of Artificial Sequence: Synthetic peptide
  Seed: RFYRTCKL
RYYRTCKL

SEQ ID NO: 160834 - protein, 8 aa, Artificial Sequence
  Description of Artificial Sequence: Synthetic peptide
  Seed: RFYRTCKL
RYYRTCKM

SEQ ID NO: 160835 - protein, 8 aa, Artificial Sequence
  Description of Artificial Sequence: Synthetic peptide
  Seed: RFYRTCKL
RYYRTCKY

SEQ ID NO: 160836 - protein, 8 aa, Artificial Sequence
  Description of Artificial Sequence: Synthetic peptide
  Seed: SSDDFALI
SADDFALF

SEQ ID NO: 160837 - protein, 8 aa, Artificial Sequence
  Description of Artificial Sequence: Synthetic peptide
  Seed: SSDDFALI
SADDFALI

SEQ ID NO: 160838 - protein, 8 aa, Artificial Sequence
  Description of Artificial Sequence: Synthetic peptide
  Seed: SSDDFALI
SADDFALL

SEQ ID NO: 160839 - protein, 8 aa, Artificial Sequence
  Description of Artificial Sequence: Synthetic peptide
  Seed: SSDDFALI
SADDFALM

SEQ ID NO: 160840 - protein, 8 aa, Artificial Sequence
  Description of Artificial Sequence: Synthetic peptide
  Seed: SSDDFALI
SADDFALV

SEQ ID NO: 160841 - protein, 11 aa, Artificial Sequence
  Description of Artificial Sequence: Synthetic peptide
  Seed: SPGMMMGMFNM
SAGMMMGMFNA

SEQ ID NO: 160842 - protein, 11 aa, Artificial Sequence
  Description of Artificial Sequence: Synthetic peptide
  Seed: SPGMMMGMFNM
SAGMMMGMFNI

SEQ ID NO: 160843 - protein, 11 aa, Artificial Sequence
  Description of Artificial Sequence: Synthetic peptide
  Seed: SPGMMMGMFNM
SAGMMMGMFNL

SEQ ID NO: 160844 - protein, 11 aa, Artificial Sequence
  Description of Artificial Sequence: Synthetic peptide
  Seed: SPGMMMGMFNM
SAGMMMGMFNM

SEQ ID NO: 160845 - protein, 11 aa, Artificial Sequence
  Description of Artificial Sequence: Synthetic peptide
  Seed: SPGMMMGMFNM
SAGMMMGMFNT

SEQ ID NO: 160846 - protein, 11 aa, Artificial Sequence
  Description of Artificial Sequence: Synthetic peptide
  Seed: SPGMMMGMFNM
SAGMMMGMFNV

SEQ ID NO: 160847 - protein, 9 aa, Artificial Sequence
  Description of Artificial Sequence: Synthetic peptide
  Seed: SNKMARLGK
SAKMARLGA

SEQ ID NO: 160848 - protein, 9 aa, Artificial Sequence
  Description of Artificial Sequence: Synthetic peptide
  Seed: SNKMARLGK
SAKMARLGC

SEQ ID NO: 160849 - protein, 9 aa, Artificial Sequence
  Description of Artificial Sequence: Synthetic peptide
  Seed: SNKMARLGK
SAKMARLGF

SEQ ID NO: 160850 - protein, 9 aa, Artificial Sequence
  Description of Artificial Sequence: Synthetic peptide
  Seed: SNKMARLGK
SAKMARLGG

SEQ ID NO: 160851 - protein, 9 aa, Artificial Sequence
  Description of Artificial Sequence: Synthetic peptide
  Seed: SNKMARLGK
SAKMARLGI

SEQ ID NO: 160852 - protein, 9 aa, Artificial Sequence
  Description of Artificial Sequence: Synthetic peptide
  Seed: SNKMARLGK
SAKMARLGK

SEQ ID NO: 160853 - protein, 9 aa, Artificial Sequence
  Description of Artificial Sequence: Synthetic peptide
  Seed: SNKMARLGK
SAKMARLGL

SEQ ID NO: 160854 - protein, 9 aa, Artificial Sequence
  Description of Artificial Sequence: Synthetic peptide
  Seed: SNKMARLGK
SAKMARLGM

SEQ ID NO: 160855 - protein, 9 aa, Artificial Sequence
  Description of Artificial Sequence: Synthetic peptide
  Seed: SNKMARLGK
SAKMARLGP

SEQ ID NO: 160856 - protein, 9 aa, Artificial Sequence
  Description of Artificial Sequence: Synthetic peptide
  Seed: SNKMARLGK
SAKMARLGR

SEQ ID NO: 160857 - protein, 9 aa, Artificial Sequence
  Description of Artificial Sequence: Synthetic peptide
  Seed: SNKMARLGK
SAKMARLGS

SEQ ID NO: 160858 - protein, 9 aa, Artificial Sequence
  Description of Artificial Sequence: Synthetic peptide
  Seed: SNKMARLGK
SAKMARLGT

SEQ ID NO: 160859 - protein, 9 aa, Artificial Sequence
  Description of Artificial Sequence: Synthetic peptide
  Seed: SNKMARLGK
SAKMARLGV

SEQ ID NO: 160860 - protein, 9 aa, Artificial Sequence
  Description of Artificial Sequence: Synthetic peptide
  Seed: SNKMARLGK
SAKMARLGY

SEQ ID NO: 160861 - protein, 9 aa, Artificial Sequence
  Description of Artificial Sequence: Synthetic peptide
  Seed: SYRRPVGIS
SARRPVGIA

SEQ ID NO: 160862 - protein, 9 aa, Artificial Sequence
  Description of Artificial Sequence: Synthetic peptide
  Seed: SYRRPVGIS
SARRPVGIC

SEQ ID NO: 160863 - protein, 9 aa, Artificial Sequence
  Description of Artificial Sequence: Synthetic peptide
  Seed: SYRRPVGIS
SARRPVGIF

SEQ ID NO: 160864 - protein, 9 aa, Artificial Sequence
  Description of Artificial Sequence: Synthetic peptide
  Seed: SYRRPVGIS
SARRPVGIG

SEQ ID NO: 160865 - protein, 9 aa, Artificial Sequence
  Description of Artificial Sequence: Synthetic peptide
  Seed: SYRRPVGIS
SARRPVGIH

SEQ ID NO: 160866 - protein, 9 aa, Artificial Sequence
  Description of Artificial Sequence: Synthetic peptide
  Seed: SYRRPVGIS
SARRPVGII

SEQ ID NO: 160867 - protein, 9 aa, Artificial Sequence
  Description of Artificial Sequence: Synthetic peptide
  Seed: SYRRPVGIS
SARRPVGIK

SEQ ID NO: 160868 - protein, 9 aa, Artificial Sequence
  Description of Artificial Sequence: Synthetic peptide
  Seed: SYRRPVGIS
SARRPVGIL

SEQ ID NO: 160869 - protein, 9 aa, Artificial Sequence
  Description of Artificial Sequence: Synthetic peptide
  Seed: SYRRPVGIS
SARRPVGIM

SEQ ID NO: 160870 - protein, 9 aa, Artificial Sequence
  Description of Artificial Sequence: Synthetic peptide
  Seed: SYRRPVGIS
SARRPVGIQ

SEQ ID NO: 160871 - protein, 9 aa, Artificial Sequence
  Description of Artificial Sequence: Synthetic peptide
  Seed: SYRRPVGIS
SARRPVGIR

SEQ ID NO: 160872 - protein, 9 aa, Artificial Sequence
  Description of Artificial Sequence: Synthetic peptide
  Seed: SYRRPVGIS
SARRPVGIS

SEQ ID NO: 160873 - protein, 10 aa, Artificial Sequence
  Description of Artificial Sequence: Synthetic peptide
  Seed: SYRRPVGISS
SARRPVGISA

SEQ ID NO: 160874 - protein, 10 aa, Artificial Sequence
  Description of Artificial Sequence: Synthetic peptide
  Seed: SYRRPVGISS
SARRPVGISG

SEQ ID NO: 160875 - protein, 10 aa, Artificial Sequence
  Description of Artificial Sequence: Synthetic peptide
  Seed: SYRRPVGISS
SARRPVGISI

SEQ ID NO: 160876 - protein, 10 aa, Artificial Sequence
  Description of Artificial Sequence: Synthetic peptide
  Seed: SYRRPVGISS
SARRPVGISK

SEQ ID NO: 160877 - protein, 10 aa, Artificial Sequence
  Description of Artificial Sequence: Synthetic peptide
  Seed: SYRRPVGISS
SARRPVGISL

SEQ ID NO: 160878 - protein, 10 aa, Artificial Sequence
  Description of Artificial Sequence: Synthetic peptide
  Seed: SYRRPVGISS
SARRPVGISM

SEQ ID NO: 160879 - protein, 10 aa, Artificial Sequence
  Description of Artificial Sequence: Synthetic peptide
  Seed: SYRRPVGISS
SARRPVGISR

SEQ ID NO: 160880 - protein, 10 aa, Artificial Sequence
  Description of Artificial Sequence: Synthetic peptide
  Seed: SYRRPVGISS
SARRPVGISS

SEQ ID NO: 160881 - protein, 10 aa, Artificial Sequence
  Description of Artificial Sequence: Synthetic peptide
  Seed: SYRRPVGISS
SARRPVGIST

SEQ ID NO: 160882 - protein, 10 aa, Artificial Sequence
  Description of Artificial Sequence: Synthetic peptide
  Seed: SYRRPVGISS
SARRPVGISV

SEQ ID NO: 160883 - protein, 10 aa, Artificial Sequence
  Description of Artificial Sequence: Synthetic peptide
  Seed: SYRRPVGISS
SARRPVGISY

SEQ ID NO: 160884 - protein, 9 aa, Artificial Sequence
  Description of Artificial Sequence: Synthetic peptide
  Seed: SYRRPVGIS
SARRPVGIT

SEQ ID NO: 160885 - protein, 9 aa, Artificial Sequence
  Description of Artificial Sequence: Synthetic peptide
  Seed: SYRRPVGIS
SARRPVGIV

SEQ ID NO: 160886 - protein, 9 aa, Artificial Sequence
  Description of Artificial Sequence: Synthetic peptide
  Seed: SYRRPVGIS
SARRPVGIY

SEQ ID NO: 160887 - protein, 10 aa, Artificial Sequence
  Description of Artificial Sequence: Synthetic peptide
  Seed: SLSPGMMMGM
SASPGMMMGI

SEQ ID NO: 160888 - protein, 10 aa, Artificial Sequence
  Description of Artificial Sequence: Synthetic peptide
  Seed: SLSPGMMMGM
SASPGMMMGL

SEQ ID NO: 160889 - protein, 10 aa, Artificial Sequence
  Description of Artificial Sequence: Synthetic peptide
  Seed: SLSPGMMMGM
SASPGMMMGV

SEQ ID NO: 160890 - protein, 9 aa, Artificial Sequence
  Description of Artificial Sequence: Synthetic peptide
  Seed: SSSYRRPVG
SASYRRPVA

SEQ ID NO: 160891 - protein, 9 aa, Artificial Sequence
  Description of Artificial Sequence: Synthetic peptide
  Seed: SSSYRRPVG
SASYRRPVK

SEQ ID NO: 160892 - protein, 9 aa, Artificial Sequence
  Description of Artificial Sequence: Synthetic peptide
  Seed: SSSYRRPVG
SASYRRPVV

SEQ ID NO: 160893 - protein, 9 aa, Artificial Sequence
  Description of Artificial Sequence: Synthetic peptide
  Seed: STVLGVSIL
SAVLGVSIF

SEQ ID NO: 160894 - protein, 9 aa, Artificial Sequence
  Description of Artificial Sequence: Synthetic peptide
  Seed: STVLGVSIL
SAVLGVSIH

SEQ ID NO: 160895 - protein, 9 aa, Artificial Sequence
  Description of Artificial Sequence: Synthetic peptide
  Seed: STVLGVSIL
SAVLGVSII

SEQ ID NO: 160896 - protein, 9 aa, Artificial Sequence
  Description of Artificial Sequence: Synthetic peptide
  Seed: STVLGVSIL
SAVLGVSIL

SEQ ID NO: 160897 - protein, 9 aa, Artificial Sequence
  Description of Artificial Sequence: Synthetic peptide
  Seed: STVLGVSIL
SAVLGVSIM

SEQ ID NO: 160898 - protein, 9 aa, Artificial Sequence
  Description of Artificial Sequence: Synthetic peptide
  Seed: STVLGVSIL
SAVLGVSIV

SEQ ID NO: 160899 - protein, 9 aa, Artificial Sequence
  Description of Artificial Sequence: Synthetic peptide
  Seed: STVLGVSIL
SAVLGVSIW

SEQ ID NO: 160900 - protein, 9 aa, Artificial Sequence
  Description of Artificial Sequence: Synthetic peptide
  Seed: STVLGVSIL
SAVLGVSIY

SEQ ID NO: 160901 - protein, 9 aa, Artificial Sequence
  Description of Artificial Sequence: Synthetic peptide
  Seed: SSYRRPVGI
SAYRRPVGA

SEQ ID NO: 160902 - protein, 9 aa, Artificial Sequence
  Description of Artificial Sequence: Synthetic peptide
  Seed: SSYRRPVGI
SAYRRPVGC

SEQ ID NO: 160903 - protein, 9 aa, Artificial Sequence
  Description of Artificial Sequence: Synthetic peptide
  Seed: SSYRRPVGI
SAYRRPVGF

SEQ ID NO: 160904 - protein, 9 aa, Artificial Sequence
  Description of Artificial Sequence: Synthetic peptide
  Seed: SSYRRPVGI
SAYRRPVGH

SEQ ID NO: 160905 - protein, 9 aa, Artificial Sequence
  Description of Artificial Sequence: Synthetic peptide
  Seed: SSYRRPVGI
SAYRRPVGI

SEQ ID NO: 160906 - protein, 10 aa, Artificial Sequence
  Description of Artificial Sequence: Synthetic peptide
  Seed: SSYRRPVGIS
SAYRRPVGIA

SEQ ID NO: 160907 - protein, 10 aa, Artificial Sequence
  Description of Artificial Sequence: Synthetic peptide
  Seed: SSYRRPVGIS
SAYRRPVGIK

SEQ ID NO: 160908 - protein, 10 aa, Artificial Sequence
  Description of Artificial Sequence: Synthetic peptide
  Seed: SSYRRPVGIS
SAYRRPVGIR

SEQ ID NO: 160909 - protein, 10 aa, Artificial Sequence
  Description of Artificial Sequence: Synthetic peptide
  Seed: SSYRRPVGIS
SAYRRPVGIV

SEQ ID NO: 160910 - protein, 9 aa, Artificial Sequence
  Description of Artificial Sequence: Synthetic peptide
  Seed: SSYRRPVGI
SAYRRPVGK

SEQ ID NO: 160911 - protein, 9 aa, Artificial Sequence
  Description of Artificial Sequence: Synthetic peptide
  Seed: SSYRRPVGI
SAYRRPVGL

SEQ ID NO: 160912 - protein, 9 aa, Artificial Sequence
  Description of Artificial Sequence: Synthetic peptide
  Seed: SSYRRPVGI
SAYRRPVGM

SEQ ID NO: 160913 - protein, 9 aa, Artificial Sequence
  Description of Artificial Sequence: Synthetic peptide
  Seed: SSYRRPVGI
SAYRRPVGR

SEQ ID NO: 160914 - protein, 9 aa, Artificial Sequence
  Description of Artificial Sequence: Synthetic peptide
  Seed: SSYRRPVGI
SAYRRPVGV

SEQ ID NO: 160915 - protein, 9 aa, Artificial Sequence
  Description of Artificial Sequence: Synthetic peptide
  Seed: SSYRRPVGI
SAYRRPVGW

SEQ ID NO: 160916 - protein, 9 aa, Artificial Sequence
  Description of Artificial Sequence: Synthetic peptide
  Seed: SSYRRPVGI
SAYRRPVGY

SEQ ID NO: 160917 - protein, 11 aa, Artificial Sequence
  Description of Artificial Sequence: Synthetic peptide
  Seed: SPGMMMGMFNM
SCGMMMGMFNA

SEQ ID NO: 160918 - protein, 11 aa, Artificial Sequence
  Description of Artificial Sequence: Synthetic peptide
  Seed: SPGMMMGMFNM
SCGMMMGMFNI

SEQ ID NO: 160919 - protein, 11 aa, Artificial Sequence
  Description of Artificial Sequence: Synthetic peptide
  Seed: SPGMMMGMFNM
SCGMMMGMFNL

SEQ ID NO: 160920 - protein, 11 aa, Artificial Sequence
  Description of Artificial Sequence: Synthetic peptide
  Seed: SPGMMMGMFNM
SCGMMMGMFNM

SEQ ID NO: 160921 - protein, 11 aa, Artificial Sequence
  Description of Artificial Sequence: Synthetic peptide
  Seed: SPGMMMGMFNM
SCGMMMGMFNT

SEQ ID NO: 160922 - protein, 11 aa, Artificial Sequence
  Description of Artificial Sequence: Synthetic peptide
  Seed: SPGMMMGMFNM
SCGMMMGMFNV

SEQ ID NO: 160923 - protein, 9 aa, Artificial Sequence
  Description of Artificial Sequence: Synthetic peptide
  Seed: SNKMARLGK
SCKMARLGA

SEQ ID NO: 160924 - protein, 9 aa, Artificial Sequence
  Description of Artificial Sequence: Synthetic peptide
  Seed: SNKMARLGK
SCKMARLGK

SEQ ID NO: 160925 - protein, 9 aa, Artificial Sequence
  Description of Artificial Sequence: Synthetic peptide
  Seed: SYRRPVGIS
SCRRPVGIA

SEQ ID NO: 160926 - protein, 9 aa, Artificial Sequence
  Description of Artificial Sequence: Synthetic peptide
  Seed: SYRRPVGIS
SCRRPVGIK

SEQ ID NO: 160927 - protein, 10 aa, Artificial Sequence
  Description of Artificial Sequence: Synthetic peptide
  Seed: SYRRPVGISS
SCRRPVGISK

SEQ ID NO: 160928 - protein, 10 aa, Artificial Sequence
  Description of Artificial Sequence: Synthetic peptide
  Seed: SLSPGMMMGM
SCSPGMMMGV

SEQ ID NO: 160929 - protein, 9 aa, Artificial Sequence
  Description of Artificial Sequence: Synthetic peptide
  Seed: SSSYRRPVG
SCSYRRPVK

SEQ ID NO: 160930 - protein, 10 aa, Artificial Sequence
  Description of Artificial Sequence: Synthetic peptide
  Seed: SSYRRPVGIS
SCYRRPVGIA

SEQ ID NO: 160931 - protein, 10 aa, Artificial Sequence
  Description of Artificial Sequence: Synthetic peptide
  Seed: SSYRRPVGIS
SCYRRPVGIK

SEQ ID NO: 160932 - protein, 9 aa, Artificial Sequence
  Description of Artificial Sequence: Synthetic peptide
  Seed: SSYRRPVGI
SCYRRPVGK

SEQ ID NO: 160933 - protein, 9 aa, Artificial Sequence
  Description of Artificial Sequence: Synthetic peptide
  Seed: SSYRRPVGI
SCYRRPVGW

SEQ ID NO: 160934 - protein, 9 aa, Artificial Sequence
  Description of Artificial Sequence: Synthetic peptide
  Seed: SSYRRPVGI
SCYRRPVGY

SEQ ID NO: 160935 - protein, 11 aa, Artificial Sequence
  Description of Artificial Sequence: Synthetic peptide
  Seed: SPGMMMGMFNM
SDGMMMGMFNA

SEQ ID NO: 160936 - protein, 11 aa, Artificial Sequence
  Description of Artificial Sequence: Synthetic peptide
  Seed: SPGMMMGMFNM
SDGMMMGMFNI

SEQ ID NO: 160937 - protein, 11 aa, Artificial Sequence
  Description of Artificial Sequence: Synthetic peptide
  Seed: SPGMMMGMFNM
SDGMMMGMFNL

SEQ ID NO: 160938 - protein, 11 aa, Artificial Sequence
  Description of Artificial Sequence: Synthetic peptide
  Seed: SPGMMMGMFNM
SDGMMMGMFNM

SEQ ID NO: 160939 - protein, 11 aa, Artificial Sequence
  Description of Artificial Sequence: Synthetic peptide
  Seed: SPGMMMGMFNM
SDGMMMGMFNT

SEQ ID NO: 160940 - protein, 11 aa, Artificial Sequence
  Description of Artificial Sequence: Synthetic peptide
  Seed: SPGMMMGMFNM
SDGMMMGMFNV

SEQ ID NO: 160941 - protein, 10 aa, Artificial Sequence
  Description of Artificial Sequence: Synthetic peptide
  Seed: SLSPGMMMGM
SDSPGMMMGV

SEQ ID NO: 160942 - protein, 10 aa, Artificial Sequence
  Description of Artificial Sequence: Synthetic peptide
  Seed: SSYRRPVGIS
SDYRRPVGIA

SEQ ID NO: 160943 - protein, 10 aa, Artificial Sequence
  Description of Artificial Sequence: Synthetic peptide
  Seed: SSYRRPVGIS
SDYRRPVGIK

SEQ ID NO: 160944 - protein, 11 aa, Artificial Sequence
  Description of Artificial Sequence: Synthetic peptide
  Seed: SPGMMMGMFNM
SEGMMMGMFNA

SEQ ID NO: 160945 - protein, 11 aa, Artificial Sequence
  Description of Artificial Sequence: Synthetic peptide
  Seed: SPGMMMGMFNM
SEGMMMGMFNI

SEQ ID NO: 160946 - protein, 11 aa, Artificial Sequence
  Description of Artificial Sequence: Synthetic peptide
  Seed: SPGMMMGMFNM
SEGMMMGMFNL

SEQ ID NO: 160947 - protein, 11 aa, Artificial Sequence
  Description of Artificial Sequence: Synthetic peptide
  Seed: SPGMMMGMFNM
SEGMMMGMFNM

SEQ ID NO: 160948 - protein, 11 aa, Artificial Sequence
  Description of Artificial Sequence: Synthetic peptide
  Seed: SPGMMMGMFNM
SEGMMMGMFNT

SEQ ID NO: 160949 - protein, 11 aa, Artificial Sequence
  Description of Artificial Sequence: Synthetic peptide
  Seed: SPGMMMGMFNM
SEGMMMGMFNV

SEQ ID NO: 160950 - protein, 10 aa, Artificial Sequence
  Description of Artificial Sequence: Synthetic peptide
  Seed: SLSPGMMMGM
SESPGMMMGV

SEQ ID NO: 160951 - protein, 10 aa, Artificial Sequence
  Description of Artificial Sequence: Synthetic peptide
  Seed: SSYRRPVGIS
SEYRRPVGIA

SEQ ID NO: 160952 - protein, 10 aa, Artificial Sequence
  Description of Artificial Sequence: Synthetic peptide
  Seed: SSYRRPVGIS
SEYRRPVGIK

SEQ ID NO: 160953 - protein, 8 aa, Artificial Sequence
  Description of Artificial Sequence: Synthetic peptide
  Seed: SFFYRYGF
SFFYRYGL

SEQ ID NO: 160954 - protein, 8 aa, Artificial Sequence
  Description of Artificial Sequence: Synthetic peptide
  Seed: SFFYRYGF
SFFYRYGM

SEQ ID NO: 160955 - protein, 8 aa, Artificial Sequence
  Description of Artificial Sequence: Synthetic peptide
  Seed: SFFYRYGF
SFFYRYGY

SEQ ID NO: 160956 - protein, 11 aa, Artificial Sequence
  Description of Artificial Sequence: Synthetic peptide
  Seed: SPGMMMGMFNM
SFGMMMGMFNA

SEQ ID NO: 160957 - protein, 11 aa, Artificial Sequence
  Description of Artificial Sequence: Synthetic peptide
  Seed: SPGMMMGMFNM
SFGMMMGMFNI

SEQ ID NO: 160958 - protein, 11 aa, Artificial Sequence
  Description of Artificial Sequence: Synthetic peptide
  Seed: SPGMMMGMFNM
SFGMMMGMFNL

SEQ ID NO: 160959 - protein, 11 aa, Artificial Sequence
  Description of Artificial Sequence: Synthetic peptide
  Seed: SPGMMMGMFNM
SFGMMMGMFNM

SEQ ID NO: 160960 - protein, 11 aa, Artificial Sequence
  Description of Artificial Sequence: Synthetic peptide
  Seed: SPGMMMGMFNM
SFGMMMGMFNT

SEQ ID NO: 160961 - protein, 11 aa, Artificial Sequence
  Description of Artificial Sequence: Synthetic peptide
  Seed: SPGMMMGMFNM
SFGMMMGMFNV

SEQ ID NO: 160962 - protein, 9 aa, Artificial Sequence
  Description of Artificial Sequence: Synthetic peptide
  Seed: SNKMARLGK
SFKMARLGA

SEQ ID NO: 160963 - protein, 9 aa, Artificial Sequence
  Description of Artificial Sequence: Synthetic peptide
  Seed: SNKMARLGK
SFKMARLGG

SEQ ID NO: 160964 - protein, 9 aa, Artificial Sequence
  Description of Artificial Sequence: Synthetic peptide
  Seed: SNKMARLGK
SFKMARLGI

SEQ ID NO: 160965 - protein, 9 aa, Artificial Sequence
  Description of Artificial Sequence: Synthetic peptide
  Seed: SNKMARLGK
SFKMARLGK

SEQ ID NO: 160966 - protein, 9 aa, Artificial Sequence
  Description of Artificial Sequence: Synthetic peptide
  Seed: SNKMARLGK
SFKMARLGL

SEQ ID NO: 160967 - protein, 9 aa, Artificial Sequence
  Description of Artificial Sequence: Synthetic peptide
  Seed: SNKMARLGK
SFKMARLGM

SEQ ID NO: 160968 - protein, 9 aa, Artificial Sequence
  Description of Artificial Sequence: Synthetic peptide
  Seed: SNKMARLGK
SFKMARLGN

SEQ ID NO: 160969 - protein, 9 aa, Artificial Sequence
  Description of Artificial Sequence: Synthetic peptide
  Seed: SNKMARLGK
SFKMARLGP

SEQ ID NO: 160970 - protein, 9 aa, Artificial Sequence
  Description of Artificial Sequence: Synthetic peptide
  Seed: SNKMARLGK
SFKMARLGR

SEQ ID NO: 160971 - protein, 9 aa, Artificial Sequence
  Description of Artificial Sequence: Synthetic peptide
  Seed: SNKMARLGK
SFKMARLGS

SEQ ID NO: 160972 - protein, 9 aa, Artificial Sequence
  Description of Artificial Sequence: Synthetic peptide
  Seed: SNKMARLGK
SFKMARLGT

SEQ ID NO: 160973 - protein, 9 aa, Artificial Sequence
  Description of Artificial Sequence: Synthetic peptide
  Seed: SNKMARLGK
SFKMARLGV

SEQ ID NO: 160974 - protein, 9 aa, Artificial Sequence
  Description of Artificial Sequence: Synthetic peptide
  Seed: SNKMARLGK
SFKMARLGY

SEQ ID NO: 160975 - protein, 9 aa, Artificial Sequence
  Description of Artificial Sequence: Synthetic peptide
  Seed: SYRRPVGIS
SFRRPVGIA

SEQ ID NO: 160976 - protein, 9 aa, Artificial Sequence
  Description of Artificial Sequence: Synthetic peptide
  Seed: SYRRPVGIS
SFRRPVGIG

SEQ ID NO: 160977 - protein, 9 aa, Artificial Sequence
  Description of Artificial Sequence: Synthetic peptide
  Seed: SYRRPVGIS
SFRRPVGII

SEQ ID NO: 160978 - protein, 9 aa, Artificial Sequence
  Description of Artificial Sequence: Synthetic peptide
  Seed: SYRRPVGIS
SFRRPVGIK

SEQ ID NO: 160979 - protein, 9 aa, Artificial Sequence
  Description of Artificial Sequence: Synthetic peptide
  Seed: SYRRPVGIS
SFRRPVGIL

SEQ ID NO: 160980 - protein, 9 aa, Artificial Sequence
  Description of Artificial Sequence: Synthetic peptide
  Seed: SYRRPVGIS
SFRRPVGIM

SEQ ID NO: 160981 - protein, 9 aa, Artificial Sequence
  Description of Artificial Sequence: Synthetic peptide
  Seed: SYRRPVGIS
SFRRPVGIP

SEQ ID NO: 160982 - protein, 9 aa, Artificial Sequence
  Description of Artificial Sequence: Synthetic peptide
  Seed: SYRRPVGIS
SFRRPVGIR

SEQ ID NO: 160983 - protein, 9 aa, Artificial Sequence
  Description of Artificial Sequence: Synthetic peptide
  Seed: SYRRPVGIS
SFRRPVGIS

SEQ ID NO: 160984 - protein, 10 aa, Artificial Sequence
  Description of Artificial Sequence: Synthetic peptide
  Seed: SYRRPVGISS
SFRRPVGISA

SEQ ID NO: 160985 - protein, 10 aa, Artificial Sequence
  Description of Artificial Sequence: Synthetic peptide
  Seed: SYRRPVGISS
SFRRPVGISG

SEQ ID NO: 160986 - protein, 10 aa, Artificial Sequence
  Description of Artificial Sequence: Synthetic peptide
  Seed: SYRRPVGISS
SFRRPVGISI

SEQ ID NO: 160987 - protein, 10 aa, Artificial Sequence
  Description of Artificial Sequence: Synthetic peptide
  Seed: SYRRPVGISS
SFRRPVGISK

SEQ ID NO: 160988 - protein, 10 aa, Artificial Sequence
  Description of Artificial Sequence: Synthetic peptide
  Seed: SYRRPVGISS
SFRRPVGISL

SEQ ID NO: 160989 - protein, 10 aa, Artificial Sequence
  Description of Artificial Sequence: Synthetic peptide
  Seed: SYRRPVGISS
SFRRPVGISM

SEQ ID NO: 160990 - protein, 10 aa, Artificial Sequence
  Description of Artificial Sequence: Synthetic peptide
  Seed: SYRRPVGISS
SFRRPVGISR

SEQ ID NO: 160991 - protein, 10 aa, Artificial Sequence
  Description of Artificial Sequence: Synthetic peptide
  Seed: SYRRPVGISS
SFRRPVGISS

SEQ ID NO: 160992 - protein, 11 aa, Artificial Sequence
  Description of Artificial Sequence: Synthetic peptide
  Seed: SYRRPVGISSM
SFRRPVGISSF

SEQ ID NO: 160993 - protein, 11 aa, Artificial Sequence
  Description of Artificial Sequence: Synthetic peptide
  Seed: SYRRPVGISSM
SFRRPVGISSL

SEQ ID NO: 160994 - protein, 11 aa, Artificial Sequence
  Description of Artificial Sequence: Synthetic peptide
  Seed: SYRRPVGISSM
SFRRPVGISSM

SEQ ID NO: 160995 - protein, 11 aa, Artificial Sequence
  Description of Artificial Sequence: Synthetic peptide
  Seed: SYRRPVGISSM
SFRRPVGISSW

SEQ ID NO: 160996 - protein, 11 aa, Artificial Sequence
  Description of Artificial Sequence: Synthetic peptide
  Seed: SYRRPVGISSM
SFRRPVGISSY

SEQ ID NO: 160997 - protein, 10 aa, Artificial Sequence
  Description of Artificial Sequence: Synthetic peptide
  Seed: SYRRPVGISS
SFRRPVGIST

SEQ ID NO: 160998 - protein, 10 aa, Artificial Sequence
  Description of Artificial Sequence: Synthetic peptide
  Seed: SYRRPVGISS
SFRRPVGISV

SEQ ID NO: 160999 - protein, 10 aa, Artificial Sequence
  Description of Artificial Sequence: Synthetic peptide
  Seed: SYRRPVGISS
SFRRPVGISY

SEQ ID NO: 161000 - protein, 9 aa, Artificial Sequence
  Description of Artificial Sequence: Synthetic peptide
  Seed: SYRRPVGIS
SFRRPVGIT

SEQ ID NO: 161001 - protein, 9 aa, Artificial Sequence
  Description of Artificial Sequence: Synthetic peptide
  Seed: SYRRPVGIS
SFRRPVGIV

SEQ ID NO: 161002 - protein, 9 aa, Artificial Sequence
  Description of Artificial Sequence: Synthetic peptide
  Seed: SYRRPVGIS
SFRRPVGIY

SEQ ID NO: 161003 - protein, 10 aa, Artificial Sequence
  Description of Artificial Sequence: Synthetic peptide
  Seed: SLSPGMMMGM
SFSPGMMMGV

SEQ ID NO: 161004 - protein, 9 aa, Artificial Sequence
  Description of Artificial Sequence: Synthetic peptide
  Seed: SSSYRRPVG
SFSYRRPVA

SEQ ID NO: 161005 - protein, 9 aa, Artificial Sequence
  Description of Artificial Sequence: Synthetic peptide
  Seed: SSSYRRPVG
SFSYRRPVK

SEQ ID NO: 161006 - protein, 9 aa, Artificial Sequence
  Description of Artificial Sequence: Synthetic peptide
  Seed: SSYRRPVGI
SFYRRPVGA

SEQ ID NO: 161007 - protein, 10 aa, Artificial Sequence
  Description of Artificial Sequence: Synthetic peptide
  Seed: SSYRRPVGIS
SFYRRPVGIA

SEQ ID NO: 161008 - protein, 10 aa, Artificial Sequence
  Description of Artificial Sequence: Synthetic peptide
  Seed: SSYRRPVGIS
SFYRRPVGIK

SEQ ID NO: 161009 - protein, 9 aa, Artificial Sequence
  Description of Artificial Sequence: Synthetic peptide
  Seed: SSYRRPVGI
SFYRRPVGK

SEQ ID NO: 161010 - protein, 11 aa, Artificial Sequence
  Description of Artificial Sequence: Synthetic peptide
  Seed: SPGMMMGMFNM
SGGMMMGMFNA

SEQ ID NO: 161011 - protein, 11 aa, Artificial Sequence
  Description of Artificial Sequence: Synthetic peptide
  Seed: SPGMMMGMFNM
SGGMMMGMFNI

SEQ ID NO: 161012 - protein, 11 aa, Artificial Sequence
  Description of Artificial Sequence: Synthetic peptide
  Seed: SPGMMMGMFNM
SGGMMMGMFNL

SEQ ID NO: 161013 - protein, 11 aa, Artificial Sequence
  Description of Artificial Sequence: Synthetic peptide
  Seed: SPGMMMGMFNM
SGGMMMGMFNM

SEQ ID NO: 161014 - protein, 11 aa, Artificial Sequence
  Description of Artificial Sequence: Synthetic peptide
  Seed: SPGMMMGMFNM
SGGMMMGMFNT

SEQ ID NO: 161015 - protein, 11 aa, Artificial Sequence
  Description of Artificial Sequence: Synthetic peptide
  Seed: SPGMMMGMFNM
SGGMMMGMFNV

SEQ ID NO: 161016 - protein, 9 aa, Artificial Sequence
  Description of Artificial Sequence: Synthetic peptide
  Seed: SNKMARLGK
SGKMARLGA

SEQ ID NO: 161017 - protein, 9 aa, Artificial Sequence
  Description of Artificial Sequence: Synthetic peptide
  Seed: SNKMARLGK
SGKMARLGI

SEQ ID NO: 161018 - protein, 9 aa, Artificial Sequence
  Description of Artificial Sequence: Synthetic peptide
  Seed: SNKMARLGK
SGKMARLGK

SEQ ID NO: 161019 - protein, 9 aa, Artificial Sequence
  Description of Artificial Sequence: Synthetic peptide
  Seed: SNKMARLGK
SGKMARLGL

SEQ ID NO: 161020 - protein, 9 aa, Artificial Sequence
  Description of Artificial Sequence: Synthetic peptide
  Seed: SNKMARLGK
SGKMARLGM

SEQ ID NO: 161021 - protein, 9 aa, Artificial Sequence
  Description of Artificial Sequence: Synthetic peptide
  Seed: SNKMARLGK
SGKMARLGR

SEQ ID NO: 161022 - protein, 9 aa, Artificial Sequence
  Description of Artificial Sequence: Synthetic peptide
  Seed: SNKMARLGK
SGKMARLGS

SEQ ID NO: 161023 - protein, 9 aa, Artificial Sequence
  Description of Artificial Sequence: Synthetic peptide
  Seed: SNKMARLGK
SGKMARLGV

SEQ ID NO: 161024 - protein, 9 aa, Artificial Sequence
  Description of Artificial Sequence: Synthetic peptide
  Seed: SNKMARLGK
SGKMARLGY

SEQ ID NO: 161025 - protein, 9 aa, Artificial Sequence
  Description of Artificial Sequence: Synthetic peptide
  Seed: SYRRPVGIS
SGRRPVGIA

SEQ ID NO: 161026 - protein, 9 aa, Artificial Sequence
  Description of Artificial Sequence: Synthetic peptide
  Seed: SYRRPVGIS
SGRRPVGII

SEQ ID NO: 161027 - protein, 9 aa, Artificial Sequence
  Description of Artificial Sequence: Synthetic peptide
  Seed: SYRRPVGIS
SGRRPVGIK

SEQ ID NO: 161028 - protein, 9 aa, Artificial Sequence
  Description of Artificial Sequence: Synthetic peptide
  Seed: SYRRPVGIS
SGRRPVGIL

SEQ ID NO: 161029 - protein, 9 aa, Artificial Sequence
  Description of Artificial Sequence: Synthetic peptide
  Seed: SYRRPVGIS
SGRRPVGIM

SEQ ID NO: 161030 - protein, 9 aa, Artificial Sequence
  Description of Artificial Sequence: Synthetic peptide
  Seed: SYRRPVGIS
SGRRPVGIR

SEQ ID NO: 161031 - protein, 9 aa, Artificial Sequence
  Description of Artificial Sequence: Synthetic peptide
  Seed: SYRRPVGIS
SGRRPVGIS

SEQ ID NO: 161032 - protein, 10 aa, Artificial Sequence
  Description of Artificial Sequence: Synthetic peptide
  Seed: SYRRPVGISS
SGRRPVGISA

SEQ ID NO: 161033 - protein, 10 aa, Artificial Sequence
  Description of Artificial Sequence: Synthetic peptide
  Seed: SYRRPVGISS
SGRRPVGISI

SEQ ID NO: 161034 - protein, 10 aa, Artificial Sequence
  Description of Artificial Sequence: Synthetic peptide
  Seed: SYRRPVGISS
SGRRPVGISK

SEQ ID NO: 161035 - protein, 10 aa, Artificial Sequence
  Description of Artificial Sequence: Synthetic peptide
  Seed: SYRRPVGISS
SGRRPVGISR

SEQ ID NO: 161036 - protein, 10 aa, Artificial Sequence
  Description of Artificial Sequence: Synthetic peptide
  Seed: SYRRPVGISS
SGRRPVGISV

SEQ ID NO: 161037 - protein, 9 aa, Artificial Sequence
  Description of Artificial Sequence: Synthetic peptide
  Seed: SYRRPVGIS
SGRRPVGIV

SEQ ID NO: 161038 - protein, 9 aa, Artificial Sequence
  Description of Artificial Sequence: Synthetic peptide
  Seed: SYRRPVGIS
SGRRPVGIY

SEQ ID NO: 161039 - protein, 10 aa, Artificial Sequence
  Description of Artificial Sequence: Synthetic peptide
  Seed: SLSPGMMMGM
SGSPGMMMGV

SEQ ID NO: 161040 - protein, 9 aa, Artificial Sequence
  Description of Artificial Sequence: Synthetic peptide
  Seed: SSSYRRPVG
SGSYRRPVA

SEQ ID NO: 161041 - protein, 9 aa, Artificial Sequence
  Description of Artificial Sequence: Synthetic peptide
  Seed: SSSYRRPVG
SGSYRRPVK

SEQ ID NO: 161042 - protein, 9 aa, Artificial Sequence
  Description of Artificial Sequence: Synthetic peptide
  Seed: STVLGVSIL
SGVLGVSIF

SEQ ID NO: 161043 - protein, 9 aa, Artificial Sequence
  Description of Artificial Sequence: Synthetic peptide
  Seed: STVLGVSIL
SGVLGVSIW

SEQ ID NO: 161044 - protein, 9 aa, Artificial Sequence
  Description of Artificial Sequence: Synthetic peptide
  Seed: STVLGVSIL
SGVLGVSIY

SEQ ID NO: 161045 - protein, 9 aa, Artificial Sequence
  Description of Artificial Sequence: Synthetic peptide
  Seed: SSYRRPVGI
SGYRRPVGA

SEQ ID NO: 161046 - protein, 9 aa, Artificial Sequence
  Description of Artificial Sequence: Synthetic peptide
  Seed: SSYRRPVGI
SGYRRPVGF

SEQ ID NO: 161047 - protein, 10 aa, Artificial Sequence
  Description of Artificial Sequence: Synthetic peptide
  Seed: SSYRRPVGIS
SGYRRPVGIA

SEQ ID NO: 161048 - protein, 10 aa, Artificial Sequence
  Description of Artificial Sequence: Synthetic peptide
  Seed: SSYRRPVGIS
SGYRRPVGIK

SEQ ID NO: 161049 - protein, 10 aa, Artificial Sequence
  Description of Artificial Sequence: Synthetic peptide
  Seed: SSYRRPVGIS
SGYRRPVGIR

SEQ ID NO: 161050 - protein, 10 aa, Artificial Sequence
  Description of Artificial Sequence: Synthetic peptide
  Seed: SSYRRPVGIS
SGYRRPVGIV

SEQ ID NO: 161051 - protein, 9 aa, Artificial Sequence
  Description of Artificial Sequence: Synthetic peptide
  Seed: SSYRRPVGI
SGYRRPVGK

SEQ ID NO: 161052 - protein, 9 aa, Artificial Sequence
  Description of Artificial Sequence: Synthetic peptide
  Seed: SSYRRPVGI
SGYRRPVGL

SEQ ID NO: 161053 - protein, 9 aa, Artificial Sequence
  Description of Artificial Sequence: Synthetic peptide
  Seed: SSYRRPVGI
SGYRRPVGM

SEQ ID NO: 161054 - protein, 9 aa, Artificial Sequence
  Description of Artificial Sequence: Synthetic peptide
  Seed: SSYRRPVGI
SGYRRPVGW

SEQ ID NO: 161055 - protein, 9 aa, Artificial Sequence
  Description of Artificial Sequence: Synthetic peptide
  Seed: SSYRRPVGI
SGYRRPVGY

SEQ ID NO: 161056 - protein, 11 aa, Artificial Sequence
  Description of Artificial Sequence: Synthetic peptide
  Seed: SPGMMMGMFNM
SHGMMMGMFNA

SEQ ID NO: 161057 - protein, 11 aa, Artificial Sequence
  Description of Artificial Sequence: Synthetic peptide
  Seed: SPGMMMGMFNM
SHGMMMGMFNI

SEQ ID NO: 161058 - protein, 11 aa, Artificial Sequence
  Description of Artificial Sequence: Synthetic peptide
  Seed: SPGMMMGMFNM
SHGMMMGMFNL

SEQ ID NO: 161059 - protein, 11 aa, Artificial Sequence
  Description of Artificial Sequence: Synthetic peptide
  Seed: SPGMMMGMFNM
SHGMMMGMFNM

SEQ ID NO: 161060 - protein, 11 aa, Artificial Sequence
  Description of Artificial Sequence: Synthetic peptide
  Seed: SPGMMMGMFNM
SHGMMMGMFNT

SEQ ID NO: 161061 - protein, 11 aa, Artificial Sequence
  Description of Artificial Sequence: Synthetic peptide
  Seed: SPGMMMGMFNM
SHGMMMGMFNV

SEQ ID NO: 161062 - protein, 10 aa, Artificial Sequence
  Description of Artificial Sequence: Synthetic peptide
  Seed: SHGTGTGYTM
SHGTGTGYTF

SEQ ID NO: 161063 - protein, 10 aa, Artificial Sequence
  Description of Artificial Sequence: Synthetic peptide
  Seed: SHGTGTGYTM
SHGTGTGYTI

SEQ ID NO: 161064 - protein, 10 aa, Artificial Sequence
  Description of Artificial Sequence: Synthetic peptide
  Seed: SHGTGTGYTM
SHGTGTGYTL

SEQ ID NO: 161065 - protein, 10 aa, Artificial Sequence
  Description of Artificial Sequence: Synthetic peptide
  Seed: SHGTGTGYTM
SHGTGTGYTV

SEQ ID NO: 161066 - protein, 10 aa, Artificial Sequence
  Description of Artificial Sequence: Synthetic peptide
  Seed: SHGTGTGYTM
SHGTGTGYTW

SEQ ID NO: 161067 - protein, 10 aa, Artificial Sequence
  Description of Artificial Sequence: Synthetic peptide
  Seed: SHGTGTGYTM
SHGTGTGYTY

SEQ ID NO: 161068 - protein, 9 aa, Artificial Sequence
  Description of Artificial Sequence: Synthetic peptide
  Seed: SNKMARLGK
SHKMARLGK

SEQ ID NO: 161069 - protein, 9 aa, Artificial Sequence
  Description of Artificial Sequence: Synthetic peptide
  Seed: SYRRPVGIS
SHRRPVGIK

SEQ ID NO: 161070 - protein, 10 aa, Artificial Sequence
  Description of Artificial Sequence: Synthetic peptide
  Seed: SYRRPVGISS
SHRRPVGISK

SEQ ID NO: 161071 - protein, 10 aa, Artificial Sequence
  Description of Artificial Sequence: Synthetic peptide
  Seed: SLSPGMMMGM
SHSPGMMMGV

SEQ ID NO: 161072 - protein, 9 aa, Artificial Sequence
  Description of Artificial Sequence: Synthetic peptide
  Seed: SSSYRRPVG
SHSYRRPVK

SEQ ID NO: 161073 - protein, 10 aa, Artificial Sequence
  Description of Artificial Sequence: Synthetic peptide
  Seed: SSYRRPVGIS
SHYRRPVGIA

SEQ ID NO: 161074 - protein, 10 aa, Artificial Sequence
  Description of Artificial Sequence: Synthetic peptide
  Seed: SSYRRPVGIS
SHYRRPVGIK

SEQ ID NO: 161075 - protein, 8 aa, Artificial Sequence
  Description of Artificial Sequence: Synthetic peptide
  Seed: SSDDFALI
SIDDFALL

SEQ ID NO: 161076 - protein, 8 aa, Artificial Sequence
  Description of Artificial Sequence: Synthetic peptide
  Seed: SSDDFALI
SIDDFALM

SEQ ID NO: 161077 - protein, 9 aa, Artificial Sequence
  Description of Artificial Sequence: Synthetic peptide
  Seed: SMELPSFGV
SIELPSFGI

SEQ ID NO: 161078 - protein, 9 aa, Artificial Sequence
  Description of Artificial Sequence: Synthetic peptide
  Seed: SMELPSFGV
SIELPSFGL

SEQ ID NO: 161079 - protein, 9 aa, Artificial Sequence
  Description of Artificial Sequence: Synthetic peptide
  Seed: SMELPSFGV
SIELPSFGV

SEQ ID NO: 161080 - protein, 11 aa, Artificial Sequence
  Description of Artificial Sequence: Synthetic peptide
  Seed: SPGMMMGMFNM
SIGMMMGMFNA

SEQ ID NO: 161081 - protein, 11 aa, Artificial Sequence
  Description of Artificial Sequence: Synthetic peptide
  Seed: SPGMMMGMFNM
SIGMMMGMFNI

SEQ ID NO: 161082 - protein, 11 aa, Artificial Sequence
  Description of Artificial Sequence: Synthetic peptide
  Seed: SPGMMMGMFNM
SIGMMMGMFNL

SEQ ID NO: 161083 - protein, 11 aa, Artificial Sequence
  Description of Artificial Sequence: Synthetic peptide
  Seed: SPGMMMGMFNM
SIGMMMGMFNM

SEQ ID NO: 161084 - protein, 11 aa, Artificial Sequence
  Description of Artificial Sequence: Synthetic peptide
  Seed: SPGMMMGMFNM
SIGMMMGMFNT

SEQ ID NO: 161085 - protein, 11 aa, Artificial Sequence
  Description of Artificial Sequence: Synthetic peptide
  Seed: SPGMMMGMFNM
SIGMMMGMFNV

SEQ ID NO: 161086 - protein, 9 aa, Artificial Sequence
  Description of Artificial Sequence: Synthetic peptide
  Seed: SNKMARLGK
SIKMARLGA

SEQ ID NO: 161087 - protein, 9 aa, Artificial Sequence
  Description of Artificial Sequence: Synthetic peptide
  Seed: SNKMARLGK
SIKMARLGC

SEQ ID NO: 161088 - protein, 9 aa, Artificial Sequence
  Description of Artificial Sequence: Synthetic peptide
  Seed: SNKMARLGK
SIKMARLGF

SEQ ID NO: 161089 - protein, 9 aa, Artificial Sequence
  Description of Artificial Sequence: Synthetic peptide
  Seed: SNKMARLGK
SIKMARLGG

SEQ ID NO: 161090 - protein, 9 aa, Artificial Sequence
  Description of Artificial Sequence: Synthetic peptide
  Seed: SNKMARLGK
SIKMARLGI

SEQ ID NO: 161091 - protein, 9 aa, Artificial Sequence
  Description of Artificial Sequence: Synthetic peptide
  Seed: SNKMARLGK
SIKMARLGK

SEQ ID NO: 161092 - protein, 9 aa, Artificial Sequence
  Description of Artificial Sequence: Synthetic peptide
  Seed: SNKMARLGK
SIKMARLGL

SEQ ID NO: 161093 - protein, 9 aa, Artificial Sequence
  Description of Artificial Sequence: Synthetic peptide
  Seed: SNKMARLGK
SIKMARLGM

SEQ ID NO: 161094 - protein, 9 aa, Artificial Sequence
  Description of Artificial Sequence: Synthetic peptide
  Seed: SNKMARLGK
SIKMARLGN

SEQ ID NO: 161095 - protein, 9 aa, Artificial Sequence
  Description of Artificial Sequence: Synthetic peptide
  Seed: SNKMARLGK
SIKMARLGP

SEQ ID NO: 161096 - protein, 9 aa, Artificial Sequence
  Description of Artificial Sequence: Synthetic peptide
  Seed: SNKMARLGK
SIKMARLGR

SEQ ID NO: 161097 - protein, 9 aa, Artificial Sequence
  Description of Artificial Sequence: Synthetic peptide
  Seed: SNKMARLGK
SIKMARLGS

SEQ ID NO: 161098 - protein, 9 aa, Artificial Sequence
  Description of Artificial Sequence: Synthetic peptide
  Seed: SNKMARLGK
SIKMARLGT

SEQ ID NO: 161099 - protein, 9 aa, Artificial Sequence
  Description of Artificial Sequence: Synthetic peptide
  Seed: SNKMARLGK
SIKMARLGV

SEQ ID NO: 161100 - protein, 9 aa, Artificial Sequence
  Description of Artificial Sequence: Synthetic peptide
  Seed: SNKMARLGK
SIKMARLGY

SEQ ID NO: 161101 - protein, 9 aa, Artificial Sequence
  Description of Artificial Sequence: Synthetic peptide
  Seed: SYRRPVGIS
SIRRPVGIA

SEQ ID NO: 161102 - protein, 9 aa, Artificial Sequence
  Description of Artificial Sequence: Synthetic peptide
  Seed: SYRRPVGIS
SIRRPVGIC

SEQ ID NO: 161103 - protein, 9 aa, Artificial Sequence
  Description of Artificial Sequence: Synthetic peptide
  Seed: SYRRPVGIS
SIRRPVGIF

SEQ ID NO: 161104 - protein, 9 aa, Artificial Sequence
  Description of Artificial Sequence: Synthetic peptide
  Seed: SYRRPVGIS
SIRRPVGIG

SEQ ID NO: 161105 - protein, 9 aa, Artificial Sequence
  Description of Artificial Sequence: Synthetic peptide
  Seed: SYRRPVGIS
SIRRPVGII

SEQ ID NO: 161106 - protein, 9 aa, Artificial Sequence
  Description of Artificial Sequence: Synthetic peptide
  Seed: SYRRPVGIS
SIRRPVGIK

SEQ ID NO: 161107 - protein, 9 aa, Artificial Sequence
  Description of Artificial Sequence: Synthetic peptide
  Seed: SYRRPVGIS
SIRRPVGIL

SEQ ID NO: 161108 - protein, 9 aa, Artificial Sequence
  Description of Artificial Sequence: Synthetic peptide
  Seed: SYRRPVGIS
SIRRPVGIM

SEQ ID NO: 161109 - protein, 9 aa, Artificial Sequence
  Description of Artificial Sequence: Synthetic peptide
  Seed: SYRRPVGIS
SIRRPVGIN

SEQ ID NO: 161110 - protein, 9 aa, Artificial Sequence
  Description of Artificial Sequence: Synthetic peptide
  Seed: SYRRPVGIS
SIRRPVGIP

SEQ ID NO: 161111 - protein, 9 aa, Artificial Sequence
  Description of Artificial Sequence: Synthetic peptide
  Seed: SYRRPVGIS
SIRRPVGIQ

SEQ ID NO: 161112 - protein, 9 aa, Artificial Sequence
  Description of Artificial Sequence: Synthetic peptide
  Seed: SYRRPVGIS
SIRRPVGIR

SEQ ID NO: 161113 - protein, 9 aa, Artificial Sequence
  Description of Artificial Sequence: Synthetic peptide
  Seed: SYRRPVGIS
SIRRPVGIS

SEQ ID NO: 161114 - protein, 10 aa, Artificial Sequence
  Description of Artificial Sequence: Synthetic peptide
  Seed: SYRRPVGISS
SIRRPVGISA

SEQ ID NO: 161115 - protein, 10 aa, Artificial Sequence
  Description of Artificial Sequence: Synthetic peptide
  Seed: SYRRPVGISS
SIRRPVGISG

SEQ ID NO: 161116 - protein, 10 aa, Artificial Sequence
  Description of Artificial Sequence: Synthetic peptide
  Seed: SYRRPVGISS
SIRRPVGISI

SEQ ID NO: 161117 - protein, 10 aa, Artificial Sequence
  Description of Artificial Sequence: Synthetic peptide
  Seed: SYRRPVGISS
SIRRPVGISK

SEQ ID NO: 161118 - protein, 10 aa, Artificial Sequence
  Description of Artificial Sequence: Synthetic peptide
  Seed: SYRRPVGISS
SIRRPVGISL

SEQ ID NO: 161119 - protein, 10 aa, Artificial Sequence
  Description of Artificial Sequence: Synthetic peptide
  Seed: SYRRPVGISS
SIRRPVGISM

SEQ ID NO: 161120 - protein, 10 aa, Artificial Sequence
  Description of Artificial Sequence: Synthetic peptide
  Seed: SYRRPVGISS
SIRRPVGISR

SEQ ID NO: 161121 - protein, 10 aa, Artificial Sequence
  Description of Artificial Sequence: Synthetic peptide
  Seed: SYRRPVGISS
SIRRPVGISS

SEQ ID NO: 161122 - protein, 10 aa, Artificial Sequence
  Description of Artificial Sequence: Synthetic peptide
  Seed: SYRRPVGISS
SIRRPVGIST

SEQ ID NO: 161123 - protein, 10 aa, Artificial Sequence
  Description of Artificial Sequence: Synthetic peptide
  Seed: SYRRPVGISS
SIRRPVGISV

SEQ ID NO: 161124 - protein, 10 aa, Artificial Sequence
  Description of Artificial Sequence: Synthetic peptide
  Seed: SYRRPVGISS
SIRRPVGISY

SEQ ID NO: 161125 - protein, 9 aa, Artificial Sequence
  Description of Artificial Sequence: Synthetic peptide
  Seed: SYRRPVGIS
SIRRPVGIT

SEQ ID NO: 161126 - protein, 9 aa, Artificial Sequence
  Description of Artificial Sequence: Synthetic peptide
  Seed: SYRRPVGIS
SIRRPVGIV

SEQ ID NO: 161127 - protein, 9 aa, Artificial Sequence
  Description of Artificial Sequence: Synthetic peptide
  Seed: SYRRPVGIS
SIRRPVGIY

SEQ ID NO: 161128 - protein, 10 aa, Artificial Sequence
  Description of Artificial Sequence: Synthetic peptide
  Seed: SLSPGMMMGM
SISPGMMMGA

SEQ ID NO: 161129 - protein, 10 aa, Artificial Sequence
  Description of Artificial Sequence: Synthetic peptide
  Seed: SLSPGMMMGM
SISPGMMMGI

SEQ ID NO: 161130 - protein, 10 aa, Artificial Sequence
  Description of Artificial Sequence: Synthetic peptide
  Seed: SLSPGMMMGM
SISPGMMMGL

SEQ ID NO: 161131 - protein, 10 aa, Artificial Sequence
  Description of Artificial Sequence: Synthetic peptide
  Seed: SLSPGMMMGM
SISPGMMMGM

SEQ ID NO: 161132 - protein, 10 aa, Artificial Sequence
  Description of Artificial Sequence: Synthetic peptide
  Seed: SLSPGMMMGM
SISPGMMMGV

SEQ ID NO: 161133 - protein, 9 aa, Artificial Sequence
  Description of Artificial Sequence: Synthetic peptide
  Seed: SSSYRRPVG
SISYRRPVA

SEQ ID NO: 161134 - protein, 9 aa, Artificial Sequence
  Description of Artificial Sequence: Synthetic peptide
  Seed: SSSYRRPVG
SISYRRPVI

SEQ ID NO: 161135 - protein, 9 aa, Artificial Sequence
  Description of Artificial Sequence: Synthetic peptide
  Seed: SSSYRRPVG
SISYRRPVK

SEQ ID NO: 161136 - protein, 9 aa, Artificial Sequence
  Description of Artificial Sequence: Synthetic peptide
  Seed: SSSYRRPVG
SISYRRPVV

SEQ ID NO: 161137 - protein, 9 aa, Artificial Sequence
  Description of Artificial Sequence: Synthetic peptide
  Seed: STVLGVSIL
SIVLGVSIF

SEQ ID NO: 161138 - protein, 9 aa, Artificial Sequence
  Description of Artificial Sequence: Synthetic peptide
  Seed: STVLGVSIL
SIVLGVSIM

SEQ ID NO: 161139 - protein, 9 aa, Artificial Sequence
  Description of Artificial Sequence: Synthetic peptide
  Seed: STVLGVSIL
SIVLGVSIW

SEQ ID NO: 161140 - protein, 9 aa, Artificial Sequence
  Description of Artificial Sequence: Synthetic peptide
  Seed: STVLGVSIL
SIVLGVSIY

SEQ ID NO: 161141 - protein, 9 aa, Artificial Sequence
  Description of Artificial Sequence: Synthetic peptide
  Seed: SSYRRPVGI
SIYRRPVGA

SEQ ID NO: 161142 - protein, 9 aa, Artificial Sequence
  Description of Artificial Sequence: Synthetic peptide
  Seed: SSYRRPVGI
SIYRRPVGF

SEQ ID NO: 161143 - protein, 9 aa, Artificial Sequence
  Description of Artificial Sequence: Synthetic peptide
  Seed: SSYRRPVGI
SIYRRPVGI

SEQ ID NO: 161144 - protein, 10 aa, Artificial Sequence
  Description of Artificial Sequence: Synthetic peptide
  Seed: SSYRRPVGIS
SIYRRPVGIA

SEQ ID NO: 161145 - protein, 10 aa, Artificial Sequence
  Description of Artificial Sequence: Synthetic peptide
  Seed: SSYRRPVGIS
SIYRRPVGII

SEQ ID NO: 161146 - protein, 10 aa, Artificial Sequence
  Description of Artificial Sequence: Synthetic peptide
  Seed: SSYRRPVGIS
SIYRRPVGIK

SEQ ID NO: 161147 - protein, 10 aa, Artificial Sequence
  Description of Artificial Sequence: Synthetic peptide
  Seed: SSYRRPVGIS
SIYRRPVGIV

SEQ ID NO: 161148 - protein, 9 aa, Artificial Sequence
  Description of Artificial Sequence: Synthetic peptide
  Seed: SSYRRPVGI
SIYRRPVGK

SEQ ID NO: 161149 - protein, 9 aa, Artificial Sequence
  Description of Artificial Sequence: Synthetic peptide
  Seed: SSYRRPVGI
SIYRRPVGL

SEQ ID NO: 161150 - protein, 9 aa, Artificial Sequence
  Description of Artificial Sequence: Synthetic peptide
  Seed: SSYRRPVGI
SIYRRPVGM

SEQ ID NO: 161151 - protein, 9 aa, Artificial Sequence
  Description of Artificial Sequence: Synthetic peptide
  Seed: SSYRRPVGI
SIYRRPVGV

SEQ ID NO: 161152 - protein, 9 aa, Artificial Sequence
  Description of Artificial Sequence: Synthetic peptide
  Seed: SSYRRPVGI
SIYRRPVGW

SEQ ID NO: 161153 - protein, 9 aa, Artificial Sequence
  Description of Artificial Sequence: Synthetic peptide
  Seed: SSYRRPVGI
SIYRRPVGY

SEQ ID NO: 161154 - protein, 11 aa, Artificial Sequence
  Description of Artificial Sequence: Synthetic peptide
  Seed: SPGMMMGMFNM
SKGMMMGMFNA

SEQ ID NO: 161155 - protein, 11 aa, Artificial Sequence
  Description of Artificial Sequence: Synthetic peptide
  Seed: SPGMMMGMFNM
SKGMMMGMFNI

SEQ ID NO: 161156 - protein, 11 aa, Artificial Sequence
  Description of Artificial Sequence: Synthetic peptide
  Seed: SPGMMMGMFNM
SKGMMMGMFNL

SEQ ID NO: 161157 - protein, 11 aa, Artificial Sequence
  Description of Artificial Sequence: Synthetic peptide
  Seed: SPGMMMGMFNM
SKGMMMGMFNM

SEQ ID NO: 161158 - protein, 11 aa, Artificial Sequence
  Description of Artificial Sequence: Synthetic peptide
  Seed: SPGMMMGMFNM
SKGMMMGMFNT

SEQ ID NO: 161159 - protein, 11 aa, Artificial Sequence
  Description of Artificial Sequence: Synthetic peptide
  Seed: SPGMMMGMFNM
SKGMMMGMFNV

SEQ ID NO: 161160 - protein, 9 aa, Artificial Sequence
  Description of Artificial Sequence: Synthetic peptide
  Seed: SNKMARLGK
SKKMARLGK

SEQ ID NO: 161161 - protein, 9 aa, Artificial Sequence
  Description of Artificial Sequence: Synthetic peptide
  Seed: SYRRPVGIS
SKRRPVGIK

SEQ ID NO: 161162 - protein, 10 aa, Artificial Sequence
  Description of Artificial Sequence: Synthetic peptide
  Seed: SYRRPVGISS
SKRRPVGISK

SEQ ID NO: 161163 - protein, 10 aa, Artificial Sequence
  Description of Artificial Sequence: Synthetic peptide
  Seed: SLSPGMMMGM
SKSPGMMMGV

SEQ ID NO: 161164 - protein, 10 aa, Artificial Sequence
  Description of Artificial Sequence: Synthetic peptide
  Seed: SSYRRPVGIS
SKYRRPVGIA

SEQ ID NO: 161165 - protein, 10 aa, Artificial Sequence
  Description of Artificial Sequence: Synthetic peptide
  Seed: SSYRRPVGIS
SKYRRPVGIK

SEQ ID NO: 161166 - protein, 8 aa, Artificial Sequence
  Description of Artificial Sequence: Synthetic peptide
  Seed: SSDDFALI
SLDDFALF

SEQ ID NO: 161167 - protein, 8 aa, Artificial Sequence
  Description of Artificial Sequence: Synthetic peptide
  Seed: SSDDFALI
SLDDFALL

SEQ ID NO: 161168 - protein, 8 aa, Artificial Sequence
  Description of Artificial Sequence: Synthetic peptide
  Seed: SSDDFALI
SLDDFALM

SEQ ID NO: 161169 - protein, 9 aa, Artificial Sequence
  Description of Artificial Sequence: Synthetic peptide
  Seed: SMELPSFGV
SLELPSFGA

SEQ ID NO: 161170 - protein, 9 aa, Artificial Sequence
  Description of Artificial Sequence: Synthetic peptide
  Seed: SMELPSFGV
SLELPSFGI

SEQ ID NO: 161171 - protein, 9 aa, Artificial Sequence
  Description of Artificial Sequence: Synthetic peptide
  Seed: SMELPSFGV
SLELPSFGL

SEQ ID NO: 161172 - protein, 9 aa, Artificial Sequence
  Description of Artificial Sequence: Synthetic peptide
  Seed: SMELPSFGV
SLELPSFGM

SEQ ID NO: 161173 - protein, 9 aa, Artificial Sequence
  Description of Artificial Sequence: Synthetic peptide
  Seed: SMELPSFGV
SLELPSFGV

SEQ ID NO: 161174 - protein, 11 aa, Artificial Sequence
  Description of Artificial Sequence: Synthetic peptide
  Seed: SPGMMMGMFNM
SLGMMMGMFNA

SEQ ID NO: 161175 - protein, 11 aa, Artificial Sequence
  Description of Artificial Sequence: Synthetic peptide
  Seed: SPGMMMGMFNM
SLGMMMGMFNI

SEQ ID NO: 161176 - protein, 11 aa, Artificial Sequence
  Description of Artificial Sequence: Synthetic peptide
  Seed: SPGMMMGMFNM
SLGMMMGMFNL

SEQ ID NO: 161177 - protein, 11 aa, Artificial Sequence
  Description of Artificial Sequence: Synthetic peptide
  Seed: SPGMMMGMFNM
SLGMMMGMFNM

SEQ ID NO: 161178 - protein, 11 aa, Artificial Sequence
  Description of Artificial Sequence: Synthetic peptide
  Seed: SPGMMMGMFNM
SLGMMMGMFNT

SEQ ID NO: 161179 - protein, 11 aa, Artificial Sequence
  Description of Artificial Sequence: Synthetic peptide
  Seed: SPGMMMGMFNM
SLGMMMGMFNV

SEQ ID NO: 161180 - protein, 9 aa, Artificial Sequence
  Description of Artificial Sequence: Synthetic peptide
  Seed: SNKMARLGK
SLKMARLGA

SEQ ID NO: 161181 - protein, 9 aa, Artificial Sequence
  Description of Artificial Sequence: Synthetic peptide
  Seed: SNKMARLGK
SLKMARLGG

SEQ ID NO: 161182 - protein, 9 aa, Artificial Sequence
  Description of Artificial Sequence: Synthetic peptide
  Seed: SNKMARLGK
SLKMARLGI

SEQ ID NO: 161183 - protein, 9 aa, Artificial Sequence
  Description of Artificial Sequence: Synthetic peptide
  Seed: SNKMARLGK
SLKMARLGK

SEQ ID NO: 161184 - protein, 9 aa, Artificial Sequence
  Description of Artificial Sequence: Synthetic peptide
  Seed: SNKMARLGK
SLKMARLGL

SEQ ID NO: 161185 - protein, 9 aa, Artificial Sequence
  Description of Artificial Sequence: Synthetic peptide
  Seed: SNKMARLGK
SLKMARLGM

SEQ ID NO: 161186 - protein, 9 aa, Artificial Sequence
  Description of Artificial Sequence: Synthetic peptide
  Seed: SNKMARLGK
SLKMARLGS

SEQ ID NO: 161187 - protein, 9 aa, Artificial Sequence
  Description of Artificial Sequence: Synthetic peptide
  Seed: SNKMARLGK
SLKMARLGT

SEQ ID NO: 161188 - protein, 9 aa, Artificial Sequence
  Description of Artificial Sequence: Synthetic peptide
  Seed: SNKMARLGK
SLKMARLGV

SEQ ID NO: 161189 - protein, 9 aa, Artificial Sequence
  Description of Artificial Sequence: Synthetic peptide
  Seed: SNKMARLGK
SLKMARLGY

SEQ ID NO: 161190 - protein, 9 aa, Artificial Sequence
  Description of Artificial Sequence: Synthetic peptide
  Seed: SYRRPVGIS
SLRRPVGIA

SEQ ID NO: 161191 - protein, 9 aa, Artificial Sequence
  Description of Artificial Sequence: Synthetic peptide
  Seed: SYRRPVGIS
SLRRPVGIG

SEQ ID NO: 161192 - protein, 9 aa, Artificial Sequence
  Description of Artificial Sequence: Synthetic peptide
  Seed: SYRRPVGIS
SLRRPVGII

SEQ ID NO: 161193 - protein, 9 aa, Artificial Sequence
  Description of Artificial Sequence: Synthetic peptide
  Seed: SYRRPVGIS
SLRRPVGIK

SEQ ID NO: 161194 - protein, 9 aa, Artificial Sequence
  Description of Artificial Sequence: Synthetic peptide
  Seed: SYRRPVGIS
SLRRPVGIL

SEQ ID NO: 161195 - protein, 9 aa, Artificial Sequence
  Description of Artificial Sequence: Synthetic peptide
  Seed: SYRRPVGIS
SLRRPVGIM

SEQ ID NO: 161196 - protein, 9 aa, Artificial Sequence
  Description of Artificial Sequence: Synthetic peptide
  Seed: SYRRPVGIS
SLRRPVGIR

SEQ ID NO: 161197 - protein, 9 aa, Artificial Sequence
  Description of Artificial Sequence: Synthetic peptide
  Seed: SYRRPVGIS
SLRRPVGIS

SEQ ID NO: 161198 - protein, 10 aa, Artificial Sequence
  Description of Artificial Sequence: Synthetic peptide
  Seed: SYRRPVGISS
SLRRPVGISA

SEQ ID NO: 161199 - protein, 10 aa, Artificial Sequence
  Description of Artificial Sequence: Synthetic peptide
  Seed: SYRRPVGISS
SLRRPVGISG

SEQ ID NO: 161200 - protein, 10 aa, Artificial Sequence
  Description of Artificial Sequence: Synthetic peptide
  Seed: SYRRPVGISS
SLRRPVGISI

SEQ ID NO: 161201 - protein, 10 aa, Artificial Sequence
  Description of Artificial Sequence: Synthetic peptide
  Seed: SYRRPVGISS
SLRRPVGISK

SEQ ID NO: 161202 - protein, 10 aa, Artificial Sequence
  Description of Artificial Sequence: Synthetic peptide
  Seed: SYRRPVGISS
SLRRPVGISL

SEQ ID NO: 161203 - protein, 10 aa, Artificial Sequence
  Description of Artificial Sequence: Synthetic peptide
  Seed: SYRRPVGISS
SLRRPVGISM

SEQ ID NO: 161204 - protein, 10 aa, Artificial Sequence
  Description of Artificial Sequence: Synthetic peptide
  Seed: SYRRPVGISS
SLRRPVGISS

SEQ ID NO: 161205 - protein, 10 aa, Artificial Sequence
  Description of Artificial Sequence: Synthetic peptide
  Seed: SYRRPVGISS
SLRRPVGISV

SEQ ID NO: 161206 - protein, 9 aa, Artificial Sequence
  Description of Artificial Sequence: Synthetic peptide
  Seed: SYRRPVGIS
SLRRPVGIV

SEQ ID NO: 161207 - protein, 9 aa, Artificial Sequence
  Description of Artificial Sequence: Synthetic peptide
  Seed: SYRRPVGIS
SLRRPVGIY

SEQ ID NO: 161208 - protein, 10 aa, Artificial Sequence
  Description of Artificial Sequence: Synthetic peptide
  Seed: SLSPGMMMGM
SLSPGMMMGA

SEQ ID NO: 161209 - protein, 10 aa, Artificial Sequence
  Description of Artificial Sequence: Synthetic peptide
  Seed: SLSPGMMMGM
SLSPGMMMGC

SEQ ID NO: 161210 - protein, 10 aa, Artificial Sequence
  Description of Artificial Sequence: Synthetic peptide
  Seed: SLSPGMMMGM
SLSPGMMMGI

SEQ ID NO: 161211 - protein, 10 aa, Artificial Sequence
  Description of Artificial Sequence: Synthetic peptide
  Seed: SLSPGMMMGM
SLSPGMMMGL

SEQ ID NO: 161212 - protein, 10 aa, Artificial Sequence
  Description of Artificial Sequence: Synthetic peptide
  Seed: SLSPGMMMGM
SLSPGMMMGS

SEQ ID NO: 161213 - protein, 10 aa, Artificial Sequence
  Description of Artificial Sequence: Synthetic peptide
  Seed: SLSPGMMMGM
SLSPGMMMGT

SEQ ID NO: 161214 - protein, 10 aa, Artificial Sequence
  Description of Artificial Sequence: Synthetic peptide
  Seed: SLSPGMMMGM
SLSPGMMMGV

SEQ ID NO: 161215 - protein, 9 aa, Artificial Sequence
  Description of Artificial Sequence: Synthetic peptide
  Seed: SSSYRRPVG
SLSYRRPVK

SEQ ID NO: 161216 - protein, 9 aa, Artificial Sequence
  Description of Artificial Sequence: Synthetic peptide
  Seed: STVLGVSIL
SLVLGVSIY

SEQ ID NO: 161217 - protein, 9 aa, Artificial Sequence
  Description of Artificial Sequence: Synthetic peptide
  Seed: SSYRRPVGI
SLYRRPVGF

SEQ ID NO: 161218 - protein, 9 aa, Artificial Sequence
  Description of Artificial Sequence: Synthetic peptide
  Seed: SSYRRPVGI
SLYRRPVGI

SEQ ID NO: 161219 - protein, 10 aa, Artificial Sequence
  Description of Artificial Sequence: Synthetic peptide
  Seed: SSYRRPVGIS
SLYRRPVGIA

SEQ ID NO: 161220 - protein, 10 aa, Artificial Sequence
  Description of Artificial Sequence: Synthetic peptide
  Seed: SSYRRPVGIS
SLYRRPVGIK

SEQ ID NO: 161221 - protein, 9 aa, Artificial Sequence
  Description of Artificial Sequence: Synthetic peptide
  Seed: SSYRRPVGI
SLYRRPVGK

SEQ ID NO: 161222 - protein, 9 aa, Artificial Sequence
  Description of Artificial Sequence: Synthetic peptide
  Seed: SSYRRPVGI
SLYRRPVGL

SEQ ID NO: 161223 - protein, 9 aa, Artificial Sequence
  Description of Artificial Sequence: Synthetic peptide
  Seed: SSYRRPVGI
SLYRRPVGM

SEQ ID NO: 161224 - protein, 9 aa, Artificial Sequence
  Description of Artificial Sequence: Synthetic peptide
  Seed: SSYRRPVGI
SLYRRPVGW

SEQ ID NO: 161225 - protein, 9 aa, Artificial Sequence
  Description of Artificial Sequence: Synthetic peptide
  Seed: SSYRRPVGI
SLYRRPVGY

SEQ ID NO: 161226 - protein, 8 aa, Artificial Sequence
  Description of Artificial Sequence: Synthetic peptide
  Seed: SSDDFALI
SMDDFALL

SEQ ID NO: 161227 - protein, 8 aa, Artificial Sequence
  Description of Artificial Sequence: Synthetic peptide
  Seed: SSDDFALI
SMDDFALM

SEQ ID NO: 161228 - protein, 9 aa, Artificial Sequence
  Description of Artificial Sequence: Synthetic peptide
  Seed: SMELPSFGV
SMELPSFGA

SEQ ID NO: 161229 - protein, 9 aa, Artificial Sequence
  Description of Artificial Sequence: Synthetic peptide
  Seed: SMELPSFGV
SMELPSFGI

SEQ ID NO: 161230 - protein, 9 aa, Artificial Sequence
  Description of Artificial Sequence: Synthetic peptide
  Seed: SMELPSFGV
SMELPSFGL

SEQ ID NO: 161231 - protein, 9 aa, Artificial Sequence
  Description of Artificial Sequence: Synthetic peptide
  Seed: SMELPSFGV
SMELPSFGM

SEQ ID NO: 161232 - protein, 11 aa, Artificial Sequence
  Description of Artificial Sequence: Synthetic peptide
  Seed: SPGMMMGMFNM
SMGMMMGMFNA

SEQ ID NO: 161233 - protein, 11 aa, Artificial Sequence
  Description of Artificial Sequence: Synthetic peptide
  Seed: SPGMMMGMFNM
SMGMMMGMFNI

SEQ ID NO: 161234 - protein, 11 aa, Artificial Sequence
  Description of Artificial Sequence: Synthetic peptide
  Seed: SPGMMMGMFNM
SMGMMMGMFNL

SEQ ID NO: 161235 - protein, 11 aa, Artificial Sequence
  Description of Artificial Sequence: Synthetic peptide
  Seed: SPGMMMGMFNM
SMGMMMGMFNM

SEQ ID NO: 161236 - protein, 11 aa, Artificial Sequence
  Description of Artificial Sequence: Synthetic peptide
  Seed: SPGMMMGMFNM
SMGMMMGMFNT

SEQ ID NO: 161237 - protein, 11 aa, Artificial Sequence
  Description of Artificial Sequence: Synthetic peptide
  Seed: SPGMMMGMFNM
SMGMMMGMFNV

SEQ ID NO: 161238 - protein, 9 aa, Artificial Sequence
  Description of Artificial Sequence: Synthetic peptide
  Seed: SNKMARLGK
SMKMARLGA

SEQ ID NO: 161239 - protein, 9 aa, Artificial Sequence
  Description of Artificial Sequence: Synthetic peptide
  Seed: SNKMARLGK
SMKMARLGC

SEQ ID NO: 161240 - protein, 9 aa, Artificial Sequence
  Description of Artificial Sequence: Synthetic peptide
  Seed: SNKMARLGK
SMKMARLGF

SEQ ID NO: 161241 - protein, 9 aa, Artificial Sequence
  Description of Artificial Sequence: Synthetic peptide
  Seed: SNKMARLGK
SMKMARLGG

SEQ ID NO: 161242 - protein, 9 aa, Artificial Sequence
  Description of Artificial Sequence: Synthetic peptide
  Seed: SNKMARLGK
SMKMARLGH

SEQ ID NO: 161243 - protein, 9 aa, Artificial Sequence
  Description of Artificial Sequence: Synthetic peptide
  Seed: SNKMARLGK
SMKMARLGI

SEQ ID NO: 161244 - protein, 9 aa, Artificial Sequence
  Description of Artificial Sequence: Synthetic peptide
  Seed: SNKMARLGK
SMKMARLGK

SEQ ID NO: 161245 - protein, 9 aa, Artificial Sequence
  Description of Artificial Sequence: Synthetic peptide
  Seed: SNKMARLGK
SMKMARLGL

SEQ ID NO: 161246 - protein, 9 aa, Artificial Sequence
  Description of Artificial Sequence: Synthetic peptide
  Seed: SNKMARLGK
SMKMARLGM

SEQ ID NO: 161247 - protein, 9 aa, Artificial Sequence
  Description of Artificial Sequence: Synthetic peptide
  Seed: SNKMARLGK
SMKMARLGN

SEQ ID NO: 161248 - protein, 9 aa, Artificial Sequence
  Description of Artificial Sequence: Synthetic peptide
  Seed: SNKMARLGK
SMKMARLGP

SEQ ID NO: 161249 - protein, 9 aa, Artificial Sequence
  Description of Artificial Sequence: Synthetic peptide
  Seed: SNKMARLGK
SMKMARLGQ

SEQ ID NO: 161250 - protein, 9 aa, Artificial Sequence
  Description of Artificial Sequence: Synthetic peptide
  Seed: SNKMARLGK
SMKMARLGR

SEQ ID NO: 161251 - protein, 9 aa, Artificial Sequence
  Description of Artificial Sequence: Synthetic peptide
  Seed: SNKMARLGK
SMKMARLGS

SEQ ID NO: 161252 - protein, 9 aa, Artificial Sequence
  Description of Artificial Sequence: Synthetic peptide
  Seed: SNKMARLGK
SMKMARLGT

SEQ ID NO: 161253 - protein, 9 aa, Artificial Sequence
  Description of Artificial Sequence: Synthetic peptide
  Seed: SNKMARLGK
SMKMARLGV

SEQ ID NO: 161254 - protein, 9 aa, Artificial Sequence
  Description of Artificial Sequence: Synthetic peptide
  Seed: SNKMARLGK
SMKMARLGY

SEQ ID NO: 161255 - protein, 9 aa, Artificial Sequence
  Description of Artificial Sequence: Synthetic peptide
  Seed: SYRRPVGIS
SMRRPVGIA

SEQ ID NO: 161256 - protein, 9 aa, Artificial Sequence
  Description of Artificial Sequence: Synthetic peptide
  Seed: SYRRPVGIS
SMRRPVGIC

SEQ ID NO: 161257 - protein, 9 aa, Artificial Sequence
  Description of Artificial Sequence: Synthetic peptide
  Seed: SYRRPVGIS
SMRRPVGIF

SEQ ID NO: 161258 - protein, 9 aa, Artificial Sequence
  Description of Artificial Sequence: Synthetic peptide
  Seed: SYRRPVGIS
SMRRPVGIG

SEQ ID NO: 161259 - protein, 9 aa, Artificial Sequence
  Description of Artificial Sequence: Synthetic peptide
  Seed: SYRRPVGIS
SMRRPVGIH

SEQ ID NO: 161260 - protein, 9 aa, Artificial Sequence
  Description of Artificial Sequence: Synthetic peptide
  Seed: SYRRPVGIS
SMRRPVGII

SEQ ID NO: 161261 - protein, 9 aa, Artificial Sequence
  Description of Artificial Sequence: Synthetic peptide
  Seed: SYRRPVGIS
SMRRPVGIK

SEQ ID NO: 161262 - protein, 9 aa, Artificial Sequence
  Description of Artificial Sequence: Synthetic peptide
  Seed: SYRRPVGIS
SMRRPVGIL

SEQ ID NO: 161263 - protein, 9 aa, Artificial Sequence
  Description of Artificial Sequence: Synthetic peptide
  Seed: SYRRPVGIS
SMRRPVGIM

SEQ ID NO: 161264 - protein, 9 aa, Artificial Sequence
  Description of Artificial Sequence: Synthetic peptide
  Seed: SYRRPVGIS
SMRRPVGIN

SEQ ID NO: 161265 - protein, 9 aa, Artificial Sequence
  Description of Artificial Sequence: Synthetic peptide
  Seed: SYRRPVGIS
SMRRPVGIP

SEQ ID NO: 161266 - protein, 9 aa, Artificial Sequence
  Description of Artificial Sequence: Synthetic peptide
  Seed: SYRRPVGIS
SMRRPVGIQ

SEQ ID NO: 161267 - protein, 9 aa, Artificial Sequence
  Description of Artificial Sequence: Synthetic peptide
  Seed: SYRRPVGIS
SMRRPVGIR

SEQ ID NO: 161268 - protein, 9 aa, Artificial Sequence
  Description of Artificial Sequence: Synthetic peptide
  Seed: SYRRPVGIS
SMRRPVGIS

SEQ ID NO: 161269 - protein, 10 aa, Artificial Sequence
  Description of Artificial Sequence: Synthetic peptide
  Seed: SYRRPVGISS
SMRRPVGISA

SEQ ID NO: 161270 - protein, 10 aa, Artificial Sequence
  Description of Artificial Sequence: Synthetic peptide
  Seed: SYRRPVGISS
SMRRPVGISF

SEQ ID NO: 161271 - protein, 10 aa, Artificial Sequence
  Description of Artificial Sequence: Synthetic peptide
  Seed: SYRRPVGISS
SMRRPVGISG

SEQ ID NO: 161272 - protein, 10 aa, Artificial Sequence
  Description of Artificial Sequence: Synthetic peptide
  Seed: SYRRPVGISS
SMRRPVGISI

SEQ ID NO: 161273 - protein, 10 aa, Artificial Sequence
  Description of Artificial Sequence: Synthetic peptide
  Seed: SYRRPVGISS
SMRRPVGISK

SEQ ID NO: 161274 - protein, 10 aa, Artificial Sequence
  Description of Artificial Sequence: Synthetic peptide
  Seed: SYRRPVGISS
SMRRPVGISL

SEQ ID NO: 161275 - protein, 10 aa, Artificial Sequence
  Description of Artificial Sequence: Synthetic peptide
  Seed: SYRRPVGISS
SMRRPVGISM

SEQ ID NO: 161276 - protein, 10 aa, Artificial Sequence
  Description of Artificial Sequence: Synthetic peptide
  Seed: SYRRPVGISS
SMRRPVGISP

SEQ ID NO: 161277 - protein, 10 aa, Artificial Sequence
  Description of Artificial Sequence: Synthetic peptide
  Seed: SYRRPVGISS
SMRRPVGISR

SEQ ID NO: 161278 - protein, 10 aa, Artificial Sequence
  Description of Artificial Sequence: Synthetic peptide
  Seed: SYRRPVGISS
SMRRPVGISS

SEQ ID NO: 161279 - protein, 10 aa, Artificial Sequence
  Description of Artificial Sequence: Synthetic peptide
  Seed: SYRRPVGISS
SMRRPVGIST

SEQ ID NO: 161280 - protein, 10 aa, Artificial Sequence
  Description of Artificial Sequence: Synthetic peptide
  Seed: SYRRPVGISS
SMRRPVGISV

SEQ ID NO: 161281 - protein, 10 aa, Artificial Sequence
  Description of Artificial Sequence: Synthetic peptide
  Seed: SYRRPVGISS
SMRRPVGISY

SEQ ID NO: 161282 - protein, 9 aa, Artificial Sequence
  Description of Artificial Sequence: Synthetic peptide
  Seed: SYRRPVGIS
SMRRPVGIT

SEQ ID NO: 161283 - protein, 9 aa, Artificial Sequence
  Description of Artificial Sequence: Synthetic peptide
  Seed: SYRRPVGIS
SMRRPVGIV

SEQ ID NO: 161284 - protein, 9 aa, Artificial Sequence
  Description of Artificial Sequence: Synthetic peptide
  Seed: SYRRPVGIS
SMRRPVGIY

SEQ ID NO: 161285 - protein, 10 aa, Artificial Sequence
  Description of Artificial Sequence: Synthetic peptide
  Seed: SLSPGMMMGM
SMSPGMMMGA

SEQ ID NO: 161286 - protein, 10 aa, Artificial Sequence
  Description of Artificial Sequence: Synthetic peptide
  Seed: SLSPGMMMGM
SMSPGMMMGC

SEQ ID NO: 161287 - protein, 10 aa, Artificial Sequence
  Description of Artificial Sequence: Synthetic peptide
  Seed: SLSPGMMMGM
SMSPGMMMGI

SEQ ID NO: 161288 - protein, 10 aa, Artificial Sequence
  Description of Artificial Sequence: Synthetic peptide
  Seed: SLSPGMMMGM
SMSPGMMMGL

SEQ ID NO: 161289 - protein, 10 aa, Artificial Sequence
  Description of Artificial Sequence: Synthetic peptide
  Seed: SLSPGMMMGM
SMSPGMMMGM

SEQ ID NO: 161290 - protein, 10 aa, Artificial Sequence
  Description of Artificial Sequence: Synthetic peptide
  Seed: SLSPGMMMGM
SMSPGMMMGP

SEQ ID NO: 161291 - protein, 10 aa, Artificial Sequence
  Description of Artificial Sequence: Synthetic peptide
  Seed: SLSPGMMMGM
SMSPGMMMGS

SEQ ID NO: 161292 - protein, 10 aa, Artificial Sequence
  Description of Artificial Sequence: Synthetic peptide
  Seed: SLSPGMMMGM
SMSPGMMMGT

SEQ ID NO: 161293 - protein, 10 aa, Artificial Sequence
  Description of Artificial Sequence: Synthetic peptide
  Seed: SLSPGMMMGM
SMSPGMMMGV

SEQ ID NO: 161294 - protein, 9 aa, Artificial Sequence
  Description of Artificial Sequence: Synthetic peptide
  Seed: SSSYRRPVG
SMSYRRPVA

SEQ ID NO: 161295 - protein, 9 aa, Artificial Sequence
  Description of Artificial Sequence: Synthetic peptide
  Seed: SSSYRRPVG
SMSYRRPVI

SEQ ID NO: 161296 - protein, 9 aa, Artificial Sequence
  Description of Artificial Sequence: Synthetic peptide
  Seed: SSSYRRPVG
SMSYRRPVK

SEQ ID NO: 161297 - protein, 9 aa, Artificial Sequence
  Description of Artificial Sequence: Synthetic peptide
  Seed: SSSYRRPVG
SMSYRRPVV

SEQ ID NO: 161298 - protein, 9 aa, Artificial Sequence
  Description of Artificial Sequence: Synthetic peptide
  Seed: SSSYRRPVG
SMSYRRPVY

SEQ ID NO: 161299 - protein, 9 aa, Artificial Sequence
  Description of Artificial Sequence: Synthetic peptide
  Seed: STVLGVSIL
SMVLGVSIF

SEQ ID NO: 161300 - protein, 9 aa, Artificial Sequence
  Description of Artificial Sequence: Synthetic peptide
  Seed: STVLGVSIL
SMVLGVSIL

SEQ ID NO: 161301 - protein, 9 aa, Artificial Sequence
  Description of Artificial Sequence: Synthetic peptide
  Seed: STVLGVSIL
SMVLGVSIM

SEQ ID NO: 161302 - protein, 9 aa, Artificial Sequence
  Description of Artificial Sequence: Synthetic peptide
  Seed: STVLGVSIL
SMVLGVSIW

SEQ ID NO: 161303 - protein, 9 aa, Artificial Sequence
  Description of Artificial Sequence: Synthetic peptide
  Seed: STVLGVSIL
SMVLGVSIY

SEQ ID NO: 161304 - protein, 9 aa, Artificial Sequence
  Description of Artificial Sequence: Synthetic peptide
  Seed: SSYRRPVGI
SMYRRPVGA

SEQ ID NO: 161305 - protein, 9 aa, Artificial Sequence
  Description of Artificial Sequence: Synthetic peptide
  Seed: SSYRRPVGI
SMYRRPVGF

SEQ ID NO: 161306 - protein, 9 aa, Artificial Sequence
  Description of Artificial Sequence: Synthetic peptide
  Seed: SSYRRPVGI
SMYRRPVGI

SEQ ID NO: 161307 - protein, 10 aa, Artificial Sequence
  Description of Artificial Sequence: Synthetic peptide
  Seed: SSYRRPVGIS
SMYRRPVGIA

SEQ ID NO: 161308 - protein, 10 aa, Artificial Sequence
  Description of Artificial Sequence: Synthetic peptide
  Seed: SSYRRPVGIS
SMYRRPVGII

SEQ ID NO: 161309 - protein, 10 aa, Artificial Sequence
  Description of Artificial Sequence: Synthetic peptide
  Seed: SSYRRPVGIS
SMYRRPVGIK

SEQ ID NO: 161310 - protein, 10 aa, Artificial Sequence
  Description of Artificial Sequence: Synthetic peptide
  Seed: SSYRRPVGIS
SMYRRPVGIR

SEQ ID NO: 161311 - protein, 10 aa, Artificial Sequence
  Description of Artificial Sequence: Synthetic peptide
  Seed: SSYRRPVGIS
SMYRRPVGIV

SEQ ID NO: 161312 - protein, 9 aa, Artificial Sequence
  Description of Artificial Sequence: Synthetic peptide
  Seed: SSYRRPVGI
SMYRRPVGK

SEQ ID NO: 161313 - protein, 9 aa, Artificial Sequence
  Description of Artificial Sequence: Synthetic peptide
  Seed: SSYRRPVGI
SMYRRPVGL

SEQ ID NO: 161314 - protein, 9 aa, Artificial Sequence
  Description of Artificial Sequence: Synthetic peptide
  Seed: SSYRRPVGI
SMYRRPVGM

SEQ ID NO: 161315 - protein, 9 aa, Artificial Sequence
  Description of Artificial Sequence: Synthetic peptide
  Seed: SSYRRPVGI
SMYRRPVGR

SEQ ID NO: 161316 - protein, 9 aa, Artificial Sequence
  Description of Artificial Sequence: Synthetic peptide
  Seed: SSYRRPVGI
SMYRRPVGV

SEQ ID NO: 161317 - protein, 9 aa, Artificial Sequence
  Description of Artificial Sequence: Synthetic peptide
  Seed: SSYRRPVGI
SMYRRPVGW

SEQ ID NO: 161318 - protein, 9 aa, Artificial Sequence
  Description of Artificial Sequence: Synthetic peptide
  Seed: SSYRRPVGI
SMYRRPVGY

SEQ ID NO: 161319 - protein, 11 aa, Artificial Sequence
  Description of Artificial Sequence: Synthetic peptide
  Seed: SPGMMMGMFNM
SNGMMMGMFNA

SEQ ID NO: 161320 - protein, 11 aa, Artificial Sequence
  Description of Artificial Sequence: Synthetic peptide
  Seed: SPGMMMGMFNM
SNGMMMGMFNI

SEQ ID NO: 161321 - protein, 11 aa, Artificial Sequence
  Description of Artificial Sequence: Synthetic peptide
  Seed: SPGMMMGMFNM
SNGMMMGMFNL

SEQ ID NO: 161322 - protein, 11 aa, Artificial Sequence
  Description of Artificial Sequence: Synthetic peptide
  Seed: SPGMMMGMFNM
SNGMMMGMFNM

SEQ ID NO: 161323 - protein, 11 aa, Artificial Sequence
  Description of Artificial Sequence: Synthetic peptide
  Seed: SPGMMMGMFNM
SNGMMMGMFNT

SEQ ID NO: 161324 - protein, 11 aa, Artificial Sequence
  Description of Artificial Sequence: Synthetic peptide
  Seed: SPGMMMGMFNM
SNGMMMGMFNV

SEQ ID NO: 161325 - protein, 9 aa, Artificial Sequence
  Description of Artificial Sequence: Synthetic peptide
  Seed: SNKMARLGK
SNKMARLGA

SEQ ID NO: 161326 - protein, 9 aa, Artificial Sequence
  Description of Artificial Sequence: Synthetic peptide
  Seed: SNKMARLGK
SNKMARLGI

SEQ ID NO: 161327 - protein, 9 aa, Artificial Sequence
  Description of Artificial Sequence: Synthetic peptide
  Seed: SNKMARLGK
SNKMARLGL

SEQ ID NO: 161328 - protein, 9 aa, Artificial Sequence
  Description of Artificial Sequence: Synthetic peptide
  Seed: SNKMARLGK
SNKMARLGM

SEQ ID NO: 161329 - protein, 9 aa, Artificial Sequence
  Description of Artificial Sequence: Synthetic peptide
  Seed: SNKMARLGK
SNKMARLGV

SEQ ID NO: 161330 - protein, 9 aa, Artificial Sequence
  Description of Artificial Sequence: Synthetic peptide
  Seed: SYRRPVGIS
SNRRPVGIA

SEQ ID NO: 161331 - protein, 9 aa, Artificial Sequence
  Description of Artificial Sequence: Synthetic peptide
  Seed: SYRRPVGIS
SNRRPVGII

SEQ ID NO: 161332 - protein, 9 aa, Artificial Sequence
  Description of Artificial Sequence: Synthetic peptide
  Seed: SYRRPVGIS
SNRRPVGIK

SEQ ID NO: 161333 - protein, 10 aa, Artificial Sequence
  Description of Artificial Sequence: Synthetic peptide
  Seed: SYRRPVGISS
SNRRPVGISA

SEQ ID NO: 161334 - protein, 10 aa, Artificial Sequence
  Description of Artificial Sequence: Synthetic peptide
  Seed: SYRRPVGISS
SNRRPVGISI

SEQ ID NO: 161335 - protein, 10 aa, Artificial Sequence
  Description of Artificial Sequence: Synthetic peptide
  Seed: SYRRPVGISS
SNRRPVGISK

SEQ ID NO: 161336 - protein, 10 aa, Artificial Sequence
  Description of Artificial Sequence: Synthetic peptide
  Seed: SYRRPVGISS
SNRRPVGISV

SEQ ID NO: 161337 - protein, 9 aa, Artificial Sequence
  Description of Artificial Sequence: Synthetic peptide
  Seed: SYRRPVGIS
SNRRPVGIV

SEQ ID NO: 161338 - protein, 10 aa, Artificial Sequence
  Description of Artificial Sequence: Synthetic peptide
  Seed: SLSPGMMMGM
SNSPGMMMGV

SEQ ID NO: 161339 - protein, 9 aa, Artificial Sequence
  Description of Artificial Sequence: Synthetic peptide
  Seed: SSSYRRPVG
SNSYRRPVK

SEQ ID NO: 161340 - protein, 10 aa, Artificial Sequence
  Description of Artificial Sequence: Synthetic peptide
  Seed: SSYRRPVGIS
SNYRRPVGIA

SEQ ID NO: 161341 - protein, 10 aa, Artificial Sequence
  Description of Artificial Sequence: Synthetic peptide
  Seed: SSYRRPVGIS
SNYRRPVGIK

SEQ ID NO: 161342 - protein, 9 aa, Artificial Sequence
  Description of Artificial Sequence: Synthetic peptide
  Seed: SSYRRPVGI
SNYRRPVGK

SEQ ID NO: 161343 - protein, 8 aa, Artificial Sequence
  Description of Artificial Sequence: Synthetic peptide
  Seed: SPGMMMGM
SPGMMMGL

SEQ ID NO: 161344 - protein, 9 aa, Artificial Sequence
  Description of Artificial Sequence: Synthetic peptide
  Seed: SPGMMMGMF
SPGMMMGMA

SEQ ID NO: 161345 - protein, 11 aa, Artificial Sequence
  Description of Artificial Sequence: Synthetic peptide
  Seed: SPGMMMGMFNM
SPGMMMGMFNA

SEQ ID NO: 161346 - protein, 11 aa, Artificial Sequence
  Description of Artificial Sequence: Synthetic peptide
  Seed: SPGMMMGMFNM
SPGMMMGMFNI

SEQ ID NO: 161347 - protein, 11 aa, Artificial Sequence
  Description of Artificial Sequence: Synthetic peptide
  Seed: SPGMMMGMFNM
SPGMMMGMFNL

SEQ ID NO: 161348 - protein, 11 aa, Artificial Sequence
  Description of Artificial Sequence: Synthetic peptide
  Seed: SPGMMMGMFNM
SPGMMMGMFNT

SEQ ID NO: 161349 - protein, 11 aa, Artificial Sequence
  Description of Artificial Sequence: Synthetic peptide
  Seed: SPGMMMGMFNM
SPGMMMGMFNV

SEQ ID NO: 161350 - protein, 9 aa, Artificial Sequence
  Description of Artificial Sequence: Synthetic peptide
  Seed: SPGMMMGMF
SPGMMMGMI

SEQ ID NO: 161351 - protein, 9 aa, Artificial Sequence
  Description of Artificial Sequence: Synthetic peptide
  Seed: SPGMMMGMF
SPGMMMGML

SEQ ID NO: 161352 - protein, 9 aa, Artificial Sequence
  Description of Artificial Sequence: Synthetic peptide
  Seed: SPGMMMGMF
SPGMMMGMM

SEQ ID NO: 161353 - protein, 9 aa, Artificial Sequence
  Description of Artificial Sequence: Synthetic peptide
  Seed: SPGMMMGMF
SPGMMMGMV

SEQ ID NO: 161354 - protein, 10 aa, Artificial Sequence
  Description of Artificial Sequence: Synthetic peptide
  Seed: SLSPGMMMGM
SPSPGMMMGV

SEQ ID NO: 161355 - protein, 10 aa, Artificial Sequence
  Description of Artificial Sequence: Synthetic peptide
  Seed: SSYRRPVGIS
SPYRRPVGIA

SEQ ID NO: 161356 - protein, 10 aa, Artificial Sequence
  Description of Artificial Sequence: Synthetic peptide
  Seed: SSYRRPVGIS
SPYRRPVGIK

SEQ ID NO: 161357 - protein, 9 aa, Artificial Sequence
  Description of Artificial Sequence: Synthetic peptide
  Seed: SMELPSFGV
SQELPSFGI

SEQ ID NO: 161358 - protein, 9 aa, Artificial Sequence
  Description of Artificial Sequence: Synthetic peptide
  Seed: SMELPSFGV
SQELPSFGL

SEQ ID NO: 161359 - protein, 9 aa, Artificial Sequence
  Description of Artificial Sequence: Synthetic peptide
  Seed: SMELPSFGV
SQELPSFGV

SEQ ID NO: 161360 - protein, 11 aa, Artificial Sequence
  Description of Artificial Sequence: Synthetic peptide
  Seed: SPGMMMGMFNM
SQGMMMGMFNA

SEQ ID NO: 161361 - protein, 11 aa, Artificial Sequence
  Description of Artificial Sequence: Synthetic peptide
  Seed: SPGMMMGMFNM
SQGMMMGMFNI

SEQ ID NO: 161362 - protein, 11 aa, Artificial Sequence
  Description of Artificial Sequence: Synthetic peptide
  Seed: SPGMMMGMFNM
SQGMMMGMFNL

SEQ ID NO: 161363 - protein, 11 aa, Artificial Sequence
  Description of Artificial Sequence: Synthetic peptide
  Seed: SPGMMMGMFNM
SQGMMMGMFNM

SEQ ID NO: 161364 - protein, 11 aa, Artificial Sequence
  Description of Artificial Sequence: Synthetic peptide
  Seed: SPGMMMGMFNM
SQGMMMGMFNT

SEQ ID NO: 161365 - protein, 11 aa, Artificial Sequence
  Description of Artificial Sequence: Synthetic peptide
  Seed: SPGMMMGMFNM
SQGMMMGMFNV

SEQ ID NO: 161366 - protein, 9 aa, Artificial Sequence
  Description of Artificial Sequence: Synthetic peptide
  Seed: SNKMARLGK
SQKMARLGA

SEQ ID NO: 161367 - protein, 9 aa, Artificial Sequence
  Description of Artificial Sequence: Synthetic peptide
  Seed: SNKMARLGK
SQKMARLGG

SEQ ID NO: 161368 - protein, 9 aa, Artificial Sequence
  Description of Artificial Sequence: Synthetic peptide
  Seed: SNKMARLGK
SQKMARLGI

SEQ ID NO: 161369 - protein, 9 aa, Artificial Sequence
  Description of Artificial Sequence: Synthetic peptide
  Seed: SNKMARLGK
SQKMARLGK

SEQ ID NO: 161370 - protein, 9 aa, Artificial Sequence
  Description of Artificial Sequence: Synthetic peptide
  Seed: SNKMARLGK
SQKMARLGL

SEQ ID NO: 161371 - protein, 9 aa, Artificial Sequence
  Description of Artificial Sequence: Synthetic peptide
  Seed: SNKMARLGK
SQKMARLGM

SEQ ID NO: 161372 - protein, 9 aa, Artificial Sequence
  Description of Artificial Sequence: Synthetic peptide
  Seed: SNKMARLGK
SQKMARLGR

SEQ ID NO: 161373 - protein, 9 aa, Artificial Sequence
  Description of Artificial Sequence: Synthetic peptide
  Seed: SNKMARLGK
SQKMARLGS

SEQ ID NO: 161374 - protein, 9 aa, Artificial Sequence
  Description of Artificial Sequence: Synthetic peptide
  Seed: SNKMARLGK
SQKMARLGT

SEQ ID NO: 161375 - protein, 9 aa, Artificial Sequence
  Description of Artificial Sequence: Synthetic peptide
  Seed: SNKMARLGK
SQKMARLGV

SEQ ID NO: 161376 - protein, 9 aa, Artificial Sequence
  Description of Artificial Sequence: Synthetic peptide
  Seed: SNKMARLGK
SQKMARLGY

SEQ ID NO: 161377 - protein, 9 aa, Artificial Sequence
  Description of Artificial Sequence: Synthetic peptide
  Seed: SYRRPVGIS
SQRRPVGIA

SEQ ID NO: 161378 - protein, 9 aa, Artificial Sequence
  Description of Artificial Sequence: Synthetic peptide
  Seed: SYRRPVGIS
SQRRPVGII

SEQ ID NO: 161379 - protein, 9 aa, Artificial Sequence
  Description of Artificial Sequence: Synthetic peptide
  Seed: SYRRPVGIS
SQRRPVGIK

SEQ ID NO: 161380 - protein, 9 aa, Artificial Sequence
  Description of Artificial Sequence: Synthetic peptide
  Seed: SYRRPVGIS
SQRRPVGIL

SEQ ID NO: 161381 - protein, 9 aa, Artificial Sequence
  Description of Artificial Sequence: Synthetic peptide
  Seed: SYRRPVGIS
SQRRPVGIM

SEQ ID NO: 161382 - protein, 9 aa, Artificial Sequence
  Description of Artificial Sequence: Synthetic peptide
  Seed: SYRRPVGIS
SQRRPVGIR

SEQ ID NO: 161383 - protein, 9 aa, Artificial Sequence
  Description of Artificial Sequence: Synthetic peptide
  Seed: SYRRPVGIS
SQRRPVGIS

SEQ ID NO: 161384 - protein, 10 aa, Artificial Sequence
  Description of Artificial Sequence: Synthetic peptide
  Seed: SYRRPVGISS
SQRRPVGISA

SEQ ID NO: 161385 - protein, 10 aa, Artificial Sequence
  Description of Artificial Sequence: Synthetic peptide
  Seed: SYRRPVGISS
SQRRPVGISI

SEQ ID NO: 161386 - protein, 10 aa, Artificial Sequence
  Description of Artificial Sequence: Synthetic peptide
  Seed: SYRRPVGISS
SQRRPVGISK

SEQ ID NO: 161387 - protein, 10 aa, Artificial Sequence
  Description of Artificial Sequence: Synthetic peptide
  Seed: SYRRPVGISS
SQRRPVGISL

SEQ ID NO: 161388 - protein, 10 aa, Artificial Sequence
  Description of Artificial Sequence: Synthetic peptide
  Seed: SYRRPVGISS
SQRRPVGISM

SEQ ID NO: 161389 - protein, 10 aa, Artificial Sequence
  Description of Artificial Sequence: Synthetic peptide
  Seed: SYRRPVGISS
SQRRPVGISR

SEQ ID NO: 161390 - protein, 10 aa, Artificial Sequence
  Description of Artificial Sequence: Synthetic peptide
  Seed: SYRRPVGISS
SQRRPVGISS

SEQ ID NO: 161391 - protein, 10 aa, Artificial Sequence
  Description of Artificial Sequence: Synthetic peptide
  Seed: SYRRPVGISS
SQRRPVGISV

SEQ ID NO: 161392 - protein, 10 aa, Artificial Sequence
  Description of Artificial Sequence: Synthetic peptide
  Seed: SYRRPVGISS
SQRRPVGISY

SEQ ID NO: 161393 - protein, 9 aa, Artificial Sequence
  Description of Artificial Sequence: Synthetic peptide
  Seed: SYRRPVGIS
SQRRPVGIV

SEQ ID NO: 161394 - protein, 9 aa, Artificial Sequence
  Description of Artificial Sequence: Synthetic peptide
  Seed: SYRRPVGIS
SQRRPVGIY

SEQ ID NO: 161395 - protein, 10 aa, Artificial Sequence
  Description of Artificial Sequence: Synthetic peptide
  Seed: SLSPGMMMGM
SQSPGMMMGA

SEQ ID NO: 161396 - protein, 10 aa, Artificial Sequence
  Description of Artificial Sequence: Synthetic peptide
  Seed: SLSPGMMMGM
SQSPGMMMGI

SEQ ID NO: 161397 - protein, 10 aa, Artificial Sequence
  Description of Artificial Sequence: Synthetic peptide
  Seed: SLSPGMMMGM
SQSPGMMMGL

SEQ ID NO: 161398 - protein, 10 aa, Artificial Sequence
  Description of Artificial Sequence: Synthetic peptide
  Seed: SLSPGMMMGM
SQSPGMMMGM

SEQ ID NO: 161399 - protein, 10 aa, Artificial Sequence
  Description of Artificial Sequence: Synthetic peptide
  Seed: SLSPGMMMGM
SQSPGMMMGV

SEQ ID NO: 161400 - protein, 9 aa, Artificial Sequence
  Description of Artificial Sequence: Synthetic peptide
  Seed: SSSYRRPVG
SQSYRRPVA

SEQ ID NO: 161401 - protein, 9 aa, Artificial Sequence
  Description of Artificial Sequence: Synthetic peptide
  Seed: SSSYRRPVG
SQSYRRPVK

SEQ ID NO: 161402 - protein, 9 aa, Artificial Sequence
  Description of Artificial Sequence: Synthetic peptide
  Seed: SSSYRRPVG
SQSYRRPVV

SEQ ID NO: 161403 - protein, 9 aa, Artificial Sequence
  Description of Artificial Sequence: Synthetic peptide
  Seed: STVLGVSIL
SQVLGVSIF

SEQ ID NO: 161404 - protein, 9 aa, Artificial Sequence
  Description of Artificial Sequence: Synthetic peptide
  Seed: STVLGVSIL
SQVLGVSIM

SEQ ID NO: 161405 - protein, 9 aa, Artificial Sequence
  Description of Artificial Sequence: Synthetic peptide
  Seed: STVLGVSIL
SQVLGVSIW

SEQ ID NO: 161406 - protein, 9 aa, Artificial Sequence
  Description of Artificial Sequence: Synthetic peptide
  Seed: STVLGVSIL
SQVLGVSIY

SEQ ID NO: 161407 - protein, 9 aa, Artificial Sequence
  Description of Artificial Sequence: Synthetic peptide
  Seed: SSYRRPVGI
SQYRRPVGA

SEQ ID NO: 161408 - protein, 9 aa, Artificial Sequence
  Description of Artificial Sequence: Synthetic peptide
  Seed: SSYRRPVGI
SQYRRPVGF

SEQ ID NO: 161409 - protein, 9 aa, Artificial Sequence
  Description of Artificial Sequence: Synthetic peptide
  Seed: SSYRRPVGI
SQYRRPVGI

SEQ ID NO: 161410 - protein, 10 aa, Artificial Sequence
  Description of Artificial Sequence: Synthetic peptide
  Seed: SSYRRPVGIS
SQYRRPVGIA

SEQ ID NO: 161411 - protein, 10 aa, Artificial Sequence
  Description of Artificial Sequence: Synthetic peptide
  Seed: SSYRRPVGIS
SQYRRPVGIK

SEQ ID NO: 161412 - protein, 10 aa, Artificial Sequence
  Description of Artificial Sequence: Synthetic peptide
  Seed: SSYRRPVGIS
SQYRRPVGIR

SEQ ID NO: 161413 - protein, 10 aa, Artificial Sequence
  Description of Artificial Sequence: Synthetic peptide
  Seed: SSYRRPVGIS
SQYRRPVGIV

SEQ ID NO: 161414 - protein, 9 aa, Artificial Sequence
  Description of Artificial Sequence: Synthetic peptide
  Seed: SSYRRPVGI
SQYRRPVGK

SEQ ID NO: 161415 - protein, 9 aa, Artificial Sequence
  Description of Artificial Sequence: Synthetic peptide
  Seed: SSYRRPVGI
SQYRRPVGM

SEQ ID NO: 161416 - protein, 9 aa, Artificial Sequence
  Description of Artificial Sequence: Synthetic peptide
  Seed: SSYRRPVGI
SQYRRPVGW

SEQ ID NO: 161417 - protein, 9 aa, Artificial Sequence
  Description of Artificial Sequence: Synthetic peptide
  Seed: SSYRRPVGI
SQYRRPVGY

SEQ ID NO: 161418 - protein, 11 aa, Artificial Sequence
  Description of Artificial Sequence: Synthetic peptide
  Seed: SPGMMMGMFNM
SRGMMMGMFNA

SEQ ID NO: 161419 - protein, 11 aa, Artificial Sequence
  Description of Artificial Sequence: Synthetic peptide
  Seed: SPGMMMGMFNM
SRGMMMGMFNI

SEQ ID NO: 161420 - protein, 11 aa, Artificial Sequence
  Description of Artificial Sequence: Synthetic peptide
  Seed: SPGMMMGMFNM
SRGMMMGMFNL

SEQ ID NO: 161421 - protein, 11 aa, Artificial Sequence
  Description of Artificial Sequence: Synthetic peptide
  Seed: SPGMMMGMFNM
SRGMMMGMFNM

SEQ ID NO: 161422 - protein, 11 aa, Artificial Sequence
  Description of Artificial Sequence: Synthetic peptide
  Seed: SPGMMMGMFNM
SRGMMMGMFNT

SEQ ID NO: 161423 - protein, 11 aa, Artificial Sequence
  Description of Artificial Sequence: Synthetic peptide
  Seed: SPGMMMGMFNM
SRGMMMGMFNV

SEQ ID NO: 161424 - protein, 10 aa, Artificial Sequence
  Description of Artificial Sequence: Synthetic peptide
  Seed: SHGTGTGYTM
SRGTGTGYTL

SEQ ID NO: 161425 - protein, 9 aa, Artificial Sequence
  Description of Artificial Sequence: Synthetic peptide
  Seed: SNKMARLGK
SRKMARLGK

SEQ ID NO: 161426 - protein, 9 aa, Artificial Sequence
  Description of Artificial Sequence: Synthetic peptide
  Seed: SYRRPVGIS
SRRRPVGIK

SEQ ID NO: 161427 - protein, 10 aa, Artificial Sequence
  Description of Artificial Sequence: Synthetic peptide
  Seed: SYRRPVGISS
SRRRPVGISK

SEQ ID NO: 161428 - protein, 10 aa, Artificial Sequence
  Description of Artificial Sequence: Synthetic peptide
  Seed: SLSPGMMMGM
SRSPGMMMGV

SEQ ID NO: 161429 - protein, 10 aa, Artificial Sequence
  Description of Artificial Sequence: Synthetic peptide
  Seed: SSYRRPVGIS
SRYRRPVGIA

SEQ ID NO: 161430 - protein, 10 aa, Artificial Sequence
  Description of Artificial Sequence: Synthetic peptide
  Seed: SSYRRPVGIS
SRYRRPVGIK

SEQ ID NO: 161431 - protein, 10 aa, Artificial Sequence
  Description of Artificial Sequence: Synthetic peptide
  Seed: SSYRRPVGIS
SRYRRPVGIR

SEQ ID NO: 161432 - protein, 10 aa, Artificial Sequence
  Description of Artificial Sequence: Synthetic peptide
  Seed: SSYRRPVGIS
SRYRRPVGIV

SEQ ID NO: 161433 - protein, 8 aa, Artificial Sequence
  Description of Artificial Sequence: Synthetic peptide
  Seed: SSDDFALI
SSDDFALF

SEQ ID NO: 161434 - protein, 8 aa, Artificial Sequence
  Description of Artificial Sequence: Synthetic peptide
  Seed: SSDDFALI
SSDDFALL

SEQ ID NO: 161435 - protein, 8 aa, Artificial Sequence
  Description of Artificial Sequence: Synthetic peptide
  Seed: SSDDFALI
SSDDFALM

SEQ ID NO: 161436 - protein, 8 aa, Artificial Sequence
  Description of Artificial Sequence: Synthetic peptide
  Seed: SSDDFALI
SSDDFALV

SEQ ID NO: 161437 - protein, 11 aa, Artificial Sequence
  Description of Artificial Sequence: Synthetic peptide
  Seed: SPGMMMGMFNM
SSGMMMGMFNA

SEQ ID NO: 161438 - protein, 11 aa, Artificial Sequence
  Description of Artificial Sequence: Synthetic peptide
  Seed: SPGMMMGMFNM
SSGMMMGMFNI

SEQ ID NO: 161439 - protein, 11 aa, Artificial Sequence
  Description of Artificial Sequence: Synthetic peptide
  Seed: SPGMMMGMFNM
SSGMMMGMFNL

SEQ ID NO: 161440 - protein, 11 aa, Artificial Sequence
  Description of Artificial Sequence: Synthetic peptide
  Seed: SPGMMMGMFNM
SSGMMMGMFNM

SEQ ID NO: 161441 - protein, 11 aa, Artificial Sequence
  Description of Artificial Sequence: Synthetic peptide
  Seed: SPGMMMGMFNM
SSGMMMGMFNT

SEQ ID NO: 161442 - protein, 11 aa, Artificial Sequence
  Description of Artificial Sequence: Synthetic peptide
  Seed: SPGMMMGMFNM
SSGMMMGMFNV

SEQ ID NO: 161443 - protein, 9 aa, Artificial Sequence
  Description of Artificial Sequence: Synthetic peptide
  Seed: SNKMARLGK
SSKMARLGA

SEQ ID NO: 161444 - protein, 9 aa, Artificial Sequence
  Description of Artificial Sequence: Synthetic peptide
  Seed: SNKMARLGK
SSKMARLGC

SEQ ID NO: 161445 - protein, 9 aa, Artificial Sequence
  Description of Artificial Sequence: Synthetic peptide
  Seed: SNKMARLGK
SSKMARLGE

SEQ ID NO: 161446 - protein, 9 aa, Artificial Sequence
  Description of Artificial Sequence: Synthetic peptide
  Seed: SNKMARLGK
SSKMARLGF

SEQ ID NO: 161447 - protein, 9 aa, Artificial Sequence
  Description of Artificial Sequence: Synthetic peptide
  Seed: SNKMARLGK
SSKMARLGG

SEQ ID NO: 161448 - protein, 9 aa, Artificial Sequence
  Description of Artificial Sequence: Synthetic peptide
  Seed: SNKMARLGK
SSKMARLGH

SEQ ID NO: 161449 - protein, 9 aa, Artificial Sequence
  Description of Artificial Sequence: Synthetic peptide
  Seed: SNKMARLGK
SSKMARLGI

SEQ ID NO: 161450 - protein, 9 aa, Artificial Sequence
  Description of Artificial Sequence: Synthetic peptide
  Seed: SNKMARLGK
SSKMARLGK

SEQ ID NO: 161451 - protein, 9 aa, Artificial Sequence
  Description of Artificial Sequence: Synthetic peptide
  Seed: SNKMARLGK
SSKMARLGL

SEQ ID NO: 161452 - protein, 9 aa, Artificial Sequence
  Description of Artificial Sequence: Synthetic peptide
  Seed: SNKMARLGK
SSKMARLGM

SEQ ID NO: 161453 - protein, 9 aa, Artificial Sequence
  Description of Artificial Sequence: Synthetic peptide
  Seed: SNKMARLGK
SSKMARLGN

SEQ ID NO: 161454 - protein, 9 aa, Artificial Sequence
  Description of Artificial Sequence: Synthetic peptide
  Seed: SNKMARLGK
SSKMARLGP

SEQ ID NO: 161455 - protein, 9 aa, Artificial Sequence
  Description of Artificial Sequence: Synthetic peptide
  Seed: SNKMARLGK
SSKMARLGQ

SEQ ID NO: 161456 - protein, 9 aa, Artificial Sequence
  Description of Artificial Sequence: Synthetic peptide
  Seed: SNKMARLGK
SSKMARLGR

SEQ ID NO: 161457 - protein, 9 aa, Artificial Sequence
  Description of Artificial Sequence: Synthetic peptide
  Seed: SNKMARLGK
SSKMARLGS

SEQ ID NO: 161458 - protein, 9 aa, Artificial Sequence
  Description of Artificial Sequence: Synthetic peptide
  Seed: SNKMARLGK
SSKMARLGT

SEQ ID NO: 161459 - protein, 9 aa, Artificial Sequence
  Description of Artificial Sequence: Synthetic peptide
  Seed: SNKMARLGK
SSKMARLGV

SEQ ID NO: 161460 - protein, 9 aa, Artificial Sequence
  Description of Artificial Sequence: Synthetic peptide
  Seed: SNKMARLGK
SSKMARLGY

SEQ ID NO: 161461 - protein, 9 aa, Artificial Sequence
  Description of Artificial Sequence: Synthetic peptide
  Seed: SYRRPVGIS
SSRRPVGIA

SEQ ID NO: 161462 - protein, 9 aa, Artificial Sequence
  Description of Artificial Sequence: Synthetic peptide
  Seed: SYRRPVGIS
SSRRPVGIC

SEQ ID NO: 161463 - protein, 9 aa, Artificial Sequence
  Description of Artificial Sequence: Synthetic peptide
  Seed: SYRRPVGIS
SSRRPVGIE

SEQ ID NO: 161464 - protein, 9 aa, Artificial Sequence
  Description of Artificial Sequence: Synthetic peptide
  Seed: SYRRPVGIS
SSRRPVGIF

SEQ ID NO: 161465 - protein, 9 aa, Artificial Sequence
  Description of Artificial Sequence: Synthetic peptide
  Seed: SYRRPVGIS
SSRRPVGIG

SEQ ID NO: 161466 - protein, 9 aa, Artificial Sequence
  Description of Artificial Sequence: Synthetic peptide
  Seed: SYRRPVGIS
SSRRPVGIH

SEQ ID NO: 161467 - protein, 9 aa, Artificial Sequence
  Description of Artificial Sequence: Synthetic peptide
  Seed: SYRRPVGIS
SSRRPVGII

SEQ ID NO: 161468 - protein, 9 aa, Artificial Sequence
  Description of Artificial Sequence: Synthetic peptide
  Seed: SYRRPVGIS
SSRRPVGIK

SEQ ID NO: 161469 - protein, 9 aa, Artificial Sequence
  Description of Artificial Sequence: Synthetic peptide
  Seed: SYRRPVGIS
SSRRPVGIL

SEQ ID NO: 161470 - protein, 9 aa, Artificial Sequence
  Description of Artificial Sequence: Synthetic peptide
  Seed: SYRRPVGIS
SSRRPVGIM

SEQ ID NO: 161471 - protein, 9 aa, Artificial Sequence
  Description of Artificial Sequence: Synthetic peptide
  Seed: SYRRPVGIS
SSRRPVGIN

SEQ ID NO: 161472 - protein, 9 aa, Artificial Sequence
  Description of Artificial Sequence: Synthetic peptide
  Seed: SYRRPVGIS
SSRRPVGIP

SEQ ID NO: 161473 - protein, 9 aa, Artificial Sequence
  Description of Artificial Sequence: Synthetic peptide
  Seed: SYRRPVGIS
SSRRPVGIQ

SEQ ID NO: 161474 - protein, 9 aa, Artificial Sequence
  Description of Artificial Sequence: Synthetic peptide
  Seed: SYRRPVGIS
SSRRPVGIR

SEQ ID NO: 161475 - protein, 9 aa, Artificial Sequence
  Description of Artificial Sequence: Synthetic peptide
  Seed: SYRRPVGIS
SSRRPVGIS

SEQ ID NO: 161476 - protein, 10 aa, Artificial Sequence
  Description of Artificial Sequence: Synthetic peptide
  Seed: SYRRPVGISS
SSRRPVGISA

SEQ ID NO: 161477 - protein, 10 aa, Artificial Sequence
  Description of Artificial Sequence: Synthetic peptide
  Seed: SYRRPVGISS
SSRRPVGISC

SEQ ID NO: 161478 - protein, 10 aa, Artificial Sequence
  Description of Artificial Sequence: Synthetic peptide
  Seed: SYRRPVGISS
SSRRPVGISE

SEQ ID NO: 161479 - protein, 10 aa, Artificial Sequence
  Description of Artificial Sequence: Synthetic peptide
  Seed: SYRRPVGISS
SSRRPVGISF

SEQ ID NO: 161480 - protein, 10 aa, Artificial Sequence
  Description of Artificial Sequence: Synthetic peptide
  Seed: SYRRPVGISS
SSRRPVGISG

SEQ ID NO: 161481 - protein, 10 aa, Artificial Sequence
  Description of Artificial Sequence: Synthetic peptide
  Seed: SYRRPVGISS
SSRRPVGISH

SEQ ID NO: 161482 - protein, 10 aa, Artificial Sequence
  Description of Artificial Sequence: Synthetic peptide
  Seed: SYRRPVGISS
SSRRPVGISI

SEQ ID NO: 161483 - protein, 10 aa, Artificial Sequence
  Description of Artificial Sequence: Synthetic peptide
  Seed: SYRRPVGISS
SSRRPVGISK

SEQ ID NO: 161484 - protein, 10 aa, Artificial Sequence
  Description of Artificial Sequence: Synthetic peptide
  Seed: SYRRPVGISS
SSRRPVGISL

SEQ ID NO: 161485 - protein, 10 aa, Artificial Sequence
  Description of Artificial Sequence: Synthetic peptide
  Seed: SYRRPVGISS
SSRRPVGISM

SEQ ID NO: 161486 - protein, 10 aa, Artificial Sequence
  Description of Artificial Sequence: Synthetic peptide
  Seed: SYRRPVGISS
SSRRPVGISN

SEQ ID NO: 161487 - protein, 10 aa, Artificial Sequence
  Description of Artificial Sequence: Synthetic peptide
  Seed: SYRRPVGISS
SSRRPVGISP

SEQ ID NO: 161488 - protein, 10 aa, Artificial Sequence
  Description of Artificial Sequence: Synthetic peptide
  Seed: SYRRPVGISS
SSRRPVGISQ

SEQ ID NO: 161489 - protein, 10 aa, Artificial Sequence
  Description of Artificial Sequence: Synthetic peptide
  Seed: SYRRPVGISS
SSRRPVGISR

SEQ ID NO: 161490 - protein, 10 aa, Artificial Sequence
  Description of Artificial Sequence: Synthetic peptide
  Seed: SYRRPVGISS
SSRRPVGISS

SEQ ID NO: 161491 - protein, 10 aa, Artificial Sequence
  Description of Artificial Sequence: Synthetic peptide
  Seed: SYRRPVGISS
SSRRPVGIST

SEQ ID NO: 161492 - protein, 10 aa, Artificial Sequence
  Description of Artificial Sequence: Synthetic peptide
  Seed: SYRRPVGISS
SSRRPVGISV

SEQ ID NO: 161493 - protein, 10 aa, Artificial Sequence
  Description of Artificial Sequence: Synthetic peptide
  Seed: SYRRPVGISS
SSRRPVGISY

SEQ ID NO: 161494 - protein, 9 aa, Artificial Sequence
  Description of Artificial Sequence: Synthetic peptide
  Seed: SYRRPVGIS
SSRRPVGIT

SEQ ID NO: 161495 - protein, 9 aa, Artificial Sequence
  Description of Artificial Sequence: Synthetic peptide
  Seed: SYRRPVGIS
SSRRPVGIV

SEQ ID NO: 161496 - protein, 9 aa, Artificial Sequence
  Description of Artificial Sequence: Synthetic peptide
  Seed: SYRRPVGIS
SSRRPVGIY

SEQ ID NO: 161497 - protein, 10 aa, Artificial Sequence
  Description of Artificial Sequence: Synthetic peptide
  Seed: SLSPGMMMGM
SSSPGMMMGL

SEQ ID NO: 161498 - protein, 10 aa, Artificial Sequence
  Description of Artificial Sequence: Synthetic peptide
  Seed: SLSPGMMMGM
SSSPGMMMGV

SEQ ID NO: 161499 - protein, 9 aa, Artificial Sequence
  Description of Artificial Sequence: Synthetic peptide
  Seed: SSSYRRPVG
SSSYRRPVA

SEQ ID NO: 161500 - protein, 9 aa, Artificial Sequence
  Description of Artificial Sequence: Synthetic peptide
  Seed: SSSYRRPVG
SSSYRRPVI

SEQ ID NO: 161501 - protein, 9 aa, Artificial Sequence
  Description of Artificial Sequence: Synthetic peptide
  Seed: SSSYRRPVG
SSSYRRPVK

SEQ ID NO: 161502 - protein, 9 aa, Artificial Sequence
  Description of Artificial Sequence: Synthetic peptide
  Seed: SSSYRRPVG
SSSYRRPVL

SEQ ID NO: 161503 - protein, 9 aa, Artificial Sequence
  Description of Artificial Sequence: Synthetic peptide
  Seed: SSSYRRPVG
SSSYRRPVM

SEQ ID NO: 161504 - protein, 9 aa, Artificial Sequence
  Description of Artificial Sequence: Synthetic peptide
  Seed: SSSYRRPVG
SSSYRRPVR

SEQ ID NO: 161505 - protein, 9 aa, Artificial Sequence
  Description of Artificial Sequence: Synthetic peptide
  Seed: SSSYRRPVG
SSSYRRPVS

SEQ ID NO: 161506 - protein, 9 aa, Artificial Sequence
  Description of Artificial Sequence: Synthetic peptide
  Seed: SSSYRRPVG
SSSYRRPVT

SEQ ID NO: 161507 - protein, 9 aa, Artificial Sequence
  Description of Artificial Sequence: Synthetic peptide
  Seed: SSSYRRPVG
SSSYRRPVV

SEQ ID NO: 161508 - protein, 9 aa, Artificial Sequence
  Description of Artificial Sequence: Synthetic peptide
  Seed: SSSYRRPVG
SSSYRRPVY

SEQ ID NO: 161509 - protein, 9 aa, Artificial Sequence
  Description of Artificial Sequence: Synthetic peptide
  Seed: STVLGVSIL
SSVLGVSIF

SEQ ID NO: 161510 - protein, 9 aa, Artificial Sequence
  Description of Artificial Sequence: Synthetic peptide
  Seed: STVLGVSIL
SSVLGVSII

SEQ ID NO: 161511 - protein, 9 aa, Artificial Sequence
  Description of Artificial Sequence: Synthetic peptide
  Seed: STVLGVSIL
SSVLGVSIL

SEQ ID NO: 161512 - protein, 9 aa, Artificial Sequence
  Description of Artificial Sequence: Synthetic peptide
  Seed: STVLGVSIL
SSVLGVSIM

SEQ ID NO: 161513 - protein, 9 aa, Artificial Sequence
  Description of Artificial Sequence: Synthetic peptide
  Seed: STVLGVSIL
SSVLGVSIV

SEQ ID NO: 161514 - protein, 9 aa, Artificial Sequence
  Description of Artificial Sequence: Synthetic peptide
  Seed: STVLGVSIL
SSVLGVSIW

SEQ ID NO: 161515 - protein, 9 aa, Artificial Sequence
  Description of Artificial Sequence: Synthetic peptide
  Seed: STVLGVSIL
SSVLGVSIY

SEQ ID NO: 161516 - protein, 9 aa, Artificial Sequence
  Description of Artificial Sequence: Synthetic peptide
  Seed: SSYRRPVGI
SSYRRPVGA

SEQ ID NO: 161517 - protein, 9 aa, Artificial Sequence
  Description of Artificial Sequence: Synthetic peptide
  Seed: SSYRRPVGI
SSYRRPVGC

SEQ ID NO: 161518 - protein, 9 aa, Artificial Sequence
  Description of Artificial Sequence: Synthetic peptide
  Seed: SSYRRPVGI
SSYRRPVGF

SEQ ID NO: 161519 - protein, 9 aa, Artificial Sequence
  Description of Artificial Sequence: Synthetic peptide
  Seed: SSYRRPVGI
SSYRRPVGG

SEQ ID NO: 161520 - protein, 10 aa, Artificial Sequence
  Description of Artificial Sequence: Synthetic peptide
  Seed: SSYRRPVGIS
SSYRRPVGIA

SEQ ID NO: 161521 - protein, 10 aa, Artificial Sequence
  Description of Artificial Sequence: Synthetic peptide
  Seed: SSYRRPVGIS
SSYRRPVGII

SEQ ID NO: 161522 - protein, 10 aa, Artificial Sequence
  Description of Artificial Sequence: Synthetic peptide
  Seed: SSYRRPVGIS
SSYRRPVGIK

SEQ ID NO: 161523 - protein, 10 aa, Artificial Sequence
  Description of Artificial Sequence: Synthetic peptide
  Seed: SSYRRPVGIS
SSYRRPVGIL

SEQ ID NO: 161524 - protein, 10 aa, Artificial Sequence
  Description of Artificial Sequence: Synthetic peptide
  Seed: SSYRRPVGIS
SSYRRPVGIM

SEQ ID NO: 161525 - protein, 10 aa, Artificial Sequence
  Description of Artificial Sequence: Synthetic peptide
  Seed: SSYRRPVGIS
SSYRRPVGIR

SEQ ID NO: 161526 - protein, 10 aa, Artificial Sequence
  Description of Artificial Sequence: Synthetic peptide
  Seed: SSYRRPVGIS
SSYRRPVGIV

SEQ ID NO: 161527 - protein, 10 aa, Artificial Sequence
  Description of Artificial Sequence: Synthetic peptide
  Seed: SSYRRPVGIS
SSYRRPVGIY

SEQ ID NO: 161528 - protein, 9 aa, Artificial Sequence
  Description of Artificial Sequence: Synthetic peptide
  Seed: SSYRRPVGI
SSYRRPVGK

SEQ ID NO: 161529 - protein, 9 aa, Artificial Sequence
  Description of Artificial Sequence: Synthetic peptide
  Seed: SSYRRPVGI
SSYRRPVGL

SEQ ID NO: 161530 - protein, 9 aa, Artificial Sequence
  Description of Artificial Sequence: Synthetic peptide
  Seed: SSYRRPVGI
SSYRRPVGM

SEQ ID NO: 161531 - protein, 9 aa, Artificial Sequence
  Description of Artificial Sequence: Synthetic peptide
  Seed: SSYRRPVGI
SSYRRPVGR

SEQ ID NO: 161532 - protein, 9 aa, Artificial Sequence
  Description of Artificial Sequence: Synthetic peptide
  Seed: SSYRRPVGI
SSYRRPVGS

SEQ ID NO: 161533 - protein, 9 aa, Artificial Sequence
  Description of Artificial Sequence: Synthetic peptide
  Seed: SSYRRPVGI
SSYRRPVGT

SEQ ID NO: 161534 - protein, 9 aa, Artificial Sequence
  Description of Artificial Sequence: Synthetic peptide
  Seed: SSYRRPVGI
SSYRRPVGV

SEQ ID NO: 161535 - protein, 9 aa, Artificial Sequence
  Description of Artificial Sequence: Synthetic peptide
  Seed: SSYRRPVGI
SSYRRPVGW

SEQ ID NO: 161536 - protein, 9 aa, Artificial Sequence
  Description of Artificial Sequence: Synthetic peptide
  Seed: SSYRRPVGI
SSYRRPVGY

SEQ ID NO: 161537 - protein, 8 aa, Artificial Sequence
  Description of Artificial Sequence: Synthetic peptide
  Seed: SSDDFALI
STDDFALF

SEQ ID NO: 161538 - protein, 8 aa, Artificial Sequence
  Description of Artificial Sequence: Synthetic peptide
  Seed: SSDDFALI
STDDFALI

SEQ ID NO: 161539 - protein, 8 aa, Artificial Sequence
  Description of Artificial Sequence: Synthetic peptide
  Seed: SSDDFALI
STDDFALL

SEQ ID NO: 161540 - protein, 8 aa, Artificial Sequence
  Description of Artificial Sequence: Synthetic peptide
  Seed: SSDDFALI
STDDFALM

SEQ ID NO: 161541 - protein, 8 aa, Artificial Sequence
  Description of Artificial Sequence: Synthetic peptide
  Seed: SSDDFALI
STDDFALV

SEQ ID NO: 161542 - protein, 9 aa, Artificial Sequence
  Description of Artificial Sequence: Synthetic peptide
  Seed: SMELPSFGV
STELPSFGV

SEQ ID NO: 161543 - protein, 11 aa, Artificial Sequence
  Description of Artificial Sequence: Synthetic peptide
  Seed: SPGMMMGMFNM
STGMMMGMFNA

SEQ ID NO: 161544 - protein, 11 aa, Artificial Sequence
  Description of Artificial Sequence: Synthetic peptide
  Seed: SPGMMMGMFNM
STGMMMGMFNI

SEQ ID NO: 161545 - protein, 11 aa, Artificial Sequence
  Description of Artificial Sequence: Synthetic peptide
  Seed: SPGMMMGMFNM
STGMMMGMFNL

SEQ ID NO: 161546 - protein, 11 aa, Artificial Sequence
  Description of Artificial Sequence: Synthetic peptide
  Seed: SPGMMMGMFNM
STGMMMGMFNM

SEQ ID NO: 161547 - protein, 11 aa, Artificial Sequence
  Description of Artificial Sequence: Synthetic peptide
  Seed: SPGMMMGMFNM
STGMMMGMFNT

SEQ ID NO: 161548 - protein, 11 aa, Artificial Sequence
  Description of Artificial Sequence: Synthetic peptide
  Seed: SPGMMMGMFNM
STGMMMGMFNV

SEQ ID NO: 161549 - protein, 9 aa, Artificial Sequence
  Description of Artificial Sequence: Synthetic peptide
  Seed: SNKMARLGK
STKMARLGA

SEQ ID NO: 161550 - protein, 9 aa, Artificial Sequence
  Description of Artificial Sequence: Synthetic peptide
  Seed: SNKMARLGK
STKMARLGC

SEQ ID NO: 161551 - protein, 9 aa, Artificial Sequence
  Description of Artificial Sequence: Synthetic peptide
  Seed: SNKMARLGK
STKMARLGE

SEQ ID NO: 161552 - protein, 9 aa, Artificial Sequence
  Description of Artificial Sequence: Synthetic peptide
  Seed: SNKMARLGK
STKMARLGF

SEQ ID NO: 161553 - protein, 9 aa, Artificial Sequence
  Description of Artificial Sequence: Synthetic peptide
  Seed: SNKMARLGK
STKMARLGG

SEQ ID NO: 161554 - protein, 9 aa, Artificial Sequence
  Description of Artificial Sequence: Synthetic peptide
  Seed: SNKMARLGK
STKMARLGH

SEQ ID NO: 161555 - protein, 9 aa, Artificial Sequence
  Description of Artificial Sequence: Synthetic peptide
  Seed: SNKMARLGK
STKMARLGI

SEQ ID NO: 161556 - protein, 9 aa, Artificial Sequence
  Description of Artificial Sequence: Synthetic peptide
  Seed: SNKMARLGK
STKMARLGK

SEQ ID NO: 161557 - protein, 9 aa, Artificial Sequence
  Description of Artificial Sequence: Synthetic peptide
  Seed: SNKMARLGK
STKMARLGL

SEQ ID NO: 161558 - protein, 9 aa, Artificial Sequence
  Description of Artificial Sequence: Synthetic peptide
  Seed: SNKMARLGK
STKMARLGM

SEQ ID NO: 161559 - protein, 9 aa, Artificial Sequence
  Description of Artificial Sequence: Synthetic peptide
  Seed: SNKMARLGK
STKMARLGN

SEQ ID NO: 161560 - protein, 9 aa, Artificial Sequence
  Description of Artificial Sequence: Synthetic peptide
  Seed: SNKMARLGK
STKMARLGP

SEQ ID NO: 161561 - protein, 9 aa, Artificial Sequence
  Description of Artificial Sequence: Synthetic peptide
  Seed: SNKMARLGK
STKMARLGQ

SEQ ID NO: 161562 - protein, 9 aa, Artificial Sequence
  Description of Artificial Sequence: Synthetic peptide
  Seed: SNKMARLGK
STKMARLGR

SEQ ID NO: 161563 - protein, 9 aa, Artificial Sequence
  Description of Artificial Sequence: Synthetic peptide
  Seed: SNKMARLGK
STKMARLGS

SEQ ID NO: 161564 - protein, 9 aa, Artificial Sequence
  Description of Artificial Sequence: Synthetic peptide
  Seed: SNKMARLGK
STKMARLGT

SEQ ID NO: 161565 - protein, 9 aa, Artificial Sequence
  Description of Artificial Sequence: Synthetic peptide
  Seed: SNKMARLGK
STKMARLGV

SEQ ID NO: 161566 - protein, 9 aa, Artificial Sequence
  Description of Artificial Sequence: Synthetic peptide
  Seed: SNKMARLGK
STKMARLGW

SEQ ID NO: 161567 - protein, 9 aa, Artificial Sequence
  Description of Artificial Sequence: Synthetic peptide
  Seed: SNKMARLGK
STKMARLGY

SEQ ID NO: 161568 - protein, 9 aa, Artificial Sequence
  Description of Artificial Sequence: Synthetic peptide
  Seed: SYRRPVGIS
STRRPVGIA

SEQ ID NO: 161569 - protein, 9 aa, Artificial Sequence
  Description of Artificial Sequence: Synthetic peptide
  Seed: SYRRPVGIS
STRRPVGIC

SEQ ID NO: 161570 - protein, 9 aa, Artificial Sequence
  Description of Artificial Sequence: Synthetic peptide
  Seed: SYRRPVGIS
STRRPVGIE

SEQ ID NO: 161571 - protein, 9 aa, Artificial Sequence
  Description of Artificial Sequence: Synthetic peptide
  Seed: SYRRPVGIS
STRRPVGIF

SEQ ID NO: 161572 - protein, 9 aa, Artificial Sequence
  Description of Artificial Sequence: Synthetic peptide
  Seed: SYRRPVGIS
STRRPVGIG

SEQ ID NO: 161573 - protein, 9 aa, Artificial Sequence
  Description of Artificial Sequence: Synthetic peptide
  Seed: SYRRPVGIS
STRRPVGIH

SEQ ID NO: 161574 - protein, 9 aa, Artificial Sequence
  Description of Artificial Sequence: Synthetic peptide
  Seed: SYRRPVGIS
STRRPVGII

SEQ ID NO: 161575 - protein, 9 aa, Artificial Sequence
  Description of Artificial Sequence: Synthetic peptide
  Seed: SYRRPVGIS
STRRPVGIK

SEQ ID NO: 161576 - protein, 9 aa, Artificial Sequence
  Description of Artificial Sequence: Synthetic peptide
  Seed: SYRRPVGIS
STRRPVGIL

SEQ ID NO: 161577 - protein, 9 aa, Artificial Sequence
  Description of Artificial Sequence: Synthetic peptide
  Seed: SYRRPVGIS
STRRPVGIM

SEQ ID NO: 161578 - protein, 9 aa, Artificial Sequence
  Description of Artificial Sequence: Synthetic peptide
  Seed: SYRRPVGIS
STRRPVGIN

SEQ ID NO: 161579 - protein, 9 aa, Artificial Sequence
  Description of Artificial Sequence: Synthetic peptide
  Seed: SYRRPVGIS
STRRPVGIP

SEQ ID NO: 161580 - protein, 9 aa, Artificial Sequence
  Description of Artificial Sequence: Synthetic peptide
  Seed: SYRRPVGIS
STRRPVGIQ

SEQ ID NO: 161581 - protein, 9 aa, Artificial Sequence
  Description of Artificial Sequence: Synthetic peptide
  Seed: SYRRPVGIS
STRRPVGIR

SEQ ID NO: 161582 - protein, 9 aa, Artificial Sequence
  Description of Artificial Sequence: Synthetic peptide
  Seed: SYRRPVGIS
STRRPVGIS

SEQ ID NO: 161583 - protein, 10 aa, Artificial Sequence
  Description of Artificial Sequence: Synthetic peptide
  Seed: SYRRPVGISS
STRRPVGISA

SEQ ID NO: 161584 - protein, 10 aa, Artificial Sequence
  Description of Artificial Sequence: Synthetic peptide
  Seed: SYRRPVGISS
STRRPVGISC

SEQ ID NO: 161585 - protein, 10 aa, Artificial Sequence
  Description of Artificial Sequence: Synthetic peptide
  Seed: SYRRPVGISS
STRRPVGISE

SEQ ID NO: 161586 - protein, 10 aa, Artificial Sequence
  Description of Artificial Sequence: Synthetic peptide
  Seed: SYRRPVGISS
STRRPVGISF

SEQ ID NO: 161587 - protein, 10 aa, Artificial Sequence
  Description of Artificial Sequence: Synthetic peptide
  Seed: SYRRPVGISS
STRRPVGISG

SEQ ID NO: 161588 - protein, 10 aa, Artificial Sequence
  Description of Artificial Sequence: Synthetic peptide
  Seed: SYRRPVGISS
STRRPVGISH

SEQ ID NO: 161589 - protein, 10 aa, Artificial Sequence
  Description of Artificial Sequence: Synthetic peptide
  Seed: SYRRPVGISS
STRRPVGISI

SEQ ID NO: 161590 - protein, 10 aa, Artificial Sequence
  Description of Artificial Sequence: Synthetic peptide
  Seed: SYRRPVGISS
STRRPVGISK

SEQ ID NO: 161591 - protein, 10 aa, Artificial Sequence
  Description of Artificial Sequence: Synthetic peptide
  Seed: SYRRPVGISS
STRRPVGISL

SEQ ID NO: 161592 - protein, 10 aa, Artificial Sequence
  Description of Artificial Sequence: Synthetic peptide
  Seed: SYRRPVGISS
STRRPVGISM

SEQ ID NO: 161593 - protein, 10 aa, Artificial Sequence
  Description of Artificial Sequence: Synthetic peptide
  Seed: SYRRPVGISS
STRRPVGISN

SEQ ID NO: 161594 - protein, 10 aa, Artificial Sequence
  Description of Artificial Sequence: Synthetic peptide
  Seed: SYRRPVGISS
STRRPVGISP

SEQ ID NO: 161595 - protein, 10 aa, Artificial Sequence
  Description of Artificial Sequence: Synthetic peptide
  Seed: SYRRPVGISS
STRRPVGISQ

SEQ ID NO: 161596 - protein, 10 aa, Artificial Sequence
  Description of Artificial Sequence: Synthetic peptide
  Seed: SYRRPVGISS
STRRPVGISR

SEQ ID NO: 161597 - protein, 10 aa, Artificial Sequence
  Description of Artificial Sequence: Synthetic peptide
  Seed: SYRRPVGISS
STRRPVGISS

SEQ ID NO: 161598 - protein, 10 aa, Artificial Sequence
  Description of Artificial Sequence: Synthetic peptide
  Seed: SYRRPVGISS
STRRPVGIST

SEQ ID NO: 161599 - protein, 10 aa, Artificial Sequence
  Description of Artificial Sequence: Synthetic peptide
  Seed: SYRRPVGISS
STRRPVGISV

SEQ ID NO: 161600 - protein, 10 aa, Artificial Sequence
  Description of Artificial Sequence: Synthetic peptide
  Seed: SYRRPVGISS
STRRPVGISY

SEQ ID NO: 161601 - protein, 9 aa, Artificial Sequence
  Description of Artificial Sequence: Synthetic peptide
  Seed: SYRRPVGIS
STRRPVGIT

SEQ ID NO: 161602 - protein, 9 aa, Artificial Sequence
  Description of Artificial Sequence: Synthetic peptide
  Seed: SYRRPVGIS
STRRPVGIV

SEQ ID NO: 161603 - protein, 9 aa, Artificial Sequence
  Description of Artificial Sequence: Synthetic peptide
  Seed: SYRRPVGIS
STRRPVGIY

SEQ ID NO: 161604 - protein, 10 aa, Artificial Sequence
  Description of Artificial Sequence: Synthetic peptide
  Seed: SLSPGMMMGM
STSPGMMMGA

SEQ ID NO: 161605 - protein, 10 aa, Artificial Sequence
  Description of Artificial Sequence: Synthetic peptide
  Seed: SLSPGMMMGM
STSPGMMMGI

SEQ ID NO: 161606 - protein, 10 aa, Artificial Sequence
  Description of Artificial Sequence: Synthetic peptide
  Seed: SLSPGMMMGM
STSPGMMMGL

SEQ ID NO: 161607 - protein, 10 aa, Artificial Sequence
  Description of Artificial Sequence: Synthetic peptide
  Seed: SLSPGMMMGM
STSPGMMMGV

SEQ ID NO: 161608 - protein, 9 aa, Artificial Sequence
  Description of Artificial Sequence: Synthetic peptide
  Seed: SSSYRRPVG
STSYRRPVA

SEQ ID NO: 161609 - protein, 9 aa, Artificial Sequence
  Description of Artificial Sequence: Synthetic peptide
  Seed: SSSYRRPVG
STSYRRPVG

SEQ ID NO: 161610 - protein, 9 aa, Artificial Sequence
  Description of Artificial Sequence: Synthetic peptide
  Seed: SSSYRRPVG
STSYRRPVI

SEQ ID NO: 161611 - protein, 9 aa, Artificial Sequence
  Description of Artificial Sequence: Synthetic peptide
  Seed: SSSYRRPVG
STSYRRPVK

SEQ ID NO: 161612 - protein, 9 aa, Artificial Sequence
  Description of Artificial Sequence: Synthetic peptide
  Seed: SSSYRRPVG
STSYRRPVL

SEQ ID NO: 161613 - protein, 9 aa, Artificial Sequence
  Description of Artificial Sequence: Synthetic peptide
  Seed: SSSYRRPVG
STSYRRPVM

SEQ ID NO: 161614 - protein, 9 aa, Artificial Sequence
  Description of Artificial Sequence: Synthetic peptide
  Seed: SSSYRRPVG
STSYRRPVR

SEQ ID NO: 161615 - protein, 9 aa, Artificial Sequence
  Description of Artificial Sequence: Synthetic peptide
  Seed: SSSYRRPVG
STSYRRPVS

SEQ ID NO: 161616 - protein, 9 aa, Artificial Sequence
  Description of Artificial Sequence: Synthetic peptide
  Seed: SSSYRRPVG
STSYRRPVT

SEQ ID NO: 161617 - protein, 9 aa, Artificial Sequence
  Description of Artificial Sequence: Synthetic peptide
  Seed: SSSYRRPVG
STSYRRPVV

SEQ ID NO: 161618 - protein, 9 aa, Artificial Sequence
  Description of Artificial Sequence: Synthetic peptide
  Seed: SSSYRRPVG
STSYRRPVY

SEQ ID NO: 161619 - protein, 9 aa, Artificial Sequence
  Description of Artificial Sequence: Synthetic peptide
  Seed: STVLGVSIL
STVLGVSIA

SEQ ID NO: 161620 - protein, 9 aa, Artificial Sequence
  Description of Artificial Sequence: Synthetic peptide
  Seed: STVLGVSIL
STVLGVSIF

SEQ ID NO: 161621 - protein, 9 aa, Artificial Sequence
  Description of Artificial Sequence: Synthetic peptide
  Seed: STVLGVSIL
STVLGVSII

SEQ ID NO: 161622 - protein, 9 aa, Artificial Sequence
  Description of Artificial Sequence: Synthetic peptide
  Seed: STVLGVSIL
STVLGVSIM

SEQ ID NO: 161623 - protein, 9 aa, Artificial Sequence
  Description of Artificial Sequence: Synthetic peptide
  Seed: STVLGVSIL
STVLGVSIV

SEQ ID NO: 161624 - protein, 9 aa, Artificial Sequence
  Description of Artificial Sequence: Synthetic peptide
  Seed: STVLGVSIL
STVLGVSIW

SEQ ID NO: 161625 - protein, 9 aa, Artificial Sequence
  Description of Artificial Sequence: Synthetic peptide
  Seed: STVLGVSIL
STVLGVSIY

SEQ ID NO: 161626 - protein, 9 aa, Artificial Sequence
  Description of Artificial Sequence: Synthetic peptide
  Seed: SSYRRPVGI
STYRRPVGA

SEQ ID NO: 161627 - protein, 9 aa, Artificial Sequence
  Description of Artificial Sequence: Synthetic peptide
  Seed: SSYRRPVGI
STYRRPVGC

SEQ ID NO: 161628 - protein, 9 aa, Artificial Sequence
  Description of Artificial Sequence: Synthetic peptide
  Seed: SSYRRPVGI
STYRRPVGF

SEQ ID NO: 161629 - protein, 9 aa, Artificial Sequence
  Description of Artificial Sequence: Synthetic peptide
  Seed: SSYRRPVGI
STYRRPVGG

SEQ ID NO: 161630 - protein, 9 aa, Artificial Sequence
  Description of Artificial Sequence: Synthetic peptide
  Seed: SSYRRPVGI
STYRRPVGH

SEQ ID NO: 161631 - protein, 9 aa, Artificial Sequence
  Description of Artificial Sequence: Synthetic peptide
  Seed: SSYRRPVGI
STYRRPVGI

SEQ ID NO: 161632 - protein, 10 aa, Artificial Sequence
  Description of Artificial Sequence: Synthetic peptide
  Seed: SSYRRPVGIS
STYRRPVGIA

SEQ ID NO: 161633 - protein, 10 aa, Artificial Sequence
  Description of Artificial Sequence: Synthetic peptide
  Seed: SSYRRPVGIS
STYRRPVGIG

SEQ ID NO: 161634 - protein, 10 aa, Artificial Sequence
  Description of Artificial Sequence: Synthetic peptide
  Seed: SSYRRPVGIS
STYRRPVGII

SEQ ID NO: 161635 - protein, 10 aa, Artificial Sequence
  Description of Artificial Sequence: Synthetic peptide
  Seed: SSYRRPVGIS
STYRRPVGIK

SEQ ID NO: 161636 - protein, 10 aa, Artificial Sequence
  Description of Artificial Sequence: Synthetic peptide
  Seed: SSYRRPVGIS
STYRRPVGIL

SEQ ID NO: 161637 - protein, 10 aa, Artificial Sequence
  Description of Artificial Sequence: Synthetic peptide
  Seed: SSYRRPVGIS
STYRRPVGIM

SEQ ID NO: 161638 - protein, 10 aa, Artificial Sequence
  Description of Artificial Sequence: Synthetic peptide
  Seed: SSYRRPVGIS
STYRRPVGIR

SEQ ID NO: 161639 - protein, 10 aa, Artificial Sequence
  Description of Artificial Sequence: Synthetic peptide
  Seed: SSYRRPVGIS
STYRRPVGIS

SEQ ID NO: 161640 - protein, 10 aa, Artificial Sequence
  Description of Artificial Sequence: Synthetic peptide
  Seed: SSYRRPVGIS
STYRRPVGIT

SEQ ID NO: 161641 - protein, 10 aa, Artificial Sequence
  Description of Artificial Sequence: Synthetic peptide
  Seed: SSYRRPVGIS
STYRRPVGIV

SEQ ID NO: 161642 - protein, 10 aa, Artificial Sequence
  Description of Artificial Sequence: Synthetic peptide
  Seed: SSYRRPVGIS
STYRRPVGIY

SEQ ID NO: 161643 - protein, 9 aa, Artificial Sequence
  Description of Artificial Sequence: Synthetic peptide
  Seed: SSYRRPVGI
STYRRPVGK

SEQ ID NO: 161644 - protein, 9 aa, Artificial Sequence
  Description of Artificial Sequence: Synthetic peptide
  Seed: SSYRRPVGI
STYRRPVGL

SEQ ID NO: 161645 - protein, 9 aa, Artificial Sequence
  Description of Artificial Sequence: Synthetic peptide
  Seed: SSYRRPVGI
STYRRPVGM

SEQ ID NO: 161646 - protein, 9 aa, Artificial Sequence
  Description of Artificial Sequence: Synthetic peptide
  Seed: SSYRRPVGI
STYRRPVGR

SEQ ID NO: 161647 - protein, 9 aa, Artificial Sequence
  Description of Artificial Sequence: Synthetic peptide
  Seed: SSYRRPVGI
STYRRPVGS

SEQ ID NO: 161648 - protein, 9 aa, Artificial Sequence
  Description of Artificial Sequence: Synthetic peptide
  Seed: SSYRRPVGI
STYRRPVGT

SEQ ID NO: 161649 - protein, 9 aa, Artificial Sequence
  Description of Artificial Sequence: Synthetic peptide
  Seed: SSYRRPVGI
STYRRPVGV

SEQ ID NO: 161650 - protein, 9 aa, Artificial Sequence
  Description of Artificial Sequence: Synthetic peptide
  Seed: SSYRRPVGI
STYRRPVGW

SEQ ID NO: 161651 - protein, 9 aa, Artificial Sequence
  Description of Artificial Sequence: Synthetic peptide
  Seed: SSYRRPVGI
STYRRPVGY

SEQ ID NO: 161652 - protein, 8 aa, Artificial Sequence
  Description of Artificial Sequence: Synthetic peptide
  Seed: SSDDFALI
SVDDFALF

SEQ ID NO: 161653 - protein, 8 aa, Artificial Sequence
  Description of Artificial Sequence: Synthetic peptide
  Seed: SSDDFALI
SVDDFALL

SEQ ID NO: 161654 - protein, 8 aa, Artificial Sequence
  Description of Artificial Sequence: Synthetic peptide
  Seed: SSDDFALI
SVDDFALM

SEQ ID NO: 161655 - protein, 9 aa, Artificial Sequence
  Description of Artificial Sequence: Synthetic peptide
  Seed: SMELPSFGV
SVELPSFGV

SEQ ID NO: 161656 - protein, 11 aa, Artificial Sequence
  Description of Artificial Sequence: Synthetic peptide
  Seed: SPGMMMGMFNM
SVGMMMGMFNA

SEQ ID NO: 161657 - protein, 11 aa, Artificial Sequence
  Description of Artificial Sequence: Synthetic peptide
  Seed: SPGMMMGMFNM
SVGMMMGMFNI

SEQ ID NO: 161658 - protein, 11 aa, Artificial Sequence
  Description of Artificial Sequence: Synthetic peptide
  Seed: SPGMMMGMFNM
SVGMMMGMFNL

SEQ ID NO: 161659 - protein, 11 aa, Artificial Sequence
  Description of Artificial Sequence: Synthetic peptide
  Seed: SPGMMMGMFNM
SVGMMMGMFNM

SEQ ID NO: 161660 - protein, 11 aa, Artificial Sequence
  Description of Artificial Sequence: Synthetic peptide
  Seed: SPGMMMGMFNM
SVGMMMGMFNT

SEQ ID NO: 161661 - protein, 11 aa, Artificial Sequence
  Description of Artificial Sequence: Synthetic peptide
  Seed: SPGMMMGMFNM
SVGMMMGMFNV

SEQ ID NO: 161662 - protein, 9 aa, Artificial Sequence
  Description of Artificial Sequence: Synthetic peptide
  Seed: SNKMARLGK
SVKMARLGA

SEQ ID NO: 161663 - protein, 9 aa, Artificial Sequence
  Description of Artificial Sequence: Synthetic peptide
  Seed: SNKMARLGK
SVKMARLGC

SEQ ID NO: 161664 - protein, 9 aa, Artificial Sequence
  Description of Artificial Sequence: Synthetic peptide
  Seed: SNKMARLGK
SVKMARLGE

SEQ ID NO: 161665 - protein, 9 aa, Artificial Sequence
  Description of Artificial Sequence: Synthetic peptide
  Seed: SNKMARLGK
SVKMARLGF

SEQ ID NO: 161666 - protein, 9 aa, Artificial Sequence
  Description of Artificial Sequence: Synthetic peptide
  Seed: SNKMARLGK
SVKMARLGG

SEQ ID NO: 161667 - protein, 9 aa, Artificial Sequence
  Description of Artificial Sequence: Synthetic peptide
  Seed: SNKMARLGK
SVKMARLGH

SEQ ID NO: 161668 - protein, 9 aa, Artificial Sequence
  Description of Artificial Sequence: Synthetic peptide
  Seed: SNKMARLGK
SVKMARLGI

SEQ ID NO: 161669 - protein, 9 aa, Artificial Sequence
  Description of Artificial Sequence: Synthetic peptide
  Seed: SNKMARLGK
SVKMARLGK

SEQ ID NO: 161670 - protein, 9 aa, Artificial Sequence
  Description of Artificial Sequence: Synthetic peptide
  Seed: SNKMARLGK
SVKMARLGL

SEQ ID NO: 161671 - protein, 9 aa, Artificial Sequence
  Description of Artificial Sequence: Synthetic peptide
  Seed: SNKMARLGK
SVKMARLGM

SEQ ID NO: 161672 - protein, 9 aa, Artificial Sequence
  Description of Artificial Sequence: Synthetic peptide
  Seed: SNKMARLGK
SVKMARLGN

SEQ ID NO: 161673 - protein, 9 aa, Artificial Sequence
  Description of Artificial Sequence: Synthetic peptide
  Seed: SNKMARLGK
SVKMARLGP

SEQ ID NO: 161674 - protein, 9 aa, Artificial Sequence
  Description of Artificial Sequence: Synthetic peptide
  Seed: SNKMARLGK
SVKMARLGQ

SEQ ID NO: 161675 - protein, 9 aa, Artificial Sequence
  Description of Artificial Sequence: Synthetic peptide
  Seed: SNKMARLGK
SVKMARLGR

SEQ ID NO: 161676 - protein, 9 aa, Artificial Sequence
  Description of Artificial Sequence: Synthetic peptide
  Seed: SNKMARLGK
SVKMARLGS

SEQ ID NO: 161677 - protein, 9 aa, Artificial Sequence
  Description of Artificial Sequence: Synthetic peptide
  Seed: SNKMARLGK
SVKMARLGT

SEQ ID NO: 161678 - protein, 9 aa, Artificial Sequence
  Description of Artificial Sequence: Synthetic peptide
  Seed: SNKMARLGK
SVKMARLGV

SEQ ID NO: 161679 - protein, 9 aa, Artificial Sequence
  Description of Artificial Sequence: Synthetic peptide
  Seed: SNKMARLGK
SVKMARLGY

SEQ ID NO: 161680 - protein, 9 aa, Artificial Sequence
  Description of Artificial Sequence: Synthetic peptide
  Seed: SYRRPVGIS
SVRRPVGIA

SEQ ID NO: 161681 - protein, 9 aa, Artificial Sequence
  Description of Artificial Sequence: Synthetic peptide
  Seed: SYRRPVGIS
SVRRPVGIC

SEQ ID NO: 161682 - protein, 9 aa, Artificial Sequence
  Description of Artificial Sequence: Synthetic peptide
  Seed: SYRRPVGIS
SVRRPVGIE

SEQ ID NO: 161683 - protein, 9 aa, Artificial Sequence
  Description of Artificial Sequence: Synthetic peptide
  Seed: SYRRPVGIS
SVRRPVGIF

SEQ ID NO: 161684 - protein, 9 aa, Artificial Sequence
  Description of Artificial Sequence: Synthetic peptide
  Seed: SYRRPVGIS
SVRRPVGIG

SEQ ID NO: 161685 - protein, 9 aa, Artificial Sequence
  Description of Artificial Sequence: Synthetic peptide
  Seed: SYRRPVGIS
SVRRPVGIH

SEQ ID NO: 161686 - protein, 9 aa, Artificial Sequence
  Description of Artificial Sequence: Synthetic peptide
  Seed: SYRRPVGIS
SVRRPVGII

SEQ ID NO: 161687 - protein, 9 aa, Artificial Sequence
  Description of Artificial Sequence: Synthetic peptide
  Seed: SYRRPVGIS
SVRRPVGIK

SEQ ID NO: 161688 - protein, 9 aa, Artificial Sequence
  Description of Artificial Sequence: Synthetic peptide
  Seed: SYRRPVGIS
SVRRPVGIL

SEQ ID NO: 161689 - protein, 9 aa, Artificial Sequence
  Description of Artificial Sequence: Synthetic peptide
  Seed: SYRRPVGIS
SVRRPVGIM

SEQ ID NO: 161690 - protein, 9 aa, Artificial Sequence
  Description of Artificial Sequence: Synthetic peptide
  Seed: SYRRPVGIS
SVRRPVGIN

SEQ ID NO: 161691 - protein, 9 aa, Artificial Sequence
  Description of Artificial Sequence: Synthetic peptide
  Seed: SYRRPVGIS
SVRRPVGIP

SEQ ID NO: 161692 - protein, 9 aa, Artificial Sequence
  Description of Artificial Sequence: Synthetic peptide
  Seed: SYRRPVGIS
SVRRPVGIQ

SEQ ID NO: 161693 - protein, 9 aa, Artificial Sequence
  Description of Artificial Sequence: Synthetic peptide
  Seed: SYRRPVGIS
SVRRPVGIR

SEQ ID NO: 161694 - protein, 9 aa, Artificial Sequence
  Description of Artificial Sequence: Synthetic peptide
  Seed: SYRRPVGIS
SVRRPVGIS

SEQ ID NO: 161695 - protein, 10 aa, Artificial Sequence
  Description of Artificial Sequence: Synthetic peptide
  Seed: SYRRPVGISS
SVRRPVGISA

SEQ ID NO: 161696 - protein, 10 aa, Artificial Sequence
  Description of Artificial Sequence: Synthetic peptide
  Seed: SYRRPVGISS
SVRRPVGISC

SEQ ID NO: 161697 - protein, 10 aa, Artificial Sequence
  Description of Artificial Sequence: Synthetic peptide
  Seed: SYRRPVGISS
SVRRPVGISF

SEQ ID NO: 161698 - protein, 10 aa, Artificial Sequence
  Description of Artificial Sequence: Synthetic peptide
  Seed: SYRRPVGISS
SVRRPVGISG

SEQ ID NO: 161699 - protein, 10 aa, Artificial Sequence
  Description of Artificial Sequence: Synthetic peptide
  Seed: SYRRPVGISS
SVRRPVGISI

SEQ ID NO: 161700 - protein, 10 aa, Artificial Sequence
  Description of Artificial Sequence: Synthetic peptide
  Seed: SYRRPVGISS
SVRRPVGISK

SEQ ID NO: 161701 - protein, 10 aa, Artificial Sequence
  Description of Artificial Sequence: Synthetic peptide
  Seed: SYRRPVGISS
SVRRPVGISL

SEQ ID NO: 161702 - protein, 10 aa, Artificial Sequence
  Description of Artificial Sequence: Synthetic peptide
  Seed: SYRRPVGISS
SVRRPVGISM

SEQ ID NO: 161703 - protein, 10 aa, Artificial Sequence
  Description of Artificial Sequence: Synthetic peptide
  Seed: SYRRPVGISS
SVRRPVGISN

SEQ ID NO: 161704 - protein, 10 aa, Artificial Sequence
  Description of Artificial Sequence: Synthetic peptide
  Seed: SYRRPVGISS
SVRRPVGISP

SEQ ID NO: 161705 - protein, 10 aa, Artificial Sequence
  Description of Artificial Sequence: Synthetic peptide
  Seed: SYRRPVGISS
SVRRPVGISR

SEQ ID NO: 161706 - protein, 10 aa, Artificial Sequence
  Description of Artificial Sequence: Synthetic peptide
  Seed: SYRRPVGISS
SVRRPVGISS

SEQ ID NO: 161707 - protein, 10 aa, Artificial Sequence
  Description of Artificial Sequence: Synthetic peptide
  Seed: SYRRPVGISS
SVRRPVGIST

SEQ ID NO: 161708 - protein, 10 aa, Artificial Sequence
  Description of Artificial Sequence: Synthetic peptide
  Seed: SYRRPVGISS
SVRRPVGISV

SEQ ID NO: 161709 - protein, 10 aa, Artificial Sequence
  Description of Artificial Sequence: Synthetic peptide
  Seed: SYRRPVGISS
SVRRPVGISY

SEQ ID NO: 161710 - protein, 9 aa, Artificial Sequence
  Description of Artificial Sequence: Synthetic peptide
  Seed: SYRRPVGIS
SVRRPVGIT

SEQ ID NO: 161711 - protein, 9 aa, Artificial Sequence
  Description of Artificial Sequence: Synthetic peptide
  Seed: SYRRPVGIS
SVRRPVGIV

SEQ ID NO: 161712 - protein, 9 aa, Artificial Sequence
  Description of Artificial Sequence: Synthetic peptide
  Seed: SYRRPVGIS
SVRRPVGIY

SEQ ID NO: 161713 - protein, 10 aa, Artificial Sequence
  Description of Artificial Sequence: Synthetic peptide
  Seed: SLSPGMMMGM
SVSPGMMMGA

SEQ ID NO: 161714 - protein, 10 aa, Artificial Sequence
  Description of Artificial Sequence: Synthetic peptide
  Seed: SLSPGMMMGM
SVSPGMMMGI

SEQ ID NO: 161715 - protein, 10 aa, Artificial Sequence
  Description of Artificial Sequence: Synthetic peptide
  Seed: SLSPGMMMGM
SVSPGMMMGL

SEQ ID NO: 161716 - protein, 10 aa, Artificial Sequence
  Description of Artificial Sequence: Synthetic peptide
  Seed: SLSPGMMMGM
SVSPGMMMGM

SEQ ID NO: 161717 - protein, 10 aa, Artificial Sequence
  Description of Artificial Sequence: Synthetic peptide
  Seed: SLSPGMMMGM
SVSPGMMMGV

SEQ ID NO: 161718 - protein, 9 aa, Artificial Sequence
  Description of Artificial Sequence: Synthetic peptide
  Seed: SSSYRRPVG
SVSYRRPVA

SEQ ID NO: 161719 - protein, 9 aa, Artificial Sequence
  Description of Artificial Sequence: Synthetic peptide
  Seed: SSSYRRPVG
SVSYRRPVG

SEQ ID NO: 161720 - protein, 9 aa, Artificial Sequence
  Description of Artificial Sequence: Synthetic peptide
  Seed: SSSYRRPVG
SVSYRRPVI

SEQ ID NO: 161721 - protein, 9 aa, Artificial Sequence
  Description of Artificial Sequence: Synthetic peptide
  Seed: SSSYRRPVG
SVSYRRPVK

SEQ ID NO: 161722 - protein, 9 aa, Artificial Sequence
  Description of Artificial Sequence: Synthetic peptide
  Seed: SSSYRRPVG
SVSYRRPVL

SEQ ID NO: 161723 - protein, 9 aa, Artificial Sequence
  Description of Artificial Sequence: Synthetic peptide
  Seed: SSSYRRPVG
SVSYRRPVM

SEQ ID NO: 161724 - protein, 9 aa, Artificial Sequence
  Description of Artificial Sequence: Synthetic peptide
  Seed: SSSYRRPVG
SVSYRRPVS

SEQ ID NO: 161725 - protein, 9 aa, Artificial Sequence
  Description of Artificial Sequence: Synthetic peptide
  Seed: SSSYRRPVG
SVSYRRPVV

SEQ ID NO: 161726 - protein, 9 aa, Artificial Sequence
  Description of Artificial Sequence: Synthetic peptide
  Seed: SSSYRRPVG
SVSYRRPVY

SEQ ID NO: 161727 - protein, 9 aa, Artificial Sequence
  Description of Artificial Sequence: Synthetic peptide
  Seed: STVLGVSIL
SVVLGVSIF

SEQ ID NO: 161728 - protein, 9 aa, Artificial Sequence
  Description of Artificial Sequence: Synthetic peptide
  Seed: STVLGVSIL
SVVLGVSIL

SEQ ID NO: 161729 - protein, 9 aa, Artificial Sequence
  Description of Artificial Sequence: Synthetic peptide
  Seed: STVLGVSIL
SVVLGVSIM

SEQ ID NO: 161730 - protein, 9 aa, Artificial Sequence
  Description of Artificial Sequence: Synthetic peptide
  Seed: STVLGVSIL
SVVLGVSIV

SEQ ID NO: 161731 - protein, 9 aa, Artificial Sequence
  Description of Artificial Sequence: Synthetic peptide
  Seed: STVLGVSIL
SVVLGVSIW

SEQ ID NO: 161732 - protein, 9 aa, Artificial Sequence
  Description of Artificial Sequence: Synthetic peptide
  Seed: STVLGVSIL
SVVLGVSIY

SEQ ID NO: 161733 - protein, 9 aa, Artificial Sequence
  Description of Artificial Sequence: Synthetic peptide
  Seed: SSYRRPVGI
SVYRRPVGA

SEQ ID NO: 161734 - protein, 9 aa, Artificial Sequence
  Description of Artificial Sequence: Synthetic peptide
  Seed: SSYRRPVGI
SVYRRPVGF

SEQ ID NO: 161735 - protein, 9 aa, Artificial Sequence
  Description of Artificial Sequence: Synthetic peptide
  Seed: SSYRRPVGI
SVYRRPVGG

SEQ ID NO: 161736 - protein, 9 aa, Artificial Sequence
  Description of Artificial Sequence: Synthetic peptide
  Seed: SSYRRPVGI
SVYRRPVGI

SEQ ID NO: 161737 - protein, 10 aa, Artificial Sequence
  Description of Artificial Sequence: Synthetic peptide
  Seed: SSYRRPVGIS
SVYRRPVGIA

SEQ ID NO: 161738 - protein, 10 aa, Artificial Sequence
  Description of Artificial Sequence: Synthetic peptide
  Seed: SSYRRPVGIS
SVYRRPVGIG

SEQ ID NO: 161739 - protein, 10 aa, Artificial Sequence
  Description of Artificial Sequence: Synthetic peptide
  Seed: SSYRRPVGIS
SVYRRPVGII

SEQ ID NO: 161740 - protein, 10 aa, Artificial Sequence
  Description of Artificial Sequence: Synthetic peptide
  Seed: SSYRRPVGIS
SVYRRPVGIK

SEQ ID NO: 161741 - protein, 10 aa, Artificial Sequence
  Description of Artificial Sequence: Synthetic peptide
  Seed: SSYRRPVGIS
SVYRRPVGIL

SEQ ID NO: 161742 - protein, 10 aa, Artificial Sequence
  Description of Artificial Sequence: Synthetic peptide
  Seed: SSYRRPVGIS
SVYRRPVGIM

SEQ ID NO: 161743 - protein, 10 aa, Artificial Sequence
  Description of Artificial Sequence: Synthetic peptide
  Seed: SSYRRPVGIS
SVYRRPVGIR

SEQ ID NO: 161744 - protein, 10 aa, Artificial Sequence
  Description of Artificial Sequence: Synthetic peptide
  Seed: SSYRRPVGIS
SVYRRPVGIS

SEQ ID NO: 161745 - protein, 10 aa, Artificial Sequence
  Description of Artificial Sequence: Synthetic peptide
  Seed: SSYRRPVGIS
SVYRRPVGIV

SEQ ID NO: 161746 - protein, 10 aa, Artificial Sequence
  Description of Artificial Sequence: Synthetic peptide
  Seed: SSYRRPVGIS
SVYRRPVGIY

SEQ ID NO: 161747 - protein, 9 aa, Artificial Sequence
  Description of Artificial Sequence: Synthetic peptide
  Seed: SSYRRPVGI
SVYRRPVGK

SEQ ID NO: 161748 - protein, 9 aa, Artificial Sequence
  Description of Artificial Sequence: Synthetic peptide
  Seed: SSYRRPVGI
SVYRRPVGL

SEQ ID NO: 161749 - protein, 9 aa, Artificial Sequence
  Description of Artificial Sequence: Synthetic peptide
  Seed: SSYRRPVGI
SVYRRPVGM

SEQ ID NO: 161750 - protein, 9 aa, Artificial Sequence
  Description of Artificial Sequence: Synthetic peptide
  Seed: SSYRRPVGI
SVYRRPVGR

SEQ ID NO: 161751 - protein, 9 aa, Artificial Sequence
  Description of Artificial Sequence: Synthetic peptide
  Seed: SSYRRPVGI
SVYRRPVGS

SEQ ID NO: 161752 - protein, 9 aa, Artificial Sequence
  Description of Artificial Sequence: Synthetic peptide
  Seed: SSYRRPVGI
SVYRRPVGV

SEQ ID NO: 161753 - protein, 9 aa, Artificial Sequence
  Description of Artificial Sequence: Synthetic peptide
  Seed: SSYRRPVGI
SVYRRPVGW

SEQ ID NO: 161754 - protein, 9 aa, Artificial Sequence
  Description of Artificial Sequence: Synthetic peptide
  Seed: SSYRRPVGI
SVYRRPVGY

SEQ ID NO: 161755 - protein, 8 aa, Artificial Sequence
  Description of Artificial Sequence: Synthetic peptide
  Seed: SFFYRYGF
SWFYRYGF

SEQ ID NO: 161756 - protein, 8 aa, Artificial Sequence
  Description of Artificial Sequence: Synthetic peptide
  Seed: SFFYRYGF
SWFYRYGM

SEQ ID NO: 161757 - protein, 8 aa, Artificial Sequence
  Description of Artificial Sequence: Synthetic peptide
  Seed: SFFYRYGF
SWFYRYGW

SEQ ID NO: 161758 - protein, 11 aa, Artificial Sequence
  Description of Artificial Sequence: Synthetic peptide
  Seed: SPGMMMGMFNM
SWGMMMGMFNA

SEQ ID NO: 161759 - protein, 11 aa, Artificial Sequence
  Description of Artificial Sequence: Synthetic peptide
  Seed: SPGMMMGMFNM
SWGMMMGMFNI

SEQ ID NO: 161760 - protein, 11 aa, Artificial Sequence
  Description of Artificial Sequence: Synthetic peptide
  Seed: SPGMMMGMFNM
SWGMMMGMFNL

SEQ ID NO: 161761 - protein, 11 aa, Artificial Sequence
  Description of Artificial Sequence: Synthetic peptide
  Seed: SPGMMMGMFNM
SWGMMMGMFNM

SEQ ID NO: 161762 - protein, 11 aa, Artificial Sequence
  Description of Artificial Sequence: Synthetic peptide
  Seed: SPGMMMGMFNM
SWGMMMGMFNT

SEQ ID NO: 161763 - protein, 11 aa, Artificial Sequence
  Description of Artificial Sequence: Synthetic peptide
  Seed: SPGMMMGMFNM
SWGMMMGMFNV

SEQ ID NO: 161764 - protein, 9 aa, Artificial Sequence
  Description of Artificial Sequence: Synthetic peptide
  Seed: SNKMARLGK
SWKMARLGA

SEQ ID NO: 161765 - protein, 9 aa, Artificial Sequence
  Description of Artificial Sequence: Synthetic peptide
  Seed: SNKMARLGK
SWKMARLGG

SEQ ID NO: 161766 - protein, 9 aa, Artificial Sequence
  Description of Artificial Sequence: Synthetic peptide
  Seed: SNKMARLGK
SWKMARLGI

SEQ ID NO: 161767 - protein, 9 aa, Artificial Sequence
  Description of Artificial Sequence: Synthetic peptide
  Seed: SNKMARLGK
SWKMARLGK

SEQ ID NO: 161768 - protein, 9 aa, Artificial Sequence
  Description of Artificial Sequence: Synthetic peptide
  Seed: SNKMARLGK
SWKMARLGL

SEQ ID NO: 161769 - protein, 9 aa, Artificial Sequence
  Description of Artificial Sequence: Synthetic peptide
  Seed: SNKMARLGK
SWKMARLGM

SEQ ID NO: 161770 - protein, 9 aa, Artificial Sequence
  Description of Artificial Sequence: Synthetic peptide
  Seed: SNKMARLGK
SWKMARLGS

SEQ ID NO: 161771 - protein, 9 aa, Artificial Sequence
  Description of Artificial Sequence: Synthetic peptide
  Seed: SNKMARLGK
SWKMARLGV

SEQ ID NO: 161772 - protein, 9 aa, Artificial Sequence
  Description of Artificial Sequence: Synthetic peptide
  Seed: SYRRPVGIS
SWRRPVGIA

SEQ ID NO: 161773 - protein, 9 aa, Artificial Sequence
  Description of Artificial Sequence: Synthetic peptide
  Seed: SYRRPVGIS
SWRRPVGIG

SEQ ID NO: 161774 - protein, 9 aa, Artificial Sequence
  Description of Artificial Sequence: Synthetic peptide
  Seed: SYRRPVGIS
SWRRPVGII

SEQ ID NO: 161775 - protein, 9 aa, Artificial Sequence
  Description of Artificial Sequence: Synthetic peptide
  Seed: SYRRPVGIS
SWRRPVGIK

SEQ ID NO: 161776 - protein, 9 aa, Artificial Sequence
  Description of Artificial Sequence: Synthetic peptide
  Seed: SYRRPVGIS
SWRRPVGIL

SEQ ID NO: 161777 - protein, 9 aa, Artificial Sequence
  Description of Artificial Sequence: Synthetic peptide
  Seed: SYRRPVGIS
SWRRPVGIM

SEQ ID NO: 161778 - protein, 9 aa, Artificial Sequence
  Description of Artificial Sequence: Synthetic peptide
  Seed: SYRRPVGIS
SWRRPVGIR

SEQ ID NO: 161779 - protein, 9 aa, Artificial Sequence
  Description of Artificial Sequence: Synthetic peptide
  Seed: SYRRPVGIS
SWRRPVGIS

SEQ ID NO: 161780 - protein, 10 aa, Artificial Sequence
  Description of Artificial Sequence: Synthetic peptide
  Seed: SYRRPVGISS
SWRRPVGISA

SEQ ID NO: 161781 - protein, 10 aa, Artificial Sequence
  Description of Artificial Sequence: Synthetic peptide
  Seed: SYRRPVGISS
SWRRPVGISG

SEQ ID NO: 161782 - protein, 10 aa, Artificial Sequence
  Description of Artificial Sequence: Synthetic peptide
  Seed: SYRRPVGISS
SWRRPVGISI

SEQ ID NO: 161783 - protein, 10 aa, Artificial Sequence
  Description of Artificial Sequence: Synthetic peptide
  Seed: SYRRPVGISS
SWRRPVGISK

SEQ ID NO: 161784 - protein, 10 aa, Artificial Sequence
  Description of Artificial Sequence: Synthetic peptide
  Seed: SYRRPVGISS
SWRRPVGISL

SEQ ID NO: 161785 - protein, 10 aa, Artificial Sequence
  Description of Artificial Sequence: Synthetic peptide
  Seed: SYRRPVGISS
SWRRPVGISM

SEQ ID NO: 161786 - protein, 10 aa, Artificial Sequence
  Description of Artificial Sequence: Synthetic peptide
  Seed: SYRRPVGISS
SWRRPVGISR

SEQ ID NO: 161787 - protein, 10 aa, Artificial Sequence
  Description of Artificial Sequence: Synthetic peptide
  Seed: SYRRPVGISS
SWRRPVGISS

SEQ ID NO: 161788 - protein, 11 aa, Artificial Sequence
  Description of Artificial Sequence: Synthetic peptide
  Seed: SYRRPVGISSM
SWRRPVGISSF

SEQ ID NO: 161789 - protein, 11 aa, Artificial Sequence
  Description of Artificial Sequence: Synthetic peptide
  Seed: SYRRPVGISSM
SWRRPVGISSI

SEQ ID NO: 161790 - protein, 11 aa, Artificial Sequence
  Description of Artificial Sequence: Synthetic peptide
  Seed: SYRRPVGISSM
SWRRPVGISSW

SEQ ID NO: 161791 - protein, 10 aa, Artificial Sequence
  Description of Artificial Sequence: Synthetic peptide
  Seed: SYRRPVGISS
SWRRPVGISV

SEQ ID NO: 161792 - protein, 9 aa, Artificial Sequence
  Description of Artificial Sequence: Synthetic peptide
  Seed: SYRRPVGIS
SWRRPVGIV

SEQ ID NO: 161793 - protein, 10 aa, Artificial Sequence
  Description of Artificial Sequence: Synthetic peptide
  Seed: SLSPGMMMGM
SWSPGMMMGV

SEQ ID NO: 161794 - protein, 9 aa, Artificial Sequence
  Description of Artificial Sequence: Synthetic peptide
  Seed: SSSYRRPVG
SWSYRRPVA

SEQ ID NO: 161795 - protein, 9 aa, Artificial Sequence
  Description of Artificial Sequence: Synthetic peptide
  Seed: SSSYRRPVG
SWSYRRPVK

SEQ ID NO: 161796 - protein, 9 aa, Artificial Sequence
  Description of Artificial Sequence: Synthetic peptide
  Seed: SSYRRPVGI
SWYRRPVGA

SEQ ID NO: 161797 - protein, 10 aa, Artificial Sequence
  Description of Artificial Sequence: Synthetic peptide
  Seed: SSYRRPVGIS
SWYRRPVGIA

SEQ ID NO: 161798 - protein, 10 aa, Artificial Sequence
  Description of Artificial Sequence: Synthetic peptide
  Seed: SSYRRPVGIS
SWYRRPVGIK

SEQ ID NO: 161799 - protein, 10 aa, Artificial Sequence
  Description of Artificial Sequence: Synthetic peptide
  Seed: SSYRRPVGIS
SWYRRPVGIV

SEQ ID NO: 161800 - protein, 9 aa, Artificial Sequence
  Description of Artificial Sequence: Synthetic peptide
  Seed: SSYRRPVGI
SWYRRPVGK

SEQ ID NO: 161801 - protein, 8 aa, Artificial Sequence
  Description of Artificial Sequence: Synthetic peptide
  Seed: SFFYRYGF
SYFYRYGF

SEQ ID NO: 161802 - protein, 8 aa, Artificial Sequence
  Description of Artificial Sequence: Synthetic peptide
  Seed: SFFYRYGF
SYFYRYGI

SEQ ID NO: 161803 - protein, 8 aa, Artificial Sequence
  Description of Artificial Sequence: Synthetic peptide
  Seed: SFFYRYGF
SYFYRYGL

SEQ ID NO: 161804 - protein, 8 aa, Artificial Sequence
  Description of Artificial Sequence: Synthetic peptide
  Seed: SFFYRYGF
SYFYRYGM

SEQ ID NO: 161805 - protein, 8 aa, Artificial Sequence
  Description of Artificial Sequence: Synthetic peptide
  Seed: SFFYRYGF
SYFYRYGV

SEQ ID NO: 161806 - protein, 8 aa, Artificial Sequence
  Description of Artificial Sequence: Synthetic peptide
  Seed: SFFYRYGF
SYFYRYGW

SEQ ID NO: 161807 - protein, 8 aa, Artificial Sequence
  Description of Artificial Sequence: Synthetic peptide
  Seed: SFFYRYGF
SYFYRYGY

SEQ ID NO: 161808 - protein, 11 aa, Artificial Sequence
  Description of Artificial Sequence: Synthetic peptide
  Seed: SPGMMMGMFNM
SYGMMMGMFNA

SEQ ID NO: 161809 - protein, 11 aa, Artificial Sequence
  Description of Artificial Sequence: Synthetic peptide
  Seed: SPGMMMGMFNM
SYGMMMGMFNI

SEQ ID NO: 161810 - protein, 11 aa, Artificial Sequence
  Description of Artificial Sequence: Synthetic peptide
  Seed: SPGMMMGMFNM
SYGMMMGMFNL

SEQ ID NO: 161811 - protein, 11 aa, Artificial Sequence
  Description of Artificial Sequence: Synthetic peptide
  Seed: SPGMMMGMFNM
SYGMMMGMFNM

SEQ ID NO: 161812 - protein, 11 aa, Artificial Sequence
  Description of Artificial Sequence: Synthetic peptide
  Seed: SPGMMMGMFNM
SYGMMMGMFNT

SEQ ID NO: 161813 - protein, 11 aa, Artificial Sequence
  Description of Artificial Sequence: Synthetic peptide
  Seed: SPGMMMGMFNM
SYGMMMGMFNV

SEQ ID NO: 161814 - protein, 9 aa, Artificial Sequence
  Description of Artificial Sequence: Synthetic peptide
  Seed: SNKMARLGK
SYKMARLGA

SEQ ID NO: 161815 - protein, 9 aa, Artificial Sequence
  Description of Artificial Sequence: Synthetic peptide
  Seed: SNKMARLGK
SYKMARLGC

SEQ ID NO: 161816 - protein, 9 aa, Artificial Sequence
  Description of Artificial Sequence: Synthetic peptide
  Seed: SNKMARLGK
SYKMARLGF

SEQ ID NO: 161817 - protein, 9 aa, Artificial Sequence
  Description of Artificial Sequence: Synthetic peptide
  Seed: SNKMARLGK
SYKMARLGG

SEQ ID NO: 161818 - protein, 9 aa, Artificial Sequence
  Description of Artificial Sequence: Synthetic peptide
  Seed: SNKMARLGK
SYKMARLGI

SEQ ID NO: 161819 - protein, 9 aa, Artificial Sequence
  Description of Artificial Sequence: Synthetic peptide
  Seed: SNKMARLGK
SYKMARLGK

SEQ ID NO: 161820 - protein, 9 aa, Artificial Sequence
  Description of Artificial Sequence: Synthetic peptide
  Seed: SNKMARLGK
SYKMARLGL

SEQ ID NO: 161821 - protein, 9 aa, Artificial Sequence
  Description of Artificial Sequence: Synthetic peptide
  Seed: SNKMARLGK
SYKMARLGM

SEQ ID NO: 161822 - protein, 9 aa, Artificial Sequence
  Description of Artificial Sequence: Synthetic peptide
  Seed: SNKMARLGK
SYKMARLGN

SEQ ID NO: 161823 - protein, 9 aa, Artificial Sequence
  Description of Artificial Sequence: Synthetic peptide
  Seed: SNKMARLGK
SYKMARLGP

SEQ ID NO: 161824 - protein, 9 aa, Artificial Sequence
  Description of Artificial Sequence: Synthetic peptide
  Seed: SNKMARLGK
SYKMARLGQ

SEQ ID NO: 161825 - protein, 9 aa, Artificial Sequence
  Description of Artificial Sequence: Synthetic peptide
  Seed: SNKMARLGK
SYKMARLGR

SEQ ID NO: 161826 - protein, 9 aa, Artificial Sequence
  Description of Artificial Sequence: Synthetic peptide
  Seed: SNKMARLGK
SYKMARLGS

SEQ ID NO: 161827 - protein, 9 aa, Artificial Sequence
  Description of Artificial Sequence: Synthetic peptide
  Seed: SNKMARLGK
SYKMARLGT

SEQ ID NO: 161828 - protein, 9 aa, Artificial Sequence
  Description of Artificial Sequence: Synthetic peptide
  Seed: SNKMARLGK
SYKMARLGV

SEQ ID NO: 161829 - protein, 9 aa, Artificial Sequence
  Description of Artificial Sequence: Synthetic peptide
  Seed: SNKMARLGK
SYKMARLGY

SEQ ID NO: 161830 - protein, 9 aa, Artificial Sequence
  Description of Artificial Sequence: Synthetic peptide
  Seed: SYRRPVGIS
SYRRPVGIA

SEQ ID NO: 161831 - protein, 9 aa, Artificial Sequence
  Description of Artificial Sequence: Synthetic peptide
  Seed: SYRRPVGIS
SYRRPVGIC

SEQ ID NO: 161832 - protein, 9 aa, Artificial Sequence
  Description of Artificial Sequence: Synthetic peptide
  Seed: SYRRPVGIS
SYRRPVGIE

SEQ ID NO: 161833 - protein, 9 aa, Artificial Sequence
  Description of Artificial Sequence: Synthetic peptide
  Seed: SYRRPVGIS
SYRRPVGIG

SEQ ID NO: 161834 - protein, 9 aa, Artificial Sequence
  Description of Artificial Sequence: Synthetic peptide
  Seed: SYRRPVGIS
SYRRPVGII

SEQ ID NO: 161835 - protein, 9 aa, Artificial Sequence
  Description of Artificial Sequence: Synthetic peptide
  Seed: SYRRPVGIS
SYRRPVGIK

SEQ ID NO: 161836 - protein, 9 aa, Artificial Sequence
  Description of Artificial Sequence: Synthetic peptide
  Seed: SYRRPVGIS
SYRRPVGIL

SEQ ID NO: 161837 - protein, 9 aa, Artificial Sequence
  Description of Artificial Sequence: Synthetic peptide
  Seed: SYRRPVGIS
SYRRPVGIM

SEQ ID NO: 161838 - protein, 9 aa, Artificial Sequence
  Description of Artificial Sequence: Synthetic peptide
  Seed: SYRRPVGIS
SYRRPVGIP

SEQ ID NO: 161839 - protein, 9 aa, Artificial Sequence
  Description of Artificial Sequence: Synthetic peptide
  Seed: SYRRPVGIS
SYRRPVGIQ

SEQ ID NO: 161840 - protein, 9 aa, Artificial Sequence
  Description of Artificial Sequence: Synthetic peptide
  Seed: SYRRPVGIS
SYRRPVGIR

SEQ ID NO: 161841 - protein, 10 aa, Artificial Sequence
  Description of Artificial Sequence: Synthetic peptide
  Seed: SYRRPVGISS
SYRRPVGISA

SEQ ID NO: 161842 - protein, 10 aa, Artificial Sequence
  Description of Artificial Sequence: Synthetic peptide
  Seed: SYRRPVGISS
SYRRPVGISC

SEQ ID NO: 161843 - protein, 10 aa, Artificial Sequence
  Description of Artificial Sequence: Synthetic peptide
  Seed: SYRRPVGISS
SYRRPVGISG

SEQ ID NO: 161844 - protein, 10 aa, Artificial Sequence
  Description of Artificial Sequence: Synthetic peptide
  Seed: SYRRPVGISS
SYRRPVGISI

SEQ ID NO: 161845 - protein, 10 aa, Artificial Sequence
  Description of Artificial Sequence: Synthetic peptide
  Seed: SYRRPVGISS
SYRRPVGISK

SEQ ID NO: 161846 - protein, 10 aa, Artificial Sequence
  Description of Artificial Sequence: Synthetic peptide
  Seed: SYRRPVGISS
SYRRPVGISL

SEQ ID NO: 161847 - protein, 10 aa, Artificial Sequence
  Description of Artificial Sequence: Synthetic peptide
  Seed: SYRRPVGISS
SYRRPVGISM

SEQ ID NO: 161848 - protein, 10 aa, Artificial Sequence
  Description of Artificial Sequence: Synthetic peptide
  Seed: SYRRPVGISS
SYRRPVGISN

SEQ ID NO: 161849 - protein, 10 aa, Artificial Sequence
  Description of Artificial Sequence: Synthetic peptide
  Seed: SYRRPVGISS
SYRRPVGISP

SEQ ID NO: 161850 - protein, 10 aa, Artificial Sequence
  Description of Artificial Sequence: Synthetic peptide
  Seed: SYRRPVGISS
SYRRPVGISQ

SEQ ID NO: 161851 - protein, 10 aa, Artificial Sequence
  Description of Artificial Sequence: Synthetic peptide
  Seed: SYRRPVGISS
SYRRPVGISR

SEQ ID NO: 161852 - protein, 11 aa, Artificial Sequence
  Description of Artificial Sequence: Synthetic peptide
  Seed: SYRRPVGISSM
SYRRPVGISSF

SEQ ID NO: 161853 - protein, 11 aa, Artificial Sequence
  Description of Artificial Sequence: Synthetic peptide
  Seed: SYRRPVGISSM
SYRRPVGISSI

SEQ ID NO: 161854 - protein, 11 aa, Artificial Sequence
  Description of Artificial Sequence: Synthetic peptide
  Seed: SYRRPVGISSM
SYRRPVGISSL

SEQ ID NO: 161855 - protein, 11 aa, Artificial Sequence
  Description of Artificial Sequence: Synthetic peptide
  Seed: SYRRPVGISSM
SYRRPVGISSW

SEQ ID NO: 161856 - protein, 11 aa, Artificial Sequence
  Description of Artificial Sequence: Synthetic peptide
  Seed: SYRRPVGISSM
SYRRPVGISSY

SEQ ID NO: 161857 - protein, 10 aa, Artificial Sequence
  Description of Artificial Sequence: Synthetic peptide
  Seed: SYRRPVGISS
SYRRPVGIST

SEQ ID NO: 161858 - protein, 10 aa, Artificial Sequence
  Description of Artificial Sequence: Synthetic peptide
  Seed: SYRRPVGISS
SYRRPVGISV

SEQ ID NO: 161859 - protein, 10 aa, Artificial Sequence
  Description of Artificial Sequence: Synthetic peptide
  Seed: SYRRPVGISS
SYRRPVGISY

SEQ ID NO: 161860 - protein, 9 aa, Artificial Sequence
  Description of Artificial Sequence: Synthetic peptide
  Seed: SYRRPVGIS
SYRRPVGIT

SEQ ID NO: 161861 - protein, 9 aa, Artificial Sequence
  Description of Artificial Sequence: Synthetic peptide
  Seed: SYRRPVGIS
SYRRPVGIV

SEQ ID NO: 161862 - protein, 9 aa, Artificial Sequence
  Description of Artificial Sequence: Synthetic peptide
  Seed: SYRRPVGIS
SYRRPVGIY

SEQ ID NO: 161863 - protein, 10 aa, Artificial Sequence
  Description of Artificial Sequence: Synthetic peptide
  Seed: SLSPGMMMGM
SYSPGMMMGV

SEQ ID NO: 161864 - protein, 9 aa, Artificial Sequence
  Description of Artificial Sequence: Synthetic peptide
  Seed: SSSYRRPVG
SYSYRRPVA

SEQ ID NO: 161865 - protein, 9 aa, Artificial Sequence
  Description of Artificial Sequence: Synthetic peptide
  Seed: SSSYRRPVG
SYSYRRPVK

SEQ ID NO: 161866 - protein, 9 aa, Artificial Sequence
  Description of Artificial Sequence: Synthetic peptide
  Seed: SSSYRRPVG
SYSYRRPVV

SEQ ID NO: 161867 - protein, 9 aa, Artificial Sequence
  Description of Artificial Sequence: Synthetic peptide
  Seed: SSYRRPVGI
SYYRRPVGA

SEQ ID NO: 161868 - protein, 10 aa, Artificial Sequence
  Description of Artificial Sequence: Synthetic peptide
  Seed: SSYRRPVGIS
SYYRRPVGIA

SEQ ID NO: 161869 - protein, 10 aa, Artificial Sequence
  Description of Artificial Sequence: Synthetic peptide
  Seed: SSYRRPVGIS
SYYRRPVGIK

SEQ ID NO: 161870 - protein, 9 aa, Artificial Sequence
  Description of Artificial Sequence: Synthetic peptide
  Seed: SSYRRPVGI
SYYRRPVGK

SEQ ID NO: 161871 - protein, 9 aa, Artificial Sequence
  Description of Artificial Sequence: Synthetic peptide
  Seed: SSYRRPVGI
SYYRRPVGR

SEQ ID NO: 161872 - protein, 9 aa, Artificial Sequence
  Description of Artificial Sequence: Synthetic peptide
  Seed: SSYRRPVGI
SYYRRPVGV

SEQ ID NO: 161873 - protein, 9 aa, Artificial Sequence
  Description of Artificial Sequence: Synthetic peptide
  Seed: TSFFYRYGF
TAFFYRYGA

SEQ ID NO: 161874 - protein, 9 aa, Artificial Sequence
  Description of Artificial Sequence: Synthetic peptide
  Seed: TSFFYRYGF
TAFFYRYGF

SEQ ID NO: 161875 - protein, 9 aa, Artificial Sequence
  Description of Artificial Sequence: Synthetic peptide
  Seed: TSFFYRYGF
TAFFYRYGI

SEQ ID NO: 161876 - protein, 9 aa, Artificial Sequence
  Description of Artificial Sequence: Synthetic peptide
  Seed: TSFFYRYGF
TAFFYRYGL

SEQ ID NO: 161877 - protein, 9 aa, Artificial Sequence
  Description of Artificial Sequence: Synthetic peptide
  Seed: TSFFYRYGF
TAFFYRYGM

SEQ ID NO: 161878 - protein, 9 aa, Artificial Sequence
  Description of Artificial Sequence: Synthetic peptide
  Seed: TSFFYRYGF
TAFFYRYGV

SEQ ID NO: 161879 - protein, 9 aa, Artificial Sequence
  Description of Artificial Sequence: Synthetic peptide
  Seed: TSFFYRYGF
TAFFYRYGW

SEQ ID NO: 161880 - protein, 9 aa, Artificial Sequence
  Description of Artificial Sequence: Synthetic peptide
  Seed: TSFFYRYGF
TAFFYRYGY

SEQ ID NO: 161881 - protein, 11 aa, Artificial Sequence
  Description of Artificial Sequence: Synthetic peptide
  Seed: TTFPYTGDPPY
TAFPYTGDPPF

SEQ ID NO: 161882 - protein, 11 aa, Artificial Sequence
  Description of Artificial Sequence: Synthetic peptide
  Seed: TTFPYTGDPPY
TAFPYTGDPPK

SEQ ID NO: 161883 - protein, 11 aa, Artificial Sequence
  Description of Artificial Sequence: Synthetic peptide
  Seed: TTFPYTGDPPY
TAFPYTGDPPM

SEQ ID NO: 161884 - protein, 11 aa, Artificial Sequence
  Description of Artificial Sequence: Synthetic peptide
  Seed: TTFPYTGDPPY
TAFPYTGDPPR

SEQ ID NO: 161885 - protein, 11 aa, Artificial Sequence
  Description of Artificial Sequence: Synthetic peptide
  Seed: TTFPYTGDPPY
TAFPYTGDPPW

SEQ ID NO: 161886 - protein, 11 aa, Artificial Sequence
  Description of Artificial Sequence: Synthetic peptide
  Seed: TTFPYTGDPPY
TAFPYTGDPPY

SEQ ID NO: 161887 - protein, 10 aa, Artificial Sequence
  Description of Artificial Sequence: Synthetic peptide
  Seed: TVLGVSILNL
TALGVSILNV

SEQ ID NO: 161888 - protein, 11 aa, Artificial Sequence
  Description of Artificial Sequence: Synthetic peptide
  Seed: TLNTMTKDAER
TANTMTKDAER

SEQ ID NO: 161889 - protein, 10 aa, Artificial Sequence
  Description of Artificial Sequence: Synthetic peptide
  Seed: TFPYTGDPPY
TAPYTGDPPF

SEQ ID NO: 161890 - protein, 10 aa, Artificial Sequence
  Description of Artificial Sequence: Synthetic peptide
  Seed: TFPYTGDPPY
TAPYTGDPPL

SEQ ID NO: 161891 - protein, 10 aa, Artificial Sequence
  Description of Artificial Sequence: Synthetic peptide
  Seed: TFPYTGDPPY
TAPYTGDPPM

SEQ ID NO: 161892 - protein, 10 aa, Artificial Sequence
  Description of Artificial Sequence: Synthetic peptide
  Seed: TFPYTGDPPY
TAPYTGDPPY

SEQ ID NO: 161893 - protein, 10 aa, Artificial Sequence
  Description of Artificial Sequence: Synthetic peptide
  Seed: TGTGYTMDTV
TATGYTMDTV

SEQ ID NO: 161894 - protein, 9 aa, Artificial Sequence
  Description of Artificial Sequence: Synthetic peptide
  Seed: TSFFYRYGF
TCFFYRYGW

SEQ ID NO: 161895 - protein, 9 aa, Artificial Sequence
  Description of Artificial Sequence: Synthetic peptide
  Seed: TSFFYRYGF
TCFFYRYGY

SEQ ID NO: 161896 - protein, 11 aa, Artificial Sequence
  Description of Artificial Sequence: Synthetic peptide
  Seed: TTFPYTGDPPY
TCFPYTGDPPF

SEQ ID NO: 161897 - protein, 11 aa, Artificial Sequence
  Description of Artificial Sequence: Synthetic peptide
  Seed: TTFPYTGDPPY
TCFPYTGDPPM

SEQ ID NO: 161898 - protein, 11 aa, Artificial Sequence
  Description of Artificial Sequence: Synthetic peptide
  Seed: TTFPYTGDPPY
TCFPYTGDPPY

SEQ ID NO: 161899 - protein, 10 aa, Artificial Sequence
  Description of Artificial Sequence: Synthetic peptide
  Seed: TVLGVSILNL
TCLGVSILNV

SEQ ID NO: 161900 - protein, 11 aa, Artificial Sequence
  Description of Artificial Sequence: Synthetic peptide
  Seed: TLNTMTKDAER
TCNTMTKDAER

SEQ ID NO: 161901 - protein, 10 aa, Artificial Sequence
  Description of Artificial Sequence: Synthetic peptide
  Seed: TFPYTGDPPY
TCPYTGDPPF

SEQ ID NO: 161902 - protein, 10 aa, Artificial Sequence
  Description of Artificial Sequence: Synthetic peptide
  Seed: TFPYTGDPPY
TCPYTGDPPL

SEQ ID NO: 161903 - protein, 10 aa, Artificial Sequence
  Description of Artificial Sequence: Synthetic peptide
  Seed: TFPYTGDPPY
TCPYTGDPPM

SEQ ID NO: 161904 - protein, 10 aa, Artificial Sequence
  Description of Artificial Sequence: Synthetic peptide
  Seed: TFPYTGDPPY
TCPYTGDPPY

SEQ ID NO: 161905 - protein, 10 aa, Artificial Sequence
  Description of Artificial Sequence: Synthetic peptide
  Seed: TGTGYTMDTV
TCTGYTMDTV

SEQ ID NO: 161906 - protein, 9 aa, Artificial Sequence
  Description of Artificial Sequence: Synthetic peptide
  Seed: TSFFYRYGF
TDFFYRYGY

SEQ ID NO: 161907 - protein, 11 aa, Artificial Sequence
  Description of Artificial Sequence: Synthetic peptide
  Seed: TTFPYTGDPPY
TDFPYTGDPPF

SEQ ID NO: 161908 - protein, 11 aa, Artificial Sequence
  Description of Artificial Sequence: Synthetic peptide
  Seed: TTFPYTGDPPY
TDFPYTGDPPM

SEQ ID NO: 161909 - protein, 11 aa, Artificial Sequence
  Description of Artificial Sequence: Synthetic peptide
  Seed: TTFPYTGDPPY
TDFPYTGDPPY

SEQ ID NO: 161910 - protein, 10 aa, Artificial Sequence
  Description of Artificial Sequence: Synthetic peptide
  Seed: TVLGVSILNL
TDLGVSILNV

SEQ ID NO: 161911 - protein, 11 aa, Artificial Sequence
  Description of Artificial Sequence: Synthetic peptide
  Seed: TLNTMTKDAER
TDNTMTKDAER

SEQ ID NO: 161912 - protein, 10 aa, Artificial Sequence
  Description of Artificial Sequence: Synthetic peptide
  Seed: TFPYTGDPPY
TDPYTGDPPF

SEQ ID NO: 161913 - protein, 10 aa, Artificial Sequence
  Description of Artificial Sequence: Synthetic peptide
  Seed: TFPYTGDPPY
TDPYTGDPPL

SEQ ID NO: 161914 - protein, 10 aa, Artificial Sequence
  Description of Artificial Sequence: Synthetic peptide
  Seed: TFPYTGDPPY
TDPYTGDPPM

SEQ ID NO: 161915 - protein, 10 aa, Artificial Sequence
  Description of Artificial Sequence: Synthetic peptide
  Seed: TFPYTGDPPY
TDPYTGDPPY

SEQ ID NO: 161916 - protein, 10 aa, Artificial Sequence
  Description of Artificial Sequence: Synthetic peptide
  Seed: TGTGYTMDTV
TDTGYTMDTV

SEQ ID NO: 161917 - protein, 9 aa, Artificial Sequence
  Description of Artificial Sequence: Synthetic peptide
  Seed: TSFFYRYGF
TEFFYRYGF

SEQ ID NO: 161918 - protein, 9 aa, Artificial Sequence
  Description of Artificial Sequence: Synthetic peptide
  Seed: TSFFYRYGF
TEFFYRYGM

SEQ ID NO: 161919 - protein, 9 aa, Artificial Sequence
  Description of Artificial Sequence: Synthetic peptide
  Seed: TSFFYRYGF
TEFFYRYGY

SEQ ID NO: 161920 - protein, 11 aa, Artificial Sequence
  Description of Artificial Sequence: Synthetic peptide
  Seed: TTFPYTGDPPY
TEFPYTGDPPF

SEQ ID NO: 161921 - protein, 11 aa, Artificial Sequence
  Description of Artificial Sequence: Synthetic peptide
  Seed: TTFPYTGDPPY
TEFPYTGDPPM

SEQ ID NO: 161922 - protein, 11 aa, Artificial Sequence
  Description of Artificial Sequence: Synthetic peptide
  Seed: TTFPYTGDPPY
TEFPYTGDPPY

SEQ ID NO: 161923 - protein, 10 aa, Artificial Sequence
  Description of Artificial Sequence: Synthetic peptide
  Seed: TVLGVSILNL
TELGVSILNV

SEQ ID NO: 161924 - protein, 11 aa, Artificial Sequence
  Description of Artificial Sequence: Synthetic peptide
  Seed: TLNTMTKDAER
TENTMTKDAER

SEQ ID NO: 161925 - protein, 10 aa, Artificial Sequence
  Description of Artificial Sequence: Synthetic peptide
  Seed: TFPYTGDPPY
TEPYTGDPPF

SEQ ID NO: 161926 - protein, 10 aa, Artificial Sequence
  Description of Artificial Sequence: Synthetic peptide
  Seed: TFPYTGDPPY
TEPYTGDPPL

SEQ ID NO: 161927 - protein, 10 aa, Artificial Sequence
  Description of Artificial Sequence: Synthetic peptide
  Seed: TFPYTGDPPY
TEPYTGDPPM

SEQ ID NO: 161928 - protein, 10 aa, Artificial Sequence
  Description of Artificial Sequence: Synthetic peptide
  Seed: TFPYTGDPPY
TEPYTGDPPY

SEQ ID NO: 161929 - protein, 10 aa, Artificial Sequence
  Description of Artificial Sequence: Synthetic peptide
  Seed: TGTGYTMDTV
TETGYTMDTV

SEQ ID NO: 161930 - protein, 9 aa, Artificial Sequence
  Description of Artificial Sequence: Synthetic peptide
  Seed: TSFFYRYGF
TFFFYRYGF

SEQ ID NO: 161931 - protein, 9 aa, Artificial Sequence
  Description of Artificial Sequence: Synthetic peptide
  Seed: TSFFYRYGF
TFFFYRYGH

SEQ ID NO: 161932 - protein, 9 aa, Artificial Sequence
  Description of Artificial Sequence: Synthetic peptide
  Seed: TSFFYRYGF
TFFFYRYGI

SEQ ID NO: 161933 - protein, 9 aa, Artificial Sequence
  Description of Artificial Sequence: Synthetic peptide
  Seed: TSFFYRYGF
TFFFYRYGL

SEQ ID NO: 161934 - protein, 9 aa, Artificial Sequence
  Description of Artificial Sequence: Synthetic peptide
  Seed: TSFFYRYGF
TFFFYRYGM

SEQ ID NO: 161935 - protein, 9 aa, Artificial Sequence
  Description of Artificial Sequence: Synthetic peptide
  Seed: TSFFYRYGF
TFFFYRYGV

SEQ ID NO: 161936 - protein, 9 aa, Artificial Sequence
  Description of Artificial Sequence: Synthetic peptide
  Seed: TSFFYRYGF
TFFFYRYGW

SEQ ID NO: 161937 - protein, 9 aa, Artificial Sequence
  Description of Artificial Sequence: Synthetic peptide
  Seed: TSFFYRYGF
TFFFYRYGY

SEQ ID NO: 161938 - protein, 11 aa, Artificial Sequence
  Description of Artificial Sequence: Synthetic peptide
  Seed: TTFPYTGDPPY
TFFPYTGDPPF

SEQ ID NO: 161939 - protein, 11 aa, Artificial Sequence
  Description of Artificial Sequence: Synthetic peptide
  Seed: TTFPYTGDPPY
TFFPYTGDPPM

SEQ ID NO: 161940 - protein, 11 aa, Artificial Sequence
  Description of Artificial Sequence: Synthetic peptide
  Seed: TTFPYTGDPPY
TFFPYTGDPPY

SEQ ID NO: 161941 - protein, 10 aa, Artificial Sequence
  Description of Artificial Sequence: Synthetic peptide
  Seed: TVLGVSILNL
TFLGVSILNA

SEQ ID NO: 161942 - protein, 10 aa, Artificial Sequence
  Description of Artificial Sequence: Synthetic peptide
  Seed: TVLGVSILNL
TFLGVSILNI

SEQ ID NO: 161943 - protein, 10 aa, Artificial Sequence
  Description of Artificial Sequence: Synthetic peptide
  Seed: TVLGVSILNL
TFLGVSILNL

SEQ ID NO: 161944 - protein, 10 aa, Artificial Sequence
  Description of Artificial Sequence: Synthetic peptide
  Seed: TVLGVSILNL
TFLGVSILNV

SEQ ID NO: 161945 - protein, 11 aa, Artificial Sequence
  Description of Artificial Sequence: Synthetic peptide
  Seed: TLNTMTKDAER
TFNTMTKDAER

SEQ ID NO: 161946 - protein, 10 aa, Artificial Sequence
  Description of Artificial Sequence: Synthetic peptide
  Seed: TFPYTGDPPY
TFPYTGDPPF

SEQ ID NO: 161947 - protein, 10 aa, Artificial Sequence
  Description of Artificial Sequence: Synthetic peptide
  Seed: TFPYTGDPPY
TFPYTGDPPI

SEQ ID NO: 161948 - protein, 10 aa, Artificial Sequence
  Description of Artificial Sequence: Synthetic peptide
  Seed: TFPYTGDPPY
TFPYTGDPPL

SEQ ID NO: 161949 - protein, 10 aa, Artificial Sequence
  Description of Artificial Sequence: Synthetic peptide
  Seed: TFPYTGDPPY
TFPYTGDPPM

SEQ ID NO: 161950 - protein, 10 aa, Artificial Sequence
  Description of Artificial Sequence: Synthetic peptide
  Seed: TFPYTGDPPY
TFPYTGDPPW

SEQ ID NO: 161951 - protein, 10 aa, Artificial Sequence
  Description of Artificial Sequence: Synthetic peptide
  Seed: TGTGYTMDTV
TFTGYTMDTV

SEQ ID NO: 161952 - protein, 9 aa, Artificial Sequence
  Description of Artificial Sequence: Synthetic peptide
  Seed: TSFFYRYGF
TGFFYRYGF

SEQ ID NO: 161953 - protein, 9 aa, Artificial Sequence
  Description of Artificial Sequence: Synthetic peptide
  Seed: TSFFYRYGF
TGFFYRYGL

SEQ ID NO: 161954 - protein, 9 aa, Artificial Sequence
  Description of Artificial Sequence: Synthetic peptide
  Seed: TSFFYRYGF
TGFFYRYGM

SEQ ID NO: 161955 - protein, 9 aa, Artificial Sequence
  Description of Artificial Sequence: Synthetic peptide
  Seed: TSFFYRYGF
TGFFYRYGW

SEQ ID NO: 161956 - protein, 9 aa, Artificial Sequence
  Description of Artificial Sequence: Synthetic peptide
  Seed: TSFFYRYGF
TGFFYRYGY

SEQ ID NO: 161957 - protein, 11 aa, Artificial Sequence
  Description of Artificial Sequence: Synthetic peptide
  Seed: TTFPYTGDPPY
TGFPYTGDPPF

SEQ ID NO: 161958 - protein, 11 aa, Artificial Sequence
  Description of Artificial Sequence: Synthetic peptide
  Seed: TTFPYTGDPPY
TGFPYTGDPPM

SEQ ID NO: 161959 - protein, 11 aa, Artificial Sequence
  Description of Artificial Sequence: Synthetic peptide
  Seed: TTFPYTGDPPY
TGFPYTGDPPY

SEQ ID NO: 161960 - protein, 10 aa, Artificial Sequence
  Description of Artificial Sequence: Synthetic peptide
  Seed: TVLGVSILNL
TGLGVSILNV

SEQ ID NO: 161961 - protein, 11 aa, Artificial Sequence
  Description of Artificial Sequence: Synthetic peptide
  Seed: TLNTMTKDAER
TGNTMTKDAER

SEQ ID NO: 161962 - protein, 10 aa, Artificial Sequence
  Description of Artificial Sequence: Synthetic peptide
  Seed: TFPYTGDPPY
TGPYTGDPPF

SEQ ID NO: 161963 - protein, 10 aa, Artificial Sequence
  Description of Artificial Sequence: Synthetic peptide
  Seed: TFPYTGDPPY
TGPYTGDPPL

SEQ ID NO: 161964 - protein, 10 aa, Artificial Sequence
  Description of Artificial Sequence: Synthetic peptide
  Seed: TFPYTGDPPY
TGPYTGDPPM

SEQ ID NO: 161965 - protein, 10 aa, Artificial Sequence
  Description of Artificial Sequence: Synthetic peptide
  Seed: TFPYTGDPPY
TGPYTGDPPY

SEQ ID NO: 161966 - protein, 9 aa, Artificial Sequence
  Description of Artificial Sequence: Synthetic peptide
  Seed: TSFFYRYGF
THFFYRYGF

SEQ ID NO: 161967 - protein, 9 aa, Artificial Sequence
  Description of Artificial Sequence: Synthetic peptide
  Seed: TSFFYRYGF
THFFYRYGL

SEQ ID NO: 161968 - protein, 9 aa, Artificial Sequence
  Description of Artificial Sequence: Synthetic peptide
  Seed: TSFFYRYGF
THFFYRYGM

SEQ ID NO: 161969 - protein, 9 aa, Artificial Sequence
  Description of Artificial Sequence: Synthetic peptide
  Seed: TSFFYRYGF
THFFYRYGW

SEQ ID NO: 161970 - protein, 9 aa, Artificial Sequence
  Description of Artificial Sequence: Synthetic peptide
  Seed: TSFFYRYGF
THFFYRYGY

SEQ ID NO: 161971 - protein, 11 aa, Artificial Sequence
  Description of Artificial Sequence: Synthetic peptide
  Seed: TTFPYTGDPPY
THFPYTGDPPF

SEQ ID NO: 161972 - protein, 11 aa, Artificial Sequence
  Description of Artificial Sequence: Synthetic peptide
  Seed: TTFPYTGDPPY
THFPYTGDPPM

SEQ ID NO: 161973 - protein, 11 aa, Artificial Sequence
  Description of Artificial Sequence: Synthetic peptide
  Seed: TTFPYTGDPPY
THFPYTGDPPY

SEQ ID NO: 161974 - protein, 10 aa, Artificial Sequence
  Description of Artificial Sequence: Synthetic peptide
  Seed: TVLGVSILNL
THLGVSILNV

SEQ ID NO: 161975 - protein, 11 aa, Artificial Sequence
  Description of Artificial Sequence: Synthetic peptide
  Seed: TLNTMTKDAER
THNTMTKDAER

SEQ ID NO: 161976 - protein, 10 aa, Artificial Sequence
  Description of Artificial Sequence: Synthetic peptide
  Seed: TFPYTGDPPY
THPYTGDPPF

SEQ ID NO: 161977 - protein, 10 aa, Artificial Sequence
  Description of Artificial Sequence: Synthetic peptide
  Seed: TFPYTGDPPY
THPYTGDPPL

SEQ ID NO: 161978 - protein, 10 aa, Artificial Sequence
  Description of Artificial Sequence: Synthetic peptide
  Seed: TFPYTGDPPY
THPYTGDPPM

SEQ ID NO: 161979 - protein, 10 aa, Artificial Sequence
  Description of Artificial Sequence: Synthetic peptide
  Seed: TFPYTGDPPY
THPYTGDPPY

SEQ ID NO: 161980 - protein, 10 aa, Artificial Sequence
  Description of Artificial Sequence: Synthetic peptide
  Seed: TGTGYTMDTV
THTGYTMDTV

SEQ ID NO: 161981 - protein, 9 aa, Artificial Sequence
  Description of Artificial Sequence: Synthetic peptide
  Seed: TSFFYRYGF
TIFFYRYGF

SEQ ID NO: 161982 - protein, 9 aa, Artificial Sequence
  Description of Artificial Sequence: Synthetic peptide
  Seed: TSFFYRYGF
TIFFYRYGI

SEQ ID NO: 161983 - protein, 9 aa, Artificial Sequence
  Description of Artificial Sequence: Synthetic peptide
  Seed: TSFFYRYGF
TIFFYRYGL

SEQ ID NO: 161984 - protein, 9 aa, Artificial Sequence
  Description of Artificial Sequence: Synthetic peptide
  Seed: TSFFYRYGF
TIFFYRYGM

SEQ ID NO: 161985 - protein, 9 aa, Artificial Sequence
  Description of Artificial Sequence: Synthetic peptide
  Seed: TSFFYRYGF
TIFFYRYGV

SEQ ID NO: 161986 - protein, 9 aa, Artificial Sequence
  Description of Artificial Sequence: Synthetic peptide
  Seed: TSFFYRYGF
TIFFYRYGW

SEQ ID NO: 161987 - protein, 9 aa, Artificial Sequence
  Description of Artificial Sequence: Synthetic peptide
  Seed: TSFFYRYGF
TIFFYRYGY

SEQ ID NO: 161988 - protein, 11 aa, Artificial Sequence
  Description of Artificial Sequence: Synthetic peptide
  Seed: TTFPYTGDPPY
TIFPYTGDPPF

SEQ ID NO: 161989 - protein, 11 aa, Artificial Sequence
  Description of Artificial Sequence: Synthetic peptide
  Seed: TTFPYTGDPPY
TIFPYTGDPPK

SEQ ID NO: 161990 - protein, 11 aa, Artificial Sequence
  Description of Artificial Sequence: Synthetic peptide
  Seed: TTFPYTGDPPY
TIFPYTGDPPM

SEQ ID NO: 161991 - protein, 11 aa, Artificial Sequence
  Description of Artificial Sequence: Synthetic peptide
  Seed: TTFPYTGDPPY
TIFPYTGDPPR

SEQ ID NO: 161992 - protein, 11 aa, Artificial Sequence
  Description of Artificial Sequence: Synthetic peptide
  Seed: TTFPYTGDPPY
TIFPYTGDPPW

SEQ ID NO: 161993 - protein, 11 aa, Artificial Sequence
  Description of Artificial Sequence: Synthetic peptide
  Seed: TTFPYTGDPPY
TIFPYTGDPPY

SEQ ID NO: 161994 - protein, 10 aa, Artificial Sequence
  Description of Artificial Sequence: Synthetic peptide
  Seed: TVLGVSILNL
TILGVSILNA

SEQ ID NO: 161995 - protein, 10 aa, Artificial Sequence
  Description of Artificial Sequence: Synthetic peptide
  Seed: TVLGVSILNL
TILGVSILNI

SEQ ID NO: 161996 - protein, 10 aa, Artificial Sequence
  Description of Artificial Sequence: Synthetic peptide
  Seed: TVLGVSILNL
TILGVSILNL

SEQ ID NO: 161997 - protein, 10 aa, Artificial Sequence
  Description of Artificial Sequence: Synthetic peptide
  Seed: TVLGVSILNL
TILGVSILNV

SEQ ID NO: 161998 - protein, 11 aa, Artificial Sequence
  Description of Artificial Sequence: Synthetic peptide
  Seed: TLNTMTKDAER
TINTMTKDAER

SEQ ID NO: 161999 - protein, 10 aa, Artificial Sequence
  Description of Artificial Sequence: Synthetic peptide
  Seed: TFPYTGDPPY
TIPYTGDPPF

SEQ ID NO: 162000 - protein, 10 aa, Artificial Sequence
  Description of Artificial Sequence: Synthetic peptide
  Seed: TFPYTGDPPY
TIPYTGDPPL

SEQ ID NO: 162001 - protein, 10 aa, Artificial Sequence
  Description of Artificial Sequence: Synthetic peptide
  Seed: TFPYTGDPPY
TIPYTGDPPM

SEQ ID NO: 162002 - protein, 10 aa, Artificial Sequence
  Description of Artificial Sequence: Synthetic peptide
  Seed: TFPYTGDPPY
TIPYTGDPPY

SEQ ID NO: 162003 - protein, 10 aa, Artificial Sequence
  Description of Artificial Sequence: Synthetic peptide
  Seed: TGTGYTMDTV
TITGYTMDTV

SEQ ID NO: 162004 - protein, 9 aa, Artificial Sequence
  Description of Artificial Sequence: Synthetic peptide
  Seed: TSFFYRYGF
TKFFYRYGF

SEQ ID NO: 162005 - protein, 9 aa, Artificial Sequence
  Description of Artificial Sequence: Synthetic peptide
  Seed: TSFFYRYGF
TKFFYRYGI

SEQ ID NO: 162006 - protein, 9 aa, Artificial Sequence
  Description of Artificial Sequence: Synthetic peptide
  Seed: TSFFYRYGF
TKFFYRYGL

SEQ ID NO: 162007 - protein, 9 aa, Artificial Sequence
  Description of Artificial Sequence: Synthetic peptide
  Seed: TSFFYRYGF
TKFFYRYGM

SEQ ID NO: 162008 - protein, 9 aa, Artificial Sequence
  Description of Artificial Sequence: Synthetic peptide
  Seed: TSFFYRYGF
TKFFYRYGY

SEQ ID NO: 162009 - protein, 11 aa, Artificial Sequence
  Description of Artificial Sequence: Synthetic peptide
  Seed: TTFPYTGDPPY
TKFPYTGDPPF

SEQ ID NO: 162010 - protein, 11 aa, Artificial Sequence
  Description of Artificial Sequence: Synthetic peptide
  Seed: TTFPYTGDPPY
TKFPYTGDPPL

SEQ ID NO: 162011 - protein, 11 aa, Artificial Sequence
  Description of Artificial Sequence: Synthetic peptide
  Seed: TTFPYTGDPPY
TKFPYTGDPPM

SEQ ID NO: 162012 - protein, 11 aa, Artificial Sequence
  Description of Artificial Sequence: Synthetic peptide
  Seed: TTFPYTGDPPY
TKFPYTGDPPY

SEQ ID NO: 162013 - protein, 10 aa, Artificial Sequence
  Description of Artificial Sequence: Synthetic peptide
  Seed: TVLGVSILNL
TKLGVSILNV

SEQ ID NO: 162014 - protein, 11 aa, Artificial Sequence
  Description of Artificial Sequence: Synthetic peptide
  Seed: TLNTMTKDAER
TKNTMTKDAER

SEQ ID NO: 162015 - protein, 10 aa, Artificial Sequence
  Description of Artificial Sequence: Synthetic peptide
  Seed: TFPYTGDPPY
TKPYTGDPPF

SEQ ID NO: 162016 - protein, 10 aa, Artificial Sequence
  Description of Artificial Sequence: Synthetic peptide
  Seed: TFPYTGDPPY
TKPYTGDPPL

SEQ ID NO: 162017 - protein, 10 aa, Artificial Sequence
  Description of Artificial Sequence: Synthetic peptide
  Seed: TFPYTGDPPY
TKPYTGDPPM

SEQ ID NO: 162018 - protein, 10 aa, Artificial Sequence
  Description of Artificial Sequence: Synthetic peptide
  Seed: TFPYTGDPPY
TKPYTGDPPY

SEQ ID NO: 162019 - protein, 10 aa, Artificial Sequence
  Description of Artificial Sequence: Synthetic peptide
  Seed: TGTGYTMDTV
TKTGYTMDTV

SEQ ID NO: 162020 - protein, 9 aa, Artificial Sequence
  Description of Artificial Sequence: Synthetic peptide
  Seed: TSFFYRYGF
TLFFYRYGF

SEQ ID NO: 162021 - protein, 9 aa, Artificial Sequence
  Description of Artificial Sequence: Synthetic peptide
  Seed: TSFFYRYGF
TLFFYRYGI

SEQ ID NO: 162022 - protein, 9 aa, Artificial Sequence
  Description of Artificial Sequence: Synthetic peptide
  Seed: TSFFYRYGF
TLFFYRYGL

SEQ ID NO: 162023 - protein, 9 aa, Artificial Sequence
  Description of Artificial Sequence: Synthetic peptide
  Seed: TSFFYRYGF
TLFFYRYGM

SEQ ID NO: 162024 - protein, 9 aa, Artificial Sequence
  Description of Artificial Sequence: Synthetic peptide
  Seed: TSFFYRYGF
TLFFYRYGV

SEQ ID NO: 162025 - protein, 9 aa, Artificial Sequence
  Description of Artificial Sequence: Synthetic peptide
  Seed: TSFFYRYGF
TLFFYRYGW

SEQ ID NO: 162026 - protein, 9 aa, Artificial Sequence
  Description of Artificial Sequence: Synthetic peptide
  Seed: TSFFYRYGF
TLFFYRYGY

SEQ ID NO: 162027 - protein, 11 aa, Artificial Sequence
  Description of Artificial Sequence: Synthetic peptide
  Seed: TTFPYTGDPPY
TLFPYTGDPPF

SEQ ID NO: 162028 - protein, 11 aa, Artificial Sequence
  Description of Artificial Sequence: Synthetic peptide
  Seed: TTFPYTGDPPY
TLFPYTGDPPK

SEQ ID NO: 162029 - protein, 11 aa, Artificial Sequence
  Description of Artificial Sequence: Synthetic peptide
  Seed: TTFPYTGDPPY
TLFPYTGDPPM

SEQ ID NO: 162030 - protein, 11 aa, Artificial Sequence
  Description of Artificial Sequence: Synthetic peptide
  Seed: TTFPYTGDPPY
TLFPYTGDPPR

SEQ ID NO: 162031 - protein, 11 aa, Artificial Sequence
  Description of Artificial Sequence: Synthetic peptide
  Seed: TTFPYTGDPPY
TLFPYTGDPPW

SEQ ID NO: 162032 - protein, 11 aa, Artificial Sequence
  Description of Artificial Sequence: Synthetic peptide
  Seed: TTFPYTGDPPY
TLFPYTGDPPY

SEQ ID NO: 162033 - protein, 10 aa, Artificial Sequence
  Description of Artificial Sequence: Synthetic peptide
  Seed: TVLGVSILNL
TLLGVSILNA

SEQ ID NO: 162034 - protein, 10 aa, Artificial Sequence
  Description of Artificial Sequence: Synthetic peptide
  Seed: TVLGVSILNL
TLLGVSILNI

SEQ ID NO: 162035 - protein, 10 aa, Artificial Sequence
  Description of Artificial Sequence: Synthetic peptide
  Seed: TVLGVSILNL
TLLGVSILNL

SEQ ID NO: 162036 - protein, 10 aa, Artificial Sequence
  Description of Artificial Sequence: Synthetic peptide
  Seed: TVLGVSILNL
TLLGVSILNM

SEQ ID NO: 162037 - protein, 10 aa, Artificial Sequence
  Description of Artificial Sequence: Synthetic peptide
  Seed: TVLGVSILNL
TLLGVSILNT

SEQ ID NO: 162038 - protein, 10 aa, Artificial Sequence
  Description of Artificial Sequence: Synthetic peptide
  Seed: TVLGVSILNL
TLLGVSILNV

SEQ ID NO: 162039 - protein, 10 aa, Artificial Sequence
  Description of Artificial Sequence: Synthetic peptide
  Seed: TFPYTGDPPY
TLPYTGDPPF

SEQ ID NO: 162040 - protein, 10 aa, Artificial Sequence
  Description of Artificial Sequence: Synthetic peptide
  Seed: TFPYTGDPPY
TLPYTGDPPL

SEQ ID NO: 162041 - protein, 10 aa, Artificial Sequence
  Description of Artificial Sequence: Synthetic peptide
  Seed: TFPYTGDPPY
TLPYTGDPPM

SEQ ID NO: 162042 - protein, 10 aa, Artificial Sequence
  Description of Artificial Sequence: Synthetic peptide
  Seed: TFPYTGDPPY
TLPYTGDPPY

SEQ ID NO: 162043 - protein, 10 aa, Artificial Sequence
  Description of Artificial Sequence: Synthetic peptide
  Seed: TGTGYTMDTV
TLTGYTMDTV

SEQ ID NO: 162044 - protein, 9 aa, Artificial Sequence
  Description of Artificial Sequence: Synthetic peptide
  Seed: TSFFYRYGF
TMFFYRYGF

SEQ ID NO: 162045 - protein, 9 aa, Artificial Sequence
  Description of Artificial Sequence: Synthetic peptide
  Seed: TSFFYRYGF
TMFFYRYGH

SEQ ID NO: 162046 - protein, 9 aa, Artificial Sequence
  Description of Artificial Sequence: Synthetic peptide
  Seed: TSFFYRYGF
TMFFYRYGI

SEQ ID NO: 162047 - protein, 9 aa, Artificial Sequence
  Description of Artificial Sequence: Synthetic peptide
  Seed: TSFFYRYGF
TMFFYRYGL

SEQ ID NO: 162048 - protein, 9 aa, Artificial Sequence
  Description of Artificial Sequence: Synthetic peptide
  Seed: TSFFYRYGF
TMFFYRYGM

SEQ ID NO: 162049 - protein, 9 aa, Artificial Sequence
  Description of Artificial Sequence: Synthetic peptide
  Seed: TSFFYRYGF
TMFFYRYGV

SEQ ID NO: 162050 - protein, 9 aa, Artificial Sequence
  Description of Artificial Sequence: Synthetic peptide
  Seed: TSFFYRYGF
TMFFYRYGW

SEQ ID NO: 162051 - protein, 9 aa, Artificial Sequence
  Description of Artificial Sequence: Synthetic peptide
  Seed: TSFFYRYGF
TMFFYRYGY

SEQ ID NO: 162052 - protein, 11 aa, Artificial Sequence
  Description of Artificial Sequence: Synthetic peptide
  Seed: TTFPYTGDPPY
TMFPYTGDPPF

SEQ ID NO: 162053 - protein, 11 aa, Artificial Sequence
  Description of Artificial Sequence: Synthetic peptide
  Seed: TTFPYTGDPPY
TMFPYTGDPPK

SEQ ID NO: 162054 - protein, 11 aa, Artificial Sequence
  Description of Artificial Sequence: Synthetic peptide
  Seed: TTFPYTGDPPY
TMFPYTGDPPL

SEQ ID NO: 162055 - protein, 11 aa, Artificial Sequence
  Description of Artificial Sequence: Synthetic peptide
  Seed: TTFPYTGDPPY
TMFPYTGDPPM

SEQ ID NO: 162056 - protein, 11 aa, Artificial Sequence
  Description of Artificial Sequence: Synthetic peptide
  Seed: TTFPYTGDPPY
TMFPYTGDPPR

SEQ ID NO: 162057 - protein, 11 aa, Artificial Sequence
  Description of Artificial Sequence: Synthetic peptide
  Seed: TTFPYTGDPPY
TMFPYTGDPPW

SEQ ID NO: 162058 - protein, 11 aa, Artificial Sequence
  Description of Artificial Sequence: Synthetic peptide
  Seed: TTFPYTGDPPY
TMFPYTGDPPY

SEQ ID NO: 162059 - protein, 10 aa, Artificial Sequence
  Description of Artificial Sequence: Synthetic peptide
  Seed: TVLGVSILNL
TMLGVSILNA

SEQ ID NO: 162060 - protein, 10 aa, Artificial Sequence
  Description of Artificial Sequence: Synthetic peptide
  Seed: TVLGVSILNL
TMLGVSILNI

SEQ ID NO: 162061 - protein, 10 aa, Artificial Sequence
  Description of Artificial Sequence: Synthetic peptide
  Seed: TVLGVSILNL
TMLGVSILNL

SEQ ID NO: 162062 - protein, 10 aa, Artificial Sequence
  Description of Artificial Sequence: Synthetic peptide
  Seed: TVLGVSILNL
TMLGVSILNM

SEQ ID NO: 162063 - protein, 10 aa, Artificial Sequence
  Description of Artificial Sequence: Synthetic peptide
  Seed: TVLGVSILNL
TMLGVSILNT

SEQ ID NO: 162064 - protein, 10 aa, Artificial Sequence
  Description of Artificial Sequence: Synthetic peptide
  Seed: TVLGVSILNL
TMLGVSILNV

SEQ ID NO: 162065 - protein, 11 aa, Artificial Sequence
  Description of Artificial Sequence: Synthetic peptide
  Seed: TLNTMTKDAER
TMNTMTKDAER

SEQ ID NO: 162066 - protein, 10 aa, Artificial Sequence
  Description of Artificial Sequence: Synthetic peptide
  Seed: TFPYTGDPPY
TMPYTGDPPF

SEQ ID NO: 162067 - protein, 10 aa, Artificial Sequence
  Description of Artificial Sequence: Synthetic peptide
  Seed: TFPYTGDPPY
TMPYTGDPPL

SEQ ID NO: 162068 - protein, 10 aa, Artificial Sequence
  Description of Artificial Sequence: Synthetic peptide
  Seed: TFPYTGDPPY
TMPYTGDPPM

SEQ ID NO: 162069 - protein, 10 aa, Artificial Sequence
  Description of Artificial Sequence: Synthetic peptide
  Seed: TFPYTGDPPY
TMPYTGDPPW

SEQ ID NO: 162070 - protein, 10 aa, Artificial Sequence
  Description of Artificial Sequence: Synthetic peptide
  Seed: TFPYTGDPPY
TMPYTGDPPY

SEQ ID NO: 162071 - protein, 10 aa, Artificial Sequence
  Description of Artificial Sequence: Synthetic peptide
  Seed: TGTGYTMDTV
TMTGYTMDTV

SEQ ID NO: 162072 - protein, 9 aa, Artificial Sequence
  Description of Artificial Sequence: Synthetic peptide
  Seed: TSFFYRYGF
TNFFYRYGF

SEQ ID NO: 162073 - protein, 9 aa, Artificial Sequence
  Description of Artificial Sequence: Synthetic peptide
  Seed: TSFFYRYGF
TNFFYRYGW

SEQ ID NO: 162074 - protein, 9 aa, Artificial Sequence
  Description of Artificial Sequence: Synthetic peptide
  Seed: TSFFYRYGF
TNFFYRYGY

SEQ ID NO: 162075 - protein, 11 aa, Artificial Sequence
  Description of Artificial Sequence: Synthetic peptide
  Seed: TTFPYTGDPPY
TNFPYTGDPPF

SEQ ID NO: 162076 - protein, 11 aa, Artificial Sequence
  Description of Artificial Sequence: Synthetic peptide
  Seed: TTFPYTGDPPY
TNFPYTGDPPM

SEQ ID NO: 162077 - protein, 11 aa, Artificial Sequence
  Description of Artificial Sequence: Synthetic peptide
  Seed: TTFPYTGDPPY
TNFPYTGDPPY

SEQ ID NO: 162078 - protein, 10 aa, Artificial Sequence
  Description of Artificial Sequence: Synthetic peptide
  Seed: TVLGVSILNL
TNLGVSILNV

SEQ ID NO: 162079 - protein, 11 aa, Artificial Sequence
  Description of Artificial Sequence: Synthetic peptide
  Seed: TLNTMTKDAER
TNNTMTKDAER

SEQ ID NO: 162080 - protein, 10 aa, Artificial Sequence
  Description of Artificial Sequence: Synthetic peptide
  Seed: TFPYTGDPPY
TNPYTGDPPF

SEQ ID NO: 162081 - protein, 10 aa, Artificial Sequence
  Description of Artificial Sequence: Synthetic peptide
  Seed: TFPYTGDPPY
TNPYTGDPPL

SEQ ID NO: 162082 - protein, 10 aa, Artificial Sequence
  Description of Artificial Sequence: Synthetic peptide
  Seed: TFPYTGDPPY
TNPYTGDPPM

SEQ ID NO: 162083 - protein, 10 aa, Artificial Sequence
  Description of Artificial Sequence: Synthetic peptide
  Seed: TFPYTGDPPY
TNPYTGDPPY

SEQ ID NO: 162084 - protein, 10 aa, Artificial Sequence
  Description of Artificial Sequence: Synthetic peptide
  Seed: TGTGYTMDTV
TNTGYTMDTV

SEQ ID NO: 162085 - protein, 9 aa, Artificial Sequence
  Description of Artificial Sequence: Synthetic peptide
  Seed: TSFFYRYGF
TPFFYRYGA

SEQ ID NO: 162086 - protein, 9 aa, Artificial Sequence
  Description of Artificial Sequence: Synthetic peptide
  Seed: TSFFYRYGF
TPFFYRYGF

SEQ ID NO: 162087 - protein, 9 aa, Artificial Sequence
  Description of Artificial Sequence: Synthetic peptide
  Seed: TSFFYRYGF
TPFFYRYGH

SEQ ID NO: 162088 - protein, 9 aa, Artificial Sequence
  Description of Artificial Sequence: Synthetic peptide
  Seed: TSFFYRYGF
TPFFYRYGL

SEQ ID NO: 162089 - protein, 9 aa, Artificial Sequence
  Description of Artificial Sequence: Synthetic peptide
  Seed: TSFFYRYGF
TPFFYRYGM

SEQ ID NO: 162090 - protein, 9 aa, Artificial Sequence
  Description of Artificial Sequence: Synthetic peptide
  Seed: TSFFYRYGF
TPFFYRYGW

SEQ ID NO: 162091 - protein, 9 aa, Artificial Sequence
  Description of Artificial Sequence: Synthetic peptide
  Seed: TSFFYRYGF
TPFFYRYGY

SEQ ID NO: 162092 - protein, 11 aa, Artificial Sequence
  Description of Artificial Sequence: Synthetic peptide
  Seed: TTFPYTGDPPY
TPFPYTGDPPF

SEQ ID NO: 162093 - protein, 11 aa, Artificial Sequence
  Description of Artificial Sequence: Synthetic peptide
  Seed: TTFPYTGDPPY
TPFPYTGDPPL

SEQ ID NO: 162094 - protein, 11 aa, Artificial Sequence
  Description of Artificial Sequence: Synthetic peptide
  Seed: TTFPYTGDPPY
TPFPYTGDPPM

SEQ ID NO: 162095 - protein, 11 aa, Artificial Sequence
  Description of Artificial Sequence: Synthetic peptide
  Seed: TTFPYTGDPPY
TPFPYTGDPPY

SEQ ID NO: 162096 - protein, 10 aa, Artificial Sequence
  Description of Artificial Sequence: Synthetic peptide
  Seed: TPGMQIRGFV
TPGMQIRGFA

SEQ ID NO: 162097 - protein, 10 aa, Artificial Sequence
  Description of Artificial Sequence: Synthetic peptide
  Seed: TPGMQIRGFV
TPGMQIRGFF

SEQ ID NO: 162098 - protein, 10 aa, Artificial Sequence
  Description of Artificial Sequence: Synthetic peptide
  Seed: TPGMQIRGFV
TPGMQIRGFI

SEQ ID NO: 162099 - protein, 10 aa, Artificial Sequence
  Description of Artificial Sequence: Synthetic peptide
  Seed: TPGMQIRGFV
TPGMQIRGFL

SEQ ID NO: 162100 - protein, 10 aa, Artificial Sequence
  Description of Artificial Sequence: Synthetic peptide
  Seed: TPGMQIRGFV
TPGMQIRGFM

SEQ ID NO: 162101 - protein, 9 aa, Artificial Sequence
  Description of Artificial Sequence: Synthetic peptide
  Seed: TPGMQIRGF
TPGMQIRGI

SEQ ID NO: 162102 - protein, 9 aa, Artificial Sequence
  Description of Artificial Sequence: Synthetic peptide
  Seed: TPGMQIRGF
TPGMQIRGL

SEQ ID NO: 162103 - protein, 9 aa, Artificial Sequence
  Description of Artificial Sequence: Synthetic peptide
  Seed: TPGMQIRGF
TPGMQIRGM

SEQ ID NO: 162104 - protein, 9 aa, Artificial Sequence
  Description of Artificial Sequence: Synthetic peptide
  Seed: TPGMQIRGF
TPGMQIRGV

SEQ ID NO: 162105 - protein, 10 aa, Artificial Sequence
  Description of Artificial Sequence: Synthetic peptide
  Seed: TVLGVSILNL
TPLGVSILNV

SEQ ID NO: 162106 - protein, 11 aa, Artificial Sequence
  Description of Artificial Sequence: Synthetic peptide
  Seed: TLNTMTKDAER
TPNTMTKDAER

SEQ ID NO: 162107 - protein, 10 aa, Artificial Sequence
  Description of Artificial Sequence: Synthetic peptide
  Seed: TFPYTGDPPY
TPPYTGDPPF

SEQ ID NO: 162108 - protein, 10 aa, Artificial Sequence
  Description of Artificial Sequence: Synthetic peptide
  Seed: TFPYTGDPPY
TPPYTGDPPL

SEQ ID NO: 162109 - protein, 10 aa, Artificial Sequence
  Description of Artificial Sequence: Synthetic peptide
  Seed: TFPYTGDPPY
TPPYTGDPPM

SEQ ID NO: 162110 - protein, 10 aa, Artificial Sequence
  Description of Artificial Sequence: Synthetic peptide
  Seed: TFPYTGDPPY
TPPYTGDPPY

SEQ ID NO: 162111 - protein, 10 aa, Artificial Sequence
  Description of Artificial Sequence: Synthetic peptide
  Seed: TGTGYTMDTV
TPTGYTMDTV

SEQ ID NO: 162112 - protein, 9 aa, Artificial Sequence
  Description of Artificial Sequence: Synthetic peptide
  Seed: TSFFYRYGF
TQFFYRYGA

SEQ ID NO: 162113 - protein, 9 aa, Artificial Sequence
  Description of Artificial Sequence: Synthetic peptide
  Seed: TSFFYRYGF
TQFFYRYGF

SEQ ID NO: 162114 - protein, 9 aa, Artificial Sequence
  Description of Artificial Sequence: Synthetic peptide
  Seed: TSFFYRYGF
TQFFYRYGH

SEQ ID NO: 162115 - protein, 9 aa, Artificial Sequence
  Description of Artificial Sequence: Synthetic peptide
  Seed: TSFFYRYGF
TQFFYRYGI

SEQ ID NO: 162116 - protein, 9 aa, Artificial Sequence
  Description of Artificial Sequence: Synthetic peptide
  Seed: TSFFYRYGF
TQFFYRYGL

SEQ ID NO: 162117 - protein, 9 aa, Artificial Sequence
  Description of Artificial Sequence: Synthetic peptide
  Seed: TSFFYRYGF
TQFFYRYGM

SEQ ID NO: 162118 - protein, 9 aa, Artificial Sequence
  Description of Artificial Sequence: Synthetic peptide
  Seed: TSFFYRYGF
TQFFYRYGV

SEQ ID NO: 162119 - protein, 9 aa, Artificial Sequence
  Description of Artificial Sequence: Synthetic peptide
  Seed: TSFFYRYGF
TQFFYRYGW

SEQ ID NO: 162120 - protein, 9 aa, Artificial Sequence
  Description of Artificial Sequence: Synthetic peptide
  Seed: TSFFYRYGF
TQFFYRYGY

SEQ ID NO: 162121 - protein, 11 aa, Artificial Sequence
  Description of Artificial Sequence: Synthetic peptide
  Seed: TTFPYTGDPPY
TQFPYTGDPPF

SEQ ID NO: 162122 - protein, 11 aa, Artificial Sequence
  Description of Artificial Sequence: Synthetic peptide
  Seed: TTFPYTGDPPY
TQFPYTGDPPH

SEQ ID NO: 162123 - protein, 11 aa, Artificial Sequence
  Description of Artificial Sequence: Synthetic peptide
  Seed: TTFPYTGDPPY
TQFPYTGDPPI

SEQ ID NO: 162124 - protein, 11 aa, Artificial Sequence
  Description of Artificial Sequence: Synthetic peptide
  Seed: TTFPYTGDPPY
TQFPYTGDPPL

SEQ ID NO: 162125 - protein, 11 aa, Artificial Sequence
  Description of Artificial Sequence: Synthetic peptide
  Seed: TTFPYTGDPPY
TQFPYTGDPPM

SEQ ID NO: 162126 - protein, 11 aa, Artificial Sequence
  Description of Artificial Sequence: Synthetic peptide
  Seed: TTFPYTGDPPY
TQFPYTGDPPV

SEQ ID NO: 162127 - protein, 11 aa, Artificial Sequence
  Description of Artificial Sequence: Synthetic peptide
  Seed: TTFPYTGDPPY
TQFPYTGDPPW

SEQ ID NO: 162128 - protein, 11 aa, Artificial Sequence
  Description of Artificial Sequence: Synthetic peptide
  Seed: TTFPYTGDPPY
TQFPYTGDPPY

SEQ ID NO: 162129 - protein, 10 aa, Artificial Sequence
  Description of Artificial Sequence: Synthetic peptide
  Seed: TVLGVSILNL
TQLGVSILNA

SEQ ID NO: 162130 - protein, 10 aa, Artificial Sequence
  Description of Artificial Sequence: Synthetic peptide
  Seed: TVLGVSILNL
TQLGVSILNI

SEQ ID NO: 162131 - protein, 10 aa, Artificial Sequence
  Description of Artificial Sequence: Synthetic peptide
  Seed: TVLGVSILNL
TQLGVSILNL

SEQ ID NO: 162132 - protein, 10 aa, Artificial Sequence
  Description of Artificial Sequence: Synthetic peptide
  Seed: TVLGVSILNL
TQLGVSILNM

SEQ ID NO: 162133 - protein, 10 aa, Artificial Sequence
  Description of Artificial Sequence: Synthetic peptide
  Seed: TVLGVSILNL
TQLGVSILNV

SEQ ID NO: 162134 - protein, 11 aa, Artificial Sequence
  Description of Artificial Sequence: Synthetic peptide
  Seed: TLNTMTKDAER
TQNTMTKDAER

SEQ ID NO: 162135 - protein, 10 aa, Artificial Sequence
  Description of Artificial Sequence: Synthetic peptide
  Seed: TFPYTGDPPY
TQPYTGDPPF

SEQ ID NO: 162136 - protein, 10 aa, Artificial Sequence
  Description of Artificial Sequence: Synthetic peptide
  Seed: TFPYTGDPPY
TQPYTGDPPH

SEQ ID NO: 162137 - protein, 10 aa, Artificial Sequence
  Description of Artificial Sequence: Synthetic peptide
  Seed: TFPYTGDPPY
TQPYTGDPPI

SEQ ID NO: 162138 - protein, 10 aa, Artificial Sequence
  Description of Artificial Sequence: Synthetic peptide
  Seed: TFPYTGDPPY
TQPYTGDPPL

SEQ ID NO: 162139 - protein, 10 aa, Artificial Sequence
  Description of Artificial Sequence: Synthetic peptide
  Seed: TFPYTGDPPY
TQPYTGDPPM

SEQ ID NO: 162140 - protein, 10 aa, Artificial Sequence
  Description of Artificial Sequence: Synthetic peptide
  Seed: TFPYTGDPPY
TQPYTGDPPW

SEQ ID NO: 162141 - protein, 10 aa, Artificial Sequence
  Description of Artificial Sequence: Synthetic peptide
  Seed: TFPYTGDPPY
TQPYTGDPPY

SEQ ID NO: 162142 - protein, 10 aa, Artificial Sequence
  Description of Artificial Sequence: Synthetic peptide
  Seed: TGTGYTMDTV
TQTGYTMDTV

SEQ ID NO: 162143 - protein, 9 aa, Artificial Sequence
  Description of Artificial Sequence: Synthetic peptide
  Seed: TSFFYRYGF
TRFFYRYGF

SEQ ID NO: 162144 - protein, 9 aa, Artificial Sequence
  Description of Artificial Sequence: Synthetic peptide
  Seed: TSFFYRYGF
TRFFYRYGM

SEQ ID NO: 162145 - protein, 9 aa, Artificial Sequence
  Description of Artificial Sequence: Synthetic peptide
  Seed: TSFFYRYGF
TRFFYRYGY

SEQ ID NO: 162146 - protein, 11 aa, Artificial Sequence
  Description of Artificial Sequence: Synthetic peptide
  Seed: TTFPYTGDPPY
TRFPYTGDPPF

SEQ ID NO: 162147 - protein, 11 aa, Artificial Sequence
  Description of Artificial Sequence: Synthetic peptide
  Seed: TTFPYTGDPPY
TRFPYTGDPPM

SEQ ID NO: 162148 - protein, 11 aa, Artificial Sequence
  Description of Artificial Sequence: Synthetic peptide
  Seed: TTFPYTGDPPY
TRFPYTGDPPY

SEQ ID NO: 162149 - protein, 10 aa, Artificial Sequence
  Description of Artificial Sequence: Synthetic peptide
  Seed: TVLGVSILNL
TRLGVSILNV

SEQ ID NO: 162150 - protein, 11 aa, Artificial Sequence
  Description of Artificial Sequence: Synthetic peptide
  Seed: TLNTMTKDAER
TRNTMTKDAER

SEQ ID NO: 162151 - protein, 10 aa, Artificial Sequence
  Description of Artificial Sequence: Synthetic peptide
  Seed: TFPYTGDPPY
TRPYTGDPPF

SEQ ID NO: 162152 - protein, 10 aa, Artificial Sequence
  Description of Artificial Sequence: Synthetic peptide
  Seed: TFPYTGDPPY
TRPYTGDPPL

SEQ ID NO: 162153 - protein, 10 aa, Artificial Sequence
  Description of Artificial Sequence: Synthetic peptide
  Seed: TFPYTGDPPY
TRPYTGDPPM

SEQ ID NO: 162154 - protein, 10 aa, Artificial Sequence
  Description of Artificial Sequence: Synthetic peptide
  Seed: TFPYTGDPPY
TRPYTGDPPY

SEQ ID NO: 162155 - protein, 10 aa, Artificial Sequence
  Description of Artificial Sequence: Synthetic peptide
  Seed: TGTGYTMDTV
TRTGYTMDTV

SEQ ID NO: 162156 - protein, 9 aa, Artificial Sequence
  Description of Artificial Sequence: Synthetic peptide
  Seed: TSFFYRYGF
TSFFYRYGI

SEQ ID NO: 162157 - protein, 9 aa, Artificial Sequence
  Description of Artificial Sequence: Synthetic peptide
  Seed: TSFFYRYGF
TSFFYRYGL

SEQ ID NO: 162158 - protein, 9 aa, Artificial Sequence
  Description of Artificial Sequence: Synthetic peptide
  Seed: TSFFYRYGF
TSFFYRYGM

SEQ ID NO: 162159 - protein, 9 aa, Artificial Sequence
  Description of Artificial Sequence: Synthetic peptide
  Seed: TSFFYRYGF
TSFFYRYGV

SEQ ID NO: 162160 - protein, 9 aa, Artificial Sequence
  Description of Artificial Sequence: Synthetic peptide
  Seed: TSFFYRYGF
TSFFYRYGY

SEQ ID NO: 162161 - protein, 11 aa, Artificial Sequence
  Description of Artificial Sequence: Synthetic peptide
  Seed: TTFPYTGDPPY
TSFPYTGDPPF

SEQ ID NO: 162162 - protein, 11 aa, Artificial Sequence
  Description of Artificial Sequence: Synthetic peptide
  Seed: TTFPYTGDPPY
TSFPYTGDPPI

SEQ ID NO: 162163 - protein, 11 aa, Artificial Sequence
  Description of Artificial Sequence: Synthetic peptide
  Seed: TTFPYTGDPPY
TSFPYTGDPPK

SEQ ID NO: 162164 - protein, 11 aa, Artificial Sequence
  Description of Artificial Sequence: Synthetic peptide
  Seed: TTFPYTGDPPY
TSFPYTGDPPL

SEQ ID NO: 162165 - protein, 11 aa, Artificial Sequence
  Description of Artificial Sequence: Synthetic peptide
  Seed: TTFPYTGDPPY
TSFPYTGDPPM

SEQ ID NO: 162166 - protein, 11 aa, Artificial Sequence
  Description of Artificial Sequence: Synthetic peptide
  Seed: TTFPYTGDPPY
TSFPYTGDPPR

SEQ ID NO: 162167 - protein, 11 aa, Artificial Sequence
  Description of Artificial Sequence: Synthetic peptide
  Seed: TTFPYTGDPPY
TSFPYTGDPPW

SEQ ID NO: 162168 - protein, 11 aa, Artificial Sequence
  Description of Artificial Sequence: Synthetic peptide
  Seed: TTFPYTGDPPY
TSFPYTGDPPY

SEQ ID NO: 162169 - protein, 10 aa, Artificial Sequence
  Description of Artificial Sequence: Synthetic peptide
  Seed: TVLGVSILNL
TSLGVSILNV

SEQ ID NO: 162170 - protein, 11 aa, Artificial Sequence
  Description of Artificial Sequence: Synthetic peptide
  Seed: TLNTMTKDAER
TSNTMTKDAER

SEQ ID NO: 162171 - protein, 10 aa, Artificial Sequence
  Description of Artificial Sequence: Synthetic peptide
  Seed: TFPYTGDPPY
TSPYTGDPPF

SEQ ID NO: 162172 - protein, 10 aa, Artificial Sequence
  Description of Artificial Sequence: Synthetic peptide
  Seed: TFPYTGDPPY
TSPYTGDPPL

SEQ ID NO: 162173 - protein, 10 aa, Artificial Sequence
  Description of Artificial Sequence: Synthetic peptide
  Seed: TFPYTGDPPY
TSPYTGDPPM

SEQ ID NO: 162174 - protein, 10 aa, Artificial Sequence
  Description of Artificial Sequence: Synthetic peptide
  Seed: TFPYTGDPPY
TSPYTGDPPY

SEQ ID NO: 162175 - protein, 10 aa, Artificial Sequence
  Description of Artificial Sequence: Synthetic peptide
  Seed: TGTGYTMDTV
TSTGYTMDTV

SEQ ID NO: 162176 - protein, 9 aa, Artificial Sequence
  Description of Artificial Sequence: Synthetic peptide
  Seed: TSFFYRYGF
TTFFYRYGF

SEQ ID NO: 162177 - protein, 9 aa, Artificial Sequence
  Description of Artificial Sequence: Synthetic peptide
  Seed: TSFFYRYGF
TTFFYRYGI

SEQ ID NO: 162178 - protein, 9 aa, Artificial Sequence
  Description of Artificial Sequence: Synthetic peptide
  Seed: TSFFYRYGF
TTFFYRYGL

SEQ ID NO: 162179 - protein, 9 aa, Artificial Sequence
  Description of Artificial Sequence: Synthetic peptide
  Seed: TSFFYRYGF
TTFFYRYGM

SEQ ID NO: 162180 - protein, 9 aa, Artificial Sequence
  Description of Artificial Sequence: Synthetic peptide
  Seed: TSFFYRYGF
TTFFYRYGV

SEQ ID NO: 162181 - protein, 9 aa, Artificial Sequence
  Description of Artificial Sequence: Synthetic peptide
  Seed: TSFFYRYGF
TTFFYRYGY

SEQ ID NO: 162182 - protein, 11 aa, Artificial Sequence
  Description of Artificial Sequence: Synthetic peptide
  Seed: TTFPYTGDPPY
TTFPYTGDPPF

SEQ ID NO: 162183 - protein, 11 aa, Artificial Sequence
  Description of Artificial Sequence: Synthetic peptide
  Seed: TTFPYTGDPPY
TTFPYTGDPPK

SEQ ID NO: 162184 - protein, 11 aa, Artificial Sequence
  Description of Artificial Sequence: Synthetic peptide
  Seed: TTFPYTGDPPY
TTFPYTGDPPL

SEQ ID NO: 162185 - protein, 11 aa, Artificial Sequence
  Description of Artificial Sequence: Synthetic peptide
  Seed: TTFPYTGDPPY
TTFPYTGDPPM

SEQ ID NO: 162186 - protein, 11 aa, Artificial Sequence
  Description of Artificial Sequence: Synthetic peptide
  Seed: TTFPYTGDPPY
TTFPYTGDPPR

SEQ ID NO: 162187 - protein, 11 aa, Artificial Sequence
  Description of Artificial Sequence: Synthetic peptide
  Seed: TTFPYTGDPPY
TTFPYTGDPPW

SEQ ID NO: 162188 - protein, 10 aa, Artificial Sequence
  Description of Artificial Sequence: Synthetic peptide
  Seed: TVLGVSILNL
TTLGVSILNA

SEQ ID NO: 162189 - protein, 10 aa, Artificial Sequence
  Description of Artificial Sequence: Synthetic peptide
  Seed: TVLGVSILNL
TTLGVSILNI

SEQ ID NO: 162190 - protein, 10 aa, Artificial Sequence
  Description of Artificial Sequence: Synthetic peptide
  Seed: TVLGVSILNL
TTLGVSILNL

SEQ ID NO: 162191 - protein, 10 aa, Artificial Sequence
  Description of Artificial Sequence: Synthetic peptide
  Seed: TVLGVSILNL
TTLGVSILNM

SEQ ID NO: 162192 - protein, 10 aa, Artificial Sequence
  Description of Artificial Sequence: Synthetic peptide
  Seed: TVLGVSILNL
TTLGVSILNV

SEQ ID NO: 162193 - protein, 11 aa, Artificial Sequence
  Description of Artificial Sequence: Synthetic peptide
  Seed: TLNTMTKDAER
TTNTMTKDAEK

SEQ ID NO: 162194 - protein, 11 aa, Artificial Sequence
  Description of Artificial Sequence: Synthetic peptide
  Seed: TLNTMTKDAER
TTNTMTKDAER

SEQ ID NO: 162195 - protein, 10 aa, Artificial Sequence
  Description of Artificial Sequence: Synthetic peptide
  Seed: TFPYTGDPPY
TTPYTGDPPF

SEQ ID NO: 162196 - protein, 10 aa, Artificial Sequence
  Description of Artificial Sequence: Synthetic peptide
  Seed: TFPYTGDPPY
TTPYTGDPPL

SEQ ID NO: 162197 - protein, 10 aa, Artificial Sequence
  Description of Artificial Sequence: Synthetic peptide
  Seed: TFPYTGDPPY
TTPYTGDPPM

SEQ ID NO: 162198 - protein, 10 aa, Artificial Sequence
  Description of Artificial Sequence: Synthetic peptide
  Seed: TFPYTGDPPY
TTPYTGDPPY

SEQ ID NO: 162199 - protein, 10 aa, Artificial Sequence
  Description of Artificial Sequence: Synthetic peptide
  Seed: TGTGYTMDTV
TTTGYTMDTA

SEQ ID NO: 162200 - protein, 10 aa, Artificial Sequence
  Description of Artificial Sequence: Synthetic peptide
  Seed: TGTGYTMDTV
TTTGYTMDTI

SEQ ID NO: 162201 - protein, 10 aa, Artificial Sequence
  Description of Artificial Sequence: Synthetic peptide
  Seed: TGTGYTMDTV
TTTGYTMDTL

SEQ ID NO: 162202 - protein, 10 aa, Artificial Sequence
  Description of Artificial Sequence: Synthetic peptide
  Seed: TGTGYTMDTV
TTTGYTMDTV

SEQ ID NO: 162203 - protein, 9 aa, Artificial Sequence
  Description of Artificial Sequence: Synthetic peptide
  Seed: TSFFYRYGF
TVFFYRYGF

SEQ ID NO: 162204 - protein, 9 aa, Artificial Sequence
  Description of Artificial Sequence: Synthetic peptide
  Seed: TSFFYRYGF
TVFFYRYGI

SEQ ID NO: 162205 - protein, 9 aa, Artificial Sequence
  Description of Artificial Sequence: Synthetic peptide
  Seed: TSFFYRYGF
TVFFYRYGL

SEQ ID NO: 162206 - protein, 9 aa, Artificial Sequence
  Description of Artificial Sequence: Synthetic peptide
  Seed: TSFFYRYGF
TVFFYRYGM

SEQ ID NO: 162207 - protein, 9 aa, Artificial Sequence
  Description of Artificial Sequence: Synthetic peptide
  Seed: TSFFYRYGF
TVFFYRYGV

SEQ ID NO: 162208 - protein, 9 aa, Artificial Sequence
  Description of Artificial Sequence: Synthetic peptide
  Seed: TSFFYRYGF
TVFFYRYGW

SEQ ID NO: 162209 - protein, 9 aa, Artificial Sequence
  Description of Artificial Sequence: Synthetic peptide
  Seed: TSFFYRYGF
TVFFYRYGY

SEQ ID NO: 162210 - protein, 11 aa, Artificial Sequence
  Description of Artificial Sequence: Synthetic peptide
  Seed: TTFPYTGDPPY
TVFPYTGDPPF

SEQ ID NO: 162211 - protein, 11 aa, Artificial Sequence
  Description of Artificial Sequence: Synthetic peptide
  Seed: TTFPYTGDPPY
TVFPYTGDPPK

SEQ ID NO: 162212 - protein, 11 aa, Artificial Sequence
  Description of Artificial Sequence: Synthetic peptide
  Seed: TTFPYTGDPPY
TVFPYTGDPPM

SEQ ID NO: 162213 - protein, 11 aa, Artificial Sequence
  Description of Artificial Sequence: Synthetic peptide
  Seed: TTFPYTGDPPY
TVFPYTGDPPR

SEQ ID NO: 162214 - protein, 11 aa, Artificial Sequence
  Description of Artificial Sequence: Synthetic peptide
  Seed: TTFPYTGDPPY
TVFPYTGDPPW

SEQ ID NO: 162215 - protein, 11 aa, Artificial Sequence
  Description of Artificial Sequence: Synthetic peptide
  Seed: TTFPYTGDPPY
TVFPYTGDPPY

SEQ ID NO: 162216 - protein, 10 aa, Artificial Sequence
  Description of Artificial Sequence: Synthetic peptide
  Seed: TVLGVSILNL
TVLGVSILNA

SEQ ID NO: 162217 - protein, 10 aa, Artificial Sequence
  Description of Artificial Sequence: Synthetic peptide
  Seed: TVLGVSILNL
TVLGVSILNI

SEQ ID NO: 162218 - protein, 10 aa, Artificial Sequence
  Description of Artificial Sequence: Synthetic peptide
  Seed: TVLGVSILNL
TVLGVSILNV

SEQ ID NO: 162219 - protein, 11 aa, Artificial Sequence
  Description of Artificial Sequence: Synthetic peptide
  Seed: TLNTMTKDAER
TVNTMTKDAEK

SEQ ID NO: 162220 - protein, 11 aa, Artificial Sequence
  Description of Artificial Sequence: Synthetic peptide
  Seed: TLNTMTKDAER
TVNTMTKDAER

SEQ ID NO: 162221 - protein, 10 aa, Artificial Sequence
  Description of Artificial Sequence: Synthetic peptide
  Seed: TFPYTGDPPY
TVPYTGDPPF

SEQ ID NO: 162222 - protein, 10 aa, Artificial Sequence
  Description of Artificial Sequence: Synthetic peptide
  Seed: TFPYTGDPPY
TVPYTGDPPL

SEQ ID NO: 162223 - protein, 10 aa, Artificial Sequence
  Description of Artificial Sequence: Synthetic peptide
  Seed: TFPYTGDPPY
TVPYTGDPPM

SEQ ID NO: 162224 - protein, 10 aa, Artificial Sequence
  Description of Artificial Sequence: Synthetic peptide
  Seed: TFPYTGDPPY
TVPYTGDPPY

SEQ ID NO: 162225 - protein, 10 aa, Artificial Sequence
  Description of Artificial Sequence: Synthetic peptide
  Seed: TGTGYTMDTV
TVTGYTMDTI

SEQ ID NO: 162226 - protein, 10 aa, Artificial Sequence
  Description of Artificial Sequence: Synthetic peptide
  Seed: TGTGYTMDTV
TVTGYTMDTL

SEQ ID NO: 162227 - protein, 10 aa, Artificial Sequence
  Description of Artificial Sequence: Synthetic peptide
  Seed: TGTGYTMDTV
TVTGYTMDTV

SEQ ID NO: 162228 - protein, 9 aa, Artificial Sequence
  Description of Artificial Sequence: Synthetic peptide
  Seed: TSFFYRYGF
TWFFYRYGF

SEQ ID NO: 162229 - protein, 9 aa, Artificial Sequence
  Description of Artificial Sequence: Synthetic peptide
  Seed: TSFFYRYGF
TWFFYRYGI

SEQ ID NO: 162230 - protein, 9 aa, Artificial Sequence
  Description of Artificial Sequence: Synthetic peptide
  Seed: TSFFYRYGF
TWFFYRYGL

SEQ ID NO: 162231 - protein, 9 aa, Artificial Sequence
  Description of Artificial Sequence: Synthetic peptide
  Seed: TSFFYRYGF
TWFFYRYGM

SEQ ID NO: 162232 - protein, 9 aa, Artificial Sequence
  Description of Artificial Sequence: Synthetic peptide
  Seed: TSFFYRYGF
TWFFYRYGV

SEQ ID NO: 162233 - protein, 9 aa, Artificial Sequence
  Description of Artificial Sequence: Synthetic peptide
  Seed: TSFFYRYGF
TWFFYRYGW

SEQ ID NO: 162234 - protein, 9 aa, Artificial Sequence
  Description of Artificial Sequence: Synthetic peptide
  Seed: TSFFYRYGF
TWFFYRYGY

SEQ ID NO: 162235 - protein, 11 aa, Artificial Sequence
  Description of Artificial Sequence: Synthetic peptide
  Seed: TTFPYTGDPPY
TWFPYTGDPPF

SEQ ID NO: 162236 - protein, 11 aa, Artificial Sequence
  Description of Artificial Sequence: Synthetic peptide
  Seed: TTFPYTGDPPY
TWFPYTGDPPM

SEQ ID NO: 162237 - protein, 11 aa, Artificial Sequence
  Description of Artificial Sequence: Synthetic peptide
  Seed: TTFPYTGDPPY
TWFPYTGDPPY

SEQ ID NO: 162238 - protein, 10 aa, Artificial Sequence
  Description of Artificial Sequence: Synthetic peptide
  Seed: TVLGVSILNL
TWLGVSILNI

SEQ ID NO: 162239 - protein, 10 aa, Artificial Sequence
  Description of Artificial Sequence: Synthetic peptide
  Seed: TVLGVSILNL
TWLGVSILNV

SEQ ID NO: 162240 - protein, 11 aa, Artificial Sequence
  Description of Artificial Sequence: Synthetic peptide
  Seed: TLNTMTKDAER
TWNTMTKDAER

SEQ ID NO: 162241 - protein, 10 aa, Artificial Sequence
  Description of Artificial Sequence: Synthetic peptide
  Seed: TFPYTGDPPY
TWPYTGDPPF

SEQ ID NO: 162242 - protein, 10 aa, Artificial Sequence
  Description of Artificial Sequence: Synthetic peptide
  Seed: TFPYTGDPPY
TWPYTGDPPL

SEQ ID NO: 162243 - protein, 10 aa, Artificial Sequence
  Description of Artificial Sequence: Synthetic peptide
  Seed: TFPYTGDPPY
TWPYTGDPPM

SEQ ID NO: 162244 - protein, 10 aa, Artificial Sequence
  Description of Artificial Sequence: Synthetic peptide
  Seed: TFPYTGDPPY
TWPYTGDPPY

SEQ ID NO: 162245 - protein, 10 aa, Artificial Sequence
  Description of Artificial Sequence: Synthetic peptide
  Seed: TGTGYTMDTV
TWTGYTMDTV

SEQ ID NO: 162246 - protein, 9 aa, Artificial Sequence
  Description of Artificial Sequence: Synthetic peptide
  Seed: TSFFYRYGF
TYFFYRYGA

SEQ ID NO: 162247 - protein, 9 aa, Artificial Sequence
  Description of Artificial Sequence: Synthetic peptide
  Seed: TSFFYRYGF
TYFFYRYGF

SEQ ID NO: 162248 - protein, 9 aa, Artificial Sequence
  Description of Artificial Sequence: Synthetic peptide
  Seed: TSFFYRYGF
TYFFYRYGH

SEQ ID NO: 162249 - protein, 9 aa, Artificial Sequence
  Description of Artificial Sequence: Synthetic peptide
  Seed: TSFFYRYGF
TYFFYRYGI

SEQ ID NO: 162250 - protein, 9 aa, Artificial Sequence
  Description of Artificial Sequence: Synthetic peptide
  Seed: TSFFYRYGF
TYFFYRYGK

SEQ ID NO: 162251 - protein, 9 aa, Artificial Sequence
  Description of Artificial Sequence: Synthetic peptide
  Seed: TSFFYRYGF
TYFFYRYGL

SEQ ID NO: 162252 - protein, 9 aa, Artificial Sequence
  Description of Artificial Sequence: Synthetic peptide
  Seed: TSFFYRYGF
TYFFYRYGM

SEQ ID NO: 162253 - protein, 9 aa, Artificial Sequence
  Description of Artificial Sequence: Synthetic peptide
  Seed: TSFFYRYGF
TYFFYRYGR

SEQ ID NO: 162254 - protein, 9 aa, Artificial Sequence
  Description of Artificial Sequence: Synthetic peptide
  Seed: TSFFYRYGF
TYFFYRYGV

SEQ ID NO: 162255 - protein, 9 aa, Artificial Sequence
  Description of Artificial Sequence: Synthetic peptide
  Seed: TSFFYRYGF
TYFFYRYGW

SEQ ID NO: 162256 - protein, 9 aa, Artificial Sequence
  Description of Artificial Sequence: Synthetic peptide
  Seed: TSFFYRYGF
TYFFYRYGY

SEQ ID NO: 162257 - protein, 11 aa, Artificial Sequence
  Description of Artificial Sequence: Synthetic peptide
  Seed: TTFPYTGDPPY
TYFPYTGDPPF

SEQ ID NO: 162258 - protein, 11 aa, Artificial Sequence
  Description of Artificial Sequence: Synthetic peptide
  Seed: TTFPYTGDPPY
TYFPYTGDPPM

SEQ ID NO: 162259 - protein, 11 aa, Artificial Sequence
  Description of Artificial Sequence: Synthetic peptide
  Seed: TTFPYTGDPPY
TYFPYTGDPPY

SEQ ID NO: 162260 - protein, 10 aa, Artificial Sequence
  Description of Artificial Sequence: Synthetic peptide
  Seed: TVLGVSILNL
TYLGVSILNI

SEQ ID NO: 162261 - protein, 10 aa, Artificial Sequence
  Description of Artificial Sequence: Synthetic peptide
  Seed: TVLGVSILNL
TYLGVSILNL

SEQ ID NO: 162262 - protein, 10 aa, Artificial Sequence
  Description of Artificial Sequence: Synthetic peptide
  Seed: TVLGVSILNL
TYLGVSILNV

SEQ ID NO: 162263 - protein, 11 aa, Artificial Sequence
  Description of Artificial Sequence: Synthetic peptide
  Seed: TLNTMTKDAER
TYNTMTKDAER

SEQ ID NO: 162264 - protein, 10 aa, Artificial Sequence
  Description of Artificial Sequence: Synthetic peptide
  Seed: TFPYTGDPPY
TYPYTGDPPF

SEQ ID NO: 162265 - protein, 10 aa, Artificial Sequence
  Description of Artificial Sequence: Synthetic peptide
  Seed: TFPYTGDPPY
TYPYTGDPPI

SEQ ID NO: 162266 - protein, 10 aa, Artificial Sequence
  Description of Artificial Sequence: Synthetic peptide
  Seed: TFPYTGDPPY
TYPYTGDPPL

SEQ ID NO: 162267 - protein, 10 aa, Artificial Sequence
  Description of Artificial Sequence: Synthetic peptide
  Seed: TFPYTGDPPY
TYPYTGDPPM

SEQ ID NO: 162268 - protein, 10 aa, Artificial Sequence
  Description of Artificial Sequence: Synthetic peptide
  Seed: TFPYTGDPPY
TYPYTGDPPV

SEQ ID NO: 162269 - protein, 10 aa, Artificial Sequence
  Description of Artificial Sequence: Synthetic peptide
  Seed: TFPYTGDPPY
TYPYTGDPPW

SEQ ID NO: 162270 - protein, 10 aa, Artificial Sequence
  Description of Artificial Sequence: Synthetic peptide
  Seed: TFPYTGDPPY
TYPYTGDPPY

SEQ ID NO: 162271 - protein, 10 aa, Artificial Sequence
  Description of Artificial Sequence: Synthetic peptide
  Seed: TGTGYTMDTV
TYTGYTMDTV

SEQ ID NO: 162272 - protein, 9 aa, Artificial Sequence
  Description of Artificial Sequence: Synthetic peptide
  Seed: VVRKMMTNS
VARKMMTNA

SEQ ID NO: 162273 - protein, 9 aa, Artificial Sequence
  Description of Artificial Sequence: Synthetic peptide
  Seed: VVRKMMTNS
VARKMMTNI

SEQ ID NO: 162274 - protein, 9 aa, Artificial Sequence
  Description of Artificial Sequence: Synthetic peptide
  Seed: VVRKMMTNS
VARKMMTNK

SEQ ID NO: 162275 - protein, 9 aa, Artificial Sequence
  Description of Artificial Sequence: Synthetic peptide
  Seed: VVRKMMTNS
VARKMMTNL

SEQ ID NO: 162276 - protein, 9 aa, Artificial Sequence
  Description of Artificial Sequence: Synthetic peptide
  Seed: VVRKMMTNS
VARKMMTNM

SEQ ID NO: 162277 - protein, 9 aa, Artificial Sequence
  Description of Artificial Sequence: Synthetic peptide
  Seed: VVRKMMTNS
VARKMMTNR

SEQ ID NO: 162278 - protein, 9 aa, Artificial Sequence
  Description of Artificial Sequence: Synthetic peptide
  Seed: VVRKMMTNS
VARKMMTNS

SEQ ID NO: 162279 - protein, 9 aa, Artificial Sequence
  Description of Artificial Sequence: Synthetic peptide
  Seed: VVRKMMTNS
VARKMMTNV

SEQ ID NO: 162280 - protein, 9 aa, Artificial Sequence
  Description of Artificial Sequence: Synthetic peptide
  Seed: VVRKMMTNS
VARKMMTNY

SEQ ID NO: 162281 - protein, 9 aa, Artificial Sequence
  Description of Artificial Sequence: Synthetic peptide
  Seed: VVRKMMTNS
VCRKMMTNK

SEQ ID NO: 162282 - protein, 9 aa, Artificial Sequence
  Description of Artificial Sequence: Synthetic peptide
  Seed: VVRKMMTNS
VFRKMMTNA

SEQ ID NO: 162283 - protein, 9 aa, Artificial Sequence
  Description of Artificial Sequence: Synthetic peptide
  Seed: VVRKMMTNS
VFRKMMTNG

SEQ ID NO: 162284 - protein, 9 aa, Artificial Sequence
  Description of Artificial Sequence: Synthetic peptide
  Seed: VVRKMMTNS
VFRKMMTNI

SEQ ID NO: 162285 - protein, 9 aa, Artificial Sequence
  Description of Artificial Sequence: Synthetic peptide
  Seed: VVRKMMTNS
VFRKMMTNK

SEQ ID NO: 162286 - protein, 9 aa, Artificial Sequence
  Description of Artificial Sequence: Synthetic peptide
  Seed: VVRKMMTNS
VFRKMMTNL

SEQ ID NO: 162287 - protein, 9 aa, Artificial Sequence
  Description of Artificial Sequence: Synthetic peptide
  Seed: VVRKMMTNS
VFRKMMTNM

SEQ ID NO: 162288 - protein, 9 aa, Artificial Sequence
  Description of Artificial Sequence: Synthetic peptide
  Seed: VVRKMMTNS
VFRKMMTNR

SEQ ID NO: 162289 - protein, 9 aa, Artificial Sequence
  Description of Artificial Sequence: Synthetic peptide
  Seed: VVRKMMTNS
VFRKMMTNS

SEQ ID NO: 162290 - protein, 9 aa, Artificial Sequence
  Description of Artificial Sequence: Synthetic peptide
  Seed: VVRKMMTNS
VFRKMMTNV

SEQ ID NO: 162291 - protein, 9 aa, Artificial Sequence
  Description of Artificial Sequence: Synthetic peptide
  Seed: VVRKMMTNS
VGRKMMTNA

SEQ ID NO: 162292 - protein, 9 aa, Artificial Sequence
  Description of Artificial Sequence: Synthetic peptide
  Seed: VVRKMMTNS
VGRKMMTNI

SEQ ID NO: 162293 - protein, 9 aa, Artificial Sequence
  Description of Artificial Sequence: Synthetic peptide
  Seed: VVRKMMTNS
VGRKMMTNK

SEQ ID NO: 162294 - protein, 9 aa, Artificial Sequence
  Description of Artificial Sequence: Synthetic peptide
  Seed: VVRKMMTNS
VGRKMMTNV

SEQ ID NO: 162295 - protein, 9 aa, Artificial Sequence
  Description of Artificial Sequence: Synthetic peptide
  Seed: VVRKMMTNS
VHRKMMTNK

SEQ ID NO: 162296 - protein, 9 aa, Artificial Sequence
  Description of Artificial Sequence: Synthetic peptide
  Seed: VLGVSILNL
VIGVSILNI

SEQ ID NO: 162297 - protein, 9 aa, Artificial Sequence
  Description of Artificial Sequence: Synthetic peptide
  Seed: VLGVSILNL
VIGVSILNV

SEQ ID NO: 162298 - protein, 9 aa, Artificial Sequence
  Description of Artificial Sequence: Synthetic peptide
  Seed: VVRKMMTNS
VIRKMMTNA

SEQ ID NO: 162299 - protein, 9 aa, Artificial Sequence
  Description of Artificial Sequence: Synthetic peptide
  Seed: VVRKMMTNS
VIRKMMTNG

SEQ ID NO: 162300 - protein, 9 aa, Artificial Sequence
  Description of Artificial Sequence: Synthetic peptide
  Seed: VVRKMMTNS
VIRKMMTNI

SEQ ID NO: 162301 - protein, 9 aa, Artificial Sequence
  Description of Artificial Sequence: Synthetic peptide
  Seed: VVRKMMTNS
VIRKMMTNK

SEQ ID NO: 162302 - protein, 9 aa, Artificial Sequence
  Description of Artificial Sequence: Synthetic peptide
  Seed: VVRKMMTNS
VIRKMMTNL

SEQ ID NO: 162303 - protein, 9 aa, Artificial Sequence
  Description of Artificial Sequence: Synthetic peptide
  Seed: VVRKMMTNS
VIRKMMTNM

SEQ ID NO: 162304 - protein, 9 aa, Artificial Sequence
  Description of Artificial Sequence: Synthetic peptide
  Seed: VVRKMMTNS
VIRKMMTNS

SEQ ID NO: 162305 - protein, 9 aa, Artificial Sequence
  Description of Artificial Sequence: Synthetic peptide
  Seed: VVRKMMTNS
VIRKMMTNV

SEQ ID NO: 162306 - protein, 9 aa, Artificial Sequence
  Description of Artificial Sequence: Synthetic peptide
  Seed: VVRKMMTNS
VIRKMMTNY

SEQ ID NO: 162307 - protein, 9 aa, Artificial Sequence
  Description of Artificial Sequence: Synthetic peptide
  Seed: VVRKMMTNS
VKRKMMTNK

SEQ ID NO: 162308 - protein, 9 aa, Artificial Sequence
  Description of Artificial Sequence: Synthetic peptide
  Seed: VLGVSILNL
VLGVSILNA

SEQ ID NO: 162309 - protein, 9 aa, Artificial Sequence
  Description of Artificial Sequence: Synthetic peptide
  Seed: VLGVSILNL
VLGVSILNI

SEQ ID NO: 162310 - protein, 9 aa, Artificial Sequence
  Description of Artificial Sequence: Synthetic peptide
  Seed: VLGVSILNL
VLGVSILNM

SEQ ID NO: 162311 - protein, 9 aa, Artificial Sequence
  Description of Artificial Sequence: Synthetic peptide
  Seed: VLGVSILNL
VLGVSILNV

SEQ ID NO: 162312 - protein, 9 aa, Artificial Sequence
  Description of Artificial Sequence: Synthetic peptide
  Seed: VVRKMMTNS
VLRKMMTNA

SEQ ID NO: 162313 - protein, 9 aa, Artificial Sequence
  Description of Artificial Sequence: Synthetic peptide
  Seed: VVRKMMTNS
VLRKMMTNG

SEQ ID NO: 162314 - protein, 9 aa, Artificial Sequence
  Description of Artificial Sequence: Synthetic peptide
  Seed: VVRKMMTNS
VLRKMMTNI

SEQ ID NO: 162315 - protein, 9 aa, Artificial Sequence
  Description of Artificial Sequence: Synthetic peptide
  Seed: VVRKMMTNS
VLRKMMTNK

SEQ ID NO: 162316 - protein, 9 aa, Artificial Sequence
  Description of Artificial Sequence: Synthetic peptide
  Seed: VVRKMMTNS
VLRKMMTNL

SEQ ID NO: 162317 - protein, 9 aa, Artificial Sequence
  Description of Artificial Sequence: Synthetic peptide
  Seed: VVRKMMTNS
VLRKMMTNM

SEQ ID NO: 162318 - protein, 9 aa, Artificial Sequence
  Description of Artificial Sequence: Synthetic peptide
  Seed: VVRKMMTNS
VLRKMMTNV

SEQ ID NO: 162319 - protein, 9 aa, Artificial Sequence
  Description of Artificial Sequence: Synthetic peptide
  Seed: VLGVSILNL
VMGVSILNA

SEQ ID NO: 162320 - protein, 9 aa, Artificial Sequence
  Description of Artificial Sequence: Synthetic peptide
  Seed: VLGVSILNL
VMGVSILNI

SEQ ID NO: 162321 - protein, 9 aa, Artificial Sequence
  Description of Artificial Sequence: Synthetic peptide
  Seed: VLGVSILNL
VMGVSILNL

SEQ ID NO: 162322 - protein, 9 aa, Artificial Sequence
  Description of Artificial Sequence: Synthetic peptide
  Seed: VLGVSILNL
VMGVSILNM

SEQ ID NO: 162323 - protein, 9 aa, Artificial Sequence
  Description of Artificial Sequence: Synthetic peptide
  Seed: VLGVSILNL
VMGVSILNV

SEQ ID NO: 162324 - protein, 9 aa, Artificial Sequence
  Description of Artificial Sequence: Synthetic peptide
  Seed: VVRKMMTNS
VMRKMMTNA

SEQ ID NO: 162325 - protein, 9 aa, Artificial Sequence
  Description of Artificial Sequence: Synthetic peptide
  Seed: VVRKMMTNS
VMRKMMTNG

SEQ ID NO: 162326 - protein, 9 aa, Artificial Sequence
  Description of Artificial Sequence: Synthetic peptide
  Seed: VVRKMMTNS
VMRKMMTNI

SEQ ID NO: 162327 - protein, 9 aa, Artificial Sequence
  Description of Artificial Sequence: Synthetic peptide
  Seed: VVRKMMTNS
VMRKMMTNK

SEQ ID NO: 162328 - protein, 9 aa, Artificial Sequence
  Description of Artificial Sequence: Synthetic peptide
  Seed: VVRKMMTNS
VMRKMMTNL

SEQ ID NO: 162329 - protein, 9 aa, Artificial Sequence
  Description of Artificial Sequence: Synthetic peptide
  Seed: VVRKMMTNS
VMRKMMTNM

SEQ ID NO: 162330 - protein, 9 aa, Artificial Sequence
  Description of Artificial Sequence: Synthetic peptide
  Seed: VVRKMMTNS
VMRKMMTNR

SEQ ID NO: 162331 - protein, 9 aa, Artificial Sequence
  Description of Artificial Sequence: Synthetic peptide
  Seed: VVRKMMTNS
VMRKMMTNS

SEQ ID NO: 162332 - protein, 9 aa, Artificial Sequence
  Description of Artificial Sequence: Synthetic peptide
  Seed: VVRKMMTNS
VMRKMMTNV

SEQ ID NO: 162333 - protein, 9 aa, Artificial Sequence
  Description of Artificial Sequence: Synthetic peptide
  Seed: VVRKMMTNS
VMRKMMTNY

SEQ ID NO: 162334 - protein, 9 aa, Artificial Sequence
  Description of Artificial Sequence: Synthetic peptide
  Seed: VVRKMMTNS
VNRKMMTNA

SEQ ID NO: 162335 - protein, 9 aa, Artificial Sequence
  Description of Artificial Sequence: Synthetic peptide
  Seed: VVRKMMTNS
VNRKMMTNK

SEQ ID NO: 162336 - protein, 9 aa, Artificial Sequence
  Description of Artificial Sequence: Synthetic peptide
  Seed: VVRKMMTNS
VNRKMMTNV

SEQ ID NO: 162337 - protein, 9 aa, Artificial Sequence
  Description of Artificial Sequence: Synthetic peptide
  Seed: VLGVSILNL
VQGVSILNV

SEQ ID NO: 162338 - protein, 9 aa, Artificial Sequence
  Description of Artificial Sequence: Synthetic peptide
  Seed: VVRKMMTNS
VQRKMMTNA

SEQ ID NO: 162339 - protein, 9 aa, Artificial Sequence
  Description of Artificial Sequence: Synthetic peptide
  Seed: VVRKMMTNS
VQRKMMTNI

SEQ ID NO: 162340 - protein, 9 aa, Artificial Sequence
  Description of Artificial Sequence: Synthetic peptide
  Seed: VVRKMMTNS
VQRKMMTNK

SEQ ID NO: 162341 - protein, 9 aa, Artificial Sequence
  Description of Artificial Sequence: Synthetic peptide
  Seed: VVRKMMTNS
VQRKMMTNL

SEQ ID NO: 162342 - protein, 9 aa, Artificial Sequence
  Description of Artificial Sequence: Synthetic peptide
  Seed: VVRKMMTNS
VQRKMMTNM

SEQ ID NO: 162343 - protein, 9 aa, Artificial Sequence
  Description of Artificial Sequence: Synthetic peptide
  Seed: VVRKMMTNS
VQRKMMTNR

SEQ ID NO: 162344 - protein, 9 aa, Artificial Sequence
  Description of Artificial Sequence: Synthetic peptide
  Seed: VVRKMMTNS
VQRKMMTNS

SEQ ID NO: 162345 - protein, 9 aa, Artificial Sequence
  Description of Artificial Sequence: Synthetic peptide
  Seed: VVRKMMTNS
VQRKMMTNV

SEQ ID NO: 162346 - protein, 9 aa, Artificial Sequence
  Description of Artificial Sequence: Synthetic peptide
  Seed: VVRKMMTNS
VQRKMMTNY

SEQ ID NO: 162347 - protein, 9 aa, Artificial Sequence
  Description of Artificial Sequence: Synthetic peptide
  Seed: VVRKMMTNS
VRRKMMTNK

SEQ ID NO: 162348 - protein, 9 aa, Artificial Sequence
  Description of Artificial Sequence: Synthetic peptide
  Seed: VVRKMMTNS
VSRKMMTNA

SEQ ID NO: 162349 - protein, 9 aa, Artificial Sequence
  Description of Artificial Sequence: Synthetic peptide
  Seed: VVRKMMTNS
VSRKMMTNC

SEQ ID NO: 162350 - protein, 9 aa, Artificial Sequence
  Description of Artificial Sequence: Synthetic peptide
  Seed: VVRKMMTNS
VSRKMMTNF

SEQ ID NO: 162351 - protein, 9 aa, Artificial Sequence
  Description of Artificial Sequence: Synthetic peptide
  Seed: VVRKMMTNS
VSRKMMTNG

SEQ ID NO: 162352 - protein, 9 aa, Artificial Sequence
  Description of Artificial Sequence: Synthetic peptide
  Seed: VVRKMMTNS
VSRKMMTNI

SEQ ID NO: 162353 - protein, 9 aa, Artificial Sequence
  Description of Artificial Sequence: Synthetic peptide
  Seed: VVRKMMTNS
VSRKMMTNK

SEQ ID NO: 162354 - protein, 9 aa, Artificial Sequence
  Description of Artificial Sequence: Synthetic peptide
  Seed: VVRKMMTNS
VSRKMMTNL

SEQ ID NO: 162355 - protein, 9 aa, Artificial Sequence
  Description of Artificial Sequence: Synthetic peptide
  Seed: VVRKMMTNS
VSRKMMTNM

SEQ ID NO: 162356 - protein, 9 aa, Artificial Sequence
  Description of Artificial Sequence: Synthetic peptide
  Seed: VVRKMMTNS
VSRKMMTNN

SEQ ID NO: 162357 - protein, 9 aa, Artificial Sequence
  Description of Artificial Sequence: Synthetic peptide
  Seed: VVRKMMTNS
VSRKMMTNP

SEQ ID NO: 162358 - protein, 9 aa, Artificial Sequence
  Description of Artificial Sequence: Synthetic peptide
  Seed: VVRKMMTNS
VSRKMMTNQ

SEQ ID NO: 162359 - protein, 9 aa, Artificial Sequence
  Description of Artificial Sequence: Synthetic peptide
  Seed: VVRKMMTNS
VSRKMMTNR

SEQ ID NO: 162360 - protein, 9 aa, Artificial Sequence
  Description of Artificial Sequence: Synthetic peptide
  Seed: VVRKMMTNS
VSRKMMTNS

SEQ ID NO: 162361 - protein, 9 aa, Artificial Sequence
  Description of Artificial Sequence: Synthetic peptide
  Seed: VVRKMMTNS
VSRKMMTNT

SEQ ID NO: 162362 - protein, 9 aa, Artificial Sequence
  Description of Artificial Sequence: Synthetic peptide
  Seed: VVRKMMTNS
VSRKMMTNV

SEQ ID NO: 162363 - protein, 9 aa, Artificial Sequence
  Description of Artificial Sequence: Synthetic peptide
  Seed: VVRKMMTNS
VSRKMMTNY

SEQ ID NO: 162364 - protein, 9 aa, Artificial Sequence
  Description of Artificial Sequence: Synthetic peptide
  Seed: VLGVSILNL
VTGVSILNV

SEQ ID NO: 162365 - protein, 9 aa, Artificial Sequence
  Description of Artificial Sequence: Synthetic peptide
  Seed: VVRKMMTNS
VTRKMMTNA

SEQ ID NO: 162366 - protein, 9 aa, Artificial Sequence
  Description of Artificial Sequence: Synthetic peptide
  Seed: VVRKMMTNS
VTRKMMTNC

SEQ ID NO: 162367 - protein, 9 aa, Artificial Sequence
  Description of Artificial Sequence: Synthetic peptide
  Seed: VVRKMMTNS
VTRKMMTNE

SEQ ID NO: 162368 - protein, 9 aa, Artificial Sequence
  Description of Artificial Sequence: Synthetic peptide
  Seed: VVRKMMTNS
VTRKMMTNF

SEQ ID NO: 162369 - protein, 9 aa, Artificial Sequence
  Description of Artificial Sequence: Synthetic peptide
  Seed: VVRKMMTNS
VTRKMMTNG

SEQ ID NO: 162370 - protein, 9 aa, Artificial Sequence
  Description of Artificial Sequence: Synthetic peptide
  Seed: VVRKMMTNS
VTRKMMTNH

SEQ ID NO: 162371 - protein, 9 aa, Artificial Sequence
  Description of Artificial Sequence: Synthetic peptide
  Seed: VVRKMMTNS
VTRKMMTNI

SEQ ID NO: 162372 - protein, 9 aa, Artificial Sequence
  Description of Artificial Sequence: Synthetic peptide
  Seed: VVRKMMTNS
VTRKMMTNK

SEQ ID NO: 162373 - protein, 9 aa, Artificial Sequence
  Description of Artificial Sequence: Synthetic peptide
  Seed: VVRKMMTNS
VTRKMMTNL

SEQ ID NO: 162374 - protein, 9 aa, Artificial Sequence
  Description of Artificial Sequence: Synthetic peptide
  Seed: VVRKMMTNS
VTRKMMTNM

SEQ ID NO: 162375 - protein, 9 aa, Artificial Sequence
  Description of Artificial Sequence: Synthetic peptide
  Seed: VVRKMMTNS
VTRKMMTNN

SEQ ID NO: 162376 - protein, 9 aa, Artificial Sequence
  Description of Artificial Sequence: Synthetic peptide
  Seed: VVRKMMTNS
VTRKMMTNP

SEQ ID NO: 162377 - protein, 9 aa, Artificial Sequence
  Description of Artificial Sequence: Synthetic peptide
  Seed: VVRKMMTNS
VTRKMMTNQ

SEQ ID NO: 162378 - protein, 9 aa, Artificial Sequence
  Description of Artificial Sequence: Synthetic peptide
  Seed: VVRKMMTNS
VTRKMMTNR

SEQ ID NO: 162379 - protein, 9 aa, Artificial Sequence
  Description of Artificial Sequence: Synthetic peptide
  Seed: VVRKMMTNS
VTRKMMTNS

SEQ ID NO: 162380 - protein, 9 aa, Artificial Sequence
  Description of Artificial Sequence: Synthetic peptide
  Seed: VVRKMMTNS
VTRKMMTNT

SEQ ID NO: 162381 - protein, 9 aa, Artificial Sequence
  Description of Artificial Sequence: Synthetic peptide
  Seed: VVRKMMTNS
VTRKMMTNV

SEQ ID NO: 162382 - protein, 9 aa, Artificial Sequence
  Description of Artificial Sequence: Synthetic peptide
  Seed: VVRKMMTNS
VTRKMMTNY

SEQ ID NO: 162383 - protein, 9 aa, Artificial Sequence
  Description of Artificial Sequence: Synthetic peptide
  Seed: VLGVSILNL
VVGVSILNV

SEQ ID NO: 162384 - protein, 9 aa, Artificial Sequence
  Description of Artificial Sequence: Synthetic peptide
  Seed: VVRKMMTNS
VVRKMMTNA

SEQ ID NO: 162385 - protein, 9 aa, Artificial Sequence
  Description of Artificial Sequence: Synthetic peptide
  Seed: VVRKMMTNS
VVRKMMTNF

SEQ ID NO: 162386 - protein, 9 aa, Artificial Sequence
  Description of Artificial Sequence: Synthetic peptide
  Seed: VVRKMMTNS
VVRKMMTNG

SEQ ID NO: 162387 - protein, 9 aa, Artificial Sequence
  Description of Artificial Sequence: Synthetic peptide
  Seed: VVRKMMTNS
VVRKMMTNI

SEQ ID NO: 162388 - protein, 9 aa, Artificial Sequence
  Description of Artificial Sequence: Synthetic peptide
  Seed: VVRKMMTNS
VVRKMMTNK

SEQ ID NO: 162389 - protein, 9 aa, Artificial Sequence
  Description of Artificial Sequence: Synthetic peptide
  Seed: VVRKMMTNS
VVRKMMTNL

SEQ ID NO: 162390 - protein, 9 aa, Artificial Sequence
  Description of Artificial Sequence: Synthetic peptide
  Seed: VVRKMMTNS
VVRKMMTNM

SEQ ID NO: 162391 - protein, 9 aa, Artificial Sequence
  Description of Artificial Sequence: Synthetic peptide
  Seed: VVRKMMTNS
VVRKMMTNP

SEQ ID NO: 162392 - protein, 9 aa, Artificial Sequence
  Description of Artificial Sequence: Synthetic peptide
  Seed: VVRKMMTNS
VVRKMMTNR

SEQ ID NO: 162393 - protein, 9 aa, Artificial Sequence
  Description of Artificial Sequence: Synthetic peptide
  Seed: VVRKMMTNS
VVRKMMTNT

SEQ ID NO: 162394 - protein, 9 aa, Artificial Sequence
  Description of Artificial Sequence: Synthetic peptide
  Seed: VVRKMMTNS
VVRKMMTNV

SEQ ID NO: 162395 - protein, 9 aa, Artificial Sequence
  Description of Artificial Sequence: Synthetic peptide
  Seed: VVRKMMTNS
VVRKMMTNY

SEQ ID NO: 162396 - protein, 9 aa, Artificial Sequence
  Description of Artificial Sequence: Synthetic peptide
  Seed: VVRKMMTNS
VWRKMMTNA

SEQ ID NO: 162397 - protein, 9 aa, Artificial Sequence
  Description of Artificial Sequence: Synthetic peptide
  Seed: VVRKMMTNS
VWRKMMTNI

SEQ ID NO: 162398 - protein, 9 aa, Artificial Sequence
  Description of Artificial Sequence: Synthetic peptide
  Seed: VVRKMMTNS
VWRKMMTNK

SEQ ID NO: 162399 - protein, 9 aa, Artificial Sequence
  Description of Artificial Sequence: Synthetic peptide
  Seed: VVRKMMTNS
VWRKMMTNL

SEQ ID NO: 162400 - protein, 9 aa, Artificial Sequence
  Description of Artificial Sequence: Synthetic peptide
  Seed: VVRKMMTNS
VWRKMMTNM

SEQ ID NO: 162401 - protein, 9 aa, Artificial Sequence
  Description of Artificial Sequence: Synthetic peptide
  Seed: VVRKMMTNS
VWRKMMTNV

SEQ ID NO: 162402 - protein, 9 aa, Artificial Sequence
  Description of Artificial Sequence: Synthetic peptide
  Seed: VVRKMMTNS
VYRKMMTNA

SEQ ID NO: 162403 - protein, 9 aa, Artificial Sequence
  Description of Artificial Sequence: Synthetic peptide
  Seed: VVRKMMTNS
VYRKMMTNG

SEQ ID NO: 162404 - protein, 9 aa, Artificial Sequence
  Description of Artificial Sequence: Synthetic peptide
  Seed: VVRKMMTNS
VYRKMMTNI

SEQ ID NO: 162405 - protein, 9 aa, Artificial Sequence
  Description of Artificial Sequence: Synthetic peptide
  Seed: VVRKMMTNS
VYRKMMTNK

SEQ ID NO: 162406 - protein, 9 aa, Artificial Sequence
  Description of Artificial Sequence: Synthetic peptide
  Seed: VVRKMMTNS
VYRKMMTNL

SEQ ID NO: 162407 - protein, 9 aa, Artificial Sequence
  Description of Artificial Sequence: Synthetic peptide
  Seed: VVRKMMTNS
VYRKMMTNM

SEQ ID NO: 162408 - protein, 9 aa, Artificial Sequence
  Description of Artificial Sequence: Synthetic peptide
  Seed: VVRKMMTNS
VYRKMMTNR

SEQ ID NO: 162409 - protein, 9 aa, Artificial Sequence
  Description of Artificial Sequence: Synthetic peptide
  Seed: VVRKMMTNS
VYRKMMTNS

SEQ ID NO: 162410 - protein, 9 aa, Artificial Sequence
  Description of Artificial Sequence: Synthetic peptide
  Seed: VVRKMMTNS
VYRKMMTNT

SEQ ID NO: 162411 - protein, 9 aa, Artificial Sequence
  Description of Artificial Sequence: Synthetic peptide
  Seed: VVRKMMTNS
VYRKMMTNV

SEQ ID NO: 162412 - protein, 9 aa, Artificial Sequence
  Description of Artificial Sequence: Synthetic peptide
  Seed: YSHGTGTGY
YAHGTGTGA

SEQ ID NO: 162413 - protein, 9 aa, Artificial Sequence
  Description of Artificial Sequence: Synthetic peptide
  Seed: YSHGTGTGY
YAHGTGTGC

SEQ ID NO: 162414 - protein, 9 aa, Artificial Sequence
  Description of Artificial Sequence: Synthetic peptide
  Seed: YSHGTGTGY
YAHGTGTGF

SEQ ID NO: 162415 - protein, 9 aa, Artificial Sequence
  Description of Artificial Sequence: Synthetic peptide
  Seed: YSHGTGTGY
YAHGTGTGH

SEQ ID NO: 162416 - protein, 9 aa, Artificial Sequence
  Description of Artificial Sequence: Synthetic peptide
  Seed: YSHGTGTGY
YAHGTGTGI

SEQ ID NO: 162417 - protein, 9 aa, Artificial Sequence
  Description of Artificial Sequence: Synthetic peptide
  Seed: YSHGTGTGY
YAHGTGTGK

SEQ ID NO: 162418 - protein, 9 aa, Artificial Sequence
  Description of Artificial Sequence: Synthetic peptide
  Seed: YSHGTGTGY
YAHGTGTGL

SEQ ID NO: 162419 - protein, 9 aa, Artificial Sequence
  Description of Artificial Sequence: Synthetic peptide
  Seed: YSHGTGTGY
YAHGTGTGM

SEQ ID NO: 162420 - protein, 9 aa, Artificial Sequence
  Description of Artificial Sequence: Synthetic peptide
  Seed: YSHGTGTGY
YAHGTGTGR

SEQ ID NO: 162421 - protein, 9 aa, Artificial Sequence
  Description of Artificial Sequence: Synthetic peptide
  Seed: YSHGTGTGY
YAHGTGTGV

SEQ ID NO: 162422 - protein, 9 aa, Artificial Sequence
  Description of Artificial Sequence: Synthetic peptide
  Seed: YSHGTGTGY
YAHGTGTGW

SEQ ID NO: 162423 - protein, 9 aa, Artificial Sequence
  Description of Artificial Sequence: Synthetic peptide
  Seed: YSHGTGTGY
YAHGTGTGY

SEQ ID NO: 162424 - protein, 11 aa, Artificial Sequence
  Description of Artificial Sequence: Synthetic peptide
  Seed: YSHGTGTGYTM
YAHGTGTGYTF

SEQ ID NO: 162425 - protein, 11 aa, Artificial Sequence
  Description of Artificial Sequence: Synthetic peptide
  Seed: YSHGTGTGYTM
YAHGTGTGYTL

SEQ ID NO: 162426 - protein, 11 aa, Artificial Sequence
  Description of Artificial Sequence: Synthetic peptide
  Seed: YSHGTGTGYTM
YAHGTGTGYTM

SEQ ID NO: 162427 - protein, 11 aa, Artificial Sequence
  Description of Artificial Sequence: Synthetic peptide
  Seed: YSHGTGTGYTM
YAHGTGTGYTW

SEQ ID NO: 162428 - protein, 11 aa, Artificial Sequence
  Description of Artificial Sequence: Synthetic peptide
  Seed: YSHGTGTGYTM
YAHGTGTGYTY

SEQ ID NO: 162429 - protein, 10 aa, Artificial Sequence
  Description of Artificial Sequence: Synthetic peptide
  Seed: YRRPVGISSM
YARPVGISSF

SEQ ID NO: 162430 - protein, 10 aa, Artificial Sequence
  Description of Artificial Sequence: Synthetic peptide
  Seed: YRRPVGISSM
YARPVGISSL

SEQ ID NO: 162431 - protein, 10 aa, Artificial Sequence
  Description of Artificial Sequence: Synthetic peptide
  Seed: YRRPVGISSM
YARPVGISSM

SEQ ID NO: 162432 - protein, 10 aa, Artificial Sequence
  Description of Artificial Sequence: Synthetic peptide
  Seed: YRRPVGISSM
YARPVGISSY

SEQ ID NO: 162433 - protein, 9 aa, Artificial Sequence
  Description of Artificial Sequence: Synthetic peptide
  Seed: YSHGTGTGY
YCHGTGTGF

SEQ ID NO: 162434 - protein, 9 aa, Artificial Sequence
  Description of Artificial Sequence: Synthetic peptide
  Seed: YSHGTGTGY
YCHGTGTGM

SEQ ID NO: 162435 - protein, 9 aa, Artificial Sequence
  Description of Artificial Sequence: Synthetic peptide
  Seed: YSHGTGTGY
YCHGTGTGW

SEQ ID NO: 162436 - protein, 9 aa, Artificial Sequence
  Description of Artificial Sequence: Synthetic peptide
  Seed: YSHGTGTGY
YCHGTGTGY

SEQ ID NO: 162437 - protein, 10 aa, Artificial Sequence
  Description of Artificial Sequence: Synthetic peptide
  Seed: YRRPVGISSM
YCRPVGISSF

SEQ ID NO: 162438 - protein, 10 aa, Artificial Sequence
  Description of Artificial Sequence: Synthetic peptide
  Seed: YRRPVGISSM
YCRPVGISSM

SEQ ID NO: 162439 - protein, 10 aa, Artificial Sequence
  Description of Artificial Sequence: Synthetic peptide
  Seed: YRRPVGISSM
YCRPVGISSY

SEQ ID NO: 162440 - protein, 10 aa, Artificial Sequence
  Description of Artificial Sequence: Synthetic peptide
  Seed: YRRPVGISSM
YDRPVGISSF

SEQ ID NO: 162441 - protein, 10 aa, Artificial Sequence
  Description of Artificial Sequence: Synthetic peptide
  Seed: YRRPVGISSM
YDRPVGISSM

SEQ ID NO: 162442 - protein, 10 aa, Artificial Sequence
  Description of Artificial Sequence: Synthetic peptide
  Seed: YRRPVGISSM
YDRPVGISSY

SEQ ID NO: 162443 - protein, 9 aa, Artificial Sequence
  Description of Artificial Sequence: Synthetic peptide
  Seed: YSHGTGTGY
YEHGTGTGF

SEQ ID NO: 162444 - protein, 9 aa, Artificial Sequence
  Description of Artificial Sequence: Synthetic peptide
  Seed: YSHGTGTGY
YEHGTGTGL

SEQ ID NO: 162445 - protein, 9 aa, Artificial Sequence
  Description of Artificial Sequence: Synthetic peptide
  Seed: YSHGTGTGY
YEHGTGTGM

SEQ ID NO: 162446 - protein, 9 aa, Artificial Sequence
  Description of Artificial Sequence: Synthetic peptide
  Seed: YSHGTGTGY
YEHGTGTGY

SEQ ID NO: 162447 - protein, 10 aa, Artificial Sequence
  Description of Artificial Sequence: Synthetic peptide
  Seed: YRRPVGISSM
YERPVGISSF

SEQ ID NO: 162448 - protein, 10 aa, Artificial Sequence
  Description of Artificial Sequence: Synthetic peptide
  Seed: YRRPVGISSM
YERPVGISSL

SEQ ID NO: 162449 - protein, 10 aa, Artificial Sequence
  Description of Artificial Sequence: Synthetic peptide
  Seed: YRRPVGISSM
YERPVGISSM

SEQ ID NO: 162450 - protein, 10 aa, Artificial Sequence
  Description of Artificial Sequence: Synthetic peptide
  Seed: YRRPVGISSM
YERPVGISSY

SEQ ID NO: 162451 - protein, 9 aa, Artificial Sequence
  Description of Artificial Sequence: Synthetic peptide
  Seed: YSHGTGTGY
YFHGTGTGA

SEQ ID NO: 162452 - protein, 9 aa, Artificial Sequence
  Description of Artificial Sequence: Synthetic peptide
  Seed: YSHGTGTGY
YFHGTGTGC

SEQ ID NO: 162453 - protein, 9 aa, Artificial Sequence
  Description of Artificial Sequence: Synthetic peptide
  Seed: YSHGTGTGY
YFHGTGTGF

SEQ ID NO: 162454 - protein, 9 aa, Artificial Sequence
  Description of Artificial Sequence: Synthetic peptide
  Seed: YSHGTGTGY
YFHGTGTGH

SEQ ID NO: 162455 - protein, 9 aa, Artificial Sequence
  Description of Artificial Sequence: Synthetic peptide
  Seed: YSHGTGTGY
YFHGTGTGI

SEQ ID NO: 162456 - protein, 9 aa, Artificial Sequence
  Description of Artificial Sequence: Synthetic peptide
  Seed: YSHGTGTGY
YFHGTGTGL

SEQ ID NO: 162457 - protein, 9 aa, Artificial Sequence
  Description of Artificial Sequence: Synthetic peptide
  Seed: YSHGTGTGY
YFHGTGTGM

SEQ ID NO: 162458 - protein, 9 aa, Artificial Sequence
  Description of Artificial Sequence: Synthetic peptide
  Seed: YSHGTGTGY
YFHGTGTGV

SEQ ID NO: 162459 - protein, 9 aa, Artificial Sequence
  Description of Artificial Sequence: Synthetic peptide
  Seed: YSHGTGTGY
YFHGTGTGW

SEQ ID NO: 162460 - protein, 9 aa, Artificial Sequence
  Description of Artificial Sequence: Synthetic peptide
  Seed: YSHGTGTGY
YFHGTGTGY

SEQ ID NO: 162461 - protein, 10 aa, Artificial Sequence
  Description of Artificial Sequence: Synthetic peptide
  Seed: YRRPVGISSM
YFRPVGISSA

SEQ ID NO: 162462 - protein, 10 aa, Artificial Sequence
  Description of Artificial Sequence: Synthetic peptide
  Seed: YRRPVGISSM
YFRPVGISSF

SEQ ID NO: 162463 - protein, 10 aa, Artificial Sequence
  Description of Artificial Sequence: Synthetic peptide
  Seed: YRRPVGISSM
YFRPVGISSH

SEQ ID NO: 162464 - protein, 10 aa, Artificial Sequence
  Description of Artificial Sequence: Synthetic peptide
  Seed: YRRPVGISSM
YFRPVGISSI

SEQ ID NO: 162465 - protein, 10 aa, Artificial Sequence
  Description of Artificial Sequence: Synthetic peptide
  Seed: YRRPVGISSM
YFRPVGISSL

SEQ ID NO: 162466 - protein, 10 aa, Artificial Sequence
  Description of Artificial Sequence: Synthetic peptide
  Seed: YRRPVGISSM
YFRPVGISSM

SEQ ID NO: 162467 - protein, 10 aa, Artificial Sequence
  Description of Artificial Sequence: Synthetic peptide
  Seed: YRRPVGISSM
YFRPVGISSV

SEQ ID NO: 162468 - protein, 10 aa, Artificial Sequence
  Description of Artificial Sequence: Synthetic peptide
  Seed: YRRPVGISSM
YFRPVGISSW

SEQ ID NO: 162469 - protein, 10 aa, Artificial Sequence
  Description of Artificial Sequence: Synthetic peptide
  Seed: YRRPVGISSM
YFRPVGISSY

SEQ ID NO: 162470 - protein, 9 aa, Artificial Sequence
  Description of Artificial Sequence: Synthetic peptide
  Seed: YSHGTGTGY
YGHGTGTGF

SEQ ID NO: 162471 - protein, 9 aa, Artificial Sequence
  Description of Artificial Sequence: Synthetic peptide
  Seed: YSHGTGTGY
YGHGTGTGL

SEQ ID NO: 162472 - protein, 9 aa, Artificial Sequence
  Description of Artificial Sequence: Synthetic peptide
  Seed: YSHGTGTGY
YGHGTGTGM

SEQ ID NO: 162473 - protein, 9 aa, Artificial Sequence
  Description of Artificial Sequence: Synthetic peptide
  Seed: YSHGTGTGY
YGHGTGTGW

SEQ ID NO: 162474 - protein, 9 aa, Artificial Sequence
  Description of Artificial Sequence: Synthetic peptide
  Seed: YSHGTGTGY
YGHGTGTGY

SEQ ID NO: 162475 - protein, 10 aa, Artificial Sequence
  Description of Artificial Sequence: Synthetic peptide
  Seed: YRRPVGISSM
YGRPVGISSF

SEQ ID NO: 162476 - protein, 10 aa, Artificial Sequence
  Description of Artificial Sequence: Synthetic peptide
  Seed: YRRPVGISSM
YGRPVGISSM

SEQ ID NO: 162477 - protein, 10 aa, Artificial Sequence
  Description of Artificial Sequence: Synthetic peptide
  Seed: YRRPVGISSM
YGRPVGISSY

SEQ ID NO: 162478 - protein, 9 aa, Artificial Sequence
  Description of Artificial Sequence: Synthetic peptide
  Seed: YSHGTGTGY
YHHGTGTGF

SEQ ID NO: 162479 - protein, 9 aa, Artificial Sequence
  Description of Artificial Sequence: Synthetic peptide
  Seed: YSHGTGTGY
YHHGTGTGI

SEQ ID NO: 162480 - protein, 9 aa, Artificial Sequence
  Description of Artificial Sequence: Synthetic peptide
  Seed: YSHGTGTGY
YHHGTGTGL

SEQ ID NO: 162481 - protein, 9 aa, Artificial Sequence
  Description of Artificial Sequence: Synthetic peptide
  Seed: YSHGTGTGY
YHHGTGTGM

SEQ ID NO: 162482 - protein, 9 aa, Artificial Sequence
  Description of Artificial Sequence: Synthetic peptide
  Seed: YSHGTGTGY
YHHGTGTGW

SEQ ID NO: 162483 - protein, 9 aa, Artificial Sequence
  Description of Artificial Sequence: Synthetic peptide
  Seed: YSHGTGTGY
YHHGTGTGY

SEQ ID NO: 162484 - protein, 10 aa, Artificial Sequence
  Description of Artificial Sequence: Synthetic peptide
  Seed: YRRPVGISSM
YHRPVGISSF

SEQ ID NO: 162485 - protein, 10 aa, Artificial Sequence
  Description of Artificial Sequence: Synthetic peptide
  Seed: YRRPVGISSM
YHRPVGISSH

SEQ ID NO: 162486 - protein, 10 aa, Artificial Sequence
  Description of Artificial Sequence: Synthetic peptide
  Seed: YRRPVGISSM
YHRPVGISSL

SEQ ID NO: 162487 - protein, 10 aa, Artificial Sequence
  Description of Artificial Sequence: Synthetic peptide
  Seed: YRRPVGISSM
YHRPVGISSM

SEQ ID NO: 162488 - protein, 10 aa, Artificial Sequence
  Description of Artificial Sequence: Synthetic peptide
  Seed: YRRPVGISSM
YHRPVGISSY

SEQ ID NO: 162489 - protein, 9 aa, Artificial Sequence
  Description of Artificial Sequence: Synthetic peptide
  Seed: YSHGTGTGY
YIHGTGTGF

SEQ ID NO: 162490 - protein, 9 aa, Artificial Sequence
  Description of Artificial Sequence: Synthetic peptide
  Seed: YSHGTGTGY
YIHGTGTGK

SEQ ID NO: 162491 - protein, 9 aa, Artificial Sequence
  Description of Artificial Sequence: Synthetic peptide
  Seed: YSHGTGTGY
YIHGTGTGL

SEQ ID NO: 162492 - protein, 9 aa, Artificial Sequence
  Description of Artificial Sequence: Synthetic peptide
  Seed: YSHGTGTGY
YIHGTGTGM

SEQ ID NO: 162493 - protein, 9 aa, Artificial Sequence
  Description of Artificial Sequence: Synthetic peptide
  Seed: YSHGTGTGY
YIHGTGTGR

SEQ ID NO: 162494 - protein, 9 aa, Artificial Sequence
  Description of Artificial Sequence: Synthetic peptide
  Seed: YSHGTGTGY
YIHGTGTGV

SEQ ID NO: 162495 - protein, 9 aa, Artificial Sequence
  Description of Artificial Sequence: Synthetic peptide
  Seed: YSHGTGTGY
YIHGTGTGW

SEQ ID NO: 162496 - protein, 9 aa, Artificial Sequence
  Description of Artificial Sequence: Synthetic peptide
  Seed: YSHGTGTGY
YIHGTGTGY

SEQ ID NO: 162497 - protein, 11 aa, Artificial Sequence
  Description of Artificial Sequence: Synthetic peptide
  Seed: YSHGTGTGYTM
YIHGTGTGYTF

SEQ ID NO: 162498 - protein, 11 aa, Artificial Sequence
  Description of Artificial Sequence: Synthetic peptide
  Seed: YSHGTGTGYTM
YIHGTGTGYTW

SEQ ID NO: 162499 - protein, 11 aa, Artificial Sequence
  Description of Artificial Sequence: Synthetic peptide
  Seed: YSHGTGTGYTM
YIHGTGTGYTY

SEQ ID NO: 162500 - protein, 10 aa, Artificial Sequence
  Description of Artificial Sequence: Synthetic peptide
  Seed: YRRPVGISSM
YIRPVGISSF

SEQ ID NO: 162501 - protein, 10 aa, Artificial Sequence
  Description of Artificial Sequence: Synthetic peptide
  Seed: YRRPVGISSM
YIRPVGISSL

SEQ ID NO: 162502 - protein, 10 aa, Artificial Sequence
  Description of Artificial Sequence: Synthetic peptide
  Seed: YRRPVGISSM
YIRPVGISSM

SEQ ID NO: 162503 - protein, 10 aa, Artificial Sequence
  Description of Artificial Sequence: Synthetic peptide
  Seed: YRRPVGISSM
YIRPVGISSY

SEQ ID NO: 162504 - protein, 9 aa, Artificial Sequence
  Description of Artificial Sequence: Synthetic peptide
  Seed: YSHGTGTGY
YKHGTGTGF

SEQ ID NO: 162505 - protein, 9 aa, Artificial Sequence
  Description of Artificial Sequence: Synthetic peptide
  Seed: YSHGTGTGY
YKHGTGTGH

SEQ ID NO: 162506 - protein, 9 aa, Artificial Sequence
  Description of Artificial Sequence: Synthetic peptide
  Seed: YSHGTGTGY
YKHGTGTGI

SEQ ID NO: 162507 - protein, 9 aa, Artificial Sequence
  Description of Artificial Sequence: Synthetic peptide
  Seed: YSHGTGTGY
YKHGTGTGL

SEQ ID NO: 162508 - protein, 9 aa, Artificial Sequence
  Description of Artificial Sequence: Synthetic peptide
  Seed: YSHGTGTGY
YKHGTGTGM

SEQ ID NO: 162509 - protein, 9 aa, Artificial Sequence
  Description of Artificial Sequence: Synthetic peptide
  Seed: YSHGTGTGY
YKHGTGTGV

SEQ ID NO: 162510 - protein, 9 aa, Artificial Sequence
  Description of Artificial Sequence: Synthetic peptide
  Seed: YSHGTGTGY
YKHGTGTGW

SEQ ID NO: 162511 - protein, 9 aa, Artificial Sequence
  Description of Artificial Sequence: Synthetic peptide
  Seed: YSHGTGTGY
YKHGTGTGY

SEQ ID NO: 162512 - protein, 10 aa, Artificial Sequence
  Description of Artificial Sequence: Synthetic peptide
  Seed: YRRPVGISSM
YKRPVGISSF

SEQ ID NO: 162513 - protein, 10 aa, Artificial Sequence
  Description of Artificial Sequence: Synthetic peptide
  Seed: YRRPVGISSM
YKRPVGISSI

SEQ ID NO: 162514 - protein, 10 aa, Artificial Sequence
  Description of Artificial Sequence: Synthetic peptide
  Seed: YRRPVGISSM
YKRPVGISSL

SEQ ID NO: 162515 - protein, 10 aa, Artificial Sequence
  Description of Artificial Sequence: Synthetic peptide
  Seed: YRRPVGISSM
YKRPVGISSM

SEQ ID NO: 162516 - protein, 10 aa, Artificial Sequence
  Description of Artificial Sequence: Synthetic peptide
  Seed: YRRPVGISSM
YKRPVGISSW

SEQ ID NO: 162517 - protein, 10 aa, Artificial Sequence
  Description of Artificial Sequence: Synthetic peptide
  Seed: YRRPVGISSM
YKRPVGISSY

SEQ ID NO: 162518 - protein, 9 aa, Artificial Sequence
  Description of Artificial Sequence: Synthetic peptide
  Seed: YSHGTGTGY
YLHGTGTGF

SEQ ID NO: 162519 - protein, 9 aa, Artificial Sequence
  Description of Artificial Sequence: Synthetic peptide
  Seed: YSHGTGTGY
YLHGTGTGL

SEQ ID NO: 162520 - protein, 9 aa, Artificial Sequence
  Description of Artificial Sequence: Synthetic peptide
  Seed: YSHGTGTGY
YLHGTGTGM

SEQ ID NO: 162521 - protein, 9 aa, Artificial Sequence
  Description of Artificial Sequence: Synthetic peptide
  Seed: YSHGTGTGY
YLHGTGTGR

SEQ ID NO: 162522 - protein, 9 aa, Artificial Sequence
  Description of Artificial Sequence: Synthetic peptide
  Seed: YSHGTGTGY
YLHGTGTGW

SEQ ID NO: 162523 - protein, 9 aa, Artificial Sequence
  Description of Artificial Sequence: Synthetic peptide
  Seed: YSHGTGTGY
YLHGTGTGY

SEQ ID NO: 162524 - protein, 10 aa, Artificial Sequence
  Description of Artificial Sequence: Synthetic peptide
  Seed: YRRPVGISSM
YLRPVGISSF

SEQ ID NO: 162525 - protein, 10 aa, Artificial Sequence
  Description of Artificial Sequence: Synthetic peptide
  Seed: YRRPVGISSM
YLRPVGISSL

SEQ ID NO: 162526 - protein, 10 aa, Artificial Sequence
  Description of Artificial Sequence: Synthetic peptide
  Seed: YRRPVGISSM
YLRPVGISSM

SEQ ID NO: 162527 - protein, 10 aa, Artificial Sequence
  Description of Artificial Sequence: Synthetic peptide
  Seed: YRRPVGISSM
YLRPVGISSY

SEQ ID NO: 162528 - protein, 9 aa, Artificial Sequence
  Description of Artificial Sequence: Synthetic peptide
  Seed: YSHGTGTGY
YMHGTGTGA

SEQ ID NO: 162529 - protein, 9 aa, Artificial Sequence
  Description of Artificial Sequence: Synthetic peptide
  Seed: YSHGTGTGY
YMHGTGTGF

SEQ ID NO: 162530 - protein, 9 aa, Artificial Sequence
  Description of Artificial Sequence: Synthetic peptide
  Seed: YSHGTGTGY
YMHGTGTGH

SEQ ID NO: 162531 - protein, 9 aa, Artificial Sequence
  Description of Artificial Sequence: Synthetic peptide
  Seed: YSHGTGTGY
YMHGTGTGI

SEQ ID NO: 162532 - protein, 9 aa, Artificial Sequence
  Description of Artificial Sequence: Synthetic peptide
  Seed: YSHGTGTGY
YMHGTGTGL

SEQ ID NO: 162533 - protein, 9 aa, Artificial Sequence
  Description of Artificial Sequence: Synthetic peptide
  Seed: YSHGTGTGY
YMHGTGTGM

SEQ ID NO: 162534 - protein, 9 aa, Artificial Sequence
  Description of Artificial Sequence: Synthetic peptide
  Seed: YSHGTGTGY
YMHGTGTGR

SEQ ID NO: 162535 - protein, 9 aa, Artificial Sequence
  Description of Artificial Sequence: Synthetic peptide
  Seed: YSHGTGTGY
YMHGTGTGV

SEQ ID NO: 162536 - protein, 9 aa, Artificial Sequence
  Description of Artificial Sequence: Synthetic peptide
  Seed: YSHGTGTGY
YMHGTGTGW

SEQ ID NO: 162537 - protein, 9 aa, Artificial Sequence
  Description of Artificial Sequence: Synthetic peptide
  Seed: YSHGTGTGY
YMHGTGTGY

SEQ ID NO: 162538 - protein, 11 aa, Artificial Sequence
  Description of Artificial Sequence: Synthetic peptide
  Seed: YSHGTGTGYTM
YMHGTGTGYTF

SEQ ID NO: 162539 - protein, 11 aa, Artificial Sequence
  Description of Artificial Sequence: Synthetic peptide
  Seed: YSHGTGTGYTM
YMHGTGTGYTM

SEQ ID NO: 162540 - protein, 11 aa, Artificial Sequence
  Description of Artificial Sequence: Synthetic peptide
  Seed: YSHGTGTGYTM
YMHGTGTGYTW

SEQ ID NO: 162541 - protein, 11 aa, Artificial Sequence
  Description of Artificial Sequence: Synthetic peptide
  Seed: YSHGTGTGYTM
YMHGTGTGYTY

SEQ ID NO: 162542 - protein, 10 aa, Artificial Sequence
  Description of Artificial Sequence: Synthetic peptide
  Seed: YRRPVGISSM
YMRPVGISSF

SEQ ID NO: 162543 - protein, 10 aa, Artificial Sequence
  Description of Artificial Sequence: Synthetic peptide
  Seed: YRRPVGISSM
YMRPVGISSH

SEQ ID NO: 162544 - protein, 10 aa, Artificial Sequence
  Description of Artificial Sequence: Synthetic peptide
  Seed: YRRPVGISSM
YMRPVGISSI

SEQ ID NO: 162545 - protein, 10 aa, Artificial Sequence
  Description of Artificial Sequence: Synthetic peptide
  Seed: YRRPVGISSM
YMRPVGISSL

SEQ ID NO: 162546 - protein, 10 aa, Artificial Sequence
  Description of Artificial Sequence: Synthetic peptide
  Seed: YRRPVGISSM
YMRPVGISSM

SEQ ID NO: 162547 - protein, 10 aa, Artificial Sequence
  Description of Artificial Sequence: Synthetic peptide
  Seed: YRRPVGISSM
YMRPVGISSW

SEQ ID NO: 162548 - protein, 10 aa, Artificial Sequence
  Description of Artificial Sequence: Synthetic peptide
  Seed: YRRPVGISSM
YMRPVGISSY

SEQ ID NO: 162549 - protein, 9 aa, Artificial Sequence
  Description of Artificial Sequence: Synthetic peptide
  Seed: YSHGTGTGY
YNHGTGTGF

SEQ ID NO: 162550 - protein, 9 aa, Artificial Sequence
  Description of Artificial Sequence: Synthetic peptide
  Seed: YSHGTGTGY
YNHGTGTGM

SEQ ID NO: 162551 - protein, 9 aa, Artificial Sequence
  Description of Artificial Sequence: Synthetic peptide
  Seed: YSHGTGTGY
YNHGTGTGY

SEQ ID NO: 162552 - protein, 10 aa, Artificial Sequence
  Description of Artificial Sequence: Synthetic peptide
  Seed: YRRPVGISSM
YNRPVGISSF

SEQ ID NO: 162553 - protein, 10 aa, Artificial Sequence
  Description of Artificial Sequence: Synthetic peptide
  Seed: YRRPVGISSM
YNRPVGISSM

SEQ ID NO: 162554 - protein, 10 aa, Artificial Sequence
  Description of Artificial Sequence: Synthetic peptide
  Seed: YRRPVGISSM
YNRPVGISSY

SEQ ID NO: 162555 - protein, 9 aa, Artificial Sequence
  Description of Artificial Sequence: Synthetic peptide
  Seed: YSHGTGTGY
YPHGTGTGA

SEQ ID NO: 162556 - protein, 9 aa, Artificial Sequence
  Description of Artificial Sequence: Synthetic peptide
  Seed: YSHGTGTGY
YPHGTGTGF

SEQ ID NO: 162557 - protein, 9 aa, Artificial Sequence
  Description of Artificial Sequence: Synthetic peptide
  Seed: YSHGTGTGY
YPHGTGTGH

SEQ ID NO: 162558 - protein, 9 aa, Artificial Sequence
  Description of Artificial Sequence: Synthetic peptide
  Seed: YSHGTGTGY
YPHGTGTGI

SEQ ID NO: 162559 - protein, 9 aa, Artificial Sequence
  Description of Artificial Sequence: Synthetic peptide
  Seed: YSHGTGTGY
YPHGTGTGL

SEQ ID NO: 162560 - protein, 9 aa, Artificial Sequence
  Description of Artificial Sequence: Synthetic peptide
  Seed: YSHGTGTGY
YPHGTGTGM

SEQ ID NO: 162561 - protein, 9 aa, Artificial Sequence
  Description of Artificial Sequence: Synthetic peptide
  Seed: YSHGTGTGY
YPHGTGTGV

SEQ ID NO: 162562 - protein, 9 aa, Artificial Sequence
  Description of Artificial Sequence: Synthetic peptide
  Seed: YSHGTGTGY
YPHGTGTGW

SEQ ID NO: 162563 - protein, 9 aa, Artificial Sequence
  Description of Artificial Sequence: Synthetic peptide
  Seed: YSHGTGTGY
YPHGTGTGY

SEQ ID NO: 162564 - protein, 10 aa, Artificial Sequence
  Description of Artificial Sequence: Synthetic peptide
  Seed: YRRPVGISSM
YPRPVGISSF

SEQ ID NO: 162565 - protein, 10 aa, Artificial Sequence
  Description of Artificial Sequence: Synthetic peptide
  Seed: YRRPVGISSM
YPRPVGISSL

SEQ ID NO: 162566 - protein, 10 aa, Artificial Sequence
  Description of Artificial Sequence: Synthetic peptide
  Seed: YRRPVGISSM
YPRPVGISSM

SEQ ID NO: 162567 - protein, 10 aa, Artificial Sequence
  Description of Artificial Sequence: Synthetic peptide
  Seed: YRRPVGISSM
YPRPVGISSY

SEQ ID NO: 162568 - protein, 9 aa, Artificial Sequence
  Description of Artificial Sequence: Synthetic peptide
  Seed: YSHGTGTGY
YQHGTGTGA

SEQ ID NO: 162569 - protein, 9 aa, Artificial Sequence
  Description of Artificial Sequence: Synthetic peptide
  Seed: YSHGTGTGY
YQHGTGTGF

SEQ ID NO: 162570 - protein, 9 aa, Artificial Sequence
  Description of Artificial Sequence: Synthetic peptide
  Seed: YSHGTGTGY
YQHGTGTGG

SEQ ID NO: 162571 - protein, 9 aa, Artificial Sequence
  Description of Artificial Sequence: Synthetic peptide
  Seed: YSHGTGTGY
YQHGTGTGH

SEQ ID NO: 162572 - protein, 9 aa, Artificial Sequence
  Description of Artificial Sequence: Synthetic peptide
  Seed: YSHGTGTGY
YQHGTGTGI

SEQ ID NO: 162573 - protein, 9 aa, Artificial Sequence
  Description of Artificial Sequence: Synthetic peptide
  Seed: YSHGTGTGY
YQHGTGTGL

SEQ ID NO: 162574 - protein, 9 aa, Artificial Sequence
  Description of Artificial Sequence: Synthetic peptide
  Seed: YSHGTGTGY
YQHGTGTGM

SEQ ID NO: 162575 - protein, 9 aa, Artificial Sequence
  Description of Artificial Sequence: Synthetic peptide
  Seed: YSHGTGTGY
YQHGTGTGV

SEQ ID NO: 162576 - protein, 9 aa, Artificial Sequence
  Description of Artificial Sequence: Synthetic peptide
  Seed: YSHGTGTGY
YQHGTGTGW

SEQ ID NO: 162577 - protein, 9 aa, Artificial Sequence
  Description of Artificial Sequence: Synthetic peptide
  Seed: YSHGTGTGY
YQHGTGTGY

SEQ ID NO: 162578 - protein, 10 aa, Artificial Sequence
  Description of Artificial Sequence: Synthetic peptide
  Seed: YRRPVGISSM
YQRPVGISSA

SEQ ID NO: 162579 - protein, 10 aa, Artificial Sequence
  Description of Artificial Sequence: Synthetic peptide
  Seed: YRRPVGISSM
YQRPVGISSF

SEQ ID NO: 162580 - protein, 10 aa, Artificial Sequence
  Description of Artificial Sequence: Synthetic peptide
  Seed: YRRPVGISSM
YQRPVGISSH

SEQ ID NO: 162581 - protein, 10 aa, Artificial Sequence
  Description of Artificial Sequence: Synthetic peptide
  Seed: YRRPVGISSM
YQRPVGISSI

SEQ ID NO: 162582 - protein, 10 aa, Artificial Sequence
  Description of Artificial Sequence: Synthetic peptide
  Seed: YRRPVGISSM
YQRPVGISSL

SEQ ID NO: 162583 - protein, 10 aa, Artificial Sequence
  Description of Artificial Sequence: Synthetic peptide
  Seed: YRRPVGISSM
YQRPVGISSM

SEQ ID NO: 162584 - protein, 10 aa, Artificial Sequence
  Description of Artificial Sequence: Synthetic peptide
  Seed: YRRPVGISSM
YQRPVGISSV

SEQ ID NO: 162585 - protein, 10 aa, Artificial Sequence
  Description of Artificial Sequence: Synthetic peptide
  Seed: YRRPVGISSM
YQRPVGISSW

SEQ ID NO: 162586 - protein, 10 aa, Artificial Sequence
  Description of Artificial Sequence: Synthetic peptide
  Seed: YRRPVGISSM
YQRPVGISSY

SEQ ID NO: 162587 - protein, 9 aa, Artificial Sequence
  Description of Artificial Sequence: Synthetic peptide
  Seed: YSHGTGTGY
YRHGTGTGF

SEQ ID NO: 162588 - protein, 9 aa, Artificial Sequence
  Description of Artificial Sequence: Synthetic peptide
  Seed: YSHGTGTGY
YRHGTGTGL

SEQ ID NO: 162589 - protein, 9 aa, Artificial Sequence
  Description of Artificial Sequence: Synthetic peptide
  Seed: YSHGTGTGY
YRHGTGTGM

SEQ ID NO: 162590 - protein, 9 aa, Artificial Sequence
  Description of Artificial Sequence: Synthetic peptide
  Seed: YSHGTGTGY
YRHGTGTGY

SEQ ID NO: 162591 - protein, 10 aa, Artificial Sequence
  Description of Artificial Sequence: Synthetic peptide
  Seed: YRRPVGISSM
YRRPVGISSF

SEQ ID NO: 162592 - protein, 10 aa, Artificial Sequence
  Description of Artificial Sequence: Synthetic peptide
  Seed: YRRPVGISSM
YRRPVGISSI

SEQ ID NO: 162593 - protein, 10 aa, Artificial Sequence
  Description of Artificial Sequence: Synthetic peptide
  Seed: YRRPVGISSM
YRRPVGISSK

SEQ ID NO: 162594 - protein, 10 aa, Artificial Sequence
  Description of Artificial Sequence: Synthetic peptide
  Seed: YRRPVGISSM
YRRPVGISSL

SEQ ID NO: 162595 - protein, 10 aa, Artificial Sequence
  Description of Artificial Sequence: Synthetic peptide
  Seed: YRRPVGISSM
YRRPVGISSR

SEQ ID NO: 162596 - protein, 10 aa, Artificial Sequence
  Description of Artificial Sequence: Synthetic peptide
  Seed: YRRPVGISSM
YRRPVGISSV

SEQ ID NO: 162597 - protein, 10 aa, Artificial Sequence
  Description of Artificial Sequence: Synthetic peptide
  Seed: YRRPVGISSM
YRRPVGISSY

SEQ ID NO: 162598 - protein, 9 aa, Artificial Sequence
  Description of Artificial Sequence: Synthetic peptide
  Seed: YSHGTGTGY
YSHGTGTGF

SEQ ID NO: 162599 - protein, 9 aa, Artificial Sequence
  Description of Artificial Sequence: Synthetic peptide
  Seed: YSHGTGTGY
YSHGTGTGH

SEQ ID NO: 162600 - protein, 9 aa, Artificial Sequence
  Description of Artificial Sequence: Synthetic peptide
  Seed: YSHGTGTGY
YSHGTGTGI

SEQ ID NO: 162601 - protein, 9 aa, Artificial Sequence
  Description of Artificial Sequence: Synthetic peptide
  Seed: YSHGTGTGY
YSHGTGTGL

SEQ ID NO: 162602 - protein, 9 aa, Artificial Sequence
  Description of Artificial Sequence: Synthetic peptide
  Seed: YSHGTGTGY
YSHGTGTGM

SEQ ID NO: 162603 - protein, 9 aa, Artificial Sequence
  Description of Artificial Sequence: Synthetic peptide
  Seed: YSHGTGTGY
YSHGTGTGR

SEQ ID NO: 162604 - protein, 9 aa, Artificial Sequence
  Description of Artificial Sequence: Synthetic peptide
  Seed: YSHGTGTGY
YSHGTGTGV

SEQ ID NO: 162605 - protein, 9 aa, Artificial Sequence
  Description of Artificial Sequence: Synthetic peptide
  Seed: YSHGTGTGY
YSHGTGTGW

SEQ ID NO: 162606 - protein, 11 aa, Artificial Sequence
  Description of Artificial Sequence: Synthetic peptide
  Seed: YSHGTGTGYTM
YSHGTGTGYTF

SEQ ID NO: 162607 - protein, 11 aa, Artificial Sequence
  Description of Artificial Sequence: Synthetic peptide
  Seed: YSHGTGTGYTM
YSHGTGTGYTL

SEQ ID NO: 162608 - protein, 11 aa, Artificial Sequence
  Description of Artificial Sequence: Synthetic peptide
  Seed: YSHGTGTGYTM
YSHGTGTGYTW

SEQ ID NO: 162609 - protein, 11 aa, Artificial Sequence
  Description of Artificial Sequence: Synthetic peptide
  Seed: YSHGTGTGYTM
YSHGTGTGYTY

SEQ ID NO: 162610 - protein, 10 aa, Artificial Sequence
  Description of Artificial Sequence: Synthetic peptide
  Seed: YRRPVGISSM
YSRPVGISSF

SEQ ID NO: 162611 - protein, 10 aa, Artificial Sequence
  Description of Artificial Sequence: Synthetic peptide
  Seed: YRRPVGISSM
YSRPVGISSL

SEQ ID NO: 162612 - protein, 10 aa, Artificial Sequence
  Description of Artificial Sequence: Synthetic peptide
  Seed: YRRPVGISSM
YSRPVGISSM

SEQ ID NO: 162613 - protein, 10 aa, Artificial Sequence
  Description of Artificial Sequence: Synthetic peptide
  Seed: YRRPVGISSM
YSRPVGISSY

SEQ ID NO: 162614 - protein, 9 aa, Artificial Sequence
  Description of Artificial Sequence: Synthetic peptide
  Seed: YSHGTGTGY
YTHGTGTGF

SEQ ID NO: 162615 - protein, 9 aa, Artificial Sequence
  Description of Artificial Sequence: Synthetic peptide
  Seed: YSHGTGTGY
YTHGTGTGI

SEQ ID NO: 162616 - protein, 9 aa, Artificial Sequence
  Description of Artificial Sequence: Synthetic peptide
  Seed: YSHGTGTGY
YTHGTGTGK

SEQ ID NO: 162617 - protein, 9 aa, Artificial Sequence
  Description of Artificial Sequence: Synthetic peptide
  Seed: YSHGTGTGY
YTHGTGTGL

SEQ ID NO: 162618 - protein, 9 aa, Artificial Sequence
  Description of Artificial Sequence: Synthetic peptide
  Seed: YSHGTGTGY
YTHGTGTGM

SEQ ID NO: 162619 - protein, 9 aa, Artificial Sequence
  Description of Artificial Sequence: Synthetic peptide
  Seed: YSHGTGTGY
YTHGTGTGR

SEQ ID NO: 162620 - protein, 9 aa, Artificial Sequence
  Description of Artificial Sequence: Synthetic peptide
  Seed: YSHGTGTGY
YTHGTGTGV

SEQ ID NO: 162621 - protein, 9 aa, Artificial Sequence
  Description of Artificial Sequence: Synthetic peptide
  Seed: YSHGTGTGY
YTHGTGTGW

SEQ ID NO: 162622 - protein, 9 aa, Artificial Sequence
  Description of Artificial Sequence: Synthetic peptide
  Seed: YSHGTGTGY
YTHGTGTGY

SEQ ID NO: 162623 - protein, 11 aa, Artificial Sequence
  Description of Artificial Sequence: Synthetic peptide
  Seed: YSHGTGTGYTM
YTHGTGTGYTF

SEQ ID NO: 162624 - protein, 11 aa, Artificial Sequence
  Description of Artificial Sequence: Synthetic peptide
  Seed: YSHGTGTGYTM
YTHGTGTGYTL

SEQ ID NO: 162625 - protein, 11 aa, Artificial Sequence
  Description of Artificial Sequence: Synthetic peptide
  Seed: YSHGTGTGYTM
YTHGTGTGYTM

SEQ ID NO: 162626 - protein, 11 aa, Artificial Sequence
  Description of Artificial Sequence: Synthetic peptide
  Seed: YSHGTGTGYTM
YTHGTGTGYTW

SEQ ID NO: 162627 - protein, 11 aa, Artificial Sequence
  Description of Artificial Sequence: Synthetic peptide
  Seed: YSHGTGTGYTM
YTHGTGTGYTY

SEQ ID NO: 162628 - protein, 10 aa, Artificial Sequence
  Description of Artificial Sequence: Synthetic peptide
  Seed: YRRPVGISSM
YTRPVGISSF

SEQ ID NO: 162629 - protein, 10 aa, Artificial Sequence
  Description of Artificial Sequence: Synthetic peptide
  Seed: YRRPVGISSM
YTRPVGISSL

SEQ ID NO: 162630 - protein, 10 aa, Artificial Sequence
  Description of Artificial Sequence: Synthetic peptide
  Seed: YRRPVGISSM
YTRPVGISSM

SEQ ID NO: 162631 - protein, 10 aa, Artificial Sequence
  Description of Artificial Sequence: Synthetic peptide
  Seed: YRRPVGISSM
YTRPVGISSY

SEQ ID NO: 162632 - protein, 9 aa, Artificial Sequence
  Description of Artificial Sequence: Synthetic peptide
  Seed: YSHGTGTGY
YVHGTGTGF

SEQ ID NO: 162633 - protein, 9 aa, Artificial Sequence
  Description of Artificial Sequence: Synthetic peptide
  Seed: YSHGTGTGY
YVHGTGTGI

SEQ ID NO: 162634 - protein, 9 aa, Artificial Sequence
  Description of Artificial Sequence: Synthetic peptide
  Seed: YSHGTGTGY
YVHGTGTGK

SEQ ID NO: 162635 - protein, 9 aa, Artificial Sequence
  Description of Artificial Sequence: Synthetic peptide
  Seed: YSHGTGTGY
YVHGTGTGL

SEQ ID NO: 162636 - protein, 9 aa, Artificial Sequence
  Description of Artificial Sequence: Synthetic peptide
  Seed: YSHGTGTGY
YVHGTGTGM

SEQ ID NO: 162637 - protein, 9 aa, Artificial Sequence
  Description of Artificial Sequence: Synthetic peptide
  Seed: YSHGTGTGY
YVHGTGTGR

SEQ ID NO: 162638 - protein, 9 aa, Artificial Sequence
  Description of Artificial Sequence: Synthetic peptide
  Seed: YSHGTGTGY
YVHGTGTGV

SEQ ID NO: 162639 - protein, 9 aa, Artificial Sequence
  Description of Artificial Sequence: Synthetic peptide
  Seed: YSHGTGTGY
YVHGTGTGW

SEQ ID NO: 162640 - protein, 9 aa, Artificial Sequence
  Description of Artificial Sequence: Synthetic peptide
  Seed: YSHGTGTGY
YVHGTGTGY

SEQ ID NO: 162641 - protein, 11 aa, Artificial Sequence
  Description of Artificial Sequence: Synthetic peptide
  Seed: YSHGTGTGYTM
YVHGTGTGYTF

SEQ ID NO: 162642 - protein, 11 aa, Artificial Sequence
  Description of Artificial Sequence: Synthetic peptide
  Seed: YSHGTGTGYTM
YVHGTGTGYTM

SEQ ID NO: 162643 - protein, 11 aa, Artificial Sequence
  Description of Artificial Sequence: Synthetic peptide
  Seed: YSHGTGTGYTM
YVHGTGTGYTW

SEQ ID NO: 162644 - protein, 11 aa, Artificial Sequence
  Description of Artificial Sequence: Synthetic peptide
  Seed: YSHGTGTGYTM
YVHGTGTGYTY

SEQ ID NO: 162645 - protein, 10 aa, Artificial Sequence
  Description of Artificial Sequence: Synthetic peptide
  Seed: YRRPVGISSM
YVRPVGISSF

SEQ ID NO: 162646 - protein, 10 aa, Artificial Sequence
  Description of Artificial Sequence: Synthetic peptide
  Seed: YRRPVGISSM
YVRPVGISSL

SEQ ID NO: 162647 - protein, 10 aa, Artificial Sequence
  Description of Artificial Sequence: Synthetic peptide
  Seed: YRRPVGISSM
YVRPVGISSM

SEQ ID NO: 162648 - protein, 10 aa, Artificial Sequence
  Description of Artificial Sequence: Synthetic peptide
  Seed: YRRPVGISSM
YVRPVGISSY

SEQ ID NO: 162649 - protein, 9 aa, Artificial Sequence
  Description of Artificial Sequence: Synthetic peptide
  Seed: YSHGTGTGY
YWHGTGTGF

SEQ ID NO: 162650 - protein, 9 aa, Artificial Sequence
  Description of Artificial Sequence: Synthetic peptide
  Seed: YSHGTGTGY
YWHGTGTGI

SEQ ID NO: 162651 - protein, 9 aa, Artificial Sequence
  Description of Artificial Sequence: Synthetic peptide
  Seed: YSHGTGTGY
YWHGTGTGL

SEQ ID NO: 162652 - protein, 9 aa, Artificial Sequence
  Description of Artificial Sequence: Synthetic peptide
  Seed: YSHGTGTGY
YWHGTGTGM

SEQ ID NO: 162653 - protein, 9 aa, Artificial Sequence
  Description of Artificial Sequence: Synthetic peptide
  Seed: YSHGTGTGY
YWHGTGTGV

SEQ ID NO: 162654 - protein, 9 aa, Artificial Sequence
  Description of Artificial Sequence: Synthetic peptide
  Seed: YSHGTGTGY
YWHGTGTGW

SEQ ID NO: 162655 - protein, 9 aa, Artificial Sequence
  Description of Artificial Sequence: Synthetic peptide
  Seed: YSHGTGTGY
YWHGTGTGY

SEQ ID NO: 162656 - protein, 10 aa, Artificial Sequence
  Description of Artificial Sequence: Synthetic peptide
  Seed: YRRPVGISSM
YWRPVGISSF

SEQ ID NO: 162657 - protein, 10 aa, Artificial Sequence
  Description of Artificial Sequence: Synthetic peptide
  Seed: YRRPVGISSM
YWRPVGISSI

SEQ ID NO: 162658 - protein, 10 aa, Artificial Sequence
  Description of Artificial Sequence: Synthetic peptide
  Seed: YRRPVGISSM
YWRPVGISSL

SEQ ID NO: 162659 - protein, 10 aa, Artificial Sequence
  Description of Artificial Sequence: Synthetic peptide
  Seed: YRRPVGISSM
YWRPVGISSM

SEQ ID NO: 162660 - protein, 10 aa, Artificial Sequence
  Description of Artificial Sequence: Synthetic peptide
  Seed: YRRPVGISSM
YWRPVGISSV

SEQ ID NO: 162661 - protein, 10 aa, Artificial Sequence
  Description of Artificial Sequence: Synthetic peptide
  Seed: YRRPVGISSM
YWRPVGISSW

SEQ ID NO: 162662 - protein, 10 aa, Artificial Sequence
  Description of Artificial Sequence: Synthetic peptide
  Seed: YRRPVGISSM
YWRPVGISSY

SEQ ID NO: 162663 - protein, 9 aa, Artificial Sequence
  Description of Artificial Sequence: Synthetic peptide
  Seed: YSHGTGTGY
YYHGTGTGA

SEQ ID NO: 162664 - protein, 9 aa, Artificial Sequence
  Description of Artificial Sequence: Synthetic peptide
  Seed: YSHGTGTGY
YYHGTGTGC

SEQ ID NO: 162665 - protein, 9 aa, Artificial Sequence
  Description of Artificial Sequence: Synthetic peptide
  Seed: YSHGTGTGY
YYHGTGTGF

SEQ ID NO: 162666 - protein, 9 aa, Artificial Sequence
  Description of Artificial Sequence: Synthetic peptide
  Seed: YSHGTGTGY
YYHGTGTGH

SEQ ID NO: 162667 - protein, 9 aa, Artificial Sequence
  Description of Artificial Sequence: Synthetic peptide
  Seed: YSHGTGTGY
YYHGTGTGI

SEQ ID NO: 162668 - protein, 9 aa, Artificial Sequence
  Description of Artificial Sequence: Synthetic peptide
  Seed: YSHGTGTGY
YYHGTGTGL

SEQ ID NO: 162669 - protein, 9 aa, Artificial Sequence
  Description of Artificial Sequence: Synthetic peptide
  Seed: YSHGTGTGY
YYHGTGTGM

SEQ ID NO: 162670 - protein, 9 aa, Artificial Sequence
  Description of Artificial Sequence: Synthetic peptide
  Seed: YSHGTGTGY
YYHGTGTGQ

SEQ ID NO: 162671 - protein, 9 aa, Artificial Sequence
  Description of Artificial Sequence: Synthetic peptide
  Seed: YSHGTGTGY
YYHGTGTGS

SEQ ID NO: 162672 - protein, 9 aa, Artificial Sequence
  Description of Artificial Sequence: Synthetic peptide
  Seed: YSHGTGTGY
YYHGTGTGT

SEQ ID NO: 162673 - protein, 9 aa, Artificial Sequence
  Description of Artificial Sequence: Synthetic peptide
  Seed: YSHGTGTGY
YYHGTGTGV

SEQ ID NO: 162674 - protein, 9 aa, Artificial Sequence
  Description of Artificial Sequence: Synthetic peptide
  Seed: YSHGTGTGY
YYHGTGTGW

SEQ ID NO: 162675 - protein, 9 aa, Artificial Sequence
  Description of Artificial Sequence: Synthetic peptide
  Seed: YSHGTGTGY
YYHGTGTGY

SEQ ID NO: 162676 - protein, 10 aa, Artificial Sequence
  Description of Artificial Sequence: Synthetic peptide
  Seed: YRRPVGISSM
YYRPVGISSA

SEQ ID NO: 162677 - protein, 10 aa, Artificial Sequence
  Description of Artificial Sequence: Synthetic peptide
  Seed: YRRPVGISSM
YYRPVGISSC

SEQ ID NO: 162678 - protein, 10 aa, Artificial Sequence
  Description of Artificial Sequence: Synthetic peptide
  Seed: YRRPVGISSM
YYRPVGISSF

SEQ ID NO: 162679 - protein, 10 aa, Artificial Sequence
  Description of Artificial Sequence: Synthetic peptide
  Seed: YRRPVGISSM
YYRPVGISSH

SEQ ID NO: 162680 - protein, 10 aa, Artificial Sequence
  Description of Artificial Sequence: Synthetic peptide
  Seed: YRRPVGISSM
YYRPVGISSI

SEQ ID NO: 162681 - protein, 10 aa, Artificial Sequence
  Description of Artificial Sequence: Synthetic peptide
  Seed: YRRPVGISSM
YYRPVGISSL

SEQ ID NO: 162682 - protein, 10 aa, Artificial Sequence
  Description of Artificial Sequence: Synthetic peptide
  Seed: YRRPVGISSM
YYRPVGISSM

SEQ ID NO: 162683 - protein, 10 aa, Artificial Sequence
  Description of Artificial Sequence: Synthetic peptide
  Seed: YRRPVGISSM
YYRPVGISST

SEQ ID NO: 162684 - protein, 10 aa, Artificial Sequence
  Description of Artificial Sequence: Synthetic peptide
  Seed: YRRPVGISSM
YYRPVGISSV

SEQ ID NO: 162685 - protein, 10 aa, Artificial Sequence
  Description of Artificial Sequence: Synthetic peptide
  Seed: YRRPVGISSM
YYRPVGISSW

SEQ ID NO: 162686 - protein, 10 aa, Artificial Sequence
  Description of Artificial Sequence: Synthetic peptide
  Seed: YRRPVGISSM
YYRPVGISSY

SEQ ID NO: 162687 - protein, 9 aa, Artificial Sequence
  Description of Artificial Sequence: Synthetic peptide
  Seed: EVETYVLSI
EAETYVLSV

SEQ ID NO: 162688 - protein, 8 aa, Artificial Sequence
  Description of Artificial Sequence: Synthetic peptide
  Seed: EWLKTRPI
EFLKTRPL

SEQ ID NO: 162689 - protein, 9 aa, Artificial Sequence
  Description of Artificial Sequence: Synthetic peptide
  Seed: EVETYVLSI
EIETYVLSV

SEQ ID NO: 162690 - protein, 8 aa, Artificial Sequence
  Description of Artificial Sequence: Synthetic peptide
  Seed: EWLKTRPI
EMLKTRPI

SEQ ID NO: 162691 - protein, 8 aa, Artificial Sequence
  Description of Artificial Sequence: Synthetic peptide
  Seed: EWLKTRPI
EMLKTRPL

SEQ ID NO: 162692 - protein, 9 aa, Artificial Sequence
  Description of Artificial Sequence: Synthetic peptide
  Seed: EVETYVLSI
ESETYVLSV

SEQ ID NO: 162693 - protein, 9 aa, Artificial Sequence
  Description of Artificial Sequence: Synthetic peptide
  Seed: EVETYVLSI
ETETYVLSI

SEQ ID NO: 162694 - protein, 9 aa, Artificial Sequence
  Description of Artificial Sequence: Synthetic peptide
  Seed: EVETYVLSI
ETETYVLSL

SEQ ID NO: 162695 - protein, 9 aa, Artificial Sequence
  Description of Artificial Sequence: Synthetic peptide
  Seed: EVETYVLSI
ETETYVLSV

SEQ ID NO: 162696 - protein, 9 aa, Artificial Sequence
  Description of Artificial Sequence: Synthetic peptide
  Seed: EVETYVLSI
EVETYVLSV

SEQ ID NO: 162697 - protein, 8 aa, Artificial Sequence
  Description of Artificial Sequence: Synthetic peptide
  Seed: EWLKTRPI
EWLKTRPL

SEQ ID NO: 162698 - protein, 8 aa, Artificial Sequence
  Description of Artificial Sequence: Synthetic peptide
  Seed: EWLKTRPI
EYLKTRPL

SEQ ID NO: 162699 - protein, 8 aa, Artificial Sequence
  Description of Artificial Sequence: Synthetic peptide
  Seed: KTRPILSP
KARPILSA

SEQ ID NO: 162700 - protein, 8 aa, Artificial Sequence
  Description of Artificial Sequence: Synthetic peptide
  Seed: KTRPILSP
KARPILSF

SEQ ID NO: 162701 - protein, 8 aa, Artificial Sequence
  Description of Artificial Sequence: Synthetic peptide
  Seed: KTRPILSP
KARPILSI

SEQ ID NO: 162702 - protein, 8 aa, Artificial Sequence
  Description of Artificial Sequence: Synthetic peptide
  Seed: KTRPILSP
KARPILSK

SEQ ID NO: 162703 - protein, 8 aa, Artificial Sequence
  Description of Artificial Sequence: Synthetic peptide
  Seed: KTRPILSP
KARPILSL

SEQ ID NO: 162704 - protein, 8 aa, Artificial Sequence
  Description of Artificial Sequence: Synthetic peptide
  Seed: KTRPILSP
KARPILSM

SEQ ID NO: 162705 - protein, 9 aa, Artificial Sequence
  Description of Artificial Sequence: Synthetic peptide
  Seed: KTRPILSPL
KARPILSPA

SEQ ID NO: 162706 - protein, 9 aa, Artificial Sequence
  Description of Artificial Sequence: Synthetic peptide
  Seed: KTRPILSPL
KARPILSPC

SEQ ID NO: 162707 - protein, 9 aa, Artificial Sequence
  Description of Artificial Sequence: Synthetic peptide
  Seed: KTRPILSPL
KARPILSPD

SEQ ID NO: 162708 - protein, 9 aa, Artificial Sequence
  Description of Artificial Sequence: Synthetic peptide
  Seed: KTRPILSPL
KARPILSPE

SEQ ID NO: 162709 - protein, 9 aa, Artificial Sequence
  Description of Artificial Sequence: Synthetic peptide
  Seed: KTRPILSPL
KARPILSPF

SEQ ID NO: 162710 - protein, 9 aa, Artificial Sequence
  Description of Artificial Sequence: Synthetic peptide
  Seed: KTRPILSPL
KARPILSPG

SEQ ID NO: 162711 - protein, 9 aa, Artificial Sequence
  Description of Artificial Sequence: Synthetic peptide
  Seed: KTRPILSPL
KARPILSPH

SEQ ID NO: 162712 - protein, 9 aa, Artificial Sequence
  Description of Artificial Sequence: Synthetic peptide
  Seed: KTRPILSPL
KARPILSPI

SEQ ID NO: 162713 - protein, 9 aa, Artificial Sequence
  Description of Artificial Sequence: Synthetic peptide
  Seed: KTRPILSPL
KARPILSPK

SEQ ID NO: 162714 - protein, 10 aa, Artificial Sequence
  Description of Artificial Sequence: Synthetic peptide
  Seed: KTRPILSPLT
KARPILSPLA

SEQ ID NO: 162715 - protein, 10 aa, Artificial Sequence
  Description of Artificial Sequence: Synthetic peptide
  Seed: KTRPILSPLT
KARPILSPLC

SEQ ID NO: 162716 - protein, 10 aa, Artificial Sequence
  Description of Artificial Sequence: Synthetic peptide
  Seed: KTRPILSPLT
KARPILSPLD

SEQ ID NO: 162717 - protein, 10 aa, Artificial Sequence
  Description of Artificial Sequence: Synthetic peptide
  Seed: KTRPILSPLT
KARPILSPLE

SEQ ID NO: 162718 - protein, 10 aa, Artificial Sequence
  Description of Artificial Sequence: Synthetic peptide
  Seed: KTRPILSPLT
KARPILSPLF

SEQ ID NO: 162719 - protein, 10 aa, Artificial Sequence
  Description of Artificial Sequence: Synthetic peptide
  Seed: KTRPILSPLT
KARPILSPLG

SEQ ID NO: 162720 - protein, 10 aa, Artificial Sequence
  Description of Artificial Sequence: Synthetic peptide
  Seed: KTRPILSPLT
KARPILSPLH

SEQ ID NO: 162721 - protein, 10 aa, Artificial Sequence
  Description of Artificial Sequence: Synthetic peptide
  Seed: KTRPILSPLT
KARPILSPLI

SEQ ID NO: 162722 - protein, 10 aa, Artificial Sequence
  Description of Artificial Sequence: Synthetic peptide
  Seed: KTRPILSPLT
KARPILSPLK

SEQ ID NO: 162723 - protein, 10 aa, Artificial Sequence
  Description of Artificial Sequence: Synthetic peptide
  Seed: KTRPILSPLT
KARPILSPLL

SEQ ID NO: 162724 - protein, 10 aa, Artificial Sequence
  Description of Artificial Sequence: Synthetic peptide
  Seed: KTRPILSPLT
KARPILSPLM

SEQ ID NO: 162725 - protein, 10 aa, Artificial Sequence
  Description of Artificial Sequence: Synthetic peptide
  Seed: KTRPILSPLT
KARPILSPLN

SEQ ID NO: 162726 - protein, 10 aa, Artificial Sequence
  Description of Artificial Sequence: Synthetic peptide
  Seed: KTRPILSPLT
KARPILSPLP

SEQ ID NO: 162727 - protein, 10 aa, Artificial Sequence
  Description of Artificial Sequence: Synthetic peptide
  Seed: KTRPILSPLT
KARPILSPLQ

SEQ ID NO: 162728 - protein, 10 aa, Artificial Sequence
  Description of Artificial Sequence: Synthetic peptide
  Seed: KTRPILSPLT
KARPILSPLR

SEQ ID NO: 162729 - protein, 10 aa, Artificial Sequence
  Description of Artificial Sequence: Synthetic peptide
  Seed: KTRPILSPLT
KARPILSPLS

SEQ ID NO: 162730 - protein, 10 aa, Artificial Sequence
  Description of Artificial Sequence: Synthetic peptide
  Seed: KTRPILSPLT
KARPILSPLT

SEQ ID NO: 162731 - protein, 11 aa, Artificial Sequence
  Description of Artificial Sequence: Synthetic peptide
  Seed: KTRPILSPLTK
KARPILSPLTA

SEQ ID NO: 162732 - protein, 11 aa, Artificial Sequence
  Description of Artificial Sequence: Synthetic peptide
  Seed: KTRPILSPLTK
KARPILSPLTG

SEQ ID NO: 162733 - protein, 11 aa, Artificial Sequence
  Description of Artificial Sequence: Synthetic peptide
  Seed: KTRPILSPLTK
KARPILSPLTI

SEQ ID NO: 162734 - protein, 11 aa, Artificial Sequence
  Description of Artificial Sequence: Synthetic peptide
  Seed: KTRPILSPLTK
KARPILSPLTK

SEQ ID NO: 162735 - protein, 11 aa, Artificial Sequence
  Description of Artificial Sequence: Synthetic peptide
  Seed: KTRPILSPLTK
KARPILSPLTL

SEQ ID NO: 162736 - protein, 11 aa, Artificial Sequence
  Description of Artificial Sequence: Synthetic peptide
  Seed: KTRPILSPLTK
KARPILSPLTM

SEQ ID NO: 162737 - protein, 11 aa, Artificial Sequence
  Description of Artificial Sequence: Synthetic peptide
  Seed: KTRPILSPLTK
KARPILSPLTR

SEQ ID NO: 162738 - protein, 11 aa, Artificial Sequence
  Description of Artificial Sequence: Synthetic peptide
  Seed: KTRPILSPLTK
KARPILSPLTS

SEQ ID NO: 162739 - protein, 11 aa, Artificial Sequence
  Description of Artificial Sequence: Synthetic peptide
  Seed: KTRPILSPLTK
KARPILSPLTT

SEQ ID NO: 162740 - protein, 11 aa, Artificial Sequence
  Description of Artificial Sequence: Synthetic peptide
  Seed: KTRPILSPLTK
KARPILSPLTV

SEQ ID NO: 162741 - protein, 11 aa, Artificial Sequence
  Description of Artificial Sequence: Synthetic peptide
  Seed: KTRPILSPLTK
KARPILSPLTY

SEQ ID NO: 162742 - protein, 10 aa, Artificial Sequence
  Description of Artificial Sequence: Synthetic peptide
  Seed: KTRPILSPLT
KARPILSPLV

SEQ ID NO: 162743 - protein, 10 aa, Artificial Sequence
  Description of Artificial Sequence: Synthetic peptide
  Seed: KTRPILSPLT
KARPILSPLW

SEQ ID NO: 162744 - protein, 10 aa, Artificial Sequence
  Description of Artificial Sequence: Synthetic peptide
  Seed: KTRPILSPLT
KARPILSPLY

SEQ ID NO: 162745 - protein, 9 aa, Artificial Sequence
  Description of Artificial Sequence: Synthetic peptide
  Seed: KTRPILSPL
KARPILSPN

SEQ ID NO: 162746 - protein, 9 aa, Artificial Sequence
  Description of Artificial Sequence: Synthetic peptide
  Seed: KTRPILSPL
KARPILSPP

SEQ ID NO: 162747 - protein, 9 aa, Artificial Sequence
  Description of Artificial Sequence: Synthetic peptide
  Seed: KTRPILSPL
KARPILSPQ

SEQ ID NO: 162748 - protein, 9 aa, Artificial Sequence
  Description of Artificial Sequence: Synthetic peptide
  Seed: KTRPILSPL
KARPILSPR

SEQ ID NO: 162749 - protein, 9 aa, Artificial Sequence
  Description of Artificial Sequence: Synthetic peptide
  Seed: KTRPILSPL
KARPILSPS

SEQ ID NO: 162750 - protein, 9 aa, Artificial Sequence
  Description of Artificial Sequence: Synthetic peptide
  Seed: KTRPILSPL
KARPILSPT

SEQ ID NO: 162751 - protein, 9 aa, Artificial Sequence
  Description of Artificial Sequence: Synthetic peptide
  Seed: KTRPILSPL
KARPILSPV

SEQ ID NO: 162752 - protein, 9 aa, Artificial Sequence
  Description of Artificial Sequence: Synthetic peptide
  Seed: KTRPILSPL
KARPILSPW

SEQ ID NO: 162753 - protein, 8 aa, Artificial Sequence
  Description of Artificial Sequence: Synthetic peptide
  Seed: KTRPILSP
KARPILSR

SEQ ID NO: 162754 - protein, 8 aa, Artificial Sequence
  Description of Artificial Sequence: Synthetic peptide
  Seed: KTRPILSP
KARPILSS

SEQ ID NO: 162755 - protein, 8 aa, Artificial Sequence
  Description of Artificial Sequence: Synthetic peptide
  Seed: KTRPILSP
KARPILSV

SEQ ID NO: 162756 - protein, 8 aa, Artificial Sequence
  Description of Artificial Sequence: Synthetic peptide
  Seed: KTRPILSP
KARPILSY

SEQ ID NO: 162757 - protein, 9 aa, Artificial Sequence
  Description of Artificial Sequence: Synthetic peptide
  Seed: KTRPILSPL
KCRPILSPA

SEQ ID NO: 162758 - protein, 9 aa, Artificial Sequence
  Description of Artificial Sequence: Synthetic peptide
  Seed: KTRPILSPL
KCRPILSPF

SEQ ID NO: 162759 - protein, 9 aa, Artificial Sequence
  Description of Artificial Sequence: Synthetic peptide
  Seed: KTRPILSPL
KCRPILSPG

SEQ ID NO: 162760 - protein, 9 aa, Artificial Sequence
  Description of Artificial Sequence: Synthetic peptide
  Seed: KTRPILSPL
KCRPILSPH

SEQ ID NO: 162761 - protein, 9 aa, Artificial Sequence
  Description of Artificial Sequence: Synthetic peptide
  Seed: KTRPILSPL
KCRPILSPI

SEQ ID NO: 162762 - protein, 9 aa, Artificial Sequence
  Description of Artificial Sequence: Synthetic peptide
  Seed: KTRPILSPL
KCRPILSPK

SEQ ID NO: 162763 - protein, 9 aa, Artificial Sequence
  Description of Artificial Sequence: Synthetic peptide
  Seed: KTRPILSPL
KCRPILSPL

SEQ ID NO: 162764 - protein, 10 aa, Artificial Sequence
  Description of Artificial Sequence: Synthetic peptide
  Seed: KTRPILSPLT
KCRPILSPLA

SEQ ID NO: 162765 - protein, 10 aa, Artificial Sequence
  Description of Artificial Sequence: Synthetic peptide
  Seed: KTRPILSPLT
KCRPILSPLI

SEQ ID NO: 162766 - protein, 10 aa, Artificial Sequence
  Description of Artificial Sequence: Synthetic peptide
  Seed: KTRPILSPLT
KCRPILSPLK

SEQ ID NO: 162767 - protein, 10 aa, Artificial Sequence
  Description of Artificial Sequence: Synthetic peptide
  Seed: KTRPILSPLT
KCRPILSPLL

SEQ ID NO: 162768 - protein, 10 aa, Artificial Sequence
  Description of Artificial Sequence: Synthetic peptide
  Seed: KTRPILSPLT
KCRPILSPLM

SEQ ID NO: 162769 - protein, 11 aa, Artificial Sequence
  Description of Artificial Sequence: Synthetic peptide
  Seed: KTRPILSPLTK
KCRPILSPLTK

SEQ ID NO: 162770 - protein, 11 aa, Artificial Sequence
  Description of Artificial Sequence: Synthetic peptide
  Seed: KTRPILSPLTK
KCRPILSPLTR

SEQ ID NO: 162771 - protein, 10 aa, Artificial Sequence
  Description of Artificial Sequence: Synthetic peptide
  Seed: KTRPILSPLT
KCRPILSPLV

SEQ ID NO: 162772 - protein, 10 aa, Artificial Sequence
  Description of Artificial Sequence: Synthetic peptide
  Seed: KTRPILSPLT
KCRPILSPLY

SEQ ID NO: 162773 - protein, 9 aa, Artificial Sequence
  Description of Artificial Sequence: Synthetic peptide
  Seed: KTRPILSPL
KCRPILSPM

SEQ ID NO: 162774 - protein, 9 aa, Artificial Sequence
  Description of Artificial Sequence: Synthetic peptide
  Seed: KTRPILSPL
KCRPILSPN

SEQ ID NO: 162775 - protein, 9 aa, Artificial Sequence
  Description of Artificial Sequence: Synthetic peptide
  Seed: KTRPILSPL
KCRPILSPP

SEQ ID NO: 162776 - protein, 9 aa, Artificial Sequence
  Description of Artificial Sequence: Synthetic peptide
  Seed: KTRPILSPL
KCRPILSPQ

SEQ ID NO: 162777 - protein, 9 aa, Artificial Sequence
  Description of Artificial Sequence: Synthetic peptide
  Seed: KTRPILSPL
KCRPILSPR

SEQ ID NO: 162778 - protein, 9 aa, Artificial Sequence
  Description of Artificial Sequence: Synthetic peptide
  Seed: KTRPILSPL
KCRPILSPS

SEQ ID NO: 162779 - protein, 9 aa, Artificial Sequence
  Description of Artificial Sequence: Synthetic peptide
  Seed: KTRPILSPL
KCRPILSPT

SEQ ID NO: 162780 - protein, 9 aa, Artificial Sequence
  Description of Artificial Sequence: Synthetic peptide
  Seed: KTRPILSPL
KCRPILSPV

SEQ ID NO: 162781 - protein, 9 aa, Artificial Sequence
  Description of Artificial Sequence: Synthetic peptide
  Seed: KTRPILSPL
KCRPILSPW

SEQ ID NO: 162782 - protein, 9 aa, Artificial Sequence
  Description of Artificial Sequence: Synthetic peptide
  Seed: KTRPILSPL
KCRPILSPY

SEQ ID NO: 162783 - protein, 9 aa, Artificial Sequence
  Description of Artificial Sequence: Synthetic peptide
  Seed: KTRPILSPL
KDRPILSPA

SEQ ID NO: 162784 - protein, 9 aa, Artificial Sequence
  Description of Artificial Sequence: Synthetic peptide
  Seed: KTRPILSPL
KDRPILSPK

SEQ ID NO: 162785 - protein, 9 aa, Artificial Sequence
  Description of Artificial Sequence: Synthetic peptide
  Seed: KTRPILSPL
KDRPILSPR

SEQ ID NO: 162786 - protein, 9 aa, Artificial Sequence
  Description of Artificial Sequence: Synthetic peptide
  Seed: KTRPILSPL
KDRPILSPY

SEQ ID NO: 162787 - protein, 9 aa, Artificial Sequence
  Description of Artificial Sequence: Synthetic peptide
  Seed: KTRPILSPL
KERPILSPA

SEQ ID NO: 162788 - protein, 9 aa, Artificial Sequence
  Description of Artificial Sequence: Synthetic peptide
  Seed: KTRPILSPL
KERPILSPF

SEQ ID NO: 162789 - protein, 9 aa, Artificial Sequence
  Description of Artificial Sequence: Synthetic peptide
  Seed: KTRPILSPL
KERPILSPK

SEQ ID NO: 162790 - protein, 10 aa, Artificial Sequence
  Description of Artificial Sequence: Synthetic peptide
  Seed: KTRPILSPLT
KERPILSPLK

SEQ ID NO: 162791 - protein, 9 aa, Artificial Sequence
  Description of Artificial Sequence: Synthetic peptide
  Seed: KTRPILSPL
KERPILSPM

SEQ ID NO: 162792 - protein, 9 aa, Artificial Sequence
  Description of Artificial Sequence: Synthetic peptide
  Seed: KTRPILSPL
KERPILSPR

SEQ ID NO: 162793 - protein, 9 aa, Artificial Sequence
  Description of Artificial Sequence: Synthetic peptide
  Seed: KTRPILSPL
KERPILSPY

SEQ ID NO: 162794 - protein, 8 aa, Artificial Sequence
  Description of Artificial Sequence: Synthetic peptide
  Seed: KTRPILSP
KFRPILSA

SEQ ID NO: 162795 - protein, 8 aa, Artificial Sequence
  Description of Artificial Sequence: Synthetic peptide
  Seed: KTRPILSP
KFRPILSF

SEQ ID NO: 162796 - protein, 8 aa, Artificial Sequence
  Description of Artificial Sequence: Synthetic peptide
  Seed: KTRPILSP
KFRPILSG

SEQ ID NO: 162797 - protein, 8 aa, Artificial Sequence
  Description of Artificial Sequence: Synthetic peptide
  Seed: KTRPILSP
KFRPILSI

SEQ ID NO: 162798 - protein, 8 aa, Artificial Sequence
  Description of Artificial Sequence: Synthetic peptide
  Seed: KTRPILSP
KFRPILSK

SEQ ID NO: 162799 - protein, 8 aa, Artificial Sequence
  Description of Artificial Sequence: Synthetic peptide
  Seed: KTRPILSP
KFRPILSL

SEQ ID NO: 162800 - protein, 8 aa, Artificial Sequence
  Description of Artificial Sequence: Synthetic peptide
  Seed: KTRPILSP
KFRPILSM

SEQ ID NO: 162801 - protein, 8 aa, Artificial Sequence
  Description of Artificial Sequence: Synthetic peptide
  Seed: KTRPILSP
KFRPILSP

SEQ ID NO: 162802 - protein, 9 aa, Artificial Sequence
  Description of Artificial Sequence: Synthetic peptide
  Seed: KTRPILSPL
KFRPILSPA

SEQ ID NO: 162803 - protein, 9 aa, Artificial Sequence
  Description of Artificial Sequence: Synthetic peptide
  Seed: KTRPILSPL
KFRPILSPC

SEQ ID NO: 162804 - protein, 9 aa, Artificial Sequence
  Description of Artificial Sequence: Synthetic peptide
  Seed: KTRPILSPL
KFRPILSPD

SEQ ID NO: 162805 - protein, 9 aa, Artificial Sequence
  Description of Artificial Sequence: Synthetic peptide
  Seed: KTRPILSPL
KFRPILSPE

SEQ ID NO: 162806 - protein, 9 aa, Artificial Sequence
  Description of Artificial Sequence: Synthetic peptide
  Seed: KTRPILSPL
KFRPILSPF

SEQ ID NO: 162807 - protein, 9 aa, Artificial Sequence
  Description of Artificial Sequence: Synthetic peptide
  Seed: KTRPILSPL
KFRPILSPG

SEQ ID NO: 162808 - protein, 9 aa, Artificial Sequence
  Description of Artificial Sequence: Synthetic peptide
  Seed: KTRPILSPL
KFRPILSPH

SEQ ID NO: 162809 - protein, 9 aa, Artificial Sequence
  Description of Artificial Sequence: Synthetic peptide
  Seed: KTRPILSPL
KFRPILSPI

SEQ ID NO: 162810 - protein, 9 aa, Artificial Sequence
  Description of Artificial Sequence: Synthetic peptide
  Seed: KTRPILSPL
KFRPILSPK

SEQ ID NO: 162811 - protein, 9 aa, Artificial Sequence
  Description of Artificial Sequence: Synthetic peptide
  Seed: KTRPILSPL
KFRPILSPL

SEQ ID NO: 162812 - protein, 10 aa, Artificial Sequence
  Description of Artificial Sequence: Synthetic peptide
  Seed: KTRPILSPLT
KFRPILSPLA

SEQ ID NO: 162813 - protein, 10 aa, Artificial Sequence
  Description of Artificial Sequence: Synthetic peptide
  Seed: KTRPILSPLT
KFRPILSPLC

SEQ ID NO: 162814 - protein, 10 aa, Artificial Sequence
  Description of Artificial Sequence: Synthetic peptide
  Seed: KTRPILSPLT
KFRPILSPLD

SEQ ID NO: 162815 - protein, 10 aa, Artificial Sequence
  Description of Artificial Sequence: Synthetic peptide
  Seed: KTRPILSPLT
KFRPILSPLE

SEQ ID NO: 162816 - protein, 10 aa, Artificial Sequence
  Description of Artificial Sequence: Synthetic peptide
  Seed: KTRPILSPLT
KFRPILSPLF

SEQ ID NO: 162817 - protein, 10 aa, Artificial Sequence
  Description of Artificial Sequence: Synthetic peptide
  Seed: KTRPILSPLT
KFRPILSPLG

SEQ ID NO: 162818 - protein, 10 aa, Artificial Sequence
  Description of Artificial Sequence: Synthetic peptide
  Seed: KTRPILSPLT
KFRPILSPLH

SEQ ID NO: 162819 - protein, 10 aa, Artificial Sequence
  Description of Artificial Sequence: Synthetic peptide
  Seed: KTRPILSPLT
KFRPILSPLI

SEQ ID NO: 162820 - protein, 10 aa, Artificial Sequence
  Description of Artificial Sequence: Synthetic peptide
  Seed: KTRPILSPLT
KFRPILSPLK

SEQ ID NO: 162821 - protein, 10 aa, Artificial Sequence
  Description of Artificial Sequence: Synthetic peptide
  Seed: KTRPILSPLT
KFRPILSPLL

SEQ ID NO: 162822 - protein, 10 aa, Artificial Sequence
  Description of Artificial Sequence: Synthetic peptide
  Seed: KTRPILSPLT
KFRPILSPLM

SEQ ID NO: 162823 - protein, 10 aa, Artificial Sequence
  Description of Artificial Sequence: Synthetic peptide
  Seed: KTRPILSPLT
KFRPILSPLN

SEQ ID NO: 162824 - protein, 10 aa, Artificial Sequence
  Description of Artificial Sequence: Synthetic peptide
  Seed: KTRPILSPLT
KFRPILSPLP

SEQ ID NO: 162825 - protein, 10 aa, Artificial Sequence
  Description of Artificial Sequence: Synthetic peptide
  Seed: KTRPILSPLT
KFRPILSPLQ

SEQ ID NO: 162826 - protein, 10 aa, Artificial Sequence
  Description of Artificial Sequence: Synthetic peptide
  Seed: KTRPILSPLT
KFRPILSPLR

SEQ ID NO: 162827 - protein, 10 aa, Artificial Sequence
  Description of Artificial Sequence: Synthetic peptide
  Seed: KTRPILSPLT
KFRPILSPLS

SEQ ID NO: 162828 - protein, 10 aa, Artificial Sequence
  Description of Artificial Sequence: Synthetic peptide
  Seed: KTRPILSPLT
KFRPILSPLT

SEQ ID NO: 162829 - protein, 11 aa, Artificial Sequence
  Description of Artificial Sequence: Synthetic peptide
  Seed: KTRPILSPLTK
KFRPILSPLTA

SEQ ID NO: 162830 - protein, 11 aa, Artificial Sequence
  Description of Artificial Sequence: Synthetic peptide
  Seed: KTRPILSPLTK
KFRPILSPLTG

SEQ ID NO: 162831 - protein, 11 aa, Artificial Sequence
  Description of Artificial Sequence: Synthetic peptide
  Seed: KTRPILSPLTK
KFRPILSPLTI

SEQ ID NO: 162832 - protein, 11 aa, Artificial Sequence
  Description of Artificial Sequence: Synthetic peptide
  Seed: KTRPILSPLTK
KFRPILSPLTK

SEQ ID NO: 162833 - protein, 11 aa, Artificial Sequence
  Description of Artificial Sequence: Synthetic peptide
  Seed: KTRPILSPLTK
KFRPILSPLTL

SEQ ID NO: 162834 - protein, 11 aa, Artificial Sequence
  Description of Artificial Sequence: Synthetic peptide
  Seed: KTRPILSPLTK
KFRPILSPLTM

SEQ ID NO: 162835 - protein, 11 aa, Artificial Sequence
  Description of Artificial Sequence: Synthetic peptide
  Seed: KTRPILSPLTK
KFRPILSPLTR

SEQ ID NO: 162836 - protein, 11 aa, Artificial Sequence
  Description of Artificial Sequence: Synthetic peptide
  Seed: KTRPILSPLTK
KFRPILSPLTS

SEQ ID NO: 162837 - protein, 11 aa, Artificial Sequence
  Description of Artificial Sequence: Synthetic peptide
  Seed: KTRPILSPLTK
KFRPILSPLTT

SEQ ID NO: 162838 - protein, 11 aa, Artificial Sequence
  Description of Artificial Sequence: Synthetic peptide
  Seed: KTRPILSPLTK
KFRPILSPLTV

SEQ ID NO: 162839 - protein, 11 aa, Artificial Sequence
  Description of Artificial Sequence: Synthetic peptide
  Seed: KTRPILSPLTK
KFRPILSPLTY

SEQ ID NO: 162840 - protein, 10 aa, Artificial Sequence
  Description of Artificial Sequence: Synthetic peptide
  Seed: KTRPILSPLT
KFRPILSPLV

SEQ ID NO: 162841 - protein, 10 aa, Artificial Sequence
  Description of Artificial Sequence: Synthetic peptide
  Seed: KTRPILSPLT
KFRPILSPLW

SEQ ID NO: 162842 - protein, 10 aa, Artificial Sequence
  Description of Artificial Sequence: Synthetic peptide
  Seed: KTRPILSPLT
KFRPILSPLY

SEQ ID NO: 162843 - protein, 9 aa, Artificial Sequence
  Description of Artificial Sequence: Synthetic peptide
  Seed: KTRPILSPL
KFRPILSPM

SEQ ID NO: 162844 - protein, 9 aa, Artificial Sequence
  Description of Artificial Sequence: Synthetic peptide
  Seed: KTRPILSPL
KFRPILSPN

SEQ ID NO: 162845 - protein, 9 aa, Artificial Sequence
  Description of Artificial Sequence: Synthetic peptide
  Seed: KTRPILSPL
KFRPILSPP

SEQ ID NO: 162846 - protein, 9 aa, Artificial Sequence
  Description of Artificial Sequence: Synthetic peptide
  Seed: KTRPILSPL
KFRPILSPQ

SEQ ID NO: 162847 - protein, 9 aa, Artificial Sequence
  Description of Artificial Sequence: Synthetic peptide
  Seed: KTRPILSPL
KFRPILSPR

SEQ ID NO: 162848 - protein, 9 aa, Artificial Sequence
  Description of Artificial Sequence: Synthetic peptide
  Seed: KTRPILSPL
KFRPILSPS

SEQ ID NO: 162849 - protein, 9 aa, Artificial Sequence
  Description of Artificial Sequence: Synthetic peptide
  Seed: KTRPILSPL
KFRPILSPT

SEQ ID NO: 162850 - protein, 9 aa, Artificial Sequence
  Description of Artificial Sequence: Synthetic peptide
  Seed: KTRPILSPL
KFRPILSPV

SEQ ID NO: 162851 - protein, 9 aa, Artificial Sequence
  Description of Artificial Sequence: Synthetic peptide
  Seed: KTRPILSPL
KFRPILSPW

SEQ ID NO: 162852 - protein, 9 aa, Artificial Sequence
  Description of Artificial Sequence: Synthetic peptide
  Seed: KTRPILSPL
KFRPILSPY

SEQ ID NO: 162853 - protein, 8 aa, Artificial Sequence
  Description of Artificial Sequence: Synthetic peptide
  Seed: KTRPILSP
KFRPILSR

SEQ ID NO: 162854 - protein, 8 aa, Artificial Sequence
  Description of Artificial Sequence: Synthetic peptide
  Seed: KTRPILSP
KFRPILSS

SEQ ID NO: 162855 - protein, 8 aa, Artificial Sequence
  Description of Artificial Sequence: Synthetic peptide
  Seed: KTRPILSP
KFRPILSV

SEQ ID NO: 162856 - protein, 8 aa, Artificial Sequence
  Description of Artificial Sequence: Synthetic peptide
  Seed: KTRPILSP
KFRPILSY

SEQ ID NO: 162857 - protein, 8 aa, Artificial Sequence
  Description of Artificial Sequence: Synthetic peptide
  Seed: KTRPILSP
KGRPILSK

SEQ ID NO: 162858 - protein, 9 aa, Artificial Sequence
  Description of Artificial Sequence: Synthetic peptide
  Seed: KTRPILSPL
KGRPILSPA

SEQ ID NO: 162859 - protein, 9 aa, Artificial Sequence
  Description of Artificial Sequence: Synthetic peptide
  Seed: KTRPILSPL
KGRPILSPC

SEQ ID NO: 162860 - protein, 9 aa, Artificial Sequence
  Description of Artificial Sequence: Synthetic peptide
  Seed: KTRPILSPL
KGRPILSPE

SEQ ID NO: 162861 - protein, 9 aa, Artificial Sequence
  Description of Artificial Sequence: Synthetic peptide
  Seed: KTRPILSPL
KGRPILSPF

SEQ ID NO: 162862 - protein, 9 aa, Artificial Sequence
  Description of Artificial Sequence: Synthetic peptide
  Seed: KTRPILSPL
KGRPILSPG

SEQ ID NO: 162863 - protein, 9 aa, Artificial Sequence
  Description of Artificial Sequence: Synthetic peptide
  Seed: KTRPILSPL
KGRPILSPH

SEQ ID NO: 162864 - protein, 9 aa, Artificial Sequence
  Description of Artificial Sequence: Synthetic peptide
  Seed: KTRPILSPL
KGRPILSPI

SEQ ID NO: 162865 - protein, 9 aa, Artificial Sequence
  Description of Artificial Sequence: Synthetic peptide
  Seed: KTRPILSPL
KGRPILSPK

SEQ ID NO: 162866 - protein, 9 aa, Artificial Sequence
  Description of Artificial Sequence: Synthetic peptide
  Seed: KTRPILSPL
KGRPILSPL

SEQ ID NO: 162867 - protein, 10 aa, Artificial Sequence
  Description of Artificial Sequence: Synthetic peptide
  Seed: KTRPILSPLT
KGRPILSPLA

SEQ ID NO: 162868 - protein, 10 aa, Artificial Sequence
  Description of Artificial Sequence: Synthetic peptide
  Seed: KTRPILSPLT
KGRPILSPLC

SEQ ID NO: 162869 - protein, 10 aa, Artificial Sequence
  Description of Artificial Sequence: Synthetic peptide
  Seed: KTRPILSPLT
KGRPILSPLE

SEQ ID NO: 162870 - protein, 10 aa, Artificial Sequence
  Description of Artificial Sequence: Synthetic peptide
  Seed: KTRPILSPLT
KGRPILSPLF

SEQ ID NO: 162871 - protein, 10 aa, Artificial Sequence
  Description of Artificial Sequence: Synthetic peptide
  Seed: KTRPILSPLT
KGRPILSPLG

SEQ ID NO: 162872 - protein, 10 aa, Artificial Sequence
  Description of Artificial Sequence: Synthetic peptide
  Seed: KTRPILSPLT
KGRPILSPLH

SEQ ID NO: 162873 - protein, 10 aa, Artificial Sequence
  Description of Artificial Sequence: Synthetic peptide
  Seed: KTRPILSPLT
KGRPILSPLI

SEQ ID NO: 162874 - protein, 10 aa, Artificial Sequence
  Description of Artificial Sequence: Synthetic peptide
  Seed: KTRPILSPLT
KGRPILSPLK

SEQ ID NO: 162875 - protein, 10 aa, Artificial Sequence
  Description of Artificial Sequence: Synthetic peptide
  Seed: KTRPILSPLT
KGRPILSPLL

SEQ ID NO: 162876 - protein, 10 aa, Artificial Sequence
  Description of Artificial Sequence: Synthetic peptide
  Seed: KTRPILSPLT
KGRPILSPLM

SEQ ID NO: 162877 - protein, 10 aa, Artificial Sequence
  Description of Artificial Sequence: Synthetic peptide
  Seed: KTRPILSPLT
KGRPILSPLN

SEQ ID NO: 162878 - protein, 10 aa, Artificial Sequence
  Description of Artificial Sequence: Synthetic peptide
  Seed: KTRPILSPLT
KGRPILSPLP

SEQ ID NO: 162879 - protein, 10 aa, Artificial Sequence
  Description of Artificial Sequence: Synthetic peptide
  Seed: KTRPILSPLT
KGRPILSPLQ

SEQ ID NO: 162880 - protein, 10 aa, Artificial Sequence
  Description of Artificial Sequence: Synthetic peptide
  Seed: KTRPILSPLT
KGRPILSPLR

SEQ ID NO: 162881 - protein, 10 aa, Artificial Sequence
  Description of Artificial Sequence: Synthetic peptide
  Seed: KTRPILSPLT
KGRPILSPLS

SEQ ID NO: 162882 - protein, 10 aa, Artificial Sequence
  Description of Artificial Sequence: Synthetic peptide
  Seed: KTRPILSPLT
KGRPILSPLT

SEQ ID NO: 162883 - protein, 11 aa, Artificial Sequence
  Description of Artificial Sequence: Synthetic peptide
  Seed: KTRPILSPLTK
KGRPILSPLTA

SEQ ID NO: 162884 - protein, 11 aa, Artificial Sequence
  Description of Artificial Sequence: Synthetic peptide
  Seed: KTRPILSPLTK
KGRPILSPLTI

SEQ ID NO: 162885 - protein, 11 aa, Artificial Sequence
  Description of Artificial Sequence: Synthetic peptide
  Seed: KTRPILSPLTK
KGRPILSPLTK

SEQ ID NO: 162886 - protein, 11 aa, Artificial Sequence
  Description of Artificial Sequence: Synthetic peptide
  Seed: KTRPILSPLTK
KGRPILSPLTR

SEQ ID NO: 162887 - protein, 11 aa, Artificial Sequence
  Description of Artificial Sequence: Synthetic peptide
  Seed: KTRPILSPLTK
KGRPILSPLTV

SEQ ID NO: 162888 - protein, 10 aa, Artificial Sequence
  Description of Artificial Sequence: Synthetic peptide
  Seed: KTRPILSPLT
KGRPILSPLV

SEQ ID NO: 162889 - protein, 10 aa, Artificial Sequence
  Description of Artificial Sequence: Synthetic peptide
  Seed: KTRPILSPLT
KGRPILSPLY

SEQ ID NO: 162890 - protein, 9 aa, Artificial Sequence
  Description of Artificial Sequence: Synthetic peptide
  Seed: KTRPILSPL
KGRPILSPM

SEQ ID NO: 162891 - protein, 9 aa, Artificial Sequence
  Description of Artificial Sequence: Synthetic peptide
  Seed: KTRPILSPL
KGRPILSPN

SEQ ID NO: 162892 - protein, 9 aa, Artificial Sequence
  Description of Artificial Sequence: Synthetic peptide
  Seed: KTRPILSPL
KGRPILSPP

SEQ ID NO: 162893 - protein, 9 aa, Artificial Sequence
  Description of Artificial Sequence: Synthetic peptide
  Seed: KTRPILSPL
KGRPILSPQ

SEQ ID NO: 162894 - protein, 9 aa, Artificial Sequence
  Description of Artificial Sequence: Synthetic peptide
  Seed: KTRPILSPL
KGRPILSPR

SEQ ID NO: 162895 - protein, 9 aa, Artificial Sequence
  Description of Artificial Sequence: Synthetic peptide
  Seed: KTRPILSPL
KGRPILSPS

SEQ ID NO: 162896 - protein, 9 aa, Artificial Sequence
  Description of Artificial Sequence: Synthetic peptide
  Seed: KTRPILSPL
KGRPILSPT

SEQ ID NO: 162897 - protein, 9 aa, Artificial Sequence
  Description of Artificial Sequence: Synthetic peptide
  Seed: KTRPILSPL
KGRPILSPV

SEQ ID NO: 162898 - protein, 9 aa, Artificial Sequence
  Description of Artificial Sequence: Synthetic peptide
  Seed: KTRPILSPL
KGRPILSPW

SEQ ID NO: 162899 - protein, 9 aa, Artificial Sequence
  Description of Artificial Sequence: Synthetic peptide
  Seed: KTRPILSPL
KGRPILSPY

SEQ ID NO: 162900 - protein, 8 aa, Artificial Sequence
  Description of Artificial Sequence: Synthetic peptide
  Seed: KTRPILSP
KHRPILSK

SEQ ID NO: 162901 - protein, 9 aa, Artificial Sequence
  Description of Artificial Sequence: Synthetic peptide
  Seed: KTRPILSPL
KHRPILSPA

SEQ ID NO: 162902 - protein, 9 aa, Artificial Sequence
  Description of Artificial Sequence: Synthetic peptide
  Seed: KTRPILSPL
KHRPILSPI

SEQ ID NO: 162903 - protein, 9 aa, Artificial Sequence
  Description of Artificial Sequence: Synthetic peptide
  Seed: KTRPILSPL
KHRPILSPK

SEQ ID NO: 162904 - protein, 9 aa, Artificial Sequence
  Description of Artificial Sequence: Synthetic peptide
  Seed: KTRPILSPL
KHRPILSPL

SEQ ID NO: 162905 - protein, 10 aa, Artificial Sequence
  Description of Artificial Sequence: Synthetic peptide
  Seed: KTRPILSPLT
KHRPILSPLA

SEQ ID NO: 162906 - protein, 10 aa, Artificial Sequence
  Description of Artificial Sequence: Synthetic peptide
  Seed: KTRPILSPLT
KHRPILSPLK

SEQ ID NO: 162907 - protein, 10 aa, Artificial Sequence
  Description of Artificial Sequence: Synthetic peptide
  Seed: KTRPILSPLT
KHRPILSPLR

SEQ ID NO: 162908 - protein, 11 aa, Artificial Sequence
  Description of Artificial Sequence: Synthetic peptide
  Seed: KTRPILSPLTK
KHRPILSPLTK

SEQ ID NO: 162909 - protein, 10 aa, Artificial Sequence
  Description of Artificial Sequence: Synthetic peptide
  Seed: KTRPILSPLT
KHRPILSPLV

SEQ ID NO: 162910 - protein, 9 aa, Artificial Sequence
  Description of Artificial Sequence: Synthetic peptide
  Seed: KTRPILSPL
KHRPILSPM

SEQ ID NO: 162911 - protein, 9 aa, Artificial Sequence
  Description of Artificial Sequence: Synthetic peptide
  Seed: KTRPILSPL
KHRPILSPR

SEQ ID NO: 162912 - protein, 9 aa, Artificial Sequence
  Description of Artificial Sequence: Synthetic peptide
  Seed: KTRPILSPL
KHRPILSPS

SEQ ID NO: 162913 - protein, 9 aa, Artificial Sequence
  Description of Artificial Sequence: Synthetic peptide
  Seed: KTRPILSPL
KHRPILSPV

SEQ ID NO: 162914 - protein, 9 aa, Artificial Sequence
  Description of Artificial Sequence: Synthetic peptide
  Seed: KTRPILSPL
KHRPILSPY

SEQ ID NO: 162915 - protein, 8 aa, Artificial Sequence
  Description of Artificial Sequence: Synthetic peptide
  Seed: KTRPILSP
KIRPILSA

SEQ ID NO: 162916 - protein, 8 aa, Artificial Sequence
  Description of Artificial Sequence: Synthetic peptide
  Seed: KTRPILSP
KIRPILSF

SEQ ID NO: 162917 - protein, 8 aa, Artificial Sequence
  Description of Artificial Sequence: Synthetic peptide
  Seed: KTRPILSP
KIRPILSG

SEQ ID NO: 162918 - protein, 8 aa, Artificial Sequence
  Description of Artificial Sequence: Synthetic peptide
  Seed: KTRPILSP
KIRPILSI

SEQ ID NO: 162919 - protein, 8 aa, Artificial Sequence
  Description of Artificial Sequence: Synthetic peptide
  Seed: KTRPILSP
KIRPILSK

SEQ ID NO: 162920 - protein, 8 aa, Artificial Sequence
  Description of Artificial Sequence: Synthetic peptide
  Seed: KTRPILSP
KIRPILSL

SEQ ID NO: 162921 - protein, 8 aa, Artificial Sequence
  Description of Artificial Sequence: Synthetic peptide
  Seed: KTRPILSP
KIRPILSM

SEQ ID NO: 162922 - protein, 8 aa, Artificial Sequence
  Description of Artificial Sequence: Synthetic peptide
  Seed: KTRPILSP
KIRPILSP

SEQ ID NO: 162923 - protein, 9 aa, Artificial Sequence
  Description of Artificial Sequence: Synthetic peptide
  Seed: KTRPILSPL
KIRPILSPA

SEQ ID NO: 162924 - protein, 9 aa, Artificial Sequence
  Description of Artificial Sequence: Synthetic peptide
  Seed: KTRPILSPL
KIRPILSPC

SEQ ID NO: 162925 - protein, 9 aa, Artificial Sequence
  Description of Artificial Sequence: Synthetic peptide
  Seed: KTRPILSPL
KIRPILSPD

SEQ ID NO: 162926 - protein, 9 aa, Artificial Sequence
  Description of Artificial Sequence: Synthetic peptide
  Seed: KTRPILSPL
KIRPILSPE

SEQ ID NO: 162927 - protein, 9 aa, Artificial Sequence
  Description of Artificial Sequence: Synthetic peptide
  Seed: KTRPILSPL
KIRPILSPF

SEQ ID NO: 162928 - protein, 9 aa, Artificial Sequence
  Description of Artificial Sequence: Synthetic peptide
  Seed: KTRPILSPL
KIRPILSPG

SEQ ID NO: 162929 - protein, 9 aa, Artificial Sequence
  Description of Artificial Sequence: Synthetic peptide
  Seed: KTRPILSPL
KIRPILSPH

SEQ ID NO: 162930 - protein, 9 aa, Artificial Sequence
  Description of Artificial Sequence: Synthetic peptide
  Seed: KTRPILSPL
KIRPILSPI

SEQ ID NO: 162931 - protein, 9 aa, Artificial Sequence
  Description of Artificial Sequence: Synthetic peptide
  Seed: KTRPILSPL
KIRPILSPK

SEQ ID NO: 162932 - protein, 10 aa, Artificial Sequence
  Description of Artificial Sequence: Synthetic peptide
  Seed: KTRPILSPLT
KIRPILSPLA

SEQ ID NO: 162933 - protein, 10 aa, Artificial Sequence
  Description of Artificial Sequence: Synthetic peptide
  Seed: KTRPILSPLT
KIRPILSPLC

SEQ ID NO: 162934 - protein, 10 aa, Artificial Sequence
  Description of Artificial Sequence: Synthetic peptide
  Seed: KTRPILSPLT
KIRPILSPLD

SEQ ID NO: 162935 - protein, 10 aa, Artificial Sequence
  Description of Artificial Sequence: Synthetic peptide
  Seed: KTRPILSPLT
KIRPILSPLE

SEQ ID NO: 162936 - protein, 10 aa, Artificial Sequence
  Description of Artificial Sequence: Synthetic peptide
  Seed: KTRPILSPLT
KIRPILSPLF

SEQ ID NO: 162937 - protein, 10 aa, Artificial Sequence
  Description of Artificial Sequence: Synthetic peptide
  Seed: KTRPILSPLT
KIRPILSPLG

SEQ ID NO: 162938 - protein, 10 aa, Artificial Sequence
  Description of Artificial Sequence: Synthetic peptide
  Seed: KTRPILSPLT
KIRPILSPLH

SEQ ID NO: 162939 - protein, 10 aa, Artificial Sequence
  Description of Artificial Sequence: Synthetic peptide
  Seed: KTRPILSPLT
KIRPILSPLI

SEQ ID NO: 162940 - protein, 10 aa, Artificial Sequence
  Description of Artificial Sequence: Synthetic peptide
  Seed: KTRPILSPLT
KIRPILSPLK

SEQ ID NO: 162941 - protein, 10 aa, Artificial Sequence
  Description of Artificial Sequence: Synthetic peptide
  Seed: KTRPILSPLT
KIRPILSPLL

SEQ ID NO: 162942 - protein, 10 aa, Artificial Sequence
  Description of Artificial Sequence: Synthetic peptide
  Seed: KTRPILSPLT
KIRPILSPLM

SEQ ID NO: 162943 - protein, 10 aa, Artificial Sequence
  Description of Artificial Sequence: Synthetic peptide
  Seed: KTRPILSPLT
KIRPILSPLN

SEQ ID NO: 162944 - protein, 10 aa, Artificial Sequence
  Description of Artificial Sequence: Synthetic peptide
  Seed: KTRPILSPLT
KIRPILSPLP

SEQ ID NO: 162945 - protein, 10 aa, Artificial Sequence
  Description of Artificial Sequence: Synthetic peptide
  Seed: KTRPILSPLT
KIRPILSPLQ

SEQ ID NO: 162946 - protein, 10 aa, Artificial Sequence
  Description of Artificial Sequence: Synthetic peptide
  Seed: KTRPILSPLT
KIRPILSPLR

SEQ ID NO: 162947 - protein, 10 aa, Artificial Sequence
  Description of Artificial Sequence: Synthetic peptide
  Seed: KTRPILSPLT
KIRPILSPLS

SEQ ID NO: 162948 - protein, 10 aa, Artificial Sequence
  Description of Artificial Sequence: Synthetic peptide
  Seed: KTRPILSPLT
KIRPILSPLT

SEQ ID NO: 162949 - protein, 11 aa, Artificial Sequence
  Description of Artificial Sequence: Synthetic peptide
  Seed: KTRPILSPLTK
KIRPILSPLTA

SEQ ID NO: 162950 - protein, 11 aa, Artificial Sequence
  Description of Artificial Sequence: Synthetic peptide
  Seed: KTRPILSPLTK
KIRPILSPLTF

SEQ ID NO: 162951 - protein, 11 aa, Artificial Sequence
  Description of Artificial Sequence: Synthetic peptide
  Seed: KTRPILSPLTK
KIRPILSPLTG

SEQ ID NO: 162952 - protein, 11 aa, Artificial Sequence
  Description of Artificial Sequence: Synthetic peptide
  Seed: KTRPILSPLTK
KIRPILSPLTI

SEQ ID NO: 162953 - protein, 11 aa, Artificial Sequence
  Description of Artificial Sequence: Synthetic peptide
  Seed: KTRPILSPLTK
KIRPILSPLTK

SEQ ID NO: 162954 - protein, 11 aa, Artificial Sequence
  Description of Artificial Sequence: Synthetic peptide
  Seed: KTRPILSPLTK
KIRPILSPLTL

SEQ ID NO: 162955 - protein, 11 aa, Artificial Sequence
  Description of Artificial Sequence: Synthetic peptide
  Seed: KTRPILSPLTK
KIRPILSPLTM

SEQ ID NO: 162956 - protein, 11 aa, Artificial Sequence
  Description of Artificial Sequence: Synthetic peptide
  Seed: KTRPILSPLTK
KIRPILSPLTR

SEQ ID NO: 162957 - protein, 11 aa, Artificial Sequence
  Description of Artificial Sequence: Synthetic peptide
  Seed: KTRPILSPLTK
KIRPILSPLTS

SEQ ID NO: 162958 - protein, 11 aa, Artificial Sequence
  Description of Artificial Sequence: Synthetic peptide
  Seed: KTRPILSPLTK
KIRPILSPLTT

SEQ ID NO: 162959 - protein, 11 aa, Artificial Sequence
  Description of Artificial Sequence: Synthetic peptide
  Seed: KTRPILSPLTK
KIRPILSPLTV

SEQ ID NO: 162960 - protein, 11 aa, Artificial Sequence
  Description of Artificial Sequence: Synthetic peptide
  Seed: KTRPILSPLTK
KIRPILSPLTY

SEQ ID NO: 162961 - protein, 10 aa, Artificial Sequence
  Description of Artificial Sequence: Synthetic peptide
  Seed: KTRPILSPLT
KIRPILSPLV

SEQ ID NO: 162962 - protein, 10 aa, Artificial Sequence
  Description of Artificial Sequence: Synthetic peptide
  Seed: KTRPILSPLT
KIRPILSPLW

SEQ ID NO: 162963 - protein, 10 aa, Artificial Sequence
  Description of Artificial Sequence: Synthetic peptide
  Seed: KTRPILSPLT
KIRPILSPLY

SEQ ID NO: 162964 - protein, 9 aa, Artificial Sequence
  Description of Artificial Sequence: Synthetic peptide
  Seed: KTRPILSPL
KIRPILSPM

SEQ ID NO: 162965 - protein, 9 aa, Artificial Sequence
  Description of Artificial Sequence: Synthetic peptide
  Seed: KTRPILSPL
KIRPILSPN

SEQ ID NO: 162966 - protein, 9 aa, Artificial Sequence
  Description of Artificial Sequence: Synthetic peptide
  Seed: KTRPILSPL
KIRPILSPP

SEQ ID NO: 162967 - protein, 9 aa, Artificial Sequence
  Description of Artificial Sequence: Synthetic peptide
  Seed: KTRPILSPL
KIRPILSPQ

SEQ ID NO: 162968 - protein, 9 aa, Artificial Sequence
  Description of Artificial Sequence: Synthetic peptide
  Seed: KTRPILSPL
KIRPILSPR

SEQ ID NO: 162969 - protein, 9 aa, Artificial Sequence
  Description of Artificial Sequence: Synthetic peptide
  Seed: KTRPILSPL
KIRPILSPS

SEQ ID NO: 162970 - protein, 9 aa, Artificial Sequence
  Description of Artificial Sequence: Synthetic peptide
  Seed: KTRPILSPL
KIRPILSPT

SEQ ID NO: 162971 - protein, 9 aa, Artificial Sequence
  Description of Artificial Sequence: Synthetic peptide
  Seed: KTRPILSPL
KIRPILSPV

SEQ ID NO: 162972 - protein, 9 aa, Artificial Sequence
  Description of Artificial Sequence: Synthetic peptide
  Seed: KTRPILSPL
KIRPILSPW

SEQ ID NO: 162973 - protein, 9 aa, Artificial Sequence
  Description of Artificial Sequence: Synthetic peptide
  Seed: KTRPILSPL
KIRPILSPY

SEQ ID NO: 162974 - protein, 8 aa, Artificial Sequence
  Description of Artificial Sequence: Synthetic peptide
  Seed: KTRPILSP
KIRPILSS

SEQ ID NO: 162975 - protein, 8 aa, Artificial Sequence
  Description of Artificial Sequence: Synthetic peptide
  Seed: KTRPILSP
KIRPILSV

SEQ ID NO: 162976 - protein, 8 aa, Artificial Sequence
  Description of Artificial Sequence: Synthetic peptide
  Seed: KTRPILSP
KIRPILSY

SEQ ID NO: 162977 - protein, 8 aa, Artificial Sequence
  Description of Artificial Sequence: Synthetic peptide
  Seed: KTRPILSP
KKRPILSK

SEQ ID NO: 162978 - protein, 9 aa, Artificial Sequence
  Description of Artificial Sequence: Synthetic peptide
  Seed: KTRPILSPL
KKRPILSPA

SEQ ID NO: 162979 - protein, 9 aa, Artificial Sequence
  Description of Artificial Sequence: Synthetic peptide
  Seed: KTRPILSPL
KKRPILSPF

SEQ ID NO: 162980 - protein, 9 aa, Artificial Sequence
  Description of Artificial Sequence: Synthetic peptide
  Seed: KTRPILSPL
KKRPILSPI

SEQ ID NO: 162981 - protein, 9 aa, Artificial Sequence
  Description of Artificial Sequence: Synthetic peptide
  Seed: KTRPILSPL
KKRPILSPK

SEQ ID NO: 162982 - protein, 9 aa, Artificial Sequence
  Description of Artificial Sequence: Synthetic peptide
  Seed: KTRPILSPL
KKRPILSPL

SEQ ID NO: 162983 - protein, 10 aa, Artificial Sequence
  Description of Artificial Sequence: Synthetic peptide
  Seed: KTRPILSPLT
KKRPILSPLK

SEQ ID NO: 162984 - protein, 9 aa, Artificial Sequence
  Description of Artificial Sequence: Synthetic peptide
  Seed: KTRPILSPL
KKRPILSPM

SEQ ID NO: 162985 - protein, 9 aa, Artificial Sequence
  Description of Artificial Sequence: Synthetic peptide
  Seed: KTRPILSPL
KKRPILSPR

SEQ ID NO: 162986 - protein, 9 aa, Artificial Sequence
  Description of Artificial Sequence: Synthetic peptide
  Seed: KTRPILSPL
KKRPILSPV

SEQ ID NO: 162987 - protein, 9 aa, Artificial Sequence
  Description of Artificial Sequence: Synthetic peptide
  Seed: KTRPILSPL
KKRPILSPY

SEQ ID NO: 162988 - protein, 8 aa, Artificial Sequence
  Description of Artificial Sequence: Synthetic peptide
  Seed: KTRPILSP
KLRPILSA

SEQ ID NO: 162989 - protein, 8 aa, Artificial Sequence
  Description of Artificial Sequence: Synthetic peptide
  Seed: KTRPILSP
KLRPILSF

SEQ ID NO: 162990 - protein, 8 aa, Artificial Sequence
  Description of Artificial Sequence: Synthetic peptide
  Seed: KTRPILSP
KLRPILSI

SEQ ID NO: 162991 - protein, 8 aa, Artificial Sequence
  Description of Artificial Sequence: Synthetic peptide
  Seed: KTRPILSP
KLRPILSK

SEQ ID NO: 162992 - protein, 8 aa, Artificial Sequence
  Description of Artificial Sequence: Synthetic peptide
  Seed: KTRPILSP
KLRPILSM

SEQ ID NO: 162993 - protein, 9 aa, Artificial Sequence
  Description of Artificial Sequence: Synthetic peptide
  Seed: KTRPILSPL
KLRPILSPA

SEQ ID NO: 162994 - protein, 9 aa, Artificial Sequence
  Description of Artificial Sequence: Synthetic peptide
  Seed: KTRPILSPL
KLRPILSPC

SEQ ID NO: 162995 - protein, 9 aa, Artificial Sequence
  Description of Artificial Sequence: Synthetic peptide
  Seed: KTRPILSPL
KLRPILSPD

SEQ ID NO: 162996 - protein, 9 aa, Artificial Sequence
  Description of Artificial Sequence: Synthetic peptide
  Seed: KTRPILSPL
KLRPILSPE

SEQ ID NO: 162997 - protein, 9 aa, Artificial Sequence
  Description of Artificial Sequence: Synthetic peptide
  Seed: KTRPILSPL
KLRPILSPF

SEQ ID NO: 162998 - protein, 9 aa, Artificial Sequence
  Description of Artificial Sequence: Synthetic peptide
  Seed: KTRPILSPL
KLRPILSPG

SEQ ID NO: 162999 - protein, 9 aa, Artificial Sequence
  Description of Artificial Sequence: Synthetic peptide
  Seed: KTRPILSPL
KLRPILSPH

SEQ ID NO: 163000 - protein, 9 aa, Artificial Sequence
  Description of Artificial Sequence: Synthetic peptide
  Seed: KTRPILSPL
KLRPILSPI

SEQ ID NO: 163001 - protein, 9 aa, Artificial Sequence
  Description of Artificial Sequence: Synthetic peptide
  Seed: KTRPILSPL
KLRPILSPK

SEQ ID NO: 163002 - protein, 9 aa, Artificial Sequence
  Description of Artificial Sequence: Synthetic peptide
  Seed: KTRPILSPL
KLRPILSPL

SEQ ID NO: 163003 - protein, 10 aa, Artificial Sequence
  Description of Artificial Sequence: Synthetic peptide
  Seed: KTRPILSPLT
KLRPILSPLA

SEQ ID NO: 163004 - protein, 10 aa, Artificial Sequence
  Description of Artificial Sequence: Synthetic peptide
  Seed: KTRPILSPLT
KLRPILSPLC

SEQ ID NO: 163005 - protein, 10 aa, Artificial Sequence
  Description of Artificial Sequence: Synthetic peptide
  Seed: KTRPILSPLT
KLRPILSPLE

SEQ ID NO: 163006 - protein, 10 aa, Artificial Sequence
  Description of Artificial Sequence: Synthetic peptide
  Seed: KTRPILSPLT
KLRPILSPLF

SEQ ID NO: 163007 - protein, 10 aa, Artificial Sequence
  Description of Artificial Sequence: Synthetic peptide
  Seed: KTRPILSPLT
KLRPILSPLG

SEQ ID NO: 163008 - protein, 10 aa, Artificial Sequence
  Description of Artificial Sequence: Synthetic peptide
  Seed: KTRPILSPLT
KLRPILSPLH

SEQ ID NO: 163009 - protein, 10 aa, Artificial Sequence
  Description of Artificial Sequence: Synthetic peptide
  Seed: KTRPILSPLT
KLRPILSPLI

SEQ ID NO: 163010 - protein, 10 aa, Artificial Sequence
  Description of Artificial Sequence: Synthetic peptide
  Seed: KTRPILSPLT
KLRPILSPLK

SEQ ID NO: 163011 - protein, 10 aa, Artificial Sequence
  Description of Artificial Sequence: Synthetic peptide
  Seed: KTRPILSPLT
KLRPILSPLL

SEQ ID NO: 163012 - protein, 10 aa, Artificial Sequence
  Description of Artificial Sequence: Synthetic peptide
  Seed: KTRPILSPLT
KLRPILSPLM

SEQ ID NO: 163013 - protein, 10 aa, Artificial Sequence
  Description of Artificial Sequence: Synthetic peptide
  Seed: KTRPILSPLT
KLRPILSPLN

SEQ ID NO: 163014 - protein, 10 aa, Artificial Sequence
  Description of Artificial Sequence: Synthetic peptide
  Seed: KTRPILSPLT
KLRPILSPLP

SEQ ID NO: 163015 - protein, 10 aa, Artificial Sequence
  Description of Artificial Sequence: Synthetic peptide
  Seed: KTRPILSPLT
KLRPILSPLQ

SEQ ID NO: 163016 - protein, 10 aa, Artificial Sequence
  Description of Artificial Sequence: Synthetic peptide
  Seed: KTRPILSPLT
KLRPILSPLR

SEQ ID NO: 163017 - protein, 10 aa, Artificial Sequence
  Description of Artificial Sequence: Synthetic peptide
  Seed: KTRPILSPLT
KLRPILSPLS

SEQ ID NO: 163018 - protein, 10 aa, Artificial Sequence
  Description of Artificial Sequence: Synthetic peptide
  Seed: KTRPILSPLT
KLRPILSPLT

SEQ ID NO: 163019 - protein, 11 aa, Artificial Sequence
  Description of Artificial Sequence: Synthetic peptide
  Seed: KTRPILSPLTK
KLRPILSPLTA

SEQ ID NO: 163020 - protein, 11 aa, Artificial Sequence
  Description of Artificial Sequence: Synthetic peptide
  Seed: KTRPILSPLTK
KLRPILSPLTG

SEQ ID NO: 163021 - protein, 11 aa, Artificial Sequence
  Description of Artificial Sequence: Synthetic peptide
  Seed: KTRPILSPLTK
KLRPILSPLTI

SEQ ID NO: 163022 - protein, 11 aa, Artificial Sequence
  Description of Artificial Sequence: Synthetic peptide
  Seed: KTRPILSPLTK
KLRPILSPLTL

SEQ ID NO: 163023 - protein, 11 aa, Artificial Sequence
  Description of Artificial Sequence: Synthetic peptide
  Seed: KTRPILSPLTK
KLRPILSPLTM

SEQ ID NO: 163024 - protein, 11 aa, Artificial Sequence
  Description of Artificial Sequence: Synthetic peptide
  Seed: KTRPILSPLTK
KLRPILSPLTR

SEQ ID NO: 163025 - protein, 11 aa, Artificial Sequence
  Description of Artificial Sequence: Synthetic peptide
  Seed: KTRPILSPLTK
KLRPILSPLTS

SEQ ID NO: 163026 - protein, 11 aa, Artificial Sequence
  Description of Artificial Sequence: Synthetic peptide
  Seed: KTRPILSPLTK
KLRPILSPLTV

SEQ ID NO: 163027 - protein, 11 aa, Artificial Sequence
  Description of Artificial Sequence: Synthetic peptide
  Seed: KTRPILSPLTK
KLRPILSPLTY

SEQ ID NO: 163028 - protein, 10 aa, Artificial Sequence
  Description of Artificial Sequence: Synthetic peptide
  Seed: KTRPILSPLT
KLRPILSPLV

SEQ ID NO: 163029 - protein, 10 aa, Artificial Sequence
  Description of Artificial Sequence: Synthetic peptide
  Seed: KTRPILSPLT
KLRPILSPLY

SEQ ID NO: 163030 - protein, 9 aa, Artificial Sequence
  Description of Artificial Sequence: Synthetic peptide
  Seed: KTRPILSPL
KLRPILSPM

SEQ ID NO: 163031 - protein, 9 aa, Artificial Sequence
  Description of Artificial Sequence: Synthetic peptide
  Seed: KTRPILSPL
KLRPILSPN

SEQ ID NO: 163032 - protein, 9 aa, Artificial Sequence
  Description of Artificial Sequence: Synthetic peptide
  Seed: KTRPILSPL
KLRPILSPP

SEQ ID NO: 163033 - protein, 9 aa, Artificial Sequence
  Description of Artificial Sequence: Synthetic peptide
  Seed: KTRPILSPL
KLRPILSPQ

SEQ ID NO: 163034 - protein, 9 aa, Artificial Sequence
  Description of Artificial Sequence: Synthetic peptide
  Seed: KTRPILSPL
KLRPILSPR

SEQ ID NO: 163035 - protein, 9 aa, Artificial Sequence
  Description of Artificial Sequence: Synthetic peptide
  Seed: KTRPILSPL
KLRPILSPS

SEQ ID NO: 163036 - protein, 9 aa, Artificial Sequence
  Description of Artificial Sequence: Synthetic peptide
  Seed: KTRPILSPL
KLRPILSPT

SEQ ID NO: 163037 - protein, 9 aa, Artificial Sequence
  Description of Artificial Sequence: Synthetic peptide
  Seed: KTRPILSPL
KLRPILSPV

SEQ ID NO: 163038 - protein, 9 aa, Artificial Sequence
  Description of Artificial Sequence: Synthetic peptide
  Seed: KTRPILSPL
KLRPILSPW

SEQ ID NO: 163039 - protein, 9 aa, Artificial Sequence
  Description of Artificial Sequence: Synthetic peptide
  Seed: KTRPILSPL
KLRPILSPY

SEQ ID NO: 163040 - protein, 8 aa, Artificial Sequence
  Description of Artificial Sequence: Synthetic peptide
  Seed: KTRPILSP
KLRPILSV

SEQ ID NO: 163041 - protein, 8 aa, Artificial Sequence
  Description of Artificial Sequence: Synthetic peptide
  Seed: KTRPILSP
KLRPILSY

SEQ ID NO: 163042 - protein, 8 aa, Artificial Sequence
  Description of Artificial Sequence: Synthetic peptide
  Seed: KTRPILSP
KMRPILSA

SEQ ID NO: 163043 - protein, 8 aa, Artificial Sequence
  Description of Artificial Sequence: Synthetic peptide
  Seed: KTRPILSP
KMRPILSF

SEQ ID NO: 163044 - protein, 8 aa, Artificial Sequence
  Description of Artificial Sequence: Synthetic peptide
  Seed: KTRPILSP
KMRPILSG

SEQ ID NO: 163045 - protein, 8 aa, Artificial Sequence
  Description of Artificial Sequence: Synthetic peptide
  Seed: KTRPILSP
KMRPILSI

SEQ ID NO: 163046 - protein, 8 aa, Artificial Sequence
  Description of Artificial Sequence: Synthetic peptide
  Seed: KTRPILSP
KMRPILSK

SEQ ID NO: 163047 - protein, 8 aa, Artificial Sequence
  Description of Artificial Sequence: Synthetic peptide
  Seed: KTRPILSP
KMRPILSL

SEQ ID NO: 163048 - protein, 8 aa, Artificial Sequence
  Description of Artificial Sequence: Synthetic peptide
  Seed: KTRPILSP
KMRPILSM

SEQ ID NO: 163049 - protein, 8 aa, Artificial Sequence
  Description of Artificial Sequence: Synthetic peptide
  Seed: KTRPILSP
KMRPILSP

SEQ ID NO: 163050 - protein, 9 aa, Artificial Sequence
  Description of Artificial Sequence: Synthetic peptide
  Seed: KTRPILSPL
KMRPILSPA

SEQ ID NO: 163051 - protein, 9 aa, Artificial Sequence
  Description of Artificial Sequence: Synthetic peptide
  Seed: KTRPILSPL
KMRPILSPC

SEQ ID NO: 163052 - protein, 9 aa, Artificial Sequence
  Description of Artificial Sequence: Synthetic peptide
  Seed: KTRPILSPL
KMRPILSPD

SEQ ID NO: 163053 - protein, 9 aa, Artificial Sequence
  Description of Artificial Sequence: Synthetic peptide
  Seed: KTRPILSPL
KMRPILSPE

SEQ ID NO: 163054 - protein, 9 aa, Artificial Sequence
  Description of Artificial Sequence: Synthetic peptide
  Seed: KTRPILSPL
KMRPILSPF

SEQ ID NO: 163055 - protein, 9 aa, Artificial Sequence
  Description of Artificial Sequence: Synthetic peptide
  Seed: KTRPILSPL
KMRPILSPG

SEQ ID NO: 163056 - protein, 9 aa, Artificial Sequence
  Description of Artificial Sequence: Synthetic peptide
  Seed: KTRPILSPL
KMRPILSPH

SEQ ID NO: 163057 - protein, 9 aa, Artificial Sequence
  Description of Artificial Sequence: Synthetic peptide
  Seed: KTRPILSPL
KMRPILSPI

SEQ ID NO: 163058 - protein, 9 aa, Artificial Sequence
  Description of Artificial Sequence: Synthetic peptide
  Seed: KTRPILSPL
KMRPILSPK

SEQ ID NO: 163059 - protein, 9 aa, Artificial Sequence
  Description of Artificial Sequence: Synthetic peptide
  Seed: KTRPILSPL
KMRPILSPL

SEQ ID NO: 163060 - protein, 10 aa, Artificial Sequence
  Description of Artificial Sequence: Synthetic peptide
  Seed: KTRPILSPLT
KMRPILSPLA

SEQ ID NO: 163061 - protein, 10 aa, Artificial Sequence
  Description of Artificial Sequence: Synthetic peptide
  Seed: KTRPILSPLT
KMRPILSPLC

SEQ ID NO: 163062 - protein, 10 aa, Artificial Sequence
  Description of Artificial Sequence: Synthetic peptide
  Seed: KTRPILSPLT
KMRPILSPLD

SEQ ID NO: 163063 - protein, 10 aa, Artificial Sequence
  Description of Artificial Sequence: Synthetic peptide
  Seed: KTRPILSPLT
KMRPILSPLE

SEQ ID NO: 163064 - protein, 10 aa, Artificial Sequence
  Description of Artificial Sequence: Synthetic peptide
  Seed: KTRPILSPLT
KMRPILSPLF

SEQ ID NO: 163065 - protein, 10 aa, Artificial Sequence
  Description of Artificial Sequence: Synthetic peptide
  Seed: KTRPILSPLT
KMRPILSPLG

SEQ ID NO: 163066 - protein, 10 aa, Artificial Sequence
  Description of Artificial Sequence: Synthetic peptide
  Seed: KTRPILSPLT
KMRPILSPLH

SEQ ID NO: 163067 - protein, 10 aa, Artificial Sequence
  Description of Artificial Sequence: Synthetic peptide
  Seed: KTRPILSPLT
KMRPILSPLI

SEQ ID NO: 163068 - protein, 10 aa, Artificial Sequence
  Description of Artificial Sequence: Synthetic peptide
  Seed: KTRPILSPLT
KMRPILSPLK

SEQ ID NO: 163069 - protein, 10 aa, Artificial Sequence
  Description of Artificial Sequence: Synthetic peptide
  Seed: KTRPILSPLT
KMRPILSPLL

SEQ ID NO: 163070 - protein, 10 aa, Artificial Sequence
  Description of Artificial Sequence: Synthetic peptide
  Seed: KTRPILSPLT
KMRPILSPLM

SEQ ID NO: 163071 - protein, 10 aa, Artificial Sequence
  Description of Artificial Sequence: Synthetic peptide
  Seed: KTRPILSPLT
KMRPILSPLN

SEQ ID NO: 163072 - protein, 10 aa, Artificial Sequence
  Description of Artificial Sequence: Synthetic peptide
  Seed: KTRPILSPLT
KMRPILSPLP

SEQ ID NO: 163073 - protein, 10 aa, Artificial Sequence
  Description of Artificial Sequence: Synthetic peptide
  Seed: KTRPILSPLT
KMRPILSPLQ

SEQ ID NO: 163074 - protein, 10 aa, Artificial Sequence
  Description of Artificial Sequence: Synthetic peptide
  Seed: KTRPILSPLT
KMRPILSPLR

SEQ ID NO: 163075 - protein, 10 aa, Artificial Sequence
  Description of Artificial Sequence: Synthetic peptide
  Seed: KTRPILSPLT
KMRPILSPLS

SEQ ID NO: 163076 - protein, 10 aa, Artificial Sequence
  Description of Artificial Sequence: Synthetic peptide
  Seed: KTRPILSPLT
KMRPILSPLT

SEQ ID NO: 163077 - protein, 11 aa, Artificial Sequence
  Description of Artificial Sequence: Synthetic peptide
  Seed: KTRPILSPLTK
KMRPILSPLTA

SEQ ID NO: 163078 - protein, 11 aa, Artificial Sequence
  Description of Artificial Sequence: Synthetic peptide
  Seed: KTRPILSPLTK
KMRPILSPLTF

SEQ ID NO: 163079 - protein, 11 aa, Artificial Sequence
  Description of Artificial Sequence: Synthetic peptide
  Seed: KTRPILSPLTK
KMRPILSPLTG

SEQ ID NO: 163080 - protein, 11 aa, Artificial Sequence
  Description of Artificial Sequence: Synthetic peptide
  Seed: KTRPILSPLTK
KMRPILSPLTI

SEQ ID NO: 163081 - protein, 11 aa, Artificial Sequence
  Description of Artificial Sequence: Synthetic peptide
  Seed: KTRPILSPLTK
KMRPILSPLTL

SEQ ID NO: 163082 - protein, 11 aa, Artificial Sequence
  Description of Artificial Sequence: Synthetic peptide
  Seed: KTRPILSPLTK
KMRPILSPLTM

SEQ ID NO: 163083 - protein, 11 aa, Artificial Sequence
  Description of Artificial Sequence: Synthetic peptide
  Seed: KTRPILSPLTK
KMRPILSPLTP

SEQ ID NO: 163084 - protein, 11 aa, Artificial Sequence
  Description of Artificial Sequence: Synthetic peptide
  Seed: KTRPILSPLTK
KMRPILSPLTQ

SEQ ID NO: 163085 - protein, 11 aa, Artificial Sequence
  Description of Artificial Sequence: Synthetic peptide
  Seed: KTRPILSPLTK
KMRPILSPLTR

SEQ ID NO: 163086 - protein, 11 aa, Artificial Sequence
  Description of Artificial Sequence: Synthetic peptide
  Seed: KTRPILSPLTK
KMRPILSPLTS

SEQ ID NO: 163087 - protein, 11 aa, Artificial Sequence
  Description of Artificial Sequence: Synthetic peptide
  Seed: KTRPILSPLTK
KMRPILSPLTT

SEQ ID NO: 163088 - protein, 11 aa, Artificial Sequence
  Description of Artificial Sequence: Synthetic peptide
  Seed: KTRPILSPLTK
KMRPILSPLTV

SEQ ID NO: 163089 - protein, 11 aa, Artificial Sequence
  Description of Artificial Sequence: Synthetic peptide
  Seed: KTRPILSPLTK
KMRPILSPLTY

SEQ ID NO: 163090 - protein, 10 aa, Artificial Sequence
  Description of Artificial Sequence: Synthetic peptide
  Seed: KTRPILSPLT
KMRPILSPLV

SEQ ID NO: 163091 - protein, 10 aa, Artificial Sequence
  Description of Artificial Sequence: Synthetic peptide
  Seed: KTRPILSPLT
KMRPILSPLW

SEQ ID NO: 163092 - protein, 10 aa, Artificial Sequence
  Description of Artificial Sequence: Synthetic peptide
  Seed: KTRPILSPLT
KMRPILSPLY

SEQ ID NO: 163093 - protein, 9 aa, Artificial Sequence
  Description of Artificial Sequence: Synthetic peptide
  Seed: KTRPILSPL
KMRPILSPM

SEQ ID NO: 163094 - protein, 9 aa, Artificial Sequence
  Description of Artificial Sequence: Synthetic peptide
  Seed: KTRPILSPL
KMRPILSPN

SEQ ID NO: 163095 - protein, 9 aa, Artificial Sequence
  Description of Artificial Sequence: Synthetic peptide
  Seed: KTRPILSPL
KMRPILSPP

SEQ ID NO: 163096 - protein, 9 aa, Artificial Sequence
  Description of Artificial Sequence: Synthetic peptide
  Seed: KTRPILSPL
KMRPILSPQ

SEQ ID NO: 163097 - protein, 9 aa, Artificial Sequence
  Description of Artificial Sequence: Synthetic peptide
  Seed: KTRPILSPL
KMRPILSPR

SEQ ID NO: 163098 - protein, 9 aa, Artificial Sequence
  Description of Artificial Sequence: Synthetic peptide
  Seed: KTRPILSPL
KMRPILSPS

SEQ ID NO: 163099 - protein, 9 aa, Artificial Sequence
  Description of Artificial Sequence: Synthetic peptide
  Seed: KTRPILSPL
KMRPILSPT

SEQ ID NO: 163100 - protein, 9 aa, Artificial Sequence
  Description of Artificial Sequence: Synthetic peptide
  Seed: KTRPILSPL
KMRPILSPW

SEQ ID NO: 163101 - protein, 9 aa, Artificial Sequence
  Description of Artificial Sequence: Synthetic peptide
  Seed: KTRPILSPL
KMRPILSPY

SEQ ID NO: 163102 - protein, 8 aa, Artificial Sequence
  Description of Artificial Sequence: Synthetic peptide
  Seed: KTRPILSP
KMRPILSR

SEQ ID NO: 163103 - protein, 8 aa, Artificial Sequence
  Description of Artificial Sequence: Synthetic peptide
  Seed: KTRPILSP
KMRPILSS

SEQ ID NO: 163104 - protein, 8 aa, Artificial Sequence
  Description of Artificial Sequence: Synthetic peptide
  Seed: KTRPILSP
KMRPILST

SEQ ID NO: 163105 - protein, 8 aa, Artificial Sequence
  Description of Artificial Sequence: Synthetic peptide
  Seed: KTRPILSP
KMRPILSV

SEQ ID NO: 163106 - protein, 8 aa, Artificial Sequence
  Description of Artificial Sequence: Synthetic peptide
  Seed: KTRPILSP
KMRPILSY

SEQ ID NO: 163107 - protein, 8 aa, Artificial Sequence
  Description of Artificial Sequence: Synthetic peptide
  Seed: KTRPILSP
KNRPILSK

SEQ ID NO: 163108 - protein, 9 aa, Artificial Sequence
  Description of Artificial Sequence: Synthetic peptide
  Seed: KTRPILSPL
KNRPILSPA

SEQ ID NO: 163109 - protein, 9 aa, Artificial Sequence
  Description of Artificial Sequence: Synthetic peptide
  Seed: KTRPILSPL
KNRPILSPC

SEQ ID NO: 163110 - protein, 9 aa, Artificial Sequence
  Description of Artificial Sequence: Synthetic peptide
  Seed: KTRPILSPL
KNRPILSPE

SEQ ID NO: 163111 - protein, 9 aa, Artificial Sequence
  Description of Artificial Sequence: Synthetic peptide
  Seed: KTRPILSPL
KNRPILSPF

SEQ ID NO: 163112 - protein, 9 aa, Artificial Sequence
  Description of Artificial Sequence: Synthetic peptide
  Seed: KTRPILSPL
KNRPILSPG

SEQ ID NO: 163113 - protein, 9 aa, Artificial Sequence
  Description of Artificial Sequence: Synthetic peptide
  Seed: KTRPILSPL
KNRPILSPH

SEQ ID NO: 163114 - protein, 9 aa, Artificial Sequence
  Description of Artificial Sequence: Synthetic peptide
  Seed: KTRPILSPL
KNRPILSPI

SEQ ID NO: 163115 - protein, 9 aa, Artificial Sequence
  Description of Artificial Sequence: Synthetic peptide
  Seed: KTRPILSPL
KNRPILSPK

SEQ ID NO: 163116 - protein, 9 aa, Artificial Sequence
  Description of Artificial Sequence: Synthetic peptide
  Seed: KTRPILSPL
KNRPILSPL

SEQ ID NO: 163117 - protein, 10 aa, Artificial Sequence
  Description of Artificial Sequence: Synthetic peptide
  Seed: KTRPILSPLT
KNRPILSPLA

SEQ ID NO: 163118 - protein, 10 aa, Artificial Sequence
  Description of Artificial Sequence: Synthetic peptide
  Seed: KTRPILSPLT
KNRPILSPLC

SEQ ID NO: 163119 - protein, 10 aa, Artificial Sequence
  Description of Artificial Sequence: Synthetic peptide
  Seed: KTRPILSPLT
KNRPILSPLF

SEQ ID NO: 163120 - protein, 10 aa, Artificial Sequence
  Description of Artificial Sequence: Synthetic peptide
  Seed: KTRPILSPLT
KNRPILSPLG

SEQ ID NO: 163121 - protein, 10 aa, Artificial Sequence
  Description of Artificial Sequence: Synthetic peptide
  Seed: KTRPILSPLT
KNRPILSPLI

SEQ ID NO: 163122 - protein, 10 aa, Artificial Sequence
  Description of Artificial Sequence: Synthetic peptide
  Seed: KTRPILSPLT
KNRPILSPLK

SEQ ID NO: 163123 - protein, 10 aa, Artificial Sequence
  Description of Artificial Sequence: Synthetic peptide
  Seed: KTRPILSPLT
KNRPILSPLL

SEQ ID NO: 163124 - protein, 10 aa, Artificial Sequence
  Description of Artificial Sequence: Synthetic peptide
  Seed: KTRPILSPLT
KNRPILSPLM

SEQ ID NO: 163125 - protein, 10 aa, Artificial Sequence
  Description of Artificial Sequence: Synthetic peptide
  Seed: KTRPILSPLT
KNRPILSPLP

SEQ ID NO: 163126 - protein, 10 aa, Artificial Sequence
  Description of Artificial Sequence: Synthetic peptide
  Seed: KTRPILSPLT
KNRPILSPLR

SEQ ID NO: 163127 - protein, 10 aa, Artificial Sequence
  Description of Artificial Sequence: Synthetic peptide
  Seed: KTRPILSPLT
KNRPILSPLS

SEQ ID NO: 163128 - protein, 10 aa, Artificial Sequence
  Description of Artificial Sequence: Synthetic peptide
  Seed: KTRPILSPLT
KNRPILSPLT

SEQ ID NO: 163129 - protein, 11 aa, Artificial Sequence
  Description of Artificial Sequence: Synthetic peptide
  Seed: KTRPILSPLTK
KNRPILSPLTA

SEQ ID NO: 163130 - protein, 11 aa, Artificial Sequence
  Description of Artificial Sequence: Synthetic peptide
  Seed: KTRPILSPLTK
KNRPILSPLTK

SEQ ID NO: 163131 - protein, 11 aa, Artificial Sequence
  Description of Artificial Sequence: Synthetic peptide
  Seed: KTRPILSPLTK
KNRPILSPLTR

SEQ ID NO: 163132 - protein, 11 aa, Artificial Sequence
  Description of Artificial Sequence: Synthetic peptide
  Seed: KTRPILSPLTK
KNRPILSPLTV

SEQ ID NO: 163133 - protein, 10 aa, Artificial Sequence
  Description of Artificial Sequence: Synthetic peptide
  Seed: KTRPILSPLT
KNRPILSPLV

SEQ ID NO: 163134 - protein, 10 aa, Artificial Sequence
  Description of Artificial Sequence: Synthetic peptide
  Seed: KTRPILSPLT
KNRPILSPLY

SEQ ID NO: 163135 - protein, 9 aa, Artificial Sequence
  Description of Artificial Sequence: Synthetic peptide
  Seed: KTRPILSPL
KNRPILSPM

SEQ ID NO: 163136 - protein, 9 aa, Artificial Sequence
  Description of Artificial Sequence: Synthetic peptide
  Seed: KTRPILSPL
KNRPILSPN

SEQ ID NO: 163137 - protein, 9 aa, Artificial Sequence
  Description of Artificial Sequence: Synthetic peptide
  Seed: KTRPILSPL
KNRPILSPP

SEQ ID NO: 163138 - protein, 9 aa, Artificial Sequence
  Description of Artificial Sequence: Synthetic peptide
  Seed: KTRPILSPL
KNRPILSPQ

SEQ ID NO: 163139 - protein, 9 aa, Artificial Sequence
  Description of Artificial Sequence: Synthetic peptide
  Seed: KTRPILSPL
KNRPILSPR

SEQ ID NO: 163140 - protein, 9 aa, Artificial Sequence
  Description of Artificial Sequence: Synthetic peptide
  Seed: KTRPILSPL
KNRPILSPS

SEQ ID NO: 163141 - protein, 9 aa, Artificial Sequence
  Description of Artificial Sequence: Synthetic peptide
  Seed: KTRPILSPL
KNRPILSPT

SEQ ID NO: 163142 - protein, 9 aa, Artificial Sequence
  Description of Artificial Sequence: Synthetic peptide
  Seed: KTRPILSPL
KNRPILSPV

SEQ ID NO: 163143 - protein, 9 aa, Artificial Sequence
  Description of Artificial Sequence: Synthetic peptide
  Seed: KTRPILSPL
KNRPILSPW

SEQ ID NO: 163144 - protein, 9 aa, Artificial Sequence
  Description of Artificial Sequence: Synthetic peptide
  Seed: KTRPILSPL
KNRPILSPY

SEQ ID NO: 163145 - protein, 9 aa, Artificial Sequence
  Description of Artificial Sequence: Synthetic peptide
  Seed: KTRPILSPL
KPRPILSPA

SEQ ID NO: 163146 - protein, 9 aa, Artificial Sequence
  Description of Artificial Sequence: Synthetic peptide
  Seed: KTRPILSPL
KPRPILSPC

SEQ ID NO: 163147 - protein, 9 aa, Artificial Sequence
  Description of Artificial Sequence: Synthetic peptide
  Seed: KTRPILSPL
KPRPILSPD

SEQ ID NO: 163148 - protein, 9 aa, Artificial Sequence
  Description of Artificial Sequence: Synthetic peptide
  Seed: KTRPILSPL
KPRPILSPE

SEQ ID NO: 163149 - protein, 9 aa, Artificial Sequence
  Description of Artificial Sequence: Synthetic peptide
  Seed: KTRPILSPL
KPRPILSPF

SEQ ID NO: 163150 - protein, 9 aa, Artificial Sequence
  Description of Artificial Sequence: Synthetic peptide
  Seed: KTRPILSPL
KPRPILSPG

SEQ ID NO: 163151 - protein, 9 aa, Artificial Sequence
  Description of Artificial Sequence: Synthetic peptide
  Seed: KTRPILSPL
KPRPILSPH

SEQ ID NO: 163152 - protein, 9 aa, Artificial Sequence
  Description of Artificial Sequence: Synthetic peptide
  Seed: KTRPILSPL
KPRPILSPI

SEQ ID NO: 163153 - protein, 9 aa, Artificial Sequence
  Description of Artificial Sequence: Synthetic peptide
  Seed: KTRPILSPL
KPRPILSPK

SEQ ID NO: 163154 - protein, 9 aa, Artificial Sequence
  Description of Artificial Sequence: Synthetic peptide
  Seed: KTRPILSPL
KPRPILSPL

SEQ ID NO: 163155 - protein, 10 aa, Artificial Sequence
  Description of Artificial Sequence: Synthetic peptide
  Seed: KTRPILSPLT
KPRPILSPLK

SEQ ID NO: 163156 - protein, 9 aa, Artificial Sequence
  Description of Artificial Sequence: Synthetic peptide
  Seed: KTRPILSPL
KPRPILSPM

SEQ ID NO: 163157 - protein, 9 aa, Artificial Sequence
  Description of Artificial Sequence: Synthetic peptide
  Seed: KTRPILSPL
KPRPILSPN

SEQ ID NO: 163158 - protein, 9 aa, Artificial Sequence
  Description of Artificial Sequence: Synthetic peptide
  Seed: KTRPILSPL
KPRPILSPP

SEQ ID NO: 163159 - protein, 9 aa, Artificial Sequence
  Description of Artificial Sequence: Synthetic peptide
  Seed: KTRPILSPL
KPRPILSPQ

SEQ ID NO: 163160 - protein, 9 aa, Artificial Sequence
  Description of Artificial Sequence: Synthetic peptide
  Seed: KTRPILSPL
KPRPILSPR

SEQ ID NO: 163161 - protein, 9 aa, Artificial Sequence
  Description of Artificial Sequence: Synthetic peptide
  Seed: KTRPILSPL
KPRPILSPS

SEQ ID NO: 163162 - protein, 9 aa, Artificial Sequence
  Description of Artificial Sequence: Synthetic peptide
  Seed: KTRPILSPL
KPRPILSPT

SEQ ID NO: 163163 - protein, 9 aa, Artificial Sequence
  Description of Artificial Sequence: Synthetic peptide
  Seed: KTRPILSPL
KPRPILSPV

SEQ ID NO: 163164 - protein, 9 aa, Artificial Sequence
  Description of Artificial Sequence: Synthetic peptide
  Seed: KTRPILSPL
KPRPILSPW

SEQ ID NO: 163165 - protein, 9 aa, Artificial Sequence
  Description of Artificial Sequence: Synthetic peptide
  Seed: KTRPILSPL
KPRPILSPY

SEQ ID NO: 163166 - protein, 8 aa, Artificial Sequence
  Description of Artificial Sequence: Synthetic peptide
  Seed: KTRPILSP
KQRPILSA

SEQ ID NO: 163167 - protein, 8 aa, Artificial Sequence
  Description of Artificial Sequence: Synthetic peptide
  Seed: KTRPILSP
KQRPILSK

SEQ ID NO: 163168 - protein, 9 aa, Artificial Sequence
  Description of Artificial Sequence: Synthetic peptide
  Seed: KTRPILSPL
KQRPILSPA

SEQ ID NO: 163169 - protein, 9 aa, Artificial Sequence
  Description of Artificial Sequence: Synthetic peptide
  Seed: KTRPILSPL
KQRPILSPC

SEQ ID NO: 163170 - protein, 9 aa, Artificial Sequence
  Description of Artificial Sequence: Synthetic peptide
  Seed: KTRPILSPL
KQRPILSPD

SEQ ID NO: 163171 - protein, 9 aa, Artificial Sequence
  Description of Artificial Sequence: Synthetic peptide
  Seed: KTRPILSPL
KQRPILSPE

SEQ ID NO: 163172 - protein, 9 aa, Artificial Sequence
  Description of Artificial Sequence: Synthetic peptide
  Seed: KTRPILSPL
KQRPILSPF

SEQ ID NO: 163173 - protein, 9 aa, Artificial Sequence
  Description of Artificial Sequence: Synthetic peptide
  Seed: KTRPILSPL
KQRPILSPG

SEQ ID NO: 163174 - protein, 9 aa, Artificial Sequence
  Description of Artificial Sequence: Synthetic peptide
  Seed: KTRPILSPL
KQRPILSPH

SEQ ID NO: 163175 - protein, 9 aa, Artificial Sequence
  Description of Artificial Sequence: Synthetic peptide
  Seed: KTRPILSPL
KQRPILSPI

SEQ ID NO: 163176 - protein, 9 aa, Artificial Sequence
  Description of Artificial Sequence: Synthetic peptide
  Seed: KTRPILSPL
KQRPILSPK

SEQ ID NO: 163177 - protein, 9 aa, Artificial Sequence
  Description of Artificial Sequence: Synthetic peptide
  Seed: KTRPILSPL
KQRPILSPL

SEQ ID NO: 163178 - protein, 10 aa, Artificial Sequence
  Description of Artificial Sequence: Synthetic peptide
  Seed: KTRPILSPLT
KQRPILSPLA

SEQ ID NO: 163179 - protein, 10 aa, Artificial Sequence
  Description of Artificial Sequence: Synthetic peptide
  Seed: KTRPILSPLT
KQRPILSPLC

SEQ ID NO: 163180 - protein, 10 aa, Artificial Sequence
  Description of Artificial Sequence: Synthetic peptide
  Seed: KTRPILSPLT
KQRPILSPLE

SEQ ID NO: 163181 - protein, 10 aa, Artificial Sequence
  Description of Artificial Sequence: Synthetic peptide
  Seed: KTRPILSPLT
KQRPILSPLF

SEQ ID NO: 163182 - protein, 10 aa, Artificial Sequence
  Description of Artificial Sequence: Synthetic peptide
  Seed: KTRPILSPLT
KQRPILSPLG

SEQ ID NO: 163183 - protein, 10 aa, Artificial Sequence
  Description of Artificial Sequence: Synthetic peptide
  Seed: KTRPILSPLT
KQRPILSPLH

SEQ ID NO: 163184 - protein, 10 aa, Artificial Sequence
  Description of Artificial Sequence: Synthetic peptide
  Seed: KTRPILSPLT
KQRPILSPLI

SEQ ID NO: 163185 - protein, 10 aa, Artificial Sequence
  Description of Artificial Sequence: Synthetic peptide
  Seed: KTRPILSPLT
KQRPILSPLK

SEQ ID NO: 163186 - protein, 10 aa, Artificial Sequence
  Description of Artificial Sequence: Synthetic peptide
  Seed: KTRPILSPLT
KQRPILSPLL

SEQ ID NO: 163187 - protein, 10 aa, Artificial Sequence
  Description of Artificial Sequence: Synthetic peptide
  Seed: KTRPILSPLT
KQRPILSPLM

SEQ ID NO: 163188 - protein, 10 aa, Artificial Sequence
  Description of Artificial Sequence: Synthetic peptide
  Seed: KTRPILSPLT
KQRPILSPLN

SEQ ID NO: 163189 - protein, 10 aa, Artificial Sequence
  Description of Artificial Sequence: Synthetic peptide
  Seed: KTRPILSPLT
KQRPILSPLP

SEQ ID NO: 163190 - protein, 10 aa, Artificial Sequence
  Description of Artificial Sequence: Synthetic peptide
  Seed: KTRPILSPLT
KQRPILSPLQ

SEQ ID NO: 163191 - protein, 10 aa, Artificial Sequence
  Description of Artificial Sequence: Synthetic peptide
  Seed: KTRPILSPLT
KQRPILSPLR

SEQ ID NO: 163192 - protein, 10 aa, Artificial Sequence
  Description of Artificial Sequence: Synthetic peptide
  Seed: KTRPILSPLT
KQRPILSPLS

SEQ ID NO: 163193 - protein, 10 aa, Artificial Sequence
  Description of Artificial Sequence: Synthetic peptide
  Seed: KTRPILSPLT
KQRPILSPLT

SEQ ID NO: 163194 - protein, 11 aa, Artificial Sequence
  Description of Artificial Sequence: Synthetic peptide
  Seed: KTRPILSPLTK
KQRPILSPLTA

SEQ ID NO: 163195 - protein, 11 aa, Artificial Sequence
  Description of Artificial Sequence: Synthetic peptide
  Seed: KTRPILSPLTK
KQRPILSPLTI

SEQ ID NO: 163196 - protein, 11 aa, Artificial Sequence
  Description of Artificial Sequence: Synthetic peptide
  Seed: KTRPILSPLTK
KQRPILSPLTK

SEQ ID NO: 163197 - protein, 11 aa, Artificial Sequence
  Description of Artificial Sequence: Synthetic peptide
  Seed: KTRPILSPLTK
KQRPILSPLTM

SEQ ID NO: 163198 - protein, 11 aa, Artificial Sequence
  Description of Artificial Sequence: Synthetic peptide
  Seed: KTRPILSPLTK
KQRPILSPLTR

SEQ ID NO: 163199 - protein, 11 aa, Artificial Sequence
  Description of Artificial Sequence: Synthetic peptide
  Seed: KTRPILSPLTK
KQRPILSPLTV

SEQ ID NO: 163200 - protein, 10 aa, Artificial Sequence
  Description of Artificial Sequence: Synthetic peptide
  Seed: KTRPILSPLT
KQRPILSPLV

SEQ ID NO: 163201 - protein, 10 aa, Artificial Sequence
  Description of Artificial Sequence: Synthetic peptide
  Seed: KTRPILSPLT
KQRPILSPLY

SEQ ID NO: 163202 - protein, 9 aa, Artificial Sequence
  Description of Artificial Sequence: Synthetic peptide
  Seed: KTRPILSPL
KQRPILSPM

SEQ ID NO: 163203 - protein, 9 aa, Artificial Sequence
  Description of Artificial Sequence: Synthetic peptide
  Seed: KTRPILSPL
KQRPILSPN

SEQ ID NO: 163204 - protein, 9 aa, Artificial Sequence
  Description of Artificial Sequence: Synthetic peptide
  Seed: KTRPILSPL
KQRPILSPP

SEQ ID NO: 163205 - protein, 9 aa, Artificial Sequence
  Description of Artificial Sequence: Synthetic peptide
  Seed: KTRPILSPL
KQRPILSPQ

SEQ ID NO: 163206 - protein, 9 aa, Artificial Sequence
  Description of Artificial Sequence: Synthetic peptide
  Seed: KTRPILSPL
KQRPILSPR

SEQ ID NO: 163207 - protein, 9 aa, Artificial Sequence
  Description of Artificial Sequence: Synthetic peptide
  Seed: KTRPILSPL
KQRPILSPS

SEQ ID NO: 163208 - protein, 9 aa, Artificial Sequence
  Description of Artificial Sequence: Synthetic peptide
  Seed: KTRPILSPL
KQRPILSPT

SEQ ID NO: 163209 - protein, 9 aa, Artificial Sequence
  Description of Artificial Sequence: Synthetic peptide
  Seed: KTRPILSPL
KQRPILSPW

SEQ ID NO: 163210 - protein, 9 aa, Artificial Sequence
  Description of Artificial Sequence: Synthetic peptide
  Seed: KTRPILSPL
KQRPILSPY

SEQ ID NO: 163211 - protein, 8 aa, Artificial Sequence
  Description of Artificial Sequence: Synthetic peptide
  Seed: KTRPILSP
KQRPILSV

SEQ ID NO: 163212 - protein, 8 aa, Artificial Sequence
  Description of Artificial Sequence: Synthetic peptide
  Seed: KTRPILSP
KRRPILSK

SEQ ID NO: 163213 - protein, 9 aa, Artificial Sequence
  Description of Artificial Sequence: Synthetic peptide
  Seed: KTRPILSPL
KRRPILSPA

SEQ ID NO: 163214 - protein, 9 aa, Artificial Sequence
  Description of Artificial Sequence: Synthetic peptide
  Seed: KTRPILSPL
KRRPILSPI

SEQ ID NO: 163215 - protein, 9 aa, Artificial Sequence
  Description of Artificial Sequence: Synthetic peptide
  Seed: KTRPILSPL
KRRPILSPK

SEQ ID NO: 163216 - protein, 10 aa, Artificial Sequence
  Description of Artificial Sequence: Synthetic peptide
  Seed: KTRPILSPLT
KRRPILSPLK

SEQ ID NO: 163217 - protein, 9 aa, Artificial Sequence
  Description of Artificial Sequence: Synthetic peptide
  Seed: KTRPILSPL
KRRPILSPM

SEQ ID NO: 163218 - protein, 9 aa, Artificial Sequence
  Description of Artificial Sequence: Synthetic peptide
  Seed: KTRPILSPL
KRRPILSPR

SEQ ID NO: 163219 - protein, 9 aa, Artificial Sequence
  Description of Artificial Sequence: Synthetic peptide
  Seed: KTRPILSPL
KRRPILSPV

SEQ ID NO: 163220 - protein, 9 aa, Artificial Sequence
  Description of Artificial Sequence: Synthetic peptide
  Seed: KTRPILSPL
KRRPILSPY

SEQ ID NO: 163221 - protein, 8 aa, Artificial Sequence
  Description of Artificial Sequence: Synthetic peptide
  Seed: KTRPILSP
KSRPILSA

SEQ ID NO: 163222 - protein, 8 aa, Artificial Sequence
  Description of Artificial Sequence: Synthetic peptide
  Seed: KTRPILSP
KSRPILSC

SEQ ID NO: 163223 - protein, 8 aa, Artificial Sequence
  Description of Artificial Sequence: Synthetic peptide
  Seed: KTRPILSP
KSRPILSE

SEQ ID NO: 163224 - protein, 8 aa, Artificial Sequence
  Description of Artificial Sequence: Synthetic peptide
  Seed: KTRPILSP
KSRPILSF

SEQ ID NO: 163225 - protein, 8 aa, Artificial Sequence
  Description of Artificial Sequence: Synthetic peptide
  Seed: KTRPILSP
KSRPILSG

SEQ ID NO: 163226 - protein, 8 aa, Artificial Sequence
  Description of Artificial Sequence: Synthetic peptide
  Seed: KTRPILSP
KSRPILSH

SEQ ID NO: 163227 - protein, 8 aa, Artificial Sequence
  Description of Artificial Sequence: Synthetic peptide
  Seed: KTRPILSP
KSRPILSI

SEQ ID NO: 163228 - protein, 8 aa, Artificial Sequence
  Description of Artificial Sequence: Synthetic peptide
  Seed: KTRPILSP
KSRPILSK

SEQ ID NO: 163229 - protein, 8 aa, Artificial Sequence
  Description of Artificial Sequence: Synthetic peptide
  Seed: KTRPILSP
KSRPILSL

SEQ ID NO: 163230 - protein, 8 aa, Artificial Sequence
  Description of Artificial Sequence: Synthetic peptide
  Seed: KTRPILSP
KSRPILSM

SEQ ID NO: 163231 - protein, 8 aa, Artificial Sequence
  Description of Artificial Sequence: Synthetic peptide
  Seed: KTRPILSP
KSRPILSN

SEQ ID NO: 163232 - protein, 8 aa, Artificial Sequence
  Description of Artificial Sequence: Synthetic peptide
  Seed: KTRPILSP
KSRPILSP

SEQ ID NO: 163233 - protein, 9 aa, Artificial Sequence
  Description of Artificial Sequence: Synthetic peptide
  Seed: KTRPILSPL
KSRPILSPA

SEQ ID NO: 163234 - protein, 9 aa, Artificial Sequence
  Description of Artificial Sequence: Synthetic peptide
  Seed: KTRPILSPL
KSRPILSPC

SEQ ID NO: 163235 - protein, 9 aa, Artificial Sequence
  Description of Artificial Sequence: Synthetic peptide
  Seed: KTRPILSPL
KSRPILSPD

SEQ ID NO: 163236 - protein, 9 aa, Artificial Sequence
  Description of Artificial Sequence: Synthetic peptide
  Seed: KTRPILSPL
KSRPILSPE

SEQ ID NO: 163237 - protein, 9 aa, Artificial Sequence
  Description of Artificial Sequence: Synthetic peptide
  Seed: KTRPILSPL
KSRPILSPF

SEQ ID NO: 163238 - protein, 9 aa, Artificial Sequence
  Description of Artificial Sequence: Synthetic peptide
  Seed: KTRPILSPL
KSRPILSPG

SEQ ID NO: 163239 - protein, 9 aa, Artificial Sequence
  Description of Artificial Sequence: Synthetic peptide
  Seed: KTRPILSPL
KSRPILSPH

SEQ ID NO: 163240 - protein, 9 aa, Artificial Sequence
  Description of Artificial Sequence: Synthetic peptide
  Seed: KTRPILSPL
KSRPILSPI

SEQ ID NO: 163241 - protein, 9 aa, Artificial Sequence
  Description of Artificial Sequence: Synthetic peptide
  Seed: KTRPILSPL
KSRPILSPK

SEQ ID NO: 163242 - protein, 9 aa, Artificial Sequence
  Description of Artificial Sequence: Synthetic peptide
  Seed: KTRPILSPL
KSRPILSPL

SEQ ID NO: 163243 - protein, 10 aa, Artificial Sequence
  Description of Artificial Sequence: Synthetic peptide
  Seed: KTRPILSPLT
KSRPILSPLA

SEQ ID NO: 163244 - protein, 10 aa, Artificial Sequence
  Description of Artificial Sequence: Synthetic peptide
  Seed: KTRPILSPLT
KSRPILSPLC

SEQ ID NO: 163245 - protein, 10 aa, Artificial Sequence
  Description of Artificial Sequence: Synthetic peptide
  Seed: KTRPILSPLT
KSRPILSPLD

SEQ ID NO: 163246 - protein, 10 aa, Artificial Sequence
  Description of Artificial Sequence: Synthetic peptide
  Seed: KTRPILSPLT
KSRPILSPLE

SEQ ID NO: 163247 - protein, 10 aa, Artificial Sequence
  Description of Artificial Sequence: Synthetic peptide
  Seed: KTRPILSPLT
KSRPILSPLF

SEQ ID NO: 163248 - protein, 10 aa, Artificial Sequence
  Description of Artificial Sequence: Synthetic peptide
  Seed: KTRPILSPLT
KSRPILSPLG

SEQ ID NO: 163249 - protein, 10 aa, Artificial Sequence
  Description of Artificial Sequence: Synthetic peptide
  Seed: KTRPILSPLT
KSRPILSPLH

SEQ ID NO: 163250 - protein, 10 aa, Artificial Sequence
  Description of Artificial Sequence: Synthetic peptide
  Seed: KTRPILSPLT
KSRPILSPLI

SEQ ID NO: 163251 - protein, 10 aa, Artificial Sequence
  Description of Artificial Sequence: Synthetic peptide
  Seed: KTRPILSPLT
KSRPILSPLK

SEQ ID NO: 163252 - protein, 10 aa, Artificial Sequence
  Description of Artificial Sequence: Synthetic peptide
  Seed: KTRPILSPLT
KSRPILSPLL

SEQ ID NO: 163253 - protein, 10 aa, Artificial Sequence
  Description of Artificial Sequence: Synthetic peptide
  Seed: KTRPILSPLT
KSRPILSPLM

SEQ ID NO: 163254 - protein, 10 aa, Artificial Sequence
  Description of Artificial Sequence: Synthetic peptide
  Seed: KTRPILSPLT
KSRPILSPLN

SEQ ID NO: 163255 - protein, 10 aa, Artificial Sequence
  Description of Artificial Sequence: Synthetic peptide
  Seed: KTRPILSPLT
KSRPILSPLP

SEQ ID NO: 163256 - protein, 10 aa, Artificial Sequence
  Description of Artificial Sequence: Synthetic peptide
  Seed: KTRPILSPLT
KSRPILSPLQ

SEQ ID NO: 163257 - protein, 10 aa, Artificial Sequence
  Description of Artificial Sequence: Synthetic peptide
  Seed: KTRPILSPLT
KSRPILSPLR

SEQ ID NO: 163258 - protein, 10 aa, Artificial Sequence
  Description of Artificial Sequence: Synthetic peptide
  Seed: KTRPILSPLT
KSRPILSPLS

SEQ ID NO: 163259 - protein, 10 aa, Artificial Sequence
  Description of Artificial Sequence: Synthetic peptide
  Seed: KTRPILSPLT
KSRPILSPLT

SEQ ID NO: 163260 - protein, 11 aa, Artificial Sequence
  Description of Artificial Sequence: Synthetic peptide
  Seed: KTRPILSPLTK
KSRPILSPLTA

SEQ ID NO: 163261 - protein, 11 aa, Artificial Sequence
  Description of Artificial Sequence: Synthetic peptide
  Seed: KTRPILSPLTK
KSRPILSPLTC

SEQ ID NO: 163262 - protein, 11 aa, Artificial Sequence
  Description of Artificial Sequence: Synthetic peptide
  Seed: KTRPILSPLTK
KSRPILSPLTE

SEQ ID NO: 163263 - protein, 11 aa, Artificial Sequence
  Description of Artificial Sequence: Synthetic peptide
  Seed: KTRPILSPLTK
KSRPILSPLTF

SEQ ID NO: 163264 - protein, 11 aa, Artificial Sequence
  Description of Artificial Sequence: Synthetic peptide
  Seed: KTRPILSPLTK
KSRPILSPLTG

SEQ ID NO: 163265 - protein, 11 aa, Artificial Sequence
  Description of Artificial Sequence: Synthetic peptide
  Seed: KTRPILSPLTK
KSRPILSPLTH

SEQ ID NO: 163266 - protein, 11 aa, Artificial Sequence
  Description of Artificial Sequence: Synthetic peptide
  Seed: KTRPILSPLTK
KSRPILSPLTI

SEQ ID NO: 163267 - protein, 11 aa, Artificial Sequence
  Description of Artificial Sequence: Synthetic peptide
  Seed: KTRPILSPLTK
KSRPILSPLTK

SEQ ID NO: 163268 - protein, 11 aa, Artificial Sequence
  Description of Artificial Sequence: Synthetic peptide
  Seed: KTRPILSPLTK
KSRPILSPLTL

SEQ ID NO: 163269 - protein, 11 aa, Artificial Sequence
  Description of Artificial Sequence: Synthetic peptide
  Seed: KTRPILSPLTK
KSRPILSPLTM

SEQ ID NO: 163270 - protein, 11 aa, Artificial Sequence
  Description of Artificial Sequence: Synthetic peptide
  Seed: KTRPILSPLTK
KSRPILSPLTN

SEQ ID NO: 163271 - protein, 11 aa, Artificial Sequence
  Description of Artificial Sequence: Synthetic peptide
  Seed: KTRPILSPLTK
KSRPILSPLTP

SEQ ID NO: 163272 - protein, 11 aa, Artificial Sequence
  Description of Artificial Sequence: Synthetic peptide
  Seed: KTRPILSPLTK
KSRPILSPLTQ

SEQ ID NO: 163273 - protein, 11 aa, Artificial Sequence
  Description of Artificial Sequence: Synthetic peptide
  Seed: KTRPILSPLTK
KSRPILSPLTR

SEQ ID NO: 163274 - protein, 11 aa, Artificial Sequence
  Description of Artificial Sequence: Synthetic peptide
  Seed: KTRPILSPLTK
KSRPILSPLTS

SEQ ID NO: 163275 - protein, 11 aa, Artificial Sequence
  Description of Artificial Sequence: Synthetic peptide
  Seed: KTRPILSPLTK
KSRPILSPLTT

SEQ ID NO: 163276 - protein, 11 aa, Artificial Sequence
  Description of Artificial Sequence: Synthetic peptide
  Seed: KTRPILSPLTK
KSRPILSPLTV

SEQ ID NO: 163277 - protein, 11 aa, Artificial Sequence
  Description of Artificial Sequence: Synthetic peptide
  Seed: KTRPILSPLTK
KSRPILSPLTY

SEQ ID NO: 163278 - protein, 10 aa, Artificial Sequence
  Description of Artificial Sequence: Synthetic peptide
  Seed: KTRPILSPLT
KSRPILSPLV

SEQ ID NO: 163279 - protein, 10 aa, Artificial Sequence
  Description of Artificial Sequence: Synthetic peptide
  Seed: KTRPILSPLT
KSRPILSPLW

SEQ ID NO: 163280 - protein, 10 aa, Artificial Sequence
  Description of Artificial Sequence: Synthetic peptide
  Seed: KTRPILSPLT
KSRPILSPLY

SEQ ID NO: 163281 - protein, 9 aa, Artificial Sequence
  Description of Artificial Sequence: Synthetic peptide
  Seed: KTRPILSPL
KSRPILSPM

SEQ ID NO: 163282 - protein, 9 aa, Artificial Sequence
  Description of Artificial Sequence: Synthetic peptide
  Seed: KTRPILSPL
KSRPILSPN

SEQ ID NO: 163283 - protein, 9 aa, Artificial Sequence
  Description of Artificial Sequence: Synthetic peptide
  Seed: KTRPILSPL
KSRPILSPP

SEQ ID NO: 163284 - protein, 9 aa, Artificial Sequence
  Description of Artificial Sequence: Synthetic peptide
  Seed: KTRPILSPL
KSRPILSPQ

SEQ ID NO: 163285 - protein, 9 aa, Artificial Sequence
  Description of Artificial Sequence: Synthetic peptide
  Seed: KTRPILSPL
KSRPILSPR

SEQ ID NO: 163286 - protein, 9 aa, Artificial Sequence
  Description of Artificial Sequence: Synthetic peptide
  Seed: KTRPILSPL
KSRPILSPS

SEQ ID NO: 163287 - protein, 9 aa, Artificial Sequence
  Description of Artificial Sequence: Synthetic peptide
  Seed: KTRPILSPL
KSRPILSPT

SEQ ID NO: 163288 - protein, 9 aa, Artificial Sequence
  Description of Artificial Sequence: Synthetic peptide
  Seed: KTRPILSPL
KSRPILSPV

SEQ ID NO: 163289 - protein, 8 aa, Artificial Sequence
  Description of Artificial Sequence: Synthetic peptide
  Seed: KTRPILSP
KSRPILSQ

SEQ ID NO: 163290 - protein, 8 aa, Artificial Sequence
  Description of Artificial Sequence: Synthetic peptide
  Seed: KTRPILSP
KSRPILSR

SEQ ID NO: 163291 - protein, 8 aa, Artificial Sequence
  Description of Artificial Sequence: Synthetic peptide
  Seed: KTRPILSP
KSRPILSS

SEQ ID NO: 163292 - protein, 8 aa, Artificial Sequence
  Description of Artificial Sequence: Synthetic peptide
  Seed: KTRPILSP
KSRPILST

SEQ ID NO: 163293 - protein, 8 aa, Artificial Sequence
  Description of Artificial Sequence: Synthetic peptide
  Seed: KTRPILSP
KSRPILSV

SEQ ID NO: 163294 - protein, 8 aa, Artificial Sequence
  Description of Artificial Sequence: Synthetic peptide
  Seed: KTRPILSP
KSRPILSW

SEQ ID NO: 163295 - protein, 8 aa, Artificial Sequence
  Description of Artificial Sequence: Synthetic peptide
  Seed: KTRPILSP
KSRPILSY

SEQ ID NO: 163296 - protein, 8 aa, Artificial Sequence
  Description of Artificial Sequence: Synthetic peptide
  Seed: KTRPILSP
KTRPILSA

SEQ ID NO: 163297 - protein, 8 aa, Artificial Sequence
  Description of Artificial Sequence: Synthetic peptide
  Seed: KTRPILSP
KTRPILSC

SEQ ID NO: 163298 - protein, 8 aa, Artificial Sequence
  Description of Artificial Sequence: Synthetic peptide
  Seed: KTRPILSP
KTRPILSE

SEQ ID NO: 163299 - protein, 8 aa, Artificial Sequence
  Description of Artificial Sequence: Synthetic peptide
  Seed: KTRPILSP
KTRPILSF

SEQ ID NO: 163300 - protein, 8 aa, Artificial Sequence
  Description of Artificial Sequence: Synthetic peptide
  Seed: KTRPILSP
KTRPILSG

SEQ ID NO: 163301 - protein, 8 aa, Artificial Sequence
  Description of Artificial Sequence: Synthetic peptide
  Seed: KTRPILSP
KTRPILSH

SEQ ID NO: 163302 - protein, 8 aa, Artificial Sequence
  Description of Artificial Sequence: Synthetic peptide
  Seed: KTRPILSP
KTRPILSI

SEQ ID NO: 163303 - protein, 8 aa, Artificial Sequence
  Description of Artificial Sequence: Synthetic peptide
  Seed: KTRPILSP
KTRPILSK

SEQ ID NO: 163304 - protein, 8 aa, Artificial Sequence
  Description of Artificial Sequence: Synthetic peptide
  Seed: KTRPILSP
KTRPILSL

SEQ ID NO: 163305 - protein, 8 aa, Artificial Sequence
  Description of Artificial Sequence: Synthetic peptide
  Seed: KTRPILSP
KTRPILSM

SEQ ID NO: 163306 - protein, 8 aa, Artificial Sequence
  Description of Artificial Sequence: Synthetic peptide
  Seed: KTRPILSP
KTRPILSN

SEQ ID NO: 163307 - protein, 9 aa, Artificial Sequence
  Description of Artificial Sequence: Synthetic peptide
  Seed: KTRPILSPL
KTRPILSPA

SEQ ID NO: 163308 - protein, 9 aa, Artificial Sequence
  Description of Artificial Sequence: Synthetic peptide
  Seed: KTRPILSPL
KTRPILSPC

SEQ ID NO: 163309 - protein, 9 aa, Artificial Sequence
  Description of Artificial Sequence: Synthetic peptide
  Seed: KTRPILSPL
KTRPILSPD

SEQ ID NO: 163310 - protein, 9 aa, Artificial Sequence
  Description of Artificial Sequence: Synthetic peptide
  Seed: KTRPILSPL
KTRPILSPE

SEQ ID NO: 163311 - protein, 9 aa, Artificial Sequence
  Description of Artificial Sequence: Synthetic peptide
  Seed: KTRPILSPL
KTRPILSPG

SEQ ID NO: 163312 - protein, 9 aa, Artificial Sequence
  Description of Artificial Sequence: Synthetic peptide
  Seed: KTRPILSPL
KTRPILSPH

SEQ ID NO: 163313 - protein, 9 aa, Artificial Sequence
  Description of Artificial Sequence: Synthetic peptide
  Seed: KTRPILSPL
KTRPILSPI

SEQ ID NO: 163314 - protein, 9 aa, Artificial Sequence
  Description of Artificial Sequence: Synthetic peptide
  Seed: KTRPILSPL
KTRPILSPK

SEQ ID NO: 163315 - protein, 10 aa, Artificial Sequence
  Description of Artificial Sequence: Synthetic peptide
  Seed: KTRPILSPLT
KTRPILSPLA

SEQ ID NO: 163316 - protein, 10 aa, Artificial Sequence
  Description of Artificial Sequence: Synthetic peptide
  Seed: KTRPILSPLT
KTRPILSPLC

SEQ ID NO: 163317 - protein, 10 aa, Artificial Sequence
  Description of Artificial Sequence: Synthetic peptide
  Seed: KTRPILSPLT
KTRPILSPLD

SEQ ID NO: 163318 - protein, 10 aa, Artificial Sequence
  Description of Artificial Sequence: Synthetic peptide
  Seed: KTRPILSPLT
KTRPILSPLE

SEQ ID NO: 163319 - protein, 10 aa, Artificial Sequence
  Description of Artificial Sequence: Synthetic peptide
  Seed: KTRPILSPLT
KTRPILSPLF

SEQ ID NO: 163320 - protein, 10 aa, Artificial Sequence
  Description of Artificial Sequence: Synthetic peptide
  Seed: KTRPILSPLT
KTRPILSPLG

SEQ ID NO: 163321 - protein, 10 aa, Artificial Sequence
  Description of Artificial Sequence: Synthetic peptide
  Seed: KTRPILSPLT
KTRPILSPLH

SEQ ID NO: 163322 - protein, 10 aa, Artificial Sequence
  Description of Artificial Sequence: Synthetic peptide
  Seed: KTRPILSPLT
KTRPILSPLI

SEQ ID NO: 163323 - protein, 10 aa, Artificial Sequence
  Description of Artificial Sequence: Synthetic peptide
  Seed: KTRPILSPLT
KTRPILSPLK

SEQ ID NO: 163324 - protein, 10 aa, Artificial Sequence
  Description of Artificial Sequence: Synthetic peptide
  Seed: KTRPILSPLT
KTRPILSPLL

SEQ ID NO: 163325 - protein, 10 aa, Artificial Sequence
  Description of Artificial Sequence: Synthetic peptide
  Seed: KTRPILSPLT
KTRPILSPLM

SEQ ID NO: 163326 - protein, 10 aa, Artificial Sequence
  Description of Artificial Sequence: Synthetic peptide
  Seed: KTRPILSPLT
KTRPILSPLN

SEQ ID NO: 163327 - protein, 10 aa, Artificial Sequence
  Description of Artificial Sequence: Synthetic peptide
  Seed: KTRPILSPLT
KTRPILSPLP

SEQ ID NO: 163328 - protein, 10 aa, Artificial Sequence
  Description of Artificial Sequence: Synthetic peptide
  Seed: KTRPILSPLT
KTRPILSPLQ

SEQ ID NO: 163329 - protein, 10 aa, Artificial Sequence
  Description of Artificial Sequence: Synthetic peptide
  Seed: KTRPILSPLT
KTRPILSPLR

SEQ ID NO: 163330 - protein, 10 aa, Artificial Sequence
  Description of Artificial Sequence: Synthetic peptide
  Seed: KTRPILSPLT
KTRPILSPLS

SEQ ID NO: 163331 - protein, 11 aa, Artificial Sequence
  Description of Artificial Sequence: Synthetic peptide
  Seed: KTRPILSPLTK
KTRPILSPLTA

SEQ ID NO: 163332 - protein, 11 aa, Artificial Sequence
  Description of Artificial Sequence: Synthetic peptide
  Seed: KTRPILSPLTK
KTRPILSPLTC

SEQ ID NO: 163333 - protein, 11 aa, Artificial Sequence
  Description of Artificial Sequence: Synthetic peptide
  Seed: KTRPILSPLTK
KTRPILSPLTE

SEQ ID NO: 163334 - protein, 11 aa, Artificial Sequence
  Description of Artificial Sequence: Synthetic peptide
  Seed: KTRPILSPLTK
KTRPILSPLTF

SEQ ID NO: 163335 - protein, 11 aa, Artificial Sequence
  Description of Artificial Sequence: Synthetic peptide
  Seed: KTRPILSPLTK
KTRPILSPLTG

SEQ ID NO: 163336 - protein, 11 aa, Artificial Sequence
  Description of Artificial Sequence: Synthetic peptide
  Seed: KTRPILSPLTK
KTRPILSPLTH

SEQ ID NO: 163337 - protein, 11 aa, Artificial Sequence
  Description of Artificial Sequence: Synthetic peptide
  Seed: KTRPILSPLTK
KTRPILSPLTI

SEQ ID NO: 163338 - protein, 11 aa, Artificial Sequence
  Description of Artificial Sequence: Synthetic peptide
  Seed: KTRPILSPLTK
KTRPILSPLTL

SEQ ID NO: 163339 - protein, 11 aa, Artificial Sequence
  Description of Artificial Sequence: Synthetic peptide
  Seed: KTRPILSPLTK
KTRPILSPLTM

SEQ ID NO: 163340 - protein, 11 aa, Artificial Sequence
  Description of Artificial Sequence: Synthetic peptide
  Seed: KTRPILSPLTK
KTRPILSPLTN

SEQ ID NO: 163341 - protein, 11 aa, Artificial Sequence
  Description of Artificial Sequence: Synthetic peptide
  Seed: KTRPILSPLTK
KTRPILSPLTP

SEQ ID NO: 163342 - protein, 11 aa, Artificial Sequence
  Description of Artificial Sequence: Synthetic peptide
  Seed: KTRPILSPLTK
KTRPILSPLTQ

SEQ ID NO: 163343 - protein, 11 aa, Artificial Sequence
  Description of Artificial Sequence: Synthetic peptide
  Seed: KTRPILSPLTK
KTRPILSPLTR

SEQ ID NO: 163344 - protein, 11 aa, Artificial Sequence
  Description of Artificial Sequence: Synthetic peptide
  Seed: KTRPILSPLTK
KTRPILSPLTS

SEQ ID NO: 163345 - protein, 11 aa, Artificial Sequence
  Description of Artificial Sequence: Synthetic peptide
  Seed: KTRPILSPLTK
KTRPILSPLTT

SEQ ID NO: 163346 - protein, 11 aa, Artificial Sequence
  Description of Artificial Sequence: Synthetic peptide
  Seed: KTRPILSPLTK
KTRPILSPLTV

SEQ ID NO: 163347 - protein, 11 aa, Artificial Sequence
  Description of Artificial Sequence: Synthetic peptide
  Seed: KTRPILSPLTK
KTRPILSPLTY

SEQ ID NO: 163348 - protein, 10 aa, Artificial Sequence
  Description of Artificial Sequence: Synthetic peptide
  Seed: KTRPILSPLT
KTRPILSPLV

SEQ ID NO: 163349 - protein, 10 aa, Artificial Sequence
  Description of Artificial Sequence: Synthetic peptide
  Seed: KTRPILSPLT
KTRPILSPLW

SEQ ID NO: 163350 - protein, 10 aa, Artificial Sequence
  Description of Artificial Sequence: Synthetic peptide
  Seed: KTRPILSPLT
KTRPILSPLY

SEQ ID NO: 163351 - protein, 9 aa, Artificial Sequence
  Description of Artificial Sequence: Synthetic peptide
  Seed: KTRPILSPL
KTRPILSPM

SEQ ID NO: 163352 - protein, 9 aa, Artificial Sequence
  Description of Artificial Sequence: Synthetic peptide
  Seed: KTRPILSPL
KTRPILSPN

SEQ ID NO: 163353 - protein, 9 aa, Artificial Sequence
  Description of Artificial Sequence: Synthetic peptide
  Seed: KTRPILSPL
KTRPILSPP

SEQ ID NO: 163354 - protein, 9 aa, Artificial Sequence
  Description of Artificial Sequence: Synthetic peptide
  Seed: KTRPILSPL
KTRPILSPQ

SEQ ID NO: 163355 - protein, 9 aa, Artificial Sequence
  Description of Artificial Sequence: Synthetic peptide
  Seed: KTRPILSPL
KTRPILSPR

SEQ ID NO: 163356 - protein, 9 aa, Artificial Sequence
  Description of Artificial Sequence: Synthetic peptide
  Seed: KTRPILSPL
KTRPILSPS

SEQ ID NO: 163357 - protein, 9 aa, Artificial Sequence
  Description of Artificial Sequence: Synthetic peptide
  Seed: KTRPILSPL
KTRPILSPT

SEQ ID NO: 163358 - protein, 9 aa, Artificial Sequence
  Description of Artificial Sequence: Synthetic peptide
  Seed: KTRPILSPL
KTRPILSPV

SEQ ID NO: 163359 - protein, 9 aa, Artificial Sequence
  Description of Artificial Sequence: Synthetic peptide
  Seed: KTRPILSPL
KTRPILSPY

SEQ ID NO: 163360 - protein, 8 aa, Artificial Sequence
  Description of Artificial Sequence: Synthetic peptide
  Seed: KTRPILSP
KTRPILSQ

SEQ ID NO: 163361 - protein, 8 aa, Artificial Sequence
  Description of Artificial Sequence: Synthetic peptide
  Seed: KTRPILSP
KTRPILSR

SEQ ID NO: 163362 - protein, 8 aa, Artificial Sequence
  Description of Artificial Sequence: Synthetic peptide
  Seed: KTRPILSP
KTRPILSS

SEQ ID NO: 163363 - protein, 8 aa, Artificial Sequence
  Description of Artificial Sequence: Synthetic peptide
  Seed: KTRPILSP
KTRPILST

SEQ ID NO: 163364 - protein, 8 aa, Artificial Sequence
  Description of Artificial Sequence: Synthetic peptide
  Seed: KTRPILSP
KTRPILSV

SEQ ID NO: 163365 - protein, 8 aa, Artificial Sequence
  Description of Artificial Sequence: Synthetic peptide
  Seed: KTRPILSP
KTRPILSW

SEQ ID NO: 163366 - protein, 8 aa, Artificial Sequence
  Description of Artificial Sequence: Synthetic peptide
  Seed: KTRPILSP
KTRPILSY

SEQ ID NO: 163367 - protein, 8 aa, Artificial Sequence
  Description of Artificial Sequence: Synthetic peptide
  Seed: KTRPILSP
KVRPILSA

SEQ ID NO: 163368 - protein, 8 aa, Artificial Sequence
  Description of Artificial Sequence: Synthetic peptide
  Seed: KTRPILSP
KVRPILSC

SEQ ID NO: 163369 - protein, 8 aa, Artificial Sequence
  Description of Artificial Sequence: Synthetic peptide
  Seed: KTRPILSP
KVRPILSE

SEQ ID NO: 163370 - protein, 8 aa, Artificial Sequence
  Description of Artificial Sequence: Synthetic peptide
  Seed: KTRPILSP
KVRPILSF

SEQ ID NO: 163371 - protein, 8 aa, Artificial Sequence
  Description of Artificial Sequence: Synthetic peptide
  Seed: KTRPILSP
KVRPILSG

SEQ ID NO: 163372 - protein, 8 aa, Artificial Sequence
  Description of Artificial Sequence: Synthetic peptide
  Seed: KTRPILSP
KVRPILSH

SEQ ID NO: 163373 - protein, 8 aa, Artificial Sequence
  Description of Artificial Sequence: Synthetic peptide
  Seed: KTRPILSP
KVRPILSI

SEQ ID NO: 163374 - protein, 8 aa, Artificial Sequence
  Description of Artificial Sequence: Synthetic peptide
  Seed: KTRPILSP
KVRPILSK

SEQ ID NO: 163375 - protein, 8 aa, Artificial Sequence
  Description of Artificial Sequence: Synthetic peptide
  Seed: KTRPILSP
KVRPILSL

SEQ ID NO: 163376 - protein, 8 aa, Artificial Sequence
  Description of Artificial Sequence: Synthetic peptide
  Seed: KTRPILSP
KVRPILSM

SEQ ID NO: 163377 - protein, 8 aa, Artificial Sequence
  Description of Artificial Sequence: Synthetic peptide
  Seed: KTRPILSP
KVRPILSN

SEQ ID NO: 163378 - protein, 8 aa, Artificial Sequence
  Description of Artificial Sequence: Synthetic peptide
  Seed: KTRPILSP
KVRPILSP

SEQ ID NO: 163379 - protein, 9 aa, Artificial Sequence
  Description of Artificial Sequence: Synthetic peptide
  Seed: KTRPILSPL
KVRPILSPA

SEQ ID NO: 163380 - protein, 9 aa, Artificial Sequence
  Description of Artificial Sequence: Synthetic peptide
  Seed: KTRPILSPL
KVRPILSPC

SEQ ID NO: 163381 - protein, 9 aa, Artificial Sequence
  Description of Artificial Sequence: Synthetic peptide
  Seed: KTRPILSPL
KVRPILSPD

SEQ ID NO: 163382 - protein, 9 aa, Artificial Sequence
  Description of Artificial Sequence: Synthetic peptide
  Seed: KTRPILSPL
KVRPILSPE

SEQ ID NO: 163383 - protein, 9 aa, Artificial Sequence
  Description of Artificial Sequence: Synthetic peptide
  Seed: KTRPILSPL
KVRPILSPF

SEQ ID NO: 163384 - protein, 9 aa, Artificial Sequence
  Description of Artificial Sequence: Synthetic peptide
  Seed: KTRPILSPL
KVRPILSPG

SEQ ID NO: 163385 - protein, 9 aa, Artificial Sequence
  Description of Artificial Sequence: Synthetic peptide
  Seed: KTRPILSPL
KVRPILSPH

SEQ ID NO: 163386 - protein, 9 aa, Artificial Sequence
  Description of Artificial Sequence: Synthetic peptide
  Seed: KTRPILSPL
KVRPILSPI

SEQ ID NO: 163387 - protein, 9 aa, Artificial Sequence
  Description of Artificial Sequence: Synthetic peptide
  Seed: KTRPILSPL
KVRPILSPK

SEQ ID NO: 163388 - protein, 9 aa, Artificial Sequence
  Description of Artificial Sequence: Synthetic peptide
  Seed: KTRPILSPL
KVRPILSPL

SEQ ID NO: 163389 - protein, 10 aa, Artificial Sequence
  Description of Artificial Sequence: Synthetic peptide
  Seed: KTRPILSPLT
KVRPILSPLA

SEQ ID NO: 163390 - protein, 10 aa, Artificial Sequence
  Description of Artificial Sequence: Synthetic peptide
  Seed: KTRPILSPLT
KVRPILSPLC

SEQ ID NO: 163391 - protein, 10 aa, Artificial Sequence
  Description of Artificial Sequence: Synthetic peptide
  Seed: KTRPILSPLT
KVRPILSPLD

SEQ ID NO: 163392 - protein, 10 aa, Artificial Sequence
  Description of Artificial Sequence: Synthetic peptide
  Seed: KTRPILSPLT
KVRPILSPLE

SEQ ID NO: 163393 - protein, 10 aa, Artificial Sequence
  Description of Artificial Sequence: Synthetic peptide
  Seed: KTRPILSPLT
KVRPILSPLF

SEQ ID NO: 163394 - protein, 10 aa, Artificial Sequence
  Description of Artificial Sequence: Synthetic peptide
  Seed: KTRPILSPLT
KVRPILSPLG

SEQ ID NO: 163395 - protein, 10 aa, Artificial Sequence
  Description of Artificial Sequence: Synthetic peptide
  Seed: KTRPILSPLT
KVRPILSPLH

SEQ ID NO: 163396 - protein, 10 aa, Artificial Sequence
  Description of Artificial Sequence: Synthetic peptide
  Seed: KTRPILSPLT
KVRPILSPLI

SEQ ID NO: 163397 - protein, 10 aa, Artificial Sequence
  Description of Artificial Sequence: Synthetic peptide
  Seed: KTRPILSPLT
KVRPILSPLK

SEQ ID NO: 163398 - protein, 10 aa, Artificial Sequence
  Description of Artificial Sequence: Synthetic peptide
  Seed: KTRPILSPLT
KVRPILSPLL

SEQ ID NO: 163399 - protein, 10 aa, Artificial Sequence
  Description of Artificial Sequence: Synthetic peptide
  Seed: KTRPILSPLT
KVRPILSPLM

SEQ ID NO: 163400 - protein, 10 aa, Artificial Sequence
  Description of Artificial Sequence: Synthetic peptide
  Seed: KTRPILSPLT
KVRPILSPLN

SEQ ID NO: 163401 - protein, 10 aa, Artificial Sequence
  Description of Artificial Sequence: Synthetic peptide
  Seed: KTRPILSPLT
KVRPILSPLP

SEQ ID NO: 163402 - protein, 10 aa, Artificial Sequence
  Description of Artificial Sequence: Synthetic peptide
  Seed: KTRPILSPLT
KVRPILSPLQ

SEQ ID NO: 163403 - protein, 10 aa, Artificial Sequence
  Description of Artificial Sequence: Synthetic peptide
  Seed: KTRPILSPLT
KVRPILSPLR

SEQ ID NO: 163404 - protein, 10 aa, Artificial Sequence
  Description of Artificial Sequence: Synthetic peptide
  Seed: KTRPILSPLT
KVRPILSPLS

SEQ ID NO: 163405 - protein, 10 aa, Artificial Sequence
  Description of Artificial Sequence: Synthetic peptide
  Seed: KTRPILSPLT
KVRPILSPLT

SEQ ID NO: 163406 - protein, 11 aa, Artificial Sequence
  Description of Artificial Sequence: Synthetic peptide
  Seed: KTRPILSPLTK
KVRPILSPLTA

SEQ ID NO: 163407 - protein, 11 aa, Artificial Sequence
  Description of Artificial Sequence: Synthetic peptide
  Seed: KTRPILSPLTK
KVRPILSPLTC

SEQ ID NO: 163408 - protein, 11 aa, Artificial Sequence
  Description of Artificial Sequence: Synthetic peptide
  Seed: KTRPILSPLTK
KVRPILSPLTE

SEQ ID NO: 163409 - protein, 11 aa, Artificial Sequence
  Description of Artificial Sequence: Synthetic peptide
  Seed: KTRPILSPLTK
KVRPILSPLTF

SEQ ID NO: 163410 - protein, 11 aa, Artificial Sequence
  Description of Artificial Sequence: Synthetic peptide
  Seed: KTRPILSPLTK
KVRPILSPLTG

SEQ ID NO: 163411 - protein, 11 aa, Artificial Sequence
  Description of Artificial Sequence: Synthetic peptide
  Seed: KTRPILSPLTK
KVRPILSPLTH

SEQ ID NO: 163412 - protein, 11 aa, Artificial Sequence
  Description of Artificial Sequence: Synthetic peptide
  Seed: KTRPILSPLTK
KVRPILSPLTI

SEQ ID NO: 163413 - protein, 11 aa, Artificial Sequence
  Description of Artificial Sequence: Synthetic peptide
  Seed: KTRPILSPLTK
KVRPILSPLTL

SEQ ID NO: 163414 - protein, 11 aa, Artificial Sequence
  Description of Artificial Sequence: Synthetic peptide
  Seed: KTRPILSPLTK
KVRPILSPLTM

SEQ ID NO: 163415 - protein, 11 aa, Artificial Sequence
  Description of Artificial Sequence: Synthetic peptide
  Seed: KTRPILSPLTK
KVRPILSPLTN

SEQ ID NO: 163416 - protein, 11 aa, Artificial Sequence
  Description of Artificial Sequence: Synthetic peptide
  Seed: KTRPILSPLTK
KVRPILSPLTP

SEQ ID NO: 163417 - protein, 11 aa, Artificial Sequence
  Description of Artificial Sequence: Synthetic peptide
  Seed: KTRPILSPLTK
KVRPILSPLTQ

SEQ ID NO: 163418 - protein, 11 aa, Artificial Sequence
  Description of Artificial Sequence: Synthetic peptide
  Seed: KTRPILSPLTK
KVRPILSPLTR

SEQ ID NO: 163419 - protein, 11 aa, Artificial Sequence
  Description of Artificial Sequence: Synthetic peptide
  Seed: KTRPILSPLTK
KVRPILSPLTS

SEQ ID NO: 163420 - protein, 11 aa, Artificial Sequence
  Description of Artificial Sequence: Synthetic peptide
  Seed: KTRPILSPLTK
KVRPILSPLTT

SEQ ID NO: 163421 - protein, 11 aa, Artificial Sequence
  Description of Artificial Sequence: Synthetic peptide
  Seed: KTRPILSPLTK
KVRPILSPLTV

SEQ ID NO: 163422 - protein, 11 aa, Artificial Sequence
  Description of Artificial Sequence: Synthetic peptide
  Seed: KTRPILSPLTK
KVRPILSPLTY

SEQ ID NO: 163423 - protein, 10 aa, Artificial Sequence
  Description of Artificial Sequence: Synthetic peptide
  Seed: KTRPILSPLT
KVRPILSPLV

SEQ ID NO: 163424 - protein, 10 aa, Artificial Sequence
  Description of Artificial Sequence: Synthetic peptide
  Seed: KTRPILSPLT
KVRPILSPLW

SEQ ID NO: 163425 - protein, 10 aa, Artificial Sequence
  Description of Artificial Sequence: Synthetic peptide
  Seed: KTRPILSPLT
KVRPILSPLY

SEQ ID NO: 163426 - protein, 9 aa, Artificial Sequence
  Description of Artificial Sequence: Synthetic peptide
  Seed: KTRPILSPL
KVRPILSPM

SEQ ID NO: 163427 - protein, 9 aa, Artificial Sequence
  Description of Artificial Sequence: Synthetic peptide
  Seed: KTRPILSPL
KVRPILSPN

SEQ ID NO: 163428 - protein, 9 aa, Artificial Sequence
  Description of Artificial Sequence: Synthetic peptide
  Seed: KTRPILSPL
KVRPILSPP

SEQ ID NO: 163429 - protein, 9 aa, Artificial Sequence
  Description of Artificial Sequence: Synthetic peptide
  Seed: KTRPILSPL
KVRPILSPQ

SEQ ID NO: 163430 - protein, 9 aa, Artificial Sequence
  Description of Artificial Sequence: Synthetic peptide
  Seed: KTRPILSPL
KVRPILSPR

SEQ ID NO: 163431 - protein, 9 aa, Artificial Sequence
  Description of Artificial Sequence: Synthetic peptide
  Seed: KTRPILSPL
KVRPILSPS

SEQ ID NO: 163432 - protein, 9 aa, Artificial Sequence
  Description of Artificial Sequence: Synthetic peptide
  Seed: KTRPILSPL
KVRPILSPT

SEQ ID NO: 163433 - protein, 9 aa, Artificial Sequence
  Description of Artificial Sequence: Synthetic peptide
  Seed: KTRPILSPL
KVRPILSPW

SEQ ID NO: 163434 - protein, 9 aa, Artificial Sequence
  Description of Artificial Sequence: Synthetic peptide
  Seed: KTRPILSPL
KVRPILSPY

SEQ ID NO: 163435 - protein, 8 aa, Artificial Sequence
  Description of Artificial Sequence: Synthetic peptide
  Seed: KTRPILSP
KVRPILSQ

SEQ ID NO: 163436 - protein, 8 aa, Artificial Sequence
  Description of Artificial Sequence: Synthetic peptide
  Seed: KTRPILSP
KVRPILSR

SEQ ID NO: 163437 - protein, 8 aa, Artificial Sequence
  Description of Artificial Sequence: Synthetic peptide
  Seed: KTRPILSP
KVRPILSS

SEQ ID NO: 163438 - protein, 8 aa, Artificial Sequence
  Description of Artificial Sequence: Synthetic peptide
  Seed: KTRPILSP
KVRPILST

SEQ ID NO: 163439 - protein, 8 aa, Artificial Sequence
  Description of Artificial Sequence: Synthetic peptide
  Seed: KTRPILSP
KVRPILSV

SEQ ID NO: 163440 - protein, 8 aa, Artificial Sequence
  Description of Artificial Sequence: Synthetic peptide
  Seed: KTRPILSP
KVRPILSW

SEQ ID NO: 163441 - protein, 8 aa, Artificial Sequence
  Description of Artificial Sequence: Synthetic peptide
  Seed: KTRPILSP
KVRPILSY

SEQ ID NO: 163442 - protein, 8 aa, Artificial Sequence
  Description of Artificial Sequence: Synthetic peptide
  Seed: KTRPILSP
KWRPILSA

SEQ ID NO: 163443 - protein, 8 aa, Artificial Sequence
  Description of Artificial Sequence: Synthetic peptide
  Seed: KTRPILSP
KWRPILSI

SEQ ID NO: 163444 - protein, 8 aa, Artificial Sequence
  Description of Artificial Sequence: Synthetic peptide
  Seed: KTRPILSP
KWRPILSK

SEQ ID NO: 163445 - protein, 8 aa, Artificial Sequence
  Description of Artificial Sequence: Synthetic peptide
  Seed: KTRPILSP
KWRPILSL

SEQ ID NO: 163446 - protein, 8 aa, Artificial Sequence
  Description of Artificial Sequence: Synthetic peptide
  Seed: KTRPILSP
KWRPILSM

SEQ ID NO: 163447 - protein, 9 aa, Artificial Sequence
  Description of Artificial Sequence: Synthetic peptide
  Seed: KTRPILSPL
KWRPILSPA

SEQ ID NO: 163448 - protein, 9 aa, Artificial Sequence
  Description of Artificial Sequence: Synthetic peptide
  Seed: KTRPILSPL
KWRPILSPC

SEQ ID NO: 163449 - protein, 9 aa, Artificial Sequence
  Description of Artificial Sequence: Synthetic peptide
  Seed: KTRPILSPL
KWRPILSPD

SEQ ID NO: 163450 - protein, 9 aa, Artificial Sequence
  Description of Artificial Sequence: Synthetic peptide
  Seed: KTRPILSPL
KWRPILSPE

SEQ ID NO: 163451 - protein, 9 aa, Artificial Sequence
  Description of Artificial Sequence: Synthetic peptide
  Seed: KTRPILSPL
KWRPILSPF

SEQ ID NO: 163452 - protein, 9 aa, Artificial Sequence
  Description of Artificial Sequence: Synthetic peptide
  Seed: KTRPILSPL
KWRPILSPG

SEQ ID NO: 163453 - protein, 9 aa, Artificial Sequence
  Description of Artificial Sequence: Synthetic peptide
  Seed: KTRPILSPL
KWRPILSPH

SEQ ID NO: 163454 - protein, 9 aa, Artificial Sequence
  Description of Artificial Sequence: Synthetic peptide
  Seed: KTRPILSPL
KWRPILSPI

SEQ ID NO: 163455 - protein, 9 aa, Artificial Sequence
  Description of Artificial Sequence: Synthetic peptide
  Seed: KTRPILSPL
KWRPILSPK

SEQ ID NO: 163456 - protein, 9 aa, Artificial Sequence
  Description of Artificial Sequence: Synthetic peptide
  Seed: KTRPILSPL
KWRPILSPL

SEQ ID NO: 163457 - protein, 10 aa, Artificial Sequence
  Description of Artificial Sequence: Synthetic peptide
  Seed: KTRPILSPLT
KWRPILSPLA

SEQ ID NO: 163458 - protein, 10 aa, Artificial Sequence
  Description of Artificial Sequence: Synthetic peptide
  Seed: KTRPILSPLT
KWRPILSPLC

SEQ ID NO: 163459 - protein, 10 aa, Artificial Sequence
  Description of Artificial Sequence: Synthetic peptide
  Seed: KTRPILSPLT
KWRPILSPLD

SEQ ID NO: 163460 - protein, 10 aa, Artificial Sequence
  Description of Artificial Sequence: Synthetic peptide
  Seed: KTRPILSPLT
KWRPILSPLE

SEQ ID NO: 163461 - protein, 10 aa, Artificial Sequence
  Description of Artificial Sequence: Synthetic peptide
  Seed: KTRPILSPLT
KWRPILSPLF

SEQ ID NO: 163462 - protein, 10 aa, Artificial Sequence
  Description of Artificial Sequence: Synthetic peptide
  Seed: KTRPILSPLT
KWRPILSPLG

SEQ ID NO: 163463 - protein, 10 aa, Artificial Sequence
  Description of Artificial Sequence: Synthetic peptide
  Seed: KTRPILSPLT
KWRPILSPLH

SEQ ID NO: 163464 - protein, 10 aa, Artificial Sequence
  Description of Artificial Sequence: Synthetic peptide
  Seed: KTRPILSPLT
KWRPILSPLI

SEQ ID NO: 163465 - protein, 10 aa, Artificial Sequence
  Description of Artificial Sequence: Synthetic peptide
  Seed: KTRPILSPLT
KWRPILSPLK

SEQ ID NO: 163466 - protein, 10 aa, Artificial Sequence
  Description of Artificial Sequence: Synthetic peptide
  Seed: KTRPILSPLT
KWRPILSPLL

SEQ ID NO: 163467 - protein, 10 aa, Artificial Sequence
  Description of Artificial Sequence: Synthetic peptide
  Seed: KTRPILSPLT
KWRPILSPLM

SEQ ID NO: 163468 - protein, 10 aa, Artificial Sequence
  Description of Artificial Sequence: Synthetic peptide
  Seed: KTRPILSPLT
KWRPILSPLN

SEQ ID NO: 163469 - protein, 10 aa, Artificial Sequence
  Description of Artificial Sequence: Synthetic peptide
  Seed: KTRPILSPLT
KWRPILSPLP

SEQ ID NO: 163470 - protein, 10 aa, Artificial Sequence
  Description of Artificial Sequence: Synthetic peptide
  Seed: KTRPILSPLT
KWRPILSPLQ

SEQ ID NO: 163471 - protein, 10 aa, Artificial Sequence
  Description of Artificial Sequence: Synthetic peptide
  Seed: KTRPILSPLT
KWRPILSPLR

SEQ ID NO: 163472 - protein, 10 aa, Artificial Sequence
  Description of Artificial Sequence: Synthetic peptide
  Seed: KTRPILSPLT
KWRPILSPLS

SEQ ID NO: 163473 - protein, 10 aa, Artificial Sequence
  Description of Artificial Sequence: Synthetic peptide
  Seed: KTRPILSPLT
KWRPILSPLT

SEQ ID NO: 163474 - protein, 11 aa, Artificial Sequence
  Description of Artificial Sequence: Synthetic peptide
  Seed: KTRPILSPLTK
KWRPILSPLTA

SEQ ID NO: 163475 - protein, 11 aa, Artificial Sequence
  Description of Artificial Sequence: Synthetic peptide
  Seed: KTRPILSPLTK
KWRPILSPLTI

SEQ ID NO: 163476 - protein, 11 aa, Artificial Sequence
  Description of Artificial Sequence: Synthetic peptide
  Seed: KTRPILSPLTK
KWRPILSPLTK

SEQ ID NO: 163477 - protein, 11 aa, Artificial Sequence
  Description of Artificial Sequence: Synthetic peptide
  Seed: KTRPILSPLTK
KWRPILSPLTL

SEQ ID NO: 163478 - protein, 11 aa, Artificial Sequence
  Description of Artificial Sequence: Synthetic peptide
  Seed: KTRPILSPLTK
KWRPILSPLTM

SEQ ID NO: 163479 - protein, 11 aa, Artificial Sequence
  Description of Artificial Sequence: Synthetic peptide
  Seed: KTRPILSPLTK
KWRPILSPLTR

SEQ ID NO: 163480 - protein, 11 aa, Artificial Sequence
  Description of Artificial Sequence: Synthetic peptide
  Seed: KTRPILSPLTK
KWRPILSPLTS

SEQ ID NO: 163481 - protein, 11 aa, Artificial Sequence
  Description of Artificial Sequence: Synthetic peptide
  Seed: KTRPILSPLTK
KWRPILSPLTV

SEQ ID NO: 163482 - protein, 10 aa, Artificial Sequence
  Description of Artificial Sequence: Synthetic peptide
  Seed: KTRPILSPLT
KWRPILSPLV

SEQ ID NO: 163483 - protein, 10 aa, Artificial Sequence
  Description of Artificial Sequence: Synthetic peptide
  Seed: KTRPILSPLT
KWRPILSPLW

SEQ ID NO: 163484 - protein, 10 aa, Artificial Sequence
  Description of Artificial Sequence: Synthetic peptide
  Seed: KTRPILSPLT
KWRPILSPLY

SEQ ID NO: 163485 - protein, 9 aa, Artificial Sequence
  Description of Artificial Sequence: Synthetic peptide
  Seed: KTRPILSPL
KWRPILSPM

SEQ ID NO: 163486 - protein, 9 aa, Artificial Sequence
  Description of Artificial Sequence: Synthetic peptide
  Seed: KTRPILSPL
KWRPILSPN

SEQ ID NO: 163487 - protein, 9 aa, Artificial Sequence
  Description of Artificial Sequence: Synthetic peptide
  Seed: KTRPILSPL
KWRPILSPP

SEQ ID NO: 163488 - protein, 9 aa, Artificial Sequence
  Description of Artificial Sequence: Synthetic peptide
  Seed: KTRPILSPL
KWRPILSPQ

SEQ ID NO: 163489 - protein, 9 aa, Artificial Sequence
  Description of Artificial Sequence: Synthetic peptide
  Seed: KTRPILSPL
KWRPILSPR

SEQ ID NO: 163490 - protein, 9 aa, Artificial Sequence
  Description of Artificial Sequence: Synthetic peptide
  Seed: KTRPILSPL
KWRPILSPS

SEQ ID NO: 163491 - protein, 9 aa, Artificial Sequence
  Description of Artificial Sequence: Synthetic peptide
  Seed: KTRPILSPL
KWRPILSPT

SEQ ID NO: 163492 - protein, 9 aa, Artificial Sequence
  Description of Artificial Sequence: Synthetic peptide
  Seed: KTRPILSPL
KWRPILSPV

SEQ ID NO: 163493 - protein, 9 aa, Artificial Sequence
  Description of Artificial Sequence: Synthetic peptide
  Seed: KTRPILSPL
KWRPILSPW

SEQ ID NO: 163494 - protein, 9 aa, Artificial Sequence
  Description of Artificial Sequence: Synthetic peptide
  Seed: KTRPILSPL
KWRPILSPY

SEQ ID NO: 163495 - protein, 8 aa, Artificial Sequence
  Description of Artificial Sequence: Synthetic peptide
  Seed: KTRPILSP
KWRPILSV

SEQ ID NO: 163496 - protein, 8 aa, Artificial Sequence
  Description of Artificial Sequence: Synthetic peptide
  Seed: KTRPILSP
KYRPILSA

SEQ ID NO: 163497 - protein, 8 aa, Artificial Sequence
  Description of Artificial Sequence: Synthetic peptide
  Seed: KTRPILSP
KYRPILSF

SEQ ID NO: 163498 - protein, 8 aa, Artificial Sequence
  Description of Artificial Sequence: Synthetic peptide
  Seed: KTRPILSP
KYRPILSG

SEQ ID NO: 163499 - protein, 8 aa, Artificial Sequence
  Description of Artificial Sequence: Synthetic peptide
  Seed: KTRPILSP
KYRPILSI

SEQ ID NO: 163500 - protein, 8 aa, Artificial Sequence
  Description of Artificial Sequence: Synthetic peptide
  Seed: KTRPILSP
KYRPILSK

SEQ ID NO: 163501 - protein, 8 aa, Artificial Sequence
  Description of Artificial Sequence: Synthetic peptide
  Seed: KTRPILSP
KYRPILSL

SEQ ID NO: 163502 - protein, 8 aa, Artificial Sequence
  Description of Artificial Sequence: Synthetic peptide
  Seed: KTRPILSP
KYRPILSM

SEQ ID NO: 163503 - protein, 8 aa, Artificial Sequence
  Description of Artificial Sequence: Synthetic peptide
  Seed: KTRPILSP
KYRPILSP

SEQ ID NO: 163504 - protein, 9 aa, Artificial Sequence
  Description of Artificial Sequence: Synthetic peptide
  Seed: KTRPILSPL
KYRPILSPA

SEQ ID NO: 163505 - protein, 9 aa, Artificial Sequence
  Description of Artificial Sequence: Synthetic peptide
  Seed: KTRPILSPL
KYRPILSPC

SEQ ID NO: 163506 - protein, 9 aa, Artificial Sequence
  Description of Artificial Sequence: Synthetic peptide
  Seed: KTRPILSPL
KYRPILSPD

SEQ ID NO: 163507 - protein, 9 aa, Artificial Sequence
  Description of Artificial Sequence: Synthetic peptide
  Seed: KTRPILSPL
KYRPILSPE

SEQ ID NO: 163508 - protein, 9 aa, Artificial Sequence
  Description of Artificial Sequence: Synthetic peptide
  Seed: KTRPILSPL
KYRPILSPF

SEQ ID NO: 163509 - protein, 9 aa, Artificial Sequence
  Description of Artificial Sequence: Synthetic peptide
  Seed: KTRPILSPL
KYRPILSPG

SEQ ID NO: 163510 - protein, 9 aa, Artificial Sequence
  Description of Artificial Sequence: Synthetic peptide
  Seed: KTRPILSPL
KYRPILSPH

SEQ ID NO: 163511 - protein, 9 aa, Artificial Sequence
  Description of Artificial Sequence: Synthetic peptide
  Seed: KTRPILSPL
KYRPILSPI

SEQ ID NO: 163512 - protein, 9 aa, Artificial Sequence
  Description of Artificial Sequence: Synthetic peptide
  Seed: KTRPILSPL
KYRPILSPK

SEQ ID NO: 163513 - protein, 9 aa, Artificial Sequence
  Description of Artificial Sequence: Synthetic peptide
  Seed: KTRPILSPL
KYRPILSPL

SEQ ID NO: 163514 - protein, 10 aa, Artificial Sequence
  Description of Artificial Sequence: Synthetic peptide
  Seed: KTRPILSPLT
KYRPILSPLA

SEQ ID NO: 163515 - protein, 10 aa, Artificial Sequence
  Description of Artificial Sequence: Synthetic peptide
  Seed: KTRPILSPLT
KYRPILSPLC

SEQ ID NO: 163516 - protein, 10 aa, Artificial Sequence
  Description of Artificial Sequence: Synthetic peptide
  Seed: KTRPILSPLT
KYRPILSPLD

SEQ ID NO: 163517 - protein, 10 aa, Artificial Sequence
  Description of Artificial Sequence: Synthetic peptide
  Seed: KTRPILSPLT
KYRPILSPLE

SEQ ID NO: 163518 - protein, 10 aa, Artificial Sequence
  Description of Artificial Sequence: Synthetic peptide
  Seed: KTRPILSPLT
KYRPILSPLF

SEQ ID NO: 163519 - protein, 10 aa, Artificial Sequence
  Description of Artificial Sequence: Synthetic peptide
  Seed: KTRPILSPLT
KYRPILSPLG

SEQ ID NO: 163520 - protein, 10 aa, Artificial Sequence
  Description of Artificial Sequence: Synthetic peptide
  Seed: KTRPILSPLT
KYRPILSPLH

SEQ ID NO: 163521 - protein, 10 aa, Artificial Sequence
  Description of Artificial Sequence: Synthetic peptide
  Seed: KTRPILSPLT
KYRPILSPLI

SEQ ID NO: 163522 - protein, 10 aa, Artificial Sequence
  Description of Artificial Sequence: Synthetic peptide
  Seed: KTRPILSPLT
KYRPILSPLK

SEQ ID NO: 163523 - protein, 10 aa, Artificial Sequence
  Description of Artificial Sequence: Synthetic peptide
  Seed: KTRPILSPLT
KYRPILSPLL

SEQ ID NO: 163524 - protein, 10 aa, Artificial Sequence
  Description of Artificial Sequence: Synthetic peptide
  Seed: KTRPILSPLT
KYRPILSPLM

SEQ ID NO: 163525 - protein, 10 aa, Artificial Sequence
  Description of Artificial Sequence: Synthetic peptide
  Seed: KTRPILSPLT
KYRPILSPLN

SEQ ID NO: 163526 - protein, 10 aa, Artificial Sequence
  Description of Artificial Sequence: Synthetic peptide
  Seed: KTRPILSPLT
KYRPILSPLP

SEQ ID NO: 163527 - protein, 10 aa, Artificial Sequence
  Description of Artificial Sequence: Synthetic peptide
  Seed: KTRPILSPLT
KYRPILSPLQ

SEQ ID NO: 163528 - protein, 10 aa, Artificial Sequence
  Description of Artificial Sequence: Synthetic peptide
  Seed: KTRPILSPLT
KYRPILSPLR

SEQ ID NO: 163529 - protein, 10 aa, Artificial Sequence
  Description of Artificial Sequence: Synthetic peptide
  Seed: KTRPILSPLT
KYRPILSPLS

SEQ ID NO: 163530 - protein, 10 aa, Artificial Sequence
  Description of Artificial Sequence: Synthetic peptide
  Seed: KTRPILSPLT
KYRPILSPLT

SEQ ID NO: 163531 - protein, 11 aa, Artificial Sequence
  Description of Artificial Sequence: Synthetic peptide
  Seed: KTRPILSPLTK
KYRPILSPLTA

SEQ ID NO: 163532 - protein, 11 aa, Artificial Sequence
  Description of Artificial Sequence: Synthetic peptide
  Seed: KTRPILSPLTK
KYRPILSPLTE

SEQ ID NO: 163533 - protein, 11 aa, Artificial Sequence
  Description of Artificial Sequence: Synthetic peptide
  Seed: KTRPILSPLTK
KYRPILSPLTG

SEQ ID NO: 163534 - protein, 11 aa, Artificial Sequence
  Description of Artificial Sequence: Synthetic peptide
  Seed: KTRPILSPLTK
KYRPILSPLTI

SEQ ID NO: 163535 - protein, 11 aa, Artificial Sequence
  Description of Artificial Sequence: Synthetic peptide
  Seed: KTRPILSPLTK
KYRPILSPLTK

SEQ ID NO: 163536 - protein, 11 aa, Artificial Sequence
  Description of Artificial Sequence: Synthetic peptide
  Seed: KTRPILSPLTK
KYRPILSPLTL

SEQ ID NO: 163537 - protein, 11 aa, Artificial Sequence
  Description of Artificial Sequence: Synthetic peptide
  Seed: KTRPILSPLTK
KYRPILSPLTM

SEQ ID NO: 163538 - protein, 11 aa, Artificial Sequence
  Description of Artificial Sequence: Synthetic peptide
  Seed: KTRPILSPLTK
KYRPILSPLTP

SEQ ID NO: 163539 - protein, 11 aa, Artificial Sequence
  Description of Artificial Sequence: Synthetic peptide
  Seed: KTRPILSPLTK
KYRPILSPLTQ

SEQ ID NO: 163540 - protein, 11 aa, Artificial Sequence
  Description of Artificial Sequence: Synthetic peptide
  Seed: KTRPILSPLTK
KYRPILSPLTS

SEQ ID NO: 163541 - protein, 11 aa, Artificial Sequence
  Description of Artificial Sequence: Synthetic peptide
  Seed: KTRPILSPLTK
KYRPILSPLTT

SEQ ID NO: 163542 - protein, 11 aa, Artificial Sequence
  Description of Artificial Sequence: Synthetic peptide
  Seed: KTRPILSPLTK
KYRPILSPLTV

SEQ ID NO: 163543 - protein, 11 aa, Artificial Sequence
  Description of Artificial Sequence: Synthetic peptide
  Seed: KTRPILSPLTK
KYRPILSPLTY

SEQ ID NO: 163544 - protein, 10 aa, Artificial Sequence
  Description of Artificial Sequence: Synthetic peptide
  Seed: KTRPILSPLT
KYRPILSPLV

SEQ ID NO: 163545 - protein, 10 aa, Artificial Sequence
  Description of Artificial Sequence: Synthetic peptide
  Seed: KTRPILSPLT
KYRPILSPLW

SEQ ID NO: 163546 - protein, 10 aa, Artificial Sequence
  Description of Artificial Sequence: Synthetic peptide
  Seed: KTRPILSPLT
KYRPILSPLY

SEQ ID NO: 163547 - protein, 9 aa, Artificial Sequence
  Description of Artificial Sequence: Synthetic peptide
  Seed: KTRPILSPL
KYRPILSPM

SEQ ID NO: 163548 - protein, 9 aa, Artificial Sequence
  Description of Artificial Sequence: Synthetic peptide
  Seed: KTRPILSPL
KYRPILSPN

SEQ ID NO: 163549 - protein, 9 aa, Artificial Sequence
  Description of Artificial Sequence: Synthetic peptide
  Seed: KTRPILSPL
KYRPILSPP

SEQ ID NO: 163550 - protein, 9 aa, Artificial Sequence
  Description of Artificial Sequence: Synthetic peptide
  Seed: KTRPILSPL
KYRPILSPQ

SEQ ID NO: 163551 - protein, 9 aa, Artificial Sequence
  Description of Artificial Sequence: Synthetic peptide
  Seed: KTRPILSPL
KYRPILSPR

SEQ ID NO: 163552 - protein, 9 aa, Artificial Sequence
  Description of Artificial Sequence: Synthetic peptide
  Seed: KTRPILSPL
KYRPILSPS

SEQ ID NO: 163553 - protein, 9 aa, Artificial Sequence
  Description of Artificial Sequence: Synthetic peptide
  Seed: KTRPILSPL
KYRPILSPT

SEQ ID NO: 163554 - protein, 9 aa, Artificial Sequence
  Description of Artificial Sequence: Synthetic peptide
  Seed: KTRPILSPL
KYRPILSPV

SEQ ID NO: 163555 - protein, 9 aa, Artificial Sequence
  Description of Artificial Sequence: Synthetic peptide
  Seed: KTRPILSPL
KYRPILSPW

SEQ ID NO: 163556 - protein, 9 aa, Artificial Sequence
  Description of Artificial Sequence: Synthetic peptide
  Seed: KTRPILSPL
KYRPILSPY

SEQ ID NO: 163557 - protein, 8 aa, Artificial Sequence
  Description of Artificial Sequence: Synthetic peptide
  Seed: KTRPILSP
KYRPILSR

SEQ ID NO: 163558 - protein, 8 aa, Artificial Sequence
  Description of Artificial Sequence: Synthetic peptide
  Seed: KTRPILSP
KYRPILSS

SEQ ID NO: 163559 - protein, 8 aa, Artificial Sequence
  Description of Artificial Sequence: Synthetic peptide
  Seed: KTRPILSP
KYRPILST

SEQ ID NO: 163560 - protein, 8 aa, Artificial Sequence
  Description of Artificial Sequence: Synthetic peptide
  Seed: KTRPILSP
KYRPILSV

SEQ ID NO: 163561 - protein, 8 aa, Artificial Sequence
  Description of Artificial Sequence: Synthetic peptide
  Seed: KTRPILSP
KYRPILSY

SEQ ID NO: 163562 - protein, 10 aa, Artificial Sequence
  Description of Artificial Sequence: Synthetic peptide
  Seed: LQRRRFVQNA
LARRRFVQNA

SEQ ID NO: 163563 - protein, 11 aa, Artificial Sequence
  Description of Artificial Sequence: Synthetic peptide
  Seed: LQRRRFVQNAL
LARRRFVQNAA

SEQ ID NO: 163564 - protein, 11 aa, Artificial Sequence
  Description of Artificial Sequence: Synthetic peptide
  Seed: LQRRRFVQNAL
LARRRFVQNAF

SEQ ID NO: 163565 - protein, 11 aa, Artificial Sequence
  Description of Artificial Sequence: Synthetic peptide
  Seed: LQRRRFVQNAL
LARRRFVQNAI

SEQ ID NO: 163566 - protein, 11 aa, Artificial Sequence
  Description of Artificial Sequence: Synthetic peptide
  Seed: LQRRRFVQNAL
LARRRFVQNAL

SEQ ID NO: 163567 - protein, 11 aa, Artificial Sequence
  Description of Artificial Sequence: Synthetic peptide
  Seed: LQRRRFVQNAL
LARRRFVQNAM

SEQ ID NO: 163568 - protein, 11 aa, Artificial Sequence
  Description of Artificial Sequence: Synthetic peptide
  Seed: LQRRRFVQNAL
LARRRFVQNAV

SEQ ID NO: 163569 - protein, 10 aa, Artificial Sequence
  Description of Artificial Sequence: Synthetic peptide
  Seed: LQRRRFVQNA
LARRRFVQNK

SEQ ID NO: 163570 - protein, 10 aa, Artificial Sequence
  Description of Artificial Sequence: Synthetic peptide
  Seed: LQRRRFVQNA
LARRRFVQNV

SEQ ID NO: 163571 - protein, 10 aa, Artificial Sequence
  Description of Artificial Sequence: Synthetic peptide
  Seed: LKTRPILSPL
LATRPILSPA

SEQ ID NO: 163572 - protein, 10 aa, Artificial Sequence
  Description of Artificial Sequence: Synthetic peptide
  Seed: LKTRPILSPL
LATRPILSPF

SEQ ID NO: 163573 - protein, 10 aa, Artificial Sequence
  Description of Artificial Sequence: Synthetic peptide
  Seed: LKTRPILSPL
LATRPILSPG

SEQ ID NO: 163574 - protein, 10 aa, Artificial Sequence
  Description of Artificial Sequence: Synthetic peptide
  Seed: LKTRPILSPL
LATRPILSPI

SEQ ID NO: 163575 - protein, 10 aa, Artificial Sequence
  Description of Artificial Sequence: Synthetic peptide
  Seed: LKTRPILSPL
LATRPILSPK

SEQ ID NO: 163576 - protein, 10 aa, Artificial Sequence
  Description of Artificial Sequence: Synthetic peptide
  Seed: LKTRPILSPL
LATRPILSPL

SEQ ID NO: 163577 - protein, 10 aa, Artificial Sequence
  Description of Artificial Sequence: Synthetic peptide
  Seed: LKTRPILSPL
LATRPILSPM

SEQ ID NO: 163578 - protein, 10 aa, Artificial Sequence
  Description of Artificial Sequence: Synthetic peptide
  Seed: LKTRPILSPL
LATRPILSPR

SEQ ID NO: 163579 - protein, 10 aa, Artificial Sequence
  Description of Artificial Sequence: Synthetic peptide
  Seed: LKTRPILSPL
LATRPILSPS

SEQ ID NO: 163580 - protein, 10 aa, Artificial Sequence
  Description of Artificial Sequence: Synthetic peptide
  Seed: LKTRPILSPL
LATRPILSPT

SEQ ID NO: 163581 - protein, 10 aa, Artificial Sequence
  Description of Artificial Sequence: Synthetic peptide
  Seed: LKTRPILSPL
LATRPILSPV

SEQ ID NO: 163582 - protein, 10 aa, Artificial Sequence
  Description of Artificial Sequence: Synthetic peptide
  Seed: LKTRPILSPL
LATRPILSPW

SEQ ID NO: 163583 - protein, 10 aa, Artificial Sequence
  Description of Artificial Sequence: Synthetic peptide
  Seed: LKTRPILSPL
LATRPILSPY

SEQ ID NO: 163584 - protein, 10 aa, Artificial Sequence
  Description of Artificial Sequence: Synthetic peptide
  Seed: LKTRPILSPL
LCTRPILSPA

SEQ ID NO: 163585 - protein, 10 aa, Artificial Sequence
  Description of Artificial Sequence: Synthetic peptide
  Seed: LKTRPILSPL
LCTRPILSPF

SEQ ID NO: 163586 - protein, 10 aa, Artificial Sequence
  Description of Artificial Sequence: Synthetic peptide
  Seed: LKTRPILSPL
LCTRPILSPG

SEQ ID NO: 163587 - protein, 10 aa, Artificial Sequence
  Description of Artificial Sequence: Synthetic peptide
  Seed: LKTRPILSPL
LCTRPILSPI

SEQ ID NO: 163588 - protein, 10 aa, Artificial Sequence
  Description of Artificial Sequence: Synthetic peptide
  Seed: LKTRPILSPL
LCTRPILSPK

SEQ ID NO: 163589 - protein, 10 aa, Artificial Sequence
  Description of Artificial Sequence: Synthetic peptide
  Seed: LKTRPILSPL
LCTRPILSPL

SEQ ID NO: 163590 - protein, 10 aa, Artificial Sequence
  Description of Artificial Sequence: Synthetic peptide
  Seed: LKTRPILSPL
LCTRPILSPM

SEQ ID NO: 163591 - protein, 10 aa, Artificial Sequence
  Description of Artificial Sequence: Synthetic peptide
  Seed: LKTRPILSPL
LCTRPILSPS

SEQ ID NO: 163592 - protein, 10 aa, Artificial Sequence
  Description of Artificial Sequence: Synthetic peptide
  Seed: LKTRPILSPL
LCTRPILSPT

SEQ ID NO: 163593 - protein, 10 aa, Artificial Sequence
  Description of Artificial Sequence: Synthetic peptide
  Seed: LKTRPILSPL
LCTRPILSPV

SEQ ID NO: 163594 - protein, 10 aa, Artificial Sequence
  Description of Artificial Sequence: Synthetic peptide
  Seed: LKTRPILSPL
LCTRPILSPW

SEQ ID NO: 163595 - protein, 10 aa, Artificial Sequence
  Description of Artificial Sequence: Synthetic peptide
  Seed: LKTRPILSPL
LCTRPILSPY

SEQ ID NO: 163596 - protein, 10 aa, Artificial Sequence
  Description of Artificial Sequence: Synthetic peptide
  Seed: LKTRPILSPL
LDTRPILSPA

SEQ ID NO: 163597 - protein, 10 aa, Artificial Sequence
  Description of Artificial Sequence: Synthetic peptide
  Seed: LKTRPILSPL
LDTRPILSPF

SEQ ID NO: 163598 - protein, 10 aa, Artificial Sequence
  Description of Artificial Sequence: Synthetic peptide
  Seed: LKTRPILSPL
LDTRPILSPG

SEQ ID NO: 163599 - protein, 10 aa, Artificial Sequence
  Description of Artificial Sequence: Synthetic peptide
  Seed: LKTRPILSPL
LDTRPILSPI

SEQ ID NO: 163600 - protein, 10 aa, Artificial Sequence
  Description of Artificial Sequence: Synthetic peptide
  Seed: LKTRPILSPL
LDTRPILSPK

SEQ ID NO: 163601 - protein, 10 aa, Artificial Sequence
  Description of Artificial Sequence: Synthetic peptide
  Seed: LKTRPILSPL
LDTRPILSPL

SEQ ID NO: 163602 - protein, 10 aa, Artificial Sequence
  Description of Artificial Sequence: Synthetic peptide
  Seed: LKTRPILSPL
LDTRPILSPM

SEQ ID NO: 163603 - protein, 10 aa, Artificial Sequence
  Description of Artificial Sequence: Synthetic peptide
  Seed: LKTRPILSPL
LDTRPILSPS

SEQ ID NO: 163604 - protein, 10 aa, Artificial Sequence
  Description of Artificial Sequence: Synthetic peptide
  Seed: LKTRPILSPL
LDTRPILSPT

SEQ ID NO: 163605 - protein, 10 aa, Artificial Sequence
  Description of Artificial Sequence: Synthetic peptide
  Seed: LKTRPILSPL
LDTRPILSPV

SEQ ID NO: 163606 - protein, 10 aa, Artificial Sequence
  Description of Artificial Sequence: Synthetic peptide
  Seed: LKTRPILSPL
LDTRPILSPW

SEQ ID NO: 163607 - protein, 10 aa, Artificial Sequence
  Description of Artificial Sequence: Synthetic peptide
  Seed: LKTRPILSPL
LDTRPILSPY

SEQ ID NO: 163608 - protein, 11 aa, Artificial Sequence
  Description of Artificial Sequence: Synthetic peptide
  Seed: LQRRRFVQNAL
LERRRFVQNAF

SEQ ID NO: 163609 - protein, 11 aa, Artificial Sequence
  Description of Artificial Sequence: Synthetic peptide
  Seed: LQRRRFVQNAL
LERRRFVQNAY

SEQ ID NO: 163610 - protein, 10 aa, Artificial Sequence
  Description of Artificial Sequence: Synthetic peptide
  Seed: LKTRPILSPL
LETRPILSPA

SEQ ID NO: 163611 - protein, 10 aa, Artificial Sequence
  Description of Artificial Sequence: Synthetic peptide
  Seed: LKTRPILSPL
LETRPILSPF

SEQ ID NO: 163612 - protein, 10 aa, Artificial Sequence
  Description of Artificial Sequence: Synthetic peptide
  Seed: LKTRPILSPL
LETRPILSPG

SEQ ID NO: 163613 - protein, 10 aa, Artificial Sequence
  Description of Artificial Sequence: Synthetic peptide
  Seed: LKTRPILSPL
LETRPILSPI

SEQ ID NO: 163614 - protein, 10 aa, Artificial Sequence
  Description of Artificial Sequence: Synthetic peptide
  Seed: LKTRPILSPL
LETRPILSPK

SEQ ID NO: 163615 - protein, 10 aa, Artificial Sequence
  Description of Artificial Sequence: Synthetic peptide
  Seed: LKTRPILSPL
LETRPILSPL

SEQ ID NO: 163616 - protein, 10 aa, Artificial Sequence
  Description of Artificial Sequence: Synthetic peptide
  Seed: LKTRPILSPL
LETRPILSPM

SEQ ID NO: 163617 - protein, 10 aa, Artificial Sequence
  Description of Artificial Sequence: Synthetic peptide
  Seed: LKTRPILSPL
LETRPILSPS

SEQ ID NO: 163618 - protein, 10 aa, Artificial Sequence
  Description of Artificial Sequence: Synthetic peptide
  Seed: LKTRPILSPL
LETRPILSPT

SEQ ID NO: 163619 - protein, 10 aa, Artificial Sequence
  Description of Artificial Sequence: Synthetic peptide
  Seed: LKTRPILSPL
LETRPILSPV

SEQ ID NO: 163620 - protein, 10 aa, Artificial Sequence
  Description of Artificial Sequence: Synthetic peptide
  Seed: LKTRPILSPL
LETRPILSPW

SEQ ID NO: 163621 - protein, 10 aa, Artificial Sequence
  Description of Artificial Sequence: Synthetic peptide
  Seed: LKTRPILSPL
LETRPILSPY

SEQ ID NO: 163622 - protein, 10 aa, Artificial Sequence
  Description of Artificial Sequence: Synthetic peptide
  Seed: LQRRRFVQNA
LFRRRFVQNA

SEQ ID NO: 163623 - protein, 11 aa, Artificial Sequence
  Description of Artificial Sequence: Synthetic peptide
  Seed: LQRRRFVQNAL
LFRRRFVQNAI

SEQ ID NO: 163624 - protein, 11 aa, Artificial Sequence
  Description of Artificial Sequence: Synthetic peptide
  Seed: LQRRRFVQNAL
LFRRRFVQNAL

SEQ ID NO: 163625 - protein, 11 aa, Artificial Sequence
  Description of Artificial Sequence: Synthetic peptide
  Seed: LQRRRFVQNAL
LFRRRFVQNAM

SEQ ID NO: 163626 - protein, 11 aa, Artificial Sequence
  Description of Artificial Sequence: Synthetic peptide
  Seed: LQRRRFVQNAL
LFRRRFVQNAV

SEQ ID NO: 163627 - protein, 10 aa, Artificial Sequence
  Description of Artificial Sequence: Synthetic peptide
  Seed: LQRRRFVQNA
LFRRRFVQNK

SEQ ID NO: 163628 - protein, 10 aa, Artificial Sequence
  Description of Artificial Sequence: Synthetic peptide
  Seed: LKTRPILSPL
LFTRPILSPA

SEQ ID NO: 163629 - protein, 10 aa, Artificial Sequence
  Description of Artificial Sequence: Synthetic peptide
  Seed: LKTRPILSPL
LFTRPILSPF

SEQ ID NO: 163630 - protein, 10 aa, Artificial Sequence
  Description of Artificial Sequence: Synthetic peptide
  Seed: LKTRPILSPL
LFTRPILSPG

SEQ ID NO: 163631 - protein, 10 aa, Artificial Sequence
  Description of Artificial Sequence: Synthetic peptide
  Seed: LKTRPILSPL
LFTRPILSPI

SEQ ID NO: 163632 - protein, 10 aa, Artificial Sequence
  Description of Artificial Sequence: Synthetic peptide
  Seed: LKTRPILSPL
LFTRPILSPK

SEQ ID NO: 163633 - protein, 10 aa, Artificial Sequence
  Description of Artificial Sequence: Synthetic peptide
  Seed: LKTRPILSPL
LFTRPILSPL

SEQ ID NO: 163634 - protein, 10 aa, Artificial Sequence
  Description of Artificial Sequence: Synthetic peptide
  Seed: LKTRPILSPL
LFTRPILSPM

SEQ ID NO: 163635 - protein, 10 aa, Artificial Sequence
  Description of Artificial Sequence: Synthetic peptide
  Seed: LKTRPILSPL
LFTRPILSPR

SEQ ID NO: 163636 - protein, 10 aa, Artificial Sequence
  Description of Artificial Sequence: Synthetic peptide
  Seed: LKTRPILSPL
LFTRPILSPS

SEQ ID NO: 163637 - protein, 10 aa, Artificial Sequence
  Description of Artificial Sequence: Synthetic peptide
  Seed: LKTRPILSPL
LFTRPILSPT

SEQ ID NO: 163638 - protein, 10 aa, Artificial Sequence
  Description of Artificial Sequence: Synthetic peptide
  Seed: LKTRPILSPL
LFTRPILSPV

SEQ ID NO: 163639 - protein, 10 aa, Artificial Sequence
  Description of Artificial Sequence: Synthetic peptide
  Seed: LKTRPILSPL
LFTRPILSPW

SEQ ID NO: 163640 - protein, 10 aa, Artificial Sequence
  Description of Artificial Sequence: Synthetic peptide
  Seed: LKTRPILSPL
LFTRPILSPY

SEQ ID NO: 163641 - protein, 11 aa, Artificial Sequence
  Description of Artificial Sequence: Synthetic peptide
  Seed: LQRRRFVQNAL
LGRRRFVQNAL

SEQ ID NO: 163642 - protein, 11 aa, Artificial Sequence
  Description of Artificial Sequence: Synthetic peptide
  Seed: LQRRRFVQNAL
LGRRRFVQNAM

SEQ ID NO: 163643 - protein, 10 aa, Artificial Sequence
  Description of Artificial Sequence: Synthetic peptide
  Seed: LQRRRFVQNA
LGRRRFVQNK

SEQ ID NO: 163644 - protein, 10 aa, Artificial Sequence
  Description of Artificial Sequence: Synthetic peptide
  Seed: LKTRPILSPL
LGTRPILSPA

SEQ ID NO: 163645 - protein, 10 aa, Artificial Sequence
  Description of Artificial Sequence: Synthetic peptide
  Seed: LKTRPILSPL
LGTRPILSPF

SEQ ID NO: 163646 - protein, 10 aa, Artificial Sequence
  Description of Artificial Sequence: Synthetic peptide
  Seed: LKTRPILSPL
LGTRPILSPG

SEQ ID NO: 163647 - protein, 10 aa, Artificial Sequence
  Description of Artificial Sequence: Synthetic peptide
  Seed: LKTRPILSPL
LGTRPILSPI

SEQ ID NO: 163648 - protein, 10 aa, Artificial Sequence
  Description of Artificial Sequence: Synthetic peptide
  Seed: LKTRPILSPL
LGTRPILSPK

SEQ ID NO: 163649 - protein, 10 aa, Artificial Sequence
  Description of Artificial Sequence: Synthetic peptide
  Seed: LKTRPILSPL
LGTRPILSPL

SEQ ID NO: 163650 - protein, 10 aa, Artificial Sequence
  Description of Artificial Sequence: Synthetic peptide
  Seed: LKTRPILSPL
LGTRPILSPM

SEQ ID NO: 163651 - protein, 10 aa, Artificial Sequence
  Description of Artificial Sequence: Synthetic peptide
  Seed: LKTRPILSPL
LGTRPILSPS

SEQ ID NO: 163652 - protein, 10 aa, Artificial Sequence
  Description of Artificial Sequence: Synthetic peptide
  Seed: LKTRPILSPL
LGTRPILSPT

SEQ ID NO: 163653 - protein, 10 aa, Artificial Sequence
  Description of Artificial Sequence: Synthetic peptide
  Seed: LKTRPILSPL
LGTRPILSPV

SEQ ID NO: 163654 - protein, 10 aa, Artificial Sequence
  Description of Artificial Sequence: Synthetic peptide
  Seed: LKTRPILSPL
LGTRPILSPW

SEQ ID NO: 163655 - protein, 10 aa, Artificial Sequence
  Description of Artificial Sequence: Synthetic peptide
  Seed: LKTRPILSPL
LGTRPILSPY

SEQ ID NO: 163656 - protein, 11 aa, Artificial Sequence
  Description of Artificial Sequence: Synthetic peptide
  Seed: LQRRRFVQNAL
LHRRRFVQNAF

SEQ ID NO: 163657 - protein, 11 aa, Artificial Sequence
  Description of Artificial Sequence: Synthetic peptide
  Seed: LQRRRFVQNAL
LHRRRFVQNAY

SEQ ID NO: 163658 - protein, 10 aa, Artificial Sequence
  Description of Artificial Sequence: Synthetic peptide
  Seed: LQRRRFVQNA
LHRRRFVQNK

SEQ ID NO: 163659 - protein, 10 aa, Artificial Sequence
  Description of Artificial Sequence: Synthetic peptide
  Seed: LKTRPILSPL
LHTRPILSPA

SEQ ID NO: 163660 - protein, 10 aa, Artificial Sequence
  Description of Artificial Sequence: Synthetic peptide
  Seed: LKTRPILSPL
LHTRPILSPF

SEQ ID NO: 163661 - protein, 10 aa, Artificial Sequence
  Description of Artificial Sequence: Synthetic peptide
  Seed: LKTRPILSPL
LHTRPILSPG

SEQ ID NO: 163662 - protein, 10 aa, Artificial Sequence
  Description of Artificial Sequence: Synthetic peptide
  Seed: LKTRPILSPL
LHTRPILSPI

SEQ ID NO: 163663 - protein, 10 aa, Artificial Sequence
  Description of Artificial Sequence: Synthetic peptide
  Seed: LKTRPILSPL
LHTRPILSPK

SEQ ID NO: 163664 - protein, 10 aa, Artificial Sequence
  Description of Artificial Sequence: Synthetic peptide
  Seed: LKTRPILSPL
LHTRPILSPL

SEQ ID NO: 163665 - protein, 10 aa, Artificial Sequence
  Description of Artificial Sequence: Synthetic peptide
  Seed: LKTRPILSPL
LHTRPILSPM

SEQ ID NO: 163666 - protein, 10 aa, Artificial Sequence
  Description of Artificial Sequence: Synthetic peptide
  Seed: LKTRPILSPL
LHTRPILSPR

SEQ ID NO: 163667 - protein, 10 aa, Artificial Sequence
  Description of Artificial Sequence: Synthetic peptide
  Seed: LKTRPILSPL
LHTRPILSPS

SEQ ID NO: 163668 - protein, 10 aa, Artificial Sequence
  Description of Artificial Sequence: Synthetic peptide
  Seed: LKTRPILSPL
LHTRPILSPT

SEQ ID NO: 163669 - protein, 10 aa, Artificial Sequence
  Description of Artificial Sequence: Synthetic peptide
  Seed: LKTRPILSPL
LHTRPILSPV

SEQ ID NO: 163670 - protein, 10 aa, Artificial Sequence
  Description of Artificial Sequence: Synthetic peptide
  Seed: LKTRPILSPL
LHTRPILSPW

SEQ ID NO: 163671 - protein, 10 aa, Artificial Sequence
  Description of Artificial Sequence: Synthetic peptide
  Seed: LKTRPILSPL
LHTRPILSPY

SEQ ID NO: 163672 - protein, 10 aa, Artificial Sequence
  Description of Artificial Sequence: Synthetic peptide
  Seed: LQRRRFVQNA
LIRRRFVQNA

SEQ ID NO: 163673 - protein, 11 aa, Artificial Sequence
  Description of Artificial Sequence: Synthetic peptide
  Seed: LQRRRFVQNAL
LIRRRFVQNAF

SEQ ID NO: 163674 - protein, 11 aa, Artificial Sequence
  Description of Artificial Sequence: Synthetic peptide
  Seed: LQRRRFVQNAL
LIRRRFVQNAI

SEQ ID NO: 163675 - protein, 11 aa, Artificial Sequence
  Description of Artificial Sequence: Synthetic peptide
  Seed: LQRRRFVQNAL
LIRRRFVQNAL

SEQ ID NO: 163676 - protein, 11 aa, Artificial Sequence
  Description of Artificial Sequence: Synthetic peptide
  Seed: LQRRRFVQNAL
LIRRRFVQNAM

SEQ ID NO: 163677 - protein, 11 aa, Artificial Sequence
  Description of Artificial Sequence: Synthetic peptide
  Seed: LQRRRFVQNAL
LIRRRFVQNAV

SEQ ID NO: 163678 - protein, 10 aa, Artificial Sequence
  Description of Artificial Sequence: Synthetic peptide
  Seed: LQRRRFVQNA
LIRRRFVQNK

SEQ ID NO: 163679 - protein, 10 aa, Artificial Sequence
  Description of Artificial Sequence: Synthetic peptide
  Seed: LKTRPILSPL
LITRPILSPA

SEQ ID NO: 163680 - protein, 10 aa, Artificial Sequence
  Description of Artificial Sequence: Synthetic peptide
  Seed: LKTRPILSPL
LITRPILSPF

SEQ ID NO: 163681 - protein, 10 aa, Artificial Sequence
  Description of Artificial Sequence: Synthetic peptide
  Seed: LKTRPILSPL
LITRPILSPG

SEQ ID NO: 163682 - protein, 10 aa, Artificial Sequence
  Description of Artificial Sequence: Synthetic peptide
  Seed: LKTRPILSPL
LITRPILSPI

SEQ ID NO: 163683 - protein, 10 aa, Artificial Sequence
  Description of Artificial Sequence: Synthetic peptide
  Seed: LKTRPILSPL
LITRPILSPK

SEQ ID NO: 163684 - protein, 10 aa, Artificial Sequence
  Description of Artificial Sequence: Synthetic peptide
  Seed: LKTRPILSPL
LITRPILSPL

SEQ ID NO: 163685 - protein, 10 aa, Artificial Sequence
  Description of Artificial Sequence: Synthetic peptide
  Seed: LKTRPILSPL
LITRPILSPM

SEQ ID NO: 163686 - protein, 10 aa, Artificial Sequence
  Description of Artificial Sequence: Synthetic peptide
  Seed: LKTRPILSPL
LITRPILSPS

SEQ ID NO: 163687 - protein, 10 aa, Artificial Sequence
  Description of Artificial Sequence: Synthetic peptide
  Seed: LKTRPILSPL
LITRPILSPT

SEQ ID NO: 163688 - protein, 10 aa, Artificial Sequence
  Description of Artificial Sequence: Synthetic peptide
  Seed: LKTRPILSPL
LITRPILSPV

SEQ ID NO: 163689 - protein, 10 aa, Artificial Sequence
  Description of Artificial Sequence: Synthetic peptide
  Seed: LKTRPILSPL
LITRPILSPW

SEQ ID NO: 163690 - protein, 10 aa, Artificial Sequence
  Description of Artificial Sequence: Synthetic peptide
  Seed: LKTRPILSPL
LITRPILSPY

SEQ ID NO: 163691 - protein, 11 aa, Artificial Sequence
  Description of Artificial Sequence: Synthetic peptide
  Seed: LQRRRFVQNAL
LKRRRFVQNAF

SEQ ID NO: 163692 - protein, 11 aa, Artificial Sequence
  Description of Artificial Sequence: Synthetic peptide
  Seed: LQRRRFVQNAL
LKRRRFVQNAL

SEQ ID NO: 163693 - protein, 11 aa, Artificial Sequence
  Description of Artificial Sequence: Synthetic peptide
  Seed: LQRRRFVQNAL
LKRRRFVQNAM

SEQ ID NO: 163694 - protein, 11 aa, Artificial Sequence
  Description of Artificial Sequence: Synthetic peptide
  Seed: LQRRRFVQNAL
LKRRRFVQNAY

SEQ ID NO: 163695 - protein, 10 aa, Artificial Sequence
  Description of Artificial Sequence: Synthetic peptide
  Seed: LKTRPILSPL
LKTRPILSPA

SEQ ID NO: 163696 - protein, 10 aa, Artificial Sequence
  Description of Artificial Sequence: Synthetic peptide
  Seed: LKTRPILSPL
LKTRPILSPC

SEQ ID NO: 163697 - protein, 10 aa, Artificial Sequence
  Description of Artificial Sequence: Synthetic peptide
  Seed: LKTRPILSPL
LKTRPILSPF

SEQ ID NO: 163698 - protein, 10 aa, Artificial Sequence
  Description of Artificial Sequence: Synthetic peptide
  Seed: LKTRPILSPL
LKTRPILSPG

SEQ ID NO: 163699 - protein, 10 aa, Artificial Sequence
  Description of Artificial Sequence: Synthetic peptide
  Seed: LKTRPILSPL
LKTRPILSPH

SEQ ID NO: 163700 - protein, 10 aa, Artificial Sequence
  Description of Artificial Sequence: Synthetic peptide
  Seed: LKTRPILSPL
LKTRPILSPI

SEQ ID NO: 163701 - protein, 10 aa, Artificial Sequence
  Description of Artificial Sequence: Synthetic peptide
  Seed: LKTRPILSPL
LKTRPILSPK

SEQ ID NO: 163702 - protein, 10 aa, Artificial Sequence
  Description of Artificial Sequence: Synthetic peptide
  Seed: LKTRPILSPL
LKTRPILSPM

SEQ ID NO: 163703 - protein, 10 aa, Artificial Sequence
  Description of Artificial Sequence: Synthetic peptide
  Seed: LKTRPILSPL
LKTRPILSPN

SEQ ID NO: 163704 - protein, 10 aa, Artificial Sequence
  Description of Artificial Sequence: Synthetic peptide
  Seed: LKTRPILSPL
LKTRPILSPP

SEQ ID NO: 163705 - protein, 10 aa, Artificial Sequence
  Description of Artificial Sequence: Synthetic peptide
  Seed: LKTRPILSPL
LKTRPILSPQ

SEQ ID NO: 163706 - protein, 10 aa, Artificial Sequence
  Description of Artificial Sequence: Synthetic peptide
  Seed: LKTRPILSPL
LKTRPILSPR

SEQ ID NO: 163707 - protein, 10 aa, Artificial Sequence
  Description of Artificial Sequence: Synthetic peptide
  Seed: LKTRPILSPL
LKTRPILSPS

SEQ ID NO: 163708 - protein, 10 aa, Artificial Sequence
  Description of Artificial Sequence: Synthetic peptide
  Seed: LKTRPILSPL
LKTRPILSPT

SEQ ID NO: 163709 - protein, 10 aa, Artificial Sequence
  Description of Artificial Sequence: Synthetic peptide
  Seed: LKTRPILSPL
LKTRPILSPV

SEQ ID NO: 163710 - protein, 10 aa, Artificial Sequence
  Description of Artificial Sequence: Synthetic peptide
  Seed: LKTRPILSPL
LKTRPILSPW

SEQ ID NO: 163711 - protein, 10 aa, Artificial Sequence
  Description of Artificial Sequence: Synthetic peptide
  Seed: LKTRPILSPL
LKTRPILSPY

SEQ ID NO: 163712 - protein, 11 aa, Artificial Sequence
  Description of Artificial Sequence: Synthetic peptide
  Seed: LQRRRFVQNAL
LLRRRFVQNAA

SEQ ID NO: 163713 - protein, 11 aa, Artificial Sequence
  Description of Artificial Sequence: Synthetic peptide
  Seed: LQRRRFVQNAL
LLRRRFVQNAF

SEQ ID NO: 163714 - protein, 11 aa, Artificial Sequence
  Description of Artificial Sequence: Synthetic peptide
  Seed: LQRRRFVQNAL
LLRRRFVQNAI

SEQ ID NO: 163715 - protein, 11 aa, Artificial Sequence
  Description of Artificial Sequence: Synthetic peptide
  Seed: LQRRRFVQNAL
LLRRRFVQNAL

SEQ ID NO: 163716 - protein, 11 aa, Artificial Sequence
  Description of Artificial Sequence: Synthetic peptide
  Seed: LQRRRFVQNAL
LLRRRFVQNAM

SEQ ID NO: 163717 - protein, 11 aa, Artificial Sequence
  Description of Artificial Sequence: Synthetic peptide
  Seed: LQRRRFVQNAL
LLRRRFVQNAV

SEQ ID NO: 163718 - protein, 11 aa, Artificial Sequence
  Description of Artificial Sequence: Synthetic peptide
  Seed: LQRRRFVQNAL
LLRRRFVQNAY

SEQ ID NO: 163719 - protein, 10 aa, Artificial Sequence
  Description of Artificial Sequence: Synthetic peptide
  Seed: LQRRRFVQNA
LLRRRFVQNK

SEQ ID NO: 163720 - protein, 10 aa, Artificial Sequence
  Description of Artificial Sequence: Synthetic peptide
  Seed: LKTRPILSPL
LLTRPILSPA

SEQ ID NO: 163721 - protein, 10 aa, Artificial Sequence
  Description of Artificial Sequence: Synthetic peptide
  Seed: LKTRPILSPL
LLTRPILSPF

SEQ ID NO: 163722 - protein, 10 aa, Artificial Sequence
  Description of Artificial Sequence: Synthetic peptide
  Seed: LKTRPILSPL
LLTRPILSPG

SEQ ID NO: 163723 - protein, 10 aa, Artificial Sequence
  Description of Artificial Sequence: Synthetic peptide
  Seed: LKTRPILSPL
LLTRPILSPI

SEQ ID NO: 163724 - protein, 10 aa, Artificial Sequence
  Description of Artificial Sequence: Synthetic peptide
  Seed: LKTRPILSPL
LLTRPILSPK

SEQ ID NO: 163725 - protein, 10 aa, Artificial Sequence
  Description of Artificial Sequence: Synthetic peptide
  Seed: LKTRPILSPL
LLTRPILSPL

SEQ ID NO: 163726 - protein, 10 aa, Artificial Sequence
  Description of Artificial Sequence: Synthetic peptide
  Seed: LKTRPILSPL
LLTRPILSPM

SEQ ID NO: 163727 - protein, 10 aa, Artificial Sequence
  Description of Artificial Sequence: Synthetic peptide
  Seed: LKTRPILSPL
LLTRPILSPS

SEQ ID NO: 163728 - protein, 10 aa, Artificial Sequence
  Description of Artificial Sequence: Synthetic peptide
  Seed: LKTRPILSPL
LLTRPILSPT

SEQ ID NO: 163729 - protein, 10 aa, Artificial Sequence
  Description of Artificial Sequence: Synthetic peptide
  Seed: LKTRPILSPL
LLTRPILSPV

SEQ ID NO: 163730 - protein, 10 aa, Artificial Sequence
  Description of Artificial Sequence: Synthetic peptide
  Seed: LKTRPILSPL
LLTRPILSPW

SEQ ID NO: 163731 - protein, 10 aa, Artificial Sequence
  Description of Artificial Sequence: Synthetic peptide
  Seed: LKTRPILSPL
LLTRPILSPY

SEQ ID NO: 163732 - protein, 10 aa, Artificial Sequence
  Description of Artificial Sequence: Synthetic peptide
  Seed: LQRRRFVQNA
LMRRRFVQNA

SEQ ID NO: 163733 - protein, 11 aa, Artificial Sequence
  Description of Artificial Sequence: Synthetic peptide
  Seed: LQRRRFVQNAL
LMRRRFVQNAA

SEQ ID NO: 163734 - protein, 11 aa, Artificial Sequence
  Description of Artificial Sequence: Synthetic peptide
  Seed: LQRRRFVQNAL
LMRRRFVQNAF

SEQ ID NO: 163735 - protein, 11 aa, Artificial Sequence
  Description of Artificial Sequence: Synthetic peptide
  Seed: LQRRRFVQNAL
LMRRRFVQNAI

SEQ ID NO: 163736 - protein, 11 aa, Artificial Sequence
  Description of Artificial Sequence: Synthetic peptide
  Seed: LQRRRFVQNAL
LMRRRFVQNAL

SEQ ID NO: 163737 - protein, 11 aa, Artificial Sequence
  Description of Artificial Sequence: Synthetic peptide
  Seed: LQRRRFVQNAL
LMRRRFVQNAM

SEQ ID NO: 163738 - protein, 11 aa, Artificial Sequence
  Description of Artificial Sequence: Synthetic peptide
  Seed: LQRRRFVQNAL
LMRRRFVQNAV

SEQ ID NO: 163739 - protein, 11 aa, Artificial Sequence
  Description of Artificial Sequence: Synthetic peptide
  Seed: LQRRRFVQNAL
LMRRRFVQNAY

SEQ ID NO: 163740 - protein, 10 aa, Artificial Sequence
  Description of Artificial Sequence: Synthetic peptide
  Seed: LQRRRFVQNA
LMRRRFVQNK

SEQ ID NO: 163741 - protein, 10 aa, Artificial Sequence
  Description of Artificial Sequence: Synthetic peptide
  Seed: LQRRRFVQNA
LMRRRFVQNV

SEQ ID NO: 163742 - protein, 10 aa, Artificial Sequence
  Description of Artificial Sequence: Synthetic peptide
  Seed: LKTRPILSPL
LMTRPILSPA

SEQ ID NO: 163743 - protein, 10 aa, Artificial Sequence
  Description of Artificial Sequence: Synthetic peptide
  Seed: LKTRPILSPL
LMTRPILSPF

SEQ ID NO: 163744 - protein, 10 aa, Artificial Sequence
  Description of Artificial Sequence: Synthetic peptide
  Seed: LKTRPILSPL
LMTRPILSPG

SEQ ID NO: 163745 - protein, 10 aa, Artificial Sequence
  Description of Artificial Sequence: Synthetic peptide
  Seed: LKTRPILSPL
LMTRPILSPI

SEQ ID NO: 163746 - protein, 10 aa, Artificial Sequence
  Description of Artificial Sequence: Synthetic peptide
  Seed: LKTRPILSPL
LMTRPILSPK

SEQ ID NO: 163747 - protein, 10 aa, Artificial Sequence
  Description of Artificial Sequence: Synthetic peptide
  Seed: LKTRPILSPL
LMTRPILSPL

SEQ ID NO: 163748 - protein, 10 aa, Artificial Sequence
  Description of Artificial Sequence: Synthetic peptide
  Seed: LKTRPILSPL
LMTRPILSPM

SEQ ID NO: 163749 - protein, 10 aa, Artificial Sequence
  Description of Artificial Sequence: Synthetic peptide
  Seed: LKTRPILSPL
LMTRPILSPP

SEQ ID NO: 163750 - protein, 10 aa, Artificial Sequence
  Description of Artificial Sequence: Synthetic peptide
  Seed: LKTRPILSPL
LMTRPILSPR

SEQ ID NO: 163751 - protein, 10 aa, Artificial Sequence
  Description of Artificial Sequence: Synthetic peptide
  Seed: LKTRPILSPL
LMTRPILSPS

SEQ ID NO: 163752 - protein, 10 aa, Artificial Sequence
  Description of Artificial Sequence: Synthetic peptide
  Seed: LKTRPILSPL
LMTRPILSPT

SEQ ID NO: 163753 - protein, 10 aa, Artificial Sequence
  Description of Artificial Sequence: Synthetic peptide
  Seed: LKTRPILSPL
LMTRPILSPV

SEQ ID NO: 163754 - protein, 10 aa, Artificial Sequence
  Description of Artificial Sequence: Synthetic peptide
  Seed: LKTRPILSPL
LMTRPILSPW

SEQ ID NO: 163755 - protein, 10 aa, Artificial Sequence
  Description of Artificial Sequence: Synthetic peptide
  Seed: LKTRPILSPL
LMTRPILSPY

SEQ ID NO: 163756 - protein, 11 aa, Artificial Sequence
  Description of Artificial Sequence: Synthetic peptide
  Seed: LQRRRFVQNAL
LNRRRFVQNAI

SEQ ID NO: 163757 - protein, 11 aa, Artificial Sequence
  Description of Artificial Sequence: Synthetic peptide
  Seed: LQRRRFVQNAL
LNRRRFVQNAL

SEQ ID NO: 163758 - protein, 11 aa, Artificial Sequence
  Description of Artificial Sequence: Synthetic peptide
  Seed: LQRRRFVQNAL
LNRRRFVQNAM

SEQ ID NO: 163759 - protein, 10 aa, Artificial Sequence
  Description of Artificial Sequence: Synthetic peptide
  Seed: LQRRRFVQNA
LNRRRFVQNK

SEQ ID NO: 163760 - protein, 10 aa, Artificial Sequence
  Description of Artificial Sequence: Synthetic peptide
  Seed: LKTRPILSPL
LNTRPILSPA

SEQ ID NO: 163761 - protein, 10 aa, Artificial Sequence
  Description of Artificial Sequence: Synthetic peptide
  Seed: LKTRPILSPL
LNTRPILSPF

SEQ ID NO: 163762 - protein, 10 aa, Artificial Sequence
  Description of Artificial Sequence: Synthetic peptide
  Seed: LKTRPILSPL
LNTRPILSPG

SEQ ID NO: 163763 - protein, 10 aa, Artificial Sequence
  Description of Artificial Sequence: Synthetic peptide
  Seed: LKTRPILSPL
LNTRPILSPI

SEQ ID NO: 163764 - protein, 10 aa, Artificial Sequence
  Description of Artificial Sequence: Synthetic peptide
  Seed: LKTRPILSPL
LNTRPILSPK

SEQ ID NO: 163765 - protein, 10 aa, Artificial Sequence
  Description of Artificial Sequence: Synthetic peptide
  Seed: LKTRPILSPL
LNTRPILSPL

SEQ ID NO: 163766 - protein, 10 aa, Artificial Sequence
  Description of Artificial Sequence: Synthetic peptide
  Seed: LKTRPILSPL
LNTRPILSPM

SEQ ID NO: 163767 - protein, 10 aa, Artificial Sequence
  Description of Artificial Sequence: Synthetic peptide
  Seed: LKTRPILSPL
LNTRPILSPS

SEQ ID NO: 163768 - protein, 10 aa, Artificial Sequence
  Description of Artificial Sequence: Synthetic peptide
  Seed: LKTRPILSPL
LNTRPILSPT

SEQ ID NO: 163769 - protein, 10 aa, Artificial Sequence
  Description of Artificial Sequence: Synthetic peptide
  Seed: LKTRPILSPL
LNTRPILSPV

SEQ ID NO: 163770 - protein, 10 aa, Artificial Sequence
  Description of Artificial Sequence: Synthetic peptide
  Seed: LKTRPILSPL
LNTRPILSPW

SEQ ID NO: 163771 - protein, 10 aa, Artificial Sequence
  Description of Artificial Sequence: Synthetic peptide
  Seed: LKTRPILSPL
LNTRPILSPY

SEQ ID NO: 163772 - protein, 11 aa, Artificial Sequence
  Description of Artificial Sequence: Synthetic peptide
  Seed: LQRRRFVQNAL
LPRRRFVQNAA

SEQ ID NO: 163773 - protein, 11 aa, Artificial Sequence
  Description of Artificial Sequence: Synthetic peptide
  Seed: LQRRRFVQNAL
LPRRRFVQNAF

SEQ ID NO: 163774 - protein, 11 aa, Artificial Sequence
  Description of Artificial Sequence: Synthetic peptide
  Seed: LQRRRFVQNAL
LPRRRFVQNAI

SEQ ID NO: 163775 - protein, 11 aa, Artificial Sequence
  Description of Artificial Sequence: Synthetic peptide
  Seed: LQRRRFVQNAL
LPRRRFVQNAL

SEQ ID NO: 163776 - protein, 11 aa, Artificial Sequence
  Description of Artificial Sequence: Synthetic peptide
  Seed: LQRRRFVQNAL
LPRRRFVQNAM

SEQ ID NO: 163777 - protein, 11 aa, Artificial Sequence
  Description of Artificial Sequence: Synthetic peptide
  Seed: LQRRRFVQNAL
LPRRRFVQNAV

SEQ ID NO: 163778 - protein, 10 aa, Artificial Sequence
  Description of Artificial Sequence: Synthetic peptide
  Seed: LKTRPILSPL
LPTRPILSPA

SEQ ID NO: 163779 - protein, 10 aa, Artificial Sequence
  Description of Artificial Sequence: Synthetic peptide
  Seed: LKTRPILSPL
LPTRPILSPC

SEQ ID NO: 163780 - protein, 10 aa, Artificial Sequence
  Description of Artificial Sequence: Synthetic peptide
  Seed: LKTRPILSPL
LPTRPILSPF

SEQ ID NO: 163781 - protein, 10 aa, Artificial Sequence
  Description of Artificial Sequence: Synthetic peptide
  Seed: LKTRPILSPL
LPTRPILSPG

SEQ ID NO: 163782 - protein, 10 aa, Artificial Sequence
  Description of Artificial Sequence: Synthetic peptide
  Seed: LKTRPILSPL
LPTRPILSPI

SEQ ID NO: 163783 - protein, 10 aa, Artificial Sequence
  Description of Artificial Sequence: Synthetic peptide
  Seed: LKTRPILSPL
LPTRPILSPK

SEQ ID NO: 163784 - protein, 10 aa, Artificial Sequence
  Description of Artificial Sequence: Synthetic peptide
  Seed: LKTRPILSPL
LPTRPILSPL

SEQ ID NO: 163785 - protein, 10 aa, Artificial Sequence
  Description of Artificial Sequence: Synthetic peptide
  Seed: LKTRPILSPL
LPTRPILSPM

SEQ ID NO: 163786 - protein, 10 aa, Artificial Sequence
  Description of Artificial Sequence: Synthetic peptide
  Seed: LKTRPILSPL
LPTRPILSPP

SEQ ID NO: 163787 - protein, 10 aa, Artificial Sequence
  Description of Artificial Sequence: Synthetic peptide
  Seed: LKTRPILSPL
LPTRPILSPS

SEQ ID NO: 163788 - protein, 10 aa, Artificial Sequence
  Description of Artificial Sequence: Synthetic peptide
  Seed: LKTRPILSPL
LPTRPILSPT

SEQ ID NO: 163789 - protein, 10 aa, Artificial Sequence
  Description of Artificial Sequence: Synthetic peptide
  Seed: LKTRPILSPL
LPTRPILSPV

SEQ ID NO: 163790 - protein, 10 aa, Artificial Sequence
  Description of Artificial Sequence: Synthetic peptide
  Seed: LKTRPILSPL
LPTRPILSPW

SEQ ID NO: 163791 - protein, 10 aa, Artificial Sequence
  Description of Artificial Sequence: Synthetic peptide
  Seed: LKTRPILSPL
LPTRPILSPY

SEQ ID NO: 163792 - protein, 11 aa, Artificial Sequence
  Description of Artificial Sequence: Synthetic peptide
  Seed: LQRRRFVQNAL
LQRRRFVQNAF

SEQ ID NO: 163793 - protein, 11 aa, Artificial Sequence
  Description of Artificial Sequence: Synthetic peptide
  Seed: LQRRRFVQNAL
LQRRRFVQNAI

SEQ ID NO: 163794 - protein, 11 aa, Artificial Sequence
  Description of Artificial Sequence: Synthetic peptide
  Seed: LQRRRFVQNAL
LQRRRFVQNAM

SEQ ID NO: 163795 - protein, 11 aa, Artificial Sequence
  Description of Artificial Sequence: Synthetic peptide
  Seed: LQRRRFVQNAL
LQRRRFVQNAV

SEQ ID NO: 163796 - protein, 11 aa, Artificial Sequence
  Description of Artificial Sequence: Synthetic peptide
  Seed: LQRRRFVQNAL
LQRRRFVQNAY

SEQ ID NO: 163797 - protein, 10 aa, Artificial Sequence
  Description of Artificial Sequence: Synthetic peptide
  Seed: LQRRRFVQNA
LQRRRFVQNK

SEQ ID NO: 163798 - protein, 10 aa, Artificial Sequence
  Description of Artificial Sequence: Synthetic peptide
  Seed: LKTRPILSPL
LQTRPILSPA

SEQ ID NO: 163799 - protein, 10 aa, Artificial Sequence
  Description of Artificial Sequence: Synthetic peptide
  Seed: LKTRPILSPL
LQTRPILSPF

SEQ ID NO: 163800 - protein, 10 aa, Artificial Sequence
  Description of Artificial Sequence: Synthetic peptide
  Seed: LKTRPILSPL
LQTRPILSPG

SEQ ID NO: 163801 - protein, 10 aa, Artificial Sequence
  Description of Artificial Sequence: Synthetic peptide
  Seed: LKTRPILSPL
LQTRPILSPH

SEQ ID NO: 163802 - protein, 10 aa, Artificial Sequence
  Description of Artificial Sequence: Synthetic peptide
  Seed: LKTRPILSPL
LQTRPILSPI

SEQ ID NO: 163803 - protein, 10 aa, Artificial Sequence
  Description of Artificial Sequence: Synthetic peptide
  Seed: LKTRPILSPL
LQTRPILSPK

SEQ ID NO: 163804 - protein, 10 aa, Artificial Sequence
  Description of Artificial Sequence: Synthetic peptide
  Seed: LKTRPILSPL
LQTRPILSPL

SEQ ID NO: 163805 - protein, 10 aa, Artificial Sequence
  Description of Artificial Sequence: Synthetic peptide
  Seed: LKTRPILSPL
LQTRPILSPM

SEQ ID NO: 163806 - protein, 10 aa, Artificial Sequence
  Description of Artificial Sequence: Synthetic peptide
  Seed: LKTRPILSPL
LQTRPILSPR

SEQ ID NO: 163807 - protein, 10 aa, Artificial Sequence
  Description of Artificial Sequence: Synthetic peptide
  Seed: LKTRPILSPL
LQTRPILSPS

SEQ ID NO: 163808 - protein, 10 aa, Artificial Sequence
  Description of Artificial Sequence: Synthetic peptide
  Seed: LKTRPILSPL
LQTRPILSPT

SEQ ID NO: 163809 - protein, 10 aa, Artificial Sequence
  Description of Artificial Sequence: Synthetic peptide
  Seed: LKTRPILSPL
LQTRPILSPV

SEQ ID NO: 163810 - protein, 10 aa, Artificial Sequence
  Description of Artificial Sequence: Synthetic peptide
  Seed: LKTRPILSPL
LQTRPILSPW

SEQ ID NO: 163811 - protein, 10 aa, Artificial Sequence
  Description of Artificial Sequence: Synthetic peptide
  Seed: LKTRPILSPL
LQTRPILSPY

SEQ ID NO: 163812 - protein, 11 aa, Artificial Sequence
  Description of Artificial Sequence: Synthetic peptide
  Seed: LQRRRFVQNAL
LRRRRFVQNAL

SEQ ID NO: 163813 - protein, 11 aa, Artificial Sequence
  Description of Artificial Sequence: Synthetic peptide
  Seed: LQRRRFVQNAL
LRRRRFVQNAM

SEQ ID NO: 163814 - protein, 10 aa, Artificial Sequence
  Description of Artificial Sequence: Synthetic peptide
  Seed: LKTRPILSPL
LRTRPILSPA

SEQ ID NO: 163815 - protein, 10 aa, Artificial Sequence
  Description of Artificial Sequence: Synthetic peptide
  Seed: LKTRPILSPL
LRTRPILSPC

SEQ ID NO: 163816 - protein, 10 aa, Artificial Sequence
  Description of Artificial Sequence: Synthetic peptide
  Seed: LKTRPILSPL
LRTRPILSPE

SEQ ID NO: 163817 - protein, 10 aa, Artificial Sequence
  Description of Artificial Sequence: Synthetic peptide
  Seed: LKTRPILSPL
LRTRPILSPF

SEQ ID NO: 163818 - protein, 10 aa, Artificial Sequence
  Description of Artificial Sequence: Synthetic peptide
  Seed: LKTRPILSPL
LRTRPILSPG

SEQ ID NO: 163819 - protein, 10 aa, Artificial Sequence
  Description of Artificial Sequence: Synthetic peptide
  Seed: LKTRPILSPL
LRTRPILSPH

SEQ ID NO: 163820 - protein, 10 aa, Artificial Sequence
  Description of Artificial Sequence: Synthetic peptide
  Seed: LKTRPILSPL
LRTRPILSPI

SEQ ID NO: 163821 - protein, 10 aa, Artificial Sequence
  Description of Artificial Sequence: Synthetic peptide
  Seed: LKTRPILSPL
LRTRPILSPK

SEQ ID NO: 163822 - protein, 10 aa, Artificial Sequence
  Description of Artificial Sequence: Synthetic peptide
  Seed: LKTRPILSPL
LRTRPILSPL

SEQ ID NO: 163823 - protein, 10 aa, Artificial Sequence
  Description of Artificial Sequence: Synthetic peptide
  Seed: LKTRPILSPL
LRTRPILSPM

SEQ ID NO: 163824 - protein, 10 aa, Artificial Sequence
  Description of Artificial Sequence: Synthetic peptide
  Seed: LKTRPILSPL
LRTRPILSPN

SEQ ID NO: 163825 - protein, 10 aa, Artificial Sequence
  Description of Artificial Sequence: Synthetic peptide
  Seed: LKTRPILSPL
LRTRPILSPP

SEQ ID NO: 163826 - protein, 10 aa, Artificial Sequence
  Description of Artificial Sequence: Synthetic peptide
  Seed: LKTRPILSPL
LRTRPILSPQ

SEQ ID NO: 163827 - protein, 10 aa, Artificial Sequence
  Description of Artificial Sequence: Synthetic peptide
  Seed: LKTRPILSPL
LRTRPILSPR

SEQ ID NO: 163828 - protein, 10 aa, Artificial Sequence
  Description of Artificial Sequence: Synthetic peptide
  Seed: LKTRPILSPL
LRTRPILSPS

SEQ ID NO: 163829 - protein, 10 aa, Artificial Sequence
  Description of Artificial Sequence: Synthetic peptide
  Seed: LKTRPILSPL
LRTRPILSPT

SEQ ID NO: 163830 - protein, 10 aa, Artificial Sequence
  Description of Artificial Sequence: Synthetic peptide
  Seed: LKTRPILSPL
LRTRPILSPV

SEQ ID NO: 163831 - protein, 10 aa, Artificial Sequence
  Description of Artificial Sequence: Synthetic peptide
  Seed: LKTRPILSPL
LRTRPILSPW

SEQ ID NO: 163832 - protein, 10 aa, Artificial Sequence
  Description of Artificial Sequence: Synthetic peptide
  Seed: LKTRPILSPL
LRTRPILSPY

SEQ ID NO: 163833 - protein, 10 aa, Artificial Sequence
  Description of Artificial Sequence: Synthetic peptide
  Seed: LQRRRFVQNA
LSRRRFVQNA

SEQ ID NO: 163834 - protein, 11 aa, Artificial Sequence
  Description of Artificial Sequence: Synthetic peptide
  Seed: LQRRRFVQNAL
LSRRRFVQNAL

SEQ ID NO: 163835 - protein, 11 aa, Artificial Sequence
  Description of Artificial Sequence: Synthetic peptide
  Seed: LQRRRFVQNAL
LSRRRFVQNAM

SEQ ID NO: 163836 - protein, 10 aa, Artificial Sequence
  Description of Artificial Sequence: Synthetic peptide
  Seed: LQRRRFVQNA
LSRRRFVQNI

SEQ ID NO: 163837 - protein, 10 aa, Artificial Sequence
  Description of Artificial Sequence: Synthetic peptide
  Seed: LQRRRFVQNA
LSRRRFVQNK

SEQ ID NO: 163838 - protein, 10 aa, Artificial Sequence
  Description of Artificial Sequence: Synthetic peptide
  Seed: LQRRRFVQNA
LSRRRFVQNL

SEQ ID NO: 163839 - protein, 10 aa, Artificial Sequence
  Description of Artificial Sequence: Synthetic peptide
  Seed: LQRRRFVQNA
LSRRRFVQNM

SEQ ID NO: 163840 - protein, 10 aa, Artificial Sequence
  Description of Artificial Sequence: Synthetic peptide
  Seed: LQRRRFVQNA
LSRRRFVQNS

SEQ ID NO: 163841 - protein, 10 aa, Artificial Sequence
  Description of Artificial Sequence: Synthetic peptide
  Seed: LQRRRFVQNA
LSRRRFVQNV

SEQ ID NO: 163842 - protein, 10 aa, Artificial Sequence
  Description of Artificial Sequence: Synthetic peptide
  Seed: LQRRRFVQNA
LSRRRFVQNY

SEQ ID NO: 163843 - protein, 10 aa, Artificial Sequence
  Description of Artificial Sequence: Synthetic peptide
  Seed: LKTRPILSPL
LSTRPILSPA

SEQ ID NO: 163844 - protein, 10 aa, Artificial Sequence
  Description of Artificial Sequence: Synthetic peptide
  Seed: LKTRPILSPL
LSTRPILSPF

SEQ ID NO: 163845 - protein, 10 aa, Artificial Sequence
  Description of Artificial Sequence: Synthetic peptide
  Seed: LKTRPILSPL
LSTRPILSPG

SEQ ID NO: 163846 - protein, 10 aa, Artificial Sequence
  Description of Artificial Sequence: Synthetic peptide
  Seed: LKTRPILSPL
LSTRPILSPI

SEQ ID NO: 163847 - protein, 10 aa, Artificial Sequence
  Description of Artificial Sequence: Synthetic peptide
  Seed: LKTRPILSPL
LSTRPILSPK

SEQ ID NO: 163848 - protein, 10 aa, Artificial Sequence
  Description of Artificial Sequence: Synthetic peptide
  Seed: LKTRPILSPL
LSTRPILSPL

SEQ ID NO: 163849 - protein, 10 aa, Artificial Sequence
  Description of Artificial Sequence: Synthetic peptide
  Seed: LKTRPILSPL
LSTRPILSPM

SEQ ID NO: 163850 - protein, 10 aa, Artificial Sequence
  Description of Artificial Sequence: Synthetic peptide
  Seed: LKTRPILSPL
LSTRPILSPP

SEQ ID NO: 163851 - protein, 10 aa, Artificial Sequence
  Description of Artificial Sequence: Synthetic peptide
  Seed: LKTRPILSPL
LSTRPILSPR

SEQ ID NO: 163852 - protein, 10 aa, Artificial Sequence
  Description of Artificial Sequence: Synthetic peptide
  Seed: LKTRPILSPL
LSTRPILSPS

SEQ ID NO: 163853 - protein, 10 aa, Artificial Sequence
  Description of Artificial Sequence: Synthetic peptide
  Seed: LKTRPILSPL
LSTRPILSPT

SEQ ID NO: 163854 - protein, 10 aa, Artificial Sequence
  Description of Artificial Sequence: Synthetic peptide
  Seed: LKTRPILSPL
LSTRPILSPV

SEQ ID NO: 163855 - protein, 10 aa, Artificial Sequence
  Description of Artificial Sequence: Synthetic peptide
  Seed: LKTRPILSPL
LSTRPILSPW

SEQ ID NO: 163856 - protein, 10 aa, Artificial Sequence
  Description of Artificial Sequence: Synthetic peptide
  Seed: LKTRPILSPL
LSTRPILSPY

SEQ ID NO: 163857 - protein, 10 aa, Artificial Sequence
  Description of Artificial Sequence: Synthetic peptide
  Seed: LQRRRFVQNA
LTRRRFVQNA

SEQ ID NO: 163858 - protein, 11 aa, Artificial Sequence
  Description of Artificial Sequence: Synthetic peptide
  Seed: LQRRRFVQNAL
LTRRRFVQNAL

SEQ ID NO: 163859 - protein, 11 aa, Artificial Sequence
  Description of Artificial Sequence: Synthetic peptide
  Seed: LQRRRFVQNAL
LTRRRFVQNAM

SEQ ID NO: 163860 - protein, 10 aa, Artificial Sequence
  Description of Artificial Sequence: Synthetic peptide
  Seed: LQRRRFVQNA
LTRRRFVQNI

SEQ ID NO: 163861 - protein, 10 aa, Artificial Sequence
  Description of Artificial Sequence: Synthetic peptide
  Seed: LQRRRFVQNA
LTRRRFVQNK

SEQ ID NO: 163862 - protein, 10 aa, Artificial Sequence
  Description of Artificial Sequence: Synthetic peptide
  Seed: LQRRRFVQNA
LTRRRFVQNL

SEQ ID NO: 163863 - protein, 10 aa, Artificial Sequence
  Description of Artificial Sequence: Synthetic peptide
  Seed: LQRRRFVQNA
LTRRRFVQNM

SEQ ID NO: 163864 - protein, 10 aa, Artificial Sequence
  Description of Artificial Sequence: Synthetic peptide
  Seed: LQRRRFVQNA
LTRRRFVQNS

SEQ ID NO: 163865 - protein, 10 aa, Artificial Sequence
  Description of Artificial Sequence: Synthetic peptide
  Seed: LQRRRFVQNA
LTRRRFVQNT

SEQ ID NO: 163866 - protein, 10 aa, Artificial Sequence
  Description of Artificial Sequence: Synthetic peptide
  Seed: LQRRRFVQNA
LTRRRFVQNV

SEQ ID NO: 163867 - protein, 10 aa, Artificial Sequence
  Description of Artificial Sequence: Synthetic peptide
  Seed: LQRRRFVQNA
LTRRRFVQNY

SEQ ID NO: 163868 - protein, 10 aa, Artificial Sequence
  Description of Artificial Sequence: Synthetic peptide
  Seed: LKTRPILSPL
LTTRPILSPA

SEQ ID NO: 163869 - protein, 10 aa, Artificial Sequence
  Description of Artificial Sequence: Synthetic peptide
  Seed: LKTRPILSPL
LTTRPILSPF

SEQ ID NO: 163870 - protein, 10 aa, Artificial Sequence
  Description of Artificial Sequence: Synthetic peptide
  Seed: LKTRPILSPL
LTTRPILSPG

SEQ ID NO: 163871 - protein, 10 aa, Artificial Sequence
  Description of Artificial Sequence: Synthetic peptide
  Seed: LKTRPILSPL
LTTRPILSPI

SEQ ID NO: 163872 - protein, 10 aa, Artificial Sequence
  Description of Artificial Sequence: Synthetic peptide
  Seed: LKTRPILSPL
LTTRPILSPK

SEQ ID NO: 163873 - protein, 10 aa, Artificial Sequence
  Description of Artificial Sequence: Synthetic peptide
  Seed: LKTRPILSPL
LTTRPILSPL

SEQ ID NO: 163874 - protein, 10 aa, Artificial Sequence
  Description of Artificial Sequence: Synthetic peptide
  Seed: LKTRPILSPL
LTTRPILSPM

SEQ ID NO: 163875 - protein, 10 aa, Artificial Sequence
  Description of Artificial Sequence: Synthetic peptide
  Seed: LKTRPILSPL
LTTRPILSPS

SEQ ID NO: 163876 - protein, 10 aa, Artificial Sequence
  Description of Artificial Sequence: Synthetic peptide
  Seed: LKTRPILSPL
LTTRPILSPT

SEQ ID NO: 163877 - protein, 10 aa, Artificial Sequence
  Description of Artificial Sequence: Synthetic peptide
  Seed: LKTRPILSPL
LTTRPILSPV

SEQ ID NO: 163878 - protein, 10 aa, Artificial Sequence
  Description of Artificial Sequence: Synthetic peptide
  Seed: LKTRPILSPL
LTTRPILSPW

SEQ ID NO: 163879 - protein, 10 aa, Artificial Sequence
  Description of Artificial Sequence: Synthetic peptide
  Seed: LKTRPILSPL
LTTRPILSPY

SEQ ID NO: 163880 - protein, 10 aa, Artificial Sequence
  Description of Artificial Sequence: Synthetic peptide
  Seed: LQRRRFVQNA
LVRRRFVQNA

SEQ ID NO: 163881 - protein, 11 aa, Artificial Sequence
  Description of Artificial Sequence: Synthetic peptide
  Seed: LQRRRFVQNAL
LVRRRFVQNAF

SEQ ID NO: 163882 - protein, 11 aa, Artificial Sequence
  Description of Artificial Sequence: Synthetic peptide
  Seed: LQRRRFVQNAL
LVRRRFVQNAI

SEQ ID NO: 163883 - protein, 11 aa, Artificial Sequence
  Description of Artificial Sequence: Synthetic peptide
  Seed: LQRRRFVQNAL
LVRRRFVQNAL

SEQ ID NO: 163884 - protein, 11 aa, Artificial Sequence
  Description of Artificial Sequence: Synthetic peptide
  Seed: LQRRRFVQNAL
LVRRRFVQNAM

SEQ ID NO: 163885 - protein, 11 aa, Artificial Sequence
  Description of Artificial Sequence: Synthetic peptide
  Seed: LQRRRFVQNAL
LVRRRFVQNAV

SEQ ID NO: 163886 - protein, 10 aa, Artificial Sequence
  Description of Artificial Sequence: Synthetic peptide
  Seed: LQRRRFVQNA
LVRRRFVQNI

SEQ ID NO: 163887 - protein, 10 aa, Artificial Sequence
  Description of Artificial Sequence: Synthetic peptide
  Seed: LQRRRFVQNA
LVRRRFVQNK

SEQ ID NO: 163888 - protein, 10 aa, Artificial Sequence
  Description of Artificial Sequence: Synthetic peptide
  Seed: LQRRRFVQNA
LVRRRFVQNL

SEQ ID NO: 163889 - protein, 10 aa, Artificial Sequence
  Description of Artificial Sequence: Synthetic peptide
  Seed: LQRRRFVQNA
LVRRRFVQNV

SEQ ID NO: 163890 - protein, 10 aa, Artificial Sequence
  Description of Artificial Sequence: Synthetic peptide
  Seed: LKTRPILSPL
LVTRPILSPA

SEQ ID NO: 163891 - protein, 10 aa, Artificial Sequence
  Description of Artificial Sequence: Synthetic peptide
  Seed: LKTRPILSPL
LVTRPILSPF

SEQ ID NO: 163892 - protein, 10 aa, Artificial Sequence
  Description of Artificial Sequence: Synthetic peptide
  Seed: LKTRPILSPL
LVTRPILSPG

SEQ ID NO: 163893 - protein, 10 aa, Artificial Sequence
  Description of Artificial Sequence: Synthetic peptide
  Seed: LKTRPILSPL
LVTRPILSPI

SEQ ID NO: 163894 - protein, 10 aa, Artificial Sequence
  Description of Artificial Sequence: Synthetic peptide
  Seed: LKTRPILSPL
LVTRPILSPK

SEQ ID NO: 163895 - protein, 10 aa, Artificial Sequence
  Description of Artificial Sequence: Synthetic peptide
  Seed: LKTRPILSPL
LVTRPILSPL

SEQ ID NO: 163896 - protein, 10 aa, Artificial Sequence
  Description of Artificial Sequence: Synthetic peptide
  Seed: LKTRPILSPL
LVTRPILSPM

SEQ ID NO: 163897 - protein, 10 aa, Artificial Sequence
  Description of Artificial Sequence: Synthetic peptide
  Seed: LKTRPILSPL
LVTRPILSPS

SEQ ID NO: 163898 - protein, 10 aa, Artificial Sequence
  Description of Artificial Sequence: Synthetic peptide
  Seed: LKTRPILSPL
LVTRPILSPT

SEQ ID NO: 163899 - protein, 10 aa, Artificial Sequence
  Description of Artificial Sequence: Synthetic peptide
  Seed: LKTRPILSPL
LVTRPILSPV

SEQ ID NO: 163900 - protein, 10 aa, Artificial Sequence
  Description of Artificial Sequence: Synthetic peptide
  Seed: LKTRPILSPL
LVTRPILSPW

SEQ ID NO: 163901 - protein, 10 aa, Artificial Sequence
  Description of Artificial Sequence: Synthetic peptide
  Seed: LKTRPILSPL
LVTRPILSPY

SEQ ID NO: 163902 - protein, 10 aa, Artificial Sequence
  Description of Artificial Sequence: Synthetic peptide
  Seed: LQRRRFVQNA
LWRRRFVQNA

SEQ ID NO: 163903 - protein, 11 aa, Artificial Sequence
  Description of Artificial Sequence: Synthetic peptide
  Seed: LQRRRFVQNAL
LWRRRFVQNAL

SEQ ID NO: 163904 - protein, 11 aa, Artificial Sequence
  Description of Artificial Sequence: Synthetic peptide
  Seed: LQRRRFVQNAL
LWRRRFVQNAM

SEQ ID NO: 163905 - protein, 10 aa, Artificial Sequence
  Description of Artificial Sequence: Synthetic peptide
  Seed: LQRRRFVQNA
LWRRRFVQNK

SEQ ID NO: 163906 - protein, 10 aa, Artificial Sequence
  Description of Artificial Sequence: Synthetic peptide
  Seed: LKTRPILSPL
LWTRPILSPA

SEQ ID NO: 163907 - protein, 10 aa, Artificial Sequence
  Description of Artificial Sequence: Synthetic peptide
  Seed: LKTRPILSPL
LWTRPILSPF

SEQ ID NO: 163908 - protein, 10 aa, Artificial Sequence
  Description of Artificial Sequence: Synthetic peptide
  Seed: LKTRPILSPL
LWTRPILSPG

SEQ ID NO: 163909 - protein, 10 aa, Artificial Sequence
  Description of Artificial Sequence: Synthetic peptide
  Seed: LKTRPILSPL
LWTRPILSPI

SEQ ID NO: 163910 - protein, 10 aa, Artificial Sequence
  Description of Artificial Sequence: Synthetic peptide
  Seed: LKTRPILSPL
LWTRPILSPK

SEQ ID NO: 163911 - protein, 10 aa, Artificial Sequence
  Description of Artificial Sequence: Synthetic peptide
  Seed: LKTRPILSPL
LWTRPILSPL

SEQ ID NO: 163912 - protein, 10 aa, Artificial Sequence
  Description of Artificial Sequence: Synthetic peptide
  Seed: LKTRPILSPL
LWTRPILSPM

SEQ ID NO: 163913 - protein, 10 aa, Artificial Sequence
  Description of Artificial Sequence: Synthetic peptide
  Seed: LKTRPILSPL
LWTRPILSPS

SEQ ID NO: 163914 - protein, 10 aa, Artificial Sequence
  Description of Artificial Sequence: Synthetic peptide
  Seed: LKTRPILSPL
LWTRPILSPT

SEQ ID NO: 163915 - protein, 10 aa, Artificial Sequence
  Description of Artificial Sequence: Synthetic peptide
  Seed: LKTRPILSPL
LWTRPILSPV

SEQ ID NO: 163916 - protein, 10 aa, Artificial Sequence
  Description of Artificial Sequence: Synthetic peptide
  Seed: LKTRPILSPL
LWTRPILSPW

SEQ ID NO: 163917 - protein, 10 aa, Artificial Sequence
  Description of Artificial Sequence: Synthetic peptide
  Seed: LKTRPILSPL
LWTRPILSPY

SEQ ID NO: 163918 - protein, 10 aa, Artificial Sequence
  Description of Artificial Sequence: Synthetic peptide
  Seed: LQRRRFVQNA
LYRRRFVQNA

SEQ ID NO: 163919 - protein, 11 aa, Artificial Sequence
  Description of Artificial Sequence: Synthetic peptide
  Seed: LQRRRFVQNAL
LYRRRFVQNAL

SEQ ID NO: 163920 - protein, 10 aa, Artificial Sequence
  Description of Artificial Sequence: Synthetic peptide
  Seed: LQRRRFVQNA
LYRRRFVQNI

SEQ ID NO: 163921 - protein, 10 aa, Artificial Sequence
  Description of Artificial Sequence: Synthetic peptide
  Seed: LQRRRFVQNA
LYRRRFVQNK

SEQ ID NO: 163922 - protein, 10 aa, Artificial Sequence
  Description of Artificial Sequence: Synthetic peptide
  Seed: LQRRRFVQNA
LYRRRFVQNV

SEQ ID NO: 163923 - protein, 10 aa, Artificial Sequence
  Description of Artificial Sequence: Synthetic peptide
  Seed: LKTRPILSPL
LYTRPILSPA

SEQ ID NO: 163924 - protein, 10 aa, Artificial Sequence
  Description of Artificial Sequence: Synthetic peptide
  Seed: LKTRPILSPL
LYTRPILSPF

SEQ ID NO: 163925 - protein, 10 aa, Artificial Sequence
  Description of Artificial Sequence: Synthetic peptide
  Seed: LKTRPILSPL
LYTRPILSPG

SEQ ID NO: 163926 - protein, 10 aa, Artificial Sequence
  Description of Artificial Sequence: Synthetic peptide
  Seed: LKTRPILSPL
LYTRPILSPI

SEQ ID NO: 163927 - protein, 10 aa, Artificial Sequence
  Description of Artificial Sequence: Synthetic peptide
  Seed: LKTRPILSPL
LYTRPILSPK

SEQ ID NO: 163928 - protein, 10 aa, Artificial Sequence
  Description of Artificial Sequence: Synthetic peptide
  Seed: LKTRPILSPL
LYTRPILSPL

SEQ ID NO: 163929 - protein, 10 aa, Artificial Sequence
  Description of Artificial Sequence: Synthetic peptide
  Seed: LKTRPILSPL
LYTRPILSPM

SEQ ID NO: 163930 - protein, 10 aa, Artificial Sequence
  Description of Artificial Sequence: Synthetic peptide
  Seed: LKTRPILSPL
LYTRPILSPP

SEQ ID NO: 163931 - protein, 10 aa, Artificial Sequence
  Description of Artificial Sequence: Synthetic peptide
  Seed: LKTRPILSPL
LYTRPILSPR

SEQ ID NO: 163932 - protein, 10 aa, Artificial Sequence
  Description of Artificial Sequence: Synthetic peptide
  Seed: LKTRPILSPL
LYTRPILSPS

SEQ ID NO: 163933 - protein, 10 aa, Artificial Sequence
  Description of Artificial Sequence: Synthetic peptide
  Seed: LKTRPILSPL
LYTRPILSPT

SEQ ID NO: 163934 - protein, 10 aa, Artificial Sequence
  Description of Artificial Sequence: Synthetic peptide
  Seed: LKTRPILSPL
LYTRPILSPV

SEQ ID NO: 163935 - protein, 10 aa, Artificial Sequence
  Description of Artificial Sequence: Synthetic peptide
  Seed: LKTRPILSPL
LYTRPILSPW

SEQ ID NO: 163936 - protein, 10 aa, Artificial Sequence
  Description of Artificial Sequence: Synthetic peptide
  Seed: LKTRPILSPL
LYTRPILSPY

SEQ ID NO: 163937 - protein, 10 aa, Artificial Sequence
  Description of Artificial Sequence: Synthetic peptide
  Seed: NPLIRHENRM
NALIRHENRL

SEQ ID NO: 163938 - protein, 10 aa, Artificial Sequence
  Description of Artificial Sequence: Synthetic peptide
  Seed: NPLIRHENRM
NILIRHENRL

SEQ ID NO: 163939 - protein, 10 aa, Artificial Sequence
  Description of Artificial Sequence: Synthetic peptide
  Seed: NPLIRHENRM
NLLIRHENRL

SEQ ID NO: 163940 - protein, 10 aa, Artificial Sequence
  Description of Artificial Sequence: Synthetic peptide
  Seed: NPLIRHENRM
NLLIRHENRM

SEQ ID NO: 163941 - protein, 10 aa, Artificial Sequence
  Description of Artificial Sequence: Synthetic peptide
  Seed: NPLIRHENRM
NMLIRHENRL

SEQ ID NO: 163942 - protein, 10 aa, Artificial Sequence
  Description of Artificial Sequence: Synthetic peptide
  Seed: NPLIRHENRM
NMLIRHENRM

SEQ ID NO: 163943 - protein, 10 aa, Artificial Sequence
  Description of Artificial Sequence: Synthetic peptide
  Seed: NPLIRHENRM
NPLIRHENRL

SEQ ID NO: 163944 - protein, 10 aa, Artificial Sequence
  Description of Artificial Sequence: Synthetic peptide
  Seed: QRRRFVQNAL
QQRRFVQNAL

SEQ ID NO: 163945 - protein, 10 aa, Artificial Sequence
  Description of Artificial Sequence: Synthetic peptide
  Seed: QRRRFVQNAL
QRRRFVQNAF

SEQ ID NO: 163946 - protein, 10 aa, Artificial Sequence
  Description of Artificial Sequence: Synthetic peptide
  Seed: QRRRFVQNAL
QRRRFVQNAI

SEQ ID NO: 163947 - protein, 10 aa, Artificial Sequence
  Description of Artificial Sequence: Synthetic peptide
  Seed: QRRRFVQNAL
QRRRFVQNAK

SEQ ID NO: 163948 - protein, 10 aa, Artificial Sequence
  Description of Artificial Sequence: Synthetic peptide
  Seed: QRRRFVQNAL
QRRRFVQNAM

SEQ ID NO: 163949 - protein, 10 aa, Artificial Sequence
  Description of Artificial Sequence: Synthetic peptide
  Seed: QRRRFVQNAL
QWRRFVQNAL

SEQ ID NO: 163950 - protein, 9 aa, Artificial Sequence
  Description of Artificial Sequence: Synthetic peptide
  Seed: RGLQRRRFV
RALQRRRFA

SEQ ID NO: 163951 - protein, 9 aa, Artificial Sequence
  Description of Artificial Sequence: Synthetic peptide
  Seed: RGLQRRRFV
RALQRRRFC

SEQ ID NO: 163952 - protein, 9 aa, Artificial Sequence
  Description of Artificial Sequence: Synthetic peptide
  Seed: RGLQRRRFV
RALQRRRFE

SEQ ID NO: 163953 - protein, 9 aa, Artificial Sequence
  Description of Artificial Sequence: Synthetic peptide
  Seed: RGLQRRRFV
RALQRRRFF

SEQ ID NO: 163954 - protein, 9 aa, Artificial Sequence
  Description of Artificial Sequence: Synthetic peptide
  Seed: RGLQRRRFV
RALQRRRFG

SEQ ID NO: 163955 - protein, 9 aa, Artificial Sequence
  Description of Artificial Sequence: Synthetic peptide
  Seed: RGLQRRRFV
RALQRRRFI

SEQ ID NO: 163956 - protein, 9 aa, Artificial Sequence
  Description of Artificial Sequence: Synthetic peptide
  Seed: RGLQRRRFV
RALQRRRFK

SEQ ID NO: 163957 - protein, 9 aa, Artificial Sequence
  Description of Artificial Sequence: Synthetic peptide
  Seed: RGLQRRRFV
RALQRRRFL

SEQ ID NO: 163958 - protein, 9 aa, Artificial Sequence
  Description of Artificial Sequence: Synthetic peptide
  Seed: RGLQRRRFV
RALQRRRFM

SEQ ID NO: 163959 - protein, 9 aa, Artificial Sequence
  Description of Artificial Sequence: Synthetic peptide
  Seed: RGLQRRRFV
RALQRRRFP

SEQ ID NO: 163960 - protein, 9 aa, Artificial Sequence
  Description of Artificial Sequence: Synthetic peptide
  Seed: RGLQRRRFV
RALQRRRFQ

SEQ ID NO: 163961 - protein, 9 aa, Artificial Sequence
  Description of Artificial Sequence: Synthetic peptide
  Seed: RGLQRRRFV
RALQRRRFR

SEQ ID NO: 163962 - protein, 9 aa, Artificial Sequence
  Description of Artificial Sequence: Synthetic peptide
  Seed: RGLQRRRFV
RALQRRRFS

SEQ ID NO: 163963 - protein, 9 aa, Artificial Sequence
  Description of Artificial Sequence: Synthetic peptide
  Seed: RGLQRRRFV
RALQRRRFT

SEQ ID NO: 163964 - protein, 9 aa, Artificial Sequence
  Description of Artificial Sequence: Synthetic peptide
  Seed: RGLQRRRFV
RALQRRRFV

SEQ ID NO: 163965 - protein, 9 aa, Artificial Sequence
  Description of Artificial Sequence: Synthetic peptide
  Seed: RGLQRRRFV
RALQRRRFY

SEQ ID NO: 163966 - protein, 9 aa, Artificial Sequence
  Description of Artificial Sequence: Synthetic peptide
  Seed: RRRFVQNAL
RARFVQNAF

SEQ ID NO: 163967 - protein, 9 aa, Artificial Sequence
  Description of Artificial Sequence: Synthetic peptide
  Seed: RRRFVQNAL
RARFVQNAL

SEQ ID NO: 163968 - protein, 9 aa, Artificial Sequence
  Description of Artificial Sequence: Synthetic peptide
  Seed: RRRFVQNAL
RARFVQNAM

SEQ ID NO: 163969 - protein, 9 aa, Artificial Sequence
  Description of Artificial Sequence: Synthetic peptide
  Seed: RRRFVQNAL
RARFVQNAW

SEQ ID NO: 163970 - protein, 9 aa, Artificial Sequence
  Description of Artificial Sequence: Synthetic peptide
  Seed: RRRFVQNAL
RARFVQNAY

SEQ ID NO: 163971 - protein, 9 aa, Artificial Sequence
  Description of Artificial Sequence: Synthetic peptide
  Seed: RGLQRRRFV
RCLQRRRFA

SEQ ID NO: 163972 - protein, 9 aa, Artificial Sequence
  Description of Artificial Sequence: Synthetic peptide
  Seed: RGLQRRRFV
RCLQRRRFK

SEQ ID NO: 163973 - protein, 9 aa, Artificial Sequence
  Description of Artificial Sequence: Synthetic peptide
  Seed: RRRFVQNAL
RCRFVQNAF

SEQ ID NO: 163974 - protein, 9 aa, Artificial Sequence
  Description of Artificial Sequence: Synthetic peptide
  Seed: RRRFVQNAL
RCRFVQNAY

SEQ ID NO: 163975 - protein, 9 aa, Artificial Sequence
  Description of Artificial Sequence: Synthetic peptide
  Seed: RRRFVQNAL
RERFVQNAF

SEQ ID NO: 163976 - protein, 9 aa, Artificial Sequence
  Description of Artificial Sequence: Synthetic peptide
  Seed: RRRFVQNAL
RERFVQNAI

SEQ ID NO: 163977 - protein, 9 aa, Artificial Sequence
  Description of Artificial Sequence: Synthetic peptide
  Seed: RRRFVQNAL
RERFVQNAL

SEQ ID NO: 163978 - protein, 9 aa, Artificial Sequence
  Description of Artificial Sequence: Synthetic peptide
  Seed: RRRFVQNAL
RERFVQNAM

SEQ ID NO: 163979 - protein, 9 aa, Artificial Sequence
  Description of Artificial Sequence: Synthetic peptide
  Seed: RRRFVQNAL
RERFVQNAW

SEQ ID NO: 163980 - protein, 9 aa, Artificial Sequence
  Description of Artificial Sequence: Synthetic peptide
  Seed: RRRFVQNAL
RERFVQNAY

SEQ ID NO: 163981 - protein, 9 aa, Artificial Sequence
  Description of Artificial Sequence: Synthetic peptide
  Seed: RGLQRRRFV
RFLQRRRFA

SEQ ID NO: 163982 - protein, 9 aa, Artificial Sequence
  Description of Artificial Sequence: Synthetic peptide
  Seed: RGLQRRRFV
RFLQRRRFC

SEQ ID NO: 163983 - protein, 9 aa, Artificial Sequence
  Description of Artificial Sequence: Synthetic peptide
  Seed: RGLQRRRFV
RFLQRRRFE

SEQ ID NO: 163984 - protein, 9 aa, Artificial Sequence
  Description of Artificial Sequence: Synthetic peptide
  Seed: RGLQRRRFV
RFLQRRRFF

SEQ ID NO: 163985 - protein, 9 aa, Artificial Sequence
  Description of Artificial Sequence: Synthetic peptide
  Seed: RGLQRRRFV
RFLQRRRFG

SEQ ID NO: 163986 - protein, 9 aa, Artificial Sequence
  Description of Artificial Sequence: Synthetic peptide
  Seed: RGLQRRRFV
RFLQRRRFI

SEQ ID NO: 163987 - protein, 9 aa, Artificial Sequence
  Description of Artificial Sequence: Synthetic peptide
  Seed: RGLQRRRFV
RFLQRRRFK

SEQ ID NO: 163988 - protein, 9 aa, Artificial Sequence
  Description of Artificial Sequence: Synthetic peptide
  Seed: RGLQRRRFV
RFLQRRRFL

SEQ ID NO: 163989 - protein, 9 aa, Artificial Sequence
  Description of Artificial Sequence: Synthetic peptide
  Seed: RGLQRRRFV
RFLQRRRFM

SEQ ID NO: 163990 - protein, 9 aa, Artificial Sequence
  Description of Artificial Sequence: Synthetic peptide
  Seed: RGLQRRRFV
RFLQRRRFN

SEQ ID NO: 163991 - protein, 9 aa, Artificial Sequence
  Description of Artificial Sequence: Synthetic peptide
  Seed: RGLQRRRFV
RFLQRRRFP

SEQ ID NO: 163992 - protein, 9 aa, Artificial Sequence
  Description of Artificial Sequence: Synthetic peptide
  Seed: RGLQRRRFV
RFLQRRRFQ

SEQ ID NO: 163993 - protein, 9 aa, Artificial Sequence
  Description of Artificial Sequence: Synthetic peptide
  Seed: RGLQRRRFV
RFLQRRRFR

SEQ ID NO: 163994 - protein, 9 aa, Artificial Sequence
  Description of Artificial Sequence: Synthetic peptide
  Seed: RGLQRRRFV
RFLQRRRFS

SEQ ID NO: 163995 - protein, 9 aa, Artificial Sequence
  Description of Artificial Sequence: Synthetic peptide
  Seed: RGLQRRRFV
RFLQRRRFT

SEQ ID NO: 163996 - protein, 9 aa, Artificial Sequence
  Description of Artificial Sequence: Synthetic peptide
  Seed: RGLQRRRFV
RFLQRRRFV

SEQ ID NO: 163997 - protein, 9 aa, Artificial Sequence
  Description of Artificial Sequence: Synthetic peptide
  Seed: RGLQRRRFV
RFLQRRRFY

SEQ ID NO: 163998 - protein, 9 aa, Artificial Sequence
  Description of Artificial Sequence: Synthetic peptide
  Seed: RRRFVQNAL
RFRFVQNAF

SEQ ID NO: 163999 - protein, 9 aa, Artificial Sequence
  Description of Artificial Sequence: Synthetic peptide
  Seed: RRRFVQNAL
RFRFVQNAI

SEQ ID NO: 164000 - protein, 9 aa, Artificial Sequence
  Description of Artificial Sequence: Synthetic peptide
  Seed: RRRFVQNAL
RFRFVQNAL

SEQ ID NO: 164001 - protein, 9 aa, Artificial Sequence
  Description of Artificial Sequence: Synthetic peptide
  Seed: RRRFVQNAL
RFRFVQNAM

SEQ ID NO: 164002 - protein, 9 aa, Artificial Sequence
  Description of Artificial Sequence: Synthetic peptide
  Seed: RRRFVQNAL
RFRFVQNAV

SEQ ID NO: 164003 - protein, 9 aa, Artificial Sequence
  Description of Artificial Sequence: Synthetic peptide
  Seed: RRRFVQNAL
RFRFVQNAW

SEQ ID NO: 164004 - protein, 9 aa, Artificial Sequence
  Description of Artificial Sequence: Synthetic peptide
  Seed: RRRFVQNAL
RFRFVQNAY

SEQ ID NO: 164005 - protein, 9 aa, Artificial Sequence
  Description of Artificial Sequence: Synthetic peptide
  Seed: RGLQRRRFV
RGLQRRRFA

SEQ ID NO: 164006 - protein, 9 aa, Artificial Sequence
  Description of Artificial Sequence: Synthetic peptide
  Seed: RGLQRRRFV
RGLQRRRFI

SEQ ID NO: 164007 - protein, 9 aa, Artificial Sequence
  Description of Artificial Sequence: Synthetic peptide
  Seed: RGLQRRRFV
RGLQRRRFK

SEQ ID NO: 164008 - protein, 9 aa, Artificial Sequence
  Description of Artificial Sequence: Synthetic peptide
  Seed: RGLQRRRFV
RGLQRRRFL

SEQ ID NO: 164009 - protein, 9 aa, Artificial Sequence
  Description of Artificial Sequence: Synthetic peptide
  Seed: RGLQRRRFV
RGLQRRRFM

SEQ ID NO: 164010 - protein, 9 aa, Artificial Sequence
  Description of Artificial Sequence: Synthetic peptide
  Seed: RGLQRRRFV
RGLQRRRFR

SEQ ID NO: 164011 - protein, 9 aa, Artificial Sequence
  Description of Artificial Sequence: Synthetic peptide
  Seed: RGLQRRRFV
RGLQRRRFS

SEQ ID NO: 164012 - protein, 9 aa, Artificial Sequence
  Description of Artificial Sequence: Synthetic peptide
  Seed: RGLQRRRFV
RGLQRRRFY

SEQ ID NO: 164013 - protein, 9 aa, Artificial Sequence
  Description of Artificial Sequence: Synthetic peptide
  Seed: RRRFVQNAL
RGRFVQNAF

SEQ ID NO: 164014 - protein, 9 aa, Artificial Sequence
  Description of Artificial Sequence: Synthetic peptide
  Seed: RRRFVQNAL
RGRFVQNAM

SEQ ID NO: 164015 - protein, 9 aa, Artificial Sequence
  Description of Artificial Sequence: Synthetic peptide
  Seed: RRRFVQNAL
RGRFVQNAY

SEQ ID NO: 164016 - protein, 9 aa, Artificial Sequence
  Description of Artificial Sequence: Synthetic peptide
  Seed: RGLQRRRFV
RHLQRRRFK

SEQ ID NO: 164017 - protein, 9 aa, Artificial Sequence
  Description of Artificial Sequence: Synthetic peptide
  Seed: RRRFVQNAL
RHRFVQNAF

SEQ ID NO: 164018 - protein, 9 aa, Artificial Sequence
  Description of Artificial Sequence: Synthetic peptide
  Seed: RRRFVQNAL
RHRFVQNAH

SEQ ID NO: 164019 - protein, 9 aa, Artificial Sequence
  Description of Artificial Sequence: Synthetic peptide
  Seed: RRRFVQNAL
RHRFVQNAI

SEQ ID NO: 164020 - protein, 9 aa, Artificial Sequence
  Description of Artificial Sequence: Synthetic peptide
  Seed: RRRFVQNAL
RHRFVQNAL

SEQ ID NO: 164021 - protein, 9 aa, Artificial Sequence
  Description of Artificial Sequence: Synthetic peptide
  Seed: RRRFVQNAL
RHRFVQNAM

SEQ ID NO: 164022 - protein, 9 aa, Artificial Sequence
  Description of Artificial Sequence: Synthetic peptide
  Seed: RRRFVQNAL
RHRFVQNAV

SEQ ID NO: 164023 - protein, 9 aa, Artificial Sequence
  Description of Artificial Sequence: Synthetic peptide
  Seed: RRRFVQNAL
RHRFVQNAW

SEQ ID NO: 164024 - protein, 9 aa, Artificial Sequence
  Description of Artificial Sequence: Synthetic peptide
  Seed: RRRFVQNAL
RHRFVQNAY

SEQ ID NO: 164025 - protein, 9 aa, Artificial Sequence
  Description of Artificial Sequence: Synthetic peptide
  Seed: RGLQRRRFV
RILQRRRFA

SEQ ID NO: 164026 - protein, 9 aa, Artificial Sequence
  Description of Artificial Sequence: Synthetic peptide
  Seed: RGLQRRRFV
RILQRRRFC

SEQ ID NO: 164027 - protein, 9 aa, Artificial Sequence
  Description of Artificial Sequence: Synthetic peptide
  Seed: RGLQRRRFV
RILQRRRFE

SEQ ID NO: 164028 - protein, 9 aa, Artificial Sequence
  Description of Artificial Sequence: Synthetic peptide
  Seed: RGLQRRRFV
RILQRRRFF

SEQ ID NO: 164029 - protein, 9 aa, Artificial Sequence
  Description of Artificial Sequence: Synthetic peptide
  Seed: RGLQRRRFV
RILQRRRFG

SEQ ID NO: 164030 - protein, 9 aa, Artificial Sequence
  Description of Artificial Sequence: Synthetic peptide
  Seed: RGLQRRRFV
RILQRRRFH

SEQ ID NO: 164031 - protein, 9 aa, Artificial Sequence
  Description of Artificial Sequence: Synthetic peptide
  Seed: RGLQRRRFV
RILQRRRFI

SEQ ID NO: 164032 - protein, 9 aa, Artificial Sequence
  Description of Artificial Sequence: Synthetic peptide
  Seed: RGLQRRRFV
RILQRRRFK

SEQ ID NO: 164033 - protein, 9 aa, Artificial Sequence
  Description of Artificial Sequence: Synthetic peptide
  Seed: RGLQRRRFV
RILQRRRFL

SEQ ID NO: 164034 - protein, 9 aa, Artificial Sequence
  Description of Artificial Sequence: Synthetic peptide
  Seed: RGLQRRRFV
RILQRRRFM

SEQ ID NO: 164035 - protein, 9 aa, Artificial Sequence
  Description of Artificial Sequence: Synthetic peptide
  Seed: RGLQRRRFV
RILQRRRFN

SEQ ID NO: 164036 - protein, 9 aa, Artificial Sequence
  Description of Artificial Sequence: Synthetic peptide
  Seed: RGLQRRRFV
RILQRRRFP

SEQ ID NO: 164037 - protein, 9 aa, Artificial Sequence
  Description of Artificial Sequence: Synthetic peptide
  Seed: RGLQRRRFV
RILQRRRFQ

SEQ ID NO: 164038 - protein, 9 aa, Artificial Sequence
  Description of Artificial Sequence: Synthetic peptide
  Seed: RGLQRRRFV
RILQRRRFR

SEQ ID NO: 164039 - protein, 9 aa, Artificial Sequence
  Description of Artificial Sequence: Synthetic peptide
  Seed: RGLQRRRFV
RILQRRRFS

SEQ ID NO: 164040 - protein, 9 aa, Artificial Sequence
  Description of Artificial Sequence: Synthetic peptide
  Seed: RGLQRRRFV
RILQRRRFT

SEQ ID NO: 164041 - protein, 9 aa, Artificial Sequence
  Description of Artificial Sequence: Synthetic peptide
  Seed: RGLQRRRFV
RILQRRRFV

SEQ ID NO: 164042 - protein, 9 aa, Artificial Sequence
  Description of Artificial Sequence: Synthetic peptide
  Seed: RGLQRRRFV
RILQRRRFY

SEQ ID NO: 164043 - protein, 9 aa, Artificial Sequence
  Description of Artificial Sequence: Synthetic peptide
  Seed: RRRFVQNAL
RIRFVQNAF

SEQ ID NO: 164044 - protein, 9 aa, Artificial Sequence
  Description of Artificial Sequence: Synthetic peptide
  Seed: RRRFVQNAL
RIRFVQNAM

SEQ ID NO: 164045 - protein, 9 aa, Artificial Sequence
  Description of Artificial Sequence: Synthetic peptide
  Seed: RRRFVQNAL
RIRFVQNAY

SEQ ID NO: 164046 - protein, 9 aa, Artificial Sequence
  Description of Artificial Sequence: Synthetic peptide
  Seed: RGLQRRRFV
RKLQRRRFK

SEQ ID NO: 164047 - protein, 9 aa, Artificial Sequence
  Description of Artificial Sequence: Synthetic peptide
  Seed: RRRFVQNAL
RKRFVQNAH

SEQ ID NO: 164048 - protein, 9 aa, Artificial Sequence
  Description of Artificial Sequence: Synthetic peptide
  Seed: RRRFVQNAL
RKRFVQNAI

SEQ ID NO: 164049 - protein, 9 aa, Artificial Sequence
  Description of Artificial Sequence: Synthetic peptide
  Seed: RRRFVQNAL
RKRFVQNAL

SEQ ID NO: 164050 - protein, 9 aa, Artificial Sequence
  Description of Artificial Sequence: Synthetic peptide
  Seed: RRRFVQNAL
RKRFVQNAM

SEQ ID NO: 164051 - protein, 9 aa, Artificial Sequence
  Description of Artificial Sequence: Synthetic peptide
  Seed: RRRFVQNAL
RKRFVQNAV

SEQ ID NO: 164052 - protein, 9 aa, Artificial Sequence
  Description of Artificial Sequence: Synthetic peptide
  Seed: RRRFVQNAL
RKRFVQNAW

SEQ ID NO: 164053 - protein, 9 aa, Artificial Sequence
  Description of Artificial Sequence: Synthetic peptide
  Seed: RRRFVQNAL
RKRFVQNAY

SEQ ID NO: 164054 - protein, 9 aa, Artificial Sequence
  Description of Artificial Sequence: Synthetic peptide
  Seed: RGLQRRRFV
RLLQRRRFA

SEQ ID NO: 164055 - protein, 9 aa, Artificial Sequence
  Description of Artificial Sequence: Synthetic peptide
  Seed: RGLQRRRFV
RLLQRRRFF

SEQ ID NO: 164056 - protein, 9 aa, Artificial Sequence
  Description of Artificial Sequence: Synthetic peptide
  Seed: RGLQRRRFV
RLLQRRRFG

SEQ ID NO: 164057 - protein, 9 aa, Artificial Sequence
  Description of Artificial Sequence: Synthetic peptide
  Seed: RGLQRRRFV
RLLQRRRFI

SEQ ID NO: 164058 - protein, 9 aa, Artificial Sequence
  Description of Artificial Sequence: Synthetic peptide
  Seed: RGLQRRRFV
RLLQRRRFK

SEQ ID NO: 164059 - protein, 9 aa, Artificial Sequence
  Description of Artificial Sequence: Synthetic peptide
  Seed: RGLQRRRFV
RLLQRRRFL

SEQ ID NO: 164060 - protein, 9 aa, Artificial Sequence
  Description of Artificial Sequence: Synthetic peptide
  Seed: RGLQRRRFV
RLLQRRRFM

SEQ ID NO: 164061 - protein, 9 aa, Artificial Sequence
  Description of Artificial Sequence: Synthetic peptide
  Seed: RGLQRRRFV
RLLQRRRFN

SEQ ID NO: 164062 - protein, 9 aa, Artificial Sequence
  Description of Artificial Sequence: Synthetic peptide
  Seed: RGLQRRRFV
RLLQRRRFP

SEQ ID NO: 164063 - protein, 9 aa, Artificial Sequence
  Description of Artificial Sequence: Synthetic peptide
  Seed: RGLQRRRFV
RLLQRRRFQ

SEQ ID NO: 164064 - protein, 9 aa, Artificial Sequence
  Description of Artificial Sequence: Synthetic peptide
  Seed: RGLQRRRFV
RLLQRRRFR

SEQ ID NO: 164065 - protein, 9 aa, Artificial Sequence
  Description of Artificial Sequence: Synthetic peptide
  Seed: RGLQRRRFV
RLLQRRRFS

SEQ ID NO: 164066 - protein, 9 aa, Artificial Sequence
  Description of Artificial Sequence: Synthetic peptide
  Seed: RGLQRRRFV
RLLQRRRFT

SEQ ID NO: 164067 - protein, 9 aa, Artificial Sequence
  Description of Artificial Sequence: Synthetic peptide
  Seed: RGLQRRRFV
RLLQRRRFV

SEQ ID NO: 164068 - protein, 9 aa, Artificial Sequence
  Description of Artificial Sequence: Synthetic peptide
  Seed: RGLQRRRFV
RLLQRRRFY

SEQ ID NO: 164069 - protein, 9 aa, Artificial Sequence
  Description of Artificial Sequence: Synthetic peptide
  Seed: RRRFVQNAL
RLRFVQNAF

SEQ ID NO: 164070 - protein, 9 aa, Artificial Sequence
  Description of Artificial Sequence: Synthetic peptide
  Seed: RRRFVQNAL
RLRFVQNAH

SEQ ID NO: 164071 - protein, 9 aa, Artificial Sequence
  Description of Artificial Sequence: Synthetic peptide
  Seed: RRRFVQNAL
RLRFVQNAL

SEQ ID NO: 164072 - protein, 9 aa, Artificial Sequence
  Description of Artificial Sequence: Synthetic peptide
  Seed: RRRFVQNAL
RLRFVQNAM

SEQ ID NO: 164073 - protein, 9 aa, Artificial Sequence
  Description of Artificial Sequence: Synthetic peptide
  Seed: RRRFVQNAL
RLRFVQNAW

SEQ ID NO: 164074 - protein, 9 aa, Artificial Sequence
  Description of Artificial Sequence: Synthetic peptide
  Seed: RRRFVQNAL
RLRFVQNAY

SEQ ID NO: 164075 - protein, 9 aa, Artificial Sequence
  Description of Artificial Sequence: Synthetic peptide
  Seed: RGLQRRRFV
RMLQRRRFA

SEQ ID NO: 164076 - protein, 9 aa, Artificial Sequence
  Description of Artificial Sequence: Synthetic peptide
  Seed: RGLQRRRFV
RMLQRRRFC

SEQ ID NO: 164077 - protein, 9 aa, Artificial Sequence
  Description of Artificial Sequence: Synthetic peptide
  Seed: RGLQRRRFV
RMLQRRRFE

SEQ ID NO: 164078 - protein, 9 aa, Artificial Sequence
  Description of Artificial Sequence: Synthetic peptide
  Seed: RGLQRRRFV
RMLQRRRFF

SEQ ID NO: 164079 - protein, 9 aa, Artificial Sequence
  Description of Artificial Sequence: Synthetic peptide
  Seed: RGLQRRRFV
RMLQRRRFG

SEQ ID NO: 164080 - protein, 9 aa, Artificial Sequence
  Description of Artificial Sequence: Synthetic peptide
  Seed: RGLQRRRFV
RMLQRRRFH

SEQ ID NO: 164081 - protein, 9 aa, Artificial Sequence
  Description of Artificial Sequence: Synthetic peptide
  Seed: RGLQRRRFV
RMLQRRRFI

SEQ ID NO: 164082 - protein, 9 aa, Artificial Sequence
  Description of Artificial Sequence: Synthetic peptide
  Seed: RGLQRRRFV
RMLQRRRFK

SEQ ID NO: 164083 - protein, 9 aa, Artificial Sequence
  Description of Artificial Sequence: Synthetic peptide
  Seed: RGLQRRRFV
RMLQRRRFL

SEQ ID NO: 164084 - protein, 9 aa, Artificial Sequence
  Description of Artificial Sequence: Synthetic peptide
  Seed: RGLQRRRFV
RMLQRRRFM

SEQ ID NO: 164085 - protein, 9 aa, Artificial Sequence
  Description of Artificial Sequence: Synthetic peptide
  Seed: RGLQRRRFV
RMLQRRRFN

SEQ ID NO: 164086 - protein, 9 aa, Artificial Sequence
  Description of Artificial Sequence: Synthetic peptide
  Seed: RGLQRRRFV
RMLQRRRFP

SEQ ID NO: 164087 - protein, 9 aa, Artificial Sequence
  Description of Artificial Sequence: Synthetic peptide
  Seed: RGLQRRRFV
RMLQRRRFQ

SEQ ID NO: 164088 - protein, 9 aa, Artificial Sequence
  Description of Artificial Sequence: Synthetic peptide
  Seed: RGLQRRRFV
RMLQRRRFR

SEQ ID NO: 164089 - protein, 9 aa, Artificial Sequence
  Description of Artificial Sequence: Synthetic peptide
  Seed: RGLQRRRFV
RMLQRRRFS

SEQ ID NO: 164090 - protein, 9 aa, Artificial Sequence
  Description of Artificial Sequence: Synthetic peptide
  Seed: RGLQRRRFV
RMLQRRRFT

SEQ ID NO: 164091 - protein, 9 aa, Artificial Sequence
  Description of Artificial Sequence: Synthetic peptide
  Seed: RGLQRRRFV
RMLQRRRFV

SEQ ID NO: 164092 - protein, 9 aa, Artificial Sequence
  Description of Artificial Sequence: Synthetic peptide
  Seed: RGLQRRRFV
RMLQRRRFY

SEQ ID NO: 164093 - protein, 9 aa, Artificial Sequence
  Description of Artificial Sequence: Synthetic peptide
  Seed: RRRFVQNAL
RMRFVQNAA

SEQ ID NO: 164094 - protein, 9 aa, Artificial Sequence
  Description of Artificial Sequence: Synthetic peptide
  Seed: RRRFVQNAL
RMRFVQNAF

SEQ ID NO: 164095 - protein, 9 aa, Artificial Sequence
  Description of Artificial Sequence: Synthetic peptide
  Seed: RRRFVQNAL
RMRFVQNAH

SEQ ID NO: 164096 - protein, 9 aa, Artificial Sequence
  Description of Artificial Sequence: Synthetic peptide
  Seed: RRRFVQNAL
RMRFVQNAI

SEQ ID NO: 164097 - protein, 9 aa, Artificial Sequence
  Description of Artificial Sequence: Synthetic peptide
  Seed: RRRFVQNAL
RMRFVQNAL

SEQ ID NO: 164098 - protein, 9 aa, Artificial Sequence
  Description of Artificial Sequence: Synthetic peptide
  Seed: RRRFVQNAL
RMRFVQNAM

SEQ ID NO: 164099 - protein, 9 aa, Artificial Sequence
  Description of Artificial Sequence: Synthetic peptide
  Seed: RRRFVQNAL
RMRFVQNAV

SEQ ID NO: 164100 - protein, 9 aa, Artificial Sequence
  Description of Artificial Sequence: Synthetic peptide
  Seed: RRRFVQNAL
RMRFVQNAW

SEQ ID NO: 164101 - protein, 9 aa, Artificial Sequence
  Description of Artificial Sequence: Synthetic peptide
  Seed: RRRFVQNAL
RMRFVQNAY

SEQ ID NO: 164102 - protein, 9 aa, Artificial Sequence
  Description of Artificial Sequence: Synthetic peptide
  Seed: RGLQRRRFV
RNLQRRRFA

SEQ ID NO: 164103 - protein, 9 aa, Artificial Sequence
  Description of Artificial Sequence: Synthetic peptide
  Seed: RGLQRRRFV
RNLQRRRFI

SEQ ID NO: 164104 - protein, 9 aa, Artificial Sequence
  Description of Artificial Sequence: Synthetic peptide
  Seed: RGLQRRRFV
RNLQRRRFK

SEQ ID NO: 164105 - protein, 9 aa, Artificial Sequence
  Description of Artificial Sequence: Synthetic peptide
  Seed: RGLQRRRFV
RNLQRRRFL

SEQ ID NO: 164106 - protein, 9 aa, Artificial Sequence
  Description of Artificial Sequence: Synthetic peptide
  Seed: RGLQRRRFV
RNLQRRRFM

SEQ ID NO: 164107 - protein, 9 aa, Artificial Sequence
  Description of Artificial Sequence: Synthetic peptide
  Seed: RGLQRRRFV
RNLQRRRFV

SEQ ID NO: 164108 - protein, 9 aa, Artificial Sequence
  Description of Artificial Sequence: Synthetic peptide
  Seed: RRRFVQNAL
RNRFVQNAF

SEQ ID NO: 164109 - protein, 9 aa, Artificial Sequence
  Description of Artificial Sequence: Synthetic peptide
  Seed: RRRFVQNAL
RNRFVQNAM

SEQ ID NO: 164110 - protein, 9 aa, Artificial Sequence
  Description of Artificial Sequence: Synthetic peptide
  Seed: RRRFVQNAL
RNRFVQNAY

SEQ ID NO: 164111 - protein, 9 aa, Artificial Sequence
  Description of Artificial Sequence: Synthetic peptide
  Seed: RRRFVQNAL
RPRFVQNAF

SEQ ID NO: 164112 - protein, 9 aa, Artificial Sequence
  Description of Artificial Sequence: Synthetic peptide
  Seed: RRRFVQNAL
RPRFVQNAY

SEQ ID NO: 164113 - protein, 8 aa, Artificial Sequence
  Description of Artificial Sequence: Synthetic peptide
  Seed: RRFVQNAL
RQFVQNAL

SEQ ID NO: 164114 - protein, 9 aa, Artificial Sequence
  Description of Artificial Sequence: Synthetic peptide
  Seed: RGLQRRRFV
RQLQRRRFA

SEQ ID NO: 164115 - protein, 9 aa, Artificial Sequence
  Description of Artificial Sequence: Synthetic peptide
  Seed: RGLQRRRFV
RQLQRRRFG

SEQ ID NO: 164116 - protein, 9 aa, Artificial Sequence
  Description of Artificial Sequence: Synthetic peptide
  Seed: RGLQRRRFV
RQLQRRRFI

SEQ ID NO: 164117 - protein, 9 aa, Artificial Sequence
  Description of Artificial Sequence: Synthetic peptide
  Seed: RGLQRRRFV
RQLQRRRFK

SEQ ID NO: 164118 - protein, 9 aa, Artificial Sequence
  Description of Artificial Sequence: Synthetic peptide
  Seed: RGLQRRRFV
RQLQRRRFL

SEQ ID NO: 164119 - protein, 9 aa, Artificial Sequence
  Description of Artificial Sequence: Synthetic peptide
  Seed: RGLQRRRFV
RQLQRRRFM

SEQ ID NO: 164120 - protein, 9 aa, Artificial Sequence
  Description of Artificial Sequence: Synthetic peptide
  Seed: RGLQRRRFV
RQLQRRRFQ

SEQ ID NO: 164121 - protein, 9 aa, Artificial Sequence
  Description of Artificial Sequence: Synthetic peptide
  Seed: RGLQRRRFV
RQLQRRRFR

SEQ ID NO: 164122 - protein, 9 aa, Artificial Sequence
  Description of Artificial Sequence: Synthetic peptide
  Seed: RGLQRRRFV
RQLQRRRFS

SEQ ID NO: 164123 - protein, 9 aa, Artificial Sequence
  Description of Artificial Sequence: Synthetic peptide
  Seed: RGLQRRRFV
RQLQRRRFT

SEQ ID NO: 164124 - protein, 9 aa, Artificial Sequence
  Description of Artificial Sequence: Synthetic peptide
  Seed: RGLQRRRFV
RQLQRRRFV

SEQ ID NO: 164125 - protein, 9 aa, Artificial Sequence
  Description of Artificial Sequence: Synthetic peptide
  Seed: RGLQRRRFV
RQLQRRRFY

SEQ ID NO: 164126 - protein, 9 aa, Artificial Sequence
  Description of Artificial Sequence: Synthetic peptide
  Seed: RRRFVQNAL
RQRFVQNAA

SEQ ID NO: 164127 - protein, 9 aa, Artificial Sequence
  Description of Artificial Sequence: Synthetic peptide
  Seed: RRRFVQNAL
RQRFVQNAC

SEQ ID NO: 164128 - protein, 9 aa, Artificial Sequence
  Description of Artificial Sequence: Synthetic peptide
  Seed: RRRFVQNAL
RQRFVQNAF

SEQ ID NO: 164129 - protein, 9 aa, Artificial Sequence
  Description of Artificial Sequence: Synthetic peptide
  Seed: RRRFVQNAL
RQRFVQNAG

SEQ ID NO: 164130 - protein, 9 aa, Artificial Sequence
  Description of Artificial Sequence: Synthetic peptide
  Seed: RRRFVQNAL
RQRFVQNAH

SEQ ID NO: 164131 - protein, 9 aa, Artificial Sequence
  Description of Artificial Sequence: Synthetic peptide
  Seed: RRRFVQNAL
RQRFVQNAI

SEQ ID NO: 164132 - protein, 9 aa, Artificial Sequence
  Description of Artificial Sequence: Synthetic peptide
  Seed: RRRFVQNAL
RQRFVQNAL

SEQ ID NO: 164133 - protein, 9 aa, Artificial Sequence
  Description of Artificial Sequence: Synthetic peptide
  Seed: RRRFVQNAL
RQRFVQNAM

SEQ ID NO: 164134 - protein, 9 aa, Artificial Sequence
  Description of Artificial Sequence: Synthetic peptide
  Seed: RRRFVQNAL
RQRFVQNAN

SEQ ID NO: 164135 - protein, 9 aa, Artificial Sequence
  Description of Artificial Sequence: Synthetic peptide
  Seed: RRRFVQNAL
RQRFVQNAS

SEQ ID NO: 164136 - protein, 9 aa, Artificial Sequence
  Description of Artificial Sequence: Synthetic peptide
  Seed: RRRFVQNAL
RQRFVQNAT

SEQ ID NO: 164137 - protein, 9 aa, Artificial Sequence
  Description of Artificial Sequence: Synthetic peptide
  Seed: RRRFVQNAL
RQRFVQNAV

SEQ ID NO: 164138 - protein, 9 aa, Artificial Sequence
  Description of Artificial Sequence: Synthetic peptide
  Seed: RRRFVQNAL
RQRFVQNAW

SEQ ID NO: 164139 - protein, 9 aa, Artificial Sequence
  Description of Artificial Sequence: Synthetic peptide
  Seed: RRRFVQNAL
RQRFVQNAY

SEQ ID NO: 164140 - protein, 8 aa, Artificial Sequence
  Description of Artificial Sequence: Synthetic peptide
  Seed: RRFVQNAL
RRFVQNAF

SEQ ID NO: 164141 - protein, 8 aa, Artificial Sequence
  Description of Artificial Sequence: Synthetic peptide
  Seed: RRFVQNAL
RRFVQNAI

SEQ ID NO: 164142 - protein, 8 aa, Artificial Sequence
  Description of Artificial Sequence: Synthetic peptide
  Seed: RRFVQNAL
RRFVQNAK

SEQ ID NO: 164143 - protein, 8 aa, Artificial Sequence
  Description of Artificial Sequence: Synthetic peptide
  Seed: RRFVQNAL
RRFVQNAM

SEQ ID NO: 164144 - protein, 8 aa, Artificial Sequence
  Description of Artificial Sequence: Synthetic peptide
  Seed: RRFVQNAL
RRFVQNAR

SEQ ID NO: 164145 - protein, 8 aa, Artificial Sequence
  Description of Artificial Sequence: Synthetic peptide
  Seed: RRFVQNAL
RRFVQNAV

SEQ ID NO: 164146 - protein, 8 aa, Artificial Sequence
  Description of Artificial Sequence: Synthetic peptide
  Seed: RRFVQNAL
RRFVQNAY

SEQ ID NO: 164147 - protein, 9 aa, Artificial Sequence
  Description of Artificial Sequence: Synthetic peptide
  Seed: RGLQRRRFV
RRLQRRRFK

SEQ ID NO: 164148 - protein, 9 aa, Artificial Sequence
  Description of Artificial Sequence: Synthetic peptide
  Seed: RRRFVQNAL
RRRFVQNAA

SEQ ID NO: 164149 - protein, 9 aa, Artificial Sequence
  Description of Artificial Sequence: Synthetic peptide
  Seed: RRRFVQNAL
RRRFVQNAC

SEQ ID NO: 164150 - protein, 9 aa, Artificial Sequence
  Description of Artificial Sequence: Synthetic peptide
  Seed: RRRFVQNAL
RRRFVQNAI

SEQ ID NO: 164151 - protein, 9 aa, Artificial Sequence
  Description of Artificial Sequence: Synthetic peptide
  Seed: RRRFVQNAL
RRRFVQNAK

SEQ ID NO: 164152 - protein, 9 aa, Artificial Sequence
  Description of Artificial Sequence: Synthetic peptide
  Seed: RRRFVQNAL
RRRFVQNAM

SEQ ID NO: 164153 - protein, 9 aa, Artificial Sequence
  Description of Artificial Sequence: Synthetic peptide
  Seed: RRRFVQNAL
RRRFVQNAR

SEQ ID NO: 164154 - protein, 9 aa, Artificial Sequence
  Description of Artificial Sequence: Synthetic peptide
  Seed: RRRFVQNAL
RRRFVQNAV

SEQ ID NO: 164155 - protein, 9 aa, Artificial Sequence
  Description of Artificial Sequence: Synthetic peptide
  Seed: RRRFVQNAL
RRRFVQNAW

SEQ ID NO: 164156 - protein, 9 aa, Artificial Sequence
  Description of Artificial Sequence: Synthetic peptide
  Seed: RGLQRRRFV
RSLQRRRFA

SEQ ID NO: 164157 - protein, 9 aa, Artificial Sequence
  Description of Artificial Sequence: Synthetic peptide
  Seed: RGLQRRRFV
RSLQRRRFC

SEQ ID NO: 164158 - protein, 9 aa, Artificial Sequence
  Description of Artificial Sequence: Synthetic peptide
  Seed: RGLQRRRFV
RSLQRRRFE

SEQ ID NO: 164159 - protein, 9 aa, Artificial Sequence
  Description of Artificial Sequence: Synthetic peptide
  Seed: RGLQRRRFV
RSLQRRRFF

SEQ ID NO: 164160 - protein, 9 aa, Artificial Sequence
  Description of Artificial Sequence: Synthetic peptide
  Seed: RGLQRRRFV
RSLQRRRFG

SEQ ID NO: 164161 - protein, 9 aa, Artificial Sequence
  Description of Artificial Sequence: Synthetic peptide
  Seed: RGLQRRRFV
RSLQRRRFH

SEQ ID NO: 164162 - protein, 9 aa, Artificial Sequence
  Description of Artificial Sequence: Synthetic peptide
  Seed: RGLQRRRFV
RSLQRRRFI

SEQ ID NO: 164163 - protein, 9 aa, Artificial Sequence
  Description of Artificial Sequence: Synthetic peptide
  Seed: RGLQRRRFV
RSLQRRRFK

SEQ ID NO: 164164 - protein, 9 aa, Artificial Sequence
  Description of Artificial Sequence: Synthetic peptide
  Seed: RGLQRRRFV
RSLQRRRFL

SEQ ID NO: 164165 - protein, 9 aa, Artificial Sequence
  Description of Artificial Sequence: Synthetic peptide
  Seed: RGLQRRRFV
RSLQRRRFM

SEQ ID NO: 164166 - protein, 9 aa, Artificial Sequence
  Description of Artificial Sequence: Synthetic peptide
  Seed: RGLQRRRFV
RSLQRRRFN

SEQ ID NO: 164167 - protein, 9 aa, Artificial Sequence
  Description of Artificial Sequence: Synthetic peptide
  Seed: RGLQRRRFV
RSLQRRRFP

SEQ ID NO: 164168 - protein, 9 aa, Artificial Sequence
  Description of Artificial Sequence: Synthetic peptide
  Seed: RGLQRRRFV
RSLQRRRFQ

SEQ ID NO: 164169 - protein, 9 aa, Artificial Sequence
  Description of Artificial Sequence: Synthetic peptide
  Seed: RGLQRRRFV
RSLQRRRFR

SEQ ID NO: 164170 - protein, 9 aa, Artificial Sequence
  Description of Artificial Sequence: Synthetic peptide
  Seed: RGLQRRRFV
RSLQRRRFS

SEQ ID NO: 164171 - protein, 9 aa, Artificial Sequence
  Description of Artificial Sequence: Synthetic peptide
  Seed: RGLQRRRFV
RSLQRRRFT

SEQ ID NO: 164172 - protein, 9 aa, Artificial Sequence
  Description of Artificial Sequence: Synthetic peptide
  Seed: RGLQRRRFV
RSLQRRRFV

SEQ ID NO: 164173 - protein, 9 aa, Artificial Sequence
  Description of Artificial Sequence: Synthetic peptide
  Seed: RGLQRRRFV
RSLQRRRFY

SEQ ID NO: 164174 - protein, 9 aa, Artificial Sequence
  Description of Artificial Sequence: Synthetic peptide
  Seed: RRRFVQNAL
RSRFVQNAF

SEQ ID NO: 164175 - protein, 9 aa, Artificial Sequence
  Description of Artificial Sequence: Synthetic peptide
  Seed: RRRFVQNAL
RSRFVQNAL

SEQ ID NO: 164176 - protein, 9 aa, Artificial Sequence
  Description of Artificial Sequence: Synthetic peptide
  Seed: RRRFVQNAL
RSRFVQNAM

SEQ ID NO: 164177 - protein, 9 aa, Artificial Sequence
  Description of Artificial Sequence: Synthetic peptide
  Seed: RRRFVQNAL
RSRFVQNAY

SEQ ID NO: 164178 - protein, 9 aa, Artificial Sequence
  Description of Artificial Sequence: Synthetic peptide
  Seed: RGLQRRRFV
RTLQRRRFA

SEQ ID NO: 164179 - protein, 9 aa, Artificial Sequence
  Description of Artificial Sequence: Synthetic peptide
  Seed: RGLQRRRFV
RTLQRRRFC

SEQ ID NO: 164180 - protein, 9 aa, Artificial Sequence
  Description of Artificial Sequence: Synthetic peptide
  Seed: RGLQRRRFV
RTLQRRRFD

SEQ ID NO: 164181 - protein, 9 aa, Artificial Sequence
  Description of Artificial Sequence: Synthetic peptide
  Seed: RGLQRRRFV
RTLQRRRFE

SEQ ID NO: 164182 - protein, 9 aa, Artificial Sequence
  Description of Artificial Sequence: Synthetic peptide
  Seed: RGLQRRRFV
RTLQRRRFF

SEQ ID NO: 164183 - protein, 9 aa, Artificial Sequence
  Description of Artificial Sequence: Synthetic peptide
  Seed: RGLQRRRFV
RTLQRRRFG

SEQ ID NO: 164184 - protein, 9 aa, Artificial Sequence
  Description of Artificial Sequence: Synthetic peptide
  Seed: RGLQRRRFV
RTLQRRRFH

SEQ ID NO: 164185 - protein, 9 aa, Artificial Sequence
  Description of Artificial Sequence: Synthetic peptide
  Seed: RGLQRRRFV
RTLQRRRFI

SEQ ID NO: 164186 - protein, 9 aa, Artificial Sequence
  Description of Artificial Sequence: Synthetic peptide
  Seed: RGLQRRRFV
RTLQRRRFK

SEQ ID NO: 164187 - protein, 9 aa, Artificial Sequence
  Description of Artificial Sequence: Synthetic peptide
  Seed: RGLQRRRFV
RTLQRRRFL

SEQ ID NO: 164188 - protein, 9 aa, Artificial Sequence
  Description of Artificial Sequence: Synthetic peptide
  Seed: RGLQRRRFV
RTLQRRRFM

SEQ ID NO: 164189 - protein, 9 aa, Artificial Sequence
  Description of Artificial Sequence: Synthetic peptide
  Seed: RGLQRRRFV
RTLQRRRFN

SEQ ID NO: 164190 - protein, 9 aa, Artificial Sequence
  Description of Artificial Sequence: Synthetic peptide
  Seed: RGLQRRRFV
RTLQRRRFP

SEQ ID NO: 164191 - protein, 9 aa, Artificial Sequence
  Description of Artificial Sequence: Synthetic peptide
  Seed: RGLQRRRFV
RTLQRRRFQ

SEQ ID NO: 164192 - protein, 9 aa, Artificial Sequence
  Description of Artificial Sequence: Synthetic peptide
  Seed: RGLQRRRFV
RTLQRRRFR

SEQ ID NO: 164193 - protein, 9 aa, Artificial Sequence
  Description of Artificial Sequence: Synthetic peptide
  Seed: RGLQRRRFV
RTLQRRRFS

SEQ ID NO: 164194 - protein, 9 aa, Artificial Sequence
  Description of Artificial Sequence: Synthetic peptide
  Seed: RGLQRRRFV
RTLQRRRFT

SEQ ID NO: 164195 - protein, 9 aa, Artificial Sequence
  Description of Artificial Sequence: Synthetic peptide
  Seed: RGLQRRRFV
RTLQRRRFV

SEQ ID NO: 164196 - protein, 9 aa, Artificial Sequence
  Description of Artificial Sequence: Synthetic peptide
  Seed: RGLQRRRFV
RTLQRRRFY

SEQ ID NO: 164197 - protein, 9 aa, Artificial Sequence
  Description of Artificial Sequence: Synthetic peptide
  Seed: RRRFVQNAL
RTRFVQNAM

SEQ ID NO: 164198 - protein, 9 aa, Artificial Sequence
  Description of Artificial Sequence: Synthetic peptide
  Seed: RRRFVQNAL
RTRFVQNAY

SEQ ID NO: 164199 - protein, 9 aa, Artificial Sequence
  Description of Artificial Sequence: Synthetic peptide
  Seed: RGLQRRRFV
RVLQRRRFA

SEQ ID NO: 164200 - protein, 9 aa, Artificial Sequence
  Description of Artificial Sequence: Synthetic peptide
  Seed: RGLQRRRFV
RVLQRRRFC

SEQ ID NO: 164201 - protein, 9 aa, Artificial Sequence
  Description of Artificial Sequence: Synthetic peptide
  Seed: RGLQRRRFV
RVLQRRRFE

SEQ ID NO: 164202 - protein, 9 aa, Artificial Sequence
  Description of Artificial Sequence: Synthetic peptide
  Seed: RGLQRRRFV
RVLQRRRFF

SEQ ID NO: 164203 - protein, 9 aa, Artificial Sequence
  Description of Artificial Sequence: Synthetic peptide
  Seed: RGLQRRRFV
RVLQRRRFG

SEQ ID NO: 164204 - protein, 9 aa, Artificial Sequence
  Description of Artificial Sequence: Synthetic peptide
  Seed: RGLQRRRFV
RVLQRRRFH

SEQ ID NO: 164205 - protein, 9 aa, Artificial Sequence
  Description of Artificial Sequence: Synthetic peptide
  Seed: RGLQRRRFV
RVLQRRRFI

SEQ ID NO: 164206 - protein, 9 aa, Artificial Sequence
  Description of Artificial Sequence: Synthetic peptide
  Seed: RGLQRRRFV
RVLQRRRFK

SEQ ID NO: 164207 - protein, 9 aa, Artificial Sequence
  Description of Artificial Sequence: Synthetic peptide
  Seed: RGLQRRRFV
RVLQRRRFL

SEQ ID NO: 164208 - protein, 9 aa, Artificial Sequence
  Description of Artificial Sequence: Synthetic peptide
  Seed: RGLQRRRFV
RVLQRRRFM

SEQ ID NO: 164209 - protein, 9 aa, Artificial Sequence
  Description of Artificial Sequence: Synthetic peptide
  Seed: RGLQRRRFV
RVLQRRRFN

SEQ ID NO: 164210 - protein, 9 aa, Artificial Sequence
  Description of Artificial Sequence: Synthetic peptide
  Seed: RGLQRRRFV
RVLQRRRFP

SEQ ID NO: 164211 - protein, 9 aa, Artificial Sequence
  Description of Artificial Sequence: Synthetic peptide
  Seed: RGLQRRRFV
RVLQRRRFQ

SEQ ID NO: 164212 - protein, 9 aa, Artificial Sequence
  Description of Artificial Sequence: Synthetic peptide
  Seed: RGLQRRRFV
RVLQRRRFR

SEQ ID NO: 164213 - protein, 9 aa, Artificial Sequence
  Description of Artificial Sequence: Synthetic peptide
  Seed: RGLQRRRFV
RVLQRRRFS

SEQ ID NO: 164214 - protein, 9 aa, Artificial Sequence
  Description of Artificial Sequence: Synthetic peptide
  Seed: RGLQRRRFV
RVLQRRRFT

SEQ ID NO: 164215 - protein, 9 aa, Artificial Sequence
  Description of Artificial Sequence: Synthetic peptide
  Seed: RGLQRRRFV
RVLQRRRFV

SEQ ID NO: 164216 - protein, 9 aa, Artificial Sequence
  Description of Artificial Sequence: Synthetic peptide
  Seed: RGLQRRRFV
RVLQRRRFY

SEQ ID NO: 164217 - protein, 9 aa, Artificial Sequence
  Description of Artificial Sequence: Synthetic peptide
  Seed: RRRFVQNAL
RVRFVQNAF

SEQ ID NO: 164218 - protein, 9 aa, Artificial Sequence
  Description of Artificial Sequence: Synthetic peptide
  Seed: RRRFVQNAL
RVRFVQNAM

SEQ ID NO: 164219 - protein, 9 aa, Artificial Sequence
  Description of Artificial Sequence: Synthetic peptide
  Seed: RRRFVQNAL
RVRFVQNAY

SEQ ID NO: 164220 - protein, 8 aa, Artificial Sequence
  Description of Artificial Sequence: Synthetic peptide
  Seed: RRFVQNAL
RWFVQNAL

SEQ ID NO: 164221 - protein, 9 aa, Artificial Sequence
  Description of Artificial Sequence: Synthetic peptide
  Seed: RGLQRRRFV
RWLQRRRFA

SEQ ID NO: 164222 - protein, 9 aa, Artificial Sequence
  Description of Artificial Sequence: Synthetic peptide
  Seed: RGLQRRRFV
RWLQRRRFF

SEQ ID NO: 164223 - protein, 9 aa, Artificial Sequence
  Description of Artificial Sequence: Synthetic peptide
  Seed: RGLQRRRFV
RWLQRRRFG

SEQ ID NO: 164224 - protein, 9 aa, Artificial Sequence
  Description of Artificial Sequence: Synthetic peptide
  Seed: RGLQRRRFV
RWLQRRRFI

SEQ ID NO: 164225 - protein, 9 aa, Artificial Sequence
  Description of Artificial Sequence: Synthetic peptide
  Seed: RGLQRRRFV
RWLQRRRFK

SEQ ID NO: 164226 - protein, 9 aa, Artificial Sequence
  Description of Artificial Sequence: Synthetic peptide
  Seed: RGLQRRRFV
RWLQRRRFL

SEQ ID NO: 164227 - protein, 9 aa, Artificial Sequence
  Description of Artificial Sequence: Synthetic peptide
  Seed: RGLQRRRFV
RWLQRRRFM

SEQ ID NO: 164228 - protein, 9 aa, Artificial Sequence
  Description of Artificial Sequence: Synthetic peptide
  Seed: RGLQRRRFV
RWLQRRRFR

SEQ ID NO: 164229 - protein, 9 aa, Artificial Sequence
  Description of Artificial Sequence: Synthetic peptide
  Seed: RGLQRRRFV
RWLQRRRFS

SEQ ID NO: 164230 - protein, 9 aa, Artificial Sequence
  Description of Artificial Sequence: Synthetic peptide
  Seed: RGLQRRRFV
RWLQRRRFT

SEQ ID NO: 164231 - protein, 9 aa, Artificial Sequence
  Description of Artificial Sequence: Synthetic peptide
  Seed: RGLQRRRFV
RWLQRRRFV

SEQ ID NO: 164232 - protein, 9 aa, Artificial Sequence
  Description of Artificial Sequence: Synthetic peptide
  Seed: RGLQRRRFV
RWLQRRRFY

SEQ ID NO: 164233 - protein, 9 aa, Artificial Sequence
  Description of Artificial Sequence: Synthetic peptide
  Seed: RRRFVQNAL
RWRFVQNAF

SEQ ID NO: 164234 - protein, 9 aa, Artificial Sequence
  Description of Artificial Sequence: Synthetic peptide
  Seed: RRRFVQNAL
RWRFVQNAI

SEQ ID NO: 164235 - protein, 9 aa, Artificial Sequence
  Description of Artificial Sequence: Synthetic peptide
  Seed: RRRFVQNAL
RWRFVQNAL

SEQ ID NO: 164236 - protein, 9 aa, Artificial Sequence
  Description of Artificial Sequence: Synthetic peptide
  Seed: RRRFVQNAL
RWRFVQNAV

SEQ ID NO: 164237 - protein, 9 aa, Artificial Sequence
  Description of Artificial Sequence: Synthetic peptide
  Seed: RRRFVQNAL
RWRFVQNAY

SEQ ID NO: 164238 - protein, 9 aa, Artificial Sequence
  Description of Artificial Sequence: Synthetic peptide
  Seed: RGLQRRRFV
RYLQRRRFA

SEQ ID NO: 164239 - protein, 9 aa, Artificial Sequence
  Description of Artificial Sequence: Synthetic peptide
  Seed: RGLQRRRFV
RYLQRRRFC

SEQ ID NO: 164240 - protein, 9 aa, Artificial Sequence
  Description of Artificial Sequence: Synthetic peptide
  Seed: RGLQRRRFV
RYLQRRRFE

SEQ ID NO: 164241 - protein, 9 aa, Artificial Sequence
  Description of Artificial Sequence: Synthetic peptide
  Seed: RGLQRRRFV
RYLQRRRFF

SEQ ID NO: 164242 - protein, 9 aa, Artificial Sequence
  Description of Artificial Sequence: Synthetic peptide
  Seed: RGLQRRRFV
RYLQRRRFG

SEQ ID NO: 164243 - protein, 9 aa, Artificial Sequence
  Description of Artificial Sequence: Synthetic peptide
  Seed: RGLQRRRFV
RYLQRRRFH

SEQ ID NO: 164244 - protein, 9 aa, Artificial Sequence
  Description of Artificial Sequence: Synthetic peptide
  Seed: RGLQRRRFV
RYLQRRRFI

SEQ ID NO: 164245 - protein, 9 aa, Artificial Sequence
  Description of Artificial Sequence: Synthetic peptide
  Seed: RGLQRRRFV
RYLQRRRFK

SEQ ID NO: 164246 - protein, 9 aa, Artificial Sequence
  Description of Artificial Sequence: Synthetic peptide
  Seed: RGLQRRRFV
RYLQRRRFL

SEQ ID NO: 164247 - protein, 9 aa, Artificial Sequence
  Description of Artificial Sequence: Synthetic peptide
  Seed: RGLQRRRFV
RYLQRRRFM

SEQ ID NO: 164248 - protein, 9 aa, Artificial Sequence
  Description of Artificial Sequence: Synthetic peptide
  Seed: RGLQRRRFV
RYLQRRRFN

SEQ ID NO: 164249 - protein, 9 aa, Artificial Sequence
  Description of Artificial Sequence: Synthetic peptide
  Seed: RGLQRRRFV
RYLQRRRFP

SEQ ID NO: 164250 - protein, 9 aa, Artificial Sequence
  Description of Artificial Sequence: Synthetic peptide
  Seed: RGLQRRRFV
RYLQRRRFQ

SEQ ID NO: 164251 - protein, 9 aa, Artificial Sequence
  Description of Artificial Sequence: Synthetic peptide
  Seed: RGLQRRRFV
RYLQRRRFR

SEQ ID NO: 164252 - protein, 9 aa, Artificial Sequence
  Description of Artificial Sequence: Synthetic peptide
  Seed: RGLQRRRFV
RYLQRRRFS

SEQ ID NO: 164253 - protein, 9 aa, Artificial Sequence
  Description of Artificial Sequence: Synthetic peptide
  Seed: RGLQRRRFV
RYLQRRRFT

SEQ ID NO: 164254 - protein, 9 aa, Artificial Sequence
  Description of Artificial Sequence: Synthetic peptide
  Seed: RGLQRRRFV
RYLQRRRFV

SEQ ID NO: 164255 - protein, 9 aa, Artificial Sequence
  Description of Artificial Sequence: Synthetic peptide
  Seed: RGLQRRRFV
RYLQRRRFY

SEQ ID NO: 164256 - protein, 9 aa, Artificial Sequence
  Description of Artificial Sequence: Synthetic peptide
  Seed: RRRFVQNAL
RYRFVQNAA

SEQ ID NO: 164257 - protein, 9 aa, Artificial Sequence
  Description of Artificial Sequence: Synthetic peptide
  Seed: RRRFVQNAL
RYRFVQNAH

SEQ ID NO: 164258 - protein, 9 aa, Artificial Sequence
  Description of Artificial Sequence: Synthetic peptide
  Seed: RRRFVQNAL
RYRFVQNAL

SEQ ID NO: 164259 - protein, 9 aa, Artificial Sequence
  Description of Artificial Sequence: Synthetic peptide
  Seed: RRRFVQNAL
RYRFVQNAM

SEQ ID NO: 164260 - protein, 9 aa, Artificial Sequence
  Description of Artificial Sequence: Synthetic peptide
  Seed: RRRFVQNAL
RYRFVQNAV

SEQ ID NO: 164261 - protein, 9 aa, Artificial Sequence
  Description of Artificial Sequence: Synthetic peptide
  Seed: RRRFVQNAL
RYRFVQNAW

SEQ ID NO: 164262 - protein, 9 aa, Artificial Sequence
  Description of Artificial Sequence: Synthetic peptide
  Seed: RRRFVQNAL
RYRFVQNAY

SEQ ID NO: 164263 - protein, 8 aa, Artificial Sequence
  Description of Artificial Sequence: Synthetic peptide
  Seed: TEVETYVL
TEVETYVI

SEQ ID NO: 164264 - protein, 9 aa, Artificial Sequence
  Description of Artificial Sequence: Synthetic peptide
  Seed: TEVETYVLS
TEVETYVLC

SEQ ID NO: 164265 - protein, 9 aa, Artificial Sequence
  Description of Artificial Sequence: Synthetic peptide
  Seed: TEVETYVLS
TEVETYVLI

SEQ ID NO: 164266 - protein, 9 aa, Artificial Sequence
  Description of Artificial Sequence: Synthetic peptide
  Seed: TEVETYVLS
TEVETYVLL

SEQ ID NO: 164267 - protein, 9 aa, Artificial Sequence
  Description of Artificial Sequence: Synthetic peptide
  Seed: TEVETYVLS
TEVETYVLM

SEQ ID NO: 164268 - protein, 9 aa, Artificial Sequence
  Description of Artificial Sequence: Synthetic peptide
  Seed: TEVETYVLS
TEVETYVLP

SEQ ID NO: 164269 - protein, 10 aa, Artificial Sequence
  Description of Artificial Sequence: Synthetic peptide
  Seed: TEVETYVLSI
TEVETYVLSA

SEQ ID NO: 164270 - protein, 10 aa, Artificial Sequence
  Description of Artificial Sequence: Synthetic peptide
  Seed: TEVETYVLSI
TEVETYVLSM

SEQ ID NO: 164271 - protein, 10 aa, Artificial Sequence
  Description of Artificial Sequence: Synthetic peptide
  Seed: TEVETYVLSI
TEVETYVLSP

SEQ ID NO: 164272 - protein, 10 aa, Artificial Sequence
  Description of Artificial Sequence: Synthetic peptide
  Seed: TEVETYVLSI
TEVETYVLSV

SEQ ID NO: 164273 - protein, 9 aa, Artificial Sequence
  Description of Artificial Sequence: Synthetic peptide
  Seed: TEVETYVLS
TEVETYVLT

SEQ ID NO: 164274 - protein, 9 aa, Artificial Sequence
  Description of Artificial Sequence: Synthetic peptide
  Seed: TEVETYVLS
TEVETYVLV

SEQ ID NO: 164275 - protein, 8 aa, Artificial Sequence
  Description of Artificial Sequence: Synthetic peptide
  Seed: TEVETYVL
TEVETYVM

SEQ ID NO: 164276 - protein, 8 aa, Artificial Sequence
  Description of Artificial Sequence: Synthetic peptide
  Seed: TEVETYVL
TEVETYVV

SEQ ID NO: 164277 - protein, 8 aa, Artificial Sequence
  Description of Artificial Sequence: Synthetic peptide
  Seed: VETYVLSI
VETYVLSF

SEQ ID NO: 164278 - protein, 8 aa, Artificial Sequence
  Description of Artificial Sequence: Synthetic peptide
  Seed: VETYVLSI
VETYVLSL

SEQ ID NO: 164279 - protein, 8 aa, Artificial Sequence
  Description of Artificial Sequence: Synthetic peptide
  Seed: VETYVLSI
VETYVLSM

SEQ ID NO: 164280 - protein, 8 aa, Artificial Sequence
  Description of Artificial Sequence: Synthetic peptide
  Seed: VETYVLSI
VETYVLSV

SEQ ID NO: 164281 - protein, 8 aa, Artificial Sequence
  Description of Artificial Sequence: Synthetic peptide
  Seed: WLKTRPIL
WAKTRPIF

SEQ ID NO: 164282 - protein, 8 aa, Artificial Sequence
  Description of Artificial Sequence: Synthetic peptide
  Seed: WLKTRPIL
WAKTRPII

SEQ ID NO: 164283 - protein, 11 aa, Artificial Sequence
  Description of Artificial Sequence: Synthetic peptide
  Seed: WLKTRPILSPL
WAKTRPILSPA

SEQ ID NO: 164284 - protein, 11 aa, Artificial Sequence
  Description of Artificial Sequence: Synthetic peptide
  Seed: WLKTRPILSPL
WAKTRPILSPF

SEQ ID NO: 164285 - protein, 11 aa, Artificial Sequence
  Description of Artificial Sequence: Synthetic peptide
  Seed: WLKTRPILSPL
WAKTRPILSPI

SEQ ID NO: 164286 - protein, 11 aa, Artificial Sequence
  Description of Artificial Sequence: Synthetic peptide
  Seed: WLKTRPILSPL
WAKTRPILSPK

SEQ ID NO: 164287 - protein, 11 aa, Artificial Sequence
  Description of Artificial Sequence: Synthetic peptide
  Seed: WLKTRPILSPL
WAKTRPILSPL

SEQ ID NO: 164288 - protein, 11 aa, Artificial Sequence
  Description of Artificial Sequence: Synthetic peptide
  Seed: WLKTRPILSPL
WAKTRPILSPM

SEQ ID NO: 164289 - protein, 11 aa, Artificial Sequence
  Description of Artificial Sequence: Synthetic peptide
  Seed: WLKTRPILSPL
WAKTRPILSPV

SEQ ID NO: 164290 - protein, 8 aa, Artificial Sequence
  Description of Artificial Sequence: Synthetic peptide
  Seed: WLKTRPIL
WAKTRPIM

SEQ ID NO: 164291 - protein, 8 aa, Artificial Sequence
  Description of Artificial Sequence: Synthetic peptide
  Seed: WLKTRPIL
WAKTRPIV

SEQ ID NO: 164292 - protein, 11 aa, Artificial Sequence
  Description of Artificial Sequence: Synthetic peptide
  Seed: WLKTRPILSPL
WCKTRPILSPA

SEQ ID NO: 164293 - protein, 11 aa, Artificial Sequence
  Description of Artificial Sequence: Synthetic peptide
  Seed: WLKTRPILSPL
WCKTRPILSPI

SEQ ID NO: 164294 - protein, 11 aa, Artificial Sequence
  Description of Artificial Sequence: Synthetic peptide
  Seed: WLKTRPILSPL
WCKTRPILSPK

SEQ ID NO: 164295 - protein, 11 aa, Artificial Sequence
  Description of Artificial Sequence: Synthetic peptide
  Seed: WLKTRPILSPL
WCKTRPILSPL

SEQ ID NO: 164296 - protein, 11 aa, Artificial Sequence
  Description of Artificial Sequence: Synthetic peptide
  Seed: WLKTRPILSPL
WCKTRPILSPM

SEQ ID NO: 164297 - protein, 11 aa, Artificial Sequence
  Description of Artificial Sequence: Synthetic peptide
  Seed: WLKTRPILSPL
WCKTRPILSPV

SEQ ID NO: 164298 - protein, 11 aa, Artificial Sequence
  Description of Artificial Sequence: Synthetic peptide
  Seed: WLKTRPILSPL
WDKTRPILSPA

SEQ ID NO: 164299 - protein, 11 aa, Artificial Sequence
  Description of Artificial Sequence: Synthetic peptide
  Seed: WLKTRPILSPL
WDKTRPILSPI

SEQ ID NO: 164300 - protein, 11 aa, Artificial Sequence
  Description of Artificial Sequence: Synthetic peptide
  Seed: WLKTRPILSPL
WDKTRPILSPK

SEQ ID NO: 164301 - protein, 11 aa, Artificial Sequence
  Description of Artificial Sequence: Synthetic peptide
  Seed: WLKTRPILSPL
WDKTRPILSPL

SEQ ID NO: 164302 - protein, 11 aa, Artificial Sequence
  Description of Artificial Sequence: Synthetic peptide
  Seed: WLKTRPILSPL
WDKTRPILSPM

SEQ ID NO: 164303 - protein, 11 aa, Artificial Sequence
  Description of Artificial Sequence: Synthetic peptide
  Seed: WLKTRPILSPL
WDKTRPILSPV

SEQ ID NO: 164304 - protein, 11 aa, Artificial Sequence
  Description of Artificial Sequence: Synthetic peptide
  Seed: WLKTRPILSPL
WEKTRPILSPA

SEQ ID NO: 164305 - protein, 11 aa, Artificial Sequence
  Description of Artificial Sequence: Synthetic peptide
  Seed: WLKTRPILSPL
WEKTRPILSPI

SEQ ID NO: 164306 - protein, 11 aa, Artificial Sequence
  Description of Artificial Sequence: Synthetic peptide
  Seed: WLKTRPILSPL
WEKTRPILSPK

SEQ ID NO: 164307 - protein, 11 aa, Artificial Sequence
  Description of Artificial Sequence: Synthetic peptide
  Seed: WLKTRPILSPL
WEKTRPILSPL

SEQ ID NO: 164308 - protein, 11 aa, Artificial Sequence
  Description of Artificial Sequence: Synthetic peptide
  Seed: WLKTRPILSPL
WEKTRPILSPM

SEQ ID NO: 164309 - protein, 11 aa, Artificial Sequence
  Description of Artificial Sequence: Synthetic peptide
  Seed: WLKTRPILSPL
WEKTRPILSPV

SEQ ID NO: 164310 - protein, 8 aa, Artificial Sequence
  Description of Artificial Sequence: Synthetic peptide
  Seed: WLKTRPIL
WFKTRPIL

SEQ ID NO: 164311 - protein, 11 aa, Artificial Sequence
  Description of Artificial Sequence: Synthetic peptide
  Seed: WLKTRPILSPL
WFKTRPILSPA

SEQ ID NO: 164312 - protein, 11 aa, Artificial Sequence
  Description of Artificial Sequence: Synthetic peptide
  Seed: WLKTRPILSPL
WFKTRPILSPI

SEQ ID NO: 164313 - protein, 11 aa, Artificial Sequence
  Description of Artificial Sequence: Synthetic peptide
  Seed: WLKTRPILSPL
WFKTRPILSPK

SEQ ID NO: 164314 - protein, 11 aa, Artificial Sequence
  Description of Artificial Sequence: Synthetic peptide
  Seed: WLKTRPILSPL
WFKTRPILSPL

SEQ ID NO: 164315 - protein, 11 aa, Artificial Sequence
  Description of Artificial Sequence: Synthetic peptide
  Seed: WLKTRPILSPL
WFKTRPILSPM

SEQ ID NO: 164316 - protein, 11 aa, Artificial Sequence
  Description of Artificial Sequence: Synthetic peptide
  Seed: WLKTRPILSPL
WFKTRPILSPV

SEQ ID NO: 164317 - protein, 8 aa, Artificial Sequence
  Description of Artificial Sequence: Synthetic peptide
  Seed: WLKTRPIL
WFKTRPIM

SEQ ID NO: 164318 - protein, 8 aa, Artificial Sequence
  Description of Artificial Sequence: Synthetic peptide
  Seed: WLKTRPIL
WGKTRPIL

SEQ ID NO: 164319 - protein, 11 aa, Artificial Sequence
  Description of Artificial Sequence: Synthetic peptide
  Seed: WLKTRPILSPL
WGKTRPILSPA

SEQ ID NO: 164320 - protein, 11 aa, Artificial Sequence
  Description of Artificial Sequence: Synthetic peptide
  Seed: WLKTRPILSPL
WGKTRPILSPI

SEQ ID NO: 164321 - protein, 11 aa, Artificial Sequence
  Description of Artificial Sequence: Synthetic peptide
  Seed: WLKTRPILSPL
WGKTRPILSPK

SEQ ID NO: 164322 - protein, 11 aa, Artificial Sequence
  Description of Artificial Sequence: Synthetic peptide
  Seed: WLKTRPILSPL
WGKTRPILSPL

SEQ ID NO: 164323 - protein, 11 aa, Artificial Sequence
  Description of Artificial Sequence: Synthetic peptide
  Seed: WLKTRPILSPL
WGKTRPILSPM

SEQ ID NO: 164324 - protein, 11 aa, Artificial Sequence
  Description of Artificial Sequence: Synthetic peptide
  Seed: WLKTRPILSPL
WGKTRPILSPV

SEQ ID NO: 164325 - protein, 8 aa, Artificial Sequence
  Description of Artificial Sequence: Synthetic peptide
  Seed: WLKTRPIL
WGKTRPIM

SEQ ID NO: 164326 - protein, 11 aa, Artificial Sequence
  Description of Artificial Sequence: Synthetic peptide
  Seed: WLKTRPILSPL
WHKTRPILSPA

SEQ ID NO: 164327 - protein, 11 aa, Artificial Sequence
  Description of Artificial Sequence: Synthetic peptide
  Seed: WLKTRPILSPL
WHKTRPILSPI

SEQ ID NO: 164328 - protein, 11 aa, Artificial Sequence
  Description of Artificial Sequence: Synthetic peptide
  Seed: WLKTRPILSPL
WHKTRPILSPK

SEQ ID NO: 164329 - protein, 11 aa, Artificial Sequence
  Description of Artificial Sequence: Synthetic peptide
  Seed: WLKTRPILSPL
WHKTRPILSPL

SEQ ID NO: 164330 - protein, 11 aa, Artificial Sequence
  Description of Artificial Sequence: Synthetic peptide
  Seed: WLKTRPILSPL
WHKTRPILSPM

SEQ ID NO: 164331 - protein, 11 aa, Artificial Sequence
  Description of Artificial Sequence: Synthetic peptide
  Seed: WLKTRPILSPL
WHKTRPILSPV

SEQ ID NO: 164332 - protein, 8 aa, Artificial Sequence
  Description of Artificial Sequence: Synthetic peptide
  Seed: WLKTRPIL
WIKTRPIF

SEQ ID NO: 164333 - protein, 8 aa, Artificial Sequence
  Description of Artificial Sequence: Synthetic peptide
  Seed: WLKTRPIL
WIKTRPII

SEQ ID NO: 164334 - protein, 8 aa, Artificial Sequence
  Description of Artificial Sequence: Synthetic peptide
  Seed: WLKTRPIL
WIKTRPIL

SEQ ID NO: 164335 - protein, 11 aa, Artificial Sequence
  Description of Artificial Sequence: Synthetic peptide
  Seed: WLKTRPILSPL
WIKTRPILSPA

SEQ ID NO: 164336 - protein, 11 aa, Artificial Sequence
  Description of Artificial Sequence: Synthetic peptide
  Seed: WLKTRPILSPL
WIKTRPILSPF

SEQ ID NO: 164337 - protein, 11 aa, Artificial Sequence
  Description of Artificial Sequence: Synthetic peptide
  Seed: WLKTRPILSPL
WIKTRPILSPI

SEQ ID NO: 164338 - protein, 11 aa, Artificial Sequence
  Description of Artificial Sequence: Synthetic peptide
  Seed: WLKTRPILSPL
WIKTRPILSPK

SEQ ID NO: 164339 - protein, 11 aa, Artificial Sequence
  Description of Artificial Sequence: Synthetic peptide
  Seed: WLKTRPILSPL
WIKTRPILSPL

SEQ ID NO: 164340 - protein, 11 aa, Artificial Sequence
  Description of Artificial Sequence: Synthetic peptide
  Seed: WLKTRPILSPL
WIKTRPILSPM

SEQ ID NO: 164341 - protein, 11 aa, Artificial Sequence
  Description of Artificial Sequence: Synthetic peptide
  Seed: WLKTRPILSPL
WIKTRPILSPV

SEQ ID NO: 164342 - protein, 8 aa, Artificial Sequence
  Description of Artificial Sequence: Synthetic peptide
  Seed: WLKTRPIL
WIKTRPIM

SEQ ID NO: 164343 - protein, 8 aa, Artificial Sequence
  Description of Artificial Sequence: Synthetic peptide
  Seed: WLKTRPIL
WIKTRPIV

SEQ ID NO: 164344 - protein, 8 aa, Artificial Sequence
  Description of Artificial Sequence: Synthetic peptide
  Seed: WLKTRPIL
WKKTRPIL

SEQ ID NO: 164345 - protein, 11 aa, Artificial Sequence
  Description of Artificial Sequence: Synthetic peptide
  Seed: WLKTRPILSPL
WKKTRPILSPA

SEQ ID NO: 164346 - protein, 11 aa, Artificial Sequence
  Description of Artificial Sequence: Synthetic peptide
  Seed: WLKTRPILSPL
WKKTRPILSPI

SEQ ID NO: 164347 - protein, 11 aa, Artificial Sequence
  Description of Artificial Sequence: Synthetic peptide
  Seed: WLKTRPILSPL
WKKTRPILSPK

SEQ ID NO: 164348 - protein, 11 aa, Artificial Sequence
  Description of Artificial Sequence: Synthetic peptide
  Seed: WLKTRPILSPL
WKKTRPILSPL

SEQ ID NO: 164349 - protein, 11 aa, Artificial Sequence
  Description of Artificial Sequence: Synthetic peptide
  Seed: WLKTRPILSPL
WKKTRPILSPM

SEQ ID NO: 164350 - protein, 11 aa, Artificial Sequence
  Description of Artificial Sequence: Synthetic peptide
  Seed: WLKTRPILSPL
WKKTRPILSPV

SEQ ID NO: 164351 - protein, 11 aa, Artificial Sequence
  Description of Artificial Sequence: Synthetic peptide
  Seed: WLKTRPILSPL
WKKTRPILSPY

SEQ ID NO: 164352 - protein, 8 aa, Artificial Sequence
  Description of Artificial Sequence: Synthetic peptide
  Seed: WLKTRPIL
WLKTRPIA

SEQ ID NO: 164353 - protein, 8 aa, Artificial Sequence
  Description of Artificial Sequence: Synthetic peptide
  Seed: WLKTRPIL
WLKTRPIF

SEQ ID NO: 164354 - protein, 8 aa, Artificial Sequence
  Description of Artificial Sequence: Synthetic peptide
  Seed: WLKTRPIL
WLKTRPII

SEQ ID NO: 164355 - protein, 11 aa, Artificial Sequence
  Description of Artificial Sequence: Synthetic peptide
  Seed: WLKTRPILSPL
WLKTRPILSPA

SEQ ID NO: 164356 - protein, 11 aa, Artificial Sequence
  Description of Artificial Sequence: Synthetic peptide
  Seed: WLKTRPILSPL
WLKTRPILSPF

SEQ ID NO: 164357 - protein, 11 aa, Artificial Sequence
  Description of Artificial Sequence: Synthetic peptide
  Seed: WLKTRPILSPL
WLKTRPILSPI

SEQ ID NO: 164358 - protein, 11 aa, Artificial Sequence
  Description of Artificial Sequence: Synthetic peptide
  Seed: WLKTRPILSPL
WLKTRPILSPK

SEQ ID NO: 164359 - protein, 11 aa, Artificial Sequence
  Description of Artificial Sequence: Synthetic peptide
  Seed: WLKTRPILSPL
WLKTRPILSPM

SEQ ID NO: 164360 - protein, 11 aa, Artificial Sequence
  Description of Artificial Sequence: Synthetic peptide
  Seed: WLKTRPILSPL
WLKTRPILSPV

SEQ ID NO: 164361 - protein, 8 aa, Artificial Sequence
  Description of Artificial Sequence: Synthetic peptide
  Seed: WLKTRPIL
WLKTRPIM

SEQ ID NO: 164362 - protein, 8 aa, Artificial Sequence
  Description of Artificial Sequence: Synthetic peptide
  Seed: WLKTRPIL
WLKTRPIV

SEQ ID NO: 164363 - protein, 8 aa, Artificial Sequence
  Description of Artificial Sequence: Synthetic peptide
  Seed: WLKTRPIL
WMKTRPIA

SEQ ID NO: 164364 - protein, 8 aa, Artificial Sequence
  Description of Artificial Sequence: Synthetic peptide
  Seed: WLKTRPIL
WMKTRPIC

SEQ ID NO: 164365 - protein, 8 aa, Artificial Sequence
  Description of Artificial Sequence: Synthetic peptide
  Seed: WLKTRPIL
WMKTRPIF

SEQ ID NO: 164366 - protein, 8 aa, Artificial Sequence
  Description of Artificial Sequence: Synthetic peptide
  Seed: WLKTRPIL
WMKTRPII

SEQ ID NO: 164367 - protein, 8 aa, Artificial Sequence
  Description of Artificial Sequence: Synthetic peptide
  Seed: WLKTRPIL
WMKTRPIL

SEQ ID NO: 164368 - protein, 11 aa, Artificial Sequence
  Description of Artificial Sequence: Synthetic peptide
  Seed: WLKTRPILSPL
WMKTRPILSPA

SEQ ID NO: 164369 - protein, 11 aa, Artificial Sequence
  Description of Artificial Sequence: Synthetic peptide
  Seed: WLKTRPILSPL
WMKTRPILSPC

SEQ ID NO: 164370 - protein, 11 aa, Artificial Sequence
  Description of Artificial Sequence: Synthetic peptide
  Seed: WLKTRPILSPL
WMKTRPILSPF

SEQ ID NO: 164371 - protein, 11 aa, Artificial Sequence
  Description of Artificial Sequence: Synthetic peptide
  Seed: WLKTRPILSPL
WMKTRPILSPI

SEQ ID NO: 164372 - protein, 11 aa, Artificial Sequence
  Description of Artificial Sequence: Synthetic peptide
  Seed: WLKTRPILSPL
WMKTRPILSPK

SEQ ID NO: 164373 - protein, 11 aa, Artificial Sequence
  Description of Artificial Sequence: Synthetic peptide
  Seed: WLKTRPILSPL
WMKTRPILSPM

SEQ ID NO: 164374 - protein, 11 aa, Artificial Sequence
  Description of Artificial Sequence: Synthetic peptide
  Seed: WLKTRPILSPL
WMKTRPILSPV

SEQ ID NO: 164375 - protein, 8 aa, Artificial Sequence
  Description of Artificial Sequence: Synthetic peptide
  Seed: WLKTRPIL
WMKTRPIP

SEQ ID NO: 164376 - protein, 8 aa, Artificial Sequence
  Description of Artificial Sequence: Synthetic peptide
  Seed: WLKTRPIL
WMKTRPIS

SEQ ID NO: 164377 - protein, 8 aa, Artificial Sequence
  Description of Artificial Sequence: Synthetic peptide
  Seed: WLKTRPIL
WMKTRPIT

SEQ ID NO: 164378 - protein, 8 aa, Artificial Sequence
  Description of Artificial Sequence: Synthetic peptide
  Seed: WLKTRPIL
WMKTRPIV

SEQ ID NO: 164379 - protein, 8 aa, Artificial Sequence
  Description of Artificial Sequence: Synthetic peptide
  Seed: WLKTRPIL
WNKTRPIL

SEQ ID NO: 164380 - protein, 11 aa, Artificial Sequence
  Description of Artificial Sequence: Synthetic peptide
  Seed: WLKTRPILSPL
WNKTRPILSPA

SEQ ID NO: 164381 - protein, 11 aa, Artificial Sequence
  Description of Artificial Sequence: Synthetic peptide
  Seed: WLKTRPILSPL
WNKTRPILSPI

SEQ ID NO: 164382 - protein, 11 aa, Artificial Sequence
  Description of Artificial Sequence: Synthetic peptide
  Seed: WLKTRPILSPL
WNKTRPILSPK

SEQ ID NO: 164383 - protein, 11 aa, Artificial Sequence
  Description of Artificial Sequence: Synthetic peptide
  Seed: WLKTRPILSPL
WNKTRPILSPL

SEQ ID NO: 164384 - protein, 11 aa, Artificial Sequence
  Description of Artificial Sequence: Synthetic peptide
  Seed: WLKTRPILSPL
WNKTRPILSPM

SEQ ID NO: 164385 - protein, 11 aa, Artificial Sequence
  Description of Artificial Sequence: Synthetic peptide
  Seed: WLKTRPILSPL
WNKTRPILSPV

SEQ ID NO: 164386 - protein, 8 aa, Artificial Sequence
  Description of Artificial Sequence: Synthetic peptide
  Seed: WLKTRPIL
WNKTRPIM

SEQ ID NO: 164387 - protein, 8 aa, Artificial Sequence
  Description of Artificial Sequence: Synthetic peptide
  Seed: WLKTRPIL
WPKTRPIA

SEQ ID NO: 164388 - protein, 8 aa, Artificial Sequence
  Description of Artificial Sequence: Synthetic peptide
  Seed: WLKTRPIL
WPKTRPIF

SEQ ID NO: 164389 - protein, 8 aa, Artificial Sequence
  Description of Artificial Sequence: Synthetic peptide
  Seed: WLKTRPIL
WPKTRPII

SEQ ID NO: 164390 - protein, 11 aa, Artificial Sequence
  Description of Artificial Sequence: Synthetic peptide
  Seed: WLKTRPILSPL
WPKTRPILSPA

SEQ ID NO: 164391 - protein, 11 aa, Artificial Sequence
  Description of Artificial Sequence: Synthetic peptide
  Seed: WLKTRPILSPL
WPKTRPILSPF

SEQ ID NO: 164392 - protein, 11 aa, Artificial Sequence
  Description of Artificial Sequence: Synthetic peptide
  Seed: WLKTRPILSPL
WPKTRPILSPI

SEQ ID NO: 164393 - protein, 11 aa, Artificial Sequence
  Description of Artificial Sequence: Synthetic peptide
  Seed: WLKTRPILSPL
WPKTRPILSPK

SEQ ID NO: 164394 - protein, 11 aa, Artificial Sequence
  Description of Artificial Sequence: Synthetic peptide
  Seed: WLKTRPILSPL
WPKTRPILSPL

SEQ ID NO: 164395 - protein, 11 aa, Artificial Sequence
  Description of Artificial Sequence: Synthetic peptide
  Seed: WLKTRPILSPL
WPKTRPILSPM

SEQ ID NO: 164396 - protein, 11 aa, Artificial Sequence
  Description of Artificial Sequence: Synthetic peptide
  Seed: WLKTRPILSPL
WPKTRPILSPV

SEQ ID NO: 164397 - protein, 8 aa, Artificial Sequence
  Description of Artificial Sequence: Synthetic peptide
  Seed: WLKTRPIL
WPKTRPIM

SEQ ID NO: 164398 - protein, 8 aa, Artificial Sequence
  Description of Artificial Sequence: Synthetic peptide
  Seed: WLKTRPIL
WPKTRPIV

SEQ ID NO: 164399 - protein, 8 aa, Artificial Sequence
  Description of Artificial Sequence: Synthetic peptide
  Seed: WLKTRPIL
WQKTRPII

SEQ ID NO: 164400 - protein, 8 aa, Artificial Sequence
  Description of Artificial Sequence: Synthetic peptide
  Seed: WLKTRPIL
WQKTRPIL

SEQ ID NO: 164401 - protein, 11 aa, Artificial Sequence
  Description of Artificial Sequence: Synthetic peptide
  Seed: WLKTRPILSPL
WQKTRPILSPA

SEQ ID NO: 164402 - protein, 11 aa, Artificial Sequence
  Description of Artificial Sequence: Synthetic peptide
  Seed: WLKTRPILSPL
WQKTRPILSPF

SEQ ID NO: 164403 - protein, 11 aa, Artificial Sequence
  Description of Artificial Sequence: Synthetic peptide
  Seed: WLKTRPILSPL
WQKTRPILSPI

SEQ ID NO: 164404 - protein, 11 aa, Artificial Sequence
  Description of Artificial Sequence: Synthetic peptide
  Seed: WLKTRPILSPL
WQKTRPILSPK

SEQ ID NO: 164405 - protein, 11 aa, Artificial Sequence
  Description of Artificial Sequence: Synthetic peptide
  Seed: WLKTRPILSPL
WQKTRPILSPL

SEQ ID NO: 164406 - protein, 11 aa, Artificial Sequence
  Description of Artificial Sequence: Synthetic peptide
  Seed: WLKTRPILSPL
WQKTRPILSPM

SEQ ID NO: 164407 - protein, 11 aa, Artificial Sequence
  Description of Artificial Sequence: Synthetic peptide
  Seed: WLKTRPILSPL
WQKTRPILSPV

SEQ ID NO: 164408 - protein, 8 aa, Artificial Sequence
  Description of Artificial Sequence: Synthetic peptide
  Seed: WLKTRPIL
WQKTRPIM

SEQ ID NO: 164409 - protein, 8 aa, Artificial Sequence
  Description of Artificial Sequence: Synthetic peptide
  Seed: WLKTRPIL
WRKTRPIL

SEQ ID NO: 164410 - protein, 11 aa, Artificial Sequence
  Description of Artificial Sequence: Synthetic peptide
  Seed: WLKTRPILSPL
WRKTRPILSPA

SEQ ID NO: 164411 - protein, 11 aa, Artificial Sequence
  Description of Artificial Sequence: Synthetic peptide
  Seed: WLKTRPILSPL
WRKTRPILSPI

SEQ ID NO: 164412 - protein, 11 aa, Artificial Sequence
  Description of Artificial Sequence: Synthetic peptide
  Seed: WLKTRPILSPL
WRKTRPILSPK

SEQ ID NO: 164413 - protein, 11 aa, Artificial Sequence
  Description of Artificial Sequence: Synthetic peptide
  Seed: WLKTRPILSPL
WRKTRPILSPL

SEQ ID NO: 164414 - protein, 11 aa, Artificial Sequence
  Description of Artificial Sequence: Synthetic peptide
  Seed: WLKTRPILSPL
WRKTRPILSPM

SEQ ID NO: 164415 - protein, 11 aa, Artificial Sequence
  Description of Artificial Sequence: Synthetic peptide
  Seed: WLKTRPILSPL
WRKTRPILSPS

SEQ ID NO: 164416 - protein, 11 aa, Artificial Sequence
  Description of Artificial Sequence: Synthetic peptide
  Seed: WLKTRPILSPL
WRKTRPILSPV

SEQ ID NO: 164417 - protein, 11 aa, Artificial Sequence
  Description of Artificial Sequence: Synthetic peptide
  Seed: WLKTRPILSPL
WRKTRPILSPY

SEQ ID NO: 164418 - protein, 8 aa, Artificial Sequence
  Description of Artificial Sequence: Synthetic peptide
  Seed: WLKTRPIL
WSKTRPIL

SEQ ID NO: 164419 - protein, 11 aa, Artificial Sequence
  Description of Artificial Sequence: Synthetic peptide
  Seed: WLKTRPILSPL
WSKTRPILSPA

SEQ ID NO: 164420 - protein, 11 aa, Artificial Sequence
  Description of Artificial Sequence: Synthetic peptide
  Seed: WLKTRPILSPL
WSKTRPILSPI

SEQ ID NO: 164421 - protein, 11 aa, Artificial Sequence
  Description of Artificial Sequence: Synthetic peptide
  Seed: WLKTRPILSPL
WSKTRPILSPK

SEQ ID NO: 164422 - protein, 11 aa, Artificial Sequence
  Description of Artificial Sequence: Synthetic peptide
  Seed: WLKTRPILSPL
WSKTRPILSPL

SEQ ID NO: 164423 - protein, 11 aa, Artificial Sequence
  Description of Artificial Sequence: Synthetic peptide
  Seed: WLKTRPILSPL
WSKTRPILSPM

SEQ ID NO: 164424 - protein, 11 aa, Artificial Sequence
  Description of Artificial Sequence: Synthetic peptide
  Seed: WLKTRPILSPL
WSKTRPILSPV

SEQ ID NO: 164425 - protein, 8 aa, Artificial Sequence
  Description of Artificial Sequence: Synthetic peptide
  Seed: WLKTRPIL
WSKTRPIM

SEQ ID NO: 164426 - protein, 8 aa, Artificial Sequence
  Description of Artificial Sequence: Synthetic peptide
  Seed: WLKTRPIL
WTKTRPIL

SEQ ID NO: 164427 - protein, 11 aa, Artificial Sequence
  Description of Artificial Sequence: Synthetic peptide
  Seed: WLKTRPILSPL
WTKTRPILSPA

SEQ ID NO: 164428 - protein, 11 aa, Artificial Sequence
  Description of Artificial Sequence: Synthetic peptide
  Seed: WLKTRPILSPL
WTKTRPILSPI

SEQ ID NO: 164429 - protein, 11 aa, Artificial Sequence
  Description of Artificial Sequence: Synthetic peptide
  Seed: WLKTRPILSPL
WTKTRPILSPK

SEQ ID NO: 164430 - protein, 11 aa, Artificial Sequence
  Description of Artificial Sequence: Synthetic peptide
  Seed: WLKTRPILSPL
WTKTRPILSPL

SEQ ID NO: 164431 - protein, 11 aa, Artificial Sequence
  Description of Artificial Sequence: Synthetic peptide
  Seed: WLKTRPILSPL
WTKTRPILSPM

SEQ ID NO: 164432 - protein, 11 aa, Artificial Sequence
  Description of Artificial Sequence: Synthetic peptide
  Seed: WLKTRPILSPL
WTKTRPILSPV

SEQ ID NO: 164433 - protein, 8 aa, Artificial Sequence
  Description of Artificial Sequence: Synthetic peptide
  Seed: WLKTRPIL
WTKTRPIM

SEQ ID NO: 164434 - protein, 8 aa, Artificial Sequence
  Description of Artificial Sequence: Synthetic peptide
  Seed: WLKTRPIL
WVKTRPIF

SEQ ID NO: 164435 - protein, 8 aa, Artificial Sequence
  Description of Artificial Sequence: Synthetic peptide
  Seed: WLKTRPIL
WVKTRPII

SEQ ID NO: 164436 - protein, 11 aa, Artificial Sequence
  Description of Artificial Sequence: Synthetic peptide
  Seed: WLKTRPILSPL
WVKTRPILSPA

SEQ ID NO: 164437 - protein, 11 aa, Artificial Sequence
  Description of Artificial Sequence: Synthetic peptide
  Seed: WLKTRPILSPL
WVKTRPILSPF

SEQ ID NO: 164438 - protein, 11 aa, Artificial Sequence
  Description of Artificial Sequence: Synthetic peptide
  Seed: WLKTRPILSPL
WVKTRPILSPI

SEQ ID NO: 164439 - protein, 11 aa, Artificial Sequence
  Description of Artificial Sequence: Synthetic peptide
  Seed: WLKTRPILSPL
WVKTRPILSPK

SEQ ID NO: 164440 - protein, 11 aa, Artificial Sequence
  Description of Artificial Sequence: Synthetic peptide
  Seed: WLKTRPILSPL
WVKTRPILSPL

SEQ ID NO: 164441 - protein, 11 aa, Artificial Sequence
  Description of Artificial Sequence: Synthetic peptide
  Seed: WLKTRPILSPL
WVKTRPILSPM

SEQ ID NO: 164442 - protein, 11 aa, Artificial Sequence
  Description of Artificial Sequence: Synthetic peptide
  Seed: WLKTRPILSPL
WVKTRPILSPV

SEQ ID NO: 164443 - protein, 8 aa, Artificial Sequence
  Description of Artificial Sequence: Synthetic peptide
  Seed: WLKTRPIL
WVKTRPIM

SEQ ID NO: 164444 - protein, 8 aa, Artificial Sequence
  Description of Artificial Sequence: Synthetic peptide
  Seed: WLKTRPIL
WVKTRPIV

SEQ ID NO: 164445 - protein, 11 aa, Artificial Sequence
  Description of Artificial Sequence: Synthetic peptide
  Seed: WLKTRPILSPL
WWKTRPILSPA

SEQ ID NO: 164446 - protein, 11 aa, Artificial Sequence
  Description of Artificial Sequence: Synthetic peptide
  Seed: WLKTRPILSPL
WWKTRPILSPI

SEQ ID NO: 164447 - protein, 11 aa, Artificial Sequence
  Description of Artificial Sequence: Synthetic peptide
  Seed: WLKTRPILSPL
WWKTRPILSPK

SEQ ID NO: 164448 - protein, 11 aa, Artificial Sequence
  Description of Artificial Sequence: Synthetic peptide
  Seed: WLKTRPILSPL
WWKTRPILSPL

SEQ ID NO: 164449 - protein, 11 aa, Artificial Sequence
  Description of Artificial Sequence: Synthetic peptide
  Seed: WLKTRPILSPL
WWKTRPILSPM

SEQ ID NO: 164450 - protein, 11 aa, Artificial Sequence
  Description of Artificial Sequence: Synthetic peptide
  Seed: WLKTRPILSPL
WWKTRPILSPV

SEQ ID NO: 164451 - protein, 11 aa, Artificial Sequence
  Description of Artificial Sequence: Synthetic peptide
  Seed: WLKTRPILSPL
WYKTRPILSPA

SEQ ID NO: 164452 - protein, 11 aa, Artificial Sequence
  Description of Artificial Sequence: Synthetic peptide
  Seed: WLKTRPILSPL
WYKTRPILSPI

SEQ ID NO: 164453 - protein, 11 aa, Artificial Sequence
  Description of Artificial Sequence: Synthetic peptide
  Seed: WLKTRPILSPL
WYKTRPILSPK

SEQ ID NO: 164454 - protein, 11 aa, Artificial Sequence
  Description of Artificial Sequence: Synthetic peptide
  Seed: WLKTRPILSPL
WYKTRPILSPL

SEQ ID NO: 164455 - protein, 11 aa, Artificial Sequence
  Description of Artificial Sequence: Synthetic peptide
  Seed: WLKTRPILSPL
WYKTRPILSPM

SEQ ID NO: 164456 - protein, 11 aa, Artificial Sequence
  Description of Artificial Sequence: Synthetic peptide
  Seed: WLKTRPILSPL
WYKTRPILSPV

SEQ ID NO: 164457 - protein, 11 aa, Artificial Sequence
  Description of Artificial Sequence: Synthetic peptide
  Seed: ANQRLNPMHQL
AAQRLNPMHQF

SEQ ID NO: 164458 - protein, 11 aa, Artificial Sequence
  Description of Artificial Sequence: Synthetic peptide
  Seed: ANQRLNPMHQL
AAQRLNPMHQI

SEQ ID NO: 164459 - protein, 11 aa, Artificial Sequence
  Description of Artificial Sequence: Synthetic peptide
  Seed: ANQRLNPMHQL
AAQRLNPMHQL

SEQ ID NO: 164460 - protein, 11 aa, Artificial Sequence
  Description of Artificial Sequence: Synthetic peptide
  Seed: ANQRLNPMHQL
AAQRLNPMHQM

SEQ ID NO: 164461 - protein, 11 aa, Artificial Sequence
  Description of Artificial Sequence: Synthetic peptide
  Seed: ANQRLNPMHQL
AAQRLNPMHQV

SEQ ID NO: 164462 - protein, 11 aa, Artificial Sequence
  Description of Artificial Sequence: Synthetic peptide
  Seed: ANQRLNPMHQL
ACQRLNPMHQF

SEQ ID NO: 164463 - protein, 11 aa, Artificial Sequence
  Description of Artificial Sequence: Synthetic peptide
  Seed: ANQRLNPMHQL
ACQRLNPMHQI

SEQ ID NO: 164464 - protein, 11 aa, Artificial Sequence
  Description of Artificial Sequence: Synthetic peptide
  Seed: ANQRLNPMHQL
ACQRLNPMHQL

SEQ ID NO: 164465 - protein, 11 aa, Artificial Sequence
  Description of Artificial Sequence: Synthetic peptide
  Seed: ANQRLNPMHQL
ACQRLNPMHQM

SEQ ID NO: 164466 - protein, 11 aa, Artificial Sequence
  Description of Artificial Sequence: Synthetic peptide
  Seed: ANQRLNPMHQL
ACQRLNPMHQV

SEQ ID NO: 164467 - protein, 11 aa, Artificial Sequence
  Description of Artificial Sequence: Synthetic peptide
  Seed: ANQRLNPMHQL
ADQRLNPMHQF

SEQ ID NO: 164468 - protein, 11 aa, Artificial Sequence
  Description of Artificial Sequence: Synthetic peptide
  Seed: ANQRLNPMHQL
ADQRLNPMHQI

SEQ ID NO: 164469 - protein, 11 aa, Artificial Sequence
  Description of Artificial Sequence: Synthetic peptide
  Seed: ANQRLNPMHQL
ADQRLNPMHQL

SEQ ID NO: 164470 - protein, 11 aa, Artificial Sequence
  Description of Artificial Sequence: Synthetic peptide
  Seed: ANQRLNPMHQL
ADQRLNPMHQM

SEQ ID NO: 164471 - protein, 11 aa, Artificial Sequence
  Description of Artificial Sequence: Synthetic peptide
  Seed: ANQRLNPMHQL
ADQRLNPMHQV

SEQ ID NO: 164472 - protein, 11 aa, Artificial Sequence
  Description of Artificial Sequence: Synthetic peptide
  Seed: ANQRLNPMHQL
AEQRLNPMHQF

SEQ ID NO: 164473 - protein, 11 aa, Artificial Sequence
  Description of Artificial Sequence: Synthetic peptide
  Seed: ANQRLNPMHQL
AEQRLNPMHQI

SEQ ID NO: 164474 - protein, 11 aa, Artificial Sequence
  Description of Artificial Sequence: Synthetic peptide
  Seed: ANQRLNPMHQL
AEQRLNPMHQL

SEQ ID NO: 164475 - protein, 11 aa, Artificial Sequence
  Description of Artificial Sequence: Synthetic peptide
  Seed: ANQRLNPMHQL
AEQRLNPMHQM

SEQ ID NO: 164476 - protein, 11 aa, Artificial Sequence
  Description of Artificial Sequence: Synthetic peptide
  Seed: ANQRLNPMHQL
AEQRLNPMHQV

SEQ ID NO: 164477 - protein, 11 aa, Artificial Sequence
  Description of Artificial Sequence: Synthetic peptide
  Seed: ANQRLNPMHQL
AFQRLNPMHQF

SEQ ID NO: 164478 - protein, 11 aa, Artificial Sequence
  Description of Artificial Sequence: Synthetic peptide
  Seed: ANQRLNPMHQL
AFQRLNPMHQI

SEQ ID NO: 164479 - protein, 11 aa, Artificial Sequence
  Description of Artificial Sequence: Synthetic peptide
  Seed: ANQRLNPMHQL
AFQRLNPMHQL

SEQ ID NO: 164480 - protein, 11 aa, Artificial Sequence
  Description of Artificial Sequence: Synthetic peptide
  Seed: ANQRLNPMHQL
AFQRLNPMHQM

SEQ ID NO: 164481 - protein, 11 aa, Artificial Sequence
  Description of Artificial Sequence: Synthetic peptide
  Seed: ANQRLNPMHQL
AFQRLNPMHQV

SEQ ID NO: 164482 - protein, 11 aa, Artificial Sequence
  Description of Artificial Sequence: Synthetic peptide
  Seed: ANQRLNPMHQL
AGQRLNPMHQF

SEQ ID NO: 164483 - protein, 11 aa, Artificial Sequence
  Description of Artificial Sequence: Synthetic peptide
  Seed: ANQRLNPMHQL
AGQRLNPMHQI

SEQ ID NO: 164484 - protein, 11 aa, Artificial Sequence
  Description of Artificial Sequence: Synthetic peptide
  Seed: ANQRLNPMHQL
AGQRLNPMHQL

SEQ ID NO: 164485 - protein, 11 aa, Artificial Sequence
  Description of Artificial Sequence: Synthetic peptide
  Seed: ANQRLNPMHQL
AGQRLNPMHQM

SEQ ID NO: 164486 - protein, 11 aa, Artificial Sequence
  Description of Artificial Sequence: Synthetic peptide
  Seed: ANQRLNPMHQL
AGQRLNPMHQV

SEQ ID NO: 164487 - protein, 11 aa, Artificial Sequence
  Description of Artificial Sequence: Synthetic peptide
  Seed: ANQRLNPMHQL
AHQRLNPMHQF

SEQ ID NO: 164488 - protein, 11 aa, Artificial Sequence
  Description of Artificial Sequence: Synthetic peptide
  Seed: ANQRLNPMHQL
AHQRLNPMHQI

SEQ ID NO: 164489 - protein, 11 aa, Artificial Sequence
  Description of Artificial Sequence: Synthetic peptide
  Seed: ANQRLNPMHQL
AHQRLNPMHQL

SEQ ID NO: 164490 - protein, 11 aa, Artificial Sequence
  Description of Artificial Sequence: Synthetic peptide
  Seed: ANQRLNPMHQL
AHQRLNPMHQM

SEQ ID NO: 164491 - protein, 11 aa, Artificial Sequence
  Description of Artificial Sequence: Synthetic peptide
  Seed: ANQRLNPMHQL
AHQRLNPMHQV

SEQ ID NO: 164492 - protein, 11 aa, Artificial Sequence
  Description of Artificial Sequence: Synthetic peptide
  Seed: ANQRLNPMHQL
AIQRLNPMHQF

SEQ ID NO: 164493 - protein, 11 aa, Artificial Sequence
  Description of Artificial Sequence: Synthetic peptide
  Seed: ANQRLNPMHQL
AIQRLNPMHQI

SEQ ID NO: 164494 - protein, 11 aa, Artificial Sequence
  Description of Artificial Sequence: Synthetic peptide
  Seed: ANQRLNPMHQL
AIQRLNPMHQL

SEQ ID NO: 164495 - protein, 11 aa, Artificial Sequence
  Description of Artificial Sequence: Synthetic peptide
  Seed: ANQRLNPMHQL
AIQRLNPMHQM

SEQ ID NO: 164496 - protein, 11 aa, Artificial Sequence
  Description of Artificial Sequence: Synthetic peptide
  Seed: ANQRLNPMHQL
AIQRLNPMHQV

SEQ ID NO: 164497 - protein, 11 aa, Artificial Sequence
  Description of Artificial Sequence: Synthetic peptide
  Seed: ANQRLNPMHQL
AKQRLNPMHQF

SEQ ID NO: 164498 - protein, 11 aa, Artificial Sequence
  Description of Artificial Sequence: Synthetic peptide
  Seed: ANQRLNPMHQL
AKQRLNPMHQI

SEQ ID NO: 164499 - protein, 11 aa, Artificial Sequence
  Description of Artificial Sequence: Synthetic peptide
  Seed: ANQRLNPMHQL
AKQRLNPMHQL

SEQ ID NO: 164500 - protein, 11 aa, Artificial Sequence
  Description of Artificial Sequence: Synthetic peptide
  Seed: ANQRLNPMHQL
AKQRLNPMHQM

SEQ ID NO: 164501 - protein, 11 aa, Artificial Sequence
  Description of Artificial Sequence: Synthetic peptide
  Seed: ANQRLNPMHQL
AKQRLNPMHQV

SEQ ID NO: 164502 - protein, 11 aa, Artificial Sequence
  Description of Artificial Sequence: Synthetic peptide
  Seed: ANQRLNPMHQL
ALQRLNPMHQF

SEQ ID NO: 164503 - protein, 11 aa, Artificial Sequence
  Description of Artificial Sequence: Synthetic peptide
  Seed: ANQRLNPMHQL
ALQRLNPMHQI

SEQ ID NO: 164504 - protein, 11 aa, Artificial Sequence
  Description of Artificial Sequence: Synthetic peptide
  Seed: ANQRLNPMHQL
ALQRLNPMHQL

SEQ ID NO: 164505 - protein, 11 aa, Artificial Sequence
  Description of Artificial Sequence: Synthetic peptide
  Seed: ANQRLNPMHQL
ALQRLNPMHQM

SEQ ID NO: 164506 - protein, 11 aa, Artificial Sequence
  Description of Artificial Sequence: Synthetic peptide
  Seed: ANQRLNPMHQL
ALQRLNPMHQV

SEQ ID NO: 164507 - protein, 11 aa, Artificial Sequence
  Description of Artificial Sequence: Synthetic peptide
  Seed: ANQRLNPMHQL
AMQRLNPMHQF

SEQ ID NO: 164508 - protein, 11 aa, Artificial Sequence
  Description of Artificial Sequence: Synthetic peptide
  Seed: ANQRLNPMHQL
AMQRLNPMHQI

SEQ ID NO: 164509 - protein, 11 aa, Artificial Sequence
  Description of Artificial Sequence: Synthetic peptide
  Seed: ANQRLNPMHQL
AMQRLNPMHQL

SEQ ID NO: 164510 - protein, 11 aa, Artificial Sequence
  Description of Artificial Sequence: Synthetic peptide
  Seed: ANQRLNPMHQL
AMQRLNPMHQM

SEQ ID NO: 164511 - protein, 11 aa, Artificial Sequence
  Description of Artificial Sequence: Synthetic peptide
  Seed: ANQRLNPMHQL
AMQRLNPMHQV

SEQ ID NO: 164512 - protein, 11 aa, Artificial Sequence
  Description of Artificial Sequence: Synthetic peptide
  Seed: ANQRLNPMHQL
ANQRLNPMHQF

SEQ ID NO: 164513 - protein, 11 aa, Artificial Sequence
  Description of Artificial Sequence: Synthetic peptide
  Seed: ANQRLNPMHQL
ANQRLNPMHQI

SEQ ID NO: 164514 - protein, 11 aa, Artificial Sequence
  Description of Artificial Sequence: Synthetic peptide
  Seed: ANQRLNPMHQL
ANQRLNPMHQM

SEQ ID NO: 164515 - protein, 11 aa, Artificial Sequence
  Description of Artificial Sequence: Synthetic peptide
  Seed: ANQRLNPMHQL
ANQRLNPMHQV

SEQ ID NO: 164516 - protein, 11 aa, Artificial Sequence
  Description of Artificial Sequence: Synthetic peptide
  Seed: ANQRLNPMHQL
APQRLNPMHQF

SEQ ID NO: 164517 - protein, 11 aa, Artificial Sequence
  Description of Artificial Sequence: Synthetic peptide
  Seed: ANQRLNPMHQL
APQRLNPMHQI

SEQ ID NO: 164518 - protein, 11 aa, Artificial Sequence
  Description of Artificial Sequence: Synthetic peptide
  Seed: ANQRLNPMHQL
APQRLNPMHQL

SEQ ID NO: 164519 - protein, 11 aa, Artificial Sequence
  Description of Artificial Sequence: Synthetic peptide
  Seed: ANQRLNPMHQL
APQRLNPMHQM

SEQ ID NO: 164520 - protein, 11 aa, Artificial Sequence
  Description of Artificial Sequence: Synthetic peptide
  Seed: ANQRLNPMHQL
APQRLNPMHQV

SEQ ID NO: 164521 - protein, 11 aa, Artificial Sequence
  Description of Artificial Sequence: Synthetic peptide
  Seed: ANQRLNPMHQL
AQQRLNPMHQF

SEQ ID NO: 164522 - protein, 11 aa, Artificial Sequence
  Description of Artificial Sequence: Synthetic peptide
  Seed: ANQRLNPMHQL
AQQRLNPMHQI

SEQ ID NO: 164523 - protein, 11 aa, Artificial Sequence
  Description of Artificial Sequence: Synthetic peptide
  Seed: ANQRLNPMHQL
AQQRLNPMHQL

SEQ ID NO: 164524 - protein, 11 aa, Artificial Sequence
  Description of Artificial Sequence: Synthetic peptide
  Seed: ANQRLNPMHQL
AQQRLNPMHQM

SEQ ID NO: 164525 - protein, 11 aa, Artificial Sequence
  Description of Artificial Sequence: Synthetic peptide
  Seed: ANQRLNPMHQL
AQQRLNPMHQV

SEQ ID NO: 164526 - protein, 11 aa, Artificial Sequence
  Description of Artificial Sequence: Synthetic peptide
  Seed: ANQRLNPMHQL
ARQRLNPMHQF

SEQ ID NO: 164527 - protein, 11 aa, Artificial Sequence
  Description of Artificial Sequence: Synthetic peptide
  Seed: ANQRLNPMHQL
ARQRLNPMHQI

SEQ ID NO: 164528 - protein, 11 aa, Artificial Sequence
  Description of Artificial Sequence: Synthetic peptide
  Seed: ANQRLNPMHQL
ARQRLNPMHQL

SEQ ID NO: 164529 - protein, 11 aa, Artificial Sequence
  Description of Artificial Sequence: Synthetic peptide
  Seed: ANQRLNPMHQL
ARQRLNPMHQM

SEQ ID NO: 164530 - protein, 11 aa, Artificial Sequence
  Description of Artificial Sequence: Synthetic peptide
  Seed: ANQRLNPMHQL
ARQRLNPMHQV

SEQ ID NO: 164531 - protein, 11 aa, Artificial Sequence
  Description of Artificial Sequence: Synthetic peptide
  Seed: ANQRLNPMHQL
ASQRLNPMHQF

SEQ ID NO: 164532 - protein, 11 aa, Artificial Sequence
  Description of Artificial Sequence: Synthetic peptide
  Seed: ANQRLNPMHQL
ASQRLNPMHQI

SEQ ID NO: 164533 - protein, 11 aa, Artificial Sequence
  Description of Artificial Sequence: Synthetic peptide
  Seed: ANQRLNPMHQL
ASQRLNPMHQL

SEQ ID NO: 164534 - protein, 11 aa, Artificial Sequence
  Description of Artificial Sequence: Synthetic peptide
  Seed: ANQRLNPMHQL
ASQRLNPMHQM

SEQ ID NO: 164535 - protein, 11 aa, Artificial Sequence
  Description of Artificial Sequence: Synthetic peptide
  Seed: ANQRLNPMHQL
ASQRLNPMHQV

SEQ ID NO: 164536 - protein, 11 aa, Artificial Sequence
  Description of Artificial Sequence: Synthetic peptide
  Seed: ANQRLNPMHQL
ATQRLNPMHQF

SEQ ID NO: 164537 - protein, 11 aa, Artificial Sequence
  Description of Artificial Sequence: Synthetic peptide
  Seed: ANQRLNPMHQL
ATQRLNPMHQI

SEQ ID NO: 164538 - protein, 11 aa, Artificial Sequence
  Description of Artificial Sequence: Synthetic peptide
  Seed: ANQRLNPMHQL
ATQRLNPMHQL

SEQ ID NO: 164539 - protein, 11 aa, Artificial Sequence
  Description of Artificial Sequence: Synthetic peptide
  Seed: ANQRLNPMHQL
ATQRLNPMHQM

SEQ ID NO: 164540 - protein, 11 aa, Artificial Sequence
  Description of Artificial Sequence: Synthetic peptide
  Seed: ANQRLNPMHQL
ATQRLNPMHQV

SEQ ID NO: 164541 - protein, 11 aa, Artificial Sequence
  Description of Artificial Sequence: Synthetic peptide
  Seed: ANQRLNPMHQL
AVQRLNPMHQF

SEQ ID NO: 164542 - protein, 11 aa, Artificial Sequence
  Description of Artificial Sequence: Synthetic peptide
  Seed: ANQRLNPMHQL
AVQRLNPMHQI

SEQ ID NO: 164543 - protein, 11 aa, Artificial Sequence
  Description of Artificial Sequence: Synthetic peptide
  Seed: ANQRLNPMHQL
AVQRLNPMHQL

SEQ ID NO: 164544 - protein, 11 aa, Artificial Sequence
  Description of Artificial Sequence: Synthetic peptide
  Seed: ANQRLNPMHQL
AVQRLNPMHQM

SEQ ID NO: 164545 - protein, 11 aa, Artificial Sequence
  Description of Artificial Sequence: Synthetic peptide
  Seed: ANQRLNPMHQL
AVQRLNPMHQV

SEQ ID NO: 164546 - protein, 11 aa, Artificial Sequence
  Description of Artificial Sequence: Synthetic peptide
  Seed: ANQRLNPMHQL
AWQRLNPMHQF

SEQ ID NO: 164547 - protein, 11 aa, Artificial Sequence
  Description of Artificial Sequence: Synthetic peptide
  Seed: ANQRLNPMHQL
AWQRLNPMHQI

SEQ ID NO: 164548 - protein, 11 aa, Artificial Sequence
  Description of Artificial Sequence: Synthetic peptide
  Seed: ANQRLNPMHQL
AWQRLNPMHQL

SEQ ID NO: 164549 - protein, 11 aa, Artificial Sequence
  Description of Artificial Sequence: Synthetic peptide
  Seed: ANQRLNPMHQL
AWQRLNPMHQM

SEQ ID NO: 164550 - protein, 11 aa, Artificial Sequence
  Description of Artificial Sequence: Synthetic peptide
  Seed: ANQRLNPMHQL
AWQRLNPMHQV

SEQ ID NO: 164551 - protein, 11 aa, Artificial Sequence
  Description of Artificial Sequence: Synthetic peptide
  Seed: ANQRLNPMHQL
AYQRLNPMHQF

SEQ ID NO: 164552 - protein, 11 aa, Artificial Sequence
  Description of Artificial Sequence: Synthetic peptide
  Seed: ANQRLNPMHQL
AYQRLNPMHQI

SEQ ID NO: 164553 - protein, 11 aa, Artificial Sequence
  Description of Artificial Sequence: Synthetic peptide
  Seed: ANQRLNPMHQL
AYQRLNPMHQL

SEQ ID NO: 164554 - protein, 11 aa, Artificial Sequence
  Description of Artificial Sequence: Synthetic peptide
  Seed: ANQRLNPMHQL
AYQRLNPMHQM

SEQ ID NO: 164555 - protein, 11 aa, Artificial Sequence
  Description of Artificial Sequence: Synthetic peptide
  Seed: ANQRLNPMHQL
AYQRLNPMHQV

SEQ ID NO: 164556 - protein, 9 aa, Artificial Sequence
  Description of Artificial Sequence: Synthetic peptide
  Seed: DVVLVMKRK
DAVLVMKRK

SEQ ID NO: 164557 - protein, 10 aa, Artificial Sequence
  Description of Artificial Sequence: Synthetic peptide
  Seed: DVVLVMKRKR
DAVLVMKRKK

SEQ ID NO: 164558 - protein, 10 aa, Artificial Sequence
  Description of Artificial Sequence: Synthetic peptide
  Seed: DVVLVMKRKR
DAVLVMKRKR

SEQ ID NO: 164559 - protein, 9 aa, Artificial Sequence
  Description of Artificial Sequence: Synthetic peptide
  Seed: DVVLVMKRK
DAVLVMKRR

SEQ ID NO: 164560 - protein, 10 aa, Artificial Sequence
  Description of Artificial Sequence: Synthetic peptide
  Seed: DVVLVMKRKR
DFVLVMKRKR

SEQ ID NO: 164561 - protein, 9 aa, Artificial Sequence
  Description of Artificial Sequence: Synthetic peptide
  Seed: DVVLVMKRK
DIVLVMKRK

SEQ ID NO: 164562 - protein, 10 aa, Artificial Sequence
  Description of Artificial Sequence: Synthetic peptide
  Seed: DVVLVMKRKR
DIVLVMKRKK

SEQ ID NO: 164563 - protein, 10 aa, Artificial Sequence
  Description of Artificial Sequence: Synthetic peptide
  Seed: DVVLVMKRKR
DIVLVMKRKR

SEQ ID NO: 164564 - protein, 9 aa, Artificial Sequence
  Description of Artificial Sequence: Synthetic peptide
  Seed: DVVLVMKRK
DIVLVMKRR

SEQ ID NO: 164565 - protein, 9 aa, Artificial Sequence
  Description of Artificial Sequence: Synthetic peptide
  Seed: DVVLVMKRK
DLVLVMKRK

SEQ ID NO: 164566 - protein, 10 aa, Artificial Sequence
  Description of Artificial Sequence: Synthetic peptide
  Seed: DVVLVMKRKR
DLVLVMKRKR

SEQ ID NO: 164567 - protein, 9 aa, Artificial Sequence
  Description of Artificial Sequence: Synthetic peptide
  Seed: DVVLVMKRK
DLVLVMKRR

SEQ ID NO: 164568 - protein, 9 aa, Artificial Sequence
  Description of Artificial Sequence: Synthetic peptide
  Seed: DVVLVMKRK
DMVLVMKRK

SEQ ID NO: 164569 - protein, 10 aa, Artificial Sequence
  Description of Artificial Sequence: Synthetic peptide
  Seed: DVVLVMKRKR
DMVLVMKRKR

SEQ ID NO: 164570 - protein, 9 aa, Artificial Sequence
  Description of Artificial Sequence: Synthetic peptide
  Seed: DVVLVMKRK
DMVLVMKRR

SEQ ID NO: 164571 - protein, 9 aa, Artificial Sequence
  Description of Artificial Sequence: Synthetic peptide
  Seed: DVVLVMKRK
DSVLVMKRK

SEQ ID NO: 164572 - protein, 10 aa, Artificial Sequence
  Description of Artificial Sequence: Synthetic peptide
  Seed: DVVLVMKRKR
DSVLVMKRKK

SEQ ID NO: 164573 - protein, 10 aa, Artificial Sequence
  Description of Artificial Sequence: Synthetic peptide
  Seed: DVVLVMKRKR
DSVLVMKRKR

SEQ ID NO: 164574 - protein, 9 aa, Artificial Sequence
  Description of Artificial Sequence: Synthetic peptide
  Seed: DVVLVMKRK
DSVLVMKRR

SEQ ID NO: 164575 - protein, 9 aa, Artificial Sequence
  Description of Artificial Sequence: Synthetic peptide
  Seed: DVVLVMKRK
DTVLVMKRK

SEQ ID NO: 164576 - protein, 10 aa, Artificial Sequence
  Description of Artificial Sequence: Synthetic peptide
  Seed: DVVLVMKRKR
DTVLVMKRKK

SEQ ID NO: 164577 - protein, 10 aa, Artificial Sequence
  Description of Artificial Sequence: Synthetic peptide
  Seed: DVVLVMKRKR
DTVLVMKRKR

SEQ ID NO: 164578 - protein, 9 aa, Artificial Sequence
  Description of Artificial Sequence: Synthetic peptide
  Seed: DVVLVMKRK
DTVLVMKRR

SEQ ID NO: 164579 - protein, 10 aa, Artificial Sequence
  Description of Artificial Sequence: Synthetic peptide
  Seed: DVVLVMKRKR
DVVLVMKRKK

SEQ ID NO: 164580 - protein, 9 aa, Artificial Sequence
  Description of Artificial Sequence: Synthetic peptide
  Seed: DVVLVMKRK
DVVLVMKRR

SEQ ID NO: 164581 - protein, 10 aa, Artificial Sequence
  Description of Artificial Sequence: Synthetic peptide
  Seed: DVVLVMKRKR
DWVLVMKRKR

SEQ ID NO: 164582 - protein, 10 aa, Artificial Sequence
  Description of Artificial Sequence: Synthetic peptide
  Seed: DVVLVMKRKR
DYVLVMKRKR

SEQ ID NO: 164583 - protein, 10 aa, Artificial Sequence
  Description of Artificial Sequence: Synthetic peptide
  Seed: EVVFPNEVGA
EAVFPNEVGA

SEQ ID NO: 164584 - protein, 10 aa, Artificial Sequence
  Description of Artificial Sequence: Synthetic peptide
  Seed: EVVFPNEVGA
EAVFPNEVGI

SEQ ID NO: 164585 - protein, 10 aa, Artificial Sequence
  Description of Artificial Sequence: Synthetic peptide
  Seed: EVVFPNEVGA
EAVFPNEVGL

SEQ ID NO: 164586 - protein, 10 aa, Artificial Sequence
  Description of Artificial Sequence: Synthetic peptide
  Seed: EVVFPNEVGA
EAVFPNEVGM

SEQ ID NO: 164587 - protein, 10 aa, Artificial Sequence
  Description of Artificial Sequence: Synthetic peptide
  Seed: EVVFPNEVGA
EAVFPNEVGT

SEQ ID NO: 164588 - protein, 10 aa, Artificial Sequence
  Description of Artificial Sequence: Synthetic peptide
  Seed: EVVFPNEVGA
EAVFPNEVGV

SEQ ID NO: 164589 - protein, 11 aa, Artificial Sequence
  Description of Artificial Sequence: Synthetic peptide
  Seed: ELVRKTRFLPV
EAVRKTRFLPI

SEQ ID NO: 164590 - protein, 11 aa, Artificial Sequence
  Description of Artificial Sequence: Synthetic peptide
  Seed: ELVRKTRFLPV
EAVRKTRFLPL

SEQ ID NO: 164591 - protein, 11 aa, Artificial Sequence
  Description of Artificial Sequence: Synthetic peptide
  Seed: ELVRKTRFLPV
EAVRKTRFLPM

SEQ ID NO: 164592 - protein, 10 aa, Artificial Sequence
  Description of Artificial Sequence: Synthetic peptide
  Seed: EVVFPNEVGA
ECVFPNEVGA

SEQ ID NO: 164593 - protein, 10 aa, Artificial Sequence
  Description of Artificial Sequence: Synthetic peptide
  Seed: EVVFPNEVGA
ECVFPNEVGI

SEQ ID NO: 164594 - protein, 10 aa, Artificial Sequence
  Description of Artificial Sequence: Synthetic peptide
  Seed: EVVFPNEVGA
ECVFPNEVGL

SEQ ID NO: 164595 - protein, 10 aa, Artificial Sequence
  Description of Artificial Sequence: Synthetic peptide
  Seed: EVVFPNEVGA
ECVFPNEVGM

SEQ ID NO: 164596 - protein, 10 aa, Artificial Sequence
  Description of Artificial Sequence: Synthetic peptide
  Seed: EVVFPNEVGA
ECVFPNEVGV

SEQ ID NO: 164597 - protein, 11 aa, Artificial Sequence
  Description of Artificial Sequence: Synthetic peptide
  Seed: ELVRKTRFLPV
ECVRKTRFLPL

SEQ ID NO: 164598 - protein, 10 aa, Artificial Sequence
  Description of Artificial Sequence: Synthetic peptide
  Seed: EVVFPNEVGA
EDVFPNEVGA

SEQ ID NO: 164599 - protein, 10 aa, Artificial Sequence
  Description of Artificial Sequence: Synthetic peptide
  Seed: EVVFPNEVGA
EDVFPNEVGI

SEQ ID NO: 164600 - protein, 10 aa, Artificial Sequence
  Description of Artificial Sequence: Synthetic peptide
  Seed: EVVFPNEVGA
EDVFPNEVGL

SEQ ID NO: 164601 - protein, 10 aa, Artificial Sequence
  Description of Artificial Sequence: Synthetic peptide
  Seed: EVVFPNEVGA
EDVFPNEVGM

SEQ ID NO: 164602 - protein, 10 aa, Artificial Sequence
  Description of Artificial Sequence: Synthetic peptide
  Seed: EVVFPNEVGA
EDVFPNEVGV

SEQ ID NO: 164603 - protein, 11 aa, Artificial Sequence
  Description of Artificial Sequence: Synthetic peptide
  Seed: ELVRKTRFLPV
EDVRKTRFLPL

SEQ ID NO: 164604 - protein, 10 aa, Artificial Sequence
  Description of Artificial Sequence: Synthetic peptide
  Seed: EVVFPNEVGA
EEVFPNEVGA

SEQ ID NO: 164605 - protein, 10 aa, Artificial Sequence
  Description of Artificial Sequence: Synthetic peptide
  Seed: EVVFPNEVGA
EEVFPNEVGI

SEQ ID NO: 164606 - protein, 10 aa, Artificial Sequence
  Description of Artificial Sequence: Synthetic peptide
  Seed: EVVFPNEVGA
EEVFPNEVGL

SEQ ID NO: 164607 - protein, 10 aa, Artificial Sequence
  Description of Artificial Sequence: Synthetic peptide
  Seed: EVVFPNEVGA
EEVFPNEVGM

SEQ ID NO: 164608 - protein, 10 aa, Artificial Sequence
  Description of Artificial Sequence: Synthetic peptide
  Seed: EVVFPNEVGA
EEVFPNEVGV

SEQ ID NO: 164609 - protein, 11 aa, Artificial Sequence
  Description of Artificial Sequence: Synthetic peptide
  Seed: ELVRKTRFLPV
EEVRKTRFLPL

SEQ ID NO: 164610 - protein, 10 aa, Artificial Sequence
  Description of Artificial Sequence: Synthetic peptide
  Seed: EVVFPNEVGA
EFVFPNEVGA

SEQ ID NO: 164611 - protein, 10 aa, Artificial Sequence
  Description of Artificial Sequence: Synthetic peptide
  Seed: EVVFPNEVGA
EFVFPNEVGI

SEQ ID NO: 164612 - protein, 10 aa, Artificial Sequence
  Description of Artificial Sequence: Synthetic peptide
  Seed: EVVFPNEVGA
EFVFPNEVGL

SEQ ID NO: 164613 - protein, 10 aa, Artificial Sequence
  Description of Artificial Sequence: Synthetic peptide
  Seed: EVVFPNEVGA
EFVFPNEVGM

SEQ ID NO: 164614 - protein, 10 aa, Artificial Sequence
  Description of Artificial Sequence: Synthetic peptide
  Seed: EVVFPNEVGA
EFVFPNEVGV

SEQ ID NO: 164615 - protein, 11 aa, Artificial Sequence
  Description of Artificial Sequence: Synthetic peptide
  Seed: ELVRKTRFLPV
EFVRKTRFLPI

SEQ ID NO: 164616 - protein, 11 aa, Artificial Sequence
  Description of Artificial Sequence: Synthetic peptide
  Seed: ELVRKTRFLPV
EFVRKTRFLPL

SEQ ID NO: 164617 - protein, 11 aa, Artificial Sequence
  Description of Artificial Sequence: Synthetic peptide
  Seed: ELVRKTRFLPV
EFVRKTRFLPM

SEQ ID NO: 164618 - protein, 10 aa, Artificial Sequence
  Description of Artificial Sequence: Synthetic peptide
  Seed: EVVFPNEVGA
EGVFPNEVGA

SEQ ID NO: 164619 - protein, 10 aa, Artificial Sequence
  Description of Artificial Sequence: Synthetic peptide
  Seed: EVVFPNEVGA
EGVFPNEVGI

SEQ ID NO: 164620 - protein, 10 aa, Artificial Sequence
  Description of Artificial Sequence: Synthetic peptide
  Seed: EVVFPNEVGA
EGVFPNEVGL

SEQ ID NO: 164621 - protein, 10 aa, Artificial Sequence
  Description of Artificial Sequence: Synthetic peptide
  Seed: EVVFPNEVGA
EGVFPNEVGM

SEQ ID NO: 164622 - protein, 10 aa, Artificial Sequence
  Description of Artificial Sequence: Synthetic peptide
  Seed: EVVFPNEVGA
EGVFPNEVGV

SEQ ID NO: 164623 - protein, 11 aa, Artificial Sequence
  Description of Artificial Sequence: Synthetic peptide
  Seed: ELVRKTRFLPV
EGVRKTRFLPL

SEQ ID NO: 164624 - protein, 11 aa, Artificial Sequence
  Description of Artificial Sequence: Synthetic peptide
  Seed: ELVRKTRFLPV
EGVRKTRFLPM

SEQ ID NO: 164625 - protein, 10 aa, Artificial Sequence
  Description of Artificial Sequence: Synthetic peptide
  Seed: EVVFPNEVGA
EHVFPNEVGA

SEQ ID NO: 164626 - protein, 10 aa, Artificial Sequence
  Description of Artificial Sequence: Synthetic peptide
  Seed: EVVFPNEVGA
EHVFPNEVGI

SEQ ID NO: 164627 - protein, 10 aa, Artificial Sequence
  Description of Artificial Sequence: Synthetic peptide
  Seed: EVVFPNEVGA
EHVFPNEVGL

SEQ ID NO: 164628 - protein, 10 aa, Artificial Sequence
  Description of Artificial Sequence: Synthetic peptide
  Seed: EVVFPNEVGA
EHVFPNEVGM

SEQ ID NO: 164629 - protein, 10 aa, Artificial Sequence
  Description of Artificial Sequence: Synthetic peptide
  Seed: EVVFPNEVGA
EHVFPNEVGV

SEQ ID NO: 164630 - protein, 11 aa, Artificial Sequence
  Description of Artificial Sequence: Synthetic peptide
  Seed: ELVRKTRFLPV
EHVRKTRFLPL

SEQ ID NO: 164631 - protein, 11 aa, Artificial Sequence
  Description of Artificial Sequence: Synthetic peptide
  Seed: ELVRKTRFLPV
EHVRKTRFLPM

SEQ ID NO: 164632 - protein, 10 aa, Artificial Sequence
  Description of Artificial Sequence: Synthetic peptide
  Seed: EVVFPNEVGA
EIVFPNEVGA

SEQ ID NO: 164633 - protein, 10 aa, Artificial Sequence
  Description of Artificial Sequence: Synthetic peptide
  Seed: EVVFPNEVGA
EIVFPNEVGI

SEQ ID NO: 164634 - protein, 10 aa, Artificial Sequence
  Description of Artificial Sequence: Synthetic peptide
  Seed: EVVFPNEVGA
EIVFPNEVGL

SEQ ID NO: 164635 - protein, 10 aa, Artificial Sequence
  Description of Artificial Sequence: Synthetic peptide
  Seed: EVVFPNEVGA
EIVFPNEVGM

SEQ ID NO: 164636 - protein, 10 aa, Artificial Sequence
  Description of Artificial Sequence: Synthetic peptide
  Seed: EVVFPNEVGA
EIVFPNEVGV

SEQ ID NO: 164637 - protein, 11 aa, Artificial Sequence
  Description of Artificial Sequence: Synthetic peptide
  Seed: ELVRKTRFLPV
EIVRKTRFLPI

SEQ ID NO: 164638 - protein, 11 aa, Artificial Sequence
  Description of Artificial Sequence: Synthetic peptide
  Seed: ELVRKTRFLPV
EIVRKTRFLPL

SEQ ID NO: 164639 - protein, 11 aa, Artificial Sequence
  Description of Artificial Sequence: Synthetic peptide
  Seed: ELVRKTRFLPV
EIVRKTRFLPM

SEQ ID NO: 164640 - protein, 10 aa, Artificial Sequence
  Description of Artificial Sequence: Synthetic peptide
  Seed: EVVFPNEVGA
EKVFPNEVGA

SEQ ID NO: 164641 - protein, 10 aa, Artificial Sequence
  Description of Artificial Sequence: Synthetic peptide
  Seed: EVVFPNEVGA
EKVFPNEVGI

SEQ ID NO: 164642 - protein, 10 aa, Artificial Sequence
  Description of Artificial Sequence: Synthetic peptide
  Seed: EVVFPNEVGA
EKVFPNEVGL

SEQ ID NO: 164643 - protein, 10 aa, Artificial Sequence
  Description of Artificial Sequence: Synthetic peptide
  Seed: EVVFPNEVGA
EKVFPNEVGM

SEQ ID NO: 164644 - protein, 10 aa, Artificial Sequence
  Description of Artificial Sequence: Synthetic peptide
  Seed: EVVFPNEVGA
EKVFPNEVGV

SEQ ID NO: 164645 - protein, 11 aa, Artificial Sequence
  Description of Artificial Sequence: Synthetic peptide
  Seed: ELVRKTRFLPV
EKVRKTRFLPL

SEQ ID NO: 164646 - protein, 10 aa, Artificial Sequence
  Description of Artificial Sequence: Synthetic peptide
  Seed: EVVFPNEVGA
ELVFPNEVGA

SEQ ID NO: 164647 - protein, 10 aa, Artificial Sequence
  Description of Artificial Sequence: Synthetic peptide
  Seed: EVVFPNEVGA
ELVFPNEVGI

SEQ ID NO: 164648 - protein, 10 aa, Artificial Sequence
  Description of Artificial Sequence: Synthetic peptide
  Seed: EVVFPNEVGA
ELVFPNEVGL

SEQ ID NO: 164649 - protein, 10 aa, Artificial Sequence
  Description of Artificial Sequence: Synthetic peptide
  Seed: EVVFPNEVGA
ELVFPNEVGM

SEQ ID NO: 164650 - protein, 10 aa, Artificial Sequence
  Description of Artificial Sequence: Synthetic peptide
  Seed: EVVFPNEVGA
ELVFPNEVGV

SEQ ID NO: 164651 - protein, 11 aa, Artificial Sequence
  Description of Artificial Sequence: Synthetic peptide
  Seed: ELVRKTRFLPV
ELVRKTRFLPF

SEQ ID NO: 164652 - protein, 11 aa, Artificial Sequence
  Description of Artificial Sequence: Synthetic peptide
  Seed: ELVRKTRFLPV
ELVRKTRFLPI

SEQ ID NO: 164653 - protein, 11 aa, Artificial Sequence
  Description of Artificial Sequence: Synthetic peptide
  Seed: ELVRKTRFLPV
ELVRKTRFLPL

SEQ ID NO: 164654 - protein, 11 aa, Artificial Sequence
  Description of Artificial Sequence: Synthetic peptide
  Seed: ELVRKTRFLPV
ELVRKTRFLPM

SEQ ID NO: 164655 - protein, 10 aa, Artificial Sequence
  Description of Artificial Sequence: Synthetic peptide
  Seed: EVVFPNEVGA
EMVFPNEVGA

SEQ ID NO: 164656 - protein, 10 aa, Artificial Sequence
  Description of Artificial Sequence: Synthetic peptide
  Seed: EVVFPNEVGA
EMVFPNEVGI

SEQ ID NO: 164657 - protein, 10 aa, Artificial Sequence
  Description of Artificial Sequence: Synthetic peptide
  Seed: EVVFPNEVGA
EMVFPNEVGL

SEQ ID NO: 164658 - protein, 10 aa, Artificial Sequence
  Description of Artificial Sequence: Synthetic peptide
  Seed: EVVFPNEVGA
EMVFPNEVGM

SEQ ID NO: 164659 - protein, 10 aa, Artificial Sequence
  Description of Artificial Sequence: Synthetic peptide
  Seed: EVVFPNEVGA
EMVFPNEVGV

SEQ ID NO: 164660 - protein, 9 aa, Artificial Sequence
  Description of Artificial Sequence: Synthetic peptide
  Seed: ELVRKTRFL
EMVRKTRFI

SEQ ID NO: 164661 - protein, 9 aa, Artificial Sequence
  Description of Artificial Sequence: Synthetic peptide
  Seed: ELVRKTRFL
EMVRKTRFL

SEQ ID NO: 164662 - protein, 11 aa, Artificial Sequence
  Description of Artificial Sequence: Synthetic peptide
  Seed: ELVRKTRFLPV
EMVRKTRFLPA

SEQ ID NO: 164663 - protein, 11 aa, Artificial Sequence
  Description of Artificial Sequence: Synthetic peptide
  Seed: ELVRKTRFLPV
EMVRKTRFLPF

SEQ ID NO: 164664 - protein, 11 aa, Artificial Sequence
  Description of Artificial Sequence: Synthetic peptide
  Seed: ELVRKTRFLPV
EMVRKTRFLPI

SEQ ID NO: 164665 - protein, 11 aa, Artificial Sequence
  Description of Artificial Sequence: Synthetic peptide
  Seed: ELVRKTRFLPV
EMVRKTRFLPL

SEQ ID NO: 164666 - protein, 11 aa, Artificial Sequence
  Description of Artificial Sequence: Synthetic peptide
  Seed: ELVRKTRFLPV
EMVRKTRFLPM

SEQ ID NO: 164667 - protein, 11 aa, Artificial Sequence
  Description of Artificial Sequence: Synthetic peptide
  Seed: ELVRKTRFLPV
EMVRKTRFLPV

SEQ ID NO: 164668 - protein, 9 aa, Artificial Sequence
  Description of Artificial Sequence: Synthetic peptide
  Seed: ELVRKTRFL
EMVRKTRFM

SEQ ID NO: 164669 - protein, 9 aa, Artificial Sequence
  Description of Artificial Sequence: Synthetic peptide
  Seed: ELVRKTRFL
EMVRKTRFV

SEQ ID NO: 164670 - protein, 10 aa, Artificial Sequence
  Description of Artificial Sequence: Synthetic peptide
  Seed: EVVFPNEVGA
ENVFPNEVGA

SEQ ID NO: 164671 - protein, 10 aa, Artificial Sequence
  Description of Artificial Sequence: Synthetic peptide
  Seed: EVVFPNEVGA
ENVFPNEVGI

SEQ ID NO: 164672 - protein, 10 aa, Artificial Sequence
  Description of Artificial Sequence: Synthetic peptide
  Seed: EVVFPNEVGA
ENVFPNEVGL

SEQ ID NO: 164673 - protein, 10 aa, Artificial Sequence
  Description of Artificial Sequence: Synthetic peptide
  Seed: EVVFPNEVGA
ENVFPNEVGM

SEQ ID NO: 164674 - protein, 10 aa, Artificial Sequence
  Description of Artificial Sequence: Synthetic peptide
  Seed: EVVFPNEVGA
ENVFPNEVGV

SEQ ID NO: 164675 - protein, 11 aa, Artificial Sequence
  Description of Artificial Sequence: Synthetic peptide
  Seed: ELVRKTRFLPV
ENVRKTRFLPL

SEQ ID NO: 164676 - protein, 11 aa, Artificial Sequence
  Description of Artificial Sequence: Synthetic peptide
  Seed: ELVRKTRFLPV
ENVRKTRFLPM

SEQ ID NO: 164677 - protein, 10 aa, Artificial Sequence
  Description of Artificial Sequence: Synthetic peptide
  Seed: EVVFPNEVGA
EPVFPNEVGA

SEQ ID NO: 164678 - protein, 10 aa, Artificial Sequence
  Description of Artificial Sequence: Synthetic peptide
  Seed: EVVFPNEVGA
EPVFPNEVGI

SEQ ID NO: 164679 - protein, 10 aa, Artificial Sequence
  Description of Artificial Sequence: Synthetic peptide
  Seed: EVVFPNEVGA
EPVFPNEVGL

SEQ ID NO: 164680 - protein, 10 aa, Artificial Sequence
  Description of Artificial Sequence: Synthetic peptide
  Seed: EVVFPNEVGA
EPVFPNEVGM

SEQ ID NO: 164681 - protein, 10 aa, Artificial Sequence
  Description of Artificial Sequence: Synthetic peptide
  Seed: EVVFPNEVGA
EPVFPNEVGV

SEQ ID NO: 164682 - protein, 9 aa, Artificial Sequence
  Description of Artificial Sequence: Synthetic peptide
  Seed: ELVRKTRFL
EPVRKTRFL

SEQ ID NO: 164683 - protein, 11 aa, Artificial Sequence
  Description of Artificial Sequence: Synthetic peptide
  Seed: ELVRKTRFLPV
EPVRKTRFLPF

SEQ ID NO: 164684 - protein, 11 aa, Artificial Sequence
  Description of Artificial Sequence: Synthetic peptide
  Seed: ELVRKTRFLPV
EPVRKTRFLPI

SEQ ID NO: 164685 - protein, 11 aa, Artificial Sequence
  Description of Artificial Sequence: Synthetic peptide
  Seed: ELVRKTRFLPV
EPVRKTRFLPL

SEQ ID NO: 164686 - protein, 11 aa, Artificial Sequence
  Description of Artificial Sequence: Synthetic peptide
  Seed: ELVRKTRFLPV
EPVRKTRFLPM

SEQ ID NO: 164687 - protein, 11 aa, Artificial Sequence
  Description of Artificial Sequence: Synthetic peptide
  Seed: ELVRKTRFLPV
EPVRKTRFLPV

SEQ ID NO: 164688 - protein, 10 aa, Artificial Sequence
  Description of Artificial Sequence: Synthetic peptide
  Seed: EVVFPNEVGA
EQVFPNEVGA

SEQ ID NO: 164689 - protein, 10 aa, Artificial Sequence
  Description of Artificial Sequence: Synthetic peptide
  Seed: EVVFPNEVGA
EQVFPNEVGI

SEQ ID NO: 164690 - protein, 10 aa, Artificial Sequence
  Description of Artificial Sequence: Synthetic peptide
  Seed: EVVFPNEVGA
EQVFPNEVGL

SEQ ID NO: 164691 - protein, 10 aa, Artificial Sequence
  Description of Artificial Sequence: Synthetic peptide
  Seed: EVVFPNEVGA
EQVFPNEVGM

SEQ ID NO: 164692 - protein, 10 aa, Artificial Sequence
  Description of Artificial Sequence: Synthetic peptide
  Seed: EVVFPNEVGA
EQVFPNEVGV

SEQ ID NO: 164693 - protein, 11 aa, Artificial Sequence
  Description of Artificial Sequence: Synthetic peptide
  Seed: ELVRKTRFLPV
EQVRKTRFLPL

SEQ ID NO: 164694 - protein, 11 aa, Artificial Sequence
  Description of Artificial Sequence: Synthetic peptide
  Seed: ELVRKTRFLPV
EQVRKTRFLPM

SEQ ID NO: 164695 - protein, 10 aa, Artificial Sequence
  Description of Artificial Sequence: Synthetic peptide
  Seed: EVVFPNEVGA
ERVFPNEVGA

SEQ ID NO: 164696 - protein, 10 aa, Artificial Sequence
  Description of Artificial Sequence: Synthetic peptide
  Seed: EVVFPNEVGA
ERVFPNEVGI

SEQ ID NO: 164697 - protein, 10 aa, Artificial Sequence
  Description of Artificial Sequence: Synthetic peptide
  Seed: EVVFPNEVGA
ERVFPNEVGL

SEQ ID NO: 164698 - protein, 10 aa, Artificial Sequence
  Description of Artificial Sequence: Synthetic peptide
  Seed: EVVFPNEVGA
ERVFPNEVGM

SEQ ID NO: 164699 - protein, 10 aa, Artificial Sequence
  Description of Artificial Sequence: Synthetic peptide
  Seed: EVVFPNEVGA
ERVFPNEVGV

SEQ ID NO: 164700 - protein, 11 aa, Artificial Sequence
  Description of Artificial Sequence: Synthetic peptide
  Seed: ELVRKTRFLPV
ERVRKTRFLPL

SEQ ID NO: 164701 - protein, 11 aa, Artificial Sequence
  Description of Artificial Sequence: Synthetic peptide
  Seed: ELVRKTRFLPV
ERVRKTRFLPM

SEQ ID NO: 164702 - protein, 10 aa, Artificial Sequence
  Description of Artificial Sequence: Synthetic peptide
  Seed: EVVFPNEVGA
ESVFPNEVGA

SEQ ID NO: 164703 - protein, 10 aa, Artificial Sequence
  Description of Artificial Sequence: Synthetic peptide
  Seed: EVVFPNEVGA
ESVFPNEVGI

SEQ ID NO: 164704 - protein, 10 aa, Artificial Sequence
  Description of Artificial Sequence: Synthetic peptide
  Seed: EVVFPNEVGA
ESVFPNEVGL

SEQ ID NO: 164705 - protein, 10 aa, Artificial Sequence
  Description of Artificial Sequence: Synthetic peptide
  Seed: EVVFPNEVGA
ESVFPNEVGM

SEQ ID NO: 164706 - protein, 10 aa, Artificial Sequence
  Description of Artificial Sequence: Synthetic peptide
  Seed: EVVFPNEVGA
ESVFPNEVGT

SEQ ID NO: 164707 - protein, 10 aa, Artificial Sequence
  Description of Artificial Sequence: Synthetic peptide
  Seed: EVVFPNEVGA
ESVFPNEVGV

SEQ ID NO: 164708 - protein, 11 aa, Artificial Sequence
  Description of Artificial Sequence: Synthetic peptide
  Seed: ELVRKTRFLPV
ESVRKTRFLPL

SEQ ID NO: 164709 - protein, 11 aa, Artificial Sequence
  Description of Artificial Sequence: Synthetic peptide
  Seed: ELVRKTRFLPV
ESVRKTRFLPM

SEQ ID NO: 164710 - protein, 10 aa, Artificial Sequence
  Description of Artificial Sequence: Synthetic peptide
  Seed: EVVFPNEVGA
ETVFPNEVGA

SEQ ID NO: 164711 - protein, 10 aa, Artificial Sequence
  Description of Artificial Sequence: Synthetic peptide
  Seed: EVVFPNEVGA
ETVFPNEVGC

SEQ ID NO: 164712 - protein, 10 aa, Artificial Sequence
  Description of Artificial Sequence: Synthetic peptide
  Seed: EVVFPNEVGA
ETVFPNEVGI

SEQ ID NO: 164713 - protein, 10 aa, Artificial Sequence
  Description of Artificial Sequence: Synthetic peptide
  Seed: EVVFPNEVGA
ETVFPNEVGL

SEQ ID NO: 164714 - protein, 10 aa, Artificial Sequence
  Description of Artificial Sequence: Synthetic peptide
  Seed: EVVFPNEVGA
ETVFPNEVGM

SEQ ID NO: 164715 - protein, 10 aa, Artificial Sequence
  Description of Artificial Sequence: Synthetic peptide
  Seed: EVVFPNEVGA
ETVFPNEVGS

SEQ ID NO: 164716 - protein, 10 aa, Artificial Sequence
  Description of Artificial Sequence: Synthetic peptide
  Seed: EVVFPNEVGA
ETVFPNEVGT

SEQ ID NO: 164717 - protein, 10 aa, Artificial Sequence
  Description of Artificial Sequence: Synthetic peptide
  Seed: EVVFPNEVGA
ETVFPNEVGV

SEQ ID NO: 164718 - protein, 11 aa, Artificial Sequence
  Description of Artificial Sequence: Synthetic peptide
  Seed: ELVRKTRFLPV
ETVRKTRFLPL

SEQ ID NO: 164719 - protein, 11 aa, Artificial Sequence
  Description of Artificial Sequence: Synthetic peptide
  Seed: ELVRKTRFLPV
ETVRKTRFLPM

SEQ ID NO: 164720 - protein, 10 aa, Artificial Sequence
  Description of Artificial Sequence: Synthetic peptide
  Seed: EVVFPNEVGA
EVVFPNEVGI

SEQ ID NO: 164721 - protein, 10 aa, Artificial Sequence
  Description of Artificial Sequence: Synthetic peptide
  Seed: EVVFPNEVGA
EVVFPNEVGL

SEQ ID NO: 164722 - protein, 10 aa, Artificial Sequence
  Description of Artificial Sequence: Synthetic peptide
  Seed: EVVFPNEVGA
EVVFPNEVGM

SEQ ID NO: 164723 - protein, 10 aa, Artificial Sequence
  Description of Artificial Sequence: Synthetic peptide
  Seed: EVVFPNEVGA
EVVFPNEVGT

SEQ ID NO: 164724 - protein, 10 aa, Artificial Sequence
  Description of Artificial Sequence: Synthetic peptide
  Seed: EVVFPNEVGA
EVVFPNEVGV

SEQ ID NO: 164725 - protein, 11 aa, Artificial Sequence
  Description of Artificial Sequence: Synthetic peptide
  Seed: ELVRKTRFLPV
EVVRKTRFLPL

SEQ ID NO: 164726 - protein, 11 aa, Artificial Sequence
  Description of Artificial Sequence: Synthetic peptide
  Seed: ELVRKTRFLPV
EVVRKTRFLPM

SEQ ID NO: 164727 - protein, 10 aa, Artificial Sequence
  Description of Artificial Sequence: Synthetic peptide
  Seed: EVVFPNEVGA
EWVFPNEVGA

SEQ ID NO: 164728 - protein, 10 aa, Artificial Sequence
  Description of Artificial Sequence: Synthetic peptide
  Seed: EVVFPNEVGA
EWVFPNEVGI

SEQ ID NO: 164729 - protein, 10 aa, Artificial Sequence
  Description of Artificial Sequence: Synthetic peptide
  Seed: EVVFPNEVGA
EWVFPNEVGL

SEQ ID NO: 164730 - protein, 10 aa, Artificial Sequence
  Description of Artificial Sequence: Synthetic peptide
  Seed: EVVFPNEVGA
EWVFPNEVGM

SEQ ID NO: 164731 - protein, 10 aa, Artificial Sequence
  Description of Artificial Sequence: Synthetic peptide
  Seed: EVVFPNEVGA
EWVFPNEVGV

SEQ ID NO: 164732 - protein, 11 aa, Artificial Sequence
  Description of Artificial Sequence: Synthetic peptide
  Seed: ELVRKTRFLPV
EWVRKTRFLPL

SEQ ID NO: 164733 - protein, 11 aa, Artificial Sequence
  Description of Artificial Sequence: Synthetic peptide
  Seed: ELVRKTRFLPV
EWVRKTRFLPM

SEQ ID NO: 164734 - protein, 10 aa, Artificial Sequence
  Description of Artificial Sequence: Synthetic peptide
  Seed: EVVFPNEVGA
EYVFPNEVGA

SEQ ID NO: 164735 - protein, 10 aa, Artificial Sequence
  Description of Artificial Sequence: Synthetic peptide
  Seed: EVVFPNEVGA
EYVFPNEVGI

SEQ ID NO: 164736 - protein, 10 aa, Artificial Sequence
  Description of Artificial Sequence: Synthetic peptide
  Seed: EVVFPNEVGA
EYVFPNEVGL

SEQ ID NO: 164737 - protein, 10 aa, Artificial Sequence
  Description of Artificial Sequence: Synthetic peptide
  Seed: EVVFPNEVGA
EYVFPNEVGM

SEQ ID NO: 164738 - protein, 10 aa, Artificial Sequence
  Description of Artificial Sequence: Synthetic peptide
  Seed: EVVFPNEVGA
EYVFPNEVGV

SEQ ID NO: 164739 - protein, 11 aa, Artificial Sequence
  Description of Artificial Sequence: Synthetic peptide
  Seed: ELVRKTRFLPV
EYVRKTRFLPI

SEQ ID NO: 164740 - protein, 11 aa, Artificial Sequence
  Description of Artificial Sequence: Synthetic peptide
  Seed: ELVRKTRFLPV
EYVRKTRFLPL

SEQ ID NO: 164741 - protein, 11 aa, Artificial Sequence
  Description of Artificial Sequence: Synthetic peptide
  Seed: ELVRKTRFLPV
EYVRKTRFLPM

SEQ ID NO: 164742 - protein, 8 aa, Artificial Sequence
  Description of Artificial Sequence: Synthetic peptide
  Seed: GEKANVLI
GEKANVLF

SEQ ID NO: 164743 - protein, 8 aa, Artificial Sequence
  Description of Artificial Sequence: Synthetic peptide
  Seed: GEKANVLI
GEKANVLL

SEQ ID NO: 164744 - protein, 8 aa, Artificial Sequence
  Description of Artificial Sequence: Synthetic peptide
  Seed: GEKANVLI
GEKANVLM

SEQ ID NO: 164745 - protein, 10 aa, Artificial Sequence
  Description of Artificial Sequence: Synthetic peptide
  Seed: ILTDSQTATK
IATDSQTATK

SEQ ID NO: 164746 - protein, 10 aa, Artificial Sequence
  Description of Artificial Sequence: Synthetic peptide
  Seed: ILTDSQTATK
ICTDSQTATK

SEQ ID NO: 164747 - protein, 10 aa, Artificial Sequence
  Description of Artificial Sequence: Synthetic peptide
  Seed: ILTDSQTATK
IDTDSQTATK

SEQ ID NO: 164748 - protein, 10 aa, Artificial Sequence
  Description of Artificial Sequence: Synthetic peptide
  Seed: ILTDSQTATK
IETDSQTATK

SEQ ID NO: 164749 - protein, 10 aa, Artificial Sequence
  Description of Artificial Sequence: Synthetic peptide
  Seed: ILTDSQTATK
IFTDSQTATK

SEQ ID NO: 164750 - protein, 10 aa, Artificial Sequence
  Description of Artificial Sequence: Synthetic peptide
  Seed: ILTDSQTATK
IGTDSQTATK

SEQ ID NO: 164751 - protein, 10 aa, Artificial Sequence
  Description of Artificial Sequence: Synthetic peptide
  Seed: ILTDSQTATK
IHTDSQTATK

SEQ ID NO: 164752 - protein, 10 aa, Artificial Sequence
  Description of Artificial Sequence: Synthetic peptide
  Seed: IMEVVFPNEV
IIEVVFPNEV

SEQ ID NO: 164753 - protein, 10 aa, Artificial Sequence
  Description of Artificial Sequence: Synthetic peptide
  Seed: ILTDSQTATK
IITDSQTATK

SEQ ID NO: 164754 - protein, 10 aa, Artificial Sequence
  Description of Artificial Sequence: Synthetic peptide
  Seed: ILTDSQTATK
IITDSQTATR

SEQ ID NO: 164755 - protein, 10 aa, Artificial Sequence
  Description of Artificial Sequence: Synthetic peptide
  Seed: ILTDSQTATK
IKTDSQTATK

SEQ ID NO: 164756 - protein, 10 aa, Artificial Sequence
  Description of Artificial Sequence: Synthetic peptide
  Seed: IMEVVFPNEV
ILEVVFPNEA

SEQ ID NO: 164757 - protein, 10 aa, Artificial Sequence
  Description of Artificial Sequence: Synthetic peptide
  Seed: IMEVVFPNEV
ILEVVFPNEI

SEQ ID NO: 164758 - protein, 10 aa, Artificial Sequence
  Description of Artificial Sequence: Synthetic peptide
  Seed: IMEVVFPNEV
ILEVVFPNEL

SEQ ID NO: 164759 - protein, 10 aa, Artificial Sequence
  Description of Artificial Sequence: Synthetic peptide
  Seed: IMEVVFPNEV
ILEVVFPNEM

SEQ ID NO: 164760 - protein, 10 aa, Artificial Sequence
  Description of Artificial Sequence: Synthetic peptide
  Seed: IMEVVFPNEV
ILEVVFPNEV

SEQ ID NO: 164761 - protein, 10 aa, Artificial Sequence
  Description of Artificial Sequence: Synthetic peptide
  Seed: IMEVVFPNEV
IMEVVFPNEA

SEQ ID NO: 164762 - protein, 10 aa, Artificial Sequence
  Description of Artificial Sequence: Synthetic peptide
  Seed: IMEVVFPNEV
IMEVVFPNEI

SEQ ID NO: 164763 - protein, 10 aa, Artificial Sequence
  Description of Artificial Sequence: Synthetic peptide
  Seed: IMEVVFPNEV
IMEVVFPNEL

SEQ ID NO: 164764 - protein, 10 aa, Artificial Sequence
  Description of Artificial Sequence: Synthetic peptide
  Seed: ILTDSQTATK
IMTDSQTATK

SEQ ID NO: 164765 - protein, 10 aa, Artificial Sequence
  Description of Artificial Sequence: Synthetic peptide
  Seed: ILTDSQTATK
INTDSQTATK

SEQ ID NO: 164766 - protein, 10 aa, Artificial Sequence
  Description of Artificial Sequence: Synthetic peptide
  Seed: ILTDSQTATK
IPTDSQTATK

SEQ ID NO: 164767 - protein, 10 aa, Artificial Sequence
  Description of Artificial Sequence: Synthetic peptide
  Seed: IMEVVFPNEV
IQEVVFPNEV

SEQ ID NO: 164768 - protein, 10 aa, Artificial Sequence
  Description of Artificial Sequence: Synthetic peptide
  Seed: ILTDSQTATK
IQTDSQTATK

SEQ ID NO: 164769 - protein, 10 aa, Artificial Sequence
  Description of Artificial Sequence: Synthetic peptide
  Seed: ILTDSQTATK
IRTDSQTATK

SEQ ID NO: 164770 - protein, 10 aa, Artificial Sequence
  Description of Artificial Sequence: Synthetic peptide
  Seed: ILTDSQTATK
ISTDSQTATK

SEQ ID NO: 164771 - protein, 10 aa, Artificial Sequence
  Description of Artificial Sequence: Synthetic peptide
  Seed: ILTDSQTATK
ITTDSQTATK

SEQ ID NO: 164772 - protein, 10 aa, Artificial Sequence
  Description of Artificial Sequence: Synthetic peptide
  Seed: ILTDSQTATK
ITTDSQTATR

SEQ ID NO: 164773 - protein, 10 aa, Artificial Sequence
  Description of Artificial Sequence: Synthetic peptide
  Seed: IMEVVFPNEV
IVEVVFPNEV

SEQ ID NO: 164774 - protein, 10 aa, Artificial Sequence
  Description of Artificial Sequence: Synthetic peptide
  Seed: ILTDSQTATK
IVTDSQTATK

SEQ ID NO: 164775 - protein, 10 aa, Artificial Sequence
  Description of Artificial Sequence: Synthetic peptide
  Seed: ILTDSQTATK
IVTDSQTATR

SEQ ID NO: 164776 - protein, 10 aa, Artificial Sequence
  Description of Artificial Sequence: Synthetic peptide
  Seed: ILTDSQTATK
IWTDSQTATK

SEQ ID NO: 164777 - protein, 10 aa, Artificial Sequence
  Description of Artificial Sequence: Synthetic peptide
  Seed: ILTDSQTATK
IYTDSQTATK

SEQ ID NO: 164778 - protein, 10 aa, Artificial Sequence
  Description of Artificial Sequence: Synthetic peptide
  Seed: KWMMAMKYPI
KAMMAMKYPA

SEQ ID NO: 164779 - protein, 10 aa, Artificial Sequence
  Description of Artificial Sequence: Synthetic peptide
  Seed: KWMMAMKYPI
KAMMAMKYPF

SEQ ID NO: 164780 - protein, 10 aa, Artificial Sequence
  Description of Artificial Sequence: Synthetic peptide
  Seed: KWMMAMKYPI
KAMMAMKYPG

SEQ ID NO: 164781 - protein, 10 aa, Artificial Sequence
  Description of Artificial Sequence: Synthetic peptide
  Seed: KWMMAMKYPI
KAMMAMKYPH

SEQ ID NO: 164782 - protein, 10 aa, Artificial Sequence
  Description of Artificial Sequence: Synthetic peptide
  Seed: KWMMAMKYPI
KAMMAMKYPI

SEQ ID NO: 164783 - protein, 10 aa, Artificial Sequence
  Description of Artificial Sequence: Synthetic peptide
  Seed: KWMMAMKYPI
KAMMAMKYPK

SEQ ID NO: 164784 - protein, 10 aa, Artificial Sequence
  Description of Artificial Sequence: Synthetic peptide
  Seed: KWMMAMKYPI
KAMMAMKYPL

SEQ ID NO: 164785 - protein, 10 aa, Artificial Sequence
  Description of Artificial Sequence: Synthetic peptide
  Seed: KWMMAMKYPI
KAMMAMKYPM

SEQ ID NO: 164786 - protein, 10 aa, Artificial Sequence
  Description of Artificial Sequence: Synthetic peptide
  Seed: KWMMAMKYPI
KAMMAMKYPR

SEQ ID NO: 164787 - protein, 10 aa, Artificial Sequence
  Description of Artificial Sequence: Synthetic peptide
  Seed: KWMMAMKYPI
KAMMAMKYPS

SEQ ID NO: 164788 - protein, 10 aa, Artificial Sequence
  Description of Artificial Sequence: Synthetic peptide
  Seed: KWMMAMKYPI
KAMMAMKYPT

SEQ ID NO: 164789 - protein, 10 aa, Artificial Sequence
  Description of Artificial Sequence: Synthetic peptide
  Seed: KWMMAMKYPI
KAMMAMKYPV

SEQ ID NO: 164790 - protein, 10 aa, Artificial Sequence
  Description of Artificial Sequence: Synthetic peptide
  Seed: KWMMAMKYPI
KAMMAMKYPW

SEQ ID NO: 164791 - protein, 10 aa, Artificial Sequence
  Description of Artificial Sequence: Synthetic peptide
  Seed: KWMMAMKYPI
KAMMAMKYPY

SEQ ID NO: 164792 - protein, 9 aa, Artificial Sequence
  Description of Artificial Sequence: Synthetic peptide
  Seed: KAVRGDLNF
KAVRGDLNI

SEQ ID NO: 164793 - protein, 9 aa, Artificial Sequence
  Description of Artificial Sequence: Synthetic peptide
  Seed: KAVRGDLNF
KAVRGDLNL

SEQ ID NO: 164794 - protein, 9 aa, Artificial Sequence
  Description of Artificial Sequence: Synthetic peptide
  Seed: KAVRGDLNF
KAVRGDLNM

SEQ ID NO: 164795 - protein, 9 aa, Artificial Sequence
  Description of Artificial Sequence: Synthetic peptide
  Seed: KAVRGDLNF
KAVRGDLNV

SEQ ID NO: 164796 - protein, 9 aa, Artificial Sequence
  Description of Artificial Sequence: Synthetic peptide
  Seed: KAVRGDLNF
KAVRGDLNW

SEQ ID NO: 164797 - protein, 9 aa, Artificial Sequence
  Description of Artificial Sequence: Synthetic peptide
  Seed: KAVRGDLNF
KAVRGDLNY

SEQ ID NO: 164798 - protein, 10 aa, Artificial Sequence
  Description of Artificial Sequence: Synthetic peptide
  Seed: KWMMAMKYPI
KCMMAMKYPA

SEQ ID NO: 164799 - protein, 10 aa, Artificial Sequence
  Description of Artificial Sequence: Synthetic peptide
  Seed: KWMMAMKYPI
KCMMAMKYPF

SEQ ID NO: 164800 - protein, 10 aa, Artificial Sequence
  Description of Artificial Sequence: Synthetic peptide
  Seed: KWMMAMKYPI
KCMMAMKYPH

SEQ ID NO: 164801 - protein, 10 aa, Artificial Sequence
  Description of Artificial Sequence: Synthetic peptide
  Seed: KWMMAMKYPI
KCMMAMKYPI

SEQ ID NO: 164802 - protein, 10 aa, Artificial Sequence
  Description of Artificial Sequence: Synthetic peptide
  Seed: KWMMAMKYPI
KCMMAMKYPK

SEQ ID NO: 164803 - protein, 10 aa, Artificial Sequence
  Description of Artificial Sequence: Synthetic peptide
  Seed: KWMMAMKYPI
KCMMAMKYPL

SEQ ID NO: 164804 - protein, 10 aa, Artificial Sequence
  Description of Artificial Sequence: Synthetic peptide
  Seed: KWMMAMKYPI
KCMMAMKYPM

SEQ ID NO: 164805 - protein, 10 aa, Artificial Sequence
  Description of Artificial Sequence: Synthetic peptide
  Seed: KWMMAMKYPI
KCMMAMKYPR

SEQ ID NO: 164806 - protein, 10 aa, Artificial Sequence
  Description of Artificial Sequence: Synthetic peptide
  Seed: KWMMAMKYPI
KCMMAMKYPT

SEQ ID NO: 164807 - protein, 10 aa, Artificial Sequence
  Description of Artificial Sequence: Synthetic peptide
  Seed: KWMMAMKYPI
KCMMAMKYPV

SEQ ID NO: 164808 - protein, 10 aa, Artificial Sequence
  Description of Artificial Sequence: Synthetic peptide
  Seed: KWMMAMKYPI
KCMMAMKYPW

SEQ ID NO: 164809 - protein, 10 aa, Artificial Sequence
  Description of Artificial Sequence: Synthetic peptide
  Seed: KWMMAMKYPI
KCMMAMKYPY

SEQ ID NO: 164810 - protein, 9 aa, Artificial Sequence
  Description of Artificial Sequence: Synthetic peptide
  Seed: KAVRGDLNF
KCVRGDLNW

SEQ ID NO: 164811 - protein, 10 aa, Artificial Sequence
  Description of Artificial Sequence: Synthetic peptide
  Seed: KWMMAMKYPI
KDMMAMKYPA

SEQ ID NO: 164812 - protein, 10 aa, Artificial Sequence
  Description of Artificial Sequence: Synthetic peptide
  Seed: KWMMAMKYPI
KDMMAMKYPF

SEQ ID NO: 164813 - protein, 10 aa, Artificial Sequence
  Description of Artificial Sequence: Synthetic peptide
  Seed: KWMMAMKYPI
KDMMAMKYPH

SEQ ID NO: 164814 - protein, 10 aa, Artificial Sequence
  Description of Artificial Sequence: Synthetic peptide
  Seed: KWMMAMKYPI
KDMMAMKYPI

SEQ ID NO: 164815 - protein, 10 aa, Artificial Sequence
  Description of Artificial Sequence: Synthetic peptide
  Seed: KWMMAMKYPI
KDMMAMKYPK

SEQ ID NO: 164816 - protein, 10 aa, Artificial Sequence
  Description of Artificial Sequence: Synthetic peptide
  Seed: KWMMAMKYPI
KDMMAMKYPL

SEQ ID NO: 164817 - protein, 10 aa, Artificial Sequence
  Description of Artificial Sequence: Synthetic peptide
  Seed: KWMMAMKYPI
KDMMAMKYPM

SEQ ID NO: 164818 - protein, 10 aa, Artificial Sequence
  Description of Artificial Sequence: Synthetic peptide
  Seed: KWMMAMKYPI
KDMMAMKYPR

SEQ ID NO: 164819 - protein, 10 aa, Artificial Sequence
  Description of Artificial Sequence: Synthetic peptide
  Seed: KWMMAMKYPI
KDMMAMKYPT

SEQ ID NO: 164820 - protein, 10 aa, Artificial Sequence
  Description of Artificial Sequence: Synthetic peptide
  Seed: KWMMAMKYPI
KDMMAMKYPV

SEQ ID NO: 164821 - protein, 10 aa, Artificial Sequence
  Description of Artificial Sequence: Synthetic peptide
  Seed: KWMMAMKYPI
KDMMAMKYPW

SEQ ID NO: 164822 - protein, 10 aa, Artificial Sequence
  Description of Artificial Sequence: Synthetic peptide
  Seed: KWMMAMKYPI
KDMMAMKYPY

SEQ ID NO: 164823 - protein, 10 aa, Artificial Sequence
  Description of Artificial Sequence: Synthetic peptide
  Seed: KWMMAMKYPI
KEMMAMKYPA

SEQ ID NO: 164824 - protein, 10 aa, Artificial Sequence
  Description of Artificial Sequence: Synthetic peptide
  Seed: KWMMAMKYPI
KEMMAMKYPF

SEQ ID NO: 164825 - protein, 10 aa, Artificial Sequence
  Description of Artificial Sequence: Synthetic peptide
  Seed: KWMMAMKYPI
KEMMAMKYPH

SEQ ID NO: 164826 - protein, 10 aa, Artificial Sequence
  Description of Artificial Sequence: Synthetic peptide
  Seed: KWMMAMKYPI
KEMMAMKYPI

SEQ ID NO: 164827 - protein, 10 aa, Artificial Sequence
  Description of Artificial Sequence: Synthetic peptide
  Seed: KWMMAMKYPI
KEMMAMKYPK

SEQ ID NO: 164828 - protein, 10 aa, Artificial Sequence
  Description of Artificial Sequence: Synthetic peptide
  Seed: KWMMAMKYPI
KEMMAMKYPL

SEQ ID NO: 164829 - protein, 10 aa, Artificial Sequence
  Description of Artificial Sequence: Synthetic peptide
  Seed: KWMMAMKYPI
KEMMAMKYPM

SEQ ID NO: 164830 - protein, 10 aa, Artificial Sequence
  Description of Artificial Sequence: Synthetic peptide
  Seed: KWMMAMKYPI
KEMMAMKYPR

SEQ ID NO: 164831 - protein, 10 aa, Artificial Sequence
  Description of Artificial Sequence: Synthetic peptide
  Seed: KWMMAMKYPI
KEMMAMKYPT

SEQ ID NO: 164832 - protein, 10 aa, Artificial Sequence
  Description of Artificial Sequence: Synthetic peptide
  Seed: KWMMAMKYPI
KEMMAMKYPV

SEQ ID NO: 164833 - protein, 10 aa, Artificial Sequence
  Description of Artificial Sequence: Synthetic peptide
  Seed: KWMMAMKYPI
KEMMAMKYPW

SEQ ID NO: 164834 - protein, 10 aa, Artificial Sequence
  Description of Artificial Sequence: Synthetic peptide
  Seed: KWMMAMKYPI
KEMMAMKYPY

SEQ ID NO: 164835 - protein, 9 aa, Artificial Sequence
  Description of Artificial Sequence: Synthetic peptide
  Seed: KAVRGDLNF
KEVRGDLNF

SEQ ID NO: 164836 - protein, 9 aa, Artificial Sequence
  Description of Artificial Sequence: Synthetic peptide
  Seed: KAVRGDLNF
KEVRGDLNM

SEQ ID NO: 164837 - protein, 9 aa, Artificial Sequence
  Description of Artificial Sequence: Synthetic peptide
  Seed: KAVRGDLNF
KEVRGDLNY

SEQ ID NO: 164838 - protein, 10 aa, Artificial Sequence
  Description of Artificial Sequence: Synthetic peptide
  Seed: KWMMAMKYPI
KFMMAMKYPA

SEQ ID NO: 164839 - protein, 10 aa, Artificial Sequence
  Description of Artificial Sequence: Synthetic peptide
  Seed: KWMMAMKYPI
KFMMAMKYPF

SEQ ID NO: 164840 - protein, 10 aa, Artificial Sequence
  Description of Artificial Sequence: Synthetic peptide
  Seed: KWMMAMKYPI
KFMMAMKYPG

SEQ ID NO: 164841 - protein, 10 aa, Artificial Sequence
  Description of Artificial Sequence: Synthetic peptide
  Seed: KWMMAMKYPI
KFMMAMKYPH

SEQ ID NO: 164842 - protein, 10 aa, Artificial Sequence
  Description of Artificial Sequence: Synthetic peptide
  Seed: KWMMAMKYPI
KFMMAMKYPI

SEQ ID NO: 164843 - protein, 10 aa, Artificial Sequence
  Description of Artificial Sequence: Synthetic peptide
  Seed: KWMMAMKYPI
KFMMAMKYPK

SEQ ID NO: 164844 - protein, 10 aa, Artificial Sequence
  Description of Artificial Sequence: Synthetic peptide
  Seed: KWMMAMKYPI
KFMMAMKYPL

SEQ ID NO: 164845 - protein, 10 aa, Artificial Sequence
  Description of Artificial Sequence: Synthetic peptide
  Seed: KWMMAMKYPI
KFMMAMKYPM

SEQ ID NO: 164846 - protein, 10 aa, Artificial Sequence
  Description of Artificial Sequence: Synthetic peptide
  Seed: KWMMAMKYPI
KFMMAMKYPQ

SEQ ID NO: 164847 - protein, 10 aa, Artificial Sequence
  Description of Artificial Sequence: Synthetic peptide
  Seed: KWMMAMKYPI
KFMMAMKYPR

SEQ ID NO: 164848 - protein, 10 aa, Artificial Sequence
  Description of Artificial Sequence: Synthetic peptide
  Seed: KWMMAMKYPI
KFMMAMKYPS

SEQ ID NO: 164849 - protein, 10 aa, Artificial Sequence
  Description of Artificial Sequence: Synthetic peptide
  Seed: KWMMAMKYPI
KFMMAMKYPT

SEQ ID NO: 164850 - protein, 10 aa, Artificial Sequence
  Description of Artificial Sequence: Synthetic peptide
  Seed: KWMMAMKYPI
KFMMAMKYPV

SEQ ID NO: 164851 - protein, 10 aa, Artificial Sequence
  Description of Artificial Sequence: Synthetic peptide
  Seed: KWMMAMKYPI
KFMMAMKYPW

SEQ ID NO: 164852 - protein, 10 aa, Artificial Sequence
  Description of Artificial Sequence: Synthetic peptide
  Seed: KWMMAMKYPI
KFMMAMKYPY

SEQ ID NO: 164853 - protein, 9 aa, Artificial Sequence
  Description of Artificial Sequence: Synthetic peptide
  Seed: KAVRGDLNF
KFVRGDLNF

SEQ ID NO: 164854 - protein, 9 aa, Artificial Sequence
  Description of Artificial Sequence: Synthetic peptide
  Seed: KAVRGDLNF
KFVRGDLNW

SEQ ID NO: 164855 - protein, 9 aa, Artificial Sequence
  Description of Artificial Sequence: Synthetic peptide
  Seed: KAVRGDLNF
KFVRGDLNY

SEQ ID NO: 164856 - protein, 10 aa, Artificial Sequence
  Description of Artificial Sequence: Synthetic peptide
  Seed: KWMMAMKYPI
KGMMAMKYPA

SEQ ID NO: 164857 - protein, 10 aa, Artificial Sequence
  Description of Artificial Sequence: Synthetic peptide
  Seed: KWMMAMKYPI
KGMMAMKYPF

SEQ ID NO: 164858 - protein, 10 aa, Artificial Sequence
  Description of Artificial Sequence: Synthetic peptide
  Seed: KWMMAMKYPI
KGMMAMKYPH

SEQ ID NO: 164859 - protein, 10 aa, Artificial Sequence
  Description of Artificial Sequence: Synthetic peptide
  Seed: KWMMAMKYPI
KGMMAMKYPI

SEQ ID NO: 164860 - protein, 10 aa, Artificial Sequence
  Description of Artificial Sequence: Synthetic peptide
  Seed: KWMMAMKYPI
KGMMAMKYPK

SEQ ID NO: 164861 - protein, 10 aa, Artificial Sequence
  Description of Artificial Sequence: Synthetic peptide
  Seed: KWMMAMKYPI
KGMMAMKYPL

SEQ ID NO: 164862 - protein, 10 aa, Artificial Sequence
  Description of Artificial Sequence: Synthetic peptide
  Seed: KWMMAMKYPI
KGMMAMKYPM

SEQ ID NO: 164863 - protein, 10 aa, Artificial Sequence
  Description of Artificial Sequence: Synthetic peptide
  Seed: KWMMAMKYPI
KGMMAMKYPR

SEQ ID NO: 164864 - protein, 10 aa, Artificial Sequence
  Description of Artificial Sequence: Synthetic peptide
  Seed: KWMMAMKYPI
KGMMAMKYPT

SEQ ID NO: 164865 - protein, 10 aa, Artificial Sequence
  Description of Artificial Sequence: Synthetic peptide
  Seed: KWMMAMKYPI
KGMMAMKYPV

SEQ ID NO: 164866 - protein, 10 aa, Artificial Sequence
  Description of Artificial Sequence: Synthetic peptide
  Seed: KWMMAMKYPI
KGMMAMKYPW

SEQ ID NO: 164867 - protein, 10 aa, Artificial Sequence
  Description of Artificial Sequence: Synthetic peptide
  Seed: KWMMAMKYPI
KGMMAMKYPY

SEQ ID NO: 164868 - protein, 9 aa, Artificial Sequence
  Description of Artificial Sequence: Synthetic peptide
  Seed: KAVRGDLNF
KGVRGDLNF

SEQ ID NO: 164869 - protein, 9 aa, Artificial Sequence
  Description of Artificial Sequence: Synthetic peptide
  Seed: KAVRGDLNF
KGVRGDLNW

SEQ ID NO: 164870 - protein, 9 aa, Artificial Sequence
  Description of Artificial Sequence: Synthetic peptide
  Seed: KAVRGDLNF
KGVRGDLNY

SEQ ID NO: 164871 - protein, 10 aa, Artificial Sequence
  Description of Artificial Sequence: Synthetic peptide
  Seed: KWMMAMKYPI
KHMMAMKYPA

SEQ ID NO: 164872 - protein, 10 aa, Artificial Sequence
  Description of Artificial Sequence: Synthetic peptide
  Seed: KWMMAMKYPI
KHMMAMKYPF

SEQ ID NO: 164873 - protein, 10 aa, Artificial Sequence
  Description of Artificial Sequence: Synthetic peptide
  Seed: KWMMAMKYPI
KHMMAMKYPH

SEQ ID NO: 164874 - protein, 10 aa, Artificial Sequence
  Description of Artificial Sequence: Synthetic peptide
  Seed: KWMMAMKYPI
KHMMAMKYPI

SEQ ID NO: 164875 - protein, 10 aa, Artificial Sequence
  Description of Artificial Sequence: Synthetic peptide
  Seed: KWMMAMKYPI
KHMMAMKYPK

SEQ ID NO: 164876 - protein, 10 aa, Artificial Sequence
  Description of Artificial Sequence: Synthetic peptide
  Seed: KWMMAMKYPI
KHMMAMKYPL

SEQ ID NO: 164877 - protein, 10 aa, Artificial Sequence
  Description of Artificial Sequence: Synthetic peptide
  Seed: KWMMAMKYPI
KHMMAMKYPM

SEQ ID NO: 164878 - protein, 10 aa, Artificial Sequence
  Description of Artificial Sequence: Synthetic peptide
  Seed: KWMMAMKYPI
KHMMAMKYPR

SEQ ID NO: 164879 - protein, 10 aa, Artificial Sequence
  Description of Artificial Sequence: Synthetic peptide
  Seed: KWMMAMKYPI
KHMMAMKYPT

SEQ ID NO: 164880 - protein, 10 aa, Artificial Sequence
  Description of Artificial Sequence: Synthetic peptide
  Seed: KWMMAMKYPI
KHMMAMKYPV

SEQ ID NO: 164881 - protein, 10 aa, Artificial Sequence
  Description of Artificial Sequence: Synthetic peptide
  Seed: KWMMAMKYPI
KHMMAMKYPW

SEQ ID NO: 164882 - protein, 10 aa, Artificial Sequence
  Description of Artificial Sequence: Synthetic peptide
  Seed: KWMMAMKYPI
KHMMAMKYPY

SEQ ID NO: 164883 - protein, 9 aa, Artificial Sequence
  Description of Artificial Sequence: Synthetic peptide
  Seed: KAVRGDLNF
KHVRGDLNF

SEQ ID NO: 164884 - protein, 9 aa, Artificial Sequence
  Description of Artificial Sequence: Synthetic peptide
  Seed: KAVRGDLNF
KHVRGDLNM

SEQ ID NO: 164885 - protein, 9 aa, Artificial Sequence
  Description of Artificial Sequence: Synthetic peptide
  Seed: KAVRGDLNF
KHVRGDLNY

SEQ ID NO: 164886 - protein, 10 aa, Artificial Sequence
  Description of Artificial Sequence: Synthetic peptide
  Seed: KWMMAMKYPI
KIMMAMKYPA

SEQ ID NO: 164887 - protein, 10 aa, Artificial Sequence
  Description of Artificial Sequence: Synthetic peptide
  Seed: KWMMAMKYPI
KIMMAMKYPC

SEQ ID NO: 164888 - protein, 10 aa, Artificial Sequence
  Description of Artificial Sequence: Synthetic peptide
  Seed: KWMMAMKYPI
KIMMAMKYPF

SEQ ID NO: 164889 - protein, 10 aa, Artificial Sequence
  Description of Artificial Sequence: Synthetic peptide
  Seed: KWMMAMKYPI
KIMMAMKYPG

SEQ ID NO: 164890 - protein, 10 aa, Artificial Sequence
  Description of Artificial Sequence: Synthetic peptide
  Seed: KWMMAMKYPI
KIMMAMKYPH

SEQ ID NO: 164891 - protein, 10 aa, Artificial Sequence
  Description of Artificial Sequence: Synthetic peptide
  Seed: KWMMAMKYPI
KIMMAMKYPI

SEQ ID NO: 164892 - protein, 10 aa, Artificial Sequence
  Description of Artificial Sequence: Synthetic peptide
  Seed: KWMMAMKYPI
KIMMAMKYPK

SEQ ID NO: 164893 - protein, 10 aa, Artificial Sequence
  Description of Artificial Sequence: Synthetic peptide
  Seed: KWMMAMKYPI
KIMMAMKYPL

SEQ ID NO: 164894 - protein, 10 aa, Artificial Sequence
  Description of Artificial Sequence: Synthetic peptide
  Seed: KWMMAMKYPI
KIMMAMKYPM

SEQ ID NO: 164895 - protein, 10 aa, Artificial Sequence
  Description of Artificial Sequence: Synthetic peptide
  Seed: KWMMAMKYPI
KIMMAMKYPR

SEQ ID NO: 164896 - protein, 10 aa, Artificial Sequence
  Description of Artificial Sequence: Synthetic peptide
  Seed: KWMMAMKYPI
KIMMAMKYPS

SEQ ID NO: 164897 - protein, 10 aa, Artificial Sequence
  Description of Artificial Sequence: Synthetic peptide
  Seed: KWMMAMKYPI
KIMMAMKYPT

SEQ ID NO: 164898 - protein, 10 aa, Artificial Sequence
  Description of Artificial Sequence: Synthetic peptide
  Seed: KWMMAMKYPI
KIMMAMKYPV

SEQ ID NO: 164899 - protein, 10 aa, Artificial Sequence
  Description of Artificial Sequence: Synthetic peptide
  Seed: KWMMAMKYPI
KIMMAMKYPW

SEQ ID NO: 164900 - protein, 10 aa, Artificial Sequence
  Description of Artificial Sequence: Synthetic peptide
  Seed: KWMMAMKYPI
KIMMAMKYPY

SEQ ID NO: 164901 - protein, 9 aa, Artificial Sequence
  Description of Artificial Sequence: Synthetic peptide
  Seed: KAVRGDLNF
KIVRGDLNF

SEQ ID NO: 164902 - protein, 9 aa, Artificial Sequence
  Description of Artificial Sequence: Synthetic peptide
  Seed: KAVRGDLNF
KIVRGDLNM

SEQ ID NO: 164903 - protein, 9 aa, Artificial Sequence
  Description of Artificial Sequence: Synthetic peptide
  Seed: KAVRGDLNF
KIVRGDLNW

SEQ ID NO: 164904 - protein, 9 aa, Artificial Sequence
  Description of Artificial Sequence: Synthetic peptide
  Seed: KAVRGDLNF
KIVRGDLNY

SEQ ID NO: 164905 - protein, 10 aa, Artificial Sequence
  Description of Artificial Sequence: Synthetic peptide
  Seed: KWMMAMKYPI
KKMMAMKYPA

SEQ ID NO: 164906 - protein, 10 aa, Artificial Sequence
  Description of Artificial Sequence: Synthetic peptide
  Seed: KWMMAMKYPI
KKMMAMKYPF

SEQ ID NO: 164907 - protein, 10 aa, Artificial Sequence
  Description of Artificial Sequence: Synthetic peptide
  Seed: KWMMAMKYPI
KKMMAMKYPH

SEQ ID NO: 164908 - protein, 10 aa, Artificial Sequence
  Description of Artificial Sequence: Synthetic peptide
  Seed: KWMMAMKYPI
KKMMAMKYPI

SEQ ID NO: 164909 - protein, 10 aa, Artificial Sequence
  Description of Artificial Sequence: Synthetic peptide
  Seed: KWMMAMKYPI
KKMMAMKYPK

SEQ ID NO: 164910 - protein, 10 aa, Artificial Sequence
  Description of Artificial Sequence: Synthetic peptide
  Seed: KWMMAMKYPI
KKMMAMKYPL

SEQ ID NO: 164911 - protein, 10 aa, Artificial Sequence
  Description of Artificial Sequence: Synthetic peptide
  Seed: KWMMAMKYPI
KKMMAMKYPM

SEQ ID NO: 164912 - protein, 10 aa, Artificial Sequence
  Description of Artificial Sequence: Synthetic peptide
  Seed: KWMMAMKYPI
KKMMAMKYPR

SEQ ID NO: 164913 - protein, 10 aa, Artificial Sequence
  Description of Artificial Sequence: Synthetic peptide
  Seed: KWMMAMKYPI
KKMMAMKYPT

SEQ ID NO: 164914 - protein, 10 aa, Artificial Sequence
  Description of Artificial Sequence: Synthetic peptide
  Seed: KWMMAMKYPI
KKMMAMKYPV

SEQ ID NO: 164915 - protein, 10 aa, Artificial Sequence
  Description of Artificial Sequence: Synthetic peptide
  Seed: KWMMAMKYPI
KKMMAMKYPW

SEQ ID NO: 164916 - protein, 10 aa, Artificial Sequence
  Description of Artificial Sequence: Synthetic peptide
  Seed: KWMMAMKYPI
KKMMAMKYPY

SEQ ID NO: 164917 - protein, 9 aa, Artificial Sequence
  Description of Artificial Sequence: Synthetic peptide
  Seed: KAVRGDLNF
KKVRGDLNF

SEQ ID NO: 164918 - protein, 9 aa, Artificial Sequence
  Description of Artificial Sequence: Synthetic peptide
  Seed: KAVRGDLNF
KKVRGDLNL

SEQ ID NO: 164919 - protein, 9 aa, Artificial Sequence
  Description of Artificial Sequence: Synthetic peptide
  Seed: KAVRGDLNF
KKVRGDLNM

SEQ ID NO: 164920 - protein, 9 aa, Artificial Sequence
  Description of Artificial Sequence: Synthetic peptide
  Seed: KAVRGDLNF
KKVRGDLNY

SEQ ID NO: 164921 - protein, 10 aa, Artificial Sequence
  Description of Artificial Sequence: Synthetic peptide
  Seed: KWMMAMKYPI
KLMMAMKYPA

SEQ ID NO: 164922 - protein, 10 aa, Artificial Sequence
  Description of Artificial Sequence: Synthetic peptide
  Seed: KWMMAMKYPI
KLMMAMKYPC

SEQ ID NO: 164923 - protein, 10 aa, Artificial Sequence
  Description of Artificial Sequence: Synthetic peptide
  Seed: KWMMAMKYPI
KLMMAMKYPF

SEQ ID NO: 164924 - protein, 10 aa, Artificial Sequence
  Description of Artificial Sequence: Synthetic peptide
  Seed: KWMMAMKYPI
KLMMAMKYPH

SEQ ID NO: 164925 - protein, 10 aa, Artificial Sequence
  Description of Artificial Sequence: Synthetic peptide
  Seed: KWMMAMKYPI
KLMMAMKYPI

SEQ ID NO: 164926 - protein, 10 aa, Artificial Sequence
  Description of Artificial Sequence: Synthetic peptide
  Seed: KWMMAMKYPI
KLMMAMKYPK

SEQ ID NO: 164927 - protein, 10 aa, Artificial Sequence
  Description of Artificial Sequence: Synthetic peptide
  Seed: KWMMAMKYPI
KLMMAMKYPL

SEQ ID NO: 164928 - protein, 10 aa, Artificial Sequence
  Description of Artificial Sequence: Synthetic peptide
  Seed: KWMMAMKYPI
KLMMAMKYPM

SEQ ID NO: 164929 - protein, 10 aa, Artificial Sequence
  Description of Artificial Sequence: Synthetic peptide
  Seed: KWMMAMKYPI
KLMMAMKYPR

SEQ ID NO: 164930 - protein, 10 aa, Artificial Sequence
  Description of Artificial Sequence: Synthetic peptide
  Seed: KWMMAMKYPI
KLMMAMKYPS

SEQ ID NO: 164931 - protein, 10 aa, Artificial Sequence
  Description of Artificial Sequence: Synthetic peptide
  Seed: KWMMAMKYPI
KLMMAMKYPT

SEQ ID NO: 164932 - protein, 10 aa, Artificial Sequence
  Description of Artificial Sequence: Synthetic peptide
  Seed: KWMMAMKYPI
KLMMAMKYPV

SEQ ID NO: 164933 - protein, 10 aa, Artificial Sequence
  Description of Artificial Sequence: Synthetic peptide
  Seed: KWMMAMKYPI
KLMMAMKYPW

SEQ ID NO: 164934 - protein, 10 aa, Artificial Sequence
  Description of Artificial Sequence: Synthetic peptide
  Seed: KWMMAMKYPI
KLMMAMKYPY

SEQ ID NO: 164935 - protein, 9 aa, Artificial Sequence
  Description of Artificial Sequence: Synthetic peptide
  Seed: KAVRGDLNF
KLVRGDLNF

SEQ ID NO: 164936 - protein, 9 aa, Artificial Sequence
  Description of Artificial Sequence: Synthetic peptide
  Seed: KAVRGDLNF
KLVRGDLNM

SEQ ID NO: 164937 - protein, 9 aa, Artificial Sequence
  Description of Artificial Sequence: Synthetic peptide
  Seed: KAVRGDLNF
KLVRGDLNW

SEQ ID NO: 164938 - protein, 9 aa, Artificial Sequence
  Description of Artificial Sequence: Synthetic peptide
  Seed: KAVRGDLNF
KLVRGDLNY

SEQ ID NO: 164939 - protein, 10 aa, Artificial Sequence
  Description of Artificial Sequence: Synthetic peptide
  Seed: KWMMAMKYPI
KMMMAMKYPA

SEQ ID NO: 164940 - protein, 10 aa, Artificial Sequence
  Description of Artificial Sequence: Synthetic peptide
  Seed: KWMMAMKYPI
KMMMAMKYPC

SEQ ID NO: 164941 - protein, 10 aa, Artificial Sequence
  Description of Artificial Sequence: Synthetic peptide
  Seed: KWMMAMKYPI
KMMMAMKYPF

SEQ ID NO: 164942 - protein, 10 aa, Artificial Sequence
  Description of Artificial Sequence: Synthetic peptide
  Seed: KWMMAMKYPI
KMMMAMKYPG

SEQ ID NO: 164943 - protein, 10 aa, Artificial Sequence
  Description of Artificial Sequence: Synthetic peptide
  Seed: KWMMAMKYPI
KMMMAMKYPH

SEQ ID NO: 164944 - protein, 10 aa, Artificial Sequence
  Description of Artificial Sequence: Synthetic peptide
  Seed: KWMMAMKYPI
KMMMAMKYPI

SEQ ID NO: 164945 - protein, 10 aa, Artificial Sequence
  Description of Artificial Sequence: Synthetic peptide
  Seed: KWMMAMKYPI
KMMMAMKYPK

SEQ ID NO: 164946 - protein, 10 aa, Artificial Sequence
  Description of Artificial Sequence: Synthetic peptide
  Seed: KWMMAMKYPI
KMMMAMKYPL

SEQ ID NO: 164947 - protein, 10 aa, Artificial Sequence
  Description of Artificial Sequence: Synthetic peptide
  Seed: KWMMAMKYPI
KMMMAMKYPM

SEQ ID NO: 164948 - protein, 10 aa, Artificial Sequence
  Description of Artificial Sequence: Synthetic peptide
  Seed: KWMMAMKYPI
KMMMAMKYPP

SEQ ID NO: 164949 - protein, 10 aa, Artificial Sequence
  Description of Artificial Sequence: Synthetic peptide
  Seed: KWMMAMKYPI
KMMMAMKYPQ

SEQ ID NO: 164950 - protein, 10 aa, Artificial Sequence
  Description of Artificial Sequence: Synthetic peptide
  Seed: KWMMAMKYPI
KMMMAMKYPR

SEQ ID NO: 164951 - protein, 10 aa, Artificial Sequence
  Description of Artificial Sequence: Synthetic peptide
  Seed: KWMMAMKYPI
KMMMAMKYPS

SEQ ID NO: 164952 - protein, 10 aa, Artificial Sequence
  Description of Artificial Sequence: Synthetic peptide
  Seed: KWMMAMKYPI
KMMMAMKYPT

SEQ ID NO: 164953 - protein, 10 aa, Artificial Sequence
  Description of Artificial Sequence: Synthetic peptide
  Seed: KWMMAMKYPI
KMMMAMKYPV

SEQ ID NO: 164954 - protein, 10 aa, Artificial Sequence
  Description of Artificial Sequence: Synthetic peptide
  Seed: KWMMAMKYPI
KMMMAMKYPW

SEQ ID NO: 164955 - protein, 10 aa, Artificial Sequence
  Description of Artificial Sequence: Synthetic peptide
  Seed: KWMMAMKYPI
KMMMAMKYPY

SEQ ID NO: 164956 - protein, 9 aa, Artificial Sequence
  Description of Artificial Sequence: Synthetic peptide
  Seed: KAVRGDLNF
KMVRGDLNF

SEQ ID NO: 164957 - protein, 9 aa, Artificial Sequence
  Description of Artificial Sequence: Synthetic peptide
  Seed: KAVRGDLNF
KMVRGDLNH

SEQ ID NO: 164958 - protein, 9 aa, Artificial Sequence
  Description of Artificial Sequence: Synthetic peptide
  Seed: KAVRGDLNF
KMVRGDLNI

SEQ ID NO: 164959 - protein, 9 aa, Artificial Sequence
  Description of Artificial Sequence: Synthetic peptide
  Seed: KAVRGDLNF
KMVRGDLNL

SEQ ID NO: 164960 - protein, 9 aa, Artificial Sequence
  Description of Artificial Sequence: Synthetic peptide
  Seed: KAVRGDLNF
KMVRGDLNM

SEQ ID NO: 164961 - protein, 9 aa, Artificial Sequence
  Description of Artificial Sequence: Synthetic peptide
  Seed: KAVRGDLNF
KMVRGDLNW

SEQ ID NO: 164962 - protein, 9 aa, Artificial Sequence
  Description of Artificial Sequence: Synthetic peptide
  Seed: KAVRGDLNF
KMVRGDLNY

SEQ ID NO: 164963 - protein, 10 aa, Artificial Sequence
  Description of Artificial Sequence: Synthetic peptide
  Seed: KWMMAMKYPI
KNMMAMKYPA

SEQ ID NO: 164964 - protein, 10 aa, Artificial Sequence
  Description of Artificial Sequence: Synthetic peptide
  Seed: KWMMAMKYPI
KNMMAMKYPF

SEQ ID NO: 164965 - protein, 10 aa, Artificial Sequence
  Description of Artificial Sequence: Synthetic peptide
  Seed: KWMMAMKYPI
KNMMAMKYPH

SEQ ID NO: 164966 - protein, 10 aa, Artificial Sequence
  Description of Artificial Sequence: Synthetic peptide
  Seed: KWMMAMKYPI
KNMMAMKYPI

SEQ ID NO: 164967 - protein, 10 aa, Artificial Sequence
  Description of Artificial Sequence: Synthetic peptide
  Seed: KWMMAMKYPI
KNMMAMKYPK

SEQ ID NO: 164968 - protein, 10 aa, Artificial Sequence
  Description of Artificial Sequence: Synthetic peptide
  Seed: KWMMAMKYPI
KNMMAMKYPL

SEQ ID NO: 164969 - protein, 10 aa, Artificial Sequence
  Description of Artificial Sequence: Synthetic peptide
  Seed: KWMMAMKYPI
KNMMAMKYPM

SEQ ID NO: 164970 - protein, 10 aa, Artificial Sequence
  Description of Artificial Sequence: Synthetic peptide
  Seed: KWMMAMKYPI
KNMMAMKYPR

SEQ ID NO: 164971 - protein, 10 aa, Artificial Sequence
  Description of Artificial Sequence: Synthetic peptide
  Seed: KWMMAMKYPI
KNMMAMKYPT

SEQ ID NO: 164972 - protein, 10 aa, Artificial Sequence
  Description of Artificial Sequence: Synthetic peptide
  Seed: KWMMAMKYPI
KNMMAMKYPV

SEQ ID NO: 164973 - protein, 10 aa, Artificial Sequence
  Description of Artificial Sequence: Synthetic peptide
  Seed: KWMMAMKYPI
KNMMAMKYPW

SEQ ID NO: 164974 - protein, 10 aa, Artificial Sequence
  Description of Artificial Sequence: Synthetic peptide
  Seed: KWMMAMKYPI
KNMMAMKYPY

SEQ ID NO: 164975 - protein, 9 aa, Artificial Sequence
  Description of Artificial Sequence: Synthetic peptide
  Seed: KAVRGDLNF
KNVRGDLNF

SEQ ID NO: 164976 - protein, 9 aa, Artificial Sequence
  Description of Artificial Sequence: Synthetic peptide
  Seed: KAVRGDLNF
KNVRGDLNW

SEQ ID NO: 164977 - protein, 9 aa, Artificial Sequence
  Description of Artificial Sequence: Synthetic peptide
  Seed: KAVRGDLNF
KNVRGDLNY

SEQ ID NO: 164978 - protein, 10 aa, Artificial Sequence
  Description of Artificial Sequence: Synthetic peptide
  Seed: KWMMAMKYPI
KPMMAMKYPA

SEQ ID NO: 164979 - protein, 10 aa, Artificial Sequence
  Description of Artificial Sequence: Synthetic peptide
  Seed: KWMMAMKYPI
KPMMAMKYPF

SEQ ID NO: 164980 - protein, 10 aa, Artificial Sequence
  Description of Artificial Sequence: Synthetic peptide
  Seed: KWMMAMKYPI
KPMMAMKYPH

SEQ ID NO: 164981 - protein, 10 aa, Artificial Sequence
  Description of Artificial Sequence: Synthetic peptide
  Seed: KWMMAMKYPI
KPMMAMKYPI

SEQ ID NO: 164982 - protein, 10 aa, Artificial Sequence
  Description of Artificial Sequence: Synthetic peptide
  Seed: KWMMAMKYPI
KPMMAMKYPK

SEQ ID NO: 164983 - protein, 10 aa, Artificial Sequence
  Description of Artificial Sequence: Synthetic peptide
  Seed: KWMMAMKYPI
KPMMAMKYPL

SEQ ID NO: 164984 - protein, 10 aa, Artificial Sequence
  Description of Artificial Sequence: Synthetic peptide
  Seed: KWMMAMKYPI
KPMMAMKYPM

SEQ ID NO: 164985 - protein, 10 aa, Artificial Sequence
  Description of Artificial Sequence: Synthetic peptide
  Seed: KWMMAMKYPI
KPMMAMKYPR

SEQ ID NO: 164986 - protein, 10 aa, Artificial Sequence
  Description of Artificial Sequence: Synthetic peptide
  Seed: KWMMAMKYPI
KPMMAMKYPT

SEQ ID NO: 164987 - protein, 10 aa, Artificial Sequence
  Description of Artificial Sequence: Synthetic peptide
  Seed: KWMMAMKYPI
KPMMAMKYPV

SEQ ID NO: 164988 - protein, 10 aa, Artificial Sequence
  Description of Artificial Sequence: Synthetic peptide
  Seed: KWMMAMKYPI
KPMMAMKYPW

SEQ ID NO: 164989 - protein, 10 aa, Artificial Sequence
  Description of Artificial Sequence: Synthetic peptide
  Seed: KWMMAMKYPI
KPMMAMKYPY

SEQ ID NO: 164990 - protein, 9 aa, Artificial Sequence
  Description of Artificial Sequence: Synthetic peptide
  Seed: KAVRGDLNF
KPVRGDLNW

SEQ ID NO: 164991 - protein, 10 aa, Artificial Sequence
  Description of Artificial Sequence: Synthetic peptide
  Seed: KWMMAMKYPI
KQMMAMKYPA

SEQ ID NO: 164992 - protein, 10 aa, Artificial Sequence
  Description of Artificial Sequence: Synthetic peptide
  Seed: KWMMAMKYPI
KQMMAMKYPC

SEQ ID NO: 164993 - protein, 10 aa, Artificial Sequence
  Description of Artificial Sequence: Synthetic peptide
  Seed: KWMMAMKYPI
KQMMAMKYPF

SEQ ID NO: 164994 - protein, 10 aa, Artificial Sequence
  Description of Artificial Sequence: Synthetic peptide
  Seed: KWMMAMKYPI
KQMMAMKYPH

SEQ ID NO: 164995 - protein, 10 aa, Artificial Sequence
  Description of Artificial Sequence: Synthetic peptide
  Seed: KWMMAMKYPI
KQMMAMKYPI

SEQ ID NO: 164996 - protein, 10 aa, Artificial Sequence
  Description of Artificial Sequence: Synthetic peptide
  Seed: KWMMAMKYPI
KQMMAMKYPK

SEQ ID NO: 164997 - protein, 10 aa, Artificial Sequence
  Description of Artificial Sequence: Synthetic peptide
  Seed: KWMMAMKYPI
KQMMAMKYPL

SEQ ID NO: 164998 - protein, 10 aa, Artificial Sequence
  Description of Artificial Sequence: Synthetic peptide
  Seed: KWMMAMKYPI
KQMMAMKYPM

SEQ ID NO: 164999 - protein, 10 aa, Artificial Sequence
  Description of Artificial Sequence: Synthetic peptide
  Seed: KWMMAMKYPI
KQMMAMKYPR

SEQ ID NO: 165000 - protein, 10 aa, Artificial Sequence
  Description of Artificial Sequence: Synthetic peptide
  Seed: KWMMAMKYPI
KQMMAMKYPT

SEQ ID NO: 165001 - protein, 10 aa, Artificial Sequence
  Description of Artificial Sequence: Synthetic peptide
  Seed: KWMMAMKYPI
KQMMAMKYPV

SEQ ID NO: 165002 - protein, 10 aa, Artificial Sequence
  Description of Artificial Sequence: Synthetic peptide
  Seed: KWMMAMKYPI
KQMMAMKYPW

SEQ ID NO: 165003 - protein, 10 aa, Artificial Sequence
  Description of Artificial Sequence: Synthetic peptide
  Seed: KWMMAMKYPI
KQMMAMKYPY

SEQ ID NO: 165004 - protein, 9 aa, Artificial Sequence
  Description of Artificial Sequence: Synthetic peptide
  Seed: KAVRGDLNF
KQVRGDLNA

SEQ ID NO: 165005 - protein, 9 aa, Artificial Sequence
  Description of Artificial Sequence: Synthetic peptide
  Seed: KAVRGDLNF
KQVRGDLNF

SEQ ID NO: 165006 - protein, 9 aa, Artificial Sequence
  Description of Artificial Sequence: Synthetic peptide
  Seed: KAVRGDLNF
KQVRGDLNH

SEQ ID NO: 165007 - protein, 9 aa, Artificial Sequence
  Description of Artificial Sequence: Synthetic peptide
  Seed: KAVRGDLNF
KQVRGDLNI

SEQ ID NO: 165008 - protein, 9 aa, Artificial Sequence
  Description of Artificial Sequence: Synthetic peptide
  Seed: KAVRGDLNF
KQVRGDLNL

SEQ ID NO: 165009 - protein, 9 aa, Artificial Sequence
  Description of Artificial Sequence: Synthetic peptide
  Seed: KAVRGDLNF
KQVRGDLNM

SEQ ID NO: 165010 - protein, 9 aa, Artificial Sequence
  Description of Artificial Sequence: Synthetic peptide
  Seed: KAVRGDLNF
KQVRGDLNV

SEQ ID NO: 165011 - protein, 9 aa, Artificial Sequence
  Description of Artificial Sequence: Synthetic peptide
  Seed: KAVRGDLNF
KQVRGDLNW

SEQ ID NO: 165012 - protein, 9 aa, Artificial Sequence
  Description of Artificial Sequence: Synthetic peptide
  Seed: KAVRGDLNF
KQVRGDLNY

SEQ ID NO: 165013 - protein, 10 aa, Artificial Sequence
  Description of Artificial Sequence: Synthetic peptide
  Seed: KWMMAMKYPI
KRMMAMKYPA

SEQ ID NO: 165014 - protein, 10 aa, Artificial Sequence
  Description of Artificial Sequence: Synthetic peptide
  Seed: KWMMAMKYPI
KRMMAMKYPF

SEQ ID NO: 165015 - protein, 10 aa, Artificial Sequence
  Description of Artificial Sequence: Synthetic peptide
  Seed: KWMMAMKYPI
KRMMAMKYPH

SEQ ID NO: 165016 - protein, 10 aa, Artificial Sequence
  Description of Artificial Sequence: Synthetic peptide
  Seed: KWMMAMKYPI
KRMMAMKYPI

SEQ ID NO: 165017 - protein, 10 aa, Artificial Sequence
  Description of Artificial Sequence: Synthetic peptide
  Seed: KWMMAMKYPI
KRMMAMKYPK

SEQ ID NO: 165018 - protein, 10 aa, Artificial Sequence
  Description of Artificial Sequence: Synthetic peptide
  Seed: KWMMAMKYPI
KRMMAMKYPL

SEQ ID NO: 165019 - protein, 10 aa, Artificial Sequence
  Description of Artificial Sequence: Synthetic peptide
  Seed: KWMMAMKYPI
KRMMAMKYPM

SEQ ID NO: 165020 - protein, 10 aa, Artificial Sequence
  Description of Artificial Sequence: Synthetic peptide
  Seed: KWMMAMKYPI
KRMMAMKYPR

SEQ ID NO: 165021 - protein, 10 aa, Artificial Sequence
  Description of Artificial Sequence: Synthetic peptide
  Seed: KWMMAMKYPI
KRMMAMKYPT

SEQ ID NO: 165022 - protein, 10 aa, Artificial Sequence
  Description of Artificial Sequence: Synthetic peptide
  Seed: KWMMAMKYPI
KRMMAMKYPV

SEQ ID NO: 165023 - protein, 10 aa, Artificial Sequence
  Description of Artificial Sequence: Synthetic peptide
  Seed: KWMMAMKYPI
KRMMAMKYPW

SEQ ID NO: 165024 - protein, 10 aa, Artificial Sequence
  Description of Artificial Sequence: Synthetic peptide
  Seed: KWMMAMKYPI
KRMMAMKYPY

SEQ ID NO: 165025 - protein, 9 aa, Artificial Sequence
  Description of Artificial Sequence: Synthetic peptide
  Seed: KAVRGDLNF
KRVRGDLNF

SEQ ID NO: 165026 - protein, 9 aa, Artificial Sequence
  Description of Artificial Sequence: Synthetic peptide
  Seed: KAVRGDLNF
KRVRGDLNM

SEQ ID NO: 165027 - protein, 9 aa, Artificial Sequence
  Description of Artificial Sequence: Synthetic peptide
  Seed: KAVRGDLNF
KRVRGDLNY

SEQ ID NO: 165028 - protein, 10 aa, Artificial Sequence
  Description of Artificial Sequence: Synthetic peptide
  Seed: KWMMAMKYPI
KSMMAMKYPA

SEQ ID NO: 165029 - protein, 10 aa, Artificial Sequence
  Description of Artificial Sequence: Synthetic peptide
  Seed: KWMMAMKYPI
KSMMAMKYPC

SEQ ID NO: 165030 - protein, 10 aa, Artificial Sequence
  Description of Artificial Sequence: Synthetic peptide
  Seed: KWMMAMKYPI
KSMMAMKYPF

SEQ ID NO: 165031 - protein, 10 aa, Artificial Sequence
  Description of Artificial Sequence: Synthetic peptide
  Seed: KWMMAMKYPI
KSMMAMKYPG

SEQ ID NO: 165032 - protein, 10 aa, Artificial Sequence
  Description of Artificial Sequence: Synthetic peptide
  Seed: KWMMAMKYPI
KSMMAMKYPH

SEQ ID NO: 165033 - protein, 10 aa, Artificial Sequence
  Description of Artificial Sequence: Synthetic peptide
  Seed: KWMMAMKYPI
KSMMAMKYPI

SEQ ID NO: 165034 - protein, 10 aa, Artificial Sequence
  Description of Artificial Sequence: Synthetic peptide
  Seed: KWMMAMKYPI
KSMMAMKYPK

SEQ ID NO: 165035 - protein, 10 aa, Artificial Sequence
  Description of Artificial Sequence: Synthetic peptide
  Seed: KWMMAMKYPI
KSMMAMKYPL

SEQ ID NO: 165036 - protein, 10 aa, Artificial Sequence
  Description of Artificial Sequence: Synthetic peptide
  Seed: KWMMAMKYPI
KSMMAMKYPM

SEQ ID NO: 165037 - protein, 10 aa, Artificial Sequence
  Description of Artificial Sequence: Synthetic peptide
  Seed: KWMMAMKYPI
KSMMAMKYPP

SEQ ID NO: 165038 - protein, 10 aa, Artificial Sequence
  Description of Artificial Sequence: Synthetic peptide
  Seed: KWMMAMKYPI
KSMMAMKYPR

SEQ ID NO: 165039 - protein, 10 aa, Artificial Sequence
  Description of Artificial Sequence: Synthetic peptide
  Seed: KWMMAMKYPI
KSMMAMKYPS

SEQ ID NO: 165040 - protein, 10 aa, Artificial Sequence
  Description of Artificial Sequence: Synthetic peptide
  Seed: KWMMAMKYPI
KSMMAMKYPT

SEQ ID NO: 165041 - protein, 10 aa, Artificial Sequence
  Description of Artificial Sequence: Synthetic peptide
  Seed: KWMMAMKYPI
KSMMAMKYPV

SEQ ID NO: 165042 - protein, 10 aa, Artificial Sequence
  Description of Artificial Sequence: Synthetic peptide
  Seed: KWMMAMKYPI
KSMMAMKYPW

SEQ ID NO: 165043 - protein, 10 aa, Artificial Sequence
  Description of Artificial Sequence: Synthetic peptide
  Seed: KWMMAMKYPI
KSMMAMKYPY

SEQ ID NO: 165044 - protein, 9 aa, Artificial Sequence
  Description of Artificial Sequence: Synthetic peptide
  Seed: KAVRGDLNF
KSVRGDLNF

SEQ ID NO: 165045 - protein, 9 aa, Artificial Sequence
  Description of Artificial Sequence: Synthetic peptide
  Seed: KAVRGDLNF
KSVRGDLNI

SEQ ID NO: 165046 - protein, 9 aa, Artificial Sequence
  Description of Artificial Sequence: Synthetic peptide
  Seed: KAVRGDLNF
KSVRGDLNL

SEQ ID NO: 165047 - protein, 9 aa, Artificial Sequence
  Description of Artificial Sequence: Synthetic peptide
  Seed: KAVRGDLNF
KSVRGDLNM

SEQ ID NO: 165048 - protein, 9 aa, Artificial Sequence
  Description of Artificial Sequence: Synthetic peptide
  Seed: KAVRGDLNF
KSVRGDLNV

SEQ ID NO: 165049 - protein, 9 aa, Artificial Sequence
  Description of Artificial Sequence: Synthetic peptide
  Seed: KAVRGDLNF
KSVRGDLNW

SEQ ID NO: 165050 - protein, 9 aa, Artificial Sequence
  Description of Artificial Sequence: Synthetic peptide
  Seed: KAVRGDLNF
KSVRGDLNY

SEQ ID NO: 165051 - protein, 10 aa, Artificial Sequence
  Description of Artificial Sequence: Synthetic peptide
  Seed: KWMMAMKYPI
KTMMAMKYPA

SEQ ID NO: 165052 - protein, 10 aa, Artificial Sequence
  Description of Artificial Sequence: Synthetic peptide
  Seed: KWMMAMKYPI
KTMMAMKYPC

SEQ ID NO: 165053 - protein, 10 aa, Artificial Sequence
  Description of Artificial Sequence: Synthetic peptide
  Seed: KWMMAMKYPI
KTMMAMKYPF

SEQ ID NO: 165054 - protein, 10 aa, Artificial Sequence
  Description of Artificial Sequence: Synthetic peptide
  Seed: KWMMAMKYPI
KTMMAMKYPG

SEQ ID NO: 165055 - protein, 10 aa, Artificial Sequence
  Description of Artificial Sequence: Synthetic peptide
  Seed: KWMMAMKYPI
KTMMAMKYPH

SEQ ID NO: 165056 - protein, 10 aa, Artificial Sequence
  Description of Artificial Sequence: Synthetic peptide
  Seed: KWMMAMKYPI
KTMMAMKYPI

SEQ ID NO: 165057 - protein, 10 aa, Artificial Sequence
  Description of Artificial Sequence: Synthetic peptide
  Seed: KWMMAMKYPI
KTMMAMKYPK

SEQ ID NO: 165058 - protein, 10 aa, Artificial Sequence
  Description of Artificial Sequence: Synthetic peptide
  Seed: KWMMAMKYPI
KTMMAMKYPL

SEQ ID NO: 165059 - protein, 10 aa, Artificial Sequence
  Description of Artificial Sequence: Synthetic peptide
  Seed: KWMMAMKYPI
KTMMAMKYPM

SEQ ID NO: 165060 - protein, 10 aa, Artificial Sequence
  Description of Artificial Sequence: Synthetic peptide
  Seed: KWMMAMKYPI
KTMMAMKYPN

SEQ ID NO: 165061 - protein, 10 aa, Artificial Sequence
  Description of Artificial Sequence: Synthetic peptide
  Seed: KWMMAMKYPI
KTMMAMKYPP

SEQ ID NO: 165062 - protein, 10 aa, Artificial Sequence
  Description of Artificial Sequence: Synthetic peptide
  Seed: KWMMAMKYPI
KTMMAMKYPQ

SEQ ID NO: 165063 - protein, 10 aa, Artificial Sequence
  Description of Artificial Sequence: Synthetic peptide
  Seed: KWMMAMKYPI
KTMMAMKYPR

SEQ ID NO: 165064 - protein, 10 aa, Artificial Sequence
  Description of Artificial Sequence: Synthetic peptide
  Seed: KWMMAMKYPI
KTMMAMKYPS

SEQ ID NO: 165065 - protein, 10 aa, Artificial Sequence
  Description of Artificial Sequence: Synthetic peptide
  Seed: KWMMAMKYPI
KTMMAMKYPT

SEQ ID NO: 165066 - protein, 10 aa, Artificial Sequence
  Description of Artificial Sequence: Synthetic peptide
  Seed: KWMMAMKYPI
KTMMAMKYPV

SEQ ID NO: 165067 - protein, 10 aa, Artificial Sequence
  Description of Artificial Sequence: Synthetic peptide
  Seed: KWMMAMKYPI
KTMMAMKYPW

SEQ ID NO: 165068 - protein, 10 aa, Artificial Sequence
  Description of Artificial Sequence: Synthetic peptide
  Seed: KWMMAMKYPI
KTMMAMKYPY

SEQ ID NO: 165069 - protein, 9 aa, Artificial Sequence
  Description of Artificial Sequence: Synthetic peptide
  Seed: KAVRGDLNF
KTVRGDLNF

SEQ ID NO: 165070 - protein, 9 aa, Artificial Sequence
  Description of Artificial Sequence: Synthetic peptide
  Seed: KAVRGDLNF
KTVRGDLNI

SEQ ID NO: 165071 - protein, 9 aa, Artificial Sequence
  Description of Artificial Sequence: Synthetic peptide
  Seed: KAVRGDLNF
KTVRGDLNL

SEQ ID NO: 165072 - protein, 9 aa, Artificial Sequence
  Description of Artificial Sequence: Synthetic peptide
  Seed: KAVRGDLNF
KTVRGDLNM

SEQ ID NO: 165073 - protein, 9 aa, Artificial Sequence
  Description of Artificial Sequence: Synthetic peptide
  Seed: KAVRGDLNF
KTVRGDLNV

SEQ ID NO: 165074 - protein, 9 aa, Artificial Sequence
  Description of Artificial Sequence: Synthetic peptide
  Seed: KAVRGDLNF
KTVRGDLNW

SEQ ID NO: 165075 - protein, 9 aa, Artificial Sequence
  Description of Artificial Sequence: Synthetic peptide
  Seed: KAVRGDLNF
KTVRGDLNY

SEQ ID NO: 165076 - protein, 10 aa, Artificial Sequence
  Description of Artificial Sequence: Synthetic peptide
  Seed: KWMMAMKYPI
KVMMAMKYPA

SEQ ID NO: 165077 - protein, 10 aa, Artificial Sequence
  Description of Artificial Sequence: Synthetic peptide
  Seed: KWMMAMKYPI
KVMMAMKYPF

SEQ ID NO: 165078 - protein, 10 aa, Artificial Sequence
  Description of Artificial Sequence: Synthetic peptide
  Seed: KWMMAMKYPI
KVMMAMKYPG

SEQ ID NO: 165079 - protein, 10 aa, Artificial Sequence
  Description of Artificial Sequence: Synthetic peptide
  Seed: KWMMAMKYPI
KVMMAMKYPH

SEQ ID NO: 165080 - protein, 10 aa, Artificial Sequence
  Description of Artificial Sequence: Synthetic peptide
  Seed: KWMMAMKYPI
KVMMAMKYPI

SEQ ID NO: 165081 - protein, 10 aa, Artificial Sequence
  Description of Artificial Sequence: Synthetic peptide
  Seed: KWMMAMKYPI
KVMMAMKYPK

SEQ ID NO: 165082 - protein, 10 aa, Artificial Sequence
  Description of Artificial Sequence: Synthetic peptide
  Seed: KWMMAMKYPI
KVMMAMKYPL

SEQ ID NO: 165083 - protein, 10 aa, Artificial Sequence
  Description of Artificial Sequence: Synthetic peptide
  Seed: KWMMAMKYPI
KVMMAMKYPM

SEQ ID NO: 165084 - protein, 10 aa, Artificial Sequence
  Description of Artificial Sequence: Synthetic peptide
  Seed: KWMMAMKYPI
KVMMAMKYPR

SEQ ID NO: 165085 - protein, 10 aa, Artificial Sequence
  Description of Artificial Sequence: Synthetic peptide
  Seed: KWMMAMKYPI
KVMMAMKYPS

SEQ ID NO: 165086 - protein, 10 aa, Artificial Sequence
  Description of Artificial Sequence: Synthetic peptide
  Seed: KWMMAMKYPI
KVMMAMKYPT

SEQ ID NO: 165087 - protein, 10 aa, Artificial Sequence
  Description of Artificial Sequence: Synthetic peptide
  Seed: KWMMAMKYPI
KVMMAMKYPV

SEQ ID NO: 165088 - protein, 10 aa, Artificial Sequence
  Description of Artificial Sequence: Synthetic peptide
  Seed: KWMMAMKYPI
KVMMAMKYPW

SEQ ID NO: 165089 - protein, 10 aa, Artificial Sequence
  Description of Artificial Sequence: Synthetic peptide
  Seed: KWMMAMKYPI
KVMMAMKYPY

SEQ ID NO: 165090 - protein, 9 aa, Artificial Sequence
  Description of Artificial Sequence: Synthetic peptide
  Seed: KAVRGDLNF
KVVRGDLNF

SEQ ID NO: 165091 - protein, 9 aa, Artificial Sequence
  Description of Artificial Sequence: Synthetic peptide
  Seed: KAVRGDLNF
KVVRGDLNI

SEQ ID NO: 165092 - protein, 9 aa, Artificial Sequence
  Description of Artificial Sequence: Synthetic peptide
  Seed: KAVRGDLNF
KVVRGDLNL

SEQ ID NO: 165093 - protein, 9 aa, Artificial Sequence
  Description of Artificial Sequence: Synthetic peptide
  Seed: KAVRGDLNF
KVVRGDLNM

SEQ ID NO: 165094 - protein, 9 aa, Artificial Sequence
  Description of Artificial Sequence: Synthetic peptide
  Seed: KAVRGDLNF
KVVRGDLNY

SEQ ID NO: 165095 - protein, 10 aa, Artificial Sequence
  Description of Artificial Sequence: Synthetic peptide
  Seed: KWMMAMKYPI
KWMMAMKYPA

SEQ ID NO: 165096 - protein, 10 aa, Artificial Sequence
  Description of Artificial Sequence: Synthetic peptide
  Seed: KWMMAMKYPI
KWMMAMKYPH

SEQ ID NO: 165097 - protein, 10 aa, Artificial Sequence
  Description of Artificial Sequence: Synthetic peptide
  Seed: KWMMAMKYPI
KWMMAMKYPK

SEQ ID NO: 165098 - protein, 10 aa, Artificial Sequence
  Description of Artificial Sequence: Synthetic peptide
  Seed: KWMMAMKYPI
KWMMAMKYPL

SEQ ID NO: 165099 - protein, 10 aa, Artificial Sequence
  Description of Artificial Sequence: Synthetic peptide
  Seed: KWMMAMKYPI
KWMMAMKYPM

SEQ ID NO: 165100 - protein, 10 aa, Artificial Sequence
  Description of Artificial Sequence: Synthetic peptide
  Seed: KWMMAMKYPI
KWMMAMKYPQ

SEQ ID NO: 165101 - protein, 10 aa, Artificial Sequence
  Description of Artificial Sequence: Synthetic peptide
  Seed: KWMMAMKYPI
KWMMAMKYPR

SEQ ID NO: 165102 - protein, 10 aa, Artificial Sequence
  Description of Artificial Sequence: Synthetic peptide
  Seed: KWMMAMKYPI
KWMMAMKYPT

SEQ ID NO: 165103 - protein, 10 aa, Artificial Sequence
  Description of Artificial Sequence: Synthetic peptide
  Seed: KWMMAMKYPI
KWMMAMKYPV

SEQ ID NO: 165104 - protein, 10 aa, Artificial Sequence
  Description of Artificial Sequence: Synthetic peptide
  Seed: KWMMAMKYPI
KWMMAMKYPY

SEQ ID NO: 165105 - protein, 10 aa, Artificial Sequence
  Description of Artificial Sequence: Synthetic peptide
  Seed: KWMMAMKYPI
KYMMAMKYPA

SEQ ID NO: 165106 - protein, 10 aa, Artificial Sequence
  Description of Artificial Sequence: Synthetic peptide
  Seed: KWMMAMKYPI
KYMMAMKYPG

SEQ ID NO: 165107 - protein, 10 aa, Artificial Sequence
  Description of Artificial Sequence: Synthetic peptide
  Seed: KWMMAMKYPI
KYMMAMKYPH

SEQ ID NO: 165108 - protein, 10 aa, Artificial Sequence
  Description of Artificial Sequence: Synthetic peptide
  Seed: KWMMAMKYPI
KYMMAMKYPI

SEQ ID NO: 165109 - protein, 10 aa, Artificial Sequence
  Description of Artificial Sequence: Synthetic peptide
  Seed: KWMMAMKYPI
KYMMAMKYPK

SEQ ID NO: 165110 - protein, 10 aa, Artificial Sequence
  Description of Artificial Sequence: Synthetic peptide
  Seed: KWMMAMKYPI
KYMMAMKYPL

SEQ ID NO: 165111 - protein, 10 aa, Artificial Sequence
  Description of Artificial Sequence: Synthetic peptide
  Seed: KWMMAMKYPI
KYMMAMKYPM

SEQ ID NO: 165112 - protein, 10 aa, Artificial Sequence
  Description of Artificial Sequence: Synthetic peptide
  Seed: KWMMAMKYPI
KYMMAMKYPQ

SEQ ID NO: 165113 - protein, 10 aa, Artificial Sequence
  Description of Artificial Sequence: Synthetic peptide
  Seed: KWMMAMKYPI
KYMMAMKYPR

SEQ ID NO: 165114 - protein, 10 aa, Artificial Sequence
  Description of Artificial Sequence: Synthetic peptide
  Seed: KWMMAMKYPI
KYMMAMKYPS

SEQ ID NO: 165115 - protein, 10 aa, Artificial Sequence
  Description of Artificial Sequence: Synthetic peptide
  Seed: KWMMAMKYPI
KYMMAMKYPT

SEQ ID NO: 165116 - protein, 10 aa, Artificial Sequence
  Description of Artificial Sequence: Synthetic peptide
  Seed: KWMMAMKYPI
KYMMAMKYPV

SEQ ID NO: 165117 - protein, 9 aa, Artificial Sequence
  Description of Artificial Sequence: Synthetic peptide
  Seed: KAVRGDLNF
KYVRGDLNF

SEQ ID NO: 165118 - protein, 9 aa, Artificial Sequence
  Description of Artificial Sequence: Synthetic peptide
  Seed: KAVRGDLNF
KYVRGDLNW

SEQ ID NO: 165119 - protein, 9 aa, Artificial Sequence
  Description of Artificial Sequence: Synthetic peptide
  Seed: LTDSQTATK
LADSQTATK

SEQ ID NO: 165120 - protein, 10 aa, Artificial Sequence
  Description of Artificial Sequence: Synthetic peptide
  Seed: LTDSQTATKR
LADSQTATKR

SEQ ID NO: 165121 - protein, 9 aa, Artificial Sequence
  Description of Artificial Sequence: Synthetic peptide
  Seed: LTDSQTATK
LADSQTATR

SEQ ID NO: 165122 - protein, 9 aa, Artificial Sequence
  Description of Artificial Sequence: Synthetic peptide
  Seed: LRMKWMMAM
LAMKWMMAA

SEQ ID NO: 165123 - protein, 9 aa, Artificial Sequence
  Description of Artificial Sequence: Synthetic peptide
  Seed: LRMKWMMAM
LAMKWMMAC

SEQ ID NO: 165124 - protein, 9 aa, Artificial Sequence
  Description of Artificial Sequence: Synthetic peptide
  Seed: LRMKWMMAM
LAMKWMMAF

SEQ ID NO: 165125 - protein, 9 aa, Artificial Sequence
  Description of Artificial Sequence: Synthetic peptide
  Seed: LRMKWMMAM
LAMKWMMAH

SEQ ID NO: 165126 - protein, 9 aa, Artificial Sequence
  Description of Artificial Sequence: Synthetic peptide
  Seed: LRMKWMMAM
LAMKWMMAI

SEQ ID NO: 165127 - protein, 9 aa, Artificial Sequence
  Description of Artificial Sequence: Synthetic peptide
  Seed: LRMKWMMAM
LAMKWMMAL

SEQ ID NO: 165128 - protein, 9 aa, Artificial Sequence
  Description of Artificial Sequence: Synthetic peptide
  Seed: LRMKWMMAM
LAMKWMMAM

SEQ ID NO: 165129 - protein, 10 aa, Artificial Sequence
  Description of Artificial Sequence: Synthetic peptide
  Seed: LRMKWMMAMK
LAMKWMMAMK

SEQ ID NO: 165130 - protein, 11 aa, Artificial Sequence
  Description of Artificial Sequence: Synthetic peptide
  Seed: LRMKWMMAMKY
LAMKWMMAMKF

SEQ ID NO: 165131 - protein, 11 aa, Artificial Sequence
  Description of Artificial Sequence: Synthetic peptide
  Seed: LRMKWMMAMKY
LAMKWMMAMKY

SEQ ID NO: 165132 - protein, 10 aa, Artificial Sequence
  Description of Artificial Sequence: Synthetic peptide
  Seed: LRMKWMMAMK
LAMKWMMAMR

SEQ ID NO: 165133 - protein, 10 aa, Artificial Sequence
  Description of Artificial Sequence: Synthetic peptide
  Seed: LRMKWMMAMK
LAMKWMMAMY

SEQ ID NO: 165134 - protein, 9 aa, Artificial Sequence
  Description of Artificial Sequence: Synthetic peptide
  Seed: LRMKWMMAM
LAMKWMMAS

SEQ ID NO: 165135 - protein, 9 aa, Artificial Sequence
  Description of Artificial Sequence: Synthetic peptide
  Seed: LRMKWMMAM
LAMKWMMAT

SEQ ID NO: 165136 - protein, 9 aa, Artificial Sequence
  Description of Artificial Sequence: Synthetic peptide
  Seed: LRMKWMMAM
LAMKWMMAV

SEQ ID NO: 165137 - protein, 9 aa, Artificial Sequence
  Description of Artificial Sequence: Synthetic peptide
  Seed: LRMKWMMAM
LAMKWMMAW

SEQ ID NO: 165138 - protein, 9 aa, Artificial Sequence
  Description of Artificial Sequence: Synthetic peptide
  Seed: LRMKWMMAM
LAMKWMMAY

SEQ ID NO: 165139 - protein, 11 aa, Artificial Sequence
  Description of Artificial Sequence: Synthetic peptide
  Seed: LNPMHQLLRHF
LAPMHQLLRHF

SEQ ID NO: 165140 - protein, 11 aa, Artificial Sequence
  Description of Artificial Sequence: Synthetic peptide
  Seed: LNPMHQLLRHF
LAPMHQLLRHY

SEQ ID NO: 165141 - protein, 9 aa, Artificial Sequence
  Description of Artificial Sequence: Synthetic peptide
  Seed: LVRKTRFLP
LARKTRFLA

SEQ ID NO: 165142 - protein, 9 aa, Artificial Sequence
  Description of Artificial Sequence: Synthetic peptide
  Seed: LVRKTRFLP
LARKTRFLF

SEQ ID NO: 165143 - protein, 9 aa, Artificial Sequence
  Description of Artificial Sequence: Synthetic peptide
  Seed: LVRKTRFLP
LARKTRFLG

SEQ ID NO: 165144 - protein, 9 aa, Artificial Sequence
  Description of Artificial Sequence: Synthetic peptide
  Seed: LVRKTRFLP
LARKTRFLI

SEQ ID NO: 165145 - protein, 9 aa, Artificial Sequence
  Description of Artificial Sequence: Synthetic peptide
  Seed: LVRKTRFLP
LARKTRFLK

SEQ ID NO: 165146 - protein, 9 aa, Artificial Sequence
  Description of Artificial Sequence: Synthetic peptide
  Seed: LVRKTRFLP
LARKTRFLL

SEQ ID NO: 165147 - protein, 9 aa, Artificial Sequence
  Description of Artificial Sequence: Synthetic peptide
  Seed: LVRKTRFLP
LARKTRFLM

SEQ ID NO: 165148 - protein, 9 aa, Artificial Sequence
  Description of Artificial Sequence: Synthetic peptide
  Seed: LVRKTRFLP
LARKTRFLP

SEQ ID NO: 165149 - protein, 10 aa, Artificial Sequence
  Description of Artificial Sequence: Synthetic peptide
  Seed: LVRKTRFLPV
LARKTRFLPA

SEQ ID NO: 165150 - protein, 10 aa, Artificial Sequence
  Description of Artificial Sequence: Synthetic peptide
  Seed: LVRKTRFLPV
LARKTRFLPF

SEQ ID NO: 165151 - protein, 10 aa, Artificial Sequence
  Description of Artificial Sequence: Synthetic peptide
  Seed: LVRKTRFLPV
LARKTRFLPG

SEQ ID NO: 165152 - protein, 10 aa, Artificial Sequence
  Description of Artificial Sequence: Synthetic peptide
  Seed: LVRKTRFLPV
LARKTRFLPI

SEQ ID NO: 165153 - protein, 10 aa, Artificial Sequence
  Description of Artificial Sequence: Synthetic peptide
  Seed: LVRKTRFLPV
LARKTRFLPK

SEQ ID NO: 165154 - protein, 10 aa, Artificial Sequence
  Description of Artificial Sequence: Synthetic peptide
  Seed: LVRKTRFLPV
LARKTRFLPL

SEQ ID NO: 165155 - protein, 10 aa, Artificial Sequence
  Description of Artificial Sequence: Synthetic peptide
  Seed: LVRKTRFLPV
LARKTRFLPM

SEQ ID NO: 165156 - protein, 10 aa, Artificial Sequence
  Description of Artificial Sequence: Synthetic peptide
  Seed: LVRKTRFLPV
LARKTRFLPR

SEQ ID NO: 165157 - protein, 10 aa, Artificial Sequence
  Description of Artificial Sequence: Synthetic peptide
  Seed: LVRKTRFLPV
LARKTRFLPS

SEQ ID NO: 165158 - protein, 10 aa, Artificial Sequence
  Description of Artificial Sequence: Synthetic peptide
  Seed: LVRKTRFLPV
LARKTRFLPT

SEQ ID NO: 165159 - protein, 10 aa, Artificial Sequence
  Description of Artificial Sequence: Synthetic peptide
  Seed: LVRKTRFLPV
LARKTRFLPV

SEQ ID NO: 165160 - protein, 10 aa, Artificial Sequence
  Description of Artificial Sequence: Synthetic peptide
  Seed: LVRKTRFLPV
LARKTRFLPY

SEQ ID NO: 165161 - protein, 9 aa, Artificial Sequence
  Description of Artificial Sequence: Synthetic peptide
  Seed: LVRKTRFLP
LARKTRFLQ

SEQ ID NO: 165162 - protein, 9 aa, Artificial Sequence
  Description of Artificial Sequence: Synthetic peptide
  Seed: LVRKTRFLP
LARKTRFLR

SEQ ID NO: 165163 - protein, 9 aa, Artificial Sequence
  Description of Artificial Sequence: Synthetic peptide
  Seed: LVRKTRFLP
LARKTRFLS

SEQ ID NO: 165164 - protein, 9 aa, Artificial Sequence
  Description of Artificial Sequence: Synthetic peptide
  Seed: LVRKTRFLP
LARKTRFLT

SEQ ID NO: 165165 - protein, 9 aa, Artificial Sequence
  Description of Artificial Sequence: Synthetic peptide
  Seed: LVRKTRFLP
LARKTRFLV

SEQ ID NO: 165166 - protein, 9 aa, Artificial Sequence
  Description of Artificial Sequence: Synthetic peptide
  Seed: LVRKTRFLP
LARKTRFLY

SEQ ID NO: 165167 - protein, 9 aa, Artificial Sequence
  Description of Artificial Sequence: Synthetic peptide
  Seed: LRMKWMMAM
LCMKWMMAF

SEQ ID NO: 165168 - protein, 9 aa, Artificial Sequence
  Description of Artificial Sequence: Synthetic peptide
  Seed: LRMKWMMAM
LCMKWMMAM

SEQ ID NO: 165169 - protein, 10 aa, Artificial Sequence
  Description of Artificial Sequence: Synthetic peptide
  Seed: LRMKWMMAMK
LCMKWMMAMK

SEQ ID NO: 165170 - protein, 10 aa, Artificial Sequence
  Description of Artificial Sequence: Synthetic peptide
  Seed: LRMKWMMAMK
LCMKWMMAMR

SEQ ID NO: 165171 - protein, 9 aa, Artificial Sequence
  Description of Artificial Sequence: Synthetic peptide
  Seed: LRMKWMMAM
LCMKWMMAY

SEQ ID NO: 165172 - protein, 11 aa, Artificial Sequence
  Description of Artificial Sequence: Synthetic peptide
  Seed: LNPMHQLLRHF
LCPMHQLLRHF

SEQ ID NO: 165173 - protein, 11 aa, Artificial Sequence
  Description of Artificial Sequence: Synthetic peptide
  Seed: LNPMHQLLRHF
LCPMHQLLRHY

SEQ ID NO: 165174 - protein, 9 aa, Artificial Sequence
  Description of Artificial Sequence: Synthetic peptide
  Seed: LVRKTRFLP
LCRKTRFLA

SEQ ID NO: 165175 - protein, 9 aa, Artificial Sequence
  Description of Artificial Sequence: Synthetic peptide
  Seed: LVRKTRFLP
LCRKTRFLK

SEQ ID NO: 165176 - protein, 10 aa, Artificial Sequence
  Description of Artificial Sequence: Synthetic peptide
  Seed: LVRKTRFLPV
LCRKTRFLPF

SEQ ID NO: 165177 - protein, 10 aa, Artificial Sequence
  Description of Artificial Sequence: Synthetic peptide
  Seed: LVRKTRFLPV
LCRKTRFLPI

SEQ ID NO: 165178 - protein, 10 aa, Artificial Sequence
  Description of Artificial Sequence: Synthetic peptide
  Seed: LVRKTRFLPV
LCRKTRFLPK

SEQ ID NO: 165179 - protein, 10 aa, Artificial Sequence
  Description of Artificial Sequence: Synthetic peptide
  Seed: LVRKTRFLPV
LCRKTRFLPL

SEQ ID NO: 165180 - protein, 10 aa, Artificial Sequence
  Description of Artificial Sequence: Synthetic peptide
  Seed: LVRKTRFLPV
LCRKTRFLPM

SEQ ID NO: 165181 - protein, 10 aa, Artificial Sequence
  Description of Artificial Sequence: Synthetic peptide
  Seed: LVRKTRFLPV
LCRKTRFLPV

SEQ ID NO: 165182 - protein, 9 aa, Artificial Sequence
  Description of Artificial Sequence: Synthetic peptide
  Seed: LRMKWMMAM
LDMKWMMAF

SEQ ID NO: 165183 - protein, 9 aa, Artificial Sequence
  Description of Artificial Sequence: Synthetic peptide
  Seed: LRMKWMMAM
LDMKWMMAM

SEQ ID NO: 165184 - protein, 10 aa, Artificial Sequence
  Description of Artificial Sequence: Synthetic peptide
  Seed: LRMKWMMAMK
LDMKWMMAMK

SEQ ID NO: 165185 - protein, 10 aa, Artificial Sequence
  Description of Artificial Sequence: Synthetic peptide
  Seed: LRMKWMMAMK
LDMKWMMAMR

SEQ ID NO: 165186 - protein, 9 aa, Artificial Sequence
  Description of Artificial Sequence: Synthetic peptide
  Seed: LRMKWMMAM
LDMKWMMAY

SEQ ID NO: 165187 - protein, 11 aa, Artificial Sequence
  Description of Artificial Sequence: Synthetic peptide
  Seed: LNPMHQLLRHF
LDPMHQLLRHF

SEQ ID NO: 165188 - protein, 11 aa, Artificial Sequence
  Description of Artificial Sequence: Synthetic peptide
  Seed: LNPMHQLLRHF
LDPMHQLLRHY

SEQ ID NO: 165189 - protein, 10 aa, Artificial Sequence
  Description of Artificial Sequence: Synthetic peptide
  Seed: LVRKTRFLPV
LDRKTRFLPF

SEQ ID NO: 165190 - protein, 10 aa, Artificial Sequence
  Description of Artificial Sequence: Synthetic peptide
  Seed: LVRKTRFLPV
LDRKTRFLPI

SEQ ID NO: 165191 - protein, 10 aa, Artificial Sequence
  Description of Artificial Sequence: Synthetic peptide
  Seed: LVRKTRFLPV
LDRKTRFLPL

SEQ ID NO: 165192 - protein, 10 aa, Artificial Sequence
  Description of Artificial Sequence: Synthetic peptide
  Seed: LVRKTRFLPV
LDRKTRFLPM

SEQ ID NO: 165193 - protein, 10 aa, Artificial Sequence
  Description of Artificial Sequence: Synthetic peptide
  Seed: LVRKTRFLPV
LDRKTRFLPV

SEQ ID NO: 165194 - protein, 9 aa, Artificial Sequence
  Description of Artificial Sequence: Synthetic peptide
  Seed: LRMKWMMAM
LEMKWMMAA

SEQ ID NO: 165195 - protein, 9 aa, Artificial Sequence
  Description of Artificial Sequence: Synthetic peptide
  Seed: LRMKWMMAM
LEMKWMMAF

SEQ ID NO: 165196 - protein, 9 aa, Artificial Sequence
  Description of Artificial Sequence: Synthetic peptide
  Seed: LRMKWMMAM
LEMKWMMAH

SEQ ID NO: 165197 - protein, 9 aa, Artificial Sequence
  Description of Artificial Sequence: Synthetic peptide
  Seed: LRMKWMMAM
LEMKWMMAI

SEQ ID NO: 165198 - protein, 9 aa, Artificial Sequence
  Description of Artificial Sequence: Synthetic peptide
  Seed: LRMKWMMAM
LEMKWMMAL

SEQ ID NO: 165199 - protein, 9 aa, Artificial Sequence
  Description of Artificial Sequence: Synthetic peptide
  Seed: LRMKWMMAM
LEMKWMMAM

SEQ ID NO: 165200 - protein, 10 aa, Artificial Sequence
  Description of Artificial Sequence: Synthetic peptide
  Seed: LRMKWMMAMK
LEMKWMMAMK

SEQ ID NO: 165201 - protein, 11 aa, Artificial Sequence
  Description of Artificial Sequence: Synthetic peptide
  Seed: LRMKWMMAMKY
LEMKWMMAMKF

SEQ ID NO: 165202 - protein, 11 aa, Artificial Sequence
  Description of Artificial Sequence: Synthetic peptide
  Seed: LRMKWMMAMKY
LEMKWMMAMKM

SEQ ID NO: 165203 - protein, 11 aa, Artificial Sequence
  Description of Artificial Sequence: Synthetic peptide
  Seed: LRMKWMMAMKY
LEMKWMMAMKY

SEQ ID NO: 165204 - protein, 10 aa, Artificial Sequence
  Description of Artificial Sequence: Synthetic peptide
  Seed: LRMKWMMAMK
LEMKWMMAMR

SEQ ID NO: 165205 - protein, 9 aa, Artificial Sequence
  Description of Artificial Sequence: Synthetic peptide
  Seed: LRMKWMMAM
LEMKWMMAV

SEQ ID NO: 165206 - protein, 9 aa, Artificial Sequence
  Description of Artificial Sequence: Synthetic peptide
  Seed: LRMKWMMAM
LEMKWMMAW

SEQ ID NO: 165207 - protein, 9 aa, Artificial Sequence
  Description of Artificial Sequence: Synthetic peptide
  Seed: LRMKWMMAM
LEMKWMMAY

SEQ ID NO: 165208 - protein, 11 aa, Artificial Sequence
  Description of Artificial Sequence: Synthetic peptide
  Seed: LNPMHQLLRHF
LEPMHQLLRHF

SEQ ID NO: 165209 - protein, 11 aa, Artificial Sequence
  Description of Artificial Sequence: Synthetic peptide
  Seed: LNPMHQLLRHF
LEPMHQLLRHY

SEQ ID NO: 165210 - protein, 10 aa, Artificial Sequence
  Description of Artificial Sequence: Synthetic peptide
  Seed: LVRKTRFLPV
LERKTRFLPF

SEQ ID NO: 165211 - protein, 10 aa, Artificial Sequence
  Description of Artificial Sequence: Synthetic peptide
  Seed: LVRKTRFLPV
LERKTRFLPI

SEQ ID NO: 165212 - protein, 10 aa, Artificial Sequence
  Description of Artificial Sequence: Synthetic peptide
  Seed: LVRKTRFLPV
LERKTRFLPL

SEQ ID NO: 165213 - protein, 10 aa, Artificial Sequence
  Description of Artificial Sequence: Synthetic peptide
  Seed: LVRKTRFLPV
LERKTRFLPM

SEQ ID NO: 165214 - protein, 10 aa, Artificial Sequence
  Description of Artificial Sequence: Synthetic peptide
  Seed: LVRKTRFLPV
LERKTRFLPV

SEQ ID NO: 165215 - protein, 9 aa, Artificial Sequence
  Description of Artificial Sequence: Synthetic peptide
  Seed: LRMKWMMAM
LFMKWMMAF

SEQ ID NO: 165216 - protein, 9 aa, Artificial Sequence
  Description of Artificial Sequence: Synthetic peptide
  Seed: LRMKWMMAM
LFMKWMMAI

SEQ ID NO: 165217 - protein, 9 aa, Artificial Sequence
  Description of Artificial Sequence: Synthetic peptide
  Seed: LRMKWMMAM
LFMKWMMAL

SEQ ID NO: 165218 - protein, 9 aa, Artificial Sequence
  Description of Artificial Sequence: Synthetic peptide
  Seed: LRMKWMMAM
LFMKWMMAM

SEQ ID NO: 165219 - protein, 10 aa, Artificial Sequence
  Description of Artificial Sequence: Synthetic peptide
  Seed: LRMKWMMAMK
LFMKWMMAMK

SEQ ID NO: 165220 - protein, 10 aa, Artificial Sequence
  Description of Artificial Sequence: Synthetic peptide
  Seed: LRMKWMMAMK
LFMKWMMAMR

SEQ ID NO: 165221 - protein, 9 aa, Artificial Sequence
  Description of Artificial Sequence: Synthetic peptide
  Seed: LRMKWMMAM
LFMKWMMAV

SEQ ID NO: 165222 - protein, 9 aa, Artificial Sequence
  Description of Artificial Sequence: Synthetic peptide
  Seed: LRMKWMMAM
LFMKWMMAY

SEQ ID NO: 165223 - protein, 11 aa, Artificial Sequence
  Description of Artificial Sequence: Synthetic peptide
  Seed: LNPMHQLLRHF
LFPMHQLLRHF

SEQ ID NO: 165224 - protein, 11 aa, Artificial Sequence
  Description of Artificial Sequence: Synthetic peptide
  Seed: LNPMHQLLRHF
LFPMHQLLRHY

SEQ ID NO: 165225 - protein, 9 aa, Artificial Sequence
  Description of Artificial Sequence: Synthetic peptide
  Seed: LVRKTRFLP
LFRKTRFLA

SEQ ID NO: 165226 - protein, 9 aa, Artificial Sequence
  Description of Artificial Sequence: Synthetic peptide
  Seed: LVRKTRFLP
LFRKTRFLF

SEQ ID NO: 165227 - protein, 9 aa, Artificial Sequence
  Description of Artificial Sequence: Synthetic peptide
  Seed: LVRKTRFLP
LFRKTRFLG

SEQ ID NO: 165228 - protein, 9 aa, Artificial Sequence
  Description of Artificial Sequence: Synthetic peptide
  Seed: LVRKTRFLP
LFRKTRFLI

SEQ ID NO: 165229 - protein, 9 aa, Artificial Sequence
  Description of Artificial Sequence: Synthetic peptide
  Seed: LVRKTRFLP
LFRKTRFLK

SEQ ID NO: 165230 - protein, 9 aa, Artificial Sequence
  Description of Artificial Sequence: Synthetic peptide
  Seed: LVRKTRFLP
LFRKTRFLL

SEQ ID NO: 165231 - protein, 9 aa, Artificial Sequence
  Description of Artificial Sequence: Synthetic peptide
  Seed: LVRKTRFLP
LFRKTRFLM

SEQ ID NO: 165232 - protein, 9 aa, Artificial Sequence
  Description of Artificial Sequence: Synthetic peptide
  Seed: LVRKTRFLP
LFRKTRFLN

SEQ ID NO: 165233 - protein, 9 aa, Artificial Sequence
  Description of Artificial Sequence: Synthetic peptide
  Seed: LVRKTRFLP
LFRKTRFLP

SEQ ID NO: 165234 - protein, 10 aa, Artificial Sequence
  Description of Artificial Sequence: Synthetic peptide
  Seed: LVRKTRFLPV
LFRKTRFLPA

SEQ ID NO: 165235 - protein, 10 aa, Artificial Sequence
  Description of Artificial Sequence: Synthetic peptide
  Seed: LVRKTRFLPV
LFRKTRFLPF

SEQ ID NO: 165236 - protein, 10 aa, Artificial Sequence
  Description of Artificial Sequence: Synthetic peptide
  Seed: LVRKTRFLPV
LFRKTRFLPG

SEQ ID NO: 165237 - protein, 10 aa, Artificial Sequence
  Description of Artificial Sequence: Synthetic peptide
  Seed: LVRKTRFLPV
LFRKTRFLPI

SEQ ID NO: 165238 - protein, 10 aa, Artificial Sequence
  Description of Artificial Sequence: Synthetic peptide
  Seed: LVRKTRFLPV
LFRKTRFLPK

SEQ ID NO: 165239 - protein, 10 aa, Artificial Sequence
  Description of Artificial Sequence: Synthetic peptide
  Seed: LVRKTRFLPV
LFRKTRFLPL

SEQ ID NO: 165240 - protein, 10 aa, Artificial Sequence
  Description of Artificial Sequence: Synthetic peptide
  Seed: LVRKTRFLPV
LFRKTRFLPM

SEQ ID NO: 165241 - protein, 10 aa, Artificial Sequence
  Description of Artificial Sequence: Synthetic peptide
  Seed: LVRKTRFLPV
LFRKTRFLPR

SEQ ID NO: 165242 - protein, 10 aa, Artificial Sequence
  Description of Artificial Sequence: Synthetic peptide
  Seed: LVRKTRFLPV
LFRKTRFLPS

SEQ ID NO: 165243 - protein, 10 aa, Artificial Sequence
  Description of Artificial Sequence: Synthetic peptide
  Seed: LVRKTRFLPV
LFRKTRFLPV

SEQ ID NO: 165244 - protein, 9 aa, Artificial Sequence
  Description of Artificial Sequence: Synthetic peptide
  Seed: LVRKTRFLP
LFRKTRFLQ

SEQ ID NO: 165245 - protein, 9 aa, Artificial Sequence
  Description of Artificial Sequence: Synthetic peptide
  Seed: LVRKTRFLP
LFRKTRFLR

SEQ ID NO: 165246 - protein, 9 aa, Artificial Sequence
  Description of Artificial Sequence: Synthetic peptide
  Seed: LVRKTRFLP
LFRKTRFLS

SEQ ID NO: 165247 - protein, 9 aa, Artificial Sequence
  Description of Artificial Sequence: Synthetic peptide
  Seed: LVRKTRFLP
LFRKTRFLT

SEQ ID NO: 165248 - protein, 9 aa, Artificial Sequence
  Description of Artificial Sequence: Synthetic peptide
  Seed: LVRKTRFLP
LFRKTRFLV

SEQ ID NO: 165249 - protein, 9 aa, Artificial Sequence
  Description of Artificial Sequence: Synthetic peptide
  Seed: LVRKTRFLP
LFRKTRFLY

SEQ ID NO: 165250 - protein, 9 aa, Artificial Sequence
  Description of Artificial Sequence: Synthetic peptide
  Seed: LRMKWMMAM
LGMKWMMAF

SEQ ID NO: 165251 - protein, 9 aa, Artificial Sequence
  Description of Artificial Sequence: Synthetic peptide
  Seed: LRMKWMMAM
LGMKWMMAL

SEQ ID NO: 165252 - protein, 9 aa, Artificial Sequence
  Description of Artificial Sequence: Synthetic peptide
  Seed: LRMKWMMAM
LGMKWMMAM

SEQ ID NO: 165253 - protein, 10 aa, Artificial Sequence
  Description of Artificial Sequence: Synthetic peptide
  Seed: LRMKWMMAMK
LGMKWMMAMK

SEQ ID NO: 165254 - protein, 10 aa, Artificial Sequence
  Description of Artificial Sequence: Synthetic peptide
  Seed: LRMKWMMAMK
LGMKWMMAMR

SEQ ID NO: 165255 - protein, 9 aa, Artificial Sequence
  Description of Artificial Sequence: Synthetic peptide
  Seed: LRMKWMMAM
LGMKWMMAV

SEQ ID NO: 165256 - protein, 9 aa, Artificial Sequence
  Description of Artificial Sequence: Synthetic peptide
  Seed: LRMKWMMAM
LGMKWMMAY

SEQ ID NO: 165257 - protein, 11 aa, Artificial Sequence
  Description of Artificial Sequence: Synthetic peptide
  Seed: LNPMHQLLRHF
LGPMHQLLRHF

SEQ ID NO: 165258 - protein, 11 aa, Artificial Sequence
  Description of Artificial Sequence: Synthetic peptide
  Seed: LNPMHQLLRHF
LGPMHQLLRHY

SEQ ID NO: 165259 - protein, 9 aa, Artificial Sequence
  Description of Artificial Sequence: Synthetic peptide
  Seed: LVRKTRFLP
LGRKTRFLA

SEQ ID NO: 165260 - protein, 9 aa, Artificial Sequence
  Description of Artificial Sequence: Synthetic peptide
  Seed: LVRKTRFLP
LGRKTRFLG

SEQ ID NO: 165261 - protein, 9 aa, Artificial Sequence
  Description of Artificial Sequence: Synthetic peptide
  Seed: LVRKTRFLP
LGRKTRFLI

SEQ ID NO: 165262 - protein, 9 aa, Artificial Sequence
  Description of Artificial Sequence: Synthetic peptide
  Seed: LVRKTRFLP
LGRKTRFLK

SEQ ID NO: 165263 - protein, 9 aa, Artificial Sequence
  Description of Artificial Sequence: Synthetic peptide
  Seed: LVRKTRFLP
LGRKTRFLL

SEQ ID NO: 165264 - protein, 9 aa, Artificial Sequence
  Description of Artificial Sequence: Synthetic peptide
  Seed: LVRKTRFLP
LGRKTRFLM

SEQ ID NO: 165265 - protein, 10 aa, Artificial Sequence
  Description of Artificial Sequence: Synthetic peptide
  Seed: LVRKTRFLPV
LGRKTRFLPA

SEQ ID NO: 165266 - protein, 10 aa, Artificial Sequence
  Description of Artificial Sequence: Synthetic peptide
  Seed: LVRKTRFLPV
LGRKTRFLPF

SEQ ID NO: 165267 - protein, 10 aa, Artificial Sequence
  Description of Artificial Sequence: Synthetic peptide
  Seed: LVRKTRFLPV
LGRKTRFLPI

SEQ ID NO: 165268 - protein, 10 aa, Artificial Sequence
  Description of Artificial Sequence: Synthetic peptide
  Seed: LVRKTRFLPV
LGRKTRFLPK

SEQ ID NO: 165269 - protein, 10 aa, Artificial Sequence
  Description of Artificial Sequence: Synthetic peptide
  Seed: LVRKTRFLPV
LGRKTRFLPL

SEQ ID NO: 165270 - protein, 10 aa, Artificial Sequence
  Description of Artificial Sequence: Synthetic peptide
  Seed: LVRKTRFLPV
LGRKTRFLPM

SEQ ID NO: 165271 - protein, 10 aa, Artificial Sequence
  Description of Artificial Sequence: Synthetic peptide
  Seed: LVRKTRFLPV
LGRKTRFLPV

SEQ ID NO: 165272 - protein, 10 aa, Artificial Sequence
  Description of Artificial Sequence: Synthetic peptide
  Seed: LVRKTRFLPV
LGRKTRFLPY

SEQ ID NO: 165273 - protein, 9 aa, Artificial Sequence
  Description of Artificial Sequence: Synthetic peptide
  Seed: LVRKTRFLP
LGRKTRFLR

SEQ ID NO: 165274 - protein, 9 aa, Artificial Sequence
  Description of Artificial Sequence: Synthetic peptide
  Seed: LVRKTRFLP
LGRKTRFLS

SEQ ID NO: 165275 - protein, 9 aa, Artificial Sequence
  Description of Artificial Sequence: Synthetic peptide
  Seed: LVRKTRFLP
LGRKTRFLT

SEQ ID NO: 165276 - protein, 9 aa, Artificial Sequence
  Description of Artificial Sequence: Synthetic peptide
  Seed: LVRKTRFLP
LGRKTRFLV

SEQ ID NO: 165277 - protein, 9 aa, Artificial Sequence
  Description of Artificial Sequence: Synthetic peptide
  Seed: LVRKTRFLP
LGRKTRFLY

SEQ ID NO: 165278 - protein, 9 aa, Artificial Sequence
  Description of Artificial Sequence: Synthetic peptide
  Seed: LRMKWMMAM
LHMKWMMAA

SEQ ID NO: 165279 - protein, 9 aa, Artificial Sequence
  Description of Artificial Sequence: Synthetic peptide
  Seed: LRMKWMMAM
LHMKWMMAC

SEQ ID NO: 165280 - protein, 9 aa, Artificial Sequence
  Description of Artificial Sequence: Synthetic peptide
  Seed: LRMKWMMAM
LHMKWMMAF

SEQ ID NO: 165281 - protein, 9 aa, Artificial Sequence
  Description of Artificial Sequence: Synthetic peptide
  Seed: LRMKWMMAM
LHMKWMMAG

SEQ ID NO: 165282 - protein, 9 aa, Artificial Sequence
  Description of Artificial Sequence: Synthetic peptide
  Seed: LRMKWMMAM
LHMKWMMAH

SEQ ID NO: 165283 - protein, 9 aa, Artificial Sequence
  Description of Artificial Sequence: Synthetic peptide
  Seed: LRMKWMMAM
LHMKWMMAI

SEQ ID NO: 165284 - protein, 9 aa, Artificial Sequence
  Description of Artificial Sequence: Synthetic peptide
  Seed: LRMKWMMAM
LHMKWMMAL

SEQ ID NO: 165285 - protein, 9 aa, Artificial Sequence
  Description of Artificial Sequence: Synthetic peptide
  Seed: LRMKWMMAM
LHMKWMMAM

SEQ ID NO: 165286 - protein, 10 aa, Artificial Sequence
  Description of Artificial Sequence: Synthetic peptide
  Seed: LRMKWMMAMK
LHMKWMMAMK

SEQ ID NO: 165287 - protein, 11 aa, Artificial Sequence
  Description of Artificial Sequence: Synthetic peptide
  Seed: LRMKWMMAMKY
LHMKWMMAMKF

SEQ ID NO: 165288 - protein, 11 aa, Artificial Sequence
  Description of Artificial Sequence: Synthetic peptide
  Seed: LRMKWMMAMKY
LHMKWMMAMKY

SEQ ID NO: 165289 - protein, 10 aa, Artificial Sequence
  Description of Artificial Sequence: Synthetic peptide
  Seed: LRMKWMMAMK
LHMKWMMAMR

SEQ ID NO: 165290 - protein, 9 aa, Artificial Sequence
  Description of Artificial Sequence: Synthetic peptide
  Seed: LRMKWMMAM
LHMKWMMAP

SEQ ID NO: 165291 - protein, 9 aa, Artificial Sequence
  Description of Artificial Sequence: Synthetic peptide
  Seed: LRMKWMMAM
LHMKWMMAS

SEQ ID NO: 165292 - protein, 9 aa, Artificial Sequence
  Description of Artificial Sequence: Synthetic peptide
  Seed: LRMKWMMAM
LHMKWMMAT

SEQ ID NO: 165293 - protein, 9 aa, Artificial Sequence
  Description of Artificial Sequence: Synthetic peptide
  Seed: LRMKWMMAM
LHMKWMMAV

SEQ ID NO: 165294 - protein, 9 aa, Artificial Sequence
  Description of Artificial Sequence: Synthetic peptide
  Seed: LRMKWMMAM
LHMKWMMAW

SEQ ID NO: 165295 - protein, 9 aa, Artificial Sequence
  Description of Artificial Sequence: Synthetic peptide
  Seed: LRMKWMMAM
LHMKWMMAY

SEQ ID NO: 165296 - protein, 11 aa, Artificial Sequence
  Description of Artificial Sequence: Synthetic peptide
  Seed: LNPMHQLLRHF
LHPMHQLLRHF

SEQ ID NO: 165297 - protein, 11 aa, Artificial Sequence
  Description of Artificial Sequence: Synthetic peptide
  Seed: LNPMHQLLRHF
LHPMHQLLRHY

SEQ ID NO: 165298 - protein, 9 aa, Artificial Sequence
  Description of Artificial Sequence: Synthetic peptide
  Seed: LVRKTRFLP
LHRKTRFLK

SEQ ID NO: 165299 - protein, 10 aa, Artificial Sequence
  Description of Artificial Sequence: Synthetic peptide
  Seed: LVRKTRFLPV
LHRKTRFLPF

SEQ ID NO: 165300 - protein, 10 aa, Artificial Sequence
  Description of Artificial Sequence: Synthetic peptide
  Seed: LVRKTRFLPV
LHRKTRFLPI

SEQ ID NO: 165301 - protein, 10 aa, Artificial Sequence
  Description of Artificial Sequence: Synthetic peptide
  Seed: LVRKTRFLPV
LHRKTRFLPK

SEQ ID NO: 165302 - protein, 10 aa, Artificial Sequence
  Description of Artificial Sequence: Synthetic peptide
  Seed: LVRKTRFLPV
LHRKTRFLPL

SEQ ID NO: 165303 - protein, 10 aa, Artificial Sequence
  Description of Artificial Sequence: Synthetic peptide
  Seed: LVRKTRFLPV
LHRKTRFLPM

SEQ ID NO: 165304 - protein, 10 aa, Artificial Sequence
  Description of Artificial Sequence: Synthetic peptide
  Seed: LVRKTRFLPV
LHRKTRFLPV

SEQ ID NO: 165305 - protein, 9 aa, Artificial Sequence
  Description of Artificial Sequence: Synthetic peptide
  Seed: LTDSQTATK
LIDSQTATK

SEQ ID NO: 165306 - protein, 9 aa, Artificial Sequence
  Description of Artificial Sequence: Synthetic peptide
  Seed: LTDSQTATK
LIDSQTATR

SEQ ID NO: 165307 - protein, 9 aa, Artificial Sequence
  Description of Artificial Sequence: Synthetic peptide
  Seed: LRMKWMMAM
LIMKWMMAF

SEQ ID NO: 165308 - protein, 9 aa, Artificial Sequence
  Description of Artificial Sequence: Synthetic peptide
  Seed: LRMKWMMAM
LIMKWMMAL

SEQ ID NO: 165309 - protein, 9 aa, Artificial Sequence
  Description of Artificial Sequence: Synthetic peptide
  Seed: LRMKWMMAM
LIMKWMMAM

SEQ ID NO: 165310 - protein, 10 aa, Artificial Sequence
  Description of Artificial Sequence: Synthetic peptide
  Seed: LRMKWMMAMK
LIMKWMMAMK

SEQ ID NO: 165311 - protein, 10 aa, Artificial Sequence
  Description of Artificial Sequence: Synthetic peptide
  Seed: LRMKWMMAMK
LIMKWMMAMR

SEQ ID NO: 165312 - protein, 10 aa, Artificial Sequence
  Description of Artificial Sequence: Synthetic peptide
  Seed: LRMKWMMAMK
LIMKWMMAMY

SEQ ID NO: 165313 - protein, 9 aa, Artificial Sequence
  Description of Artificial Sequence: Synthetic peptide
  Seed: LRMKWMMAM
LIMKWMMAV

SEQ ID NO: 165314 - protein, 9 aa, Artificial Sequence
  Description of Artificial Sequence: Synthetic peptide
  Seed: LRMKWMMAM
LIMKWMMAY

SEQ ID NO: 165315 - protein, 11 aa, Artificial Sequence
  Description of Artificial Sequence: Synthetic peptide
  Seed: LNPMHQLLRHF
LIPMHQLLRHF

SEQ ID NO: 165316 - protein, 11 aa, Artificial Sequence
  Description of Artificial Sequence: Synthetic peptide
  Seed: LNPMHQLLRHF
LIPMHQLLRHY

SEQ ID NO: 165317 - protein, 9 aa, Artificial Sequence
  Description of Artificial Sequence: Synthetic peptide
  Seed: LVRKTRFLP
LIRKTRFLA

SEQ ID NO: 165318 - protein, 9 aa, Artificial Sequence
  Description of Artificial Sequence: Synthetic peptide
  Seed: LVRKTRFLP
LIRKTRFLF

SEQ ID NO: 165319 - protein, 9 aa, Artificial Sequence
  Description of Artificial Sequence: Synthetic peptide
  Seed: LVRKTRFLP
LIRKTRFLG

SEQ ID NO: 165320 - protein, 9 aa, Artificial Sequence
  Description of Artificial Sequence: Synthetic peptide
  Seed: LVRKTRFLP
LIRKTRFLI

SEQ ID NO: 165321 - protein, 9 aa, Artificial Sequence
  Description of Artificial Sequence: Synthetic peptide
  Seed: LVRKTRFLP
LIRKTRFLK

SEQ ID NO: 165322 - protein, 9 aa, Artificial Sequence
  Description of Artificial Sequence: Synthetic peptide
  Seed: LVRKTRFLP
LIRKTRFLL

SEQ ID NO: 165323 - protein, 9 aa, Artificial Sequence
  Description of Artificial Sequence: Synthetic peptide
  Seed: LVRKTRFLP
LIRKTRFLM

SEQ ID NO: 165324 - protein, 9 aa, Artificial Sequence
  Description of Artificial Sequence: Synthetic peptide
  Seed: LVRKTRFLP
LIRKTRFLN

SEQ ID NO: 165325 - protein, 9 aa, Artificial Sequence
  Description of Artificial Sequence: Synthetic peptide
  Seed: LVRKTRFLP
LIRKTRFLP

SEQ ID NO: 165326 - protein, 10 aa, Artificial Sequence
  Description of Artificial Sequence: Synthetic peptide
  Seed: LVRKTRFLPV
LIRKTRFLPA

SEQ ID NO: 165327 - protein, 10 aa, Artificial Sequence
  Description of Artificial Sequence: Synthetic peptide
  Seed: LVRKTRFLPV
LIRKTRFLPF

SEQ ID NO: 165328 - protein, 10 aa, Artificial Sequence
  Description of Artificial Sequence: Synthetic peptide
  Seed: LVRKTRFLPV
LIRKTRFLPG

SEQ ID NO: 165329 - protein, 10 aa, Artificial Sequence
  Description of Artificial Sequence: Synthetic peptide
  Seed: LVRKTRFLPV
LIRKTRFLPI

SEQ ID NO: 165330 - protein, 10 aa, Artificial Sequence
  Description of Artificial Sequence: Synthetic peptide
  Seed: LVRKTRFLPV
LIRKTRFLPK

SEQ ID NO: 165331 - protein, 10 aa, Artificial Sequence
  Description of Artificial Sequence: Synthetic peptide
  Seed: LVRKTRFLPV
LIRKTRFLPL

SEQ ID NO: 165332 - protein, 10 aa, Artificial Sequence
  Description of Artificial Sequence: Synthetic peptide
  Seed: LVRKTRFLPV
LIRKTRFLPM

SEQ ID NO: 165333 - protein, 10 aa, Artificial Sequence
  Description of Artificial Sequence: Synthetic peptide
  Seed: LVRKTRFLPV
LIRKTRFLPS

SEQ ID NO: 165334 - protein, 10 aa, Artificial Sequence
  Description of Artificial Sequence: Synthetic peptide
  Seed: LVRKTRFLPV
LIRKTRFLPV

SEQ ID NO: 165335 - protein, 10 aa, Artificial Sequence
  Description of Artificial Sequence: Synthetic peptide
  Seed: LVRKTRFLPV
LIRKTRFLPY

SEQ ID NO: 165336 - protein, 9 aa, Artificial Sequence
  Description of Artificial Sequence: Synthetic peptide
  Seed: LVRKTRFLP
LIRKTRFLQ

SEQ ID NO: 165337 - protein, 9 aa, Artificial Sequence
  Description of Artificial Sequence: Synthetic peptide
  Seed: LVRKTRFLP
LIRKTRFLR

SEQ ID NO: 165338 - protein, 9 aa, Artificial Sequence
  Description of Artificial Sequence: Synthetic peptide
  Seed: LVRKTRFLP
LIRKTRFLS

SEQ ID NO: 165339 - protein, 9 aa, Artificial Sequence
  Description of Artificial Sequence: Synthetic peptide
  Seed: LVRKTRFLP
LIRKTRFLT

SEQ ID NO: 165340 - protein, 9 aa, Artificial Sequence
  Description of Artificial Sequence: Synthetic peptide
  Seed: LVRKTRFLP
LIRKTRFLV

SEQ ID NO: 165341 - protein, 9 aa, Artificial Sequence
  Description of Artificial Sequence: Synthetic peptide
  Seed: LVRKTRFLP
LIRKTRFLY

SEQ ID NO: 165342 - protein, 9 aa, Artificial Sequence
  Description of Artificial Sequence: Synthetic peptide
  Seed: LRMKWMMAM
LKMKWMMAA

SEQ ID NO: 165343 - protein, 9 aa, Artificial Sequence
  Description of Artificial Sequence: Synthetic peptide
  Seed: LRMKWMMAM
LKMKWMMAF

SEQ ID NO: 165344 - protein, 9 aa, Artificial Sequence
  Description of Artificial Sequence: Synthetic peptide
  Seed: LRMKWMMAM
LKMKWMMAG

SEQ ID NO: 165345 - protein, 9 aa, Artificial Sequence
  Description of Artificial Sequence: Synthetic peptide
  Seed: LRMKWMMAM
LKMKWMMAH

SEQ ID NO: 165346 - protein, 9 aa, Artificial Sequence
  Description of Artificial Sequence: Synthetic peptide
  Seed: LRMKWMMAM
LKMKWMMAI

SEQ ID NO: 165347 - protein, 9 aa, Artificial Sequence
  Description of Artificial Sequence: Synthetic peptide
  Seed: LRMKWMMAM
LKMKWMMAL

SEQ ID NO: 165348 - protein, 9 aa, Artificial Sequence
  Description of Artificial Sequence: Synthetic peptide
  Seed: LRMKWMMAM
LKMKWMMAM

SEQ ID NO: 165349 - protein, 10 aa, Artificial Sequence
  Description of Artificial Sequence: Synthetic peptide
  Seed: LRMKWMMAMK
LKMKWMMAMK

SEQ ID NO: 165350 - protein, 11 aa, Artificial Sequence
  Description of Artificial Sequence: Synthetic peptide
  Seed: LRMKWMMAMKY
LKMKWMMAMKF

SEQ ID NO: 165351 - protein, 11 aa, Artificial Sequence
  Description of Artificial Sequence: Synthetic peptide
  Seed: LRMKWMMAMKY
LKMKWMMAMKM

SEQ ID NO: 165352 - protein, 11 aa, Artificial Sequence
  Description of Artificial Sequence: Synthetic peptide
  Seed: LRMKWMMAMKY
LKMKWMMAMKY

SEQ ID NO: 165353 - protein, 10 aa, Artificial Sequence
  Description of Artificial Sequence: Synthetic peptide
  Seed: LRMKWMMAMK
LKMKWMMAMR

SEQ ID NO: 165354 - protein, 9 aa, Artificial Sequence
  Description of Artificial Sequence: Synthetic peptide
  Seed: LRMKWMMAM
LKMKWMMAS

SEQ ID NO: 165355 - protein, 9 aa, Artificial Sequence
  Description of Artificial Sequence: Synthetic peptide
  Seed: LRMKWMMAM
LKMKWMMAT

SEQ ID NO: 165356 - protein, 9 aa, Artificial Sequence
  Description of Artificial Sequence: Synthetic peptide
  Seed: LRMKWMMAM
LKMKWMMAV

SEQ ID NO: 165357 - protein, 9 aa, Artificial Sequence
  Description of Artificial Sequence: Synthetic peptide
  Seed: LRMKWMMAM
LKMKWMMAW

SEQ ID NO: 165358 - protein, 9 aa, Artificial Sequence
  Description of Artificial Sequence: Synthetic peptide
  Seed: LRMKWMMAM
LKMKWMMAY

SEQ ID NO: 165359 - protein, 11 aa, Artificial Sequence
  Description of Artificial Sequence: Synthetic peptide
  Seed: LNPMHQLLRHF
LKPMHQLLRHF

SEQ ID NO: 165360 - protein, 11 aa, Artificial Sequence
  Description of Artificial Sequence: Synthetic peptide
  Seed: LNPMHQLLRHF
LKPMHQLLRHY

SEQ ID NO: 165361 - protein, 9 aa, Artificial Sequence
  Description of Artificial Sequence: Synthetic peptide
  Seed: LVRKTRFLP
LKRKTRFLK

SEQ ID NO: 165362 - protein, 10 aa, Artificial Sequence
  Description of Artificial Sequence: Synthetic peptide
  Seed: LVRKTRFLPV
LKRKTRFLPF

SEQ ID NO: 165363 - protein, 10 aa, Artificial Sequence
  Description of Artificial Sequence: Synthetic peptide
  Seed: LVRKTRFLPV
LKRKTRFLPI

SEQ ID NO: 165364 - protein, 10 aa, Artificial Sequence
  Description of Artificial Sequence: Synthetic peptide
  Seed: LVRKTRFLPV
LKRKTRFLPK

SEQ ID NO: 165365 - protein, 10 aa, Artificial Sequence
  Description of Artificial Sequence: Synthetic peptide
  Seed: LVRKTRFLPV
LKRKTRFLPL

SEQ ID NO: 165366 - protein, 10 aa, Artificial Sequence
  Description of Artificial Sequence: Synthetic peptide
  Seed: LVRKTRFLPV
LKRKTRFLPM

SEQ ID NO: 165367 - protein, 10 aa, Artificial Sequence
  Description of Artificial Sequence: Synthetic peptide
  Seed: LVRKTRFLPV
LKRKTRFLPV

SEQ ID NO: 165368 - protein, 9 aa, Artificial Sequence
  Description of Artificial Sequence: Synthetic peptide
  Seed: LTDSQTATK
LLDSQTATK

SEQ ID NO: 165369 - protein, 9 aa, Artificial Sequence
  Description of Artificial Sequence: Synthetic peptide
  Seed: LRMKWMMAM
LLMKWMMAF

SEQ ID NO: 165370 - protein, 9 aa, Artificial Sequence
  Description of Artificial Sequence: Synthetic peptide
  Seed: LRMKWMMAM
LLMKWMMAH

SEQ ID NO: 165371 - protein, 9 aa, Artificial Sequence
  Description of Artificial Sequence: Synthetic peptide
  Seed: LRMKWMMAM
LLMKWMMAI

SEQ ID NO: 165372 - protein, 9 aa, Artificial Sequence
  Description of Artificial Sequence: Synthetic peptide
  Seed: LRMKWMMAM
LLMKWMMAL

SEQ ID NO: 165373 - protein, 9 aa, Artificial Sequence
  Description of Artificial Sequence: Synthetic peptide
  Seed: LRMKWMMAM
LLMKWMMAM

SEQ ID NO: 165374 - protein, 10 aa, Artificial Sequence
  Description of Artificial Sequence: Synthetic peptide
  Seed: LRMKWMMAMK
LLMKWMMAMK

SEQ ID NO: 165375 - protein, 10 aa, Artificial Sequence
  Description of Artificial Sequence: Synthetic peptide
  Seed: LRMKWMMAMK
LLMKWMMAMR

SEQ ID NO: 165376 - protein, 10 aa, Artificial Sequence
  Description of Artificial Sequence: Synthetic peptide
  Seed: LRMKWMMAMK
LLMKWMMAMY

SEQ ID NO: 165377 - protein, 9 aa, Artificial Sequence
  Description of Artificial Sequence: Synthetic peptide
  Seed: LRMKWMMAM
LLMKWMMAY

SEQ ID NO: 165378 - protein, 11 aa, Artificial Sequence
  Description of Artificial Sequence: Synthetic peptide
  Seed: LNPMHQLLRHF
LLPMHQLLRHF

SEQ ID NO: 165379 - protein, 11 aa, Artificial Sequence
  Description of Artificial Sequence: Synthetic peptide
  Seed: LNPMHQLLRHF
LLPMHQLLRHY

SEQ ID NO: 165380 - protein, 9 aa, Artificial Sequence
  Description of Artificial Sequence: Synthetic peptide
  Seed: LVRKTRFLP
LLRKTRFLA

SEQ ID NO: 165381 - protein, 9 aa, Artificial Sequence
  Description of Artificial Sequence: Synthetic peptide
  Seed: LVRKTRFLP
LLRKTRFLG

SEQ ID NO: 165382 - protein, 9 aa, Artificial Sequence
  Description of Artificial Sequence: Synthetic peptide
  Seed: LVRKTRFLP
LLRKTRFLI

SEQ ID NO: 165383 - protein, 9 aa, Artificial Sequence
  Description of Artificial Sequence: Synthetic peptide
  Seed: LVRKTRFLP
LLRKTRFLK

SEQ ID NO: 165384 - protein, 9 aa, Artificial Sequence
  Description of Artificial Sequence: Synthetic peptide
  Seed: LVRKTRFLP
LLRKTRFLL

SEQ ID NO: 165385 - protein, 9 aa, Artificial Sequence
  Description of Artificial Sequence: Synthetic peptide
  Seed: LVRKTRFLP
LLRKTRFLM

SEQ ID NO: 165386 - protein, 9 aa, Artificial Sequence
  Description of Artificial Sequence: Synthetic peptide
  Seed: LVRKTRFLP
LLRKTRFLP

SEQ ID NO: 165387 - protein, 10 aa, Artificial Sequence
  Description of Artificial Sequence: Synthetic peptide
  Seed: LVRKTRFLPV
LLRKTRFLPA

SEQ ID NO: 165388 - protein, 10 aa, Artificial Sequence
  Description of Artificial Sequence: Synthetic peptide
  Seed: LVRKTRFLPV
LLRKTRFLPC

SEQ ID NO: 165389 - protein, 10 aa, Artificial Sequence
  Description of Artificial Sequence: Synthetic peptide
  Seed: LVRKTRFLPV
LLRKTRFLPF

SEQ ID NO: 165390 - protein, 10 aa, Artificial Sequence
  Description of Artificial Sequence: Synthetic peptide
  Seed: LVRKTRFLPV
LLRKTRFLPI

SEQ ID NO: 165391 - protein, 10 aa, Artificial Sequence
  Description of Artificial Sequence: Synthetic peptide
  Seed: LVRKTRFLPV
LLRKTRFLPK

SEQ ID NO: 165392 - protein, 10 aa, Artificial Sequence
  Description of Artificial Sequence: Synthetic peptide
  Seed: LVRKTRFLPV
LLRKTRFLPL

SEQ ID NO: 165393 - protein, 10 aa, Artificial Sequence
  Description of Artificial Sequence: Synthetic peptide
  Seed: LVRKTRFLPV
LLRKTRFLPM

SEQ ID NO: 165394 - protein, 10 aa, Artificial Sequence
  Description of Artificial Sequence: Synthetic peptide
  Seed: LVRKTRFLPV
LLRKTRFLPT

SEQ ID NO: 165395 - protein, 10 aa, Artificial Sequence
  Description of Artificial Sequence: Synthetic peptide
  Seed: LVRKTRFLPV
LLRKTRFLPV

SEQ ID NO: 165396 - protein, 9 aa, Artificial Sequence
  Description of Artificial Sequence: Synthetic peptide
  Seed: LVRKTRFLP
LLRKTRFLR

SEQ ID NO: 165397 - protein, 9 aa, Artificial Sequence
  Description of Artificial Sequence: Synthetic peptide
  Seed: LVRKTRFLP
LLRKTRFLS

SEQ ID NO: 165398 - protein, 9 aa, Artificial Sequence
  Description of Artificial Sequence: Synthetic peptide
  Seed: LVRKTRFLP
LLRKTRFLV

SEQ ID NO: 165399 - protein, 9 aa, Artificial Sequence
  Description of Artificial Sequence: Synthetic peptide
  Seed: LVRKTRFLP
LLRKTRFLY

SEQ ID NO: 165400 - protein, 9 aa, Artificial Sequence
  Description of Artificial Sequence: Synthetic peptide
  Seed: LTDSQTATK
LMDSQTATK

SEQ ID NO: 165401 - protein, 9 aa, Artificial Sequence
  Description of Artificial Sequence: Synthetic peptide
  Seed: LRMKWMMAM
LMMKWMMAA

SEQ ID NO: 165402 - protein, 9 aa, Artificial Sequence
  Description of Artificial Sequence: Synthetic peptide
  Seed: LRMKWMMAM
LMMKWMMAF

SEQ ID NO: 165403 - protein, 9 aa, Artificial Sequence
  Description of Artificial Sequence: Synthetic peptide
  Seed: LRMKWMMAM
LMMKWMMAG

SEQ ID NO: 165404 - protein, 9 aa, Artificial Sequence
  Description of Artificial Sequence: Synthetic peptide
  Seed: LRMKWMMAM
LMMKWMMAH

SEQ ID NO: 165405 - protein, 9 aa, Artificial Sequence
  Description of Artificial Sequence: Synthetic peptide
  Seed: LRMKWMMAM
LMMKWMMAI

SEQ ID NO: 165406 - protein, 9 aa, Artificial Sequence
  Description of Artificial Sequence: Synthetic peptide
  Seed: LRMKWMMAM
LMMKWMMAL

SEQ ID NO: 165407 - protein, 9 aa, Artificial Sequence
  Description of Artificial Sequence: Synthetic peptide
  Seed: LRMKWMMAM
LMMKWMMAM

SEQ ID NO: 165408 - protein, 10 aa, Artificial Sequence
  Description of Artificial Sequence: Synthetic peptide
  Seed: LRMKWMMAMK
LMMKWMMAMH

SEQ ID NO: 165409 - protein, 10 aa, Artificial Sequence
  Description of Artificial Sequence: Synthetic peptide
  Seed: LRMKWMMAMK
LMMKWMMAMK

SEQ ID NO: 165410 - protein, 11 aa, Artificial Sequence
  Description of Artificial Sequence: Synthetic peptide
  Seed: LRMKWMMAMKY
LMMKWMMAMKF

SEQ ID NO: 165411 - protein, 11 aa, Artificial Sequence
  Description of Artificial Sequence: Synthetic peptide
  Seed: LRMKWMMAMKY
LMMKWMMAMKM

SEQ ID NO: 165412 - protein, 11 aa, Artificial Sequence
  Description of Artificial Sequence: Synthetic peptide
  Seed: LRMKWMMAMKY
LMMKWMMAMKY

SEQ ID NO: 165413 - protein, 10 aa, Artificial Sequence
  Description of Artificial Sequence: Synthetic peptide
  Seed: LRMKWMMAMK
LMMKWMMAMR

SEQ ID NO: 165414 - protein, 10 aa, Artificial Sequence
  Description of Artificial Sequence: Synthetic peptide
  Seed: LRMKWMMAMK
LMMKWMMAMY

SEQ ID NO: 165415 - protein, 9 aa, Artificial Sequence
  Description of Artificial Sequence: Synthetic peptide
  Seed: LRMKWMMAM
LMMKWMMAS

SEQ ID NO: 165416 - protein, 9 aa, Artificial Sequence
  Description of Artificial Sequence: Synthetic peptide
  Seed: LRMKWMMAM
LMMKWMMAT

SEQ ID NO: 165417 - protein, 9 aa, Artificial Sequence
  Description of Artificial Sequence: Synthetic peptide
  Seed: LRMKWMMAM
LMMKWMMAV

SEQ ID NO: 165418 - protein, 9 aa, Artificial Sequence
  Description of Artificial Sequence: Synthetic peptide
  Seed: LRMKWMMAM
LMMKWMMAW

SEQ ID NO: 165419 - protein, 9 aa, Artificial Sequence
  Description of Artificial Sequence: Synthetic peptide
  Seed: LRMKWMMAM
LMMKWMMAY

SEQ ID NO: 165420 - protein, 11 aa, Artificial Sequence
  Description of Artificial Sequence: Synthetic peptide
  Seed: LNPMHQLLRHF
LMPMHQLLRHF

SEQ ID NO: 165421 - protein, 11 aa, Artificial Sequence
  Description of Artificial Sequence: Synthetic peptide
  Seed: LNPMHQLLRHF
LMPMHQLLRHY

SEQ ID NO: 165422 - protein, 9 aa, Artificial Sequence
  Description of Artificial Sequence: Synthetic peptide
  Seed: LVRKTRFLP
LMRKTRFLA

SEQ ID NO: 165423 - protein, 9 aa, Artificial Sequence
  Description of Artificial Sequence: Synthetic peptide
  Seed: LVRKTRFLP
LMRKTRFLC

SEQ ID NO: 165424 - protein, 9 aa, Artificial Sequence
  Description of Artificial Sequence: Synthetic peptide
  Seed: LVRKTRFLP
LMRKTRFLE

SEQ ID NO: 165425 - protein, 9 aa, Artificial Sequence
  Description of Artificial Sequence: Synthetic peptide
  Seed: LVRKTRFLP
LMRKTRFLF

SEQ ID NO: 165426 - protein, 9 aa, Artificial Sequence
  Description of Artificial Sequence: Synthetic peptide
  Seed: LVRKTRFLP
LMRKTRFLG

SEQ ID NO: 165427 - protein, 9 aa, Artificial Sequence
  Description of Artificial Sequence: Synthetic peptide
  Seed: LVRKTRFLP
LMRKTRFLH

SEQ ID NO: 165428 - protein, 9 aa, Artificial Sequence
  Description of Artificial Sequence: Synthetic peptide
  Seed: LVRKTRFLP
LMRKTRFLI

SEQ ID NO: 165429 - protein, 9 aa, Artificial Sequence
  Description of Artificial Sequence: Synthetic peptide
  Seed: LVRKTRFLP
LMRKTRFLK

SEQ ID NO: 165430 - protein, 9 aa, Artificial Sequence
  Description of Artificial Sequence: Synthetic peptide
  Seed: LVRKTRFLP
LMRKTRFLL

SEQ ID NO: 165431 - protein, 9 aa, Artificial Sequence
  Description of Artificial Sequence: Synthetic peptide
  Seed: LVRKTRFLP
LMRKTRFLM

SEQ ID NO: 165432 - protein, 9 aa, Artificial Sequence
  Description of Artificial Sequence: Synthetic peptide
  Seed: LVRKTRFLP
LMRKTRFLN

SEQ ID NO: 165433 - protein, 9 aa, Artificial Sequence
  Description of Artificial Sequence: Synthetic peptide
  Seed: LVRKTRFLP
LMRKTRFLP

SEQ ID NO: 165434 - protein, 10 aa, Artificial Sequence
  Description of Artificial Sequence: Synthetic peptide
  Seed: LVRKTRFLPV
LMRKTRFLPA

SEQ ID NO: 165435 - protein, 10 aa, Artificial Sequence
  Description of Artificial Sequence: Synthetic peptide
  Seed: LVRKTRFLPV
LMRKTRFLPC

SEQ ID NO: 165436 - protein, 10 aa, Artificial Sequence
  Description of Artificial Sequence: Synthetic peptide
  Seed: LVRKTRFLPV
LMRKTRFLPF

SEQ ID NO: 165437 - protein, 10 aa, Artificial Sequence
  Description of Artificial Sequence: Synthetic peptide
  Seed: LVRKTRFLPV
LMRKTRFLPG

SEQ ID NO: 165438 - protein, 10 aa, Artificial Sequence
  Description of Artificial Sequence: Synthetic peptide
  Seed: LVRKTRFLPV
LMRKTRFLPI

SEQ ID NO: 165439 - protein, 10 aa, Artificial Sequence
  Description of Artificial Sequence: Synthetic peptide
  Seed: LVRKTRFLPV
LMRKTRFLPK

SEQ ID NO: 165440 - protein, 10 aa, Artificial Sequence
  Description of Artificial Sequence: Synthetic peptide
  Seed: LVRKTRFLPV
LMRKTRFLPL

SEQ ID NO: 165441 - protein, 10 aa, Artificial Sequence
  Description of Artificial Sequence: Synthetic peptide
  Seed: LVRKTRFLPV
LMRKTRFLPM

SEQ ID NO: 165442 - protein, 10 aa, Artificial Sequence
  Description of Artificial Sequence: Synthetic peptide
  Seed: LVRKTRFLPV
LMRKTRFLPP

SEQ ID NO: 165443 - protein, 10 aa, Artificial Sequence
  Description of Artificial Sequence: Synthetic peptide
  Seed: LVRKTRFLPV
LMRKTRFLPR

SEQ ID NO: 165444 - protein, 10 aa, Artificial Sequence
  Description of Artificial Sequence: Synthetic peptide
  Seed: LVRKTRFLPV
LMRKTRFLPS

SEQ ID NO: 165445 - protein, 10 aa, Artificial Sequence
  Description of Artificial Sequence: Synthetic peptide
  Seed: LVRKTRFLPV
LMRKTRFLPT

SEQ ID NO: 165446 - protein, 10 aa, Artificial Sequence
  Description of Artificial Sequence: Synthetic peptide
  Seed: LVRKTRFLPV
LMRKTRFLPV

SEQ ID NO: 165447 - protein, 10 aa, Artificial Sequence
  Description of Artificial Sequence: Synthetic peptide
  Seed: LVRKTRFLPV
LMRKTRFLPW

SEQ ID NO: 165448 - protein, 10 aa, Artificial Sequence
  Description of Artificial Sequence: Synthetic peptide
  Seed: LVRKTRFLPV
LMRKTRFLPY

SEQ ID NO: 165449 - protein, 9 aa, Artificial Sequence
  Description of Artificial Sequence: Synthetic peptide
  Seed: LVRKTRFLP
LMRKTRFLQ

SEQ ID NO: 165450 - protein, 9 aa, Artificial Sequence
  Description of Artificial Sequence: Synthetic peptide
  Seed: LVRKTRFLP
LMRKTRFLR

SEQ ID NO: 165451 - protein, 9 aa, Artificial Sequence
  Description of Artificial Sequence: Synthetic peptide
  Seed: LVRKTRFLP
LMRKTRFLS

SEQ ID NO: 165452 - protein, 9 aa, Artificial Sequence
  Description of Artificial Sequence: Synthetic peptide
  Seed: LVRKTRFLP
LMRKTRFLT

SEQ ID NO: 165453 - protein, 9 aa, Artificial Sequence
  Description of Artificial Sequence: Synthetic peptide
  Seed: LVRKTRFLP
LMRKTRFLV

SEQ ID NO: 165454 - protein, 9 aa, Artificial Sequence
  Description of Artificial Sequence: Synthetic peptide
  Seed: LVRKTRFLP
LMRKTRFLY

SEQ ID NO: 165455 - protein, 9 aa, Artificial Sequence
  Description of Artificial Sequence: Synthetic peptide
  Seed: LRMKWMMAM
LNMKWMMAF

SEQ ID NO: 165456 - protein, 9 aa, Artificial Sequence
  Description of Artificial Sequence: Synthetic peptide
  Seed: LRMKWMMAM
LNMKWMMAH

SEQ ID NO: 165457 - protein, 9 aa, Artificial Sequence
  Description of Artificial Sequence: Synthetic peptide
  Seed: LRMKWMMAM
LNMKWMMAI

SEQ ID NO: 165458 - protein, 9 aa, Artificial Sequence
  Description of Artificial Sequence: Synthetic peptide
  Seed: LRMKWMMAM
LNMKWMMAL

SEQ ID NO: 165459 - protein, 9 aa, Artificial Sequence
  Description of Artificial Sequence: Synthetic peptide
  Seed: LRMKWMMAM
LNMKWMMAM

SEQ ID NO: 165460 - protein, 10 aa, Artificial Sequence
  Description of Artificial Sequence: Synthetic peptide
  Seed: LRMKWMMAMK
LNMKWMMAMK

SEQ ID NO: 165461 - protein, 10 aa, Artificial Sequence
  Description of Artificial Sequence: Synthetic peptide
  Seed: LRMKWMMAMK
LNMKWMMAMR

SEQ ID NO: 165462 - protein, 9 aa, Artificial Sequence
  Description of Artificial Sequence: Synthetic peptide
  Seed: LRMKWMMAM
LNMKWMMAV

SEQ ID NO: 165463 - protein, 9 aa, Artificial Sequence
  Description of Artificial Sequence: Synthetic peptide
  Seed: LRMKWMMAM
LNMKWMMAY

SEQ ID NO: 165464 - protein, 11 aa, Artificial Sequence
  Description of Artificial Sequence: Synthetic peptide
  Seed: LNPMHQLLRHF
LNPMHQLLRHY

SEQ ID NO: 165465 - protein, 9 aa, Artificial Sequence
  Description of Artificial Sequence: Synthetic peptide
  Seed: LVRKTRFLP
LNRKTRFLA

SEQ ID NO: 165466 - protein, 9 aa, Artificial Sequence
  Description of Artificial Sequence: Synthetic peptide
  Seed: LVRKTRFLP
LNRKTRFLI

SEQ ID NO: 165467 - protein, 9 aa, Artificial Sequence
  Description of Artificial Sequence: Synthetic peptide
  Seed: LVRKTRFLP
LNRKTRFLK

SEQ ID NO: 165468 - protein, 9 aa, Artificial Sequence
  Description of Artificial Sequence: Synthetic peptide
  Seed: LVRKTRFLP
LNRKTRFLL

SEQ ID NO: 165469 - protein, 9 aa, Artificial Sequence
  Description of Artificial Sequence: Synthetic peptide
  Seed: LVRKTRFLP
LNRKTRFLM

SEQ ID NO: 165470 - protein, 10 aa, Artificial Sequence
  Description of Artificial Sequence: Synthetic peptide
  Seed: LVRKTRFLPV
LNRKTRFLPA

SEQ ID NO: 165471 - protein, 10 aa, Artificial Sequence
  Description of Artificial Sequence: Synthetic peptide
  Seed: LVRKTRFLPV
LNRKTRFLPF

SEQ ID NO: 165472 - protein, 10 aa, Artificial Sequence
  Description of Artificial Sequence: Synthetic peptide
  Seed: LVRKTRFLPV
LNRKTRFLPI

SEQ ID NO: 165473 - protein, 10 aa, Artificial Sequence
  Description of Artificial Sequence: Synthetic peptide
  Seed: LVRKTRFLPV
LNRKTRFLPK

SEQ ID NO: 165474 - protein, 10 aa, Artificial Sequence
  Description of Artificial Sequence: Synthetic peptide
  Seed: LVRKTRFLPV
LNRKTRFLPL

SEQ ID NO: 165475 - protein, 10 aa, Artificial Sequence
  Description of Artificial Sequence: Synthetic peptide
  Seed: LVRKTRFLPV
LNRKTRFLPM

SEQ ID NO: 165476 - protein, 10 aa, Artificial Sequence
  Description of Artificial Sequence: Synthetic peptide
  Seed: LVRKTRFLPV
LNRKTRFLPV

SEQ ID NO: 165477 - protein, 9 aa, Artificial Sequence
  Description of Artificial Sequence: Synthetic peptide
  Seed: LVRKTRFLP
LNRKTRFLS

SEQ ID NO: 165478 - protein, 9 aa, Artificial Sequence
  Description of Artificial Sequence: Synthetic peptide
  Seed: LVRKTRFLP
LNRKTRFLV

SEQ ID NO: 165479 - protein, 9 aa, Artificial Sequence
  Description of Artificial Sequence: Synthetic peptide
  Seed: LRMKWMMAM
LPMKWMMAA

SEQ ID NO: 165480 - protein, 9 aa, Artificial Sequence
  Description of Artificial Sequence: Synthetic peptide
  Seed: LRMKWMMAM
LPMKWMMAF

SEQ ID NO: 165481 - protein, 9 aa, Artificial Sequence
  Description of Artificial Sequence: Synthetic peptide
  Seed: LRMKWMMAM
LPMKWMMAI

SEQ ID NO: 165482 - protein, 9 aa, Artificial Sequence
  Description of Artificial Sequence: Synthetic peptide
  Seed: LRMKWMMAM
LPMKWMMAL

SEQ ID NO: 165483 - protein, 9 aa, Artificial Sequence
  Description of Artificial Sequence: Synthetic peptide
  Seed: LRMKWMMAM
LPMKWMMAM

SEQ ID NO: 165484 - protein, 10 aa, Artificial Sequence
  Description of Artificial Sequence: Synthetic peptide
  Seed: LRMKWMMAMK
LPMKWMMAMK

SEQ ID NO: 165485 - protein, 10 aa, Artificial Sequence
  Description of Artificial Sequence: Synthetic peptide
  Seed: LRMKWMMAMK
LPMKWMMAMR

SEQ ID NO: 165486 - protein, 9 aa, Artificial Sequence
  Description of Artificial Sequence: Synthetic peptide
  Seed: LRMKWMMAM
LPMKWMMAV

SEQ ID NO: 165487 - protein, 9 aa, Artificial Sequence
  Description of Artificial Sequence: Synthetic peptide
  Seed: LRMKWMMAM
LPMKWMMAY

SEQ ID NO: 165488 - protein, 11 aa, Artificial Sequence
  Description of Artificial Sequence: Synthetic peptide
  Seed: LNPMHQLLRHF
LPPMHQLLRHF

SEQ ID NO: 165489 - protein, 11 aa, Artificial Sequence
  Description of Artificial Sequence: Synthetic peptide
  Seed: LNPMHQLLRHF
LPPMHQLLRHY

SEQ ID NO: 165490 - protein, 10 aa, Artificial Sequence
  Description of Artificial Sequence: Synthetic peptide
  Seed: LVRKTRFLPV
LPRKTRFLPA

SEQ ID NO: 165491 - protein, 10 aa, Artificial Sequence
  Description of Artificial Sequence: Synthetic peptide
  Seed: LVRKTRFLPV
LPRKTRFLPC

SEQ ID NO: 165492 - protein, 10 aa, Artificial Sequence
  Description of Artificial Sequence: Synthetic peptide
  Seed: LVRKTRFLPV
LPRKTRFLPF

SEQ ID NO: 165493 - protein, 10 aa, Artificial Sequence
  Description of Artificial Sequence: Synthetic peptide
  Seed: LVRKTRFLPV
LPRKTRFLPI

SEQ ID NO: 165494 - protein, 10 aa, Artificial Sequence
  Description of Artificial Sequence: Synthetic peptide
  Seed: LVRKTRFLPV
LPRKTRFLPL

SEQ ID NO: 165495 - protein, 10 aa, Artificial Sequence
  Description of Artificial Sequence: Synthetic peptide
  Seed: LVRKTRFLPV
LPRKTRFLPM

SEQ ID NO: 165496 - protein, 10 aa, Artificial Sequence
  Description of Artificial Sequence: Synthetic peptide
  Seed: LVRKTRFLPV
LPRKTRFLPT

SEQ ID NO: 165497 - protein, 10 aa, Artificial Sequence
  Description of Artificial Sequence: Synthetic peptide
  Seed: LVRKTRFLPV
LPRKTRFLPV

SEQ ID NO: 165498 - protein, 10 aa, Artificial Sequence
  Description of Artificial Sequence: Synthetic peptide
  Seed: LVRKTRFLPV
LPRKTRFLPW

SEQ ID NO: 165499 - protein, 9 aa, Artificial Sequence
  Description of Artificial Sequence: Synthetic peptide
  Seed: LRMKWMMAM
LQMKWMMAA

SEQ ID NO: 165500 - protein, 9 aa, Artificial Sequence
  Description of Artificial Sequence: Synthetic peptide
  Seed: LRMKWMMAM
LQMKWMMAC

SEQ ID NO: 165501 - protein, 9 aa, Artificial Sequence
  Description of Artificial Sequence: Synthetic peptide
  Seed: LRMKWMMAM
LQMKWMMAE

SEQ ID NO: 165502 - protein, 9 aa, Artificial Sequence
  Description of Artificial Sequence: Synthetic peptide
  Seed: LRMKWMMAM
LQMKWMMAF

SEQ ID NO: 165503 - protein, 9 aa, Artificial Sequence
  Description of Artificial Sequence: Synthetic peptide
  Seed: LRMKWMMAM
LQMKWMMAG

SEQ ID NO: 165504 - protein, 9 aa, Artificial Sequence
  Description of Artificial Sequence: Synthetic peptide
  Seed: LRMKWMMAM
LQMKWMMAH

SEQ ID NO: 165505 - protein, 9 aa, Artificial Sequence
  Description of Artificial Sequence: Synthetic peptide
  Seed: LRMKWMMAM
LQMKWMMAI

SEQ ID NO: 165506 - protein, 9 aa, Artificial Sequence
  Description of Artificial Sequence: Synthetic peptide
  Seed: LRMKWMMAM
LQMKWMMAK

SEQ ID NO: 165507 - protein, 9 aa, Artificial Sequence
  Description of Artificial Sequence: Synthetic peptide
  Seed: LRMKWMMAM
LQMKWMMAL

SEQ ID NO: 165508 - protein, 9 aa, Artificial Sequence
  Description of Artificial Sequence: Synthetic peptide
  Seed: LRMKWMMAM
LQMKWMMAM

SEQ ID NO: 165509 - protein, 10 aa, Artificial Sequence
  Description of Artificial Sequence: Synthetic peptide
  Seed: LRMKWMMAMK
LQMKWMMAMK

SEQ ID NO: 165510 - protein, 11 aa, Artificial Sequence
  Description of Artificial Sequence: Synthetic peptide
  Seed: LRMKWMMAMKY
LQMKWMMAMKF

SEQ ID NO: 165511 - protein, 11 aa, Artificial Sequence
  Description of Artificial Sequence: Synthetic peptide
  Seed: LRMKWMMAMKY
LQMKWMMAMKI

SEQ ID NO: 165512 - protein, 11 aa, Artificial Sequence
  Description of Artificial Sequence: Synthetic peptide
  Seed: LRMKWMMAMKY
LQMKWMMAMKL

SEQ ID NO: 165513 - protein, 11 aa, Artificial Sequence
  Description of Artificial Sequence: Synthetic peptide
  Seed: LRMKWMMAMKY
LQMKWMMAMKM

SEQ ID NO: 165514 - protein, 11 aa, Artificial Sequence
  Description of Artificial Sequence: Synthetic peptide
  Seed: LRMKWMMAMKY
LQMKWMMAMKY

SEQ ID NO: 165515 - protein, 10 aa, Artificial Sequence
  Description of Artificial Sequence: Synthetic peptide
  Seed: LRMKWMMAMK
LQMKWMMAML

SEQ ID NO: 165516 - protein, 10 aa, Artificial Sequence
  Description of Artificial Sequence: Synthetic peptide
  Seed: LRMKWMMAMK
LQMKWMMAMR

SEQ ID NO: 165517 - protein, 9 aa, Artificial Sequence
  Description of Artificial Sequence: Synthetic peptide
  Seed: LRMKWMMAM
LQMKWMMAN

SEQ ID NO: 165518 - protein, 9 aa, Artificial Sequence
  Description of Artificial Sequence: Synthetic peptide
  Seed: LRMKWMMAM
LQMKWMMAP

SEQ ID NO: 165519 - protein, 9 aa, Artificial Sequence
  Description of Artificial Sequence: Synthetic peptide
  Seed: LRMKWMMAM
LQMKWMMAQ

SEQ ID NO: 165520 - protein, 9 aa, Artificial Sequence
  Description of Artificial Sequence: Synthetic peptide
  Seed: LRMKWMMAM
LQMKWMMAR

SEQ ID NO: 165521 - protein, 9 aa, Artificial Sequence
  Description of Artificial Sequence: Synthetic peptide
  Seed: LRMKWMMAM
LQMKWMMAS

SEQ ID NO: 165522 - protein, 9 aa, Artificial Sequence
  Description of Artificial Sequence: Synthetic peptide
  Seed: LRMKWMMAM
LQMKWMMAT

SEQ ID NO: 165523 - protein, 9 aa, Artificial Sequence
  Description of Artificial Sequence: Synthetic peptide
  Seed: LRMKWMMAM
LQMKWMMAV

SEQ ID NO: 165524 - protein, 9 aa, Artificial Sequence
  Description of Artificial Sequence: Synthetic peptide
  Seed: LRMKWMMAM
LQMKWMMAW

SEQ ID NO: 165525 - protein, 9 aa, Artificial Sequence
  Description of Artificial Sequence: Synthetic peptide
  Seed: LRMKWMMAM
LQMKWMMAY

SEQ ID NO: 165526 - protein, 11 aa, Artificial Sequence
  Description of Artificial Sequence: Synthetic peptide
  Seed: LNPMHQLLRHF
LQPMHQLLRHF

SEQ ID NO: 165527 - protein, 11 aa, Artificial Sequence
  Description of Artificial Sequence: Synthetic peptide
  Seed: LNPMHQLLRHF
LQPMHQLLRHY

SEQ ID NO: 165528 - protein, 9 aa, Artificial Sequence
  Description of Artificial Sequence: Synthetic peptide
  Seed: LVRKTRFLP
LQRKTRFLA

SEQ ID NO: 165529 - protein, 9 aa, Artificial Sequence
  Description of Artificial Sequence: Synthetic peptide
  Seed: LVRKTRFLP
LQRKTRFLG

SEQ ID NO: 165530 - protein, 9 aa, Artificial Sequence
  Description of Artificial Sequence: Synthetic peptide
  Seed: LVRKTRFLP
LQRKTRFLI

SEQ ID NO: 165531 - protein, 9 aa, Artificial Sequence
  Description of Artificial Sequence: Synthetic peptide
  Seed: LVRKTRFLP
LQRKTRFLK

SEQ ID NO: 165532 - protein, 9 aa, Artificial Sequence
  Description of Artificial Sequence: Synthetic peptide
  Seed: LVRKTRFLP
LQRKTRFLL

SEQ ID NO: 165533 - protein, 9 aa, Artificial Sequence
  Description of Artificial Sequence: Synthetic peptide
  Seed: LVRKTRFLP
LQRKTRFLM

SEQ ID NO: 165534 - protein, 9 aa, Artificial Sequence
  Description of Artificial Sequence: Synthetic peptide
  Seed: LVRKTRFLP
LQRKTRFLP

SEQ ID NO: 165535 - protein, 10 aa, Artificial Sequence
  Description of Artificial Sequence: Synthetic peptide
  Seed: LVRKTRFLPV
LQRKTRFLPA

SEQ ID NO: 165536 - protein, 10 aa, Artificial Sequence
  Description of Artificial Sequence: Synthetic peptide
  Seed: LVRKTRFLPV
LQRKTRFLPF

SEQ ID NO: 165537 - protein, 10 aa, Artificial Sequence
  Description of Artificial Sequence: Synthetic peptide
  Seed: LVRKTRFLPV
LQRKTRFLPI

SEQ ID NO: 165538 - protein, 10 aa, Artificial Sequence
  Description of Artificial Sequence: Synthetic peptide
  Seed: LVRKTRFLPV
LQRKTRFLPK

SEQ ID NO: 165539 - protein, 10 aa, Artificial Sequence
  Description of Artificial Sequence: Synthetic peptide
  Seed: LVRKTRFLPV
LQRKTRFLPL

SEQ ID NO: 165540 - protein, 10 aa, Artificial Sequence
  Description of Artificial Sequence: Synthetic peptide
  Seed: LVRKTRFLPV
LQRKTRFLPM

SEQ ID NO: 165541 - protein, 10 aa, Artificial Sequence
  Description of Artificial Sequence: Synthetic peptide
  Seed: LVRKTRFLPV
LQRKTRFLPR

SEQ ID NO: 165542 - protein, 10 aa, Artificial Sequence
  Description of Artificial Sequence: Synthetic peptide
  Seed: LVRKTRFLPV
LQRKTRFLPS

SEQ ID NO: 165543 - protein, 10 aa, Artificial Sequence
  Description of Artificial Sequence: Synthetic peptide
  Seed: LVRKTRFLPV
LQRKTRFLPV

SEQ ID NO: 165544 - protein, 10 aa, Artificial Sequence
  Description of Artificial Sequence: Synthetic peptide
  Seed: LVRKTRFLPV
LQRKTRFLPY

SEQ ID NO: 165545 - protein, 9 aa, Artificial Sequence
  Description of Artificial Sequence: Synthetic peptide
  Seed: LVRKTRFLP
LQRKTRFLR

SEQ ID NO: 165546 - protein, 9 aa, Artificial Sequence
  Description of Artificial Sequence: Synthetic peptide
  Seed: LVRKTRFLP
LQRKTRFLS

SEQ ID NO: 165547 - protein, 9 aa, Artificial Sequence
  Description of Artificial Sequence: Synthetic peptide
  Seed: LVRKTRFLP
LQRKTRFLT

SEQ ID NO: 165548 - protein, 9 aa, Artificial Sequence
  Description of Artificial Sequence: Synthetic peptide
  Seed: LVRKTRFLP
LQRKTRFLV

SEQ ID NO: 165549 - protein, 9 aa, Artificial Sequence
  Description of Artificial Sequence: Synthetic peptide
  Seed: LVRKTRFLP
LQRKTRFLY

SEQ ID NO: 165550 - protein, 9 aa, Artificial Sequence
  Description of Artificial Sequence: Synthetic peptide
  Seed: LRMKWMMAM
LRMKWMMAA

SEQ ID NO: 165551 - protein, 9 aa, Artificial Sequence
  Description of Artificial Sequence: Synthetic peptide
  Seed: LRMKWMMAM
LRMKWMMAC

SEQ ID NO: 165552 - protein, 9 aa, Artificial Sequence
  Description of Artificial Sequence: Synthetic peptide
  Seed: LRMKWMMAM
LRMKWMMAE

SEQ ID NO: 165553 - protein, 9 aa, Artificial Sequence
  Description of Artificial Sequence: Synthetic peptide
  Seed: LRMKWMMAM
LRMKWMMAF

SEQ ID NO: 165554 - protein, 9 aa, Artificial Sequence
  Description of Artificial Sequence: Synthetic peptide
  Seed: LRMKWMMAM
LRMKWMMAG

SEQ ID NO: 165555 - protein, 9 aa, Artificial Sequence
  Description of Artificial Sequence: Synthetic peptide
  Seed: LRMKWMMAM
LRMKWMMAH

SEQ ID NO: 165556 - protein, 9 aa, Artificial Sequence
  Description of Artificial Sequence: Synthetic peptide
  Seed: LRMKWMMAM
LRMKWMMAI

SEQ ID NO: 165557 - protein, 9 aa, Artificial Sequence
  Description of Artificial Sequence: Synthetic peptide
  Seed: LRMKWMMAM
LRMKWMMAK

SEQ ID NO: 165558 - protein, 9 aa, Artificial Sequence
  Description of Artificial Sequence: Synthetic peptide
  Seed: LRMKWMMAM
LRMKWMMAL

SEQ ID NO: 165559 - protein, 10 aa, Artificial Sequence
  Description of Artificial Sequence: Synthetic peptide
  Seed: LRMKWMMAMK
LRMKWMMAMA

SEQ ID NO: 165560 - protein, 10 aa, Artificial Sequence
  Description of Artificial Sequence: Synthetic peptide
  Seed: LRMKWMMAMK
LRMKWMMAMC

SEQ ID NO: 165561 - protein, 10 aa, Artificial Sequence
  Description of Artificial Sequence: Synthetic peptide
  Seed: LRMKWMMAMK
LRMKWMMAMD

SEQ ID NO: 165562 - protein, 10 aa, Artificial Sequence
  Description of Artificial Sequence: Synthetic peptide
  Seed: LRMKWMMAMK
LRMKWMMAME

SEQ ID NO: 165563 - protein, 10 aa, Artificial Sequence
  Description of Artificial Sequence: Synthetic peptide
  Seed: LRMKWMMAMK
LRMKWMMAMF

SEQ ID NO: 165564 - protein, 10 aa, Artificial Sequence
  Description of Artificial Sequence: Synthetic peptide
  Seed: LRMKWMMAMK
LRMKWMMAMG

SEQ ID NO: 165565 - protein, 10 aa, Artificial Sequence
  Description of Artificial Sequence: Synthetic peptide
  Seed: LRMKWMMAMK
LRMKWMMAMH

SEQ ID NO: 165566 - protein, 10 aa, Artificial Sequence
  Description of Artificial Sequence: Synthetic peptide
  Seed: LRMKWMMAMK
LRMKWMMAMI

SEQ ID NO: 165567 - protein, 11 aa, Artificial Sequence
  Description of Artificial Sequence: Synthetic peptide
  Seed: LRMKWMMAMKY
LRMKWMMAMKA

SEQ ID NO: 165568 - protein, 11 aa, Artificial Sequence
  Description of Artificial Sequence: Synthetic peptide
  Seed: LRMKWMMAMKY
LRMKWMMAMKC

SEQ ID NO: 165569 - protein, 11 aa, Artificial Sequence
  Description of Artificial Sequence: Synthetic peptide
  Seed: LRMKWMMAMKY
LRMKWMMAMKF

SEQ ID NO: 165570 - protein, 11 aa, Artificial Sequence
  Description of Artificial Sequence: Synthetic peptide
  Seed: LRMKWMMAMKY
LRMKWMMAMKG

SEQ ID NO: 165571 - protein, 11 aa, Artificial Sequence
  Description of Artificial Sequence: Synthetic peptide
  Seed: LRMKWMMAMKY
LRMKWMMAMKH

SEQ ID NO: 165572 - protein, 11 aa, Artificial Sequence
  Description of Artificial Sequence: Synthetic peptide
  Seed: LRMKWMMAMKY
LRMKWMMAMKI

SEQ ID NO: 165573 - protein, 11 aa, Artificial Sequence
  Description of Artificial Sequence: Synthetic peptide
  Seed: LRMKWMMAMKY
LRMKWMMAMKK

SEQ ID NO: 165574 - protein, 11 aa, Artificial Sequence
  Description of Artificial Sequence: Synthetic peptide
  Seed: LRMKWMMAMKY
LRMKWMMAMKL

SEQ ID NO: 165575 - protein, 11 aa, Artificial Sequence
  Description of Artificial Sequence: Synthetic peptide
  Seed: LRMKWMMAMKY
LRMKWMMAMKM

SEQ ID NO: 165576 - protein, 11 aa, Artificial Sequence
  Description of Artificial Sequence: Synthetic peptide
  Seed: LRMKWMMAMKY
LRMKWMMAMKQ

SEQ ID NO: 165577 - protein, 11 aa, Artificial Sequence
  Description of Artificial Sequence: Synthetic peptide
  Seed: LRMKWMMAMKY
LRMKWMMAMKR

SEQ ID NO: 165578 - protein, 11 aa, Artificial Sequence
  Description of Artificial Sequence: Synthetic peptide
  Seed: LRMKWMMAMKY
LRMKWMMAMKS

SEQ ID NO: 165579 - protein, 11 aa, Artificial Sequence
  Description of Artificial Sequence: Synthetic peptide
  Seed: LRMKWMMAMKY
LRMKWMMAMKT

SEQ ID NO: 165580 - protein, 11 aa, Artificial Sequence
  Description of Artificial Sequence: Synthetic peptide
  Seed: LRMKWMMAMKY
LRMKWMMAMKV

SEQ ID NO: 165581 - protein, 11 aa, Artificial Sequence
  Description of Artificial Sequence: Synthetic peptide
  Seed: LRMKWMMAMKY
LRMKWMMAMKW

SEQ ID NO: 165582 - protein, 10 aa, Artificial Sequence
  Description of Artificial Sequence: Synthetic peptide
  Seed: LRMKWMMAMK
LRMKWMMAML

SEQ ID NO: 165583 - protein, 10 aa, Artificial Sequence
  Description of Artificial Sequence: Synthetic peptide
  Seed: LRMKWMMAMK
LRMKWMMAMM

SEQ ID NO: 165584 - protein, 10 aa, Artificial Sequence
  Description of Artificial Sequence: Synthetic peptide
  Seed: LRMKWMMAMK
LRMKWMMAMN

SEQ ID NO: 165585 - protein, 10 aa, Artificial Sequence
  Description of Artificial Sequence: Synthetic peptide
  Seed: LRMKWMMAMK
LRMKWMMAMP

SEQ ID NO: 165586 - protein, 10 aa, Artificial Sequence
  Description of Artificial Sequence: Synthetic peptide
  Seed: LRMKWMMAMK
LRMKWMMAMQ

SEQ ID NO: 165587 - protein, 10 aa, Artificial Sequence
  Description of Artificial Sequence: Synthetic peptide
  Seed: LRMKWMMAMK
LRMKWMMAMR

SEQ ID NO: 165588 - protein, 10 aa, Artificial Sequence
  Description of Artificial Sequence: Synthetic peptide
  Seed: LRMKWMMAMK
LRMKWMMAMS

SEQ ID NO: 165589 - protein, 10 aa, Artificial Sequence
  Description of Artificial Sequence: Synthetic peptide
  Seed: LRMKWMMAMK
LRMKWMMAMT

SEQ ID NO: 165590 - protein, 10 aa, Artificial Sequence
  Description of Artificial Sequence: Synthetic peptide
  Seed: LRMKWMMAMK
LRMKWMMAMV

SEQ ID NO: 165591 - protein, 10 aa, Artificial Sequence
  Description of Artificial Sequence: Synthetic peptide
  Seed: LRMKWMMAMK
LRMKWMMAMW

SEQ ID NO: 165592 - protein, 10 aa, Artificial Sequence
  Description of Artificial Sequence: Synthetic peptide
  Seed: LRMKWMMAMK
LRMKWMMAMY

SEQ ID NO: 165593 - protein, 9 aa, Artificial Sequence
  Description of Artificial Sequence: Synthetic peptide
  Seed: LRMKWMMAM
LRMKWMMAN

SEQ ID NO: 165594 - protein, 9 aa, Artificial Sequence
  Description of Artificial Sequence: Synthetic peptide
  Seed: LRMKWMMAM
LRMKWMMAP

SEQ ID NO: 165595 - protein, 9 aa, Artificial Sequence
  Description of Artificial Sequence: Synthetic peptide
  Seed: LRMKWMMAM
LRMKWMMAQ

SEQ ID NO: 165596 - protein, 9 aa, Artificial Sequence
  Description of Artificial Sequence: Synthetic peptide
  Seed: LRMKWMMAM
LRMKWMMAR

SEQ ID NO: 165597 - protein, 9 aa, Artificial Sequence
  Description of Artificial Sequence: Synthetic peptide
  Seed: LRMKWMMAM
LRMKWMMAS

SEQ ID NO: 165598 - protein, 9 aa, Artificial Sequence
  Description of Artificial Sequence: Synthetic peptide
  Seed: LRMKWMMAM
LRMKWMMAT

SEQ ID NO: 165599 - protein, 9 aa, Artificial Sequence
  Description of Artificial Sequence: Synthetic peptide
  Seed: LRMKWMMAM
LRMKWMMAV

SEQ ID NO: 165600 - protein, 9 aa, Artificial Sequence
  Description of Artificial Sequence: Synthetic peptide
  Seed: LRMKWMMAM
LRMKWMMAW

SEQ ID NO: 165601 - protein, 9 aa, Artificial Sequence
  Description of Artificial Sequence: Synthetic peptide
  Seed: LRMKWMMAM
LRMKWMMAY

SEQ ID NO: 165602 - protein, 11 aa, Artificial Sequence
  Description of Artificial Sequence: Synthetic peptide
  Seed: LNPMHQLLRHF
LRPMHQLLRHF

SEQ ID NO: 165603 - protein, 11 aa, Artificial Sequence
  Description of Artificial Sequence: Synthetic peptide
  Seed: LNPMHQLLRHF
LRPMHQLLRHY

SEQ ID NO: 165604 - protein, 9 aa, Artificial Sequence
  Description of Artificial Sequence: Synthetic peptide
  Seed: LVRKTRFLP
LRRKTRFLK

SEQ ID NO: 165605 - protein, 10 aa, Artificial Sequence
  Description of Artificial Sequence: Synthetic peptide
  Seed: LVRKTRFLPV
LRRKTRFLPF

SEQ ID NO: 165606 - protein, 10 aa, Artificial Sequence
  Description of Artificial Sequence: Synthetic peptide
  Seed: LVRKTRFLPV
LRRKTRFLPI

SEQ ID NO: 165607 - protein, 10 aa, Artificial Sequence
  Description of Artificial Sequence: Synthetic peptide
  Seed: LVRKTRFLPV
LRRKTRFLPK

SEQ ID NO: 165608 - protein, 10 aa, Artificial Sequence
  Description of Artificial Sequence: Synthetic peptide
  Seed: LVRKTRFLPV
LRRKTRFLPL

SEQ ID NO: 165609 - protein, 10 aa, Artificial Sequence
  Description of Artificial Sequence: Synthetic peptide
  Seed: LVRKTRFLPV
LRRKTRFLPM

SEQ ID NO: 165610 - protein, 10 aa, Artificial Sequence
  Description of Artificial Sequence: Synthetic peptide
  Seed: LVRKTRFLPV
LRRKTRFLPV

SEQ ID NO: 165611 - protein, 9 aa, Artificial Sequence
  Description of Artificial Sequence: Synthetic peptide
  Seed: LTDSQTATK
LSDSQTATK

SEQ ID NO: 165612 - protein, 9 aa, Artificial Sequence
  Description of Artificial Sequence: Synthetic peptide
  Seed: LTDSQTATK
LSDSQTATR

SEQ ID NO: 165613 - protein, 9 aa, Artificial Sequence
  Description of Artificial Sequence: Synthetic peptide
  Seed: LRMKWMMAM
LSMKWMMAA

SEQ ID NO: 165614 - protein, 9 aa, Artificial Sequence
  Description of Artificial Sequence: Synthetic peptide
  Seed: LRMKWMMAM
LSMKWMMAF

SEQ ID NO: 165615 - protein, 9 aa, Artificial Sequence
  Description of Artificial Sequence: Synthetic peptide
  Seed: LRMKWMMAM
LSMKWMMAH

SEQ ID NO: 165616 - protein, 9 aa, Artificial Sequence
  Description of Artificial Sequence: Synthetic peptide
  Seed: LRMKWMMAM
LSMKWMMAI

SEQ ID NO: 165617 - protein, 9 aa, Artificial Sequence
  Description of Artificial Sequence: Synthetic peptide
  Seed: LRMKWMMAM
LSMKWMMAL

SEQ ID NO: 165618 - protein, 9 aa, Artificial Sequence
  Description of Artificial Sequence: Synthetic peptide
  Seed: LRMKWMMAM
LSMKWMMAM

SEQ ID NO: 165619 - protein, 10 aa, Artificial Sequence
  Description of Artificial Sequence: Synthetic peptide
  Seed: LRMKWMMAMK
LSMKWMMAMA

SEQ ID NO: 165620 - protein, 10 aa, Artificial Sequence
  Description of Artificial Sequence: Synthetic peptide
  Seed: LRMKWMMAMK
LSMKWMMAMK

SEQ ID NO: 165621 - protein, 11 aa, Artificial Sequence
  Description of Artificial Sequence: Synthetic peptide
  Seed: LRMKWMMAMKY
LSMKWMMAMKF

SEQ ID NO: 165622 - protein, 11 aa, Artificial Sequence
  Description of Artificial Sequence: Synthetic peptide
  Seed: LRMKWMMAMKY
LSMKWMMAMKY

SEQ ID NO: 165623 - protein, 10 aa, Artificial Sequence
  Description of Artificial Sequence: Synthetic peptide
  Seed: LRMKWMMAMK
LSMKWMMAMR

SEQ ID NO: 165624 - protein, 10 aa, Artificial Sequence
  Description of Artificial Sequence: Synthetic peptide
  Seed: LRMKWMMAMK
LSMKWMMAMY

SEQ ID NO: 165625 - protein, 9 aa, Artificial Sequence
  Description of Artificial Sequence: Synthetic peptide
  Seed: LRMKWMMAM
LSMKWMMAV

SEQ ID NO: 165626 - protein, 9 aa, Artificial Sequence
  Description of Artificial Sequence: Synthetic peptide
  Seed: LRMKWMMAM
LSMKWMMAW

SEQ ID NO: 165627 - protein, 9 aa, Artificial Sequence
  Description of Artificial Sequence: Synthetic peptide
  Seed: LRMKWMMAM
LSMKWMMAY

SEQ ID NO: 165628 - protein, 11 aa, Artificial Sequence
  Description of Artificial Sequence: Synthetic peptide
  Seed: LNPMHQLLRHF
LSPMHQLLRHF

SEQ ID NO: 165629 - protein, 11 aa, Artificial Sequence
  Description of Artificial Sequence: Synthetic peptide
  Seed: LNPMHQLLRHF
LSPMHQLLRHY

SEQ ID NO: 165630 - protein, 9 aa, Artificial Sequence
  Description of Artificial Sequence: Synthetic peptide
  Seed: LVRKTRFLP
LSRKTRFLA

SEQ ID NO: 165631 - protein, 9 aa, Artificial Sequence
  Description of Artificial Sequence: Synthetic peptide
  Seed: LVRKTRFLP
LSRKTRFLC

SEQ ID NO: 165632 - protein, 9 aa, Artificial Sequence
  Description of Artificial Sequence: Synthetic peptide
  Seed: LVRKTRFLP
LSRKTRFLE

SEQ ID NO: 165633 - protein, 9 aa, Artificial Sequence
  Description of Artificial Sequence: Synthetic peptide
  Seed: LVRKTRFLP
LSRKTRFLF

SEQ ID NO: 165634 - protein, 9 aa, Artificial Sequence
  Description of Artificial Sequence: Synthetic peptide
  Seed: LVRKTRFLP
LSRKTRFLG

SEQ ID NO: 165635 - protein, 9 aa, Artificial Sequence
  Description of Artificial Sequence: Synthetic peptide
  Seed: LVRKTRFLP
LSRKTRFLH

SEQ ID NO: 165636 - protein, 9 aa, Artificial Sequence
  Description of Artificial Sequence: Synthetic peptide
  Seed: LVRKTRFLP
LSRKTRFLI

SEQ ID NO: 165637 - protein, 9 aa, Artificial Sequence
  Description of Artificial Sequence: Synthetic peptide
  Seed: LVRKTRFLP
LSRKTRFLK

SEQ ID NO: 165638 - protein, 9 aa, Artificial Sequence
  Description of Artificial Sequence: Synthetic peptide
  Seed: LVRKTRFLP
LSRKTRFLL

SEQ ID NO: 165639 - protein, 9 aa, Artificial Sequence
  Description of Artificial Sequence: Synthetic peptide
  Seed: LVRKTRFLP
LSRKTRFLM

SEQ ID NO: 165640 - protein, 9 aa, Artificial Sequence
  Description of Artificial Sequence: Synthetic peptide
  Seed: LVRKTRFLP
LSRKTRFLN

SEQ ID NO: 165641 - protein, 9 aa, Artificial Sequence
  Description of Artificial Sequence: Synthetic peptide
  Seed: LVRKTRFLP
LSRKTRFLP

SEQ ID NO: 165642 - protein, 10 aa, Artificial Sequence
  Description of Artificial Sequence: Synthetic peptide
  Seed: LVRKTRFLPV
LSRKTRFLPA

SEQ ID NO: 165643 - protein, 10 aa, Artificial Sequence
  Description of Artificial Sequence: Synthetic peptide
  Seed: LVRKTRFLPV
LSRKTRFLPC

SEQ ID NO: 165644 - protein, 10 aa, Artificial Sequence
  Description of Artificial Sequence: Synthetic peptide
  Seed: LVRKTRFLPV
LSRKTRFLPE

SEQ ID NO: 165645 - protein, 10 aa, Artificial Sequence
  Description of Artificial Sequence: Synthetic peptide
  Seed: LVRKTRFLPV
LSRKTRFLPF

SEQ ID NO: 165646 - protein, 10 aa, Artificial Sequence
  Description of Artificial Sequence: Synthetic peptide
  Seed: LVRKTRFLPV
LSRKTRFLPG

SEQ ID NO: 165647 - protein, 10 aa, Artificial Sequence
  Description of Artificial Sequence: Synthetic peptide
  Seed: LVRKTRFLPV
LSRKTRFLPH

SEQ ID NO: 165648 - protein, 10 aa, Artificial Sequence
  Description of Artificial Sequence: Synthetic peptide
  Seed: LVRKTRFLPV
LSRKTRFLPI

SEQ ID NO: 165649 - protein, 10 aa, Artificial Sequence
  Description of Artificial Sequence: Synthetic peptide
  Seed: LVRKTRFLPV
LSRKTRFLPK

SEQ ID NO: 165650 - protein, 10 aa, Artificial Sequence
  Description of Artificial Sequence: Synthetic peptide
  Seed: LVRKTRFLPV
LSRKTRFLPL

SEQ ID NO: 165651 - protein, 10 aa, Artificial Sequence
  Description of Artificial Sequence: Synthetic peptide
  Seed: LVRKTRFLPV
LSRKTRFLPM

SEQ ID NO: 165652 - protein, 10 aa, Artificial Sequence
  Description of Artificial Sequence: Synthetic peptide
  Seed: LVRKTRFLPV
LSRKTRFLPN

SEQ ID NO: 165653 - protein, 10 aa, Artificial Sequence
  Description of Artificial Sequence: Synthetic peptide
  Seed: LVRKTRFLPV
LSRKTRFLPP

SEQ ID NO: 165654 - protein, 10 aa, Artificial Sequence
  Description of Artificial Sequence: Synthetic peptide
  Seed: LVRKTRFLPV
LSRKTRFLPQ

SEQ ID NO: 165655 - protein, 10 aa, Artificial Sequence
  Description of Artificial Sequence: Synthetic peptide
  Seed: LVRKTRFLPV
LSRKTRFLPR

SEQ ID NO: 165656 - protein, 10 aa, Artificial Sequence
  Description of Artificial Sequence: Synthetic peptide
  Seed: LVRKTRFLPV
LSRKTRFLPS

SEQ ID NO: 165657 - protein, 10 aa, Artificial Sequence
  Description of Artificial Sequence: Synthetic peptide
  Seed: LVRKTRFLPV
LSRKTRFLPT

SEQ ID NO: 165658 - protein, 10 aa, Artificial Sequence
  Description of Artificial Sequence: Synthetic peptide
  Seed: LVRKTRFLPV
LSRKTRFLPV

SEQ ID NO: 165659 - protein, 10 aa, Artificial Sequence
  Description of Artificial Sequence: Synthetic peptide
  Seed: LVRKTRFLPV
LSRKTRFLPY

SEQ ID NO: 165660 - protein, 9 aa, Artificial Sequence
  Description of Artificial Sequence: Synthetic peptide
  Seed: LVRKTRFLP
LSRKTRFLQ

SEQ ID NO: 165661 - protein, 9 aa, Artificial Sequence
  Description of Artificial Sequence: Synthetic peptide
  Seed: LVRKTRFLP
LSRKTRFLR

SEQ ID NO: 165662 - protein, 9 aa, Artificial Sequence
  Description of Artificial Sequence: Synthetic peptide
  Seed: LVRKTRFLP
LSRKTRFLS

SEQ ID NO: 165663 - protein, 9 aa, Artificial Sequence
  Description of Artificial Sequence: Synthetic peptide
  Seed: LVRKTRFLP
LSRKTRFLT

SEQ ID NO: 165664 - protein, 9 aa, Artificial Sequence
  Description of Artificial Sequence: Synthetic peptide
  Seed: LVRKTRFLP
LSRKTRFLV

SEQ ID NO: 165665 - protein, 9 aa, Artificial Sequence
  Description of Artificial Sequence: Synthetic peptide
  Seed: LVRKTRFLP
LSRKTRFLY

SEQ ID NO: 165666 - protein, 9 aa, Artificial Sequence
  Description of Artificial Sequence: Synthetic peptide
  Seed: LTDSQTATK
LTDSQTATR

SEQ ID NO: 165667 - protein, 9 aa, Artificial Sequence
  Description of Artificial Sequence: Synthetic peptide
  Seed: LRMKWMMAM
LTMKWMMAA

SEQ ID NO: 165668 - protein, 9 aa, Artificial Sequence
  Description of Artificial Sequence: Synthetic peptide
  Seed: LRMKWMMAM
LTMKWMMAF

SEQ ID NO: 165669 - protein, 9 aa, Artificial Sequence
  Description of Artificial Sequence: Synthetic peptide
  Seed: LRMKWMMAM
LTMKWMMAH

SEQ ID NO: 165670 - protein, 9 aa, Artificial Sequence
  Description of Artificial Sequence: Synthetic peptide
  Seed: LRMKWMMAM
LTMKWMMAI

SEQ ID NO: 165671 - protein, 9 aa, Artificial Sequence
  Description of Artificial Sequence: Synthetic peptide
  Seed: LRMKWMMAM
LTMKWMMAL

SEQ ID NO: 165672 - protein, 9 aa, Artificial Sequence
  Description of Artificial Sequence: Synthetic peptide
  Seed: LRMKWMMAM
LTMKWMMAM

SEQ ID NO: 165673 - protein, 10 aa, Artificial Sequence
  Description of Artificial Sequence: Synthetic peptide
  Seed: LRMKWMMAMK
LTMKWMMAMH

SEQ ID NO: 165674 - protein, 10 aa, Artificial Sequence
  Description of Artificial Sequence: Synthetic peptide
  Seed: LRMKWMMAMK
LTMKWMMAMK

SEQ ID NO: 165675 - protein, 11 aa, Artificial Sequence
  Description of Artificial Sequence: Synthetic peptide
  Seed: LRMKWMMAMKY
LTMKWMMAMKY

SEQ ID NO: 165676 - protein, 10 aa, Artificial Sequence
  Description of Artificial Sequence: Synthetic peptide
  Seed: LRMKWMMAMK
LTMKWMMAMR

SEQ ID NO: 165677 - protein, 10 aa, Artificial Sequence
  Description of Artificial Sequence: Synthetic peptide
  Seed: LRMKWMMAMK
LTMKWMMAMY

SEQ ID NO: 165678 - protein, 9 aa, Artificial Sequence
  Description of Artificial Sequence: Synthetic peptide
  Seed: LRMKWMMAM
LTMKWMMAV

SEQ ID NO: 165679 - protein, 9 aa, Artificial Sequence
  Description of Artificial Sequence: Synthetic peptide
  Seed: LRMKWMMAM
LTMKWMMAY

SEQ ID NO: 165680 - protein, 11 aa, Artificial Sequence
  Description of Artificial Sequence: Synthetic peptide
  Seed: LNPMHQLLRHF
LTPMHQLLRHF

SEQ ID NO: 165681 - protein, 11 aa, Artificial Sequence
  Description of Artificial Sequence: Synthetic peptide
  Seed: LNPMHQLLRHF
LTPMHQLLRHY

SEQ ID NO: 165682 - protein, 9 aa, Artificial Sequence
  Description of Artificial Sequence: Synthetic peptide
  Seed: LVRKTRFLP
LTRKTRFLA

SEQ ID NO: 165683 - protein, 9 aa, Artificial Sequence
  Description of Artificial Sequence: Synthetic peptide
  Seed: LVRKTRFLP
LTRKTRFLC

SEQ ID NO: 165684 - protein, 9 aa, Artificial Sequence
  Description of Artificial Sequence: Synthetic peptide
  Seed: LVRKTRFLP
LTRKTRFLD

SEQ ID NO: 165685 - protein, 9 aa, Artificial Sequence
  Description of Artificial Sequence: Synthetic peptide
  Seed: LVRKTRFLP
LTRKTRFLE

SEQ ID NO: 165686 - protein, 9 aa, Artificial Sequence
  Description of Artificial Sequence: Synthetic peptide
  Seed: LVRKTRFLP
LTRKTRFLF

SEQ ID NO: 165687 - protein, 9 aa, Artificial Sequence
  Description of Artificial Sequence: Synthetic peptide
  Seed: LVRKTRFLP
LTRKTRFLG

SEQ ID NO: 165688 - protein, 9 aa, Artificial Sequence
  Description of Artificial Sequence: Synthetic peptide
  Seed: LVRKTRFLP
LTRKTRFLH

SEQ ID NO: 165689 - protein, 9 aa, Artificial Sequence
  Description of Artificial Sequence: Synthetic peptide
  Seed: LVRKTRFLP
LTRKTRFLI

SEQ ID NO: 165690 - protein, 9 aa, Artificial Sequence
  Description of Artificial Sequence: Synthetic peptide
  Seed: LVRKTRFLP
LTRKTRFLK

SEQ ID NO: 165691 - protein, 9 aa, Artificial Sequence
  Description of Artificial Sequence: Synthetic peptide
  Seed: LVRKTRFLP
LTRKTRFLL

SEQ ID NO: 165692 - protein, 9 aa, Artificial Sequence
  Description of Artificial Sequence: Synthetic peptide
  Seed: LVRKTRFLP
LTRKTRFLM

SEQ ID NO: 165693 - protein, 9 aa, Artificial Sequence
  Description of Artificial Sequence: Synthetic peptide
  Seed: LVRKTRFLP
LTRKTRFLN

SEQ ID NO: 165694 - protein, 9 aa, Artificial Sequence
  Description of Artificial Sequence: Synthetic peptide
  Seed: LVRKTRFLP
LTRKTRFLP

SEQ ID NO: 165695 - protein, 10 aa, Artificial Sequence
  Description of Artificial Sequence: Synthetic peptide
  Seed: LVRKTRFLPV
LTRKTRFLPA

SEQ ID NO: 165696 - protein, 10 aa, Artificial Sequence
  Description of Artificial Sequence: Synthetic peptide
  Seed: LVRKTRFLPV
LTRKTRFLPC

SEQ ID NO: 165697 - protein, 10 aa, Artificial Sequence
  Description of Artificial Sequence: Synthetic peptide
  Seed: LVRKTRFLPV
LTRKTRFLPE

SEQ ID NO: 165698 - protein, 10 aa, Artificial Sequence
  Description of Artificial Sequence: Synthetic peptide
  Seed: LVRKTRFLPV
LTRKTRFLPF

SEQ ID NO: 165699 - protein, 10 aa, Artificial Sequence
  Description of Artificial Sequence: Synthetic peptide
  Seed: LVRKTRFLPV
LTRKTRFLPG

SEQ ID NO: 165700 - protein, 10 aa, Artificial Sequence
  Description of Artificial Sequence: Synthetic peptide
  Seed: LVRKTRFLPV
LTRKTRFLPH

SEQ ID NO: 165701 - protein, 10 aa, Artificial Sequence
  Description of Artificial Sequence: Synthetic peptide
  Seed: LVRKTRFLPV
LTRKTRFLPI

SEQ ID NO: 165702 - protein, 10 aa, Artificial Sequence
  Description of Artificial Sequence: Synthetic peptide
  Seed: LVRKTRFLPV
LTRKTRFLPK

SEQ ID NO: 165703 - protein, 10 aa, Artificial Sequence
  Description of Artificial Sequence: Synthetic peptide
  Seed: LVRKTRFLPV
LTRKTRFLPL

SEQ ID NO: 165704 - protein, 10 aa, Artificial Sequence
  Description of Artificial Sequence: Synthetic peptide
  Seed: LVRKTRFLPV
LTRKTRFLPM

SEQ ID NO: 165705 - protein, 10 aa, Artificial Sequence
  Description of Artificial Sequence: Synthetic peptide
  Seed: LVRKTRFLPV
LTRKTRFLPN

SEQ ID NO: 165706 - protein, 10 aa, Artificial Sequence
  Description of Artificial Sequence: Synthetic peptide
  Seed: LVRKTRFLPV
LTRKTRFLPP

SEQ ID NO: 165707 - protein, 10 aa, Artificial Sequence
  Description of Artificial Sequence: Synthetic peptide
  Seed: LVRKTRFLPV
LTRKTRFLPQ

SEQ ID NO: 165708 - protein, 10 aa, Artificial Sequence
  Description of Artificial Sequence: Synthetic peptide
  Seed: LVRKTRFLPV
LTRKTRFLPR

SEQ ID NO: 165709 - protein, 10 aa, Artificial Sequence
  Description of Artificial Sequence: Synthetic peptide
  Seed: LVRKTRFLPV
LTRKTRFLPS

SEQ ID NO: 165710 - protein, 10 aa, Artificial Sequence
  Description of Artificial Sequence: Synthetic peptide
  Seed: LVRKTRFLPV
LTRKTRFLPT

SEQ ID NO: 165711 - protein, 10 aa, Artificial Sequence
  Description of Artificial Sequence: Synthetic peptide
  Seed: LVRKTRFLPV
LTRKTRFLPV

SEQ ID NO: 165712 - protein, 10 aa, Artificial Sequence
  Description of Artificial Sequence: Synthetic peptide
  Seed: LVRKTRFLPV
LTRKTRFLPY

SEQ ID NO: 165713 - protein, 9 aa, Artificial Sequence
  Description of Artificial Sequence: Synthetic peptide
  Seed: LVRKTRFLP
LTRKTRFLQ

SEQ ID NO: 165714 - protein, 9 aa, Artificial Sequence
  Description of Artificial Sequence: Synthetic peptide
  Seed: LVRKTRFLP
LTRKTRFLR

SEQ ID NO: 165715 - protein, 9 aa, Artificial Sequence
  Description of Artificial Sequence: Synthetic peptide
  Seed: LVRKTRFLP
LTRKTRFLS

SEQ ID NO: 165716 - protein, 9 aa, Artificial Sequence
  Description of Artificial Sequence: Synthetic peptide
  Seed: LVRKTRFLP
LTRKTRFLT

SEQ ID NO: 165717 - protein, 9 aa, Artificial Sequence
  Description of Artificial Sequence: Synthetic peptide
  Seed: LVRKTRFLP
LTRKTRFLV

SEQ ID NO: 165718 - protein, 9 aa, Artificial Sequence
  Description of Artificial Sequence: Synthetic peptide
  Seed: LVRKTRFLP
LTRKTRFLY

SEQ ID NO: 165719 - protein, 9 aa, Artificial Sequence
  Description of Artificial Sequence: Synthetic peptide
  Seed: LTDSQTATK
LVDSQTATK

SEQ ID NO: 165720 - protein, 10 aa, Artificial Sequence
  Description of Artificial Sequence: Synthetic peptide
  Seed: LTDSQTATKR
LVDSQTATKR

SEQ ID NO: 165721 - protein, 9 aa, Artificial Sequence
  Description of Artificial Sequence: Synthetic peptide
  Seed: LTDSQTATK
LVDSQTATR

SEQ ID NO: 165722 - protein, 9 aa, Artificial Sequence
  Description of Artificial Sequence: Synthetic peptide
  Seed: LRMKWMMAM
LVMKWMMAF

SEQ ID NO: 165723 - protein, 9 aa, Artificial Sequence
  Description of Artificial Sequence: Synthetic peptide
  Seed: LRMKWMMAM
LVMKWMMAH

SEQ ID NO: 165724 - protein, 9 aa, Artificial Sequence
  Description of Artificial Sequence: Synthetic peptide
  Seed: LRMKWMMAM
LVMKWMMAI

SEQ ID NO: 165725 - protein, 9 aa, Artificial Sequence
  Description of Artificial Sequence: Synthetic peptide
  Seed: LRMKWMMAM
LVMKWMMAL

SEQ ID NO: 165726 - protein, 9 aa, Artificial Sequence
  Description of Artificial Sequence: Synthetic peptide
  Seed: LRMKWMMAM
LVMKWMMAM

SEQ ID NO: 165727 - protein, 10 aa, Artificial Sequence
  Description of Artificial Sequence: Synthetic peptide
  Seed: LRMKWMMAMK
LVMKWMMAMK

SEQ ID NO: 165728 - protein, 10 aa, Artificial Sequence
  Description of Artificial Sequence: Synthetic peptide
  Seed: LRMKWMMAMK
LVMKWMMAMR

SEQ ID NO: 165729 - protein, 10 aa, Artificial Sequence
  Description of Artificial Sequence: Synthetic peptide
  Seed: LRMKWMMAMK
LVMKWMMAMY

SEQ ID NO: 165730 - protein, 9 aa, Artificial Sequence
  Description of Artificial Sequence: Synthetic peptide
  Seed: LRMKWMMAM
LVMKWMMAV

SEQ ID NO: 165731 - protein, 9 aa, Artificial Sequence
  Description of Artificial Sequence: Synthetic peptide
  Seed: LRMKWMMAM
LVMKWMMAY

SEQ ID NO: 165732 - protein, 11 aa, Artificial Sequence
  Description of Artificial Sequence: Synthetic peptide
  Seed: LNPMHQLLRHF
LVPMHQLLRHF

SEQ ID NO: 165733 - protein, 11 aa, Artificial Sequence
  Description of Artificial Sequence: Synthetic peptide
  Seed: LNPMHQLLRHF
LVPMHQLLRHY

SEQ ID NO: 165734 - protein, 9 aa, Artificial Sequence
  Description of Artificial Sequence: Synthetic peptide
  Seed: LVRKTRFLP
LVRKTRFLA

SEQ ID NO: 165735 - protein, 9 aa, Artificial Sequence
  Description of Artificial Sequence: Synthetic peptide
  Seed: LVRKTRFLP
LVRKTRFLC

SEQ ID NO: 165736 - protein, 9 aa, Artificial Sequence
  Description of Artificial Sequence: Synthetic peptide
  Seed: LVRKTRFLP
LVRKTRFLE

SEQ ID NO: 165737 - protein, 9 aa, Artificial Sequence
  Description of Artificial Sequence: Synthetic peptide
  Seed: LVRKTRFLP
LVRKTRFLF

SEQ ID NO: 165738 - protein, 9 aa, Artificial Sequence
  Description of Artificial Sequence: Synthetic peptide
  Seed: LVRKTRFLP
LVRKTRFLG

SEQ ID NO: 165739 - protein, 9 aa, Artificial Sequence
  Description of Artificial Sequence: Synthetic peptide
  Seed: LVRKTRFLP
LVRKTRFLH

SEQ ID NO: 165740 - protein, 9 aa, Artificial Sequence
  Description of Artificial Sequence: Synthetic peptide
  Seed: LVRKTRFLP
LVRKTRFLI

SEQ ID NO: 165741 - protein, 9 aa, Artificial Sequence
  Description of Artificial Sequence: Synthetic peptide
  Seed: LVRKTRFLP
LVRKTRFLK

SEQ ID NO: 165742 - protein, 9 aa, Artificial Sequence
  Description of Artificial Sequence: Synthetic peptide
  Seed: LVRKTRFLP
LVRKTRFLL

SEQ ID NO: 165743 - protein, 9 aa, Artificial Sequence
  Description of Artificial Sequence: Synthetic peptide
  Seed: LVRKTRFLP
LVRKTRFLM

SEQ ID NO: 165744 - protein, 9 aa, Artificial Sequence
  Description of Artificial Sequence: Synthetic peptide
  Seed: LVRKTRFLP
LVRKTRFLN

SEQ ID NO: 165745 - protein, 10 aa, Artificial Sequence
  Description of Artificial Sequence: Synthetic peptide
  Seed: LVRKTRFLPV
LVRKTRFLPA

SEQ ID NO: 165746 - protein, 10 aa, Artificial Sequence
  Description of Artificial Sequence: Synthetic peptide
  Seed: LVRKTRFLPV
LVRKTRFLPF

SEQ ID NO: 165747 - protein, 10 aa, Artificial Sequence
  Description of Artificial Sequence: Synthetic peptide
  Seed: LVRKTRFLPV
LVRKTRFLPG

SEQ ID NO: 165748 - protein, 10 aa, Artificial Sequence
  Description of Artificial Sequence: Synthetic peptide
  Seed: LVRKTRFLPV
LVRKTRFLPI

SEQ ID NO: 165749 - protein, 10 aa, Artificial Sequence
  Description of Artificial Sequence: Synthetic peptide
  Seed: LVRKTRFLPV
LVRKTRFLPK

SEQ ID NO: 165750 - protein, 10 aa, Artificial Sequence
  Description of Artificial Sequence: Synthetic peptide
  Seed: LVRKTRFLPV
LVRKTRFLPL

SEQ ID NO: 165751 - protein, 10 aa, Artificial Sequence
  Description of Artificial Sequence: Synthetic peptide
  Seed: LVRKTRFLPV
LVRKTRFLPM

SEQ ID NO: 165752 - protein, 10 aa, Artificial Sequence
  Description of Artificial Sequence: Synthetic peptide
  Seed: LVRKTRFLPV
LVRKTRFLPP

SEQ ID NO: 165753 - protein, 10 aa, Artificial Sequence
  Description of Artificial Sequence: Synthetic peptide
  Seed: LVRKTRFLPV
LVRKTRFLPR

SEQ ID NO: 165754 - protein, 10 aa, Artificial Sequence
  Description of Artificial Sequence: Synthetic peptide
  Seed: LVRKTRFLPV
LVRKTRFLPS

SEQ ID NO: 165755 - protein, 10 aa, Artificial Sequence
  Description of Artificial Sequence: Synthetic peptide
  Seed: LVRKTRFLPV
LVRKTRFLPT

SEQ ID NO: 165756 - protein, 10 aa, Artificial Sequence
  Description of Artificial Sequence: Synthetic peptide
  Seed: LVRKTRFLPV
LVRKTRFLPY

SEQ ID NO: 165757 - protein, 9 aa, Artificial Sequence
  Description of Artificial Sequence: Synthetic peptide
  Seed: LVRKTRFLP
LVRKTRFLQ

SEQ ID NO: 165758 - protein, 9 aa, Artificial Sequence
  Description of Artificial Sequence: Synthetic peptide
  Seed: LVRKTRFLP
LVRKTRFLR

SEQ ID NO: 165759 - protein, 9 aa, Artificial Sequence
  Description of Artificial Sequence: Synthetic peptide
  Seed: LVRKTRFLP
LVRKTRFLS

SEQ ID NO: 165760 - protein, 9 aa, Artificial Sequence
  Description of Artificial Sequence: Synthetic peptide
  Seed: LVRKTRFLP
LVRKTRFLT

SEQ ID NO: 165761 - protein, 9 aa, Artificial Sequence
  Description of Artificial Sequence: Synthetic peptide
  Seed: LVRKTRFLP
LVRKTRFLV

SEQ ID NO: 165762 - protein, 9 aa, Artificial Sequence
  Description of Artificial Sequence: Synthetic peptide
  Seed: LVRKTRFLP
LVRKTRFLY

SEQ ID NO: 165763 - protein, 9 aa, Artificial Sequence
  Description of Artificial Sequence: Synthetic peptide
  Seed: LRMKWMMAM
LWMKWMMAF

SEQ ID NO: 165764 - protein, 9 aa, Artificial Sequence
  Description of Artificial Sequence: Synthetic peptide
  Seed: LRMKWMMAM
LWMKWMMAI

SEQ ID NO: 165765 - protein, 9 aa, Artificial Sequence
  Description of Artificial Sequence: Synthetic peptide
  Seed: LRMKWMMAM
LWMKWMMAL

SEQ ID NO: 165766 - protein, 9 aa, Artificial Sequence
  Description of Artificial Sequence: Synthetic peptide
  Seed: LRMKWMMAM
LWMKWMMAM

SEQ ID NO: 165767 - protein, 10 aa, Artificial Sequence
  Description of Artificial Sequence: Synthetic peptide
  Seed: LRMKWMMAMK
LWMKWMMAMK

SEQ ID NO: 165768 - protein, 10 aa, Artificial Sequence
  Description of Artificial Sequence: Synthetic peptide
  Seed: LRMKWMMAMK
LWMKWMMAMR

SEQ ID NO: 165769 - protein, 9 aa, Artificial Sequence
  Description of Artificial Sequence: Synthetic peptide
  Seed: LRMKWMMAM
LWMKWMMAV

SEQ ID NO: 165770 - protein, 9 aa, Artificial Sequence
  Description of Artificial Sequence: Synthetic peptide
  Seed: LRMKWMMAM
LWMKWMMAY

SEQ ID NO: 165771 - protein, 11 aa, Artificial Sequence
  Description of Artificial Sequence: Synthetic peptide
  Seed: LNPMHQLLRHF
LWPMHQLLRHF

SEQ ID NO: 165772 - protein, 11 aa, Artificial Sequence
  Description of Artificial Sequence: Synthetic peptide
  Seed: LNPMHQLLRHF
LWPMHQLLRHY

SEQ ID NO: 165773 - protein, 9 aa, Artificial Sequence
  Description of Artificial Sequence: Synthetic peptide
  Seed: LVRKTRFLP
LWRKTRFLA

SEQ ID NO: 165774 - protein, 9 aa, Artificial Sequence
  Description of Artificial Sequence: Synthetic peptide
  Seed: LVRKTRFLP
LWRKTRFLG

SEQ ID NO: 165775 - protein, 9 aa, Artificial Sequence
  Description of Artificial Sequence: Synthetic peptide
  Seed: LVRKTRFLP
LWRKTRFLI

SEQ ID NO: 165776 - protein, 9 aa, Artificial Sequence
  Description of Artificial Sequence: Synthetic peptide
  Seed: LVRKTRFLP
LWRKTRFLK

SEQ ID NO: 165777 - protein, 9 aa, Artificial Sequence
  Description of Artificial Sequence: Synthetic peptide
  Seed: LVRKTRFLP
LWRKTRFLL

SEQ ID NO: 165778 - protein, 9 aa, Artificial Sequence
  Description of Artificial Sequence: Synthetic peptide
  Seed: LVRKTRFLP
LWRKTRFLM

SEQ ID NO: 165779 - protein, 9 aa, Artificial Sequence
  Description of Artificial Sequence: Synthetic peptide
  Seed: LVRKTRFLP
LWRKTRFLP

SEQ ID NO: 165780 - protein, 10 aa, Artificial Sequence
  Description of Artificial Sequence: Synthetic peptide
  Seed: LVRKTRFLPV
LWRKTRFLPA

SEQ ID NO: 165781 - protein, 10 aa, Artificial Sequence
  Description of Artificial Sequence: Synthetic peptide
  Seed: LVRKTRFLPV
LWRKTRFLPF

SEQ ID NO: 165782 - protein, 10 aa, Artificial Sequence
  Description of Artificial Sequence: Synthetic peptide
  Seed: LVRKTRFLPV
LWRKTRFLPI

SEQ ID NO: 165783 - protein, 10 aa, Artificial Sequence
  Description of Artificial Sequence: Synthetic peptide
  Seed: LVRKTRFLPV
LWRKTRFLPK

SEQ ID NO: 165784 - protein, 10 aa, Artificial Sequence
  Description of Artificial Sequence: Synthetic peptide
  Seed: LVRKTRFLPV
LWRKTRFLPL

SEQ ID NO: 165785 - protein, 10 aa, Artificial Sequence
  Description of Artificial Sequence: Synthetic peptide
  Seed: LVRKTRFLPV
LWRKTRFLPM

SEQ ID NO: 165786 - protein, 10 aa, Artificial Sequence
  Description of Artificial Sequence: Synthetic peptide
  Seed: LVRKTRFLPV
LWRKTRFLPV

SEQ ID NO: 165787 - protein, 9 aa, Artificial Sequence
  Description of Artificial Sequence: Synthetic peptide
  Seed: LVRKTRFLP
LWRKTRFLR

SEQ ID NO: 165788 - protein, 9 aa, Artificial Sequence
  Description of Artificial Sequence: Synthetic peptide
  Seed: LVRKTRFLP
LWRKTRFLS

SEQ ID NO: 165789 - protein, 9 aa, Artificial Sequence
  Description of Artificial Sequence: Synthetic peptide
  Seed: LVRKTRFLP
LWRKTRFLT

SEQ ID NO: 165790 - protein, 9 aa, Artificial Sequence
  Description of Artificial Sequence: Synthetic peptide
  Seed: LVRKTRFLP
LWRKTRFLV

SEQ ID NO: 165791 - protein, 9 aa, Artificial Sequence
  Description of Artificial Sequence: Synthetic peptide
  Seed: LVRKTRFLP
LWRKTRFLY

SEQ ID NO: 165792 - protein, 9 aa, Artificial Sequence
  Description of Artificial Sequence: Synthetic peptide
  Seed: LRMKWMMAM
LYMKWMMAA

SEQ ID NO: 165793 - protein, 9 aa, Artificial Sequence
  Description of Artificial Sequence: Synthetic peptide
  Seed: LRMKWMMAM
LYMKWMMAF

SEQ ID NO: 165794 - protein, 9 aa, Artificial Sequence
  Description of Artificial Sequence: Synthetic peptide
  Seed: LRMKWMMAM
LYMKWMMAH

SEQ ID NO: 165795 - protein, 9 aa, Artificial Sequence
  Description of Artificial Sequence: Synthetic peptide
  Seed: LRMKWMMAM
LYMKWMMAI

SEQ ID NO: 165796 - protein, 9 aa, Artificial Sequence
  Description of Artificial Sequence: Synthetic peptide
  Seed: LRMKWMMAM
LYMKWMMAL

SEQ ID NO: 165797 - protein, 9 aa, Artificial Sequence
  Description of Artificial Sequence: Synthetic peptide
  Seed: LRMKWMMAM
LYMKWMMAM

SEQ ID NO: 165798 - protein, 10 aa, Artificial Sequence
  Description of Artificial Sequence: Synthetic peptide
  Seed: LRMKWMMAMK
LYMKWMMAMH

SEQ ID NO: 165799 - protein, 10 aa, Artificial Sequence
  Description of Artificial Sequence: Synthetic peptide
  Seed: LRMKWMMAMK
LYMKWMMAMK

SEQ ID NO: 165800 - protein, 10 aa, Artificial Sequence
  Description of Artificial Sequence: Synthetic peptide
  Seed: LRMKWMMAMK
LYMKWMMAMR

SEQ ID NO: 165801 - protein, 9 aa, Artificial Sequence
  Description of Artificial Sequence: Synthetic peptide
  Seed: LRMKWMMAM
LYMKWMMAT

SEQ ID NO: 165802 - protein, 9 aa, Artificial Sequence
  Description of Artificial Sequence: Synthetic peptide
  Seed: LRMKWMMAM
LYMKWMMAV

SEQ ID NO: 165803 - protein, 9 aa, Artificial Sequence
  Description of Artificial Sequence: Synthetic peptide
  Seed: LRMKWMMAM
LYMKWMMAW

SEQ ID NO: 165804 - protein, 9 aa, Artificial Sequence
  Description of Artificial Sequence: Synthetic peptide
  Seed: LRMKWMMAM
LYMKWMMAY

SEQ ID NO: 165805 - protein, 11 aa, Artificial Sequence
  Description of Artificial Sequence: Synthetic peptide
  Seed: LNPMHQLLRHF
LYPMHQLLRHF

SEQ ID NO: 165806 - protein, 11 aa, Artificial Sequence
  Description of Artificial Sequence: Synthetic peptide
  Seed: LNPMHQLLRHF
LYPMHQLLRHY

SEQ ID NO: 165807 - protein, 9 aa, Artificial Sequence
  Description of Artificial Sequence: Synthetic peptide
  Seed: LVRKTRFLP
LYRKTRFLA

SEQ ID NO: 165808 - protein, 9 aa, Artificial Sequence
  Description of Artificial Sequence: Synthetic peptide
  Seed: LVRKTRFLP
LYRKTRFLC

SEQ ID NO: 165809 - protein, 9 aa, Artificial Sequence
  Description of Artificial Sequence: Synthetic peptide
  Seed: LVRKTRFLP
LYRKTRFLE

SEQ ID NO: 165810 - protein, 9 aa, Artificial Sequence
  Description of Artificial Sequence: Synthetic peptide
  Seed: LVRKTRFLP
LYRKTRFLF

SEQ ID NO: 165811 - protein, 9 aa, Artificial Sequence
  Description of Artificial Sequence: Synthetic peptide
  Seed: LVRKTRFLP
LYRKTRFLG

SEQ ID NO: 165812 - protein, 9 aa, Artificial Sequence
  Description of Artificial Sequence: Synthetic peptide
  Seed: LVRKTRFLP
LYRKTRFLH

SEQ ID NO: 165813 - protein, 9 aa, Artificial Sequence
  Description of Artificial Sequence: Synthetic peptide
  Seed: LVRKTRFLP
LYRKTRFLI

SEQ ID NO: 165814 - protein, 9 aa, Artificial Sequence
  Description of Artificial Sequence: Synthetic peptide
  Seed: LVRKTRFLP
LYRKTRFLK

SEQ ID NO: 165815 - protein, 9 aa, Artificial Sequence
  Description of Artificial Sequence: Synthetic peptide
  Seed: LVRKTRFLP
LYRKTRFLL

SEQ ID NO: 165816 - protein, 9 aa, Artificial Sequence
  Description of Artificial Sequence: Synthetic peptide
  Seed: LVRKTRFLP
LYRKTRFLM

SEQ ID NO: 165817 - protein, 9 aa, Artificial Sequence
  Description of Artificial Sequence: Synthetic peptide
  Seed: LVRKTRFLP
LYRKTRFLN

SEQ ID NO: 165818 - protein, 9 aa, Artificial Sequence
  Description of Artificial Sequence: Synthetic peptide
  Seed: LVRKTRFLP
LYRKTRFLP

SEQ ID NO: 165819 - protein, 10 aa, Artificial Sequence
  Description of Artificial Sequence: Synthetic peptide
  Seed: LVRKTRFLPV
LYRKTRFLPA

SEQ ID NO: 165820 - protein, 10 aa, Artificial Sequence
  Description of Artificial Sequence: Synthetic peptide
  Seed: LVRKTRFLPV
LYRKTRFLPF

SEQ ID NO: 165821 - protein, 10 aa, Artificial Sequence
  Description of Artificial Sequence: Synthetic peptide
  Seed: LVRKTRFLPV
LYRKTRFLPG

SEQ ID NO: 165822 - protein, 10 aa, Artificial Sequence
  Description of Artificial Sequence: Synthetic peptide
  Seed: LVRKTRFLPV
LYRKTRFLPI

SEQ ID NO: 165823 - protein, 10 aa, Artificial Sequence
  Description of Artificial Sequence: Synthetic peptide
  Seed: LVRKTRFLPV
LYRKTRFLPK

SEQ ID NO: 165824 - protein, 10 aa, Artificial Sequence
  Description of Artificial Sequence: Synthetic peptide
  Seed: LVRKTRFLPV
LYRKTRFLPL

SEQ ID NO: 165825 - protein, 10 aa, Artificial Sequence
  Description of Artificial Sequence: Synthetic peptide
  Seed: LVRKTRFLPV
LYRKTRFLPM

SEQ ID NO: 165826 - protein, 10 aa, Artificial Sequence
  Description of Artificial Sequence: Synthetic peptide
  Seed: LVRKTRFLPV
LYRKTRFLPP

SEQ ID NO: 165827 - protein, 10 aa, Artificial Sequence
  Description of Artificial Sequence: Synthetic peptide
  Seed: LVRKTRFLPV
LYRKTRFLPR

SEQ ID NO: 165828 - protein, 10 aa, Artificial Sequence
  Description of Artificial Sequence: Synthetic peptide
  Seed: LVRKTRFLPV
LYRKTRFLPS

SEQ ID NO: 165829 - protein, 10 aa, Artificial Sequence
  Description of Artificial Sequence: Synthetic peptide
  Seed: LVRKTRFLPV
LYRKTRFLPT

SEQ ID NO: 165830 - protein, 10 aa, Artificial Sequence
  Description of Artificial Sequence: Synthetic peptide
  Seed: LVRKTRFLPV
LYRKTRFLPV

SEQ ID NO: 165831 - protein, 10 aa, Artificial Sequence
  Description of Artificial Sequence: Synthetic peptide
  Seed: LVRKTRFLPV
LYRKTRFLPY

SEQ ID NO: 165832 - protein, 9 aa, Artificial Sequence
  Description of Artificial Sequence: Synthetic peptide
  Seed: LVRKTRFLP
LYRKTRFLQ

SEQ ID NO: 165833 - protein, 9 aa, Artificial Sequence
  Description of Artificial Sequence: Synthetic peptide
  Seed: LVRKTRFLP
LYRKTRFLR

SEQ ID NO: 165834 - protein, 9 aa, Artificial Sequence
  Description of Artificial Sequence: Synthetic peptide
  Seed: LVRKTRFLP
LYRKTRFLS

SEQ ID NO: 165835 - protein, 9 aa, Artificial Sequence
  Description of Artificial Sequence: Synthetic peptide
  Seed: LVRKTRFLP
LYRKTRFLT

SEQ ID NO: 165836 - protein, 9 aa, Artificial Sequence
  Description of Artificial Sequence: Synthetic peptide
  Seed: LVRKTRFLP
LYRKTRFLV

SEQ ID NO: 165837 - protein, 9 aa, Artificial Sequence
  Description of Artificial Sequence: Synthetic peptide
  Seed: LVRKTRFLP
LYRKTRFLY

SEQ ID NO: 165838 - protein, 8 aa, Artificial Sequence
  Description of Artificial Sequence: Synthetic peptide
  Seed: MMAMKYPI
MAAMKYPA

SEQ ID NO: 165839 - protein, 8 aa, Artificial Sequence
  Description of Artificial Sequence: Synthetic peptide
  Seed: MMAMKYPI
MAAMKYPF

SEQ ID NO: 165840 - protein, 8 aa, Artificial Sequence
  Description of Artificial Sequence: Synthetic peptide
  Seed: MMAMKYPI
MAAMKYPI

SEQ ID NO: 165841 - protein, 9 aa, Artificial Sequence
  Description of Artificial Sequence: Synthetic peptide
  Seed: MMAMKYPIT
MAAMKYPIA

SEQ ID NO: 165842 - protein, 9 aa, Artificial Sequence
  Description of Artificial Sequence: Synthetic peptide
  Seed: MMAMKYPIT
MAAMKYPIF

SEQ ID NO: 165843 - protein, 9 aa, Artificial Sequence
  Description of Artificial Sequence: Synthetic peptide
  Seed: MMAMKYPIT
MAAMKYPII

SEQ ID NO: 165844 - protein, 9 aa, Artificial Sequence
  Description of Artificial Sequence: Synthetic peptide
  Seed: MMAMKYPIT
MAAMKYPIL

SEQ ID NO: 165845 - protein, 9 aa, Artificial Sequence
  Description of Artificial Sequence: Synthetic peptide
  Seed: MMAMKYPIT
MAAMKYPIM

SEQ ID NO: 165846 - protein, 10 aa, Artificial Sequence
  Description of Artificial Sequence: Synthetic peptide
  Seed: MMAMKYPITA
MAAMKYPITA

SEQ ID NO: 165847 - protein, 10 aa, Artificial Sequence
  Description of Artificial Sequence: Synthetic peptide
  Seed: MMAMKYPITA
MAAMKYPITF

SEQ ID NO: 165848 - protein, 10 aa, Artificial Sequence
  Description of Artificial Sequence: Synthetic peptide
  Seed: MMAMKYPITA
MAAMKYPITI

SEQ ID NO: 165849 - protein, 10 aa, Artificial Sequence
  Description of Artificial Sequence: Synthetic peptide
  Seed: MMAMKYPITA
MAAMKYPITL

SEQ ID NO: 165850 - protein, 10 aa, Artificial Sequence
  Description of Artificial Sequence: Synthetic peptide
  Seed: MMAMKYPITA
MAAMKYPITM

SEQ ID NO: 165851 - protein, 10 aa, Artificial Sequence
  Description of Artificial Sequence: Synthetic peptide
  Seed: MMAMKYPITA
MAAMKYPITV

SEQ ID NO: 165852 - protein, 10 aa, Artificial Sequence
  Description of Artificial Sequence: Synthetic peptide
  Seed: MMAMKYPITA
MAAMKYPITY

SEQ ID NO: 165853 - protein, 9 aa, Artificial Sequence
  Description of Artificial Sequence: Synthetic peptide
  Seed: MMAMKYPIT
MAAMKYPIV

SEQ ID NO: 165854 - protein, 8 aa, Artificial Sequence
  Description of Artificial Sequence: Synthetic peptide
  Seed: MMAMKYPI
MAAMKYPL

SEQ ID NO: 165855 - protein, 8 aa, Artificial Sequence
  Description of Artificial Sequence: Synthetic peptide
  Seed: MMAMKYPI
MAAMKYPM

SEQ ID NO: 165856 - protein, 8 aa, Artificial Sequence
  Description of Artificial Sequence: Synthetic peptide
  Seed: MMAMKYPI
MAAMKYPV

SEQ ID NO: 165857 - protein, 9 aa, Artificial Sequence
  Description of Artificial Sequence: Synthetic peptide
  Seed: MAMKYPITA
MAMKYPITC

SEQ ID NO: 165858 - protein, 9 aa, Artificial Sequence
  Description of Artificial Sequence: Synthetic peptide
  Seed: MAMKYPITA
MAMKYPITE

SEQ ID NO: 165859 - protein, 9 aa, Artificial Sequence
  Description of Artificial Sequence: Synthetic peptide
  Seed: MAMKYPITA
MAMKYPITF

SEQ ID NO: 165860 - protein, 9 aa, Artificial Sequence
  Description of Artificial Sequence: Synthetic peptide
  Seed: MAMKYPITA
MAMKYPITG

SEQ ID NO: 165861 - protein, 9 aa, Artificial Sequence
  Description of Artificial Sequence: Synthetic peptide
  Seed: MAMKYPITA
MAMKYPITH

SEQ ID NO: 165862 - protein, 9 aa, Artificial Sequence
  Description of Artificial Sequence: Synthetic peptide
  Seed: MAMKYPITA
MAMKYPITI

SEQ ID NO: 165863 - protein, 9 aa, Artificial Sequence
  Description of Artificial Sequence: Synthetic peptide
  Seed: MAMKYPITA
MAMKYPITK

SEQ ID NO: 165864 - protein, 9 aa, Artificial Sequence
  Description of Artificial Sequence: Synthetic peptide
  Seed: MAMKYPITA
MAMKYPITL

SEQ ID NO: 165865 - protein, 9 aa, Artificial Sequence
  Description of Artificial Sequence: Synthetic peptide
  Seed: MAMKYPITA
MAMKYPITM

SEQ ID NO: 165866 - protein, 9 aa, Artificial Sequence
  Description of Artificial Sequence: Synthetic peptide
  Seed: MAMKYPITA
MAMKYPITN

SEQ ID NO: 165867 - protein, 9 aa, Artificial Sequence
  Description of Artificial Sequence: Synthetic peptide
  Seed: MAMKYPITA
MAMKYPITP

SEQ ID NO: 165868 - protein, 9 aa, Artificial Sequence
  Description of Artificial Sequence: Synthetic peptide
  Seed: MAMKYPITA
MAMKYPITQ

SEQ ID NO: 165869 - protein, 9 aa, Artificial Sequence
  Description of Artificial Sequence: Synthetic peptide
  Seed: MAMKYPITA
MAMKYPITR

SEQ ID NO: 165870 - protein, 9 aa, Artificial Sequence
  Description of Artificial Sequence: Synthetic peptide
  Seed: MAMKYPITA
MAMKYPITS

SEQ ID NO: 165871 - protein, 9 aa, Artificial Sequence
  Description of Artificial Sequence: Synthetic peptide
  Seed: MAMKYPITA
MAMKYPITT

SEQ ID NO: 165872 - protein, 9 aa, Artificial Sequence
  Description of Artificial Sequence: Synthetic peptide
  Seed: MAMKYPITA
MAMKYPITW

SEQ ID NO: 165873 - protein, 9 aa, Artificial Sequence
  Description of Artificial Sequence: Synthetic peptide
  Seed: MAMKYPITA
MAMKYPITY

SEQ ID NO: 165874 - protein, 9 aa, Artificial Sequence
  Description of Artificial Sequence: Synthetic peptide
  Seed: MKWMMAMKY
MAWMMAMKF

SEQ ID NO: 165875 - protein, 9 aa, Artificial Sequence
  Description of Artificial Sequence: Synthetic peptide
  Seed: MKWMMAMKY
MAWMMAMKH

SEQ ID NO: 165876 - protein, 9 aa, Artificial Sequence
  Description of Artificial Sequence: Synthetic peptide
  Seed: MKWMMAMKY
MAWMMAMKI

SEQ ID NO: 165877 - protein, 9 aa, Artificial Sequence
  Description of Artificial Sequence: Synthetic peptide
  Seed: MKWMMAMKY
MAWMMAMKL

SEQ ID NO: 165878 - protein, 9 aa, Artificial Sequence
  Description of Artificial Sequence: Synthetic peptide
  Seed: MKWMMAMKY
MAWMMAMKM

SEQ ID NO: 165879 - protein, 9 aa, Artificial Sequence
  Description of Artificial Sequence: Synthetic peptide
  Seed: MKWMMAMKY
MAWMMAMKY

SEQ ID NO: 165880 - protein, 11 aa, Artificial Sequence
  Description of Artificial Sequence: Synthetic peptide
  Seed: MKWMMAMKYPI
MAWMMAMKYPA

SEQ ID NO: 165881 - protein, 11 aa, Artificial Sequence
  Description of Artificial Sequence: Synthetic peptide
  Seed: MKWMMAMKYPI
MAWMMAMKYPF

SEQ ID NO: 165882 - protein, 11 aa, Artificial Sequence
  Description of Artificial Sequence: Synthetic peptide
  Seed: MKWMMAMKYPI
MAWMMAMKYPI

SEQ ID NO: 165883 - protein, 11 aa, Artificial Sequence
  Description of Artificial Sequence: Synthetic peptide
  Seed: MKWMMAMKYPI
MAWMMAMKYPL

SEQ ID NO: 165884 - protein, 11 aa, Artificial Sequence
  Description of Artificial Sequence: Synthetic peptide
  Seed: MKWMMAMKYPI
MAWMMAMKYPM

SEQ ID NO: 165885 - protein, 11 aa, Artificial Sequence
  Description of Artificial Sequence: Synthetic peptide
  Seed: MKWMMAMKYPI
MAWMMAMKYPV

SEQ ID NO: 165886 - protein, 11 aa, Artificial Sequence
  Description of Artificial Sequence: Synthetic peptide
  Seed: MKWMMAMKYPI
MAWMMAMKYPW

SEQ ID NO: 165887 - protein, 9 aa, Artificial Sequence
  Description of Artificial Sequence: Synthetic peptide
  Seed: MMAMKYPIT
MCAMKYPIL

SEQ ID NO: 165888 - protein, 9 aa, Artificial Sequence
  Description of Artificial Sequence: Synthetic peptide
  Seed: MMAMKYPIT
MCAMKYPIM

SEQ ID NO: 165889 - protein, 10 aa, Artificial Sequence
  Description of Artificial Sequence: Synthetic peptide
  Seed: MMAMKYPITA
MCAMKYPITA

SEQ ID NO: 165890 - protein, 10 aa, Artificial Sequence
  Description of Artificial Sequence: Synthetic peptide
  Seed: MMAMKYPITA
MCAMKYPITF

SEQ ID NO: 165891 - protein, 10 aa, Artificial Sequence
  Description of Artificial Sequence: Synthetic peptide
  Seed: MMAMKYPITA
MCAMKYPITL

SEQ ID NO: 165892 - protein, 10 aa, Artificial Sequence
  Description of Artificial Sequence: Synthetic peptide
  Seed: MMAMKYPITA
MCAMKYPITM

SEQ ID NO: 165893 - protein, 10 aa, Artificial Sequence
  Description of Artificial Sequence: Synthetic peptide
  Seed: MMAMKYPITA
MCAMKYPITV

SEQ ID NO: 165894 - protein, 10 aa, Artificial Sequence
  Description of Artificial Sequence: Synthetic peptide
  Seed: MMAMKYPITA
MCAMKYPITY

SEQ ID NO: 165895 - protein, 8 aa, Artificial Sequence
  Description of Artificial Sequence: Synthetic peptide
  Seed: MMAMKYPI
MCAMKYPL

SEQ ID NO: 165896 - protein, 8 aa, Artificial Sequence
  Description of Artificial Sequence: Synthetic peptide
  Seed: MMAMKYPI
MCAMKYPM

SEQ ID NO: 165897 - protein, 9 aa, Artificial Sequence
  Description of Artificial Sequence: Synthetic peptide
  Seed: MAMKYPITA
MCMKYPITF

SEQ ID NO: 165898 - protein, 9 aa, Artificial Sequence
  Description of Artificial Sequence: Synthetic peptide
  Seed: MAMKYPITA
MCMKYPITI

SEQ ID NO: 165899 - protein, 9 aa, Artificial Sequence
  Description of Artificial Sequence: Synthetic peptide
  Seed: MAMKYPITA
MCMKYPITK

SEQ ID NO: 165900 - protein, 9 aa, Artificial Sequence
  Description of Artificial Sequence: Synthetic peptide
  Seed: MAMKYPITA
MCMKYPITL

SEQ ID NO: 165901 - protein, 9 aa, Artificial Sequence
  Description of Artificial Sequence: Synthetic peptide
  Seed: MAMKYPITA
MCMKYPITM

SEQ ID NO: 165902 - protein, 9 aa, Artificial Sequence
  Description of Artificial Sequence: Synthetic peptide
  Seed: MAMKYPITA
MCMKYPITV

SEQ ID NO: 165903 - protein, 9 aa, Artificial Sequence
  Description of Artificial Sequence: Synthetic peptide
  Seed: MAMKYPITA
MCMKYPITY

SEQ ID NO: 165904 - protein, 9 aa, Artificial Sequence
  Description of Artificial Sequence: Synthetic peptide
  Seed: MKWMMAMKY
MCWMMAMKY

SEQ ID NO: 165905 - protein, 11 aa, Artificial Sequence
  Description of Artificial Sequence: Synthetic peptide
  Seed: MKWMMAMKYPI
MCWMMAMKYPA

SEQ ID NO: 165906 - protein, 11 aa, Artificial Sequence
  Description of Artificial Sequence: Synthetic peptide
  Seed: MKWMMAMKYPI
MCWMMAMKYPF

SEQ ID NO: 165907 - protein, 11 aa, Artificial Sequence
  Description of Artificial Sequence: Synthetic peptide
  Seed: MKWMMAMKYPI
MCWMMAMKYPI

SEQ ID NO: 165908 - protein, 11 aa, Artificial Sequence
  Description of Artificial Sequence: Synthetic peptide
  Seed: MKWMMAMKYPI
MCWMMAMKYPL

SEQ ID NO: 165909 - protein, 11 aa, Artificial Sequence
  Description of Artificial Sequence: Synthetic peptide
  Seed: MKWMMAMKYPI
MCWMMAMKYPM

SEQ ID NO: 165910 - protein, 11 aa, Artificial Sequence
  Description of Artificial Sequence: Synthetic peptide
  Seed: MKWMMAMKYPI
MCWMMAMKYPV

SEQ ID NO: 165911 - protein, 11 aa, Artificial Sequence
  Description of Artificial Sequence: Synthetic peptide
  Seed: MKWMMAMKYPI
MCWMMAMKYPW

SEQ ID NO: 165912 - protein, 10 aa, Artificial Sequence
  Description of Artificial Sequence: Synthetic peptide
  Seed: MMAMKYPITA
MDAMKYPITA

SEQ ID NO: 165913 - protein, 10 aa, Artificial Sequence
  Description of Artificial Sequence: Synthetic peptide
  Seed: MMAMKYPITA
MDAMKYPITF

SEQ ID NO: 165914 - protein, 10 aa, Artificial Sequence
  Description of Artificial Sequence: Synthetic peptide
  Seed: MMAMKYPITA
MDAMKYPITL

SEQ ID NO: 165915 - protein, 10 aa, Artificial Sequence
  Description of Artificial Sequence: Synthetic peptide
  Seed: MMAMKYPITA
MDAMKYPITM

SEQ ID NO: 165916 - protein, 10 aa, Artificial Sequence
  Description of Artificial Sequence: Synthetic peptide
  Seed: MMAMKYPITA
MDAMKYPITV

SEQ ID NO: 165917 - protein, 10 aa, Artificial Sequence
  Description of Artificial Sequence: Synthetic peptide
  Seed: MMAMKYPITA
MDAMKYPITY

SEQ ID NO: 165918 - protein, 9 aa, Artificial Sequence
  Description of Artificial Sequence: Synthetic peptide
  Seed: MAMKYPITA
MDMKYPITF

SEQ ID NO: 165919 - protein, 9 aa, Artificial Sequence
  Description of Artificial Sequence: Synthetic peptide
  Seed: MAMKYPITA
MDMKYPITM

SEQ ID NO: 165920 - protein, 9 aa, Artificial Sequence
  Description of Artificial Sequence: Synthetic peptide
  Seed: MAMKYPITA
MDMKYPITY

SEQ ID NO: 165921 - protein, 9 aa, Artificial Sequence
  Description of Artificial Sequence: Synthetic peptide
  Seed: MEVVFPNEV
MDVVFPNEI

SEQ ID NO: 165922 - protein, 9 aa, Artificial Sequence
  Description of Artificial Sequence: Synthetic peptide
  Seed: MEVVFPNEV
MDVVFPNEL

SEQ ID NO: 165923 - protein, 9 aa, Artificial Sequence
  Description of Artificial Sequence: Synthetic peptide
  Seed: MEVVFPNEV
MDVVFPNEV

SEQ ID NO: 165924 - protein, 9 aa, Artificial Sequence
  Description of Artificial Sequence: Synthetic peptide
  Seed: MEVVFPNEV
MDVVFPNEW

SEQ ID NO: 165925 - protein, 9 aa, Artificial Sequence
  Description of Artificial Sequence: Synthetic peptide
  Seed: MEVVFPNEV
MDVVFPNEY

SEQ ID NO: 165926 - protein, 9 aa, Artificial Sequence
  Description of Artificial Sequence: Synthetic peptide
  Seed: MKWMMAMKY
MDWMMAMKF

SEQ ID NO: 165927 - protein, 9 aa, Artificial Sequence
  Description of Artificial Sequence: Synthetic peptide
  Seed: MKWMMAMKY
MDWMMAMKI

SEQ ID NO: 165928 - protein, 9 aa, Artificial Sequence
  Description of Artificial Sequence: Synthetic peptide
  Seed: MKWMMAMKY
MDWMMAMKL

SEQ ID NO: 165929 - protein, 9 aa, Artificial Sequence
  Description of Artificial Sequence: Synthetic peptide
  Seed: MKWMMAMKY
MDWMMAMKM

SEQ ID NO: 165930 - protein, 9 aa, Artificial Sequence
  Description of Artificial Sequence: Synthetic peptide
  Seed: MKWMMAMKY
MDWMMAMKV

SEQ ID NO: 165931 - protein, 9 aa, Artificial Sequence
  Description of Artificial Sequence: Synthetic peptide
  Seed: MKWMMAMKY
MDWMMAMKY

SEQ ID NO: 165932 - protein, 11 aa, Artificial Sequence
  Description of Artificial Sequence: Synthetic peptide
  Seed: MKWMMAMKYPI
MDWMMAMKYPA

SEQ ID NO: 165933 - protein, 11 aa, Artificial Sequence
  Description of Artificial Sequence: Synthetic peptide
  Seed: MKWMMAMKYPI
MDWMMAMKYPF

SEQ ID NO: 165934 - protein, 11 aa, Artificial Sequence
  Description of Artificial Sequence: Synthetic peptide
  Seed: MKWMMAMKYPI
MDWMMAMKYPI

SEQ ID NO: 165935 - protein, 11 aa, Artificial Sequence
  Description of Artificial Sequence: Synthetic peptide
  Seed: MKWMMAMKYPI
MDWMMAMKYPL

SEQ ID NO: 165936 - protein, 11 aa, Artificial Sequence
  Description of Artificial Sequence: Synthetic peptide
  Seed: MKWMMAMKYPI
MDWMMAMKYPM

SEQ ID NO: 165937 - protein, 11 aa, Artificial Sequence
  Description of Artificial Sequence: Synthetic peptide
  Seed: MKWMMAMKYPI
MDWMMAMKYPV

SEQ ID NO: 165938 - protein, 11 aa, Artificial Sequence
  Description of Artificial Sequence: Synthetic peptide
  Seed: MKWMMAMKYPI
MDWMMAMKYPW

SEQ ID NO: 165939 - protein, 10 aa, Artificial Sequence
  Description of Artificial Sequence: Synthetic peptide
  Seed: MMAMKYPITA
MEAMKYPITA

SEQ ID NO: 165940 - protein, 10 aa, Artificial Sequence
  Description of Artificial Sequence: Synthetic peptide
  Seed: MMAMKYPITA
MEAMKYPITF

SEQ ID NO: 165941 - protein, 10 aa, Artificial Sequence
  Description of Artificial Sequence: Synthetic peptide
  Seed: MMAMKYPITA
MEAMKYPITH

SEQ ID NO: 165942 - protein, 10 aa, Artificial Sequence
  Description of Artificial Sequence: Synthetic peptide
  Seed: MMAMKYPITA
MEAMKYPITL

SEQ ID NO: 165943 - protein, 10 aa, Artificial Sequence
  Description of Artificial Sequence: Synthetic peptide
  Seed: MMAMKYPITA
MEAMKYPITM

SEQ ID NO: 165944 - protein, 10 aa, Artificial Sequence
  Description of Artificial Sequence: Synthetic peptide
  Seed: MMAMKYPITA
MEAMKYPITV

SEQ ID NO: 165945 - protein, 10 aa, Artificial Sequence
  Description of Artificial Sequence: Synthetic peptide
  Seed: MMAMKYPITA
MEAMKYPITY

SEQ ID NO: 165946 - protein, 8 aa, Artificial Sequence
  Description of Artificial Sequence: Synthetic peptide
  Seed: MMAMKYPI
MEAMKYPL

SEQ ID NO: 165947 - protein, 9 aa, Artificial Sequence
  Description of Artificial Sequence: Synthetic peptide
  Seed: MAMKYPITA
MEMKYPITA

SEQ ID NO: 165948 - protein, 9 aa, Artificial Sequence
  Description of Artificial Sequence: Synthetic peptide
  Seed: MAMKYPITA
MEMKYPITF

SEQ ID NO: 165949 - protein, 9 aa, Artificial Sequence
  Description of Artificial Sequence: Synthetic peptide
  Seed: MAMKYPITA
MEMKYPITH

SEQ ID NO: 165950 - protein, 9 aa, Artificial Sequence
  Description of Artificial Sequence: Synthetic peptide
  Seed: MAMKYPITA
MEMKYPITI

SEQ ID NO: 165951 - protein, 9 aa, Artificial Sequence
  Description of Artificial Sequence: Synthetic peptide
  Seed: MAMKYPITA
MEMKYPITL

SEQ ID NO: 165952 - protein, 9 aa, Artificial Sequence
  Description of Artificial Sequence: Synthetic peptide
  Seed: MAMKYPITA
MEMKYPITM

SEQ ID NO: 165953 - protein, 9 aa, Artificial Sequence
  Description of Artificial Sequence: Synthetic peptide
  Seed: MAMKYPITA
MEMKYPITV

SEQ ID NO: 165954 - protein, 9 aa, Artificial Sequence
  Description of Artificial Sequence: Synthetic peptide
  Seed: MAMKYPITA
MEMKYPITW

SEQ ID NO: 165955 - protein, 9 aa, Artificial Sequence
  Description of Artificial Sequence: Synthetic peptide
  Seed: MAMKYPITA
MEMKYPITY

SEQ ID NO: 165956 - protein, 9 aa, Artificial Sequence
  Description of Artificial Sequence: Synthetic peptide
  Seed: MEVVFPNEV
MEVVFPNEA

SEQ ID NO: 165957 - protein, 9 aa, Artificial Sequence
  Description of Artificial Sequence: Synthetic peptide
  Seed: MEVVFPNEV
MEVVFPNEC

SEQ ID NO: 165958 - protein, 9 aa, Artificial Sequence
  Description of Artificial Sequence: Synthetic peptide
  Seed: MEVVFPNEV
MEVVFPNEF

SEQ ID NO: 165959 - protein, 9 aa, Artificial Sequence
  Description of Artificial Sequence: Synthetic peptide
  Seed: MEVVFPNEV
MEVVFPNEG

SEQ ID NO: 165960 - protein, 9 aa, Artificial Sequence
  Description of Artificial Sequence: Synthetic peptide
  Seed: MEVVFPNEV
MEVVFPNEH

SEQ ID NO: 165961 - protein, 9 aa, Artificial Sequence
  Description of Artificial Sequence: Synthetic peptide
  Seed: MEVVFPNEV
MEVVFPNEL

SEQ ID NO: 165962 - protein, 9 aa, Artificial Sequence
  Description of Artificial Sequence: Synthetic peptide
  Seed: MEVVFPNEV
MEVVFPNEM

SEQ ID NO: 165963 - protein, 9 aa, Artificial Sequence
  Description of Artificial Sequence: Synthetic peptide
  Seed: MEVVFPNEV
MEVVFPNEP

SEQ ID NO: 165964 - protein, 9 aa, Artificial Sequence
  Description of Artificial Sequence: Synthetic peptide
  Seed: MEVVFPNEV
MEVVFPNES

SEQ ID NO: 165965 - protein, 9 aa, Artificial Sequence
  Description of Artificial Sequence: Synthetic peptide
  Seed: MEVVFPNEV
MEVVFPNET

SEQ ID NO: 165966 - protein, 9 aa, Artificial Sequence
  Description of Artificial Sequence: Synthetic peptide
  Seed: MEVVFPNEV
MEVVFPNEW

SEQ ID NO: 165967 - protein, 9 aa, Artificial Sequence
  Description of Artificial Sequence: Synthetic peptide
  Seed: MKWMMAMKY
MEWMMAMKA

SEQ ID NO: 165968 - protein, 9 aa, Artificial Sequence
  Description of Artificial Sequence: Synthetic peptide
  Seed: MKWMMAMKY
MEWMMAMKC

SEQ ID NO: 165969 - protein, 9 aa, Artificial Sequence
  Description of Artificial Sequence: Synthetic peptide
  Seed: MKWMMAMKY
MEWMMAMKD

SEQ ID NO: 165970 - protein, 9 aa, Artificial Sequence
  Description of Artificial Sequence: Synthetic peptide
  Seed: MKWMMAMKY
MEWMMAMKE

SEQ ID NO: 165971 - protein, 9 aa, Artificial Sequence
  Description of Artificial Sequence: Synthetic peptide
  Seed: MKWMMAMKY
MEWMMAMKF

SEQ ID NO: 165972 - protein, 9 aa, Artificial Sequence
  Description of Artificial Sequence: Synthetic peptide
  Seed: MKWMMAMKY
MEWMMAMKG

SEQ ID NO: 165973 - protein, 9 aa, Artificial Sequence
  Description of Artificial Sequence: Synthetic peptide
  Seed: MKWMMAMKY
MEWMMAMKH

SEQ ID NO: 165974 - protein, 9 aa, Artificial Sequence
  Description of Artificial Sequence: Synthetic peptide
  Seed: MKWMMAMKY
MEWMMAMKI

SEQ ID NO: 165975 - protein, 9 aa, Artificial Sequence
  Description of Artificial Sequence: Synthetic peptide
  Seed: MKWMMAMKY
MEWMMAMKK

SEQ ID NO: 165976 - protein, 9 aa, Artificial Sequence
  Description of Artificial Sequence: Synthetic peptide
  Seed: MKWMMAMKY
MEWMMAMKL

SEQ ID NO: 165977 - protein, 9 aa, Artificial Sequence
  Description of Artificial Sequence: Synthetic peptide
  Seed: MKWMMAMKY
MEWMMAMKM

SEQ ID NO: 165978 - protein, 9 aa, Artificial Sequence
  Description of Artificial Sequence: Synthetic peptide
  Seed: MKWMMAMKY
MEWMMAMKN

SEQ ID NO: 165979 - protein, 9 aa, Artificial Sequence
  Description of Artificial Sequence: Synthetic peptide
  Seed: MKWMMAMKY
MEWMMAMKP

SEQ ID NO: 165980 - protein, 9 aa, Artificial Sequence
  Description of Artificial Sequence: Synthetic peptide
  Seed: MKWMMAMKY
MEWMMAMKQ

SEQ ID NO: 165981 - protein, 9 aa, Artificial Sequence
  Description of Artificial Sequence: Synthetic peptide
  Seed: MKWMMAMKY
MEWMMAMKR

SEQ ID NO: 165982 - protein, 9 aa, Artificial Sequence
  Description of Artificial Sequence: Synthetic peptide
  Seed: MKWMMAMKY
MEWMMAMKS

SEQ ID NO: 165983 - protein, 9 aa, Artificial Sequence
  Description of Artificial Sequence: Synthetic peptide
  Seed: MKWMMAMKY
MEWMMAMKT

SEQ ID NO: 165984 - protein, 9 aa, Artificial Sequence
  Description of Artificial Sequence: Synthetic peptide
  Seed: MKWMMAMKY
MEWMMAMKV

SEQ ID NO: 165985 - protein, 9 aa, Artificial Sequence
  Description of Artificial Sequence: Synthetic peptide
  Seed: MKWMMAMKY
MEWMMAMKW

SEQ ID NO: 165986 - protein, 9 aa, Artificial Sequence
  Description of Artificial Sequence: Synthetic peptide
  Seed: MKWMMAMKY
MEWMMAMKY

SEQ ID NO: 165987 - protein, 11 aa, Artificial Sequence
  Description of Artificial Sequence: Synthetic peptide
  Seed: MKWMMAMKYPI
MEWMMAMKYPA

SEQ ID NO: 165988 - protein, 11 aa, Artificial Sequence
  Description of Artificial Sequence: Synthetic peptide
  Seed: MKWMMAMKYPI
MEWMMAMKYPF

SEQ ID NO: 165989 - protein, 11 aa, Artificial Sequence
  Description of Artificial Sequence: Synthetic peptide
  Seed: MKWMMAMKYPI
MEWMMAMKYPI

SEQ ID NO: 165990 - protein, 11 aa, Artificial Sequence
  Description of Artificial Sequence: Synthetic peptide
  Seed: MKWMMAMKYPI
MEWMMAMKYPL

SEQ ID NO: 165991 - protein, 11 aa, Artificial Sequence
  Description of Artificial Sequence: Synthetic peptide
  Seed: MKWMMAMKYPI
MEWMMAMKYPM

SEQ ID NO: 165992 - protein, 11 aa, Artificial Sequence
  Description of Artificial Sequence: Synthetic peptide
  Seed: MKWMMAMKYPI
MEWMMAMKYPV

SEQ ID NO: 165993 - protein, 11 aa, Artificial Sequence
  Description of Artificial Sequence: Synthetic peptide
  Seed: MKWMMAMKYPI
MEWMMAMKYPW

SEQ ID NO: 165994 - protein, 8 aa, Artificial Sequence
  Description of Artificial Sequence: Synthetic peptide
  Seed: MMAMKYPI
MFAMKYPF

SEQ ID NO: 165995 - protein, 8 aa, Artificial Sequence
  Description of Artificial Sequence: Synthetic peptide
  Seed: MMAMKYPI
MFAMKYPI

SEQ ID NO: 165996 - protein, 9 aa, Artificial Sequence
  Description of Artificial Sequence: Synthetic peptide
  Seed: MMAMKYPIT
MFAMKYPII

SEQ ID NO: 165997 - protein, 9 aa, Artificial Sequence
  Description of Artificial Sequence: Synthetic peptide
  Seed: MMAMKYPIT
MFAMKYPIL

SEQ ID NO: 165998 - protein, 9 aa, Artificial Sequence
  Description of Artificial Sequence: Synthetic peptide
  Seed: MMAMKYPIT
MFAMKYPIM

SEQ ID NO: 165999 - protein, 10 aa, Artificial Sequence
  Description of Artificial Sequence: Synthetic peptide
  Seed: MMAMKYPITA
MFAMKYPITA

SEQ ID NO: 166000 - protein, 10 aa, Artificial Sequence
  Description of Artificial Sequence: Synthetic peptide
  Seed: MMAMKYPITA
MFAMKYPITF

SEQ ID NO: 166001 - protein, 10 aa, Artificial Sequence
  Description of Artificial Sequence: Synthetic peptide
  Seed: MMAMKYPITA
MFAMKYPITL

SEQ ID NO: 166002 - protein, 10 aa, Artificial Sequence
  Description of Artificial Sequence: Synthetic peptide
  Seed: MMAMKYPITA
MFAMKYPITM

SEQ ID NO: 166003 - protein, 10 aa, Artificial Sequence
  Description of Artificial Sequence: Synthetic peptide
  Seed: MMAMKYPITA
MFAMKYPITV

SEQ ID NO: 166004 - protein, 10 aa, Artificial Sequence
  Description of Artificial Sequence: Synthetic peptide
  Seed: MMAMKYPITA
MFAMKYPITY

SEQ ID NO: 166005 - protein, 9 aa, Artificial Sequence
  Description of Artificial Sequence: Synthetic peptide
  Seed: MMAMKYPIT
MFAMKYPIV

SEQ ID NO: 166006 - protein, 8 aa, Artificial Sequence
  Description of Artificial Sequence: Synthetic peptide
  Seed: MMAMKYPI
MFAMKYPL

SEQ ID NO: 166007 - protein, 8 aa, Artificial Sequence
  Description of Artificial Sequence: Synthetic peptide
  Seed: MMAMKYPI
MFAMKYPM

SEQ ID NO: 166008 - protein, 8 aa, Artificial Sequence
  Description of Artificial Sequence: Synthetic peptide
  Seed: MMAMKYPI
MFAMKYPV

SEQ ID NO: 166009 - protein, 9 aa, Artificial Sequence
  Description of Artificial Sequence: Synthetic peptide
  Seed: MAMKYPITA
MFMKYPITA

SEQ ID NO: 166010 - protein, 9 aa, Artificial Sequence
  Description of Artificial Sequence: Synthetic peptide
  Seed: MAMKYPITA
MFMKYPITF

SEQ ID NO: 166011 - protein, 9 aa, Artificial Sequence
  Description of Artificial Sequence: Synthetic peptide
  Seed: MAMKYPITA
MFMKYPITH

SEQ ID NO: 166012 - protein, 9 aa, Artificial Sequence
  Description of Artificial Sequence: Synthetic peptide
  Seed: MAMKYPITA
MFMKYPITI

SEQ ID NO: 166013 - protein, 9 aa, Artificial Sequence
  Description of Artificial Sequence: Synthetic peptide
  Seed: MAMKYPITA
MFMKYPITK

SEQ ID NO: 166014 - protein, 9 aa, Artificial Sequence
  Description of Artificial Sequence: Synthetic peptide
  Seed: MAMKYPITA
MFMKYPITL

SEQ ID NO: 166015 - protein, 9 aa, Artificial Sequence
  Description of Artificial Sequence: Synthetic peptide
  Seed: MAMKYPITA
MFMKYPITM

SEQ ID NO: 166016 - protein, 9 aa, Artificial Sequence
  Description of Artificial Sequence: Synthetic peptide
  Seed: MAMKYPITA
MFMKYPITV

SEQ ID NO: 166017 - protein, 9 aa, Artificial Sequence
  Description of Artificial Sequence: Synthetic peptide
  Seed: MAMKYPITA
MFMKYPITY

SEQ ID NO: 166018 - protein, 9 aa, Artificial Sequence
  Description of Artificial Sequence: Synthetic peptide
  Seed: MKWMMAMKY
MFWMMAMKF

SEQ ID NO: 166019 - protein, 9 aa, Artificial Sequence
  Description of Artificial Sequence: Synthetic peptide
  Seed: MKWMMAMKY
MFWMMAMKH

SEQ ID NO: 166020 - protein, 9 aa, Artificial Sequence
  Description of Artificial Sequence: Synthetic peptide
  Seed: MKWMMAMKY
MFWMMAMKL

SEQ ID NO: 166021 - protein, 9 aa, Artificial Sequence
  Description of Artificial Sequence: Synthetic peptide
  Seed: MKWMMAMKY
MFWMMAMKM

SEQ ID NO: 166022 - protein, 9 aa, Artificial Sequence
  Description of Artificial Sequence: Synthetic peptide
  Seed: MKWMMAMKY
MFWMMAMKY

SEQ ID NO: 166023 - protein, 11 aa, Artificial Sequence
  Description of Artificial Sequence: Synthetic peptide
  Seed: MKWMMAMKYPI
MFWMMAMKYPA

SEQ ID NO: 166024 - protein, 11 aa, Artificial Sequence
  Description of Artificial Sequence: Synthetic peptide
  Seed: MKWMMAMKYPI
MFWMMAMKYPF

SEQ ID NO: 166025 - protein, 11 aa, Artificial Sequence
  Description of Artificial Sequence: Synthetic peptide
  Seed: MKWMMAMKYPI
MFWMMAMKYPI

SEQ ID NO: 166026 - protein, 11 aa, Artificial Sequence
  Description of Artificial Sequence: Synthetic peptide
  Seed: MKWMMAMKYPI
MFWMMAMKYPL

SEQ ID NO: 166027 - protein, 11 aa, Artificial Sequence
  Description of Artificial Sequence: Synthetic peptide
  Seed: MKWMMAMKYPI
MFWMMAMKYPM

SEQ ID NO: 166028 - protein, 11 aa, Artificial Sequence
  Description of Artificial Sequence: Synthetic peptide
  Seed: MKWMMAMKYPI
MFWMMAMKYPV

SEQ ID NO: 166029 - protein, 11 aa, Artificial Sequence
  Description of Artificial Sequence: Synthetic peptide
  Seed: MKWMMAMKYPI
MFWMMAMKYPW

SEQ ID NO: 166030 - protein, 8 aa, Artificial Sequence
  Description of Artificial Sequence: Synthetic peptide
  Seed: MMAMKYPI
MGAMKYPF

SEQ ID NO: 166031 - protein, 8 aa, Artificial Sequence
  Description of Artificial Sequence: Synthetic peptide
  Seed: MMAMKYPI
MGAMKYPI

SEQ ID NO: 166032 - protein, 9 aa, Artificial Sequence
  Description of Artificial Sequence: Synthetic peptide
  Seed: MMAMKYPIT
MGAMKYPIA

SEQ ID NO: 166033 - protein, 9 aa, Artificial Sequence
  Description of Artificial Sequence: Synthetic peptide
  Seed: MMAMKYPIT
MGAMKYPIF

SEQ ID NO: 166034 - protein, 9 aa, Artificial Sequence
  Description of Artificial Sequence: Synthetic peptide
  Seed: MMAMKYPIT
MGAMKYPII

SEQ ID NO: 166035 - protein, 9 aa, Artificial Sequence
  Description of Artificial Sequence: Synthetic peptide
  Seed: MMAMKYPIT
MGAMKYPIL

SEQ ID NO: 166036 - protein, 9 aa, Artificial Sequence
  Description of Artificial Sequence: Synthetic peptide
  Seed: MMAMKYPIT
MGAMKYPIM

SEQ ID NO: 166037 - protein, 10 aa, Artificial Sequence
  Description of Artificial Sequence: Synthetic peptide
  Seed: MMAMKYPITA
MGAMKYPITA

SEQ ID NO: 166038 - protein, 10 aa, Artificial Sequence
  Description of Artificial Sequence: Synthetic peptide
  Seed: MMAMKYPITA
MGAMKYPITF

SEQ ID NO: 166039 - protein, 10 aa, Artificial Sequence
  Description of Artificial Sequence: Synthetic peptide
  Seed: MMAMKYPITA
MGAMKYPITL

SEQ ID NO: 166040 - protein, 10 aa, Artificial Sequence
  Description of Artificial Sequence: Synthetic peptide
  Seed: MMAMKYPITA
MGAMKYPITM

SEQ ID NO: 166041 - protein, 10 aa, Artificial Sequence
  Description of Artificial Sequence: Synthetic peptide
  Seed: MMAMKYPITA
MGAMKYPITV

SEQ ID NO: 166042 - protein, 10 aa, Artificial Sequence
  Description of Artificial Sequence: Synthetic peptide
  Seed: MMAMKYPITA
MGAMKYPITY

SEQ ID NO: 166043 - protein, 9 aa, Artificial Sequence
  Description of Artificial Sequence: Synthetic peptide
  Seed: MMAMKYPIT
MGAMKYPIV

SEQ ID NO: 166044 - protein, 8 aa, Artificial Sequence
  Description of Artificial Sequence: Synthetic peptide
  Seed: MMAMKYPI
MGAMKYPL

SEQ ID NO: 166045 - protein, 8 aa, Artificial Sequence
  Description of Artificial Sequence: Synthetic peptide
  Seed: MMAMKYPI
MGAMKYPM

SEQ ID NO: 166046 - protein, 8 aa, Artificial Sequence
  Description of Artificial Sequence: Synthetic peptide
  Seed: MMAMKYPI
MGAMKYPV

SEQ ID NO: 166047 - protein, 9 aa, Artificial Sequence
  Description of Artificial Sequence: Synthetic peptide
  Seed: MAMKYPITA
MGMKYPITA

SEQ ID NO: 166048 - protein, 9 aa, Artificial Sequence
  Description of Artificial Sequence: Synthetic peptide
  Seed: MAMKYPITA
MGMKYPITF

SEQ ID NO: 166049 - protein, 9 aa, Artificial Sequence
  Description of Artificial Sequence: Synthetic peptide
  Seed: MAMKYPITA
MGMKYPITH

SEQ ID NO: 166050 - protein, 9 aa, Artificial Sequence
  Description of Artificial Sequence: Synthetic peptide
  Seed: MAMKYPITA
MGMKYPITI

SEQ ID NO: 166051 - protein, 9 aa, Artificial Sequence
  Description of Artificial Sequence: Synthetic peptide
  Seed: MAMKYPITA
MGMKYPITK

SEQ ID NO: 166052 - protein, 9 aa, Artificial Sequence
  Description of Artificial Sequence: Synthetic peptide
  Seed: MAMKYPITA
MGMKYPITL

SEQ ID NO: 166053 - protein, 9 aa, Artificial Sequence
  Description of Artificial Sequence: Synthetic peptide
  Seed: MAMKYPITA
MGMKYPITM

SEQ ID NO: 166054 - protein, 9 aa, Artificial Sequence
  Description of Artificial Sequence: Synthetic peptide
  Seed: MAMKYPITA
MGMKYPITV

SEQ ID NO: 166055 - protein, 9 aa, Artificial Sequence
  Description of Artificial Sequence: Synthetic peptide
  Seed: MAMKYPITA
MGMKYPITY

SEQ ID NO: 166056 - protein, 9 aa, Artificial Sequence
  Description of Artificial Sequence: Synthetic peptide
  Seed: MKWMMAMKY
MGWMMAMKF

SEQ ID NO: 166057 - protein, 9 aa, Artificial Sequence
  Description of Artificial Sequence: Synthetic peptide
  Seed: MKWMMAMKY
MGWMMAMKM

SEQ ID NO: 166058 - protein, 9 aa, Artificial Sequence
  Description of Artificial Sequence: Synthetic peptide
  Seed: MKWMMAMKY
MGWMMAMKY

SEQ ID NO: 166059 - protein, 11 aa, Artificial Sequence
  Description of Artificial Sequence: Synthetic peptide
  Seed: MKWMMAMKYPI
MGWMMAMKYPA

SEQ ID NO: 166060 - protein, 11 aa, Artificial Sequence
  Description of Artificial Sequence: Synthetic peptide
  Seed: MKWMMAMKYPI
MGWMMAMKYPF

SEQ ID NO: 166061 - protein, 11 aa, Artificial Sequence
  Description of Artificial Sequence: Synthetic peptide
  Seed: MKWMMAMKYPI
MGWMMAMKYPI

SEQ ID NO: 166062 - protein, 11 aa, Artificial Sequence
  Description of Artificial Sequence: Synthetic peptide
  Seed: MKWMMAMKYPI
MGWMMAMKYPL

SEQ ID NO: 166063 - protein, 11 aa, Artificial Sequence
  Description of Artificial Sequence: Synthetic peptide
  Seed: MKWMMAMKYPI
MGWMMAMKYPM

SEQ ID NO: 166064 - protein, 11 aa, Artificial Sequence
  Description of Artificial Sequence: Synthetic peptide
  Seed: MKWMMAMKYPI
MGWMMAMKYPV

SEQ ID NO: 166065 - protein, 11 aa, Artificial Sequence
  Description of Artificial Sequence: Synthetic peptide
  Seed: MKWMMAMKYPI
MGWMMAMKYPW

SEQ ID NO: 166066 - protein, 10 aa, Artificial Sequence
  Description of Artificial Sequence: Synthetic peptide
  Seed: MMAMKYPITA
MHAMKYPITA

SEQ ID NO: 166067 - protein, 10 aa, Artificial Sequence
  Description of Artificial Sequence: Synthetic peptide
  Seed: MMAMKYPITA
MHAMKYPITF

SEQ ID NO: 166068 - protein, 10 aa, Artificial Sequence
  Description of Artificial Sequence: Synthetic peptide
  Seed: MMAMKYPITA
MHAMKYPITH

SEQ ID NO: 166069 - protein, 10 aa, Artificial Sequence
  Description of Artificial Sequence: Synthetic peptide
  Seed: MMAMKYPITA
MHAMKYPITI

SEQ ID NO: 166070 - protein, 10 aa, Artificial Sequence
  Description of Artificial Sequence: Synthetic peptide
  Seed: MMAMKYPITA
MHAMKYPITL

SEQ ID NO: 166071 - protein, 10 aa, Artificial Sequence
  Description of Artificial Sequence: Synthetic peptide
  Seed: MMAMKYPITA
MHAMKYPITM

SEQ ID NO: 166072 - protein, 10 aa, Artificial Sequence
  Description of Artificial Sequence: Synthetic peptide
  Seed: MMAMKYPITA
MHAMKYPITV

SEQ ID NO: 166073 - protein, 10 aa, Artificial Sequence
  Description of Artificial Sequence: Synthetic peptide
  Seed: MMAMKYPITA
MHAMKYPITY

SEQ ID NO: 166074 - protein, 9 aa, Artificial Sequence
  Description of Artificial Sequence: Synthetic peptide
  Seed: MAMKYPITA
MHMKYPITA

SEQ ID NO: 166075 - protein, 9 aa, Artificial Sequence
  Description of Artificial Sequence: Synthetic peptide
  Seed: MAMKYPITA
MHMKYPITC

SEQ ID NO: 166076 - protein, 9 aa, Artificial Sequence
  Description of Artificial Sequence: Synthetic peptide
  Seed: MAMKYPITA
MHMKYPITF

SEQ ID NO: 166077 - protein, 9 aa, Artificial Sequence
  Description of Artificial Sequence: Synthetic peptide
  Seed: MAMKYPITA
MHMKYPITG

SEQ ID NO: 166078 - protein, 9 aa, Artificial Sequence
  Description of Artificial Sequence: Synthetic peptide
  Seed: MAMKYPITA
MHMKYPITH

SEQ ID NO: 166079 - protein, 9 aa, Artificial Sequence
  Description of Artificial Sequence: Synthetic peptide
  Seed: MAMKYPITA
MHMKYPITI

SEQ ID NO: 166080 - protein, 9 aa, Artificial Sequence
  Description of Artificial Sequence: Synthetic peptide
  Seed: MAMKYPITA
MHMKYPITL

SEQ ID NO: 166081 - protein, 9 aa, Artificial Sequence
  Description of Artificial Sequence: Synthetic peptide
  Seed: MAMKYPITA
MHMKYPITM

SEQ ID NO: 166082 - protein, 9 aa, Artificial Sequence
  Description of Artificial Sequence: Synthetic peptide
  Seed: MAMKYPITA
MHMKYPITP

SEQ ID NO: 166083 - protein, 9 aa, Artificial Sequence
  Description of Artificial Sequence: Synthetic peptide
  Seed: MAMKYPITA
MHMKYPITS

SEQ ID NO: 166084 - protein, 9 aa, Artificial Sequence
  Description of Artificial Sequence: Synthetic peptide
  Seed: MAMKYPITA
MHMKYPITT

SEQ ID NO: 166085 - protein, 9 aa, Artificial Sequence
  Description of Artificial Sequence: Synthetic peptide
  Seed: MAMKYPITA
MHMKYPITV

SEQ ID NO: 166086 - protein, 9 aa, Artificial Sequence
  Description of Artificial Sequence: Synthetic peptide
  Seed: MAMKYPITA
MHMKYPITW

SEQ ID NO: 166087 - protein, 9 aa, Artificial Sequence
  Description of Artificial Sequence: Synthetic peptide
  Seed: MAMKYPITA
MHMKYPITY

SEQ ID NO: 166088 - protein, 9 aa, Artificial Sequence
  Description of Artificial Sequence: Synthetic peptide
  Seed: MKWMMAMKY
MHWMMAMKF

SEQ ID NO: 166089 - protein, 9 aa, Artificial Sequence
  Description of Artificial Sequence: Synthetic peptide
  Seed: MKWMMAMKY
MHWMMAMKH

SEQ ID NO: 166090 - protein, 9 aa, Artificial Sequence
  Description of Artificial Sequence: Synthetic peptide
  Seed: MKWMMAMKY
MHWMMAMKI

SEQ ID NO: 166091 - protein, 9 aa, Artificial Sequence
  Description of Artificial Sequence: Synthetic peptide
  Seed: MKWMMAMKY
MHWMMAMKL

SEQ ID NO: 166092 - protein, 9 aa, Artificial Sequence
  Description of Artificial Sequence: Synthetic peptide
  Seed: MKWMMAMKY
MHWMMAMKM

SEQ ID NO: 166093 - protein, 9 aa, Artificial Sequence
  Description of Artificial Sequence: Synthetic peptide
  Seed: MKWMMAMKY
MHWMMAMKV

SEQ ID NO: 166094 - protein, 9 aa, Artificial Sequence
  Description of Artificial Sequence: Synthetic peptide
  Seed: MKWMMAMKY
MHWMMAMKW

SEQ ID NO: 166095 - protein, 9 aa, Artificial Sequence
  Description of Artificial Sequence: Synthetic peptide
  Seed: MKWMMAMKY
MHWMMAMKY

SEQ ID NO: 166096 - protein, 11 aa, Artificial Sequence
  Description of Artificial Sequence: Synthetic peptide
  Seed: MKWMMAMKYPI
MHWMMAMKYPA

SEQ ID NO: 166097 - protein, 11 aa, Artificial Sequence
  Description of Artificial Sequence: Synthetic peptide
  Seed: MKWMMAMKYPI
MHWMMAMKYPF

SEQ ID NO: 166098 - protein, 11 aa, Artificial Sequence
  Description of Artificial Sequence: Synthetic peptide
  Seed: MKWMMAMKYPI
MHWMMAMKYPI

SEQ ID NO: 166099 - protein, 11 aa, Artificial Sequence
  Description of Artificial Sequence: Synthetic peptide
  Seed: MKWMMAMKYPI
MHWMMAMKYPL

SEQ ID NO: 166100 - protein, 11 aa, Artificial Sequence
  Description of Artificial Sequence: Synthetic peptide
  Seed: MKWMMAMKYPI
MHWMMAMKYPM

SEQ ID NO: 166101 - protein, 11 aa, Artificial Sequence
  Description of Artificial Sequence: Synthetic peptide
  Seed: MKWMMAMKYPI
MHWMMAMKYPV

SEQ ID NO: 166102 - protein, 11 aa, Artificial Sequence
  Description of Artificial Sequence: Synthetic peptide
  Seed: MKWMMAMKYPI
MHWMMAMKYPW

SEQ ID NO: 166103 - protein, 8 aa, Artificial Sequence
  Description of Artificial Sequence: Synthetic peptide
  Seed: MMAMKYPI
MIAMKYPA

SEQ ID NO: 166104 - protein, 8 aa, Artificial Sequence
  Description of Artificial Sequence: Synthetic peptide
  Seed: MMAMKYPI
MIAMKYPF

SEQ ID NO: 166105 - protein, 8 aa, Artificial Sequence
  Description of Artificial Sequence: Synthetic peptide
  Seed: MMAMKYPI
MIAMKYPI

SEQ ID NO: 166106 - protein, 9 aa, Artificial Sequence
  Description of Artificial Sequence: Synthetic peptide
  Seed: MMAMKYPIT
MIAMKYPIA

SEQ ID NO: 166107 - protein, 9 aa, Artificial Sequence
  Description of Artificial Sequence: Synthetic peptide
  Seed: MMAMKYPIT
MIAMKYPIF

SEQ ID NO: 166108 - protein, 9 aa, Artificial Sequence
  Description of Artificial Sequence: Synthetic peptide
  Seed: MMAMKYPIT
MIAMKYPII

SEQ ID NO: 166109 - protein, 9 aa, Artificial Sequence
  Description of Artificial Sequence: Synthetic peptide
  Seed: MMAMKYPIT
MIAMKYPIL

SEQ ID NO: 166110 - protein, 9 aa, Artificial Sequence
  Description of Artificial Sequence: Synthetic peptide
  Seed: MMAMKYPIT
MIAMKYPIM

SEQ ID NO: 166111 - protein, 10 aa, Artificial Sequence
  Description of Artificial Sequence: Synthetic peptide
  Seed: MMAMKYPITA
MIAMKYPITA

SEQ ID NO: 166112 - protein, 10 aa, Artificial Sequence
  Description of Artificial Sequence: Synthetic peptide
  Seed: MMAMKYPITA
MIAMKYPITF

SEQ ID NO: 166113 - protein, 10 aa, Artificial Sequence
  Description of Artificial Sequence: Synthetic peptide
  Seed: MMAMKYPITA
MIAMKYPITI

SEQ ID NO: 166114 - protein, 10 aa, Artificial Sequence
  Description of Artificial Sequence: Synthetic peptide
  Seed: MMAMKYPITA
MIAMKYPITL

SEQ ID NO: 166115 - protein, 10 aa, Artificial Sequence
  Description of Artificial Sequence: Synthetic peptide
  Seed: MMAMKYPITA
MIAMKYPITM

SEQ ID NO: 166116 - protein, 10 aa, Artificial Sequence
  Description of Artificial Sequence: Synthetic peptide
  Seed: MMAMKYPITA
MIAMKYPITV

SEQ ID NO: 166117 - protein, 10 aa, Artificial Sequence
  Description of Artificial Sequence: Synthetic peptide
  Seed: MMAMKYPITA
MIAMKYPITY

SEQ ID NO: 166118 - protein, 9 aa, Artificial Sequence
  Description of Artificial Sequence: Synthetic peptide
  Seed: MMAMKYPIT
MIAMKYPIV

SEQ ID NO: 166119 - protein, 8 aa, Artificial Sequence
  Description of Artificial Sequence: Synthetic peptide
  Seed: MMAMKYPI
MIAMKYPL

SEQ ID NO: 166120 - protein, 8 aa, Artificial Sequence
  Description of Artificial Sequence: Synthetic peptide
  Seed: MMAMKYPI
MIAMKYPM

SEQ ID NO: 166121 - protein, 8 aa, Artificial Sequence
  Description of Artificial Sequence: Synthetic peptide
  Seed: MMAMKYPI
MIAMKYPV

SEQ ID NO: 166122 - protein, 9 aa, Artificial Sequence
  Description of Artificial Sequence: Synthetic peptide
  Seed: MAMKYPITA
MIMKYPITA

SEQ ID NO: 166123 - protein, 9 aa, Artificial Sequence
  Description of Artificial Sequence: Synthetic peptide
  Seed: MAMKYPITA
MIMKYPITC

SEQ ID NO: 166124 - protein, 9 aa, Artificial Sequence
  Description of Artificial Sequence: Synthetic peptide
  Seed: MAMKYPITA
MIMKYPITF

SEQ ID NO: 166125 - protein, 9 aa, Artificial Sequence
  Description of Artificial Sequence: Synthetic peptide
  Seed: MAMKYPITA
MIMKYPITH

SEQ ID NO: 166126 - protein, 9 aa, Artificial Sequence
  Description of Artificial Sequence: Synthetic peptide
  Seed: MAMKYPITA
MIMKYPITI

SEQ ID NO: 166127 - protein, 9 aa, Artificial Sequence
  Description of Artificial Sequence: Synthetic peptide
  Seed: MAMKYPITA
MIMKYPITK

SEQ ID NO: 166128 - protein, 9 aa, Artificial Sequence
  Description of Artificial Sequence: Synthetic peptide
  Seed: MAMKYPITA
MIMKYPITL

SEQ ID NO: 166129 - protein, 9 aa, Artificial Sequence
  Description of Artificial Sequence: Synthetic peptide
  Seed: MAMKYPITA
MIMKYPITM

SEQ ID NO: 166130 - protein, 9 aa, Artificial Sequence
  Description of Artificial Sequence: Synthetic peptide
  Seed: MAMKYPITA
MIMKYPITS

SEQ ID NO: 166131 - protein, 9 aa, Artificial Sequence
  Description of Artificial Sequence: Synthetic peptide
  Seed: MAMKYPITA
MIMKYPITT

SEQ ID NO: 166132 - protein, 9 aa, Artificial Sequence
  Description of Artificial Sequence: Synthetic peptide
  Seed: MAMKYPITA
MIMKYPITV

SEQ ID NO: 166133 - protein, 9 aa, Artificial Sequence
  Description of Artificial Sequence: Synthetic peptide
  Seed: MAMKYPITA
MIMKYPITW

SEQ ID NO: 166134 - protein, 9 aa, Artificial Sequence
  Description of Artificial Sequence: Synthetic peptide
  Seed: MAMKYPITA
MIMKYPITY

SEQ ID NO: 166135 - protein, 9 aa, Artificial Sequence
  Description of Artificial Sequence: Synthetic peptide
  Seed: MKWMMAMKY
MIWMMAMKF

SEQ ID NO: 166136 - protein, 9 aa, Artificial Sequence
  Description of Artificial Sequence: Synthetic peptide
  Seed: MKWMMAMKY
MIWMMAMKM

SEQ ID NO: 166137 - protein, 9 aa, Artificial Sequence
  Description of Artificial Sequence: Synthetic peptide
  Seed: MKWMMAMKY
MIWMMAMKY

SEQ ID NO: 166138 - protein, 11 aa, Artificial Sequence
  Description of Artificial Sequence: Synthetic peptide
  Seed: MKWMMAMKYPI
MIWMMAMKYPA

SEQ ID NO: 166139 - protein, 11 aa, Artificial Sequence
  Description of Artificial Sequence: Synthetic peptide
  Seed: MKWMMAMKYPI
MIWMMAMKYPF

SEQ ID NO: 166140 - protein, 11 aa, Artificial Sequence
  Description of Artificial Sequence: Synthetic peptide
  Seed: MKWMMAMKYPI
MIWMMAMKYPI

SEQ ID NO: 166141 - protein, 11 aa, Artificial Sequence
  Description of Artificial Sequence: Synthetic peptide
  Seed: MKWMMAMKYPI
MIWMMAMKYPL

SEQ ID NO: 166142 - protein, 11 aa, Artificial Sequence
  Description of Artificial Sequence: Synthetic peptide
  Seed: MKWMMAMKYPI
MIWMMAMKYPM

SEQ ID NO: 166143 - protein, 11 aa, Artificial Sequence
  Description of Artificial Sequence: Synthetic peptide
  Seed: MKWMMAMKYPI
MIWMMAMKYPV

SEQ ID NO: 166144 - protein, 11 aa, Artificial Sequence
  Description of Artificial Sequence: Synthetic peptide
  Seed: MKWMMAMKYPI
MIWMMAMKYPW

SEQ ID NO: 166145 - protein, 8 aa, Artificial Sequence
  Description of Artificial Sequence: Synthetic peptide
  Seed: MMAMKYPI
MKAMKYPI

SEQ ID NO: 166146 - protein, 9 aa, Artificial Sequence
  Description of Artificial Sequence: Synthetic peptide
  Seed: MMAMKYPIT
MKAMKYPIL

SEQ ID NO: 166147 - protein, 9 aa, Artificial Sequence
  Description of Artificial Sequence: Synthetic peptide
  Seed: MMAMKYPIT
MKAMKYPIM

SEQ ID NO: 166148 - protein, 10 aa, Artificial Sequence
  Description of Artificial Sequence: Synthetic peptide
  Seed: MMAMKYPITA
MKAMKYPITA

SEQ ID NO: 166149 - protein, 10 aa, Artificial Sequence
  Description of Artificial Sequence: Synthetic peptide
  Seed: MMAMKYPITA
MKAMKYPITF

SEQ ID NO: 166150 - protein, 10 aa, Artificial Sequence
  Description of Artificial Sequence: Synthetic peptide
  Seed: MMAMKYPITA
MKAMKYPITH

SEQ ID NO: 166151 - protein, 10 aa, Artificial Sequence
  Description of Artificial Sequence: Synthetic peptide
  Seed: MMAMKYPITA
MKAMKYPITI

SEQ ID NO: 166152 - protein, 10 aa, Artificial Sequence
  Description of Artificial Sequence: Synthetic peptide
  Seed: MMAMKYPITA
MKAMKYPITL

SEQ ID NO: 166153 - protein, 10 aa, Artificial Sequence
  Description of Artificial Sequence: Synthetic peptide
  Seed: MMAMKYPITA
MKAMKYPITM

SEQ ID NO: 166154 - protein, 10 aa, Artificial Sequence
  Description of Artificial Sequence: Synthetic peptide
  Seed: MMAMKYPITA
MKAMKYPITV

SEQ ID NO: 166155 - protein, 10 aa, Artificial Sequence
  Description of Artificial Sequence: Synthetic peptide
  Seed: MMAMKYPITA
MKAMKYPITW

SEQ ID NO: 166156 - protein, 10 aa, Artificial Sequence
  Description of Artificial Sequence: Synthetic peptide
  Seed: MMAMKYPITA
MKAMKYPITY

SEQ ID NO: 166157 - protein, 8 aa, Artificial Sequence
  Description of Artificial Sequence: Synthetic peptide
  Seed: MMAMKYPI
MKAMKYPL

SEQ ID NO: 166158 - protein, 8 aa, Artificial Sequence
  Description of Artificial Sequence: Synthetic peptide
  Seed: MMAMKYPI
MKAMKYPM

SEQ ID NO: 166159 - protein, 8 aa, Artificial Sequence
  Description of Artificial Sequence: Synthetic peptide
  Seed: MMAMKYPI
MKAMKYPV

SEQ ID NO: 166160 - protein, 9 aa, Artificial Sequence
  Description of Artificial Sequence: Synthetic peptide
  Seed: MAMKYPITA
MKMKYPITA

SEQ ID NO: 166161 - protein, 9 aa, Artificial Sequence
  Description of Artificial Sequence: Synthetic peptide
  Seed: MAMKYPITA
MKMKYPITC

SEQ ID NO: 166162 - protein, 9 aa, Artificial Sequence
  Description of Artificial Sequence: Synthetic peptide
  Seed: MAMKYPITA
MKMKYPITF

SEQ ID NO: 166163 - protein, 9 aa, Artificial Sequence
  Description of Artificial Sequence: Synthetic peptide
  Seed: MAMKYPITA
MKMKYPITG

SEQ ID NO: 166164 - protein, 9 aa, Artificial Sequence
  Description of Artificial Sequence: Synthetic peptide
  Seed: MAMKYPITA
MKMKYPITH

SEQ ID NO: 166165 - protein, 9 aa, Artificial Sequence
  Description of Artificial Sequence: Synthetic peptide
  Seed: MAMKYPITA
MKMKYPITI

SEQ ID NO: 166166 - protein, 9 aa, Artificial Sequence
  Description of Artificial Sequence: Synthetic peptide
  Seed: MAMKYPITA
MKMKYPITL

SEQ ID NO: 166167 - protein, 9 aa, Artificial Sequence
  Description of Artificial Sequence: Synthetic peptide
  Seed: MAMKYPITA
MKMKYPITM

SEQ ID NO: 166168 - protein, 9 aa, Artificial Sequence
  Description of Artificial Sequence: Synthetic peptide
  Seed: MAMKYPITA
MKMKYPITN

SEQ ID NO: 166169 - protein, 9 aa, Artificial Sequence
  Description of Artificial Sequence: Synthetic peptide
  Seed: MAMKYPITA
MKMKYPITP

SEQ ID NO: 166170 - protein, 9 aa, Artificial Sequence
  Description of Artificial Sequence: Synthetic peptide
  Seed: MAMKYPITA
MKMKYPITQ

SEQ ID NO: 166171 - protein, 9 aa, Artificial Sequence
  Description of Artificial Sequence: Synthetic peptide
  Seed: MAMKYPITA
MKMKYPITS

SEQ ID NO: 166172 - protein, 9 aa, Artificial Sequence
  Description of Artificial Sequence: Synthetic peptide
  Seed: MAMKYPITA
MKMKYPITT

SEQ ID NO: 166173 - protein, 9 aa, Artificial Sequence
  Description of Artificial Sequence: Synthetic peptide
  Seed: MAMKYPITA
MKMKYPITV

SEQ ID NO: 166174 - protein, 9 aa, Artificial Sequence
  Description of Artificial Sequence: Synthetic peptide
  Seed: MAMKYPITA
MKMKYPITW

SEQ ID NO: 166175 - protein, 9 aa, Artificial Sequence
  Description of Artificial Sequence: Synthetic peptide
  Seed: MAMKYPITA
MKMKYPITY

SEQ ID NO: 166176 - protein, 9 aa, Artificial Sequence
  Description of Artificial Sequence: Synthetic peptide
  Seed: MKWMMAMKY
MKWMMAMKA

SEQ ID NO: 166177 - protein, 9 aa, Artificial Sequence
  Description of Artificial Sequence: Synthetic peptide
  Seed: MKWMMAMKY
MKWMMAMKF

SEQ ID NO: 166178 - protein, 9 aa, Artificial Sequence
  Description of Artificial Sequence: Synthetic peptide
  Seed: MKWMMAMKY
MKWMMAMKH

SEQ ID NO: 166179 - protein, 9 aa, Artificial Sequence
  Description of Artificial Sequence: Synthetic peptide
  Seed: MKWMMAMKY
MKWMMAMKI

SEQ ID NO: 166180 - protein, 9 aa, Artificial Sequence
  Description of Artificial Sequence: Synthetic peptide
  Seed: MKWMMAMKY
MKWMMAMKL

SEQ ID NO: 166181 - protein, 9 aa, Artificial Sequence
  Description of Artificial Sequence: Synthetic peptide
  Seed: MKWMMAMKY
MKWMMAMKM

SEQ ID NO: 166182 - protein, 9 aa, Artificial Sequence
  Description of Artificial Sequence: Synthetic peptide
  Seed: MKWMMAMKY
MKWMMAMKV

SEQ ID NO: 166183 - protein, 9 aa, Artificial Sequence
  Description of Artificial Sequence: Synthetic peptide
  Seed: MKWMMAMKY
MKWMMAMKW

SEQ ID NO: 166184 - protein, 11 aa, Artificial Sequence
  Description of Artificial Sequence: Synthetic peptide
  Seed: MKWMMAMKYPI
MKWMMAMKYPA

SEQ ID NO: 166185 - protein, 11 aa, Artificial Sequence
  Description of Artificial Sequence: Synthetic peptide
  Seed: MKWMMAMKYPI
MKWMMAMKYPF

SEQ ID NO: 166186 - protein, 11 aa, Artificial Sequence
  Description of Artificial Sequence: Synthetic peptide
  Seed: MKWMMAMKYPI
MKWMMAMKYPL

SEQ ID NO: 166187 - protein, 11 aa, Artificial Sequence
  Description of Artificial Sequence: Synthetic peptide
  Seed: MKWMMAMKYPI
MKWMMAMKYPM

SEQ ID NO: 166188 - protein, 11 aa, Artificial Sequence
  Description of Artificial Sequence: Synthetic peptide
  Seed: MKWMMAMKYPI
MKWMMAMKYPV

SEQ ID NO: 166189 - protein, 11 aa, Artificial Sequence
  Description of Artificial Sequence: Synthetic peptide
  Seed: MKWMMAMKYPI
MKWMMAMKYPW

SEQ ID NO: 166190 - protein, 8 aa, Artificial Sequence
  Description of Artificial Sequence: Synthetic peptide
  Seed: MMAMKYPI
MLAMKYPA

SEQ ID NO: 166191 - protein, 8 aa, Artificial Sequence
  Description of Artificial Sequence: Synthetic peptide
  Seed: MMAMKYPI
MLAMKYPC

SEQ ID NO: 166192 - protein, 8 aa, Artificial Sequence
  Description of Artificial Sequence: Synthetic peptide
  Seed: MMAMKYPI
MLAMKYPF

SEQ ID NO: 166193 - protein, 8 aa, Artificial Sequence
  Description of Artificial Sequence: Synthetic peptide
  Seed: MMAMKYPI
MLAMKYPI

SEQ ID NO: 166194 - protein, 9 aa, Artificial Sequence
  Description of Artificial Sequence: Synthetic peptide
  Seed: MMAMKYPIT
MLAMKYPIA

SEQ ID NO: 166195 - protein, 9 aa, Artificial Sequence
  Description of Artificial Sequence: Synthetic peptide
  Seed: MMAMKYPIT
MLAMKYPIC

SEQ ID NO: 166196 - protein, 9 aa, Artificial Sequence
  Description of Artificial Sequence: Synthetic peptide
  Seed: MMAMKYPIT
MLAMKYPIF

SEQ ID NO: 166197 - protein, 9 aa, Artificial Sequence
  Description of Artificial Sequence: Synthetic peptide
  Seed: MMAMKYPIT
MLAMKYPII

SEQ ID NO: 166198 - protein, 9 aa, Artificial Sequence
  Description of Artificial Sequence: Synthetic peptide
  Seed: MMAMKYPIT
MLAMKYPIL

SEQ ID NO: 166199 - protein, 9 aa, Artificial Sequence
  Description of Artificial Sequence: Synthetic peptide
  Seed: MMAMKYPIT
MLAMKYPIM

SEQ ID NO: 166200 - protein, 9 aa, Artificial Sequence
  Description of Artificial Sequence: Synthetic peptide
  Seed: MMAMKYPIT
MLAMKYPIS

SEQ ID NO: 166201 - protein, 9 aa, Artificial Sequence
  Description of Artificial Sequence: Synthetic peptide
  Seed: MMAMKYPIT
MLAMKYPIT

SEQ ID NO: 166202 - protein, 10 aa, Artificial Sequence
  Description of Artificial Sequence: Synthetic peptide
  Seed: MMAMKYPITA
MLAMKYPITA

SEQ ID NO: 166203 - protein, 10 aa, Artificial Sequence
  Description of Artificial Sequence: Synthetic peptide
  Seed: MMAMKYPITA
MLAMKYPITC

SEQ ID NO: 166204 - protein, 10 aa, Artificial Sequence
  Description of Artificial Sequence: Synthetic peptide
  Seed: MMAMKYPITA
MLAMKYPITF

SEQ ID NO: 166205 - protein, 10 aa, Artificial Sequence
  Description of Artificial Sequence: Synthetic peptide
  Seed: MMAMKYPITA
MLAMKYPITG

SEQ ID NO: 166206 - protein, 10 aa, Artificial Sequence
  Description of Artificial Sequence: Synthetic peptide
  Seed: MMAMKYPITA
MLAMKYPITH

SEQ ID NO: 166207 - protein, 10 aa, Artificial Sequence
  Description of Artificial Sequence: Synthetic peptide
  Seed: MMAMKYPITA
MLAMKYPITI

SEQ ID NO: 166208 - protein, 10 aa, Artificial Sequence
  Description of Artificial Sequence: Synthetic peptide
  Seed: MMAMKYPITA
MLAMKYPITL

SEQ ID NO: 166209 - protein, 10 aa, Artificial Sequence
  Description of Artificial Sequence: Synthetic peptide
  Seed: MMAMKYPITA
MLAMKYPITM

SEQ ID NO: 166210 - protein, 10 aa, Artificial Sequence
  Description of Artificial Sequence: Synthetic peptide
  Seed: MMAMKYPITA
MLAMKYPITS

SEQ ID NO: 166211 - protein, 10 aa, Artificial Sequence
  Description of Artificial Sequence: Synthetic peptide
  Seed: MMAMKYPITA
MLAMKYPITT

SEQ ID NO: 166212 - protein, 10 aa, Artificial Sequence
  Description of Artificial Sequence: Synthetic peptide
  Seed: MMAMKYPITA
MLAMKYPITV

SEQ ID NO: 166213 - protein, 10 aa, Artificial Sequence
  Description of Artificial Sequence: Synthetic peptide
  Seed: MMAMKYPITA
MLAMKYPITY

SEQ ID NO: 166214 - protein, 9 aa, Artificial Sequence
  Description of Artificial Sequence: Synthetic peptide
  Seed: MMAMKYPIT
MLAMKYPIV

SEQ ID NO: 166215 - protein, 8 aa, Artificial Sequence
  Description of Artificial Sequence: Synthetic peptide
  Seed: MMAMKYPI
MLAMKYPL

SEQ ID NO: 166216 - protein, 8 aa, Artificial Sequence
  Description of Artificial Sequence: Synthetic peptide
  Seed: MMAMKYPI
MLAMKYPM

SEQ ID NO: 166217 - protein, 8 aa, Artificial Sequence
  Description of Artificial Sequence: Synthetic peptide
  Seed: MMAMKYPI
MLAMKYPV

SEQ ID NO: 166218 - protein, 9 aa, Artificial Sequence
  Description of Artificial Sequence: Synthetic peptide
  Seed: MAMKYPITA
MLMKYPITA

SEQ ID NO: 166219 - protein, 9 aa, Artificial Sequence
  Description of Artificial Sequence: Synthetic peptide
  Seed: MAMKYPITA
MLMKYPITC

SEQ ID NO: 166220 - protein, 9 aa, Artificial Sequence
  Description of Artificial Sequence: Synthetic peptide
  Seed: MAMKYPITA
MLMKYPITE

SEQ ID NO: 166221 - protein, 9 aa, Artificial Sequence
  Description of Artificial Sequence: Synthetic peptide
  Seed: MAMKYPITA
MLMKYPITF

SEQ ID NO: 166222 - protein, 9 aa, Artificial Sequence
  Description of Artificial Sequence: Synthetic peptide
  Seed: MAMKYPITA
MLMKYPITG

SEQ ID NO: 166223 - protein, 9 aa, Artificial Sequence
  Description of Artificial Sequence: Synthetic peptide
  Seed: MAMKYPITA
MLMKYPITH

SEQ ID NO: 166224 - protein, 9 aa, Artificial Sequence
  Description of Artificial Sequence: Synthetic peptide
  Seed: MAMKYPITA
MLMKYPITI

SEQ ID NO: 166225 - protein, 9 aa, Artificial Sequence
  Description of Artificial Sequence: Synthetic peptide
  Seed: MAMKYPITA
MLMKYPITK

SEQ ID NO: 166226 - protein, 9 aa, Artificial Sequence
  Description of Artificial Sequence: Synthetic peptide
  Seed: MAMKYPITA
MLMKYPITL

SEQ ID NO: 166227 - protein, 9 aa, Artificial Sequence
  Description of Artificial Sequence: Synthetic peptide
  Seed: MAMKYPITA
MLMKYPITM

SEQ ID NO: 166228 - protein, 9 aa, Artificial Sequence
  Description of Artificial Sequence: Synthetic peptide
  Seed: MAMKYPITA
MLMKYPITP

SEQ ID NO: 166229 - protein, 9 aa, Artificial Sequence
  Description of Artificial Sequence: Synthetic peptide
  Seed: MAMKYPITA
MLMKYPITQ

SEQ ID NO: 166230 - protein, 9 aa, Artificial Sequence
  Description of Artificial Sequence: Synthetic peptide
  Seed: MAMKYPITA
MLMKYPITR

SEQ ID NO: 166231 - protein, 9 aa, Artificial Sequence
  Description of Artificial Sequence: Synthetic peptide
  Seed: MAMKYPITA
MLMKYPITS

SEQ ID NO: 166232 - protein, 9 aa, Artificial Sequence
  Description of Artificial Sequence: Synthetic peptide
  Seed: MAMKYPITA
MLMKYPITT

SEQ ID NO: 166233 - protein, 9 aa, Artificial Sequence
  Description of Artificial Sequence: Synthetic peptide
  Seed: MAMKYPITA
MLMKYPITV

SEQ ID NO: 166234 - protein, 9 aa, Artificial Sequence
  Description of Artificial Sequence: Synthetic peptide
  Seed: MAMKYPITA
MLMKYPITW

SEQ ID NO: 166235 - protein, 9 aa, Artificial Sequence
  Description of Artificial Sequence: Synthetic peptide
  Seed: MAMKYPITA
MLMKYPITY

SEQ ID NO: 166236 - protein, 9 aa, Artificial Sequence
  Description of Artificial Sequence: Synthetic peptide
  Seed: MKWMMAMKY
MLWMMAMKF

SEQ ID NO: 166237 - protein, 9 aa, Artificial Sequence
  Description of Artificial Sequence: Synthetic peptide
  Seed: MKWMMAMKY
MLWMMAMKH

SEQ ID NO: 166238 - protein, 9 aa, Artificial Sequence
  Description of Artificial Sequence: Synthetic peptide
  Seed: MKWMMAMKY
MLWMMAMKL

SEQ ID NO: 166239 - protein, 9 aa, Artificial Sequence
  Description of Artificial Sequence: Synthetic peptide
  Seed: MKWMMAMKY
MLWMMAMKM

SEQ ID NO: 166240 - protein, 9 aa, Artificial Sequence
  Description of Artificial Sequence: Synthetic peptide
  Seed: MKWMMAMKY
MLWMMAMKY

SEQ ID NO: 166241 - protein, 11 aa, Artificial Sequence
  Description of Artificial Sequence: Synthetic peptide
  Seed: MKWMMAMKYPI
MLWMMAMKYPA

SEQ ID NO: 166242 - protein, 11 aa, Artificial Sequence
  Description of Artificial Sequence: Synthetic peptide
  Seed: MKWMMAMKYPI
MLWMMAMKYPF

SEQ ID NO: 166243 - protein, 11 aa, Artificial Sequence
  Description of Artificial Sequence: Synthetic peptide
  Seed: MKWMMAMKYPI
MLWMMAMKYPI

SEQ ID NO: 166244 - protein, 11 aa, Artificial Sequence
  Description of Artificial Sequence: Synthetic peptide
  Seed: MKWMMAMKYPI
MLWMMAMKYPL

SEQ ID NO: 166245 - protein, 11 aa, Artificial Sequence
  Description of Artificial Sequence: Synthetic peptide
  Seed: MKWMMAMKYPI
MLWMMAMKYPM

SEQ ID NO: 166246 - protein, 11 aa, Artificial Sequence
  Description of Artificial Sequence: Synthetic peptide
  Seed: MKWMMAMKYPI
MLWMMAMKYPT

SEQ ID NO: 166247 - protein, 11 aa, Artificial Sequence
  Description of Artificial Sequence: Synthetic peptide
  Seed: MKWMMAMKYPI
MLWMMAMKYPV

SEQ ID NO: 166248 - protein, 11 aa, Artificial Sequence
  Description of Artificial Sequence: Synthetic peptide
  Seed: MKWMMAMKYPI
MLWMMAMKYPW

SEQ ID NO: 166249 - protein, 8 aa, Artificial Sequence
  Description of Artificial Sequence: Synthetic peptide
  Seed: MMAMKYPI
MMAMKYPA

SEQ ID NO: 166250 - protein, 8 aa, Artificial Sequence
  Description of Artificial Sequence: Synthetic peptide
  Seed: MMAMKYPI
MMAMKYPC

SEQ ID NO: 166251 - protein, 8 aa, Artificial Sequence
  Description of Artificial Sequence: Synthetic peptide
  Seed: MMAMKYPI
MMAMKYPF

SEQ ID NO: 166252 - protein, 9 aa, Artificial Sequence
  Description of Artificial Sequence: Synthetic peptide
  Seed: MMAMKYPIT
MMAMKYPIA

SEQ ID NO: 166253 - protein, 9 aa, Artificial Sequence
  Description of Artificial Sequence: Synthetic peptide
  Seed: MMAMKYPIT
MMAMKYPIC

SEQ ID NO: 166254 - protein, 9 aa, Artificial Sequence
  Description of Artificial Sequence: Synthetic peptide
  Seed: MMAMKYPIT
MMAMKYPIF

SEQ ID NO: 166255 - protein, 9 aa, Artificial Sequence
  Description of Artificial Sequence: Synthetic peptide
  Seed: MMAMKYPIT
MMAMKYPIG

SEQ ID NO: 166256 - protein, 9 aa, Artificial Sequence
  Description of Artificial Sequence: Synthetic peptide
  Seed: MMAMKYPIT
MMAMKYPII

SEQ ID NO: 166257 - protein, 9 aa, Artificial Sequence
  Description of Artificial Sequence: Synthetic peptide
  Seed: MMAMKYPIT
MMAMKYPIL

SEQ ID NO: 166258 - protein, 9 aa, Artificial Sequence
  Description of Artificial Sequence: Synthetic peptide
  Seed: MMAMKYPIT
MMAMKYPIM

SEQ ID NO: 166259 - protein, 9 aa, Artificial Sequence
  Description of Artificial Sequence: Synthetic peptide
  Seed: MMAMKYPIT
MMAMKYPIS

SEQ ID NO: 166260 - protein, 10 aa, Artificial Sequence
  Description of Artificial Sequence: Synthetic peptide
  Seed: MMAMKYPITA
MMAMKYPITC

SEQ ID NO: 166261 - protein, 10 aa, Artificial Sequence
  Description of Artificial Sequence: Synthetic peptide
  Seed: MMAMKYPITA
MMAMKYPITF

SEQ ID NO: 166262 - protein, 10 aa, Artificial Sequence
  Description of Artificial Sequence: Synthetic peptide
  Seed: MMAMKYPITA
MMAMKYPITG

SEQ ID NO: 166263 - protein, 10 aa, Artificial Sequence
  Description of Artificial Sequence: Synthetic peptide
  Seed: MMAMKYPITA
MMAMKYPITH

SEQ ID NO: 166264 - protein, 10 aa, Artificial Sequence
  Description of Artificial Sequence: Synthetic peptide
  Seed: MMAMKYPITA
MMAMKYPITI

SEQ ID NO: 166265 - protein, 10 aa, Artificial Sequence
  Description of Artificial Sequence: Synthetic peptide
  Seed: MMAMKYPITA
MMAMKYPITL

SEQ ID NO: 166266 - protein, 10 aa, Artificial Sequence
  Description of Artificial Sequence: Synthetic peptide
  Seed: MMAMKYPITA
MMAMKYPITM

SEQ ID NO: 166267 - protein, 10 aa, Artificial Sequence
  Description of Artificial Sequence: Synthetic peptide
  Seed: MMAMKYPITA
MMAMKYPITP

SEQ ID NO: 166268 - protein, 10 aa, Artificial Sequence
  Description of Artificial Sequence: Synthetic peptide
  Seed: MMAMKYPITA
MMAMKYPITS

SEQ ID NO: 166269 - protein, 10 aa, Artificial Sequence
  Description of Artificial Sequence: Synthetic peptide
  Seed: MMAMKYPITA
MMAMKYPITT

SEQ ID NO: 166270 - protein, 10 aa, Artificial Sequence
  Description of Artificial Sequence: Synthetic peptide
  Seed: MMAMKYPITA
MMAMKYPITV

SEQ ID NO: 166271 - protein, 10 aa, Artificial Sequence
  Description of Artificial Sequence: Synthetic peptide
  Seed: MMAMKYPITA
MMAMKYPITW

SEQ ID NO: 166272 - protein, 10 aa, Artificial Sequence
  Description of Artificial Sequence: Synthetic peptide
  Seed: MMAMKYPITA
MMAMKYPITY

SEQ ID NO: 166273 - protein, 9 aa, Artificial Sequence
  Description of Artificial Sequence: Synthetic peptide
  Seed: MMAMKYPIT
MMAMKYPIV

SEQ ID NO: 166274 - protein, 8 aa, Artificial Sequence
  Description of Artificial Sequence: Synthetic peptide
  Seed: MMAMKYPI
MMAMKYPL

SEQ ID NO: 166275 - protein, 8 aa, Artificial Sequence
  Description of Artificial Sequence: Synthetic peptide
  Seed: MMAMKYPI
MMAMKYPM

SEQ ID NO: 166276 - protein, 8 aa, Artificial Sequence
  Description of Artificial Sequence: Synthetic peptide
  Seed: MMAMKYPI
MMAMKYPS

SEQ ID NO: 166277 - protein, 8 aa, Artificial Sequence
  Description of Artificial Sequence: Synthetic peptide
  Seed: MMAMKYPI
MMAMKYPT

SEQ ID NO: 166278 - protein, 8 aa, Artificial Sequence
  Description of Artificial Sequence: Synthetic peptide
  Seed: MMAMKYPI
MMAMKYPV

SEQ ID NO: 166279 - protein, 9 aa, Artificial Sequence
  Description of Artificial Sequence: Synthetic peptide
  Seed: MAMKYPITA
MMMKYPITA

SEQ ID NO: 166280 - protein, 9 aa, Artificial Sequence
  Description of Artificial Sequence: Synthetic peptide
  Seed: MAMKYPITA
MMMKYPITC

SEQ ID NO: 166281 - protein, 9 aa, Artificial Sequence
  Description of Artificial Sequence: Synthetic peptide
  Seed: MAMKYPITA
MMMKYPITE

SEQ ID NO: 166282 - protein, 9 aa, Artificial Sequence
  Description of Artificial Sequence: Synthetic peptide
  Seed: MAMKYPITA
MMMKYPITF

SEQ ID NO: 166283 - protein, 9 aa, Artificial Sequence
  Description of Artificial Sequence: Synthetic peptide
  Seed: MAMKYPITA
MMMKYPITG

SEQ ID NO: 166284 - protein, 9 aa, Artificial Sequence
  Description of Artificial Sequence: Synthetic peptide
  Seed: MAMKYPITA
MMMKYPITH

SEQ ID NO: 166285 - protein, 9 aa, Artificial Sequence
  Description of Artificial Sequence: Synthetic peptide
  Seed: MAMKYPITA
MMMKYPITI

SEQ ID NO: 166286 - protein, 9 aa, Artificial Sequence
  Description of Artificial Sequence: Synthetic peptide
  Seed: MAMKYPITA
MMMKYPITK

SEQ ID NO: 166287 - protein, 9 aa, Artificial Sequence
  Description of Artificial Sequence: Synthetic peptide
  Seed: MAMKYPITA
MMMKYPITL

SEQ ID NO: 166288 - protein, 9 aa, Artificial Sequence
  Description of Artificial Sequence: Synthetic peptide
  Seed: MAMKYPITA
MMMKYPITN

SEQ ID NO: 166289 - protein, 9 aa, Artificial Sequence
  Description of Artificial Sequence: Synthetic peptide
  Seed: MAMKYPITA
MMMKYPITP

SEQ ID NO: 166290 - protein, 9 aa, Artificial Sequence
  Description of Artificial Sequence: Synthetic peptide
  Seed: MAMKYPITA
MMMKYPITQ

SEQ ID NO: 166291 - protein, 9 aa, Artificial Sequence
  Description of Artificial Sequence: Synthetic peptide
  Seed: MAMKYPITA
MMMKYPITR

SEQ ID NO: 166292 - protein, 9 aa, Artificial Sequence
  Description of Artificial Sequence: Synthetic peptide
  Seed: MAMKYPITA
MMMKYPITS

SEQ ID NO: 166293 - protein, 9 aa, Artificial Sequence
  Description of Artificial Sequence: Synthetic peptide
  Seed: MAMKYPITA
MMMKYPITT

SEQ ID NO: 166294 - protein, 9 aa, Artificial Sequence
  Description of Artificial Sequence: Synthetic peptide
  Seed: MAMKYPITA
MMMKYPITV

SEQ ID NO: 166295 - protein, 9 aa, Artificial Sequence
  Description of Artificial Sequence: Synthetic peptide
  Seed: MAMKYPITA
MMMKYPITW

SEQ ID NO: 166296 - protein, 9 aa, Artificial Sequence
  Description of Artificial Sequence: Synthetic peptide
  Seed: MAMKYPITA
MMMKYPITY

SEQ ID NO: 166297 - protein, 9 aa, Artificial Sequence
  Description of Artificial Sequence: Synthetic peptide
  Seed: MKWMMAMKY
MMWMMAMKA

SEQ ID NO: 166298 - protein, 9 aa, Artificial Sequence
  Description of Artificial Sequence: Synthetic peptide
  Seed: MKWMMAMKY
MMWMMAMKF

SEQ ID NO: 166299 - protein, 9 aa, Artificial Sequence
  Description of Artificial Sequence: Synthetic peptide
  Seed: MKWMMAMKY
MMWMMAMKH

SEQ ID NO: 166300 - protein, 9 aa, Artificial Sequence
  Description of Artificial Sequence: Synthetic peptide
  Seed: MKWMMAMKY
MMWMMAMKI

SEQ ID NO: 166301 - protein, 9 aa, Artificial Sequence
  Description of Artificial Sequence: Synthetic peptide
  Seed: MKWMMAMKY
MMWMMAMKK

SEQ ID NO: 166302 - protein, 9 aa, Artificial Sequence
  Description of Artificial Sequence: Synthetic peptide
  Seed: MKWMMAMKY
MMWMMAMKL

SEQ ID NO: 166303 - protein, 9 aa, Artificial Sequence
  Description of Artificial Sequence: Synthetic peptide
  Seed: MKWMMAMKY
MMWMMAMKM

SEQ ID NO: 166304 - protein, 9 aa, Artificial Sequence
  Description of Artificial Sequence: Synthetic peptide
  Seed: MKWMMAMKY
MMWMMAMKV

SEQ ID NO: 166305 - protein, 9 aa, Artificial Sequence
  Description of Artificial Sequence: Synthetic peptide
  Seed: MKWMMAMKY
MMWMMAMKW

SEQ ID NO: 166306 - protein, 9 aa, Artificial Sequence
  Description of Artificial Sequence: Synthetic peptide
  Seed: MKWMMAMKY
MMWMMAMKY

SEQ ID NO: 166307 - protein, 11 aa, Artificial Sequence
  Description of Artificial Sequence: Synthetic peptide
  Seed: MKWMMAMKYPI
MMWMMAMKYPA

SEQ ID NO: 166308 - protein, 11 aa, Artificial Sequence
  Description of Artificial Sequence: Synthetic peptide
  Seed: MKWMMAMKYPI
MMWMMAMKYPF

SEQ ID NO: 166309 - protein, 11 aa, Artificial Sequence
  Description of Artificial Sequence: Synthetic peptide
  Seed: MKWMMAMKYPI
MMWMMAMKYPI

SEQ ID NO: 166310 - protein, 11 aa, Artificial Sequence
  Description of Artificial Sequence: Synthetic peptide
  Seed: MKWMMAMKYPI
MMWMMAMKYPL

SEQ ID NO: 166311 - protein, 11 aa, Artificial Sequence
  Description of Artificial Sequence: Synthetic peptide
  Seed: MKWMMAMKYPI
MMWMMAMKYPM

SEQ ID NO: 166312 - protein, 11 aa, Artificial Sequence
  Description of Artificial Sequence: Synthetic peptide
  Seed: MKWMMAMKYPI
MMWMMAMKYPT

SEQ ID NO: 166313 - protein, 11 aa, Artificial Sequence
  Description of Artificial Sequence: Synthetic peptide
  Seed: MKWMMAMKYPI
MMWMMAMKYPV

SEQ ID NO: 166314 - protein, 11 aa, Artificial Sequence
  Description of Artificial Sequence: Synthetic peptide
  Seed: MKWMMAMKYPI
MMWMMAMKYPW

SEQ ID NO: 166315 - protein, 11 aa, Artificial Sequence
  Description of Artificial Sequence: Synthetic peptide
  Seed: MKWMMAMKYPI
MMWMMAMKYPY

SEQ ID NO: 166316 - protein, 8 aa, Artificial Sequence
  Description of Artificial Sequence: Synthetic peptide
  Seed: MMAMKYPI
MNAMKYPF

SEQ ID NO: 166317 - protein, 8 aa, Artificial Sequence
  Description of Artificial Sequence: Synthetic peptide
  Seed: MMAMKYPI
MNAMKYPI

SEQ ID NO: 166318 - protein, 9 aa, Artificial Sequence
  Description of Artificial Sequence: Synthetic peptide
  Seed: MMAMKYPIT
MNAMKYPII

SEQ ID NO: 166319 - protein, 9 aa, Artificial Sequence
  Description of Artificial Sequence: Synthetic peptide
  Seed: MMAMKYPIT
MNAMKYPIL

SEQ ID NO: 166320 - protein, 9 aa, Artificial Sequence
  Description of Artificial Sequence: Synthetic peptide
  Seed: MMAMKYPIT
MNAMKYPIM

SEQ ID NO: 166321 - protein, 10 aa, Artificial Sequence
  Description of Artificial Sequence: Synthetic peptide
  Seed: MMAMKYPITA
MNAMKYPITA

SEQ ID NO: 166322 - protein, 10 aa, Artificial Sequence
  Description of Artificial Sequence: Synthetic peptide
  Seed: MMAMKYPITA
MNAMKYPITF

SEQ ID NO: 166323 - protein, 10 aa, Artificial Sequence
  Description of Artificial Sequence: Synthetic peptide
  Seed: MMAMKYPITA
MNAMKYPITL

SEQ ID NO: 166324 - protein, 10 aa, Artificial Sequence
  Description of Artificial Sequence: Synthetic peptide
  Seed: MMAMKYPITA
MNAMKYPITM

SEQ ID NO: 166325 - protein, 10 aa, Artificial Sequence
  Description of Artificial Sequence: Synthetic peptide
  Seed: MMAMKYPITA
MNAMKYPITV

SEQ ID NO: 166326 - protein, 10 aa, Artificial Sequence
  Description of Artificial Sequence: Synthetic peptide
  Seed: MMAMKYPITA
MNAMKYPITY

SEQ ID NO: 166327 - protein, 9 aa, Artificial Sequence
  Description of Artificial Sequence: Synthetic peptide
  Seed: MMAMKYPIT
MNAMKYPIV

SEQ ID NO: 166328 - protein, 8 aa, Artificial Sequence
  Description of Artificial Sequence: Synthetic peptide
  Seed: MMAMKYPI
MNAMKYPL

SEQ ID NO: 166329 - protein, 8 aa, Artificial Sequence
  Description of Artificial Sequence: Synthetic peptide
  Seed: MMAMKYPI
MNAMKYPM

SEQ ID NO: 166330 - protein, 8 aa, Artificial Sequence
  Description of Artificial Sequence: Synthetic peptide
  Seed: MMAMKYPI
MNAMKYPV

SEQ ID NO: 166331 - protein, 9 aa, Artificial Sequence
  Description of Artificial Sequence: Synthetic peptide
  Seed: MAMKYPITA
MNMKYPITA

SEQ ID NO: 166332 - protein, 9 aa, Artificial Sequence
  Description of Artificial Sequence: Synthetic peptide
  Seed: MAMKYPITA
MNMKYPITF

SEQ ID NO: 166333 - protein, 9 aa, Artificial Sequence
  Description of Artificial Sequence: Synthetic peptide
  Seed: MAMKYPITA
MNMKYPITH

SEQ ID NO: 166334 - protein, 9 aa, Artificial Sequence
  Description of Artificial Sequence: Synthetic peptide
  Seed: MAMKYPITA
MNMKYPITI

SEQ ID NO: 166335 - protein, 9 aa, Artificial Sequence
  Description of Artificial Sequence: Synthetic peptide
  Seed: MAMKYPITA
MNMKYPITK

SEQ ID NO: 166336 - protein, 9 aa, Artificial Sequence
  Description of Artificial Sequence: Synthetic peptide
  Seed: MAMKYPITA
MNMKYPITL

SEQ ID NO: 166337 - protein, 9 aa, Artificial Sequence
  Description of Artificial Sequence: Synthetic peptide
  Seed: MAMKYPITA
MNMKYPITM

SEQ ID NO: 166338 - protein, 9 aa, Artificial Sequence
  Description of Artificial Sequence: Synthetic peptide
  Seed: MAMKYPITA
MNMKYPITV

SEQ ID NO: 166339 - protein, 9 aa, Artificial Sequence
  Description of Artificial Sequence: Synthetic peptide
  Seed: MAMKYPITA
MNMKYPITW

SEQ ID NO: 166340 - protein, 9 aa, Artificial Sequence
  Description of Artificial Sequence: Synthetic peptide
  Seed: MAMKYPITA
MNMKYPITY

SEQ ID NO: 166341 - protein, 9 aa, Artificial Sequence
  Description of Artificial Sequence: Synthetic peptide
  Seed: MKWMMAMKY
MNWMMAMKF

SEQ ID NO: 166342 - protein, 9 aa, Artificial Sequence
  Description of Artificial Sequence: Synthetic peptide
  Seed: MKWMMAMKY
MNWMMAMKL

SEQ ID NO: 166343 - protein, 9 aa, Artificial Sequence
  Description of Artificial Sequence: Synthetic peptide
  Seed: MKWMMAMKY
MNWMMAMKM

SEQ ID NO: 166344 - protein, 9 aa, Artificial Sequence
  Description of Artificial Sequence: Synthetic peptide
  Seed: MKWMMAMKY
MNWMMAMKY

SEQ ID NO: 166345 - protein, 11 aa, Artificial Sequence
  Description of Artificial Sequence: Synthetic peptide
  Seed: MKWMMAMKYPI
MNWMMAMKYPA

SEQ ID NO: 166346 - protein, 11 aa, Artificial Sequence
  Description of Artificial Sequence: Synthetic peptide
  Seed: MKWMMAMKYPI
MNWMMAMKYPF

SEQ ID NO: 166347 - protein, 11 aa, Artificial Sequence
  Description of Artificial Sequence: Synthetic peptide
  Seed: MKWMMAMKYPI
MNWMMAMKYPI

SEQ ID NO: 166348 - protein, 11 aa, Artificial Sequence
  Description of Artificial Sequence: Synthetic peptide
  Seed: MKWMMAMKYPI
MNWMMAMKYPL

SEQ ID NO: 166349 - protein, 11 aa, Artificial Sequence
  Description of Artificial Sequence: Synthetic peptide
  Seed: MKWMMAMKYPI
MNWMMAMKYPM

SEQ ID NO: 166350 - protein, 11 aa, Artificial Sequence
  Description of Artificial Sequence: Synthetic peptide
  Seed: MKWMMAMKYPI
MNWMMAMKYPV

SEQ ID NO: 166351 - protein, 11 aa, Artificial Sequence
  Description of Artificial Sequence: Synthetic peptide
  Seed: MKWMMAMKYPI
MNWMMAMKYPW

SEQ ID NO: 166352 - protein, 8 aa, Artificial Sequence
  Description of Artificial Sequence: Synthetic peptide
  Seed: MMAMKYPI
MPAMKYPA

SEQ ID NO: 166353 - protein, 8 aa, Artificial Sequence
  Description of Artificial Sequence: Synthetic peptide
  Seed: MMAMKYPI
MPAMKYPC

SEQ ID NO: 166354 - protein, 8 aa, Artificial Sequence
  Description of Artificial Sequence: Synthetic peptide
  Seed: MMAMKYPI
MPAMKYPF

SEQ ID NO: 166355 - protein, 8 aa, Artificial Sequence
  Description of Artificial Sequence: Synthetic peptide
  Seed: MMAMKYPI
MPAMKYPI

SEQ ID NO: 166356 - protein, 9 aa, Artificial Sequence
  Description of Artificial Sequence: Synthetic peptide
  Seed: MMAMKYPIT
MPAMKYPIA

SEQ ID NO: 166357 - protein, 9 aa, Artificial Sequence
  Description of Artificial Sequence: Synthetic peptide
  Seed: MMAMKYPIT
MPAMKYPIC

SEQ ID NO: 166358 - protein, 9 aa, Artificial Sequence
  Description of Artificial Sequence: Synthetic peptide
  Seed: MMAMKYPIT
MPAMKYPIF

SEQ ID NO: 166359 - protein, 9 aa, Artificial Sequence
  Description of Artificial Sequence: Synthetic peptide
  Seed: MMAMKYPIT
MPAMKYPIG

SEQ ID NO: 166360 - protein, 9 aa, Artificial Sequence
  Description of Artificial Sequence: Synthetic peptide
  Seed: MMAMKYPIT
MPAMKYPII

SEQ ID NO: 166361 - protein, 9 aa, Artificial Sequence
  Description of Artificial Sequence: Synthetic peptide
  Seed: MMAMKYPIT
MPAMKYPIL

SEQ ID NO: 166362 - protein, 9 aa, Artificial Sequence
  Description of Artificial Sequence: Synthetic peptide
  Seed: MMAMKYPIT
MPAMKYPIM

SEQ ID NO: 166363 - protein, 9 aa, Artificial Sequence
  Description of Artificial Sequence: Synthetic peptide
  Seed: MMAMKYPIT
MPAMKYPIT

SEQ ID NO: 166364 - protein, 10 aa, Artificial Sequence
  Description of Artificial Sequence: Synthetic peptide
  Seed: MMAMKYPITA
MPAMKYPITA

SEQ ID NO: 166365 - protein, 10 aa, Artificial Sequence
  Description of Artificial Sequence: Synthetic peptide
  Seed: MMAMKYPITA
MPAMKYPITC

SEQ ID NO: 166366 - protein, 10 aa, Artificial Sequence
  Description of Artificial Sequence: Synthetic peptide
  Seed: MMAMKYPITA
MPAMKYPITF

SEQ ID NO: 166367 - protein, 10 aa, Artificial Sequence
  Description of Artificial Sequence: Synthetic peptide
  Seed: MMAMKYPITA
MPAMKYPITG

SEQ ID NO: 166368 - protein, 10 aa, Artificial Sequence
  Description of Artificial Sequence: Synthetic peptide
  Seed: MMAMKYPITA
MPAMKYPITI

SEQ ID NO: 166369 - protein, 10 aa, Artificial Sequence
  Description of Artificial Sequence: Synthetic peptide
  Seed: MMAMKYPITA
MPAMKYPITL

SEQ ID NO: 166370 - protein, 10 aa, Artificial Sequence
  Description of Artificial Sequence: Synthetic peptide
  Seed: MMAMKYPITA
MPAMKYPITM

SEQ ID NO: 166371 - protein, 10 aa, Artificial Sequence
  Description of Artificial Sequence: Synthetic peptide
  Seed: MMAMKYPITA
MPAMKYPITP

SEQ ID NO: 166372 - protein, 10 aa, Artificial Sequence
  Description of Artificial Sequence: Synthetic peptide
  Seed: MMAMKYPITA
MPAMKYPITS

SEQ ID NO: 166373 - protein, 10 aa, Artificial Sequence
  Description of Artificial Sequence: Synthetic peptide
  Seed: MMAMKYPITA
MPAMKYPITT

SEQ ID NO: 166374 - protein, 10 aa, Artificial Sequence
  Description of Artificial Sequence: Synthetic peptide
  Seed: MMAMKYPITA
MPAMKYPITV

SEQ ID NO: 166375 - protein, 10 aa, Artificial Sequence
  Description of Artificial Sequence: Synthetic peptide
  Seed: MMAMKYPITA
MPAMKYPITY

SEQ ID NO: 166376 - protein, 9 aa, Artificial Sequence
  Description of Artificial Sequence: Synthetic peptide
  Seed: MMAMKYPIT
MPAMKYPIV

SEQ ID NO: 166377 - protein, 8 aa, Artificial Sequence
  Description of Artificial Sequence: Synthetic peptide
  Seed: MMAMKYPI
MPAMKYPL

SEQ ID NO: 166378 - protein, 8 aa, Artificial Sequence
  Description of Artificial Sequence: Synthetic peptide
  Seed: MMAMKYPI
MPAMKYPM

SEQ ID NO: 166379 - protein, 8 aa, Artificial Sequence
  Description of Artificial Sequence: Synthetic peptide
  Seed: MMAMKYPI
MPAMKYPT

SEQ ID NO: 166380 - protein, 8 aa, Artificial Sequence
  Description of Artificial Sequence: Synthetic peptide
  Seed: MMAMKYPI
MPAMKYPV

SEQ ID NO: 166381 - protein, 9 aa, Artificial Sequence
  Description of Artificial Sequence: Synthetic peptide
  Seed: MAMKYPITA
MPMKYPITA

SEQ ID NO: 166382 - protein, 9 aa, Artificial Sequence
  Description of Artificial Sequence: Synthetic peptide
  Seed: MAMKYPITA
MPMKYPITC

SEQ ID NO: 166383 - protein, 9 aa, Artificial Sequence
  Description of Artificial Sequence: Synthetic peptide
  Seed: MAMKYPITA
MPMKYPITD

SEQ ID NO: 166384 - protein, 9 aa, Artificial Sequence
  Description of Artificial Sequence: Synthetic peptide
  Seed: MAMKYPITA
MPMKYPITE

SEQ ID NO: 166385 - protein, 9 aa, Artificial Sequence
  Description of Artificial Sequence: Synthetic peptide
  Seed: MAMKYPITA
MPMKYPITF

SEQ ID NO: 166386 - protein, 9 aa, Artificial Sequence
  Description of Artificial Sequence: Synthetic peptide
  Seed: MAMKYPITA
MPMKYPITG

SEQ ID NO: 166387 - protein, 9 aa, Artificial Sequence
  Description of Artificial Sequence: Synthetic peptide
  Seed: MAMKYPITA
MPMKYPITH

SEQ ID NO: 166388 - protein, 9 aa, Artificial Sequence
  Description of Artificial Sequence: Synthetic peptide
  Seed: MAMKYPITA
MPMKYPITI

SEQ ID NO: 166389 - protein, 9 aa, Artificial Sequence
  Description of Artificial Sequence: Synthetic peptide
  Seed: MAMKYPITA
MPMKYPITK

SEQ ID NO: 166390 - protein, 9 aa, Artificial Sequence
  Description of Artificial Sequence: Synthetic peptide
  Seed: MAMKYPITA
MPMKYPITL

SEQ ID NO: 166391 - protein, 9 aa, Artificial Sequence
  Description of Artificial Sequence: Synthetic peptide
  Seed: MAMKYPITA
MPMKYPITM

SEQ ID NO: 166392 - protein, 9 aa, Artificial Sequence
  Description of Artificial Sequence: Synthetic peptide
  Seed: MAMKYPITA
MPMKYPITN

SEQ ID NO: 166393 - protein, 9 aa, Artificial Sequence
  Description of Artificial Sequence: Synthetic peptide
  Seed: MAMKYPITA
MPMKYPITP

SEQ ID NO: 166394 - protein, 9 aa, Artificial Sequence
  Description of Artificial Sequence: Synthetic peptide
  Seed: MAMKYPITA
MPMKYPITQ

SEQ ID NO: 166395 - protein, 9 aa, Artificial Sequence
  Description of Artificial Sequence: Synthetic peptide
  Seed: MAMKYPITA
MPMKYPITR

SEQ ID NO: 166396 - protein, 9 aa, Artificial Sequence
  Description of Artificial Sequence: Synthetic peptide
  Seed: MAMKYPITA
MPMKYPITS

SEQ ID NO: 166397 - protein, 9 aa, Artificial Sequence
  Description of Artificial Sequence: Synthetic peptide
  Seed: MAMKYPITA
MPMKYPITT

SEQ ID NO: 166398 - protein, 9 aa, Artificial Sequence
  Description of Artificial Sequence: Synthetic peptide
  Seed: MAMKYPITA
MPMKYPITV

SEQ ID NO: 166399 - protein, 9 aa, Artificial Sequence
  Description of Artificial Sequence: Synthetic peptide
  Seed: MAMKYPITA
MPMKYPITW

SEQ ID NO: 166400 - protein, 9 aa, Artificial Sequence
  Description of Artificial Sequence: Synthetic peptide
  Seed: MAMKYPITA
MPMKYPITY

SEQ ID NO: 166401 - protein, 9 aa, Artificial Sequence
  Description of Artificial Sequence: Synthetic peptide
  Seed: MEVVFPNEV
MPVVFPNEF

SEQ ID NO: 166402 - protein, 9 aa, Artificial Sequence
  Description of Artificial Sequence: Synthetic peptide
  Seed: MEVVFPNEV
MPVVFPNEY

SEQ ID NO: 166403 - protein, 9 aa, Artificial Sequence
  Description of Artificial Sequence: Synthetic peptide
  Seed: MKWMMAMKY
MPWMMAMKF

SEQ ID NO: 166404 - protein, 9 aa, Artificial Sequence
  Description of Artificial Sequence: Synthetic peptide
  Seed: MKWMMAMKY
MPWMMAMKM

SEQ ID NO: 166405 - protein, 9 aa, Artificial Sequence
  Description of Artificial Sequence: Synthetic peptide
  Seed: MKWMMAMKY
MPWMMAMKY

SEQ ID NO: 166406 - protein, 11 aa, Artificial Sequence
  Description of Artificial Sequence: Synthetic peptide
  Seed: MKWMMAMKYPI
MPWMMAMKYPA

SEQ ID NO: 166407 - protein, 11 aa, Artificial Sequence
  Description of Artificial Sequence: Synthetic peptide
  Seed: MKWMMAMKYPI
MPWMMAMKYPF

SEQ ID NO: 166408 - protein, 11 aa, Artificial Sequence
  Description of Artificial Sequence: Synthetic peptide
  Seed: MKWMMAMKYPI
MPWMMAMKYPI

SEQ ID NO: 166409 - protein, 11 aa, Artificial Sequence
  Description of Artificial Sequence: Synthetic peptide
  Seed: MKWMMAMKYPI
MPWMMAMKYPL

SEQ ID NO: 166410 - protein, 11 aa, Artificial Sequence
  Description of Artificial Sequence: Synthetic peptide
  Seed: MKWMMAMKYPI
MPWMMAMKYPM

SEQ ID NO: 166411 - protein, 11 aa, Artificial Sequence
  Description of Artificial Sequence: Synthetic peptide
  Seed: MKWMMAMKYPI
MPWMMAMKYPV

SEQ ID NO: 166412 - protein, 11 aa, Artificial Sequence
  Description of Artificial Sequence: Synthetic peptide
  Seed: MKWMMAMKYPI
MPWMMAMKYPW

SEQ ID NO: 166413 - protein, 8 aa, Artificial Sequence
  Description of Artificial Sequence: Synthetic peptide
  Seed: MMAMKYPI
MQAMKYPA

SEQ ID NO: 166414 - protein, 8 aa, Artificial Sequence
  Description of Artificial Sequence: Synthetic peptide
  Seed: MMAMKYPI
MQAMKYPF

SEQ ID NO: 166415 - protein, 8 aa, Artificial Sequence
  Description of Artificial Sequence: Synthetic peptide
  Seed: MMAMKYPI
MQAMKYPI

SEQ ID NO: 166416 - protein, 9 aa, Artificial Sequence
  Description of Artificial Sequence: Synthetic peptide
  Seed: MMAMKYPIT
MQAMKYPIA

SEQ ID NO: 166417 - protein, 9 aa, Artificial Sequence
  Description of Artificial Sequence: Synthetic peptide
  Seed: MMAMKYPIT
MQAMKYPIF

SEQ ID NO: 166418 - protein, 9 aa, Artificial Sequence
  Description of Artificial Sequence: Synthetic peptide
  Seed: MMAMKYPIT
MQAMKYPII

SEQ ID NO: 166419 - protein, 9 aa, Artificial Sequence
  Description of Artificial Sequence: Synthetic peptide
  Seed: MMAMKYPIT
MQAMKYPIL

SEQ ID NO: 166420 - protein, 9 aa, Artificial Sequence
  Description of Artificial Sequence: Synthetic peptide
  Seed: MMAMKYPIT
MQAMKYPIM

SEQ ID NO: 166421 - protein, 10 aa, Artificial Sequence
  Description of Artificial Sequence: Synthetic peptide
  Seed: MMAMKYPITA
MQAMKYPITA

SEQ ID NO: 166422 - protein, 10 aa, Artificial Sequence
  Description of Artificial Sequence: Synthetic peptide
  Seed: MMAMKYPITA
MQAMKYPITF

SEQ ID NO: 166423 - protein, 10 aa, Artificial Sequence
  Description of Artificial Sequence: Synthetic peptide
  Seed: MMAMKYPITA
MQAMKYPITG

SEQ ID NO: 166424 - protein, 10 aa, Artificial Sequence
  Description of Artificial Sequence: Synthetic peptide
  Seed: MMAMKYPITA
MQAMKYPITH

SEQ ID NO: 166425 - protein, 10 aa, Artificial Sequence
  Description of Artificial Sequence: Synthetic peptide
  Seed: MMAMKYPITA
MQAMKYPITI

SEQ ID NO: 166426 - protein, 10 aa, Artificial Sequence
  Description of Artificial Sequence: Synthetic peptide
  Seed: MMAMKYPITA
MQAMKYPITL

SEQ ID NO: 166427 - protein, 10 aa, Artificial Sequence
  Description of Artificial Sequence: Synthetic peptide
  Seed: MMAMKYPITA
MQAMKYPITM

SEQ ID NO: 166428 - protein, 10 aa, Artificial Sequence
  Description of Artificial Sequence: Synthetic peptide
  Seed: MMAMKYPITA
MQAMKYPITT

SEQ ID NO: 166429 - protein, 10 aa, Artificial Sequence
  Description of Artificial Sequence: Synthetic peptide
  Seed: MMAMKYPITA
MQAMKYPITV

SEQ ID NO: 166430 - protein, 10 aa, Artificial Sequence
  Description of Artificial Sequence: Synthetic peptide
  Seed: MMAMKYPITA
MQAMKYPITW

SEQ ID NO: 166431 - protein, 10 aa, Artificial Sequence
  Description of Artificial Sequence: Synthetic peptide
  Seed: MMAMKYPITA
MQAMKYPITY

SEQ ID NO: 166432 - protein, 9 aa, Artificial Sequence
  Description of Artificial Sequence: Synthetic peptide
  Seed: MMAMKYPIT
MQAMKYPIV

SEQ ID NO: 166433 - protein, 8 aa, Artificial Sequence
  Description of Artificial Sequence: Synthetic peptide
  Seed: MMAMKYPI
MQAMKYPL

SEQ ID NO: 166434 - protein, 8 aa, Artificial Sequence
  Description of Artificial Sequence: Synthetic peptide
  Seed: MMAMKYPI
MQAMKYPM

SEQ ID NO: 166435 - protein, 8 aa, Artificial Sequence
  Description of Artificial Sequence: Synthetic peptide
  Seed: MMAMKYPI
MQAMKYPV

SEQ ID NO: 166436 - protein, 9 aa, Artificial Sequence
  Description of Artificial Sequence: Synthetic peptide
  Seed: MAMKYPITA
MQMKYPITA

SEQ ID NO: 166437 - protein, 9 aa, Artificial Sequence
  Description of Artificial Sequence: Synthetic peptide
  Seed: MAMKYPITA
MQMKYPITC

SEQ ID NO: 166438 - protein, 9 aa, Artificial Sequence
  Description of Artificial Sequence: Synthetic peptide
  Seed: MAMKYPITA
MQMKYPITD

SEQ ID NO: 166439 - protein, 9 aa, Artificial Sequence
  Description of Artificial Sequence: Synthetic peptide
  Seed: MAMKYPITA
MQMKYPITE

SEQ ID NO: 166440 - protein, 9 aa, Artificial Sequence
  Description of Artificial Sequence: Synthetic peptide
  Seed: MAMKYPITA
MQMKYPITF

SEQ ID NO: 166441 - protein, 9 aa, Artificial Sequence
  Description of Artificial Sequence: Synthetic peptide
  Seed: MAMKYPITA
MQMKYPITG

SEQ ID NO: 166442 - protein, 9 aa, Artificial Sequence
  Description of Artificial Sequence: Synthetic peptide
  Seed: MAMKYPITA
MQMKYPITH

SEQ ID NO: 166443 - protein, 9 aa, Artificial Sequence
  Description of Artificial Sequence: Synthetic peptide
  Seed: MAMKYPITA
MQMKYPITI

SEQ ID NO: 166444 - protein, 9 aa, Artificial Sequence
  Description of Artificial Sequence: Synthetic peptide
  Seed: MAMKYPITA
MQMKYPITK

SEQ ID NO: 166445 - protein, 9 aa, Artificial Sequence
  Description of Artificial Sequence: Synthetic peptide
  Seed: MAMKYPITA
MQMKYPITL

SEQ ID NO: 166446 - protein, 9 aa, Artificial Sequence
  Description of Artificial Sequence: Synthetic peptide
  Seed: MAMKYPITA
MQMKYPITM

SEQ ID NO: 166447 - protein, 9 aa, Artificial Sequence
  Description of Artificial Sequence: Synthetic peptide
  Seed: MAMKYPITA
MQMKYPITN

SEQ ID NO: 166448 - protein, 9 aa, Artificial Sequence
  Description of Artificial Sequence: Synthetic peptide
  Seed: MAMKYPITA
MQMKYPITP

SEQ ID NO: 166449 - protein, 9 aa, Artificial Sequence
  Description of Artificial Sequence: Synthetic peptide
  Seed: MAMKYPITA
MQMKYPITQ

SEQ ID NO: 166450 - protein, 9 aa, Artificial Sequence
  Description of Artificial Sequence: Synthetic peptide
  Seed: MAMKYPITA
MQMKYPITS

SEQ ID NO: 166451 - protein, 9 aa, Artificial Sequence
  Description of Artificial Sequence: Synthetic peptide
  Seed: MAMKYPITA
MQMKYPITT

SEQ ID NO: 166452 - protein, 9 aa, Artificial Sequence
  Description of Artificial Sequence: Synthetic peptide
  Seed: MAMKYPITA
MQMKYPITV

SEQ ID NO: 166453 - protein, 9 aa, Artificial Sequence
  Description of Artificial Sequence: Synthetic peptide
  Seed: MAMKYPITA
MQMKYPITW

SEQ ID NO: 166454 - protein, 9 aa, Artificial Sequence
  Description of Artificial Sequence: Synthetic peptide
  Seed: MAMKYPITA
MQMKYPITY

SEQ ID NO: 166455 - protein, 9 aa, Artificial Sequence
  Description of Artificial Sequence: Synthetic peptide
  Seed: MEVVFPNEV
MQVVFPNEA

SEQ ID NO: 166456 - protein, 9 aa, Artificial Sequence
  Description of Artificial Sequence: Synthetic peptide
  Seed: MEVVFPNEV
MQVVFPNEF

SEQ ID NO: 166457 - protein, 9 aa, Artificial Sequence
  Description of Artificial Sequence: Synthetic peptide
  Seed: MEVVFPNEV
MQVVFPNEY

SEQ ID NO: 166458 - protein, 9 aa, Artificial Sequence
  Description of Artificial Sequence: Synthetic peptide
  Seed: MKWMMAMKY
MQWMMAMKA

SEQ ID NO: 166459 - protein, 9 aa, Artificial Sequence
  Description of Artificial Sequence: Synthetic peptide
  Seed: MKWMMAMKY
MQWMMAMKF

SEQ ID NO: 166460 - protein, 9 aa, Artificial Sequence
  Description of Artificial Sequence: Synthetic peptide
  Seed: MKWMMAMKY
MQWMMAMKG

SEQ ID NO: 166461 - protein, 9 aa, Artificial Sequence
  Description of Artificial Sequence: Synthetic peptide
  Seed: MKWMMAMKY
MQWMMAMKH

SEQ ID NO: 166462 - protein, 9 aa, Artificial Sequence
  Description of Artificial Sequence: Synthetic peptide
  Seed: MKWMMAMKY
MQWMMAMKI

SEQ ID NO: 166463 - protein, 9 aa, Artificial Sequence
  Description of Artificial Sequence: Synthetic peptide
  Seed: MKWMMAMKY
MQWMMAMKK

SEQ ID NO: 166464 - protein, 9 aa, Artificial Sequence
  Description of Artificial Sequence: Synthetic peptide
  Seed: MKWMMAMKY
MQWMMAMKL

SEQ ID NO: 166465 - protein, 9 aa, Artificial Sequence
  Description of Artificial Sequence: Synthetic peptide
  Seed: MKWMMAMKY
MQWMMAMKM

SEQ ID NO: 166466 - protein, 9 aa, Artificial Sequence
  Description of Artificial Sequence: Synthetic peptide
  Seed: MKWMMAMKY
MQWMMAMKS

SEQ ID NO: 166467 - protein, 9 aa, Artificial Sequence
  Description of Artificial Sequence: Synthetic peptide
  Seed: MKWMMAMKY
MQWMMAMKT

SEQ ID NO: 166468 - protein, 9 aa, Artificial Sequence
  Description of Artificial Sequence: Synthetic peptide
  Seed: MKWMMAMKY
MQWMMAMKV

SEQ ID NO: 166469 - protein, 9 aa, Artificial Sequence
  Description of Artificial Sequence: Synthetic peptide
  Seed: MKWMMAMKY
MQWMMAMKW

SEQ ID NO: 166470 - protein, 9 aa, Artificial Sequence
  Description of Artificial Sequence: Synthetic peptide
  Seed: MKWMMAMKY
MQWMMAMKY

SEQ ID NO: 166471 - protein, 11 aa, Artificial Sequence
  Description of Artificial Sequence: Synthetic peptide
  Seed: MKWMMAMKYPI
MQWMMAMKYPA

SEQ ID NO: 166472 - protein, 11 aa, Artificial Sequence
  Description of Artificial Sequence: Synthetic peptide
  Seed: MKWMMAMKYPI
MQWMMAMKYPF

SEQ ID NO: 166473 - protein, 11 aa, Artificial Sequence
  Description of Artificial Sequence: Synthetic peptide
  Seed: MKWMMAMKYPI
MQWMMAMKYPI

SEQ ID NO: 166474 - protein, 11 aa, Artificial Sequence
  Description of Artificial Sequence: Synthetic peptide
  Seed: MKWMMAMKYPI
MQWMMAMKYPL

SEQ ID NO: 166475 - protein, 11 aa, Artificial Sequence
  Description of Artificial Sequence: Synthetic peptide
  Seed: MKWMMAMKYPI
MQWMMAMKYPM

SEQ ID NO: 166476 - protein, 11 aa, Artificial Sequence
  Description of Artificial Sequence: Synthetic peptide
  Seed: MKWMMAMKYPI
MQWMMAMKYPV

SEQ ID NO: 166477 - protein, 11 aa, Artificial Sequence
  Description of Artificial Sequence: Synthetic peptide
  Seed: MKWMMAMKYPI
MQWMMAMKYPW

SEQ ID NO: 166478 - protein, 8 aa, Artificial Sequence
  Description of Artificial Sequence: Synthetic peptide
  Seed: MMAMKYPI
MRAMKYPF

SEQ ID NO: 166479 - protein, 8 aa, Artificial Sequence
  Description of Artificial Sequence: Synthetic peptide
  Seed: MMAMKYPI
MRAMKYPI

SEQ ID NO: 166480 - protein, 9 aa, Artificial Sequence
  Description of Artificial Sequence: Synthetic peptide
  Seed: MMAMKYPIT
MRAMKYPII

SEQ ID NO: 166481 - protein, 9 aa, Artificial Sequence
  Description of Artificial Sequence: Synthetic peptide
  Seed: MMAMKYPIT
MRAMKYPIL

SEQ ID NO: 166482 - protein, 9 aa, Artificial Sequence
  Description of Artificial Sequence: Synthetic peptide
  Seed: MMAMKYPIT
MRAMKYPIM

SEQ ID NO: 166483 - protein, 10 aa, Artificial Sequence
  Description of Artificial Sequence: Synthetic peptide
  Seed: MMAMKYPITA
MRAMKYPITA

SEQ ID NO: 166484 - protein, 10 aa, Artificial Sequence
  Description of Artificial Sequence: Synthetic peptide
  Seed: MMAMKYPITA
MRAMKYPITF

SEQ ID NO: 166485 - protein, 10 aa, Artificial Sequence
  Description of Artificial Sequence: Synthetic peptide
  Seed: MMAMKYPITA
MRAMKYPITH

SEQ ID NO: 166486 - protein, 10 aa, Artificial Sequence
  Description of Artificial Sequence: Synthetic peptide
  Seed: MMAMKYPITA
MRAMKYPITI

SEQ ID NO: 166487 - protein, 10 aa, Artificial Sequence
  Description of Artificial Sequence: Synthetic peptide
  Seed: MMAMKYPITA
MRAMKYPITL

SEQ ID NO: 166488 - protein, 10 aa, Artificial Sequence
  Description of Artificial Sequence: Synthetic peptide
  Seed: MMAMKYPITA
MRAMKYPITM

SEQ ID NO: 166489 - protein, 10 aa, Artificial Sequence
  Description of Artificial Sequence: Synthetic peptide
  Seed: MMAMKYPITA
MRAMKYPITV

SEQ ID NO: 166490 - protein, 10 aa, Artificial Sequence
  Description of Artificial Sequence: Synthetic peptide
  Seed: MMAMKYPITA
MRAMKYPITY

SEQ ID NO: 166491 - protein, 8 aa, Artificial Sequence
  Description of Artificial Sequence: Synthetic peptide
  Seed: MMAMKYPI
MRAMKYPL

SEQ ID NO: 166492 - protein, 8 aa, Artificial Sequence
  Description of Artificial Sequence: Synthetic peptide
  Seed: MMAMKYPI
MRAMKYPM

SEQ ID NO: 166493 - protein, 8 aa, Artificial Sequence
  Description of Artificial Sequence: Synthetic peptide
  Seed: MMAMKYPI
MRAMKYPV

SEQ ID NO: 166494 - protein, 9 aa, Artificial Sequence
  Description of Artificial Sequence: Synthetic peptide
  Seed: MAMKYPITA
MRMKYPITA

SEQ ID NO: 166495 - protein, 9 aa, Artificial Sequence
  Description of Artificial Sequence: Synthetic peptide
  Seed: MAMKYPITA
MRMKYPITC

SEQ ID NO: 166496 - protein, 9 aa, Artificial Sequence
  Description of Artificial Sequence: Synthetic peptide
  Seed: MAMKYPITA
MRMKYPITF

SEQ ID NO: 166497 - protein, 9 aa, Artificial Sequence
  Description of Artificial Sequence: Synthetic peptide
  Seed: MAMKYPITA
MRMKYPITG

SEQ ID NO: 166498 - protein, 9 aa, Artificial Sequence
  Description of Artificial Sequence: Synthetic peptide
  Seed: MAMKYPITA
MRMKYPITH

SEQ ID NO: 166499 - protein, 9 aa, Artificial Sequence
  Description of Artificial Sequence: Synthetic peptide
  Seed: MAMKYPITA
MRMKYPITI

SEQ ID NO: 166500 - protein, 9 aa, Artificial Sequence
  Description of Artificial Sequence: Synthetic peptide
  Seed: MAMKYPITA
MRMKYPITL

SEQ ID NO: 166501 - protein, 9 aa, Artificial Sequence
  Description of Artificial Sequence: Synthetic peptide
  Seed: MAMKYPITA
MRMKYPITM

SEQ ID NO: 166502 - protein, 9 aa, Artificial Sequence
  Description of Artificial Sequence: Synthetic peptide
  Seed: MAMKYPITA
MRMKYPITP

SEQ ID NO: 166503 - protein, 9 aa, Artificial Sequence
  Description of Artificial Sequence: Synthetic peptide
  Seed: MAMKYPITA
MRMKYPITS

SEQ ID NO: 166504 - protein, 9 aa, Artificial Sequence
  Description of Artificial Sequence: Synthetic peptide
  Seed: MAMKYPITA
MRMKYPITT

SEQ ID NO: 166505 - protein, 9 aa, Artificial Sequence
  Description of Artificial Sequence: Synthetic peptide
  Seed: MAMKYPITA
MRMKYPITV

SEQ ID NO: 166506 - protein, 9 aa, Artificial Sequence
  Description of Artificial Sequence: Synthetic peptide
  Seed: MAMKYPITA
MRMKYPITW

SEQ ID NO: 166507 - protein, 9 aa, Artificial Sequence
  Description of Artificial Sequence: Synthetic peptide
  Seed: MAMKYPITA
MRMKYPITY

SEQ ID NO: 166508 - protein, 9 aa, Artificial Sequence
  Description of Artificial Sequence: Synthetic peptide
  Seed: MKWMMAMKY
MRWMMAMKF

SEQ ID NO: 166509 - protein, 9 aa, Artificial Sequence
  Description of Artificial Sequence: Synthetic peptide
  Seed: MKWMMAMKY
MRWMMAMKH

SEQ ID NO: 166510 - protein, 9 aa, Artificial Sequence
  Description of Artificial Sequence: Synthetic peptide
  Seed: MKWMMAMKY
MRWMMAMKI

SEQ ID NO: 166511 - protein, 9 aa, Artificial Sequence
  Description of Artificial Sequence: Synthetic peptide
  Seed: MKWMMAMKY
MRWMMAMKL

SEQ ID NO: 166512 - protein, 9 aa, Artificial Sequence
  Description of Artificial Sequence: Synthetic peptide
  Seed: MKWMMAMKY
MRWMMAMKM

SEQ ID NO: 166513 - protein, 9 aa, Artificial Sequence
  Description of Artificial Sequence: Synthetic peptide
  Seed: MKWMMAMKY
MRWMMAMKW

SEQ ID NO: 166514 - protein, 9 aa, Artificial Sequence
  Description of Artificial Sequence: Synthetic peptide
  Seed: MKWMMAMKY
MRWMMAMKY

SEQ ID NO: 166515 - protein, 11 aa, Artificial Sequence
  Description of Artificial Sequence: Synthetic peptide
  Seed: MKWMMAMKYPI
MRWMMAMKYPA

SEQ ID NO: 166516 - protein, 11 aa, Artificial Sequence
  Description of Artificial Sequence: Synthetic peptide
  Seed: MKWMMAMKYPI
MRWMMAMKYPF

SEQ ID NO: 166517 - protein, 11 aa, Artificial Sequence
  Description of Artificial Sequence: Synthetic peptide
  Seed: MKWMMAMKYPI
MRWMMAMKYPI

SEQ ID NO: 166518 - protein, 11 aa, Artificial Sequence
  Description of Artificial Sequence: Synthetic peptide
  Seed: MKWMMAMKYPI
MRWMMAMKYPL

SEQ ID NO: 166519 - protein, 11 aa, Artificial Sequence
  Description of Artificial Sequence: Synthetic peptide
  Seed: MKWMMAMKYPI
MRWMMAMKYPM

SEQ ID NO: 166520 - protein, 11 aa, Artificial Sequence
  Description of Artificial Sequence: Synthetic peptide
  Seed: MKWMMAMKYPI
MRWMMAMKYPV

SEQ ID NO: 166521 - protein, 11 aa, Artificial Sequence
  Description of Artificial Sequence: Synthetic peptide
  Seed: MKWMMAMKYPI
MRWMMAMKYPW

SEQ ID NO: 166522 - protein, 8 aa, Artificial Sequence
  Description of Artificial Sequence: Synthetic peptide
  Seed: MMAMKYPI
MSAMKYPA

SEQ ID NO: 166523 - protein, 8 aa, Artificial Sequence
  Description of Artificial Sequence: Synthetic peptide
  Seed: MMAMKYPI
MSAMKYPF

SEQ ID NO: 166524 - protein, 8 aa, Artificial Sequence
  Description of Artificial Sequence: Synthetic peptide
  Seed: MMAMKYPI
MSAMKYPI

SEQ ID NO: 166525 - protein, 9 aa, Artificial Sequence
  Description of Artificial Sequence: Synthetic peptide
  Seed: MMAMKYPIT
MSAMKYPIA

SEQ ID NO: 166526 - protein, 9 aa, Artificial Sequence
  Description of Artificial Sequence: Synthetic peptide
  Seed: MMAMKYPIT
MSAMKYPIF

SEQ ID NO: 166527 - protein, 9 aa, Artificial Sequence
  Description of Artificial Sequence: Synthetic peptide
  Seed: MMAMKYPIT
MSAMKYPII

SEQ ID NO: 166528 - protein, 9 aa, Artificial Sequence
  Description of Artificial Sequence: Synthetic peptide
  Seed: MMAMKYPIT
MSAMKYPIL

SEQ ID NO: 166529 - protein, 9 aa, Artificial Sequence
  Description of Artificial Sequence: Synthetic peptide
  Seed: MMAMKYPIT
MSAMKYPIM

SEQ ID NO: 166530 - protein, 10 aa, Artificial Sequence
  Description of Artificial Sequence: Synthetic peptide
  Seed: MMAMKYPITA
MSAMKYPITA

SEQ ID NO: 166531 - protein, 10 aa, Artificial Sequence
  Description of Artificial Sequence: Synthetic peptide
  Seed: MMAMKYPITA
MSAMKYPITF

SEQ ID NO: 166532 - protein, 10 aa, Artificial Sequence
  Description of Artificial Sequence: Synthetic peptide
  Seed: MMAMKYPITA
MSAMKYPITL

SEQ ID NO: 166533 - protein, 10 aa, Artificial Sequence
  Description of Artificial Sequence: Synthetic peptide
  Seed: MMAMKYPITA
MSAMKYPITM

SEQ ID NO: 166534 - protein, 10 aa, Artificial Sequence
  Description of Artificial Sequence: Synthetic peptide
  Seed: MMAMKYPITA
MSAMKYPITV

SEQ ID NO: 166535 - protein, 10 aa, Artificial Sequence
  Description of Artificial Sequence: Synthetic peptide
  Seed: MMAMKYPITA
MSAMKYPITY

SEQ ID NO: 166536 - protein, 9 aa, Artificial Sequence
  Description of Artificial Sequence: Synthetic peptide
  Seed: MMAMKYPIT
MSAMKYPIV

SEQ ID NO: 166537 - protein, 8 aa, Artificial Sequence
  Description of Artificial Sequence: Synthetic peptide
  Seed: MMAMKYPI
MSAMKYPL

SEQ ID NO: 166538 - protein, 8 aa, Artificial Sequence
  Description of Artificial Sequence: Synthetic peptide
  Seed: MMAMKYPI
MSAMKYPM

SEQ ID NO: 166539 - protein, 8 aa, Artificial Sequence
  Description of Artificial Sequence: Synthetic peptide
  Seed: MMAMKYPI
MSAMKYPV

SEQ ID NO: 166540 - protein, 9 aa, Artificial Sequence
  Description of Artificial Sequence: Synthetic peptide
  Seed: MAMKYPITA
MSMKYPITA

SEQ ID NO: 166541 - protein, 9 aa, Artificial Sequence
  Description of Artificial Sequence: Synthetic peptide
  Seed: MAMKYPITA
MSMKYPITC

SEQ ID NO: 166542 - protein, 9 aa, Artificial Sequence
  Description of Artificial Sequence: Synthetic peptide
  Seed: MAMKYPITA
MSMKYPITF

SEQ ID NO: 166543 - protein, 9 aa, Artificial Sequence
  Description of Artificial Sequence: Synthetic peptide
  Seed: MAMKYPITA
MSMKYPITH

SEQ ID NO: 166544 - protein, 9 aa, Artificial Sequence
  Description of Artificial Sequence: Synthetic peptide
  Seed: MAMKYPITA
MSMKYPITI

SEQ ID NO: 166545 - protein, 9 aa, Artificial Sequence
  Description of Artificial Sequence: Synthetic peptide
  Seed: MAMKYPITA
MSMKYPITK

SEQ ID NO: 166546 - protein, 9 aa, Artificial Sequence
  Description of Artificial Sequence: Synthetic peptide
  Seed: MAMKYPITA
MSMKYPITL

SEQ ID NO: 166547 - protein, 9 aa, Artificial Sequence
  Description of Artificial Sequence: Synthetic peptide
  Seed: MAMKYPITA
MSMKYPITR

SEQ ID NO: 166548 - protein, 9 aa, Artificial Sequence
  Description of Artificial Sequence: Synthetic peptide
  Seed: MAMKYPITA
MSMKYPITS

SEQ ID NO: 166549 - protein, 9 aa, Artificial Sequence
  Description of Artificial Sequence: Synthetic peptide
  Seed: MAMKYPITA
MSMKYPITT

SEQ ID NO: 166550 - protein, 9 aa, Artificial Sequence
  Description of Artificial Sequence: Synthetic peptide
  Seed: MAMKYPITA
MSMKYPITV

SEQ ID NO: 166551 - protein, 9 aa, Artificial Sequence
  Description of Artificial Sequence: Synthetic peptide
  Seed: MAMKYPITA
MSMKYPITW

SEQ ID NO: 166552 - protein, 9 aa, Artificial Sequence
  Description of Artificial Sequence: Synthetic peptide
  Seed: MAMKYPITA
MSMKYPITY

SEQ ID NO: 166553 - protein, 9 aa, Artificial Sequence
  Description of Artificial Sequence: Synthetic peptide
  Seed: MKWMMAMKY
MSWMMAMKF

SEQ ID NO: 166554 - protein, 9 aa, Artificial Sequence
  Description of Artificial Sequence: Synthetic peptide
  Seed: MKWMMAMKY
MSWMMAMKH

SEQ ID NO: 166555 - protein, 9 aa, Artificial Sequence
  Description of Artificial Sequence: Synthetic peptide
  Seed: MKWMMAMKY
MSWMMAMKI

SEQ ID NO: 166556 - protein, 9 aa, Artificial Sequence
  Description of Artificial Sequence: Synthetic peptide
  Seed: MKWMMAMKY
MSWMMAMKL

SEQ ID NO: 166557 - protein, 9 aa, Artificial Sequence
  Description of Artificial Sequence: Synthetic peptide
  Seed: MKWMMAMKY
MSWMMAMKM

SEQ ID NO: 166558 - protein, 11 aa, Artificial Sequence
  Description of Artificial Sequence: Synthetic peptide
  Seed: MKWMMAMKYPI
MSWMMAMKYPA

SEQ ID NO: 166559 - protein, 11 aa, Artificial Sequence
  Description of Artificial Sequence: Synthetic peptide
  Seed: MKWMMAMKYPI
MSWMMAMKYPF

SEQ ID NO: 166560 - protein, 11 aa, Artificial Sequence
  Description of Artificial Sequence: Synthetic peptide
  Seed: MKWMMAMKYPI
MSWMMAMKYPI

SEQ ID NO: 166561 - protein, 11 aa, Artificial Sequence
  Description of Artificial Sequence: Synthetic peptide
  Seed: MKWMMAMKYPI
MSWMMAMKYPL

SEQ ID NO: 166562 - protein, 11 aa, Artificial Sequence
  Description of Artificial Sequence: Synthetic peptide
  Seed: MKWMMAMKYPI
MSWMMAMKYPM

SEQ ID NO: 166563 - protein, 11 aa, Artificial Sequence
  Description of Artificial Sequence: Synthetic peptide
  Seed: MKWMMAMKYPI
MSWMMAMKYPV

SEQ ID NO: 166564 - protein, 11 aa, Artificial Sequence
  Description of Artificial Sequence: Synthetic peptide
  Seed: MKWMMAMKYPI
MSWMMAMKYPW

SEQ ID NO: 166565 - protein, 8 aa, Artificial Sequence
  Description of Artificial Sequence: Synthetic peptide
  Seed: MMAMKYPI
MTAMKYPF

SEQ ID NO: 166566 - protein, 8 aa, Artificial Sequence
  Description of Artificial Sequence: Synthetic peptide
  Seed: MMAMKYPI
MTAMKYPI

SEQ ID NO: 166567 - protein, 9 aa, Artificial Sequence
  Description of Artificial Sequence: Synthetic peptide
  Seed: MMAMKYPIT
MTAMKYPIL

SEQ ID NO: 166568 - protein, 9 aa, Artificial Sequence
  Description of Artificial Sequence: Synthetic peptide
  Seed: MMAMKYPIT
MTAMKYPIM

SEQ ID NO: 166569 - protein, 10 aa, Artificial Sequence
  Description of Artificial Sequence: Synthetic peptide
  Seed: MMAMKYPITA
MTAMKYPITA

SEQ ID NO: 166570 - protein, 10 aa, Artificial Sequence
  Description of Artificial Sequence: Synthetic peptide
  Seed: MMAMKYPITA
MTAMKYPITF

SEQ ID NO: 166571 - protein, 10 aa, Artificial Sequence
  Description of Artificial Sequence: Synthetic peptide
  Seed: MMAMKYPITA
MTAMKYPITI

SEQ ID NO: 166572 - protein, 10 aa, Artificial Sequence
  Description of Artificial Sequence: Synthetic peptide
  Seed: MMAMKYPITA
MTAMKYPITL

SEQ ID NO: 166573 - protein, 10 aa, Artificial Sequence
  Description of Artificial Sequence: Synthetic peptide
  Seed: MMAMKYPITA
MTAMKYPITM

SEQ ID NO: 166574 - protein, 10 aa, Artificial Sequence
  Description of Artificial Sequence: Synthetic peptide
  Seed: MMAMKYPITA
MTAMKYPITV

SEQ ID NO: 166575 - protein, 10 aa, Artificial Sequence
  Description of Artificial Sequence: Synthetic peptide
  Seed: MMAMKYPITA
MTAMKYPITY

SEQ ID NO: 166576 - protein, 9 aa, Artificial Sequence
  Description of Artificial Sequence: Synthetic peptide
  Seed: MMAMKYPIT
MTAMKYPIV

SEQ ID NO: 166577 - protein, 8 aa, Artificial Sequence
  Description of Artificial Sequence: Synthetic peptide
  Seed: MMAMKYPI
MTAMKYPL

SEQ ID NO: 166578 - protein, 8 aa, Artificial Sequence
  Description of Artificial Sequence: Synthetic peptide
  Seed: MMAMKYPI
MTAMKYPM

SEQ ID NO: 166579 - protein, 8 aa, Artificial Sequence
  Description of Artificial Sequence: Synthetic peptide
  Seed: MMAMKYPI
MTAMKYPV

SEQ ID NO: 166580 - protein, 9 aa, Artificial Sequence
  Description of Artificial Sequence: Synthetic peptide
  Seed: MAMKYPITA
MTMKYPITA

SEQ ID NO: 166581 - protein, 9 aa, Artificial Sequence
  Description of Artificial Sequence: Synthetic peptide
  Seed: MAMKYPITA
MTMKYPITC

SEQ ID NO: 166582 - protein, 9 aa, Artificial Sequence
  Description of Artificial Sequence: Synthetic peptide
  Seed: MAMKYPITA
MTMKYPITF

SEQ ID NO: 166583 - protein, 9 aa, Artificial Sequence
  Description of Artificial Sequence: Synthetic peptide
  Seed: MAMKYPITA
MTMKYPITH

SEQ ID NO: 166584 - protein, 9 aa, Artificial Sequence
  Description of Artificial Sequence: Synthetic peptide
  Seed: MAMKYPITA
MTMKYPITI

SEQ ID NO: 166585 - protein, 9 aa, Artificial Sequence
  Description of Artificial Sequence: Synthetic peptide
  Seed: MAMKYPITA
MTMKYPITK

SEQ ID NO: 166586 - protein, 9 aa, Artificial Sequence
  Description of Artificial Sequence: Synthetic peptide
  Seed: MAMKYPITA
MTMKYPITL

SEQ ID NO: 166587 - protein, 9 aa, Artificial Sequence
  Description of Artificial Sequence: Synthetic peptide
  Seed: MAMKYPITA
MTMKYPITM

SEQ ID NO: 166588 - protein, 9 aa, Artificial Sequence
  Description of Artificial Sequence: Synthetic peptide
  Seed: MAMKYPITA
MTMKYPITR

SEQ ID NO: 166589 - protein, 9 aa, Artificial Sequence
  Description of Artificial Sequence: Synthetic peptide
  Seed: MAMKYPITA
MTMKYPITS

SEQ ID NO: 166590 - protein, 9 aa, Artificial Sequence
  Description of Artificial Sequence: Synthetic peptide
  Seed: MAMKYPITA
MTMKYPITT

SEQ ID NO: 166591 - protein, 9 aa, Artificial Sequence
  Description of Artificial Sequence: Synthetic peptide
  Seed: MAMKYPITA
MTMKYPITV

SEQ ID NO: 166592 - protein, 9 aa, Artificial Sequence
  Description of Artificial Sequence: Synthetic peptide
  Seed: MAMKYPITA
MTMKYPITW

SEQ ID NO: 166593 - protein, 9 aa, Artificial Sequence
  Description of Artificial Sequence: Synthetic peptide
  Seed: MAMKYPITA
MTMKYPITY

SEQ ID NO: 166594 - protein, 9 aa, Artificial Sequence
  Description of Artificial Sequence: Synthetic peptide
  Seed: MKWMMAMKY
MTWMMAMKF

SEQ ID NO: 166595 - protein, 9 aa, Artificial Sequence
  Description of Artificial Sequence: Synthetic peptide
  Seed: MKWMMAMKY
MTWMMAMKH

SEQ ID NO: 166596 - protein, 9 aa, Artificial Sequence
  Description of Artificial Sequence: Synthetic peptide
  Seed: MKWMMAMKY
MTWMMAMKL

SEQ ID NO: 166597 - protein, 9 aa, Artificial Sequence
  Description of Artificial Sequence: Synthetic peptide
  Seed: MKWMMAMKY
MTWMMAMKM

SEQ ID NO: 166598 - protein, 9 aa, Artificial Sequence
  Description of Artificial Sequence: Synthetic peptide
  Seed: MKWMMAMKY
MTWMMAMKY

SEQ ID NO: 166599 - protein, 11 aa, Artificial Sequence
  Description of Artificial Sequence: Synthetic peptide
  Seed: MKWMMAMKYPI
MTWMMAMKYPA

SEQ ID NO: 166600 - protein, 11 aa, Artificial Sequence
  Description of Artificial Sequence: Synthetic peptide
  Seed: MKWMMAMKYPI
MTWMMAMKYPF

SEQ ID NO: 166601 - protein, 11 aa, Artificial Sequence
  Description of Artificial Sequence: Synthetic peptide
  Seed: MKWMMAMKYPI
MTWMMAMKYPI

SEQ ID NO: 166602 - protein, 11 aa, Artificial Sequence
  Description of Artificial Sequence: Synthetic peptide
  Seed: MKWMMAMKYPI
MTWMMAMKYPL

SEQ ID NO: 166603 - protein, 11 aa, Artificial Sequence
  Description of Artificial Sequence: Synthetic peptide
  Seed: MKWMMAMKYPI
MTWMMAMKYPM

SEQ ID NO: 166604 - protein, 11 aa, Artificial Sequence
  Description of Artificial Sequence: Synthetic peptide
  Seed: MKWMMAMKYPI
MTWMMAMKYPV

SEQ ID NO: 166605 - protein, 11 aa, Artificial Sequence
  Description of Artificial Sequence: Synthetic peptide
  Seed: MKWMMAMKYPI
MTWMMAMKYPW

SEQ ID NO: 166606 - protein, 11 aa, Artificial Sequence
  Description of Artificial Sequence: Synthetic peptide
  Seed: MKWMMAMKYPI
MTWMMAMKYPY

SEQ ID NO: 166607 - protein, 8 aa, Artificial Sequence
  Description of Artificial Sequence: Synthetic peptide
  Seed: MMAMKYPI
MVAMKYPA

SEQ ID NO: 166608 - protein, 8 aa, Artificial Sequence
  Description of Artificial Sequence: Synthetic peptide
  Seed: MMAMKYPI
MVAMKYPF

SEQ ID NO: 166609 - protein, 8 aa, Artificial Sequence
  Description of Artificial Sequence: Synthetic peptide
  Seed: MMAMKYPI
MVAMKYPI

SEQ ID NO: 166610 - protein, 9 aa, Artificial Sequence
  Description of Artificial Sequence: Synthetic peptide
  Seed: MMAMKYPIT
MVAMKYPIA

SEQ ID NO: 166611 - protein, 9 aa, Artificial Sequence
  Description of Artificial Sequence: Synthetic peptide
  Seed: MMAMKYPIT
MVAMKYPIF

SEQ ID NO: 166612 - protein, 9 aa, Artificial Sequence
  Description of Artificial Sequence: Synthetic peptide
  Seed: MMAMKYPIT
MVAMKYPII

SEQ ID NO: 166613 - protein, 9 aa, Artificial Sequence
  Description of Artificial Sequence: Synthetic peptide
  Seed: MMAMKYPIT
MVAMKYPIL

SEQ ID NO: 166614 - protein, 9 aa, Artificial Sequence
  Description of Artificial Sequence: Synthetic peptide
  Seed: MMAMKYPIT
MVAMKYPIM

SEQ ID NO: 166615 - protein, 10 aa, Artificial Sequence
  Description of Artificial Sequence: Synthetic peptide
  Seed: MMAMKYPITA
MVAMKYPITA

SEQ ID NO: 166616 - protein, 10 aa, Artificial Sequence
  Description of Artificial Sequence: Synthetic peptide
  Seed: MMAMKYPITA
MVAMKYPITF

SEQ ID NO: 166617 - protein, 10 aa, Artificial Sequence
  Description of Artificial Sequence: Synthetic peptide
  Seed: MMAMKYPITA
MVAMKYPITI

SEQ ID NO: 166618 - protein, 10 aa, Artificial Sequence
  Description of Artificial Sequence: Synthetic peptide
  Seed: MMAMKYPITA
MVAMKYPITL

SEQ ID NO: 166619 - protein, 10 aa, Artificial Sequence
  Description of Artificial Sequence: Synthetic peptide
  Seed: MMAMKYPITA
MVAMKYPITM

SEQ ID NO: 166620 - protein, 10 aa, Artificial Sequence
  Description of Artificial Sequence: Synthetic peptide
  Seed: MMAMKYPITA
MVAMKYPITV

SEQ ID NO: 166621 - protein, 10 aa, Artificial Sequence
  Description of Artificial Sequence: Synthetic peptide
  Seed: MMAMKYPITA
MVAMKYPITY

SEQ ID NO: 166622 - protein, 9 aa, Artificial Sequence
  Description of Artificial Sequence: Synthetic peptide
  Seed: MMAMKYPIT
MVAMKYPIV

SEQ ID NO: 166623 - protein, 8 aa, Artificial Sequence
  Description of Artificial Sequence: Synthetic peptide
  Seed: MMAMKYPI
MVAMKYPL

SEQ ID NO: 166624 - protein, 8 aa, Artificial Sequence
  Description of Artificial Sequence: Synthetic peptide
  Seed: MMAMKYPI
MVAMKYPM

SEQ ID NO: 166625 - protein, 8 aa, Artificial Sequence
  Description of Artificial Sequence: Synthetic peptide
  Seed: MMAMKYPI
MVAMKYPV

SEQ ID NO: 166626 - protein, 9 aa, Artificial Sequence
  Description of Artificial Sequence: Synthetic peptide
  Seed: MAMKYPITA
MVMKYPITA

SEQ ID NO: 166627 - protein, 9 aa, Artificial Sequence
  Description of Artificial Sequence: Synthetic peptide
  Seed: MAMKYPITA
MVMKYPITC

SEQ ID NO: 166628 - protein, 9 aa, Artificial Sequence
  Description of Artificial Sequence: Synthetic peptide
  Seed: MAMKYPITA
MVMKYPITF

SEQ ID NO: 166629 - protein, 9 aa, Artificial Sequence
  Description of Artificial Sequence: Synthetic peptide
  Seed: MAMKYPITA
MVMKYPITH

SEQ ID NO: 166630 - protein, 9 aa, Artificial Sequence
  Description of Artificial Sequence: Synthetic peptide
  Seed: MAMKYPITA
MVMKYPITI

SEQ ID NO: 166631 - protein, 9 aa, Artificial Sequence
  Description of Artificial Sequence: Synthetic peptide
  Seed: MAMKYPITA
MVMKYPITK

SEQ ID NO: 166632 - protein, 9 aa, Artificial Sequence
  Description of Artificial Sequence: Synthetic peptide
  Seed: MAMKYPITA
MVMKYPITM

SEQ ID NO: 166633 - protein, 9 aa, Artificial Sequence
  Description of Artificial Sequence: Synthetic peptide
  Seed: MAMKYPITA
MVMKYPITS

SEQ ID NO: 166634 - protein, 9 aa, Artificial Sequence
  Description of Artificial Sequence: Synthetic peptide
  Seed: MAMKYPITA
MVMKYPITT

SEQ ID NO: 166635 - protein, 9 aa, Artificial Sequence
  Description of Artificial Sequence: Synthetic peptide
  Seed: MAMKYPITA
MVMKYPITV

SEQ ID NO: 166636 - protein, 9 aa, Artificial Sequence
  Description of Artificial Sequence: Synthetic peptide
  Seed: MAMKYPITA
MVMKYPITW

SEQ ID NO: 166637 - protein, 9 aa, Artificial Sequence
  Description of Artificial Sequence: Synthetic peptide
  Seed: MAMKYPITA
MVMKYPITY

SEQ ID NO: 166638 - protein, 9 aa, Artificial Sequence
  Description of Artificial Sequence: Synthetic peptide
  Seed: MKWMMAMKY
MVWMMAMKF

SEQ ID NO: 166639 - protein, 9 aa, Artificial Sequence
  Description of Artificial Sequence: Synthetic peptide
  Seed: MKWMMAMKY
MVWMMAMKH

SEQ ID NO: 166640 - protein, 9 aa, Artificial Sequence
  Description of Artificial Sequence: Synthetic peptide
  Seed: MKWMMAMKY
MVWMMAMKM

SEQ ID NO: 166641 - protein, 9 aa, Artificial Sequence
  Description of Artificial Sequence: Synthetic peptide
  Seed: MKWMMAMKY
MVWMMAMKY

SEQ ID NO: 166642 - protein, 11 aa, Artificial Sequence
  Description of Artificial Sequence: Synthetic peptide
  Seed: MKWMMAMKYPI
MVWMMAMKYPA

SEQ ID NO: 166643 - protein, 11 aa, Artificial Sequence
  Description of Artificial Sequence: Synthetic peptide
  Seed: MKWMMAMKYPI
MVWMMAMKYPF

SEQ ID NO: 166644 - protein, 11 aa, Artificial Sequence
  Description of Artificial Sequence: Synthetic peptide
  Seed: MKWMMAMKYPI
MVWMMAMKYPI

SEQ ID NO: 166645 - protein, 11 aa, Artificial Sequence
  Description of Artificial Sequence: Synthetic peptide
  Seed: MKWMMAMKYPI
MVWMMAMKYPL

SEQ ID NO: 166646 - protein, 11 aa, Artificial Sequence
  Description of Artificial Sequence: Synthetic peptide
  Seed: MKWMMAMKYPI
MVWMMAMKYPM

SEQ ID NO: 166647 - protein, 11 aa, Artificial Sequence
  Description of Artificial Sequence: Synthetic peptide
  Seed: MKWMMAMKYPI
MVWMMAMKYPV

SEQ ID NO: 166648 - protein, 11 aa, Artificial Sequence
  Description of Artificial Sequence: Synthetic peptide
  Seed: MKWMMAMKYPI
MVWMMAMKYPW

SEQ ID NO: 166649 - protein, 8 aa, Artificial Sequence
  Description of Artificial Sequence: Synthetic peptide
  Seed: MMAMKYPI
MWAMKYPI

SEQ ID NO: 166650 - protein, 9 aa, Artificial Sequence
  Description of Artificial Sequence: Synthetic peptide
  Seed: MMAMKYPIT
MWAMKYPIL

SEQ ID NO: 166651 - protein, 9 aa, Artificial Sequence
  Description of Artificial Sequence: Synthetic peptide
  Seed: MMAMKYPIT
MWAMKYPIM

SEQ ID NO: 166652 - protein, 10 aa, Artificial Sequence
  Description of Artificial Sequence: Synthetic peptide
  Seed: MMAMKYPITA
MWAMKYPITA

SEQ ID NO: 166653 - protein, 10 aa, Artificial Sequence
  Description of Artificial Sequence: Synthetic peptide
  Seed: MMAMKYPITA
MWAMKYPITF

SEQ ID NO: 166654 - protein, 10 aa, Artificial Sequence
  Description of Artificial Sequence: Synthetic peptide
  Seed: MMAMKYPITA
MWAMKYPITL

SEQ ID NO: 166655 - protein, 10 aa, Artificial Sequence
  Description of Artificial Sequence: Synthetic peptide
  Seed: MMAMKYPITA
MWAMKYPITM

SEQ ID NO: 166656 - protein, 10 aa, Artificial Sequence
  Description of Artificial Sequence: Synthetic peptide
  Seed: MMAMKYPITA
MWAMKYPITV

SEQ ID NO: 166657 - protein, 10 aa, Artificial Sequence
  Description of Artificial Sequence: Synthetic peptide
  Seed: MMAMKYPITA
MWAMKYPITY

SEQ ID NO: 166658 - protein, 8 aa, Artificial Sequence
  Description of Artificial Sequence: Synthetic peptide
  Seed: MMAMKYPI
MWAMKYPL

SEQ ID NO: 166659 - protein, 8 aa, Artificial Sequence
  Description of Artificial Sequence: Synthetic peptide
  Seed: MMAMKYPI
MWAMKYPM

SEQ ID NO: 166660 - protein, 8 aa, Artificial Sequence
  Description of Artificial Sequence: Synthetic peptide
  Seed: MMAMKYPI
MWAMKYPV

SEQ ID NO: 166661 - protein, 9 aa, Artificial Sequence
  Description of Artificial Sequence: Synthetic peptide
  Seed: MAMKYPITA
MWMKYPITF

SEQ ID NO: 166662 - protein, 9 aa, Artificial Sequence
  Description of Artificial Sequence: Synthetic peptide
  Seed: MAMKYPITA
MWMKYPITI

SEQ ID NO: 166663 - protein, 9 aa, Artificial Sequence
  Description of Artificial Sequence: Synthetic peptide
  Seed: MAMKYPITA
MWMKYPITK

SEQ ID NO: 166664 - protein, 9 aa, Artificial Sequence
  Description of Artificial Sequence: Synthetic peptide
  Seed: MAMKYPITA
MWMKYPITL

SEQ ID NO: 166665 - protein, 9 aa, Artificial Sequence
  Description of Artificial Sequence: Synthetic peptide
  Seed: MAMKYPITA
MWMKYPITM

SEQ ID NO: 166666 - protein, 9 aa, Artificial Sequence
  Description of Artificial Sequence: Synthetic peptide
  Seed: MAMKYPITA
MWMKYPITV

SEQ ID NO: 166667 - protein, 9 aa, Artificial Sequence
  Description of Artificial Sequence: Synthetic peptide
  Seed: MAMKYPITA
MWMKYPITY

SEQ ID NO: 166668 - protein, 9 aa, Artificial Sequence
  Description of Artificial Sequence: Synthetic peptide
  Seed: MKWMMAMKY
MWWMMAMKF

SEQ ID NO: 166669 - protein, 9 aa, Artificial Sequence
  Description of Artificial Sequence: Synthetic peptide
  Seed: MKWMMAMKY
MWWMMAMKH

SEQ ID NO: 166670 - protein, 9 aa, Artificial Sequence
  Description of Artificial Sequence: Synthetic peptide
  Seed: MKWMMAMKY
MWWMMAMKL

SEQ ID NO: 166671 - protein, 9 aa, Artificial Sequence
  Description of Artificial Sequence: Synthetic peptide
  Seed: MKWMMAMKY
MWWMMAMKM

SEQ ID NO: 166672 - protein, 9 aa, Artificial Sequence
  Description of Artificial Sequence: Synthetic peptide
  Seed: MKWMMAMKY
MWWMMAMKW

SEQ ID NO: 166673 - protein, 9 aa, Artificial Sequence
  Description of Artificial Sequence: Synthetic peptide
  Seed: MKWMMAMKY
MWWMMAMKY

SEQ ID NO: 166674 - protein, 11 aa, Artificial Sequence
  Description of Artificial Sequence: Synthetic peptide
  Seed: MKWMMAMKYPI
MWWMMAMKYPA

SEQ ID NO: 166675 - protein, 11 aa, Artificial Sequence
  Description of Artificial Sequence: Synthetic peptide
  Seed: MKWMMAMKYPI
MWWMMAMKYPF

SEQ ID NO: 166676 - protein, 11 aa, Artificial Sequence
  Description of Artificial Sequence: Synthetic peptide
  Seed: MKWMMAMKYPI
MWWMMAMKYPI

SEQ ID NO: 166677 - protein, 11 aa, Artificial Sequence
  Description of Artificial Sequence: Synthetic peptide
  Seed: MKWMMAMKYPI
MWWMMAMKYPL

SEQ ID NO: 166678 - protein, 11 aa, Artificial Sequence
  Description of Artificial Sequence: Synthetic peptide
  Seed: MKWMMAMKYPI
MWWMMAMKYPM

SEQ ID NO: 166679 - protein, 11 aa, Artificial Sequence
  Description of Artificial Sequence: Synthetic peptide
  Seed: MKWMMAMKYPI
MWWMMAMKYPV

SEQ ID NO: 166680 - protein, 11 aa, Artificial Sequence
  Description of Artificial Sequence: Synthetic peptide
  Seed: MKWMMAMKYPI
MWWMMAMKYPW

SEQ ID NO: 166681 - protein, 9 aa, Artificial Sequence
  Description of Artificial Sequence: Synthetic peptide
  Seed: MMAMKYPIT
MYAMKYPIL

SEQ ID NO: 166682 - protein, 10 aa, Artificial Sequence
  Description of Artificial Sequence: Synthetic peptide
  Seed: MMAMKYPITA
MYAMKYPITA

SEQ ID NO: 166683 - protein, 10 aa, Artificial Sequence
  Description of Artificial Sequence: Synthetic peptide
  Seed: MMAMKYPITA
MYAMKYPITF

SEQ ID NO: 166684 - protein, 10 aa, Artificial Sequence
  Description of Artificial Sequence: Synthetic peptide
  Seed: MMAMKYPITA
MYAMKYPITL

SEQ ID NO: 166685 - protein, 10 aa, Artificial Sequence
  Description of Artificial Sequence: Synthetic peptide
  Seed: MMAMKYPITA
MYAMKYPITM

SEQ ID NO: 166686 - protein, 10 aa, Artificial Sequence
  Description of Artificial Sequence: Synthetic peptide
  Seed: MMAMKYPITA
MYAMKYPITV

SEQ ID NO: 166687 - protein, 10 aa, Artificial Sequence
  Description of Artificial Sequence: Synthetic peptide
  Seed: MMAMKYPITA
MYAMKYPITY

SEQ ID NO: 166688 - protein, 8 aa, Artificial Sequence
  Description of Artificial Sequence: Synthetic peptide
  Seed: MMAMKYPI
MYAMKYPL

SEQ ID NO: 166689 - protein, 8 aa, Artificial Sequence
  Description of Artificial Sequence: Synthetic peptide
  Seed: MMAMKYPI
MYAMKYPM

SEQ ID NO: 166690 - protein, 8 aa, Artificial Sequence
  Description of Artificial Sequence: Synthetic peptide
  Seed: MMAMKYPI
MYAMKYPV

SEQ ID NO: 166691 - protein, 9 aa, Artificial Sequence
  Description of Artificial Sequence: Synthetic peptide
  Seed: MAMKYPITA
MYMKYPITA

SEQ ID NO: 166692 - protein, 9 aa, Artificial Sequence
  Description of Artificial Sequence: Synthetic peptide
  Seed: MAMKYPITA
MYMKYPITF

SEQ ID NO: 166693 - protein, 9 aa, Artificial Sequence
  Description of Artificial Sequence: Synthetic peptide
  Seed: MAMKYPITA
MYMKYPITH

SEQ ID NO: 166694 - protein, 9 aa, Artificial Sequence
  Description of Artificial Sequence: Synthetic peptide
  Seed: MAMKYPITA
MYMKYPITI

SEQ ID NO: 166695 - protein, 9 aa, Artificial Sequence
  Description of Artificial Sequence: Synthetic peptide
  Seed: MAMKYPITA
MYMKYPITK

SEQ ID NO: 166696 - protein, 9 aa, Artificial Sequence
  Description of Artificial Sequence: Synthetic peptide
  Seed: MAMKYPITA
MYMKYPITL

SEQ ID NO: 166697 - protein, 9 aa, Artificial Sequence
  Description of Artificial Sequence: Synthetic peptide
  Seed: MAMKYPITA
MYMKYPITM

SEQ ID NO: 166698 - protein, 9 aa, Artificial Sequence
  Description of Artificial Sequence: Synthetic peptide
  Seed: MAMKYPITA
MYMKYPITV

SEQ ID NO: 166699 - protein, 9 aa, Artificial Sequence
  Description of Artificial Sequence: Synthetic peptide
  Seed: MAMKYPITA
MYMKYPITY

SEQ ID NO: 166700 - protein, 9 aa, Artificial Sequence
  Description of Artificial Sequence: Synthetic peptide
  Seed: MKWMMAMKY
MYWMMAMKF

SEQ ID NO: 166701 - protein, 9 aa, Artificial Sequence
  Description of Artificial Sequence: Synthetic peptide
  Seed: MKWMMAMKY
MYWMMAMKH

SEQ ID NO: 166702 - protein, 9 aa, Artificial Sequence
  Description of Artificial Sequence: Synthetic peptide
  Seed: MKWMMAMKY
MYWMMAMKL

SEQ ID NO: 166703 - protein, 9 aa, Artificial Sequence
  Description of Artificial Sequence: Synthetic peptide
  Seed: MKWMMAMKY
MYWMMAMKM

SEQ ID NO: 166704 - protein, 9 aa, Artificial Sequence
  Description of Artificial Sequence: Synthetic peptide
  Seed: MKWMMAMKY
MYWMMAMKY

SEQ ID NO: 166705 - protein, 11 aa, Artificial Sequence
  Description of Artificial Sequence: Synthetic peptide
  Seed: MKWMMAMKYPI
MYWMMAMKYPA

SEQ ID NO: 166706 - protein, 11 aa, Artificial Sequence
  Description of Artificial Sequence: Synthetic peptide
  Seed: MKWMMAMKYPI
MYWMMAMKYPF

SEQ ID NO: 166707 - protein, 11 aa, Artificial Sequence
  Description of Artificial Sequence: Synthetic peptide
  Seed: MKWMMAMKYPI
MYWMMAMKYPI

SEQ ID NO: 166708 - protein, 11 aa, Artificial Sequence
  Description of Artificial Sequence: Synthetic peptide
  Seed: MKWMMAMKYPI
MYWMMAMKYPL

SEQ ID NO: 166709 - protein, 11 aa, Artificial Sequence
  Description of Artificial Sequence: Synthetic peptide
  Seed: MKWMMAMKYPI
MYWMMAMKYPM

SEQ ID NO: 166710 - protein, 11 aa, Artificial Sequence
  Description of Artificial Sequence: Synthetic peptide
  Seed: MKWMMAMKYPI
MYWMMAMKYPV

SEQ ID NO: 166711 - protein, 11 aa, Artificial Sequence
  Description of Artificial Sequence: Synthetic peptide
  Seed: MKWMMAMKYPI
MYWMMAMKYPW

SEQ ID NO: 166712 - protein, 10 aa, Artificial Sequence
  Description of Artificial Sequence: Synthetic peptide
  Seed: NPMHQLLRHF
NAMHQLLRHF

SEQ ID NO: 166713 - protein, 10 aa, Artificial Sequence
  Description of Artificial Sequence: Synthetic peptide
  Seed: NPMHQLLRHF
NAMHQLLRHW

SEQ ID NO: 166714 - protein, 10 aa, Artificial Sequence
  Description of Artificial Sequence: Synthetic peptide
  Seed: NPMHQLLRHF
NAMHQLLRHY

SEQ ID NO: 166715 - protein, 10 aa, Artificial Sequence
  Description of Artificial Sequence: Synthetic peptide
  Seed: NQRLNPMHQL
NARLNPMHQF

SEQ ID NO: 166716 - protein, 10 aa, Artificial Sequence
  Description of Artificial Sequence: Synthetic peptide
  Seed: NQRLNPMHQL
NARLNPMHQI

SEQ ID NO: 166717 - protein, 10 aa, Artificial Sequence
  Description of Artificial Sequence: Synthetic peptide
  Seed: NQRLNPMHQL
NARLNPMHQL

SEQ ID NO: 166718 - protein, 10 aa, Artificial Sequence
  Description of Artificial Sequence: Synthetic peptide
  Seed: NQRLNPMHQL
NARLNPMHQM

SEQ ID NO: 166719 - protein, 10 aa, Artificial Sequence
  Description of Artificial Sequence: Synthetic peptide
  Seed: NQRLNPMHQL
NARLNPMHQV

SEQ ID NO: 166720 - protein, 10 aa, Artificial Sequence
  Description of Artificial Sequence: Synthetic peptide
  Seed: NPMHQLLRHF
NCMHQLLRHF

SEQ ID NO: 166721 - protein, 10 aa, Artificial Sequence
  Description of Artificial Sequence: Synthetic peptide
  Seed: NPMHQLLRHF
NCMHQLLRHY

SEQ ID NO: 166722 - protein, 10 aa, Artificial Sequence
  Description of Artificial Sequence: Synthetic peptide
  Seed: NQRLNPMHQL
NCRLNPMHQF

SEQ ID NO: 166723 - protein, 10 aa, Artificial Sequence
  Description of Artificial Sequence: Synthetic peptide
  Seed: NQRLNPMHQL
NCRLNPMHQI

SEQ ID NO: 166724 - protein, 10 aa, Artificial Sequence
  Description of Artificial Sequence: Synthetic peptide
  Seed: NQRLNPMHQL
NCRLNPMHQL

SEQ ID NO: 166725 - protein, 10 aa, Artificial Sequence
  Description of Artificial Sequence: Synthetic peptide
  Seed: NQRLNPMHQL
NCRLNPMHQM

SEQ ID NO: 166726 - protein, 10 aa, Artificial Sequence
  Description of Artificial Sequence: Synthetic peptide
  Seed: NPMHQLLRHF
NDMHQLLRHF

SEQ ID NO: 166727 - protein, 10 aa, Artificial Sequence
  Description of Artificial Sequence: Synthetic peptide
  Seed: NPMHQLLRHF
NDMHQLLRHY

SEQ ID NO: 166728 - protein, 10 aa, Artificial Sequence
  Description of Artificial Sequence: Synthetic peptide
  Seed: NQRLNPMHQL
NDRLNPMHQF

SEQ ID NO: 166729 - protein, 10 aa, Artificial Sequence
  Description of Artificial Sequence: Synthetic peptide
  Seed: NQRLNPMHQL
NDRLNPMHQI

SEQ ID NO: 166730 - protein, 10 aa, Artificial Sequence
  Description of Artificial Sequence: Synthetic peptide
  Seed: NQRLNPMHQL
NDRLNPMHQL

SEQ ID NO: 166731 - protein, 10 aa, Artificial Sequence
  Description of Artificial Sequence: Synthetic peptide
  Seed: NQRLNPMHQL
NDRLNPMHQM

SEQ ID NO: 166732 - protein, 10 aa, Artificial Sequence
  Description of Artificial Sequence: Synthetic peptide
  Seed: NPMHQLLRHF
NEMHQLLRHF

SEQ ID NO: 166733 - protein, 10 aa, Artificial Sequence
  Description of Artificial Sequence: Synthetic peptide
  Seed: NPMHQLLRHF
NEMHQLLRHY

SEQ ID NO: 166734 - protein, 10 aa, Artificial Sequence
  Description of Artificial Sequence: Synthetic peptide
  Seed: NQRLNPMHQL
NERLNPMHQF

SEQ ID NO: 166735 - protein, 10 aa, Artificial Sequence
  Description of Artificial Sequence: Synthetic peptide
  Seed: NQRLNPMHQL
NERLNPMHQI

SEQ ID NO: 166736 - protein, 10 aa, Artificial Sequence
  Description of Artificial Sequence: Synthetic peptide
  Seed: NQRLNPMHQL
NERLNPMHQL

SEQ ID NO: 166737 - protein, 10 aa, Artificial Sequence
  Description of Artificial Sequence: Synthetic peptide
  Seed: NQRLNPMHQL
NERLNPMHQM

SEQ ID NO: 166738 - protein, 10 aa, Artificial Sequence
  Description of Artificial Sequence: Synthetic peptide
  Seed: NPMHQLLRHF
NFMHQLLRHF

SEQ ID NO: 166739 - protein, 10 aa, Artificial Sequence
  Description of Artificial Sequence: Synthetic peptide
  Seed: NPMHQLLRHF
NFMHQLLRHY

SEQ ID NO: 166740 - protein, 10 aa, Artificial Sequence
  Description of Artificial Sequence: Synthetic peptide
  Seed: NQRLNPMHQL
NFRLNPMHQF

SEQ ID NO: 166741 - protein, 10 aa, Artificial Sequence
  Description of Artificial Sequence: Synthetic peptide
  Seed: NQRLNPMHQL
NFRLNPMHQI

SEQ ID NO: 166742 - protein, 10 aa, Artificial Sequence
  Description of Artificial Sequence: Synthetic peptide
  Seed: NQRLNPMHQL
NFRLNPMHQL

SEQ ID NO: 166743 - protein, 10 aa, Artificial Sequence
  Description of Artificial Sequence: Synthetic peptide
  Seed: NQRLNPMHQL
NFRLNPMHQM

SEQ ID NO: 166744 - protein, 10 aa, Artificial Sequence
  Description of Artificial Sequence: Synthetic peptide
  Seed: NQRLNPMHQL
NFRLNPMHQV

SEQ ID NO: 166745 - protein, 10 aa, Artificial Sequence
  Description of Artificial Sequence: Synthetic peptide
  Seed: NPMHQLLRHF
NGMHQLLRHF

SEQ ID NO: 166746 - protein, 10 aa, Artificial Sequence
  Description of Artificial Sequence: Synthetic peptide
  Seed: NPMHQLLRHF
NGMHQLLRHY

SEQ ID NO: 166747 - protein, 10 aa, Artificial Sequence
  Description of Artificial Sequence: Synthetic peptide
  Seed: NQRLNPMHQL
NGRLNPMHQF

SEQ ID NO: 166748 - protein, 10 aa, Artificial Sequence
  Description of Artificial Sequence: Synthetic peptide
  Seed: NQRLNPMHQL
NGRLNPMHQI

SEQ ID NO: 166749 - protein, 10 aa, Artificial Sequence
  Description of Artificial Sequence: Synthetic peptide
  Seed: NQRLNPMHQL
NGRLNPMHQL

SEQ ID NO: 166750 - protein, 10 aa, Artificial Sequence
  Description of Artificial Sequence: Synthetic peptide
  Seed: NQRLNPMHQL
NGRLNPMHQM

SEQ ID NO: 166751 - protein, 10 aa, Artificial Sequence
  Description of Artificial Sequence: Synthetic peptide
  Seed: NQRLNPMHQL
NGRLNPMHQV

SEQ ID NO: 166752 - protein, 10 aa, Artificial Sequence
  Description of Artificial Sequence: Synthetic peptide
  Seed: NRANQRLNPM
NHANQRLNPI

SEQ ID NO: 166753 - protein, 10 aa, Artificial Sequence
  Description of Artificial Sequence: Synthetic peptide
  Seed: NRANQRLNPM
NHANQRLNPL

SEQ ID NO: 166754 - protein, 10 aa, Artificial Sequence
  Description of Artificial Sequence: Synthetic peptide
  Seed: NRANQRLNPM
NHANQRLNPM

SEQ ID NO: 166755 - protein, 10 aa, Artificial Sequence
  Description of Artificial Sequence: Synthetic peptide
  Seed: NRANQRLNPM
NHANQRLNPV

SEQ ID NO: 166756 - protein, 10 aa, Artificial Sequence
  Description of Artificial Sequence: Synthetic peptide
  Seed: NPMHQLLRHF
NHMHQLLRHF

SEQ ID NO: 166757 - protein, 10 aa, Artificial Sequence
  Description of Artificial Sequence: Synthetic peptide
  Seed: NPMHQLLRHF
NHMHQLLRHY

SEQ ID NO: 166758 - protein, 10 aa, Artificial Sequence
  Description of Artificial Sequence: Synthetic peptide
  Seed: NQRLNPMHQL
NHRLNPMHQF

SEQ ID NO: 166759 - protein, 10 aa, Artificial Sequence
  Description of Artificial Sequence: Synthetic peptide
  Seed: NQRLNPMHQL
NHRLNPMHQI

SEQ ID NO: 166760 - protein, 10 aa, Artificial Sequence
  Description of Artificial Sequence: Synthetic peptide
  Seed: NQRLNPMHQL
NHRLNPMHQL

SEQ ID NO: 166761 - protein, 10 aa, Artificial Sequence
  Description of Artificial Sequence: Synthetic peptide
  Seed: NQRLNPMHQL
NHRLNPMHQM

SEQ ID NO: 166762 - protein, 10 aa, Artificial Sequence
  Description of Artificial Sequence: Synthetic peptide
  Seed: NPMHQLLRHF
NIMHQLLRHF

SEQ ID NO: 166763 - protein, 10 aa, Artificial Sequence
  Description of Artificial Sequence: Synthetic peptide
  Seed: NPMHQLLRHF
NIMHQLLRHY

SEQ ID NO: 166764 - protein, 10 aa, Artificial Sequence
  Description of Artificial Sequence: Synthetic peptide
  Seed: NQRLNPMHQL
NIRLNPMHQF

SEQ ID NO: 166765 - protein, 10 aa, Artificial Sequence
  Description of Artificial Sequence: Synthetic peptide
  Seed: NQRLNPMHQL
NIRLNPMHQI

SEQ ID NO: 166766 - protein, 10 aa, Artificial Sequence
  Description of Artificial Sequence: Synthetic peptide
  Seed: NQRLNPMHQL
NIRLNPMHQL

SEQ ID NO: 166767 - protein, 10 aa, Artificial Sequence
  Description of Artificial Sequence: Synthetic peptide
  Seed: NQRLNPMHQL
NIRLNPMHQM

SEQ ID NO: 166768 - protein, 10 aa, Artificial Sequence
  Description of Artificial Sequence: Synthetic peptide
  Seed: NPMHQLLRHF
NKMHQLLRHF

SEQ ID NO: 166769 - protein, 10 aa, Artificial Sequence
  Description of Artificial Sequence: Synthetic peptide
  Seed: NPMHQLLRHF
NKMHQLLRHY

SEQ ID NO: 166770 - protein, 10 aa, Artificial Sequence
  Description of Artificial Sequence: Synthetic peptide
  Seed: NQRLNPMHQL
NKRLNPMHQF

SEQ ID NO: 166771 - protein, 10 aa, Artificial Sequence
  Description of Artificial Sequence: Synthetic peptide
  Seed: NQRLNPMHQL
NKRLNPMHQI

SEQ ID NO: 166772 - protein, 10 aa, Artificial Sequence
  Description of Artificial Sequence: Synthetic peptide
  Seed: NQRLNPMHQL
NKRLNPMHQL

SEQ ID NO: 166773 - protein, 10 aa, Artificial Sequence
  Description of Artificial Sequence: Synthetic peptide
  Seed: NQRLNPMHQL
NKRLNPMHQM

SEQ ID NO: 166774 - protein, 10 aa, Artificial Sequence
  Description of Artificial Sequence: Synthetic peptide
  Seed: NQRLNPMHQL
NKRLNPMHQV

SEQ ID NO: 166775 - protein, 10 aa, Artificial Sequence
  Description of Artificial Sequence: Synthetic peptide
  Seed: NPMHQLLRHF
NLMHQLLRHF

SEQ ID NO: 166776 - protein, 10 aa, Artificial Sequence
  Description of Artificial Sequence: Synthetic peptide
  Seed: NPMHQLLRHF
NLMHQLLRHY

SEQ ID NO: 166777 - protein, 10 aa, Artificial Sequence
  Description of Artificial Sequence: Synthetic peptide
  Seed: NQRLNPMHQL
NLRLNPMHQF

SEQ ID NO: 166778 - protein, 10 aa, Artificial Sequence
  Description of Artificial Sequence: Synthetic peptide
  Seed: NQRLNPMHQL
NLRLNPMHQI

SEQ ID NO: 166779 - protein, 10 aa, Artificial Sequence
  Description of Artificial Sequence: Synthetic peptide
  Seed: NQRLNPMHQL
NLRLNPMHQL

SEQ ID NO: 166780 - protein, 10 aa, Artificial Sequence
  Description of Artificial Sequence: Synthetic peptide
  Seed: NQRLNPMHQL
NLRLNPMHQM

SEQ ID NO: 166781 - protein, 10 aa, Artificial Sequence
  Description of Artificial Sequence: Synthetic peptide
  Seed: NPMHQLLRHF
NMMHQLLRHF

SEQ ID NO: 166782 - protein, 10 aa, Artificial Sequence
  Description of Artificial Sequence: Synthetic peptide
  Seed: NPMHQLLRHF
NMMHQLLRHY

SEQ ID NO: 166783 - protein, 10 aa, Artificial Sequence
  Description of Artificial Sequence: Synthetic peptide
  Seed: NQRLNPMHQL
NMRLNPMHQF

SEQ ID NO: 166784 - protein, 10 aa, Artificial Sequence
  Description of Artificial Sequence: Synthetic peptide
  Seed: NQRLNPMHQL
NMRLNPMHQI

SEQ ID NO: 166785 - protein, 10 aa, Artificial Sequence
  Description of Artificial Sequence: Synthetic peptide
  Seed: NQRLNPMHQL
NMRLNPMHQL

SEQ ID NO: 166786 - protein, 10 aa, Artificial Sequence
  Description of Artificial Sequence: Synthetic peptide
  Seed: NQRLNPMHQL
NMRLNPMHQM

SEQ ID NO: 166787 - protein, 10 aa, Artificial Sequence
  Description of Artificial Sequence: Synthetic peptide
  Seed: NQRLNPMHQL
NMRLNPMHQV

SEQ ID NO: 166788 - protein, 10 aa, Artificial Sequence
  Description of Artificial Sequence: Synthetic peptide
  Seed: NPMHQLLRHF
NNMHQLLRHF

SEQ ID NO: 166789 - protein, 10 aa, Artificial Sequence
  Description of Artificial Sequence: Synthetic peptide
  Seed: NPMHQLLRHF
NNMHQLLRHY

SEQ ID NO: 166790 - protein, 10 aa, Artificial Sequence
  Description of Artificial Sequence: Synthetic peptide
  Seed: NQRLNPMHQL
NNRLNPMHQF

SEQ ID NO: 166791 - protein, 10 aa, Artificial Sequence
  Description of Artificial Sequence: Synthetic peptide
  Seed: NQRLNPMHQL
NNRLNPMHQI

SEQ ID NO: 166792 - protein, 10 aa, Artificial Sequence
  Description of Artificial Sequence: Synthetic peptide
  Seed: NQRLNPMHQL
NNRLNPMHQL

SEQ ID NO: 166793 - protein, 10 aa, Artificial Sequence
  Description of Artificial Sequence: Synthetic peptide
  Seed: NQRLNPMHQL
NNRLNPMHQM

SEQ ID NO: 166794 - protein, 10 aa, Artificial Sequence
  Description of Artificial Sequence: Synthetic peptide
  Seed: NPMHQLLRHF
NPMHQLLRHI

SEQ ID NO: 166795 - protein, 10 aa, Artificial Sequence
  Description of Artificial Sequence: Synthetic peptide
  Seed: NPMHQLLRHF
NPMHQLLRHL

SEQ ID NO: 166796 - protein, 10 aa, Artificial Sequence
  Description of Artificial Sequence: Synthetic peptide
  Seed: NPMHQLLRHF
NPMHQLLRHM

SEQ ID NO: 166797 - protein, 10 aa, Artificial Sequence
  Description of Artificial Sequence: Synthetic peptide
  Seed: NPMHQLLRHF
NPMHQLLRHV

SEQ ID NO: 166798 - protein, 10 aa, Artificial Sequence
  Description of Artificial Sequence: Synthetic peptide
  Seed: NPMHQLLRHF
NPMHQLLRHW

SEQ ID NO: 166799 - protein, 10 aa, Artificial Sequence
  Description of Artificial Sequence: Synthetic peptide
  Seed: NPMHQLLRHF
NPMHQLLRHY

SEQ ID NO: 166800 - protein, 10 aa, Artificial Sequence
  Description of Artificial Sequence: Synthetic peptide
  Seed: NQRLNPMHQL
NPRLNPMHQF

SEQ ID NO: 166801 - protein, 10 aa, Artificial Sequence
  Description of Artificial Sequence: Synthetic peptide
  Seed: NQRLNPMHQL
NPRLNPMHQI

SEQ ID NO: 166802 - protein, 10 aa, Artificial Sequence
  Description of Artificial Sequence: Synthetic peptide
  Seed: NQRLNPMHQL
NPRLNPMHQL

SEQ ID NO: 166803 - protein, 10 aa, Artificial Sequence
  Description of Artificial Sequence: Synthetic peptide
  Seed: NQRLNPMHQL
NPRLNPMHQM

SEQ ID NO: 166804 - protein, 10 aa, Artificial Sequence
  Description of Artificial Sequence: Synthetic peptide
  Seed: NPMHQLLRHF
NQMHQLLRHF

SEQ ID NO: 166805 - protein, 10 aa, Artificial Sequence
  Description of Artificial Sequence: Synthetic peptide
  Seed: NPMHQLLRHF
NQMHQLLRHM

SEQ ID NO: 166806 - protein, 10 aa, Artificial Sequence
  Description of Artificial Sequence: Synthetic peptide
  Seed: NPMHQLLRHF
NQMHQLLRHY

SEQ ID NO: 166807 - protein, 10 aa, Artificial Sequence
  Description of Artificial Sequence: Synthetic peptide
  Seed: NQRLNPMHQL
NQRLNPMHQF

SEQ ID NO: 166808 - protein, 10 aa, Artificial Sequence
  Description of Artificial Sequence: Synthetic peptide
  Seed: NQRLNPMHQL
NQRLNPMHQI

SEQ ID NO: 166809 - protein, 10 aa, Artificial Sequence
  Description of Artificial Sequence: Synthetic peptide
  Seed: NQRLNPMHQL
NQRLNPMHQM

SEQ ID NO: 166810 - protein, 10 aa, Artificial Sequence
  Description of Artificial Sequence: Synthetic peptide
  Seed: NRANQRLNPM
NRANQRLNPL

SEQ ID NO: 166811 - protein, 10 aa, Artificial Sequence
  Description of Artificial Sequence: Synthetic peptide
  Seed: NPMHQLLRHF
NRMHQLLRHF

SEQ ID NO: 166812 - protein, 10 aa, Artificial Sequence
  Description of Artificial Sequence: Synthetic peptide
  Seed: NPMHQLLRHF
NRMHQLLRHY

SEQ ID NO: 166813 - protein, 10 aa, Artificial Sequence
  Description of Artificial Sequence: Synthetic peptide
  Seed: NQRLNPMHQL
NRRLNPMHQF

SEQ ID NO: 166814 - protein, 10 aa, Artificial Sequence
  Description of Artificial Sequence: Synthetic peptide
  Seed: NQRLNPMHQL
NRRLNPMHQI

SEQ ID NO: 166815 - protein, 10 aa, Artificial Sequence
  Description of Artificial Sequence: Synthetic peptide
  Seed: NQRLNPMHQL
NRRLNPMHQL

SEQ ID NO: 166816 - protein, 10 aa, Artificial Sequence
  Description of Artificial Sequence: Synthetic peptide
  Seed: NQRLNPMHQL
NRRLNPMHQM

SEQ ID NO: 166817 - protein, 10 aa, Artificial Sequence
  Description of Artificial Sequence: Synthetic peptide
  Seed: NQRLNPMHQL
NRRLNPMHQV

SEQ ID NO: 166818 - protein, 10 aa, Artificial Sequence
  Description of Artificial Sequence: Synthetic peptide
  Seed: NPMHQLLRHF
NSMHQLLRHF

SEQ ID NO: 166819 - protein, 10 aa, Artificial Sequence
  Description of Artificial Sequence: Synthetic peptide
  Seed: NPMHQLLRHF
NSMHQLLRHY

SEQ ID NO: 166820 - protein, 10 aa, Artificial Sequence
  Description of Artificial Sequence: Synthetic peptide
  Seed: NQRLNPMHQL
NSRLNPMHQF

SEQ ID NO: 166821 - protein, 10 aa, Artificial Sequence
  Description of Artificial Sequence: Synthetic peptide
  Seed: NQRLNPMHQL
NSRLNPMHQI

SEQ ID NO: 166822 - protein, 10 aa, Artificial Sequence
  Description of Artificial Sequence: Synthetic peptide
  Seed: NQRLNPMHQL
NSRLNPMHQL

SEQ ID NO: 166823 - protein, 10 aa, Artificial Sequence
  Description of Artificial Sequence: Synthetic peptide
  Seed: NQRLNPMHQL
NSRLNPMHQM

SEQ ID NO: 166824 - protein, 10 aa, Artificial Sequence
  Description of Artificial Sequence: Synthetic peptide
  Seed: NQRLNPMHQL
NSRLNPMHQV

SEQ ID NO: 166825 - protein, 10 aa, Artificial Sequence
  Description of Artificial Sequence: Synthetic peptide
  Seed: NPMHQLLRHF
NTMHQLLRHF

SEQ ID NO: 166826 - protein, 10 aa, Artificial Sequence
  Description of Artificial Sequence: Synthetic peptide
  Seed: NPMHQLLRHF
NTMHQLLRHY

SEQ ID NO: 166827 - protein, 10 aa, Artificial Sequence
  Description of Artificial Sequence: Synthetic peptide
  Seed: NQRLNPMHQL
NTRLNPMHQF

SEQ ID NO: 166828 - protein, 10 aa, Artificial Sequence
  Description of Artificial Sequence: Synthetic peptide
  Seed: NQRLNPMHQL
NTRLNPMHQI

SEQ ID NO: 166829 - protein, 10 aa, Artificial Sequence
  Description of Artificial Sequence: Synthetic peptide
  Seed: NQRLNPMHQL
NTRLNPMHQL

SEQ ID NO: 166830 - protein, 10 aa, Artificial Sequence
  Description of Artificial Sequence: Synthetic peptide
  Seed: NQRLNPMHQL
NTRLNPMHQM

SEQ ID NO: 166831 - protein, 10 aa, Artificial Sequence
  Description of Artificial Sequence: Synthetic peptide
  Seed: NPMHQLLRHF
NVMHQLLRHF

SEQ ID NO: 166832 - protein, 10 aa, Artificial Sequence
  Description of Artificial Sequence: Synthetic peptide
  Seed: NPMHQLLRHF
NVMHQLLRHY

SEQ ID NO: 166833 - protein, 10 aa, Artificial Sequence
  Description of Artificial Sequence: Synthetic peptide
  Seed: NQRLNPMHQL
NVRLNPMHQF

SEQ ID NO: 166834 - protein, 10 aa, Artificial Sequence
  Description of Artificial Sequence: Synthetic peptide
  Seed: NQRLNPMHQL
NVRLNPMHQI

SEQ ID NO: 166835 - protein, 10 aa, Artificial Sequence
  Description of Artificial Sequence: Synthetic peptide
  Seed: NQRLNPMHQL
NVRLNPMHQL

SEQ ID NO: 166836 - protein, 10 aa, Artificial Sequence
  Description of Artificial Sequence: Synthetic peptide
  Seed: NQRLNPMHQL
NVRLNPMHQM

SEQ ID NO: 166837 - protein, 10 aa, Artificial Sequence
  Description of Artificial Sequence: Synthetic peptide
  Seed: NPMHQLLRHF
NWMHQLLRHF

SEQ ID NO: 166838 - protein, 10 aa, Artificial Sequence
  Description of Artificial Sequence: Synthetic peptide
  Seed: NPMHQLLRHF
NWMHQLLRHY

SEQ ID NO: 166839 - protein, 10 aa, Artificial Sequence
  Description of Artificial Sequence: Synthetic peptide
  Seed: NQRLNPMHQL
NWRLNPMHQF

SEQ ID NO: 166840 - protein, 10 aa, Artificial Sequence
  Description of Artificial Sequence: Synthetic peptide
  Seed: NQRLNPMHQL
NWRLNPMHQI

SEQ ID NO: 166841 - protein, 10 aa, Artificial Sequence
  Description of Artificial Sequence: Synthetic peptide
  Seed: NQRLNPMHQL
NWRLNPMHQL

SEQ ID NO: 166842 - protein, 10 aa, Artificial Sequence
  Description of Artificial Sequence: Synthetic peptide
  Seed: NQRLNPMHQL
NWRLNPMHQM

SEQ ID NO: 166843 - protein, 10 aa, Artificial Sequence
  Description of Artificial Sequence: Synthetic peptide
  Seed: NQRLNPMHQL
NWRLNPMHQV

SEQ ID NO: 166844 - protein, 10 aa, Artificial Sequence
  Description of Artificial Sequence: Synthetic peptide
  Seed: NPMHQLLRHF
NYMHQLLRHF

SEQ ID NO: 166845 - protein, 10 aa, Artificial Sequence
  Description of Artificial Sequence: Synthetic peptide
  Seed: NPMHQLLRHF
NYMHQLLRHY

SEQ ID NO: 166846 - protein, 10 aa, Artificial Sequence
  Description of Artificial Sequence: Synthetic peptide
  Seed: NQRLNPMHQL
NYRLNPMHQF

SEQ ID NO: 166847 - protein, 10 aa, Artificial Sequence
  Description of Artificial Sequence: Synthetic peptide
  Seed: NQRLNPMHQL
NYRLNPMHQI

SEQ ID NO: 166848 - protein, 10 aa, Artificial Sequence
  Description of Artificial Sequence: Synthetic peptide
  Seed: NQRLNPMHQL
NYRLNPMHQL

SEQ ID NO: 166849 - protein, 10 aa, Artificial Sequence
  Description of Artificial Sequence: Synthetic peptide
  Seed: NQRLNPMHQL
NYRLNPMHQM

SEQ ID NO: 166850 - protein, 10 aa, Artificial Sequence
  Description of Artificial Sequence: Synthetic peptide
  Seed: NQRLNPMHQL
NYRLNPMHQV

SEQ ID NO: 166851 - protein, 10 aa, Artificial Sequence
  Description of Artificial Sequence: Synthetic peptide
  Seed: QRLNPMHQLL
QALNPMHQLI

SEQ ID NO: 166852 - protein, 10 aa, Artificial Sequence
  Description of Artificial Sequence: Synthetic peptide
  Seed: QRLNPMHQLL
QALNPMHQLL

SEQ ID NO: 166853 - protein, 11 aa, Artificial Sequence
  Description of Artificial Sequence: Synthetic peptide
  Seed: QRLNPMHQLLR
QALNPMHQLLR

SEQ ID NO: 166854 - protein, 10 aa, Artificial Sequence
  Description of Artificial Sequence: Synthetic peptide
  Seed: QRLNPMHQLL
QALNPMHQLV

SEQ ID NO: 166855 - protein, 10 aa, Artificial Sequence
  Description of Artificial Sequence: Synthetic peptide
  Seed: QRLNPMHQLL
QCLNPMHQLI

SEQ ID NO: 166856 - protein, 10 aa, Artificial Sequence
  Description of Artificial Sequence: Synthetic peptide
  Seed: QRLNPMHQLL
QCLNPMHQLL

SEQ ID NO: 166857 - protein, 11 aa, Artificial Sequence
  Description of Artificial Sequence: Synthetic peptide
  Seed: QRLNPMHQLLR
QCLNPMHQLLR

SEQ ID NO: 166858 - protein, 10 aa, Artificial Sequence
  Description of Artificial Sequence: Synthetic peptide
  Seed: QRLNPMHQLL
QCLNPMHQLV

SEQ ID NO: 166859 - protein, 10 aa, Artificial Sequence
  Description of Artificial Sequence: Synthetic peptide
  Seed: QRLNPMHQLL
QDLNPMHQLI

SEQ ID NO: 166860 - protein, 10 aa, Artificial Sequence
  Description of Artificial Sequence: Synthetic peptide
  Seed: QRLNPMHQLL
QDLNPMHQLL

SEQ ID NO: 166861 - protein, 10 aa, Artificial Sequence
  Description of Artificial Sequence: Synthetic peptide
  Seed: QRLNPMHQLL
QDLNPMHQLV

SEQ ID NO: 166862 - protein, 10 aa, Artificial Sequence
  Description of Artificial Sequence: Synthetic peptide
  Seed: QRLNPMHQLL
QELNPMHQLI

SEQ ID NO: 166863 - protein, 10 aa, Artificial Sequence
  Description of Artificial Sequence: Synthetic peptide
  Seed: QRLNPMHQLL
QELNPMHQLL

SEQ ID NO: 166864 - protein, 10 aa, Artificial Sequence
  Description of Artificial Sequence: Synthetic peptide
  Seed: QRLNPMHQLL
QELNPMHQLV

SEQ ID NO: 166865 - protein, 10 aa, Artificial Sequence
  Description of Artificial Sequence: Synthetic peptide
  Seed: QRLNPMHQLL
QFLNPMHQLA

SEQ ID NO: 166866 - protein, 10 aa, Artificial Sequence
  Description of Artificial Sequence: Synthetic peptide
  Seed: QRLNPMHQLL
QFLNPMHQLI

SEQ ID NO: 166867 - protein, 10 aa, Artificial Sequence
  Description of Artificial Sequence: Synthetic peptide
  Seed: QRLNPMHQLL
QFLNPMHQLL

SEQ ID NO: 166868 - protein, 11 aa, Artificial Sequence
  Description of Artificial Sequence: Synthetic peptide
  Seed: QRLNPMHQLLR
QFLNPMHQLLK

SEQ ID NO: 166869 - protein, 11 aa, Artificial Sequence
  Description of Artificial Sequence: Synthetic peptide
  Seed: QRLNPMHQLLR
QFLNPMHQLLR

SEQ ID NO: 166870 - protein, 10 aa, Artificial Sequence
  Description of Artificial Sequence: Synthetic peptide
  Seed: QRLNPMHQLL
QFLNPMHQLM

SEQ ID NO: 166871 - protein, 10 aa, Artificial Sequence
  Description of Artificial Sequence: Synthetic peptide
  Seed: QRLNPMHQLL
QFLNPMHQLV

SEQ ID NO: 166872 - protein, 10 aa, Artificial Sequence
  Description of Artificial Sequence: Synthetic peptide
  Seed: QRLNPMHQLL
QGLNPMHQLI

SEQ ID NO: 166873 - protein, 10 aa, Artificial Sequence
  Description of Artificial Sequence: Synthetic peptide
  Seed: QRLNPMHQLL
QGLNPMHQLL

SEQ ID NO: 166874 - protein, 11 aa, Artificial Sequence
  Description of Artificial Sequence: Synthetic peptide
  Seed: QRLNPMHQLLR
QGLNPMHQLLR

SEQ ID NO: 166875 - protein, 10 aa, Artificial Sequence
  Description of Artificial Sequence: Synthetic peptide
  Seed: QRLNPMHQLL
QGLNPMHQLV

SEQ ID NO: 166876 - protein, 9 aa, Artificial Sequence
  Description of Artificial Sequence: Synthetic peptide
  Seed: QRLNPMHQL
QHLNPMHQL

SEQ ID NO: 166877 - protein, 10 aa, Artificial Sequence
  Description of Artificial Sequence: Synthetic peptide
  Seed: QRLNPMHQLL
QHLNPMHQLI

SEQ ID NO: 166878 - protein, 10 aa, Artificial Sequence
  Description of Artificial Sequence: Synthetic peptide
  Seed: QRLNPMHQLL
QHLNPMHQLL

SEQ ID NO: 166879 - protein, 11 aa, Artificial Sequence
  Description of Artificial Sequence: Synthetic peptide
  Seed: QRLNPMHQLLR
QHLNPMHQLLR

SEQ ID NO: 166880 - protein, 10 aa, Artificial Sequence
  Description of Artificial Sequence: Synthetic peptide
  Seed: QRLNPMHQLL
QHLNPMHQLV

SEQ ID NO: 166881 - protein, 10 aa, Artificial Sequence
  Description of Artificial Sequence: Synthetic peptide
  Seed: QRLNPMHQLL
QILNPMHQLI

SEQ ID NO: 166882 - protein, 10 aa, Artificial Sequence
  Description of Artificial Sequence: Synthetic peptide
  Seed: QRLNPMHQLL
QILNPMHQLL

SEQ ID NO: 166883 - protein, 11 aa, Artificial Sequence
  Description of Artificial Sequence: Synthetic peptide
  Seed: QRLNPMHQLLR
QILNPMHQLLK

SEQ ID NO: 166884 - protein, 11 aa, Artificial Sequence
  Description of Artificial Sequence: Synthetic peptide
  Seed: QRLNPMHQLLR
QILNPMHQLLR

SEQ ID NO: 166885 - protein, 10 aa, Artificial Sequence
  Description of Artificial Sequence: Synthetic peptide
  Seed: QRLNPMHQLL
QILNPMHQLV

SEQ ID NO: 166886 - protein, 10 aa, Artificial Sequence
  Description of Artificial Sequence: Synthetic peptide
  Seed: QRLNPMHQLL
QKLNPMHQLI

SEQ ID NO: 166887 - protein, 10 aa, Artificial Sequence
  Description of Artificial Sequence: Synthetic peptide
  Seed: QRLNPMHQLL
QKLNPMHQLL

SEQ ID NO: 166888 - protein, 11 aa, Artificial Sequence
  Description of Artificial Sequence: Synthetic peptide
  Seed: QRLNPMHQLLR
QKLNPMHQLLK

SEQ ID NO: 166889 - protein, 11 aa, Artificial Sequence
  Description of Artificial Sequence: Synthetic peptide
  Seed: QRLNPMHQLLR
QKLNPMHQLLR

SEQ ID NO: 166890 - protein, 10 aa, Artificial Sequence
  Description of Artificial Sequence: Synthetic peptide
  Seed: QRLNPMHQLL
QKLNPMHQLV

SEQ ID NO: 166891 - protein, 10 aa, Artificial Sequence
  Description of Artificial Sequence: Synthetic peptide
  Seed: QRLNPMHQLL
QLLNPMHQLI

SEQ ID NO: 166892 - protein, 10 aa, Artificial Sequence
  Description of Artificial Sequence: Synthetic peptide
  Seed: QRLNPMHQLL
QLLNPMHQLL

SEQ ID NO: 166893 - protein, 11 aa, Artificial Sequence
  Description of Artificial Sequence: Synthetic peptide
  Seed: QRLNPMHQLLR
QLLNPMHQLLK

SEQ ID NO: 166894 - protein, 11 aa, Artificial Sequence
  Description of Artificial Sequence: Synthetic peptide
  Seed: QRLNPMHQLLR
QLLNPMHQLLR

SEQ ID NO: 166895 - protein, 10 aa, Artificial Sequence
  Description of Artificial Sequence: Synthetic peptide
  Seed: QRLNPMHQLL
QLLNPMHQLV

SEQ ID NO: 166896 - protein, 10 aa, Artificial Sequence
  Description of Artificial Sequence: Synthetic peptide
  Seed: QRLNPMHQLL
QMLNPMHQLA

SEQ ID NO: 166897 - protein, 10 aa, Artificial Sequence
  Description of Artificial Sequence: Synthetic peptide
  Seed: QRLNPMHQLL
QMLNPMHQLI

SEQ ID NO: 166898 - protein, 10 aa, Artificial Sequence
  Description of Artificial Sequence: Synthetic peptide
  Seed: QRLNPMHQLL
QMLNPMHQLL

SEQ ID NO: 166899 - protein, 11 aa, Artificial Sequence
  Description of Artificial Sequence: Synthetic peptide
  Seed: QRLNPMHQLLR
QMLNPMHQLLK

SEQ ID NO: 166900 - protein, 11 aa, Artificial Sequence
  Description of Artificial Sequence: Synthetic peptide
  Seed: QRLNPMHQLLR
QMLNPMHQLLR

SEQ ID NO: 166901 - protein, 10 aa, Artificial Sequence
  Description of Artificial Sequence: Synthetic peptide
  Seed: QRLNPMHQLL
QMLNPMHQLM

SEQ ID NO: 166902 - protein, 10 aa, Artificial Sequence
  Description of Artificial Sequence: Synthetic peptide
  Seed: QRLNPMHQLL
QMLNPMHQLV

SEQ ID NO: 166903 - protein, 10 aa, Artificial Sequence
  Description of Artificial Sequence: Synthetic peptide
  Seed: QRLNPMHQLL
QNLNPMHQLI

SEQ ID NO: 166904 - protein, 10 aa, Artificial Sequence
  Description of Artificial Sequence: Synthetic peptide
  Seed: QRLNPMHQLL
QNLNPMHQLL

SEQ ID NO: 166905 - protein, 11 aa, Artificial Sequence
  Description of Artificial Sequence: Synthetic peptide
  Seed: QRLNPMHQLLR
QNLNPMHQLLR

SEQ ID NO: 166906 - protein, 10 aa, Artificial Sequence
  Description of Artificial Sequence: Synthetic peptide
  Seed: QRLNPMHQLL
QNLNPMHQLV

SEQ ID NO: 166907 - protein, 10 aa, Artificial Sequence
  Description of Artificial Sequence: Synthetic peptide
  Seed: QRLNPMHQLL
QPLNPMHQLI

SEQ ID NO: 166908 - protein, 10 aa, Artificial Sequence
  Description of Artificial Sequence: Synthetic peptide
  Seed: QRLNPMHQLL
QPLNPMHQLL

SEQ ID NO: 166909 - protein, 10 aa, Artificial Sequence
  Description of Artificial Sequence: Synthetic peptide
  Seed: QRLNPMHQLL
QPLNPMHQLV

SEQ ID NO: 166910 - protein, 9 aa, Artificial Sequence
  Description of Artificial Sequence: Synthetic peptide
  Seed: QRLNPMHQL
QQLNPMHQI

SEQ ID NO: 166911 - protein, 9 aa, Artificial Sequence
  Description of Artificial Sequence: Synthetic peptide
  Seed: QRLNPMHQL
QQLNPMHQL

SEQ ID NO: 166912 - protein, 10 aa, Artificial Sequence
  Description of Artificial Sequence: Synthetic peptide
  Seed: QRLNPMHQLL
QQLNPMHQLI

SEQ ID NO: 166913 - protein, 10 aa, Artificial Sequence
  Description of Artificial Sequence: Synthetic peptide
  Seed: QRLNPMHQLL
QQLNPMHQLL

SEQ ID NO: 166914 - protein, 11 aa, Artificial Sequence
  Description of Artificial Sequence: Synthetic peptide
  Seed: QRLNPMHQLLR
QQLNPMHQLLR

SEQ ID NO: 166915 - protein, 10 aa, Artificial Sequence
  Description of Artificial Sequence: Synthetic peptide
  Seed: QRLNPMHQLL
QQLNPMHQLV

SEQ ID NO: 166916 - protein, 9 aa, Artificial Sequence
  Description of Artificial Sequence: Synthetic peptide
  Seed: QRLNPMHQL
QRLNPMHQA

SEQ ID NO: 166917 - protein, 9 aa, Artificial Sequence
  Description of Artificial Sequence: Synthetic peptide
  Seed: QRLNPMHQL
QRLNPMHQC

SEQ ID NO: 166918 - protein, 9 aa, Artificial Sequence
  Description of Artificial Sequence: Synthetic peptide
  Seed: QRLNPMHQL
QRLNPMHQF

SEQ ID NO: 166919 - protein, 9 aa, Artificial Sequence
  Description of Artificial Sequence: Synthetic peptide
  Seed: QRLNPMHQL
QRLNPMHQI

SEQ ID NO: 166920 - protein, 9 aa, Artificial Sequence
  Description of Artificial Sequence: Synthetic peptide
  Seed: QRLNPMHQL
QRLNPMHQK

SEQ ID NO: 166921 - protein, 10 aa, Artificial Sequence
  Description of Artificial Sequence: Synthetic peptide
  Seed: QRLNPMHQLL
QRLNPMHQLA

SEQ ID NO: 166922 - protein, 10 aa, Artificial Sequence
  Description of Artificial Sequence: Synthetic peptide
  Seed: QRLNPMHQLL
QRLNPMHQLC

SEQ ID NO: 166923 - protein, 10 aa, Artificial Sequence
  Description of Artificial Sequence: Synthetic peptide
  Seed: QRLNPMHQLL
QRLNPMHQLD

SEQ ID NO: 166924 - protein, 10 aa, Artificial Sequence
  Description of Artificial Sequence: Synthetic peptide
  Seed: QRLNPMHQLL
QRLNPMHQLE

SEQ ID NO: 166925 - protein, 10 aa, Artificial Sequence
  Description of Artificial Sequence: Synthetic peptide
  Seed: QRLNPMHQLL
QRLNPMHQLF

SEQ ID NO: 166926 - protein, 10 aa, Artificial Sequence
  Description of Artificial Sequence: Synthetic peptide
  Seed: QRLNPMHQLL
QRLNPMHQLG

SEQ ID NO: 166927 - protein, 10 aa, Artificial Sequence
  Description of Artificial Sequence: Synthetic peptide
  Seed: QRLNPMHQLL
QRLNPMHQLH

SEQ ID NO: 166928 - protein, 10 aa, Artificial Sequence
  Description of Artificial Sequence: Synthetic peptide
  Seed: QRLNPMHQLL
QRLNPMHQLI

SEQ ID NO: 166929 - protein, 10 aa, Artificial Sequence
  Description of Artificial Sequence: Synthetic peptide
  Seed: QRLNPMHQLL
QRLNPMHQLK

SEQ ID NO: 166930 - protein, 11 aa, Artificial Sequence
  Description of Artificial Sequence: Synthetic peptide
  Seed: QRLNPMHQLLR
QRLNPMHQLLF

SEQ ID NO: 166931 - protein, 11 aa, Artificial Sequence
  Description of Artificial Sequence: Synthetic peptide
  Seed: QRLNPMHQLLR
QRLNPMHQLLI

SEQ ID NO: 166932 - protein, 11 aa, Artificial Sequence
  Description of Artificial Sequence: Synthetic peptide
  Seed: QRLNPMHQLLR
QRLNPMHQLLK

SEQ ID NO: 166933 - protein, 11 aa, Artificial Sequence
  Description of Artificial Sequence: Synthetic peptide
  Seed: QRLNPMHQLLR
QRLNPMHQLLL

SEQ ID NO: 166934 - protein, 11 aa, Artificial Sequence
  Description of Artificial Sequence: Synthetic peptide
  Seed: QRLNPMHQLLR
QRLNPMHQLLM

SEQ ID NO: 166935 - protein, 11 aa, Artificial Sequence
  Description of Artificial Sequence: Synthetic peptide
  Seed: QRLNPMHQLLR
QRLNPMHQLLV

SEQ ID NO: 166936 - protein, 11 aa, Artificial Sequence
  Description of Artificial Sequence: Synthetic peptide
  Seed: QRLNPMHQLLR
QRLNPMHQLLY

SEQ ID NO: 166937 - protein, 10 aa, Artificial Sequence
  Description of Artificial Sequence: Synthetic peptide
  Seed: QRLNPMHQLL
QRLNPMHQLM

SEQ ID NO: 166938 - protein, 10 aa, Artificial Sequence
  Description of Artificial Sequence: Synthetic peptide
  Seed: QRLNPMHQLL
QRLNPMHQLN

SEQ ID NO: 166939 - protein, 10 aa, Artificial Sequence
  Description of Artificial Sequence: Synthetic peptide
  Seed: QRLNPMHQLL
QRLNPMHQLP

SEQ ID NO: 166940 - protein, 10 aa, Artificial Sequence
  Description of Artificial Sequence: Synthetic peptide
  Seed: QRLNPMHQLL
QRLNPMHQLQ

SEQ ID NO: 166941 - protein, 10 aa, Artificial Sequence
  Description of Artificial Sequence: Synthetic peptide
  Seed: QRLNPMHQLL
QRLNPMHQLR

SEQ ID NO: 166942 - protein, 10 aa, Artificial Sequence
  Description of Artificial Sequence: Synthetic peptide
  Seed: QRLNPMHQLL
QRLNPMHQLS

SEQ ID NO: 166943 - protein, 10 aa, Artificial Sequence
  Description of Artificial Sequence: Synthetic peptide
  Seed: QRLNPMHQLL
QRLNPMHQLT

SEQ ID NO: 166944 - protein, 10 aa, Artificial Sequence
  Description of Artificial Sequence: Synthetic peptide
  Seed: QRLNPMHQLL
QRLNPMHQLV

SEQ ID NO: 166945 - protein, 10 aa, Artificial Sequence
  Description of Artificial Sequence: Synthetic peptide
  Seed: QRLNPMHQLL
QRLNPMHQLW

SEQ ID NO: 166946 - protein, 10 aa, Artificial Sequence
  Description of Artificial Sequence: Synthetic peptide
  Seed: QRLNPMHQLL
QRLNPMHQLY

SEQ ID NO: 166947 - protein, 9 aa, Artificial Sequence
  Description of Artificial Sequence: Synthetic peptide
  Seed: QRLNPMHQL
QRLNPMHQM

SEQ ID NO: 166948 - protein, 9 aa, Artificial Sequence
  Description of Artificial Sequence: Synthetic peptide
  Seed: QRLNPMHQL
QRLNPMHQR

SEQ ID NO: 166949 - protein, 9 aa, Artificial Sequence
  Description of Artificial Sequence: Synthetic peptide
  Seed: QRLNPMHQL
QRLNPMHQV

SEQ ID NO: 166950 - protein, 9 aa, Artificial Sequence
  Description of Artificial Sequence: Synthetic peptide
  Seed: QRLNPMHQL
QRLNPMHQY

SEQ ID NO: 166951 - protein, 10 aa, Artificial Sequence
  Description of Artificial Sequence: Synthetic peptide
  Seed: QRLNPMHQLL
QSLNPMHQLI

SEQ ID NO: 166952 - protein, 10 aa, Artificial Sequence
  Description of Artificial Sequence: Synthetic peptide
  Seed: QRLNPMHQLL
QSLNPMHQLL

SEQ ID NO: 166953 - protein, 11 aa, Artificial Sequence
  Description of Artificial Sequence: Synthetic peptide
  Seed: QRLNPMHQLLR
QSLNPMHQLLK

SEQ ID NO: 166954 - protein, 11 aa, Artificial Sequence
  Description of Artificial Sequence: Synthetic peptide
  Seed: QRLNPMHQLLR
QSLNPMHQLLR

SEQ ID NO: 166955 - protein, 10 aa, Artificial Sequence
  Description of Artificial Sequence: Synthetic peptide
  Seed: QRLNPMHQLL
QSLNPMHQLV

SEQ ID NO: 166956 - protein, 10 aa, Artificial Sequence
  Description of Artificial Sequence: Synthetic peptide
  Seed: QRLNPMHQLL
QTLNPMHQLI

SEQ ID NO: 166957 - protein, 10 aa, Artificial Sequence
  Description of Artificial Sequence: Synthetic peptide
  Seed: QRLNPMHQLL
QTLNPMHQLL

SEQ ID NO: 166958 - protein, 11 aa, Artificial Sequence
  Description of Artificial Sequence: Synthetic peptide
  Seed: QRLNPMHQLLR
QTLNPMHQLLK

SEQ ID NO: 166959 - protein, 11 aa, Artificial Sequence
  Description of Artificial Sequence: Synthetic peptide
  Seed: QRLNPMHQLLR
QTLNPMHQLLR

SEQ ID NO: 166960 - protein, 10 aa, Artificial Sequence
  Description of Artificial Sequence: Synthetic peptide
  Seed: QRLNPMHQLL
QTLNPMHQLV

SEQ ID NO: 166961 - protein, 10 aa, Artificial Sequence
  Description of Artificial Sequence: Synthetic peptide
  Seed: QRLNPMHQLL
QVLNPMHQLI

SEQ ID NO: 166962 - protein, 10 aa, Artificial Sequence
  Description of Artificial Sequence: Synthetic peptide
  Seed: QRLNPMHQLL
QVLNPMHQLL

SEQ ID NO: 166963 - protein, 11 aa, Artificial Sequence
  Description of Artificial Sequence: Synthetic peptide
  Seed: QRLNPMHQLLR
QVLNPMHQLLK

SEQ ID NO: 166964 - protein, 11 aa, Artificial Sequence
  Description of Artificial Sequence: Synthetic peptide
  Seed: QRLNPMHQLLR
QVLNPMHQLLR

SEQ ID NO: 166965 - protein, 10 aa, Artificial Sequence
  Description of Artificial Sequence: Synthetic peptide
  Seed: QRLNPMHQLL
QVLNPMHQLV

SEQ ID NO: 166966 - protein, 10 aa, Artificial Sequence
  Description of Artificial Sequence: Synthetic peptide
  Seed: QRLNPMHQLL
QWLNPMHQLI

SEQ ID NO: 166967 - protein, 10 aa, Artificial Sequence
  Description of Artificial Sequence: Synthetic peptide
  Seed: QRLNPMHQLL
QWLNPMHQLL

SEQ ID NO: 166968 - protein, 11 aa, Artificial Sequence
  Description of Artificial Sequence: Synthetic peptide
  Seed: QRLNPMHQLLR
QWLNPMHQLLK

SEQ ID NO: 166969 - protein, 11 aa, Artificial Sequence
  Description of Artificial Sequence: Synthetic peptide
  Seed: QRLNPMHQLLR
QWLNPMHQLLR

SEQ ID NO: 166970 - protein, 10 aa, Artificial Sequence
  Description of Artificial Sequence: Synthetic peptide
  Seed: QRLNPMHQLL
QWLNPMHQLV

SEQ ID NO: 166971 - protein, 10 aa, Artificial Sequence
  Description of Artificial Sequence: Synthetic peptide
  Seed: QRLNPMHQLL
QYLNPMHQLA

SEQ ID NO: 166972 - protein, 10 aa, Artificial Sequence
  Description of Artificial Sequence: Synthetic peptide
  Seed: QRLNPMHQLL
QYLNPMHQLI

SEQ ID NO: 166973 - protein, 10 aa, Artificial Sequence
  Description of Artificial Sequence: Synthetic peptide
  Seed: QRLNPMHQLL
QYLNPMHQLL

SEQ ID NO: 166974 - protein, 11 aa, Artificial Sequence
  Description of Artificial Sequence: Synthetic peptide
  Seed: QRLNPMHQLLR
QYLNPMHQLLK

SEQ ID NO: 166975 - protein, 11 aa, Artificial Sequence
  Description of Artificial Sequence: Synthetic peptide
  Seed: QRLNPMHQLLR
QYLNPMHQLLR

SEQ ID NO: 166976 - protein, 10 aa, Artificial Sequence
  Description of Artificial Sequence: Synthetic peptide
  Seed: QRLNPMHQLL
QYLNPMHQLM

SEQ ID NO: 166977 - protein, 10 aa, Artificial Sequence
  Description of Artificial Sequence: Synthetic peptide
  Seed: QRLNPMHQLL
QYLNPMHQLV

SEQ ID NO: 166978 - protein, 8 aa, Artificial Sequence
  Description of Artificial Sequence: Synthetic peptide
  Seed: RMKWMMAM
RAKWMMAF

SEQ ID NO: 166979 - protein, 9 aa, Artificial Sequence
  Description of Artificial Sequence: Synthetic peptide
  Seed: RMKWMMAMK
RAKWMMAMA

SEQ ID NO: 166980 - protein, 9 aa, Artificial Sequence
  Description of Artificial Sequence: Synthetic peptide
  Seed: RMKWMMAMK
RAKWMMAMC

SEQ ID NO: 166981 - protein, 9 aa, Artificial Sequence
  Description of Artificial Sequence: Synthetic peptide
  Seed: RMKWMMAMK
RAKWMMAME

SEQ ID NO: 166982 - protein, 9 aa, Artificial Sequence
  Description of Artificial Sequence: Synthetic peptide
  Seed: RMKWMMAMK
RAKWMMAMF

SEQ ID NO: 166983 - protein, 9 aa, Artificial Sequence
  Description of Artificial Sequence: Synthetic peptide
  Seed: RMKWMMAMK
RAKWMMAMG

SEQ ID NO: 166984 - protein, 9 aa, Artificial Sequence
  Description of Artificial Sequence: Synthetic peptide
  Seed: RMKWMMAMK
RAKWMMAMH

SEQ ID NO: 166985 - protein, 9 aa, Artificial Sequence
  Description of Artificial Sequence: Synthetic peptide
  Seed: RMKWMMAMK
RAKWMMAMI

SEQ ID NO: 166986 - protein, 9 aa, Artificial Sequence
  Description of Artificial Sequence: Synthetic peptide
  Seed: RMKWMMAMK
RAKWMMAMK

SEQ ID NO: 166987 - protein, 10 aa, Artificial Sequence
  Description of Artificial Sequence: Synthetic peptide
  Seed: RMKWMMAMKY
RAKWMMAMKA

SEQ ID NO: 166988 - protein, 10 aa, Artificial Sequence
  Description of Artificial Sequence: Synthetic peptide
  Seed: RMKWMMAMKY
RAKWMMAMKC

SEQ ID NO: 166989 - protein, 10 aa, Artificial Sequence
  Description of Artificial Sequence: Synthetic peptide
  Seed: RMKWMMAMKY
RAKWMMAMKD

SEQ ID NO: 166990 - protein, 10 aa, Artificial Sequence
  Description of Artificial Sequence: Synthetic peptide
  Seed: RMKWMMAMKY
RAKWMMAMKE

SEQ ID NO: 166991 - protein, 10 aa, Artificial Sequence
  Description of Artificial Sequence: Synthetic peptide
  Seed: RMKWMMAMKY
RAKWMMAMKF

SEQ ID NO: 166992 - protein, 10 aa, Artificial Sequence
  Description of Artificial Sequence: Synthetic peptide
  Seed: RMKWMMAMKY
RAKWMMAMKG

SEQ ID NO: 166993 - protein, 10 aa, Artificial Sequence
  Description of Artificial Sequence: Synthetic peptide
  Seed: RMKWMMAMKY
RAKWMMAMKH

SEQ ID NO: 166994 - protein, 10 aa, Artificial Sequence
  Description of Artificial Sequence: Synthetic peptide
  Seed: RMKWMMAMKY
RAKWMMAMKI

SEQ ID NO: 166995 - protein, 10 aa, Artificial Sequence
  Description of Artificial Sequence: Synthetic peptide
  Seed: RMKWMMAMKY
RAKWMMAMKK

SEQ ID NO: 166996 - protein, 10 aa, Artificial Sequence
  Description of Artificial Sequence: Synthetic peptide
  Seed: RMKWMMAMKY
RAKWMMAMKL

SEQ ID NO: 166997 - protein, 10 aa, Artificial Sequence
  Description of Artificial Sequence: Synthetic peptide
  Seed: RMKWMMAMKY
RAKWMMAMKM

SEQ ID NO: 166998 - protein, 10 aa, Artificial Sequence
  Description of Artificial Sequence: Synthetic peptide
  Seed: RMKWMMAMKY
RAKWMMAMKN

SEQ ID NO: 166999 - protein, 10 aa, Artificial Sequence
  Description of Artificial Sequence: Synthetic peptide
  Seed: RMKWMMAMKY
RAKWMMAMKP

SEQ ID NO: 167000 - protein, 10 aa, Artificial Sequence
  Description of Artificial Sequence: Synthetic peptide
  Seed: RMKWMMAMKY
RAKWMMAMKQ

SEQ ID NO: 167001 - protein, 10 aa, Artificial Sequence
  Description of Artificial Sequence: Synthetic peptide
  Seed: RMKWMMAMKY
RAKWMMAMKR

SEQ ID NO: 167002 - protein, 10 aa, Artificial Sequence
  Description of Artificial Sequence: Synthetic peptide
  Seed: RMKWMMAMKY
RAKWMMAMKS

SEQ ID NO: 167003 - protein, 10 aa, Artificial Sequence
  Description of Artificial Sequence: Synthetic peptide
  Seed: RMKWMMAMKY
RAKWMMAMKT

SEQ ID NO: 167004 - protein, 10 aa, Artificial Sequence
  Description of Artificial Sequence: Synthetic peptide
  Seed: RMKWMMAMKY
RAKWMMAMKV

SEQ ID NO: 167005 - protein, 10 aa, Artificial Sequence
  Description of Artificial Sequence: Synthetic peptide
  Seed: RMKWMMAMKY
RAKWMMAMKW

SEQ ID NO: 167006 - protein, 10 aa, Artificial Sequence
  Description of Artificial Sequence: Synthetic peptide
  Seed: RMKWMMAMKY
RAKWMMAMKY

SEQ ID NO: 167007 - protein, 9 aa, Artificial Sequence
  Description of Artificial Sequence: Synthetic peptide
  Seed: RMKWMMAMK
RAKWMMAML

SEQ ID NO: 167008 - protein, 9 aa, Artificial Sequence
  Description of Artificial Sequence: Synthetic peptide
  Seed: RMKWMMAMK
RAKWMMAMM

SEQ ID NO: 167009 - protein, 9 aa, Artificial Sequence
  Description of Artificial Sequence: Synthetic peptide
  Seed: RMKWMMAMK
RAKWMMAMN

SEQ ID NO: 167010 - protein, 9 aa, Artificial Sequence
  Description of Artificial Sequence: Synthetic peptide
  Seed: RMKWMMAMK
RAKWMMAMP

SEQ ID NO: 167011 - protein, 9 aa, Artificial Sequence
  Description of Artificial Sequence: Synthetic peptide
  Seed: RMKWMMAMK
RAKWMMAMQ

SEQ ID NO: 167012 - protein, 9 aa, Artificial Sequence
  Description of Artificial Sequence: Synthetic peptide
  Seed: RMKWMMAMK
RAKWMMAMR

SEQ ID NO: 167013 - protein, 9 aa, Artificial Sequence
  Description of Artificial Sequence: Synthetic peptide
  Seed: RMKWMMAMK
RAKWMMAMS

SEQ ID NO: 167014 - protein, 9 aa, Artificial Sequence
  Description of Artificial Sequence: Synthetic peptide
  Seed: RMKWMMAMK
RAKWMMAMT

SEQ ID NO: 167015 - protein, 9 aa, Artificial Sequence
  Description of Artificial Sequence: Synthetic peptide
  Seed: RMKWMMAMK
RAKWMMAMV

SEQ ID NO: 167016 - protein, 9 aa, Artificial Sequence
  Description of Artificial Sequence: Synthetic peptide
  Seed: RMKWMMAMK
RAKWMMAMY

SEQ ID NO: 167017 - protein, 8 aa, Artificial Sequence
  Description of Artificial Sequence: Synthetic peptide
  Seed: RMKWMMAM
RAKWMMAY

SEQ ID NO: 167018 - protein, 9 aa, Artificial Sequence
  Description of Artificial Sequence: Synthetic peptide
  Seed: RELVRKTRF
RALVRKTRF

SEQ ID NO: 167019 - protein, 11 aa, Artificial Sequence
  Description of Artificial Sequence: Synthetic peptide
  Seed: RELVRKTRFLP
RALVRKTRFLA

SEQ ID NO: 167020 - protein, 11 aa, Artificial Sequence
  Description of Artificial Sequence: Synthetic peptide
  Seed: RELVRKTRFLP
RALVRKTRFLF

SEQ ID NO: 167021 - protein, 11 aa, Artificial Sequence
  Description of Artificial Sequence: Synthetic peptide
  Seed: RELVRKTRFLP
RALVRKTRFLG

SEQ ID NO: 167022 - protein, 11 aa, Artificial Sequence
  Description of Artificial Sequence: Synthetic peptide
  Seed: RELVRKTRFLP
RALVRKTRFLI

SEQ ID NO: 167023 - protein, 11 aa, Artificial Sequence
  Description of Artificial Sequence: Synthetic peptide
  Seed: RELVRKTRFLP
RALVRKTRFLK

SEQ ID NO: 167024 - protein, 11 aa, Artificial Sequence
  Description of Artificial Sequence: Synthetic peptide
  Seed: RELVRKTRFLP
RALVRKTRFLL

SEQ ID NO: 167025 - protein, 11 aa, Artificial Sequence
  Description of Artificial Sequence: Synthetic peptide
  Seed: RELVRKTRFLP
RALVRKTRFLM

SEQ ID NO: 167026 - protein, 11 aa, Artificial Sequence
  Description of Artificial Sequence: Synthetic peptide
  Seed: RELVRKTRFLP
RALVRKTRFLP

SEQ ID NO: 167027 - protein, 11 aa, Artificial Sequence
  Description of Artificial Sequence: Synthetic peptide
  Seed: RELVRKTRFLP
RALVRKTRFLS

SEQ ID NO: 167028 - protein, 11 aa, Artificial Sequence
  Description of Artificial Sequence: Synthetic peptide
  Seed: RELVRKTRFLP
RALVRKTRFLT

SEQ ID NO: 167029 - protein, 11 aa, Artificial Sequence
  Description of Artificial Sequence: Synthetic peptide
  Seed: RELVRKTRFLP
RALVRKTRFLV

SEQ ID NO: 167030 - protein, 11 aa, Artificial Sequence
  Description of Artificial Sequence: Synthetic peptide
  Seed: RELVRKTRFLP
RALVRKTRFLY

SEQ ID NO: 167031 - protein, 9 aa, Artificial Sequence
  Description of Artificial Sequence: Synthetic peptide
  Seed: RELVRKTRF
RALVRKTRY

SEQ ID NO: 167032 - protein, 9 aa, Artificial Sequence
  Description of Artificial Sequence: Synthetic peptide
  Seed: RLNPMHQLL
RANPMHQLA

SEQ ID NO: 167033 - protein, 9 aa, Artificial Sequence
  Description of Artificial Sequence: Synthetic peptide
  Seed: RLNPMHQLL
RANPMHQLF

SEQ ID NO: 167034 - protein, 9 aa, Artificial Sequence
  Description of Artificial Sequence: Synthetic peptide
  Seed: RLNPMHQLL
RANPMHQLG

SEQ ID NO: 167035 - protein, 9 aa, Artificial Sequence
  Description of Artificial Sequence: Synthetic peptide
  Seed: RLNPMHQLL
RANPMHQLH

SEQ ID NO: 167036 - protein, 9 aa, Artificial Sequence
  Description of Artificial Sequence: Synthetic peptide
  Seed: RLNPMHQLL
RANPMHQLI

SEQ ID NO: 167037 - protein, 9 aa, Artificial Sequence
  Description of Artificial Sequence: Synthetic peptide
  Seed: RLNPMHQLL
RANPMHQLK

SEQ ID NO: 167038 - protein, 9 aa, Artificial Sequence
  Description of Artificial Sequence: Synthetic peptide
  Seed: RLNPMHQLL
RANPMHQLL

SEQ ID NO: 167039 - protein, 10 aa, Artificial Sequence
  Description of Artificial Sequence: Synthetic peptide
  Seed: RLNPMHQLLR
RANPMHQLLK

SEQ ID NO: 167040 - protein, 10 aa, Artificial Sequence
  Description of Artificial Sequence: Synthetic peptide
  Seed: RLNPMHQLLR
RANPMHQLLR

SEQ ID NO: 167041 - protein, 11 aa, Artificial Sequence
  Description of Artificial Sequence: Synthetic peptide
  Seed: RLNPMHQLLRH
RANPMHQLLRA

SEQ ID NO: 167042 - protein, 11 aa, Artificial Sequence
  Description of Artificial Sequence: Synthetic peptide
  Seed: RLNPMHQLLRH
RANPMHQLLRC

SEQ ID NO: 167043 - protein, 11 aa, Artificial Sequence
  Description of Artificial Sequence: Synthetic peptide
  Seed: RLNPMHQLLRH
RANPMHQLLRD

SEQ ID NO: 167044 - protein, 11 aa, Artificial Sequence
  Description of Artificial Sequence: Synthetic peptide
  Seed: RLNPMHQLLRH
RANPMHQLLRE

SEQ ID NO: 167045 - protein, 11 aa, Artificial Sequence
  Description of Artificial Sequence: Synthetic peptide
  Seed: RLNPMHQLLRH
RANPMHQLLRF

SEQ ID NO: 167046 - protein, 11 aa, Artificial Sequence
  Description of Artificial Sequence: Synthetic peptide
  Seed: RLNPMHQLLRH
RANPMHQLLRG

SEQ ID NO: 167047 - protein, 11 aa, Artificial Sequence
  Description of Artificial Sequence: Synthetic peptide
  Seed: RLNPMHQLLRH
RANPMHQLLRH

SEQ ID NO: 167048 - protein, 11 aa, Artificial Sequence
  Description of Artificial Sequence: Synthetic peptide
  Seed: RLNPMHQLLRH
RANPMHQLLRI

SEQ ID NO: 167049 - protein, 11 aa, Artificial Sequence
  Description of Artificial Sequence: Synthetic peptide
  Seed: RLNPMHQLLRH
RANPMHQLLRK

SEQ ID NO: 167050 - protein, 11 aa, Artificial Sequence
  Description of Artificial Sequence: Synthetic peptide
  Seed: RLNPMHQLLRH
RANPMHQLLRL

SEQ ID NO: 167051 - protein, 11 aa, Artificial Sequence
  Description of Artificial Sequence: Synthetic peptide
  Seed: RLNPMHQLLRH
RANPMHQLLRM

SEQ ID NO: 167052 - protein, 11 aa, Artificial Sequence
  Description of Artificial Sequence: Synthetic peptide
  Seed: RLNPMHQLLRH
RANPMHQLLRN

SEQ ID NO: 167053 - protein, 11 aa, Artificial Sequence
  Description of Artificial Sequence: Synthetic peptide
  Seed: RLNPMHQLLRH
RANPMHQLLRP

SEQ ID NO: 167054 - protein, 11 aa, Artificial Sequence
  Description of Artificial Sequence: Synthetic peptide
  Seed: RLNPMHQLLRH
RANPMHQLLRQ

SEQ ID NO: 167055 - protein, 11 aa, Artificial Sequence
  Description of Artificial Sequence: Synthetic peptide
  Seed: RLNPMHQLLRH
RANPMHQLLRR

SEQ ID NO: 167056 - protein, 11 aa, Artificial Sequence
  Description of Artificial Sequence: Synthetic peptide
  Seed: RLNPMHQLLRH
RANPMHQLLRS

SEQ ID NO: 167057 - protein, 11 aa, Artificial Sequence
  Description of Artificial Sequence: Synthetic peptide
  Seed: RLNPMHQLLRH
RANPMHQLLRT

SEQ ID NO: 167058 - protein, 11 aa, Artificial Sequence
  Description of Artificial Sequence: Synthetic peptide
  Seed: RLNPMHQLLRH
RANPMHQLLRV

SEQ ID NO: 167059 - protein, 11 aa, Artificial Sequence
  Description of Artificial Sequence: Synthetic peptide
  Seed: RLNPMHQLLRH
RANPMHQLLRW

SEQ ID NO: 167060 - protein, 11 aa, Artificial Sequence
  Description of Artificial Sequence: Synthetic peptide
  Seed: RLNPMHQLLRH
RANPMHQLLRY

SEQ ID NO: 167061 - protein, 10 aa, Artificial Sequence
  Description of Artificial Sequence: Synthetic peptide
  Seed: RLNPMHQLLR
RANPMHQLLY

SEQ ID NO: 167062 - protein, 9 aa, Artificial Sequence
  Description of Artificial Sequence: Synthetic peptide
  Seed: RLNPMHQLL
RANPMHQLM

SEQ ID NO: 167063 - protein, 9 aa, Artificial Sequence
  Description of Artificial Sequence: Synthetic peptide
  Seed: RLNPMHQLL
RANPMHQLR

SEQ ID NO: 167064 - protein, 9 aa, Artificial Sequence
  Description of Artificial Sequence: Synthetic peptide
  Seed: RLNPMHQLL
RANPMHQLS

SEQ ID NO: 167065 - protein, 9 aa, Artificial Sequence
  Description of Artificial Sequence: Synthetic peptide
  Seed: RLNPMHQLL
RANPMHQLT

SEQ ID NO: 167066 - protein, 9 aa, Artificial Sequence
  Description of Artificial Sequence: Synthetic peptide
  Seed: RLNPMHQLL
RANPMHQLV

SEQ ID NO: 167067 - protein, 9 aa, Artificial Sequence
  Description of Artificial Sequence: Synthetic peptide
  Seed: RLNPMHQLL
RANPMHQLW

SEQ ID NO: 167068 - protein, 9 aa, Artificial Sequence
  Description of Artificial Sequence: Synthetic peptide
  Seed: RLNPMHQLL
RANPMHQLY

SEQ ID NO: 167069 - protein, 9 aa, Artificial Sequence
  Description of Artificial Sequence: Synthetic peptide
  Seed: RANQRLNPM
RANQRLNPA

SEQ ID NO: 167070 - protein, 9 aa, Artificial Sequence
  Description of Artificial Sequence: Synthetic peptide
  Seed: RANQRLNPM
RANQRLNPC

SEQ ID NO: 167071 - protein, 9 aa, Artificial Sequence
  Description of Artificial Sequence: Synthetic peptide
  Seed: RANQRLNPM
RANQRLNPF

SEQ ID NO: 167072 - protein, 9 aa, Artificial Sequence
  Description of Artificial Sequence: Synthetic peptide
  Seed: RANQRLNPM
RANQRLNPG

SEQ ID NO: 167073 - protein, 9 aa, Artificial Sequence
  Description of Artificial Sequence: Synthetic peptide
  Seed: RANQRLNPM
RANQRLNPH

SEQ ID NO: 167074 - protein, 9 aa, Artificial Sequence
  Description of Artificial Sequence: Synthetic peptide
  Seed: RANQRLNPM
RANQRLNPI

SEQ ID NO: 167075 - protein, 9 aa, Artificial Sequence
  Description of Artificial Sequence: Synthetic peptide
  Seed: RANQRLNPM
RANQRLNPK

SEQ ID NO: 167076 - protein, 9 aa, Artificial Sequence
  Description of Artificial Sequence: Synthetic peptide
  Seed: RANQRLNPM
RANQRLNPL

SEQ ID NO: 167077 - protein, 9 aa, Artificial Sequence
  Description of Artificial Sequence: Synthetic peptide
  Seed: RANQRLNPM
RANQRLNPP

SEQ ID NO: 167078 - protein, 9 aa, Artificial Sequence
  Description of Artificial Sequence: Synthetic peptide
  Seed: RANQRLNPM
RANQRLNPQ

SEQ ID NO: 167079 - protein, 9 aa, Artificial Sequence
  Description of Artificial Sequence: Synthetic peptide
  Seed: RANQRLNPM
RANQRLNPR

SEQ ID NO: 167080 - protein, 9 aa, Artificial Sequence
  Description of Artificial Sequence: Synthetic peptide
  Seed: RANQRLNPM
RANQRLNPS

SEQ ID NO: 167081 - protein, 9 aa, Artificial Sequence
  Description of Artificial Sequence: Synthetic peptide
  Seed: RANQRLNPM
RANQRLNPT

SEQ ID NO: 167082 - protein, 9 aa, Artificial Sequence
  Description of Artificial Sequence: Synthetic peptide
  Seed: RANQRLNPM
RANQRLNPV

SEQ ID NO: 167083 - protein, 9 aa, Artificial Sequence
  Description of Artificial Sequence: Synthetic peptide
  Seed: RANQRLNPM
RANQRLNPW

SEQ ID NO: 167084 - protein, 9 aa, Artificial Sequence
  Description of Artificial Sequence: Synthetic peptide
  Seed: RANQRLNPM
RANQRLNPY

SEQ ID NO: 167085 - protein, 9 aa, Artificial Sequence
  Description of Artificial Sequence: Synthetic peptide
  Seed: RMKWMMAMK
RCKWMMAMA

SEQ ID NO: 167086 - protein, 9 aa, Artificial Sequence
  Description of Artificial Sequence: Synthetic peptide
  Seed: RMKWMMAMK
RCKWMMAMK

SEQ ID NO: 167087 - protein, 10 aa, Artificial Sequence
  Description of Artificial Sequence: Synthetic peptide
  Seed: RMKWMMAMKY
RCKWMMAMKF

SEQ ID NO: 167088 - protein, 10 aa, Artificial Sequence
  Description of Artificial Sequence: Synthetic peptide
  Seed: RMKWMMAMKY
RCKWMMAMKK

SEQ ID NO: 167089 - protein, 10 aa, Artificial Sequence
  Description of Artificial Sequence: Synthetic peptide
  Seed: RMKWMMAMKY
RCKWMMAMKL

SEQ ID NO: 167090 - protein, 10 aa, Artificial Sequence
  Description of Artificial Sequence: Synthetic peptide
  Seed: RMKWMMAMKY
RCKWMMAMKM

SEQ ID NO: 167091 - protein, 10 aa, Artificial Sequence
  Description of Artificial Sequence: Synthetic peptide
  Seed: RMKWMMAMKY
RCKWMMAMKR

SEQ ID NO: 167092 - protein, 10 aa, Artificial Sequence
  Description of Artificial Sequence: Synthetic peptide
  Seed: RMKWMMAMKY
RCKWMMAMKY

SEQ ID NO: 167093 - protein, 9 aa, Artificial Sequence
  Description of Artificial Sequence: Synthetic peptide
  Seed: RMKWMMAMK
RCKWMMAMR

SEQ ID NO: 167094 - protein, 9 aa, Artificial Sequence
  Description of Artificial Sequence: Synthetic peptide
  Seed: RMKWMMAMK
RCKWMMAMV

SEQ ID NO: 167095 - protein, 11 aa, Artificial Sequence
  Description of Artificial Sequence: Synthetic peptide
  Seed: RELVRKTRFLP
RCLVRKTRFLA

SEQ ID NO: 167096 - protein, 11 aa, Artificial Sequence
  Description of Artificial Sequence: Synthetic peptide
  Seed: RELVRKTRFLP
RCLVRKTRFLF

SEQ ID NO: 167097 - protein, 11 aa, Artificial Sequence
  Description of Artificial Sequence: Synthetic peptide
  Seed: RELVRKTRFLP
RCLVRKTRFLG

SEQ ID NO: 167098 - protein, 11 aa, Artificial Sequence
  Description of Artificial Sequence: Synthetic peptide
  Seed: RELVRKTRFLP
RCLVRKTRFLI

SEQ ID NO: 167099 - protein, 11 aa, Artificial Sequence
  Description of Artificial Sequence: Synthetic peptide
  Seed: RELVRKTRFLP
RCLVRKTRFLK

SEQ ID NO: 167100 - protein, 11 aa, Artificial Sequence
  Description of Artificial Sequence: Synthetic peptide
  Seed: RELVRKTRFLP
RCLVRKTRFLL

SEQ ID NO: 167101 - protein, 11 aa, Artificial Sequence
  Description of Artificial Sequence: Synthetic peptide
  Seed: RELVRKTRFLP
RCLVRKTRFLM

SEQ ID NO: 167102 - protein, 11 aa, Artificial Sequence
  Description of Artificial Sequence: Synthetic peptide
  Seed: RELVRKTRFLP
RCLVRKTRFLP

SEQ ID NO: 167103 - protein, 11 aa, Artificial Sequence
  Description of Artificial Sequence: Synthetic peptide
  Seed: RELVRKTRFLP
RCLVRKTRFLS

SEQ ID NO: 167104 - protein, 11 aa, Artificial Sequence
  Description of Artificial Sequence: Synthetic peptide
  Seed: RELVRKTRFLP
RCLVRKTRFLT

SEQ ID NO: 167105 - protein, 11 aa, Artificial Sequence
  Description of Artificial Sequence: Synthetic peptide
  Seed: RELVRKTRFLP
RCLVRKTRFLV

SEQ ID NO: 167106 - protein, 11 aa, Artificial Sequence
  Description of Artificial Sequence: Synthetic peptide
  Seed: RELVRKTRFLP
RCLVRKTRFLY

SEQ ID NO: 167107 - protein, 9 aa, Artificial Sequence
  Description of Artificial Sequence: Synthetic peptide
  Seed: RLNPMHQLL
RCNPMHQLF

SEQ ID NO: 167108 - protein, 9 aa, Artificial Sequence
  Description of Artificial Sequence: Synthetic peptide
  Seed: RLNPMHQLL
RCNPMHQLK

SEQ ID NO: 167109 - protein, 9 aa, Artificial Sequence
  Description of Artificial Sequence: Synthetic peptide
  Seed: RLNPMHQLL
RCNPMHQLL

SEQ ID NO: 167110 - protein, 10 aa, Artificial Sequence
  Description of Artificial Sequence: Synthetic peptide
  Seed: RLNPMHQLLR
RCNPMHQLLK

SEQ ID NO: 167111 - protein, 10 aa, Artificial Sequence
  Description of Artificial Sequence: Synthetic peptide
  Seed: RLNPMHQLLR
RCNPMHQLLR

SEQ ID NO: 167112 - protein, 11 aa, Artificial Sequence
  Description of Artificial Sequence: Synthetic peptide
  Seed: RLNPMHQLLRH
RCNPMHQLLRR

SEQ ID NO: 167113 - protein, 9 aa, Artificial Sequence
  Description of Artificial Sequence: Synthetic peptide
  Seed: RLNPMHQLL
RCNPMHQLM

SEQ ID NO: 167114 - protein, 9 aa, Artificial Sequence
  Description of Artificial Sequence: Synthetic peptide
  Seed: RLNPMHQLL
RCNPMHQLW

SEQ ID NO: 167115 - protein, 9 aa, Artificial Sequence
  Description of Artificial Sequence: Synthetic peptide
  Seed: RLNPMHQLL
RCNPMHQLY

SEQ ID NO: 167116 - protein, 9 aa, Artificial Sequence
  Description of Artificial Sequence: Synthetic peptide
  Seed: RANQRLNPM
RCNQRLNPA

SEQ ID NO: 167117 - protein, 9 aa, Artificial Sequence
  Description of Artificial Sequence: Synthetic peptide
  Seed: RANQRLNPM
RCNQRLNPF

SEQ ID NO: 167118 - protein, 9 aa, Artificial Sequence
  Description of Artificial Sequence: Synthetic peptide
  Seed: RANQRLNPM
RCNQRLNPK

SEQ ID NO: 167119 - protein, 9 aa, Artificial Sequence
  Description of Artificial Sequence: Synthetic peptide
  Seed: RANQRLNPM
RCNQRLNPM

SEQ ID NO: 167120 - protein, 9 aa, Artificial Sequence
  Description of Artificial Sequence: Synthetic peptide
  Seed: RANQRLNPM
RCNQRLNPY

SEQ ID NO: 167121 - protein, 10 aa, Artificial Sequence
  Description of Artificial Sequence: Synthetic peptide
  Seed: RMKWMMAMKY
RDKWMMAMKF

SEQ ID NO: 167122 - protein, 10 aa, Artificial Sequence
  Description of Artificial Sequence: Synthetic peptide
  Seed: RMKWMMAMKY
RDKWMMAMKL

SEQ ID NO: 167123 - protein, 10 aa, Artificial Sequence
  Description of Artificial Sequence: Synthetic peptide
  Seed: RMKWMMAMKY
RDKWMMAMKM

SEQ ID NO: 167124 - protein, 10 aa, Artificial Sequence
  Description of Artificial Sequence: Synthetic peptide
  Seed: RMKWMMAMKY
RDKWMMAMKR

SEQ ID NO: 167125 - protein, 10 aa, Artificial Sequence
  Description of Artificial Sequence: Synthetic peptide
  Seed: RMKWMMAMKY
RDKWMMAMKY

SEQ ID NO: 167126 - protein, 9 aa, Artificial Sequence
  Description of Artificial Sequence: Synthetic peptide
  Seed: RMKWMMAMK
RDKWMMAMR

SEQ ID NO: 167127 - protein, 11 aa, Artificial Sequence
  Description of Artificial Sequence: Synthetic peptide
  Seed: RELVRKTRFLP
RDLVRKTRFLA

SEQ ID NO: 167128 - protein, 11 aa, Artificial Sequence
  Description of Artificial Sequence: Synthetic peptide
  Seed: RELVRKTRFLP
RDLVRKTRFLF

SEQ ID NO: 167129 - protein, 11 aa, Artificial Sequence
  Description of Artificial Sequence: Synthetic peptide
  Seed: RELVRKTRFLP
RDLVRKTRFLG

SEQ ID NO: 167130 - protein, 11 aa, Artificial Sequence
  Description of Artificial Sequence: Synthetic peptide
  Seed: RELVRKTRFLP
RDLVRKTRFLI

SEQ ID NO: 167131 - protein, 11 aa, Artificial Sequence
  Description of Artificial Sequence: Synthetic peptide
  Seed: RELVRKTRFLP
RDLVRKTRFLK

SEQ ID NO: 167132 - protein, 11 aa, Artificial Sequence
  Description of Artificial Sequence: Synthetic peptide
  Seed: RELVRKTRFLP
RDLVRKTRFLL

SEQ ID NO: 167133 - protein, 11 aa, Artificial Sequence
  Description of Artificial Sequence: Synthetic peptide
  Seed: RELVRKTRFLP
RDLVRKTRFLM

SEQ ID NO: 167134 - protein, 11 aa, Artificial Sequence
  Description of Artificial Sequence: Synthetic peptide
  Seed: RELVRKTRFLP
RDLVRKTRFLP

SEQ ID NO: 167135 - protein, 11 aa, Artificial Sequence
  Description of Artificial Sequence: Synthetic peptide
  Seed: RELVRKTRFLP
RDLVRKTRFLS

SEQ ID NO: 167136 - protein, 11 aa, Artificial Sequence
  Description of Artificial Sequence: Synthetic peptide
  Seed: RELVRKTRFLP
RDLVRKTRFLT

SEQ ID NO: 167137 - protein, 11 aa, Artificial Sequence
  Description of Artificial Sequence: Synthetic peptide
  Seed: RELVRKTRFLP
RDLVRKTRFLV

SEQ ID NO: 167138 - protein, 11 aa, Artificial Sequence
  Description of Artificial Sequence: Synthetic peptide
  Seed: RELVRKTRFLP
RDLVRKTRFLY

SEQ ID NO: 167139 - protein, 9 aa, Artificial Sequence
  Description of Artificial Sequence: Synthetic peptide
  Seed: RELVRKTRF
RDLVRKTRL

SEQ ID NO: 167140 - protein, 10 aa, Artificial Sequence
  Description of Artificial Sequence: Synthetic peptide
  Seed: RLNPMHQLLR
RDNPMHQLLR

SEQ ID NO: 167141 - protein, 9 aa, Artificial Sequence
  Description of Artificial Sequence: Synthetic peptide
  Seed: RLNPMHQLL
RDNPMHQLY

SEQ ID NO: 167142 - protein, 8 aa, Artificial Sequence
  Description of Artificial Sequence: Synthetic peptide
  Seed: RMKWMMAM
REKWMMAF

SEQ ID NO: 167143 - protein, 8 aa, Artificial Sequence
  Description of Artificial Sequence: Synthetic peptide
  Seed: RMKWMMAM
REKWMMAM

SEQ ID NO: 167144 - protein, 9 aa, Artificial Sequence
  Description of Artificial Sequence: Synthetic peptide
  Seed: RMKWMMAMK
REKWMMAMK

SEQ ID NO: 167145 - protein, 10 aa, Artificial Sequence
  Description of Artificial Sequence: Synthetic peptide
  Seed: RMKWMMAMKY
REKWMMAMKF

SEQ ID NO: 167146 - protein, 10 aa, Artificial Sequence
  Description of Artificial Sequence: Synthetic peptide
  Seed: RMKWMMAMKY
REKWMMAMKL

SEQ ID NO: 167147 - protein, 10 aa, Artificial Sequence
  Description of Artificial Sequence: Synthetic peptide
  Seed: RMKWMMAMKY
REKWMMAMKM

SEQ ID NO: 167148 - protein, 10 aa, Artificial Sequence
  Description of Artificial Sequence: Synthetic peptide
  Seed: RMKWMMAMKY
REKWMMAMKR

SEQ ID NO: 167149 - protein, 10 aa, Artificial Sequence
  Description of Artificial Sequence: Synthetic peptide
  Seed: RMKWMMAMKY
REKWMMAMKY

SEQ ID NO: 167150 - protein, 9 aa, Artificial Sequence
  Description of Artificial Sequence: Synthetic peptide
  Seed: RMKWMMAMK
REKWMMAMR

SEQ ID NO: 167151 - protein, 8 aa, Artificial Sequence
  Description of Artificial Sequence: Synthetic peptide
  Seed: RMKWMMAM
REKWMMAY

SEQ ID NO: 167152 - protein, 9 aa, Artificial Sequence
  Description of Artificial Sequence: Synthetic peptide
  Seed: RELVRKTRF
RELVRKTRA

SEQ ID NO: 167153 - protein, 9 aa, Artificial Sequence
  Description of Artificial Sequence: Synthetic peptide
  Seed: RELVRKTRF
RELVRKTRC

SEQ ID NO: 167154 - protein, 10 aa, Artificial Sequence
  Description of Artificial Sequence: Synthetic peptide
  Seed: RELVRKTRFL
RELVRKTRFA

SEQ ID NO: 167155 - protein, 10 aa, Artificial Sequence
  Description of Artificial Sequence: Synthetic peptide
  Seed: RELVRKTRFL
RELVRKTRFF

SEQ ID NO: 167156 - protein, 10 aa, Artificial Sequence
  Description of Artificial Sequence: Synthetic peptide
  Seed: RELVRKTRFL
RELVRKTRFI

SEQ ID NO: 167157 - protein, 11 aa, Artificial Sequence
  Description of Artificial Sequence: Synthetic peptide
  Seed: RELVRKTRFLP
RELVRKTRFLA

SEQ ID NO: 167158 - protein, 11 aa, Artificial Sequence
  Description of Artificial Sequence: Synthetic peptide
  Seed: RELVRKTRFLP
RELVRKTRFLF

SEQ ID NO: 167159 - protein, 11 aa, Artificial Sequence
  Description of Artificial Sequence: Synthetic peptide
  Seed: RELVRKTRFLP
RELVRKTRFLG

SEQ ID NO: 167160 - protein, 11 aa, Artificial Sequence
  Description of Artificial Sequence: Synthetic peptide
  Seed: RELVRKTRFLP
RELVRKTRFLI

SEQ ID NO: 167161 - protein, 11 aa, Artificial Sequence
  Description of Artificial Sequence: Synthetic peptide
  Seed: RELVRKTRFLP
RELVRKTRFLK

SEQ ID NO: 167162 - protein, 11 aa, Artificial Sequence
  Description of Artificial Sequence: Synthetic peptide
  Seed: RELVRKTRFLP
RELVRKTRFLL

SEQ ID NO: 167163 - protein, 11 aa, Artificial Sequence
  Description of Artificial Sequence: Synthetic peptide
  Seed: RELVRKTRFLP
RELVRKTRFLM

SEQ ID NO: 167164 - protein, 11 aa, Artificial Sequence
  Description of Artificial Sequence: Synthetic peptide
  Seed: RELVRKTRFLP
RELVRKTRFLS

SEQ ID NO: 167165 - protein, 11 aa, Artificial Sequence
  Description of Artificial Sequence: Synthetic peptide
  Seed: RELVRKTRFLP
RELVRKTRFLT

SEQ ID NO: 167166 - protein, 11 aa, Artificial Sequence
  Description of Artificial Sequence: Synthetic peptide
  Seed: RELVRKTRFLP
RELVRKTRFLV

SEQ ID NO: 167167 - protein, 11 aa, Artificial Sequence
  Description of Artificial Sequence: Synthetic peptide
  Seed: RELVRKTRFLP
RELVRKTRFLY

SEQ ID NO: 167168 - protein, 10 aa, Artificial Sequence
  Description of Artificial Sequence: Synthetic peptide
  Seed: RELVRKTRFL
RELVRKTRFM

SEQ ID NO: 167169 - protein, 10 aa, Artificial Sequence
  Description of Artificial Sequence: Synthetic peptide
  Seed: RELVRKTRFL
RELVRKTRFV

SEQ ID NO: 167170 - protein, 9 aa, Artificial Sequence
  Description of Artificial Sequence: Synthetic peptide
  Seed: RELVRKTRF
RELVRKTRI

SEQ ID NO: 167171 - protein, 9 aa, Artificial Sequence
  Description of Artificial Sequence: Synthetic peptide
  Seed: RELVRKTRF
RELVRKTRL

SEQ ID NO: 167172 - protein, 9 aa, Artificial Sequence
  Description of Artificial Sequence: Synthetic peptide
  Seed: RELVRKTRF
RELVRKTRM

SEQ ID NO: 167173 - protein, 9 aa, Artificial Sequence
  Description of Artificial Sequence: Synthetic peptide
  Seed: RELVRKTRF
RELVRKTRV

SEQ ID NO: 167174 - protein, 9 aa, Artificial Sequence
  Description of Artificial Sequence: Synthetic peptide
  Seed: RELVRKTRF
RELVRKTRY

SEQ ID NO: 167175 - protein, 9 aa, Artificial Sequence
  Description of Artificial Sequence: Synthetic peptide
  Seed: RLNPMHQLL
RENPMHQLF

SEQ ID NO: 167176 - protein, 9 aa, Artificial Sequence
  Description of Artificial Sequence: Synthetic peptide
  Seed: RLNPMHQLL
RENPMHQLH

SEQ ID NO: 167177 - protein, 9 aa, Artificial Sequence
  Description of Artificial Sequence: Synthetic peptide
  Seed: RLNPMHQLL
RENPMHQLI

SEQ ID NO: 167178 - protein, 9 aa, Artificial Sequence
  Description of Artificial Sequence: Synthetic peptide
  Seed: RLNPMHQLL
RENPMHQLL

SEQ ID NO: 167179 - protein, 10 aa, Artificial Sequence
  Description of Artificial Sequence: Synthetic peptide
  Seed: RLNPMHQLLR
RENPMHQLLR

SEQ ID NO: 167180 - protein, 9 aa, Artificial Sequence
  Description of Artificial Sequence: Synthetic peptide
  Seed: RLNPMHQLL
RENPMHQLM

SEQ ID NO: 167181 - protein, 9 aa, Artificial Sequence
  Description of Artificial Sequence: Synthetic peptide
  Seed: RLNPMHQLL
RENPMHQLY

SEQ ID NO: 167182 - protein, 9 aa, Artificial Sequence
  Description of Artificial Sequence: Synthetic peptide
  Seed: RANQRLNPM
RENQRLNPF

SEQ ID NO: 167183 - protein, 9 aa, Artificial Sequence
  Description of Artificial Sequence: Synthetic peptide
  Seed: RANQRLNPM
RENQRLNPI

SEQ ID NO: 167184 - protein, 9 aa, Artificial Sequence
  Description of Artificial Sequence: Synthetic peptide
  Seed: RANQRLNPM
RENQRLNPL

SEQ ID NO: 167185 - protein, 9 aa, Artificial Sequence
  Description of Artificial Sequence: Synthetic peptide
  Seed: RANQRLNPM
RENQRLNPM

SEQ ID NO: 167186 - protein, 9 aa, Artificial Sequence
  Description of Artificial Sequence: Synthetic peptide
  Seed: RANQRLNPM
RENQRLNPW

SEQ ID NO: 167187 - protein, 9 aa, Artificial Sequence
  Description of Artificial Sequence: Synthetic peptide
  Seed: RANQRLNPM
RENQRLNPY

SEQ ID NO: 167188 - protein, 8 aa, Artificial Sequence
  Description of Artificial Sequence: Synthetic peptide
  Seed: RYGPALSI
RFGPALSF

SEQ ID NO: 167189 - protein, 8 aa, Artificial Sequence
  Description of Artificial Sequence: Synthetic peptide
  Seed: RYGPALSI
RFGPALSI

SEQ ID NO: 167190 - protein, 8 aa, Artificial Sequence
  Description of Artificial Sequence: Synthetic peptide
  Seed: RYGPALSI
RFGPALSL

SEQ ID NO: 167191 - protein, 8 aa, Artificial Sequence
  Description of Artificial Sequence: Synthetic peptide
  Seed: RYGPALSI
RFGPALSM

SEQ ID NO: 167192 - protein, 8 aa, Artificial Sequence
  Description of Artificial Sequence: Synthetic peptide
  Seed: RYGPALSI
RFGPALSW

SEQ ID NO: 167193 - protein, 8 aa, Artificial Sequence
  Description of Artificial Sequence: Synthetic peptide
  Seed: RYGPALSI
RFGPALSY

SEQ ID NO: 167194 - protein, 8 aa, Artificial Sequence
  Description of Artificial Sequence: Synthetic peptide
  Seed: RMKWMMAM
RFKWMMAF

SEQ ID NO: 167195 - protein, 9 aa, Artificial Sequence
  Description of Artificial Sequence: Synthetic peptide
  Seed: RMKWMMAMK
RFKWMMAMA

SEQ ID NO: 167196 - protein, 9 aa, Artificial Sequence
  Description of Artificial Sequence: Synthetic peptide
  Seed: RMKWMMAMK
RFKWMMAME

SEQ ID NO: 167197 - protein, 9 aa, Artificial Sequence
  Description of Artificial Sequence: Synthetic peptide
  Seed: RMKWMMAMK
RFKWMMAMG

SEQ ID NO: 167198 - protein, 9 aa, Artificial Sequence
  Description of Artificial Sequence: Synthetic peptide
  Seed: RMKWMMAMK
RFKWMMAMH

SEQ ID NO: 167199 - protein, 9 aa, Artificial Sequence
  Description of Artificial Sequence: Synthetic peptide
  Seed: RMKWMMAMK
RFKWMMAMI

SEQ ID NO: 167200 - protein, 9 aa, Artificial Sequence
  Description of Artificial Sequence: Synthetic peptide
  Seed: RMKWMMAMK
RFKWMMAMK

SEQ ID NO: 167201 - protein, 10 aa, Artificial Sequence
  Description of Artificial Sequence: Synthetic peptide
  Seed: RMKWMMAMKY
RFKWMMAMKA

SEQ ID NO: 167202 - protein, 10 aa, Artificial Sequence
  Description of Artificial Sequence: Synthetic peptide
  Seed: RMKWMMAMKY
RFKWMMAMKC

SEQ ID NO: 167203 - protein, 10 aa, Artificial Sequence
  Description of Artificial Sequence: Synthetic peptide
  Seed: RMKWMMAMKY
RFKWMMAMKD

SEQ ID NO: 167204 - protein, 10 aa, Artificial Sequence
  Description of Artificial Sequence: Synthetic peptide
  Seed: RMKWMMAMKY
RFKWMMAMKE

SEQ ID NO: 167205 - protein, 10 aa, Artificial Sequence
  Description of Artificial Sequence: Synthetic peptide
  Seed: RMKWMMAMKY
RFKWMMAMKF

SEQ ID NO: 167206 - protein, 10 aa, Artificial Sequence
  Description of Artificial Sequence: Synthetic peptide
  Seed: RMKWMMAMKY
RFKWMMAMKG

SEQ ID NO: 167207 - protein, 10 aa, Artificial Sequence
  Description of Artificial Sequence: Synthetic peptide
  Seed: RMKWMMAMKY
RFKWMMAMKH

SEQ ID NO: 167208 - protein, 10 aa, Artificial Sequence
  Description of Artificial Sequence: Synthetic peptide
  Seed: RMKWMMAMKY
RFKWMMAMKI

SEQ ID NO: 167209 - protein, 10 aa, Artificial Sequence
  Description of Artificial Sequence: Synthetic peptide
  Seed: RMKWMMAMKY
RFKWMMAMKK

SEQ ID NO: 167210 - protein, 10 aa, Artificial Sequence
  Description of Artificial Sequence: Synthetic peptide
  Seed: RMKWMMAMKY
RFKWMMAMKL

SEQ ID NO: 167211 - protein, 10 aa, Artificial Sequence
  Description of Artificial Sequence: Synthetic peptide
  Seed: RMKWMMAMKY
RFKWMMAMKM

SEQ ID NO: 167212 - protein, 10 aa, Artificial Sequence
  Description of Artificial Sequence: Synthetic peptide
  Seed: RMKWMMAMKY
RFKWMMAMKN

SEQ ID NO: 167213 - protein, 10 aa, Artificial Sequence
  Description of Artificial Sequence: Synthetic peptide
  Seed: RMKWMMAMKY
RFKWMMAMKP

SEQ ID NO: 167214 - protein, 10 aa, Artificial Sequence
  Description of Artificial Sequence: Synthetic peptide
  Seed: RMKWMMAMKY
RFKWMMAMKQ

SEQ ID NO: 167215 - protein, 10 aa, Artificial Sequence
  Description of Artificial Sequence: Synthetic peptide
  Seed: RMKWMMAMKY
RFKWMMAMKR

SEQ ID NO: 167216 - protein, 10 aa, Artificial Sequence
  Description of Artificial Sequence: Synthetic peptide
  Seed: RMKWMMAMKY
RFKWMMAMKS

SEQ ID NO: 167217 - protein, 10 aa, Artificial Sequence
  Description of Artificial Sequence: Synthetic peptide
  Seed: RMKWMMAMKY
RFKWMMAMKT

SEQ ID NO: 167218 - protein, 10 aa, Artificial Sequence
  Description of Artificial Sequence: Synthetic peptide
  Seed: RMKWMMAMKY
RFKWMMAMKV

SEQ ID NO: 167219 - protein, 10 aa, Artificial Sequence
  Description of Artificial Sequence: Synthetic peptide
  Seed: RMKWMMAMKY
RFKWMMAMKW

SEQ ID NO: 167220 - protein, 10 aa, Artificial Sequence
  Description of Artificial Sequence: Synthetic peptide
  Seed: RMKWMMAMKY
RFKWMMAMKY

SEQ ID NO: 167221 - protein, 9 aa, Artificial Sequence
  Description of Artificial Sequence: Synthetic peptide
  Seed: RMKWMMAMK
RFKWMMAML

SEQ ID NO: 167222 - protein, 9 aa, Artificial Sequence
  Description of Artificial Sequence: Synthetic peptide
  Seed: RMKWMMAMK
RFKWMMAMM

SEQ ID NO: 167223 - protein, 9 aa, Artificial Sequence
  Description of Artificial Sequence: Synthetic peptide
  Seed: RMKWMMAMK
RFKWMMAMN

SEQ ID NO: 167224 - protein, 9 aa, Artificial Sequence
  Description of Artificial Sequence: Synthetic peptide
  Seed: RMKWMMAMK
RFKWMMAMP

SEQ ID NO: 167225 - protein, 9 aa, Artificial Sequence
  Description of Artificial Sequence: Synthetic peptide
  Seed: RMKWMMAMK
RFKWMMAMQ

SEQ ID NO: 167226 - protein, 9 aa, Artificial Sequence
  Description of Artificial Sequence: Synthetic peptide
  Seed: RMKWMMAMK
RFKWMMAMR

SEQ ID NO: 167227 - protein, 9 aa, Artificial Sequence
  Description of Artificial Sequence: Synthetic peptide
  Seed: RMKWMMAMK
RFKWMMAMS

SEQ ID NO: 167228 - protein, 9 aa, Artificial Sequence
  Description of Artificial Sequence: Synthetic peptide
  Seed: RMKWMMAMK
RFKWMMAMT

SEQ ID NO: 167229 - protein, 9 aa, Artificial Sequence
  Description of Artificial Sequence: Synthetic peptide
  Seed: RMKWMMAMK
RFKWMMAMV

SEQ ID NO: 167230 - protein, 9 aa, Artificial Sequence
  Description of Artificial Sequence: Synthetic peptide
  Seed: RMKWMMAMK
RFKWMMAMY

SEQ ID NO: 167231 - protein, 8 aa, Artificial Sequence
  Description of Artificial Sequence: Synthetic peptide
  Seed: RMKWMMAM
RFKWMMAY

SEQ ID NO: 167232 - protein, 11 aa, Artificial Sequence
  Description of Artificial Sequence: Synthetic peptide
  Seed: RELVRKTRFLP
RFLVRKTRFLA

SEQ ID NO: 167233 - protein, 11 aa, Artificial Sequence
  Description of Artificial Sequence: Synthetic peptide
  Seed: RELVRKTRFLP
RFLVRKTRFLE

SEQ ID NO: 167234 - protein, 11 aa, Artificial Sequence
  Description of Artificial Sequence: Synthetic peptide
  Seed: RELVRKTRFLP
RFLVRKTRFLF

SEQ ID NO: 167235 - protein, 11 aa, Artificial Sequence
  Description of Artificial Sequence: Synthetic peptide
  Seed: RELVRKTRFLP
RFLVRKTRFLG

SEQ ID NO: 167236 - protein, 11 aa, Artificial Sequence
  Description of Artificial Sequence: Synthetic peptide
  Seed: RELVRKTRFLP
RFLVRKTRFLI

SEQ ID NO: 167237 - protein, 11 aa, Artificial Sequence
  Description of Artificial Sequence: Synthetic peptide
  Seed: RELVRKTRFLP
RFLVRKTRFLK

SEQ ID NO: 167238 - protein, 11 aa, Artificial Sequence
  Description of Artificial Sequence: Synthetic peptide
  Seed: RELVRKTRFLP
RFLVRKTRFLL

SEQ ID NO: 167239 - protein, 11 aa, Artificial Sequence
  Description of Artificial Sequence: Synthetic peptide
  Seed: RELVRKTRFLP
RFLVRKTRFLM

SEQ ID NO: 167240 - protein, 11 aa, Artificial Sequence
  Description of Artificial Sequence: Synthetic peptide
  Seed: RELVRKTRFLP
RFLVRKTRFLP

SEQ ID NO: 167241 - protein, 11 aa, Artificial Sequence
  Description of Artificial Sequence: Synthetic peptide
  Seed: RELVRKTRFLP
RFLVRKTRFLQ

SEQ ID NO: 167242 - protein, 11 aa, Artificial Sequence
  Description of Artificial Sequence: Synthetic peptide
  Seed: RELVRKTRFLP
RFLVRKTRFLR

SEQ ID NO: 167243 - protein, 11 aa, Artificial Sequence
  Description of Artificial Sequence: Synthetic peptide
  Seed: RELVRKTRFLP
RFLVRKTRFLS

SEQ ID NO: 167244 - protein, 11 aa, Artificial Sequence
  Description of Artificial Sequence: Synthetic peptide
  Seed: RELVRKTRFLP
RFLVRKTRFLT

SEQ ID NO: 167245 - protein, 11 aa, Artificial Sequence
  Description of Artificial Sequence: Synthetic peptide
  Seed: RELVRKTRFLP
RFLVRKTRFLV

SEQ ID NO: 167246 - protein, 11 aa, Artificial Sequence
  Description of Artificial Sequence: Synthetic peptide
  Seed: RELVRKTRFLP
RFLVRKTRFLY

SEQ ID NO: 167247 - protein, 9 aa, Artificial Sequence
  Description of Artificial Sequence: Synthetic peptide
  Seed: RLNPMHQLL
RFNPMHQLA

SEQ ID NO: 167248 - protein, 9 aa, Artificial Sequence
  Description of Artificial Sequence: Synthetic peptide
  Seed: RLNPMHQLL
RFNPMHQLC

SEQ ID NO: 167249 - protein, 9 aa, Artificial Sequence
  Description of Artificial Sequence: Synthetic peptide
  Seed: RLNPMHQLL
RFNPMHQLF

SEQ ID NO: 167250 - protein, 9 aa, Artificial Sequence
  Description of Artificial Sequence: Synthetic peptide
  Seed: RLNPMHQLL
RFNPMHQLG

SEQ ID NO: 167251 - protein, 9 aa, Artificial Sequence
  Description of Artificial Sequence: Synthetic peptide
  Seed: RLNPMHQLL
RFNPMHQLH

SEQ ID NO: 167252 - protein, 9 aa, Artificial Sequence
  Description of Artificial Sequence: Synthetic peptide
  Seed: RLNPMHQLL
RFNPMHQLI

SEQ ID NO: 167253 - protein, 9 aa, Artificial Sequence
  Description of Artificial Sequence: Synthetic peptide
  Seed: RLNPMHQLL
RFNPMHQLK

SEQ ID NO: 167254 - protein, 9 aa, Artificial Sequence
  Description of Artificial Sequence: Synthetic peptide
  Seed: RLNPMHQLL
RFNPMHQLL

SEQ ID NO: 167255 - protein, 10 aa, Artificial Sequence
  Description of Artificial Sequence: Synthetic peptide
  Seed: RLNPMHQLLR
RFNPMHQLLH

SEQ ID NO: 167256 - protein, 10 aa, Artificial Sequence
  Description of Artificial Sequence: Synthetic peptide
  Seed: RLNPMHQLLR
RFNPMHQLLK

SEQ ID NO: 167257 - protein, 10 aa, Artificial Sequence
  Description of Artificial Sequence: Synthetic peptide
  Seed: RLNPMHQLLR
RFNPMHQLLR

SEQ ID NO: 167258 - protein, 11 aa, Artificial Sequence
  Description of Artificial Sequence: Synthetic peptide
  Seed: RLNPMHQLLRH
RFNPMHQLLRA

SEQ ID NO: 167259 - protein, 11 aa, Artificial Sequence
  Description of Artificial Sequence: Synthetic peptide
  Seed: RLNPMHQLLRH
RFNPMHQLLRC

SEQ ID NO: 167260 - protein, 11 aa, Artificial Sequence
  Description of Artificial Sequence: Synthetic peptide
  Seed: RLNPMHQLLRH
RFNPMHQLLRD

SEQ ID NO: 167261 - protein, 11 aa, Artificial Sequence
  Description of Artificial Sequence: Synthetic peptide
  Seed: RLNPMHQLLRH
RFNPMHQLLRE

SEQ ID NO: 167262 - protein, 11 aa, Artificial Sequence
  Description of Artificial Sequence: Synthetic peptide
  Seed: RLNPMHQLLRH
RFNPMHQLLRF

SEQ ID NO: 167263 - protein, 11 aa, Artificial Sequence
  Description of Artificial Sequence: Synthetic peptide
  Seed: RLNPMHQLLRH
RFNPMHQLLRG

SEQ ID NO: 167264 - protein, 11 aa, Artificial Sequence
  Description of Artificial Sequence: Synthetic peptide
  Seed: RLNPMHQLLRH
RFNPMHQLLRH

SEQ ID NO: 167265 - protein, 11 aa, Artificial Sequence
  Description of Artificial Sequence: Synthetic peptide
  Seed: RLNPMHQLLRH
RFNPMHQLLRI

SEQ ID NO: 167266 - protein, 11 aa, Artificial Sequence
  Description of Artificial Sequence: Synthetic peptide
  Seed: RLNPMHQLLRH
RFNPMHQLLRK

SEQ ID NO: 167267 - protein, 11 aa, Artificial Sequence
  Description of Artificial Sequence: Synthetic peptide
  Seed: RLNPMHQLLRH
RFNPMHQLLRL

SEQ ID NO: 167268 - protein, 11 aa, Artificial Sequence
  Description of Artificial Sequence: Synthetic peptide
  Seed: RLNPMHQLLRH
RFNPMHQLLRM

SEQ ID NO: 167269 - protein, 11 aa, Artificial Sequence
  Description of Artificial Sequence: Synthetic peptide
  Seed: RLNPMHQLLRH
RFNPMHQLLRN

SEQ ID NO: 167270 - protein, 11 aa, Artificial Sequence
  Description of Artificial Sequence: Synthetic peptide
  Seed: RLNPMHQLLRH
RFNPMHQLLRP

SEQ ID NO: 167271 - protein, 11 aa, Artificial Sequence
  Description of Artificial Sequence: Synthetic peptide
  Seed: RLNPMHQLLRH
RFNPMHQLLRQ

SEQ ID NO: 167272 - protein, 11 aa, Artificial Sequence
  Description of Artificial Sequence: Synthetic peptide
  Seed: RLNPMHQLLRH
RFNPMHQLLRR

SEQ ID NO: 167273 - protein, 11 aa, Artificial Sequence
  Description of Artificial Sequence: Synthetic peptide
  Seed: RLNPMHQLLRH
RFNPMHQLLRS

SEQ ID NO: 167274 - protein, 11 aa, Artificial Sequence
  Description of Artificial Sequence: Synthetic peptide
  Seed: RLNPMHQLLRH
RFNPMHQLLRT

SEQ ID NO: 167275 - protein, 11 aa, Artificial Sequence
  Description of Artificial Sequence: Synthetic peptide
  Seed: RLNPMHQLLRH
RFNPMHQLLRV

SEQ ID NO: 167276 - protein, 11 aa, Artificial Sequence
  Description of Artificial Sequence: Synthetic peptide
  Seed: RLNPMHQLLRH
RFNPMHQLLRW

SEQ ID NO: 167277 - protein, 11 aa, Artificial Sequence
  Description of Artificial Sequence: Synthetic peptide
  Seed: RLNPMHQLLRH
RFNPMHQLLRY

SEQ ID NO: 167278 - protein, 10 aa, Artificial Sequence
  Description of Artificial Sequence: Synthetic peptide
  Seed: RLNPMHQLLR
RFNPMHQLLY

SEQ ID NO: 167279 - protein, 9 aa, Artificial Sequence
  Description of Artificial Sequence: Synthetic peptide
  Seed: RLNPMHQLL
RFNPMHQLM

SEQ ID NO: 167280 - protein, 9 aa, Artificial Sequence
  Description of Artificial Sequence: Synthetic peptide
  Seed: RLNPMHQLL
RFNPMHQLR

SEQ ID NO: 167281 - protein, 9 aa, Artificial Sequence
  Description of Artificial Sequence: Synthetic peptide
  Seed: RLNPMHQLL
RFNPMHQLS

SEQ ID NO: 167282 - protein, 9 aa, Artificial Sequence
  Description of Artificial Sequence: Synthetic peptide
  Seed: RLNPMHQLL
RFNPMHQLT

SEQ ID NO: 167283 - protein, 9 aa, Artificial Sequence
  Description of Artificial Sequence: Synthetic peptide
  Seed: RLNPMHQLL
RFNPMHQLV

SEQ ID NO: 167284 - protein, 9 aa, Artificial Sequence
  Description of Artificial Sequence: Synthetic peptide
  Seed: RLNPMHQLL
RFNPMHQLW

SEQ ID NO: 167285 - protein, 9 aa, Artificial Sequence
  Description of Artificial Sequence: Synthetic peptide
  Seed: RLNPMHQLL
RFNPMHQLY

SEQ ID NO: 167286 - protein, 9 aa, Artificial Sequence
  Description of Artificial Sequence: Synthetic peptide
  Seed: RANQRLNPM
RFNQRLNPA

SEQ ID NO: 167287 - protein, 9 aa, Artificial Sequence
  Description of Artificial Sequence: Synthetic peptide
  Seed: RANQRLNPM
RFNQRLNPF

SEQ ID NO: 167288 - protein, 9 aa, Artificial Sequence
  Description of Artificial Sequence: Synthetic peptide
  Seed: RANQRLNPM
RFNQRLNPG

SEQ ID NO: 167289 - protein, 9 aa, Artificial Sequence
  Description of Artificial Sequence: Synthetic peptide
  Seed: RANQRLNPM
RFNQRLNPI

SEQ ID NO: 167290 - protein, 9 aa, Artificial Sequence
  Description of Artificial Sequence: Synthetic peptide
  Seed: RANQRLNPM
RFNQRLNPK

SEQ ID NO: 167291 - protein, 9 aa, Artificial Sequence
  Description of Artificial Sequence: Synthetic peptide
  Seed: RANQRLNPM
RFNQRLNPL

SEQ ID NO: 167292 - protein, 9 aa, Artificial Sequence
  Description of Artificial Sequence: Synthetic peptide
  Seed: RANQRLNPM
RFNQRLNPM

SEQ ID NO: 167293 - protein, 9 aa, Artificial Sequence
  Description of Artificial Sequence: Synthetic peptide
  Seed: RANQRLNPM
RFNQRLNPR

SEQ ID NO: 167294 - protein, 9 aa, Artificial Sequence
  Description of Artificial Sequence: Synthetic peptide
  Seed: RANQRLNPM
RFNQRLNPS

SEQ ID NO: 167295 - protein, 9 aa, Artificial Sequence
  Description of Artificial Sequence: Synthetic peptide
  Seed: RANQRLNPM
RFNQRLNPT

SEQ ID NO: 167296 - protein, 9 aa, Artificial Sequence
  Description of Artificial Sequence: Synthetic peptide
  Seed: RANQRLNPM
RFNQRLNPV

SEQ ID NO: 167297 - protein, 9 aa, Artificial Sequence
  Description of Artificial Sequence: Synthetic peptide
  Seed: RANQRLNPM
RFNQRLNPW

SEQ ID NO: 167298 - protein, 9 aa, Artificial Sequence
  Description of Artificial Sequence: Synthetic peptide
  Seed: RANQRLNPM
RFNQRLNPY

SEQ ID NO: 167299 - protein, 9 aa, Artificial Sequence
  Description of Artificial Sequence: Synthetic peptide
  Seed: RMKWMMAMK
RGKWMMAMA

SEQ ID NO: 167300 - protein, 9 aa, Artificial Sequence
  Description of Artificial Sequence: Synthetic peptide
  Seed: RMKWMMAMK
RGKWMMAMG

SEQ ID NO: 167301 - protein, 9 aa, Artificial Sequence
  Description of Artificial Sequence: Synthetic peptide
  Seed: RMKWMMAMK
RGKWMMAMH

SEQ ID NO: 167302 - protein, 9 aa, Artificial Sequence
  Description of Artificial Sequence: Synthetic peptide
  Seed: RMKWMMAMK
RGKWMMAMI

SEQ ID NO: 167303 - protein, 9 aa, Artificial Sequence
  Description of Artificial Sequence: Synthetic peptide
  Seed: RMKWMMAMK
RGKWMMAMK

SEQ ID NO: 167304 - protein, 10 aa, Artificial Sequence
  Description of Artificial Sequence: Synthetic peptide
  Seed: RMKWMMAMKY
RGKWMMAMKA

SEQ ID NO: 167305 - protein, 10 aa, Artificial Sequence
  Description of Artificial Sequence: Synthetic peptide
  Seed: RMKWMMAMKY
RGKWMMAMKF

SEQ ID NO: 167306 - protein, 10 aa, Artificial Sequence
  Description of Artificial Sequence: Synthetic peptide
  Seed: RMKWMMAMKY
RGKWMMAMKI

SEQ ID NO: 167307 - protein, 10 aa, Artificial Sequence
  Description of Artificial Sequence: Synthetic peptide
  Seed: RMKWMMAMKY
RGKWMMAMKK

SEQ ID NO: 167308 - protein, 10 aa, Artificial Sequence
  Description of Artificial Sequence: Synthetic peptide
  Seed: RMKWMMAMKY
RGKWMMAMKL

SEQ ID NO: 167309 - protein, 10 aa, Artificial Sequence
  Description of Artificial Sequence: Synthetic peptide
  Seed: RMKWMMAMKY
RGKWMMAMKM

SEQ ID NO: 167310 - protein, 10 aa, Artificial Sequence
  Description of Artificial Sequence: Synthetic peptide
  Seed: RMKWMMAMKY
RGKWMMAMKR

SEQ ID NO: 167311 - protein, 10 aa, Artificial Sequence
  Description of Artificial Sequence: Synthetic peptide
  Seed: RMKWMMAMKY
RGKWMMAMKS

SEQ ID NO: 167312 - protein, 10 aa, Artificial Sequence
  Description of Artificial Sequence: Synthetic peptide
  Seed: RMKWMMAMKY
RGKWMMAMKV

SEQ ID NO: 167313 - protein, 10 aa, Artificial Sequence
  Description of Artificial Sequence: Synthetic peptide
  Seed: RMKWMMAMKY
RGKWMMAMKY

SEQ ID NO: 167314 - protein, 9 aa, Artificial Sequence
  Description of Artificial Sequence: Synthetic peptide
  Seed: RMKWMMAMK
RGKWMMAML

SEQ ID NO: 167315 - protein, 9 aa, Artificial Sequence
  Description of Artificial Sequence: Synthetic peptide
  Seed: RMKWMMAMK
RGKWMMAMM

SEQ ID NO: 167316 - protein, 9 aa, Artificial Sequence
  Description of Artificial Sequence: Synthetic peptide
  Seed: RMKWMMAMK
RGKWMMAMP

SEQ ID NO: 167317 - protein, 9 aa, Artificial Sequence
  Description of Artificial Sequence: Synthetic peptide
  Seed: RMKWMMAMK
RGKWMMAMQ

SEQ ID NO: 167318 - protein, 9 aa, Artificial Sequence
  Description of Artificial Sequence: Synthetic peptide
  Seed: RMKWMMAMK
RGKWMMAMR

SEQ ID NO: 167319 - protein, 9 aa, Artificial Sequence
  Description of Artificial Sequence: Synthetic peptide
  Seed: RMKWMMAMK
RGKWMMAMS

SEQ ID NO: 167320 - protein, 9 aa, Artificial Sequence
  Description of Artificial Sequence: Synthetic peptide
  Seed: RMKWMMAMK
RGKWMMAMT

SEQ ID NO: 167321 - protein, 9 aa, Artificial Sequence
  Description of Artificial Sequence: Synthetic peptide
  Seed: RMKWMMAMK
RGKWMMAMV

SEQ ID NO: 167322 - protein, 9 aa, Artificial Sequence
  Description of Artificial Sequence: Synthetic peptide
  Seed: RMKWMMAMK
RGKWMMAMY

SEQ ID NO: 167323 - protein, 11 aa, Artificial Sequence
  Description of Artificial Sequence: Synthetic peptide
  Seed: RELVRKTRFLP
RGLVRKTRFLA

SEQ ID NO: 167324 - protein, 11 aa, Artificial Sequence
  Description of Artificial Sequence: Synthetic peptide
  Seed: RELVRKTRFLP
RGLVRKTRFLF

SEQ ID NO: 167325 - protein, 11 aa, Artificial Sequence
  Description of Artificial Sequence: Synthetic peptide
  Seed: RELVRKTRFLP
RGLVRKTRFLG

SEQ ID NO: 167326 - protein, 11 aa, Artificial Sequence
  Description of Artificial Sequence: Synthetic peptide
  Seed: RELVRKTRFLP
RGLVRKTRFLI

SEQ ID NO: 167327 - protein, 11 aa, Artificial Sequence
  Description of Artificial Sequence: Synthetic peptide
  Seed: RELVRKTRFLP
RGLVRKTRFLK

SEQ ID NO: 167328 - protein, 11 aa, Artificial Sequence
  Description of Artificial Sequence: Synthetic peptide
  Seed: RELVRKTRFLP
RGLVRKTRFLL

SEQ ID NO: 167329 - protein, 11 aa, Artificial Sequence
  Description of Artificial Sequence: Synthetic peptide
  Seed: RELVRKTRFLP
RGLVRKTRFLM

SEQ ID NO: 167330 - protein, 11 aa, Artificial Sequence
  Description of Artificial Sequence: Synthetic peptide
  Seed: RELVRKTRFLP
RGLVRKTRFLP

SEQ ID NO: 167331 - protein, 11 aa, Artificial Sequence
  Description of Artificial Sequence: Synthetic peptide
  Seed: RELVRKTRFLP
RGLVRKTRFLS

SEQ ID NO: 167332 - protein, 11 aa, Artificial Sequence
  Description of Artificial Sequence: Synthetic peptide
  Seed: RELVRKTRFLP
RGLVRKTRFLT

SEQ ID NO: 167333 - protein, 11 aa, Artificial Sequence
  Description of Artificial Sequence: Synthetic peptide
  Seed: RELVRKTRFLP
RGLVRKTRFLV

SEQ ID NO: 167334 - protein, 11 aa, Artificial Sequence
  Description of Artificial Sequence: Synthetic peptide
  Seed: RELVRKTRFLP
RGLVRKTRFLY

SEQ ID NO: 167335 - protein, 9 aa, Artificial Sequence
  Description of Artificial Sequence: Synthetic peptide
  Seed: RLNPMHQLL
RGNPMHQLA

SEQ ID NO: 167336 - protein, 9 aa, Artificial Sequence
  Description of Artificial Sequence: Synthetic peptide
  Seed: RLNPMHQLL
RGNPMHQLF

SEQ ID NO: 167337 - protein, 9 aa, Artificial Sequence
  Description of Artificial Sequence: Synthetic peptide
  Seed: RLNPMHQLL
RGNPMHQLI

SEQ ID NO: 167338 - protein, 9 aa, Artificial Sequence
  Description of Artificial Sequence: Synthetic peptide
  Seed: RLNPMHQLL
RGNPMHQLK

SEQ ID NO: 167339 - protein, 9 aa, Artificial Sequence
  Description of Artificial Sequence: Synthetic peptide
  Seed: RLNPMHQLL
RGNPMHQLL

SEQ ID NO: 167340 - protein, 10 aa, Artificial Sequence
  Description of Artificial Sequence: Synthetic peptide
  Seed: RLNPMHQLLR
RGNPMHQLLK

SEQ ID NO: 167341 - protein, 10 aa, Artificial Sequence
  Description of Artificial Sequence: Synthetic peptide
  Seed: RLNPMHQLLR
RGNPMHQLLR

SEQ ID NO: 167342 - protein, 11 aa, Artificial Sequence
  Description of Artificial Sequence: Synthetic peptide
  Seed: RLNPMHQLLRH
RGNPMHQLLRR

SEQ ID NO: 167343 - protein, 9 aa, Artificial Sequence
  Description of Artificial Sequence: Synthetic peptide
  Seed: RLNPMHQLL
RGNPMHQLM

SEQ ID NO: 167344 - protein, 9 aa, Artificial Sequence
  Description of Artificial Sequence: Synthetic peptide
  Seed: RLNPMHQLL
RGNPMHQLR

SEQ ID NO: 167345 - protein, 9 aa, Artificial Sequence
  Description of Artificial Sequence: Synthetic peptide
  Seed: RLNPMHQLL
RGNPMHQLV

SEQ ID NO: 167346 - protein, 9 aa, Artificial Sequence
  Description of Artificial Sequence: Synthetic peptide
  Seed: RLNPMHQLL
RGNPMHQLW

SEQ ID NO: 167347 - protein, 9 aa, Artificial Sequence
  Description of Artificial Sequence: Synthetic peptide
  Seed: RLNPMHQLL
RGNPMHQLY

SEQ ID NO: 167348 - protein, 9 aa, Artificial Sequence
  Description of Artificial Sequence: Synthetic peptide
  Seed: RANQRLNPM
RGNQRLNPA

SEQ ID NO: 167349 - protein, 9 aa, Artificial Sequence
  Description of Artificial Sequence: Synthetic peptide
  Seed: RANQRLNPM
RGNQRLNPF

SEQ ID NO: 167350 - protein, 9 aa, Artificial Sequence
  Description of Artificial Sequence: Synthetic peptide
  Seed: RANQRLNPM
RGNQRLNPI

SEQ ID NO: 167351 - protein, 9 aa, Artificial Sequence
  Description of Artificial Sequence: Synthetic peptide
  Seed: RANQRLNPM
RGNQRLNPK

SEQ ID NO: 167352 - protein, 9 aa, Artificial Sequence
  Description of Artificial Sequence: Synthetic peptide
  Seed: RANQRLNPM
RGNQRLNPL

SEQ ID NO: 167353 - protein, 9 aa, Artificial Sequence
  Description of Artificial Sequence: Synthetic peptide
  Seed: RANQRLNPM
RGNQRLNPM

SEQ ID NO: 167354 - protein, 9 aa, Artificial Sequence
  Description of Artificial Sequence: Synthetic peptide
  Seed: RANQRLNPM
RGNQRLNPR

SEQ ID NO: 167355 - protein, 9 aa, Artificial Sequence
  Description of Artificial Sequence: Synthetic peptide
  Seed: RANQRLNPM
RGNQRLNPS

SEQ ID NO: 167356 - protein, 9 aa, Artificial Sequence
  Description of Artificial Sequence: Synthetic peptide
  Seed: RANQRLNPM
RGNQRLNPV

SEQ ID NO: 167357 - protein, 9 aa, Artificial Sequence
  Description of Artificial Sequence: Synthetic peptide
  Seed: RANQRLNPM
RGNQRLNPW

SEQ ID NO: 167358 - protein, 9 aa, Artificial Sequence
  Description of Artificial Sequence: Synthetic peptide
  Seed: RANQRLNPM
RGNQRLNPY

SEQ ID NO: 167359 - protein, 8 aa, Artificial Sequence
  Description of Artificial Sequence: Synthetic peptide
  Seed: RMKWMMAM
RHKWMMAF

SEQ ID NO: 167360 - protein, 8 aa, Artificial Sequence
  Description of Artificial Sequence: Synthetic peptide
  Seed: RMKWMMAM
RHKWMMAM

SEQ ID NO: 167361 - protein, 9 aa, Artificial Sequence
  Description of Artificial Sequence: Synthetic peptide
  Seed: RMKWMMAMK
RHKWMMAMK

SEQ ID NO: 167362 - protein, 10 aa, Artificial Sequence
  Description of Artificial Sequence: Synthetic peptide
  Seed: RMKWMMAMKY
RHKWMMAMKF

SEQ ID NO: 167363 - protein, 10 aa, Artificial Sequence
  Description of Artificial Sequence: Synthetic peptide
  Seed: RMKWMMAMKY
RHKWMMAMKK

SEQ ID NO: 167364 - protein, 10 aa, Artificial Sequence
  Description of Artificial Sequence: Synthetic peptide
  Seed: RMKWMMAMKY
RHKWMMAMKL

SEQ ID NO: 167365 - protein, 10 aa, Artificial Sequence
  Description of Artificial Sequence: Synthetic peptide
  Seed: RMKWMMAMKY
RHKWMMAMKM

SEQ ID NO: 167366 - protein, 10 aa, Artificial Sequence
  Description of Artificial Sequence: Synthetic peptide
  Seed: RMKWMMAMKY
RHKWMMAMKR

SEQ ID NO: 167367 - protein, 10 aa, Artificial Sequence
  Description of Artificial Sequence: Synthetic peptide
  Seed: RMKWMMAMKY
RHKWMMAMKY

SEQ ID NO: 167368 - protein, 9 aa, Artificial Sequence
  Description of Artificial Sequence: Synthetic peptide
  Seed: RMKWMMAMK
RHKWMMAMR

SEQ ID NO: 167369 - protein, 8 aa, Artificial Sequence
  Description of Artificial Sequence: Synthetic peptide
  Seed: RMKWMMAM
RHKWMMAY

SEQ ID NO: 167370 - protein, 9 aa, Artificial Sequence
  Description of Artificial Sequence: Synthetic peptide
  Seed: RELVRKTRF
RHLVRKTRF

SEQ ID NO: 167371 - protein, 11 aa, Artificial Sequence
  Description of Artificial Sequence: Synthetic peptide
  Seed: RELVRKTRFLP
RHLVRKTRFLA

SEQ ID NO: 167372 - protein, 11 aa, Artificial Sequence
  Description of Artificial Sequence: Synthetic peptide
  Seed: RELVRKTRFLP
RHLVRKTRFLF

SEQ ID NO: 167373 - protein, 11 aa, Artificial Sequence
  Description of Artificial Sequence: Synthetic peptide
  Seed: RELVRKTRFLP
RHLVRKTRFLG

SEQ ID NO: 167374 - protein, 11 aa, Artificial Sequence
  Description of Artificial Sequence: Synthetic peptide
  Seed: RELVRKTRFLP
RHLVRKTRFLI

SEQ ID NO: 167375 - protein, 11 aa, Artificial Sequence
  Description of Artificial Sequence: Synthetic peptide
  Seed: RELVRKTRFLP
RHLVRKTRFLK

SEQ ID NO: 167376 - protein, 11 aa, Artificial Sequence
  Description of Artificial Sequence: Synthetic peptide
  Seed: RELVRKTRFLP
RHLVRKTRFLL

SEQ ID NO: 167377 - protein, 11 aa, Artificial Sequence
  Description of Artificial Sequence: Synthetic peptide
  Seed: RELVRKTRFLP
RHLVRKTRFLM

SEQ ID NO: 167378 - protein, 11 aa, Artificial Sequence
  Description of Artificial Sequence: Synthetic peptide
  Seed: RELVRKTRFLP
RHLVRKTRFLP

SEQ ID NO: 167379 - protein, 11 aa, Artificial Sequence
  Description of Artificial Sequence: Synthetic peptide
  Seed: RELVRKTRFLP
RHLVRKTRFLS

SEQ ID NO: 167380 - protein, 11 aa, Artificial Sequence
  Description of Artificial Sequence: Synthetic peptide
  Seed: RELVRKTRFLP
RHLVRKTRFLT

SEQ ID NO: 167381 - protein, 11 aa, Artificial Sequence
  Description of Artificial Sequence: Synthetic peptide
  Seed: RELVRKTRFLP
RHLVRKTRFLV

SEQ ID NO: 167382 - protein, 11 aa, Artificial Sequence
  Description of Artificial Sequence: Synthetic peptide
  Seed: RELVRKTRFLP
RHLVRKTRFLY

SEQ ID NO: 167383 - protein, 9 aa, Artificial Sequence
  Description of Artificial Sequence: Synthetic peptide
  Seed: RELVRKTRF
RHLVRKTRY

SEQ ID NO: 167384 - protein, 9 aa, Artificial Sequence
  Description of Artificial Sequence: Synthetic peptide
  Seed: RLNPMHQLL
RHNPMHQLF

SEQ ID NO: 167385 - protein, 9 aa, Artificial Sequence
  Description of Artificial Sequence: Synthetic peptide
  Seed: RLNPMHQLL
RHNPMHQLH

SEQ ID NO: 167386 - protein, 9 aa, Artificial Sequence
  Description of Artificial Sequence: Synthetic peptide
  Seed: RLNPMHQLL
RHNPMHQLI

SEQ ID NO: 167387 - protein, 9 aa, Artificial Sequence
  Description of Artificial Sequence: Synthetic peptide
  Seed: RLNPMHQLL
RHNPMHQLK

SEQ ID NO: 167388 - protein, 9 aa, Artificial Sequence
  Description of Artificial Sequence: Synthetic peptide
  Seed: RLNPMHQLL
RHNPMHQLL

SEQ ID NO: 167389 - protein, 10 aa, Artificial Sequence
  Description of Artificial Sequence: Synthetic peptide
  Seed: RLNPMHQLLR
RHNPMHQLLR

SEQ ID NO: 167390 - protein, 9 aa, Artificial Sequence
  Description of Artificial Sequence: Synthetic peptide
  Seed: RLNPMHQLL
RHNPMHQLM

SEQ ID NO: 167391 - protein, 9 aa, Artificial Sequence
  Description of Artificial Sequence: Synthetic peptide
  Seed: RLNPMHQLL
RHNPMHQLW

SEQ ID NO: 167392 - protein, 9 aa, Artificial Sequence
  Description of Artificial Sequence: Synthetic peptide
  Seed: RLNPMHQLL
RHNPMHQLY

SEQ ID NO: 167393 - protein, 9 aa, Artificial Sequence
  Description of Artificial Sequence: Synthetic peptide
  Seed: RANQRLNPM
RHNQRLNPF

SEQ ID NO: 167394 - protein, 9 aa, Artificial Sequence
  Description of Artificial Sequence: Synthetic peptide
  Seed: RANQRLNPM
RHNQRLNPH

SEQ ID NO: 167395 - protein, 9 aa, Artificial Sequence
  Description of Artificial Sequence: Synthetic peptide
  Seed: RANQRLNPM
RHNQRLNPI

SEQ ID NO: 167396 - protein, 9 aa, Artificial Sequence
  Description of Artificial Sequence: Synthetic peptide
  Seed: RANQRLNPM
RHNQRLNPK

SEQ ID NO: 167397 - protein, 9 aa, Artificial Sequence
  Description of Artificial Sequence: Synthetic peptide
  Seed: RANQRLNPM
RHNQRLNPL

SEQ ID NO: 167398 - protein, 9 aa, Artificial Sequence
  Description of Artificial Sequence: Synthetic peptide
  Seed: RANQRLNPM
RHNQRLNPM

SEQ ID NO: 167399 - protein, 9 aa, Artificial Sequence
  Description of Artificial Sequence: Synthetic peptide
  Seed: RANQRLNPM
RHNQRLNPY

SEQ ID NO: 167400 - protein, 8 aa, Artificial Sequence
  Description of Artificial Sequence: Synthetic peptide
  Seed: RMKWMMAM
RIKWMMAF

SEQ ID NO: 167401 - protein, 9 aa, Artificial Sequence
  Description of Artificial Sequence: Synthetic peptide
  Seed: RMKWMMAMK
RIKWMMAMA

SEQ ID NO: 167402 - protein, 9 aa, Artificial Sequence
  Description of Artificial Sequence: Synthetic peptide
  Seed: RMKWMMAMK
RIKWMMAMC

SEQ ID NO: 167403 - protein, 9 aa, Artificial Sequence
  Description of Artificial Sequence: Synthetic peptide
  Seed: RMKWMMAMK
RIKWMMAME

SEQ ID NO: 167404 - protein, 9 aa, Artificial Sequence
  Description of Artificial Sequence: Synthetic peptide
  Seed: RMKWMMAMK
RIKWMMAMF

SEQ ID NO: 167405 - protein, 9 aa, Artificial Sequence
  Description of Artificial Sequence: Synthetic peptide
  Seed: RMKWMMAMK
RIKWMMAMG

SEQ ID NO: 167406 - protein, 9 aa, Artificial Sequence
  Description of Artificial Sequence: Synthetic peptide
  Seed: RMKWMMAMK
RIKWMMAMH

SEQ ID NO: 167407 - protein, 9 aa, Artificial Sequence
  Description of Artificial Sequence: Synthetic peptide
  Seed: RMKWMMAMK
RIKWMMAMI

SEQ ID NO: 167408 - protein, 9 aa, Artificial Sequence
  Description of Artificial Sequence: Synthetic peptide
  Seed: RMKWMMAMK
RIKWMMAMK

SEQ ID NO: 167409 - protein, 10 aa, Artificial Sequence
  Description of Artificial Sequence: Synthetic peptide
  Seed: RMKWMMAMKY
RIKWMMAMKA

SEQ ID NO: 167410 - protein, 10 aa, Artificial Sequence
  Description of Artificial Sequence: Synthetic peptide
  Seed: RMKWMMAMKY
RIKWMMAMKC

SEQ ID NO: 167411 - protein, 10 aa, Artificial Sequence
  Description of Artificial Sequence: Synthetic peptide
  Seed: RMKWMMAMKY
RIKWMMAMKD

SEQ ID NO: 167412 - protein, 10 aa, Artificial Sequence
  Description of Artificial Sequence: Synthetic peptide
  Seed: RMKWMMAMKY
RIKWMMAMKE

SEQ ID NO: 167413 - protein, 10 aa, Artificial Sequence
  Description of Artificial Sequence: Synthetic peptide
  Seed: RMKWMMAMKY
RIKWMMAMKF

SEQ ID NO: 167414 - protein, 10 aa, Artificial Sequence
  Description of Artificial Sequence: Synthetic peptide
  Seed: RMKWMMAMKY
RIKWMMAMKG

SEQ ID NO: 167415 - protein, 10 aa, Artificial Sequence
  Description of Artificial Sequence: Synthetic peptide
  Seed: RMKWMMAMKY
RIKWMMAMKH

SEQ ID NO: 167416 - protein, 10 aa, Artificial Sequence
  Description of Artificial Sequence: Synthetic peptide
  Seed: RMKWMMAMKY
RIKWMMAMKI

SEQ ID NO: 167417 - protein, 10 aa, Artificial Sequence
  Description of Artificial Sequence: Synthetic peptide
  Seed: RMKWMMAMKY
RIKWMMAMKK

SEQ ID NO: 167418 - protein, 10 aa, Artificial Sequence
  Description of Artificial Sequence: Synthetic peptide
  Seed: RMKWMMAMKY
RIKWMMAMKL

SEQ ID NO: 167419 - protein, 10 aa, Artificial Sequence
  Description of Artificial Sequence: Synthetic peptide
  Seed: RMKWMMAMKY
RIKWMMAMKM

SEQ ID NO: 167420 - protein, 10 aa, Artificial Sequence
  Description of Artificial Sequence: Synthetic peptide
  Seed: RMKWMMAMKY
RIKWMMAMKN

SEQ ID NO: 167421 - protein, 10 aa, Artificial Sequence
  Description of Artificial Sequence: Synthetic peptide
  Seed: RMKWMMAMKY
RIKWMMAMKP

SEQ ID NO: 167422 - protein, 10 aa, Artificial Sequence
  Description of Artificial Sequence: Synthetic peptide
  Seed: RMKWMMAMKY
RIKWMMAMKQ

SEQ ID NO: 167423 - protein, 10 aa, Artificial Sequence
  Description of Artificial Sequence: Synthetic peptide
  Seed: RMKWMMAMKY
RIKWMMAMKR

SEQ ID NO: 167424 - protein, 10 aa, Artificial Sequence
  Description of Artificial Sequence: Synthetic peptide
  Seed: RMKWMMAMKY
RIKWMMAMKS

SEQ ID NO: 167425 - protein, 10 aa, Artificial Sequence
  Description of Artificial Sequence: Synthetic peptide
  Seed: RMKWMMAMKY
RIKWMMAMKT

SEQ ID NO: 167426 - protein, 10 aa, Artificial Sequence
  Description of Artificial Sequence: Synthetic peptide
  Seed: RMKWMMAMKY
RIKWMMAMKV

SEQ ID NO: 167427 - protein, 10 aa, Artificial Sequence
  Description of Artificial Sequence: Synthetic peptide
  Seed: RMKWMMAMKY
RIKWMMAMKW

SEQ ID NO: 167428 - protein, 10 aa, Artificial Sequence
  Description of Artificial Sequence: Synthetic peptide
  Seed: RMKWMMAMKY
RIKWMMAMKY

SEQ ID NO: 167429 - protein, 9 aa, Artificial Sequence
  Description of Artificial Sequence: Synthetic peptide
  Seed: RMKWMMAMK
RIKWMMAML

SEQ ID NO: 167430 - protein, 9 aa, Artificial Sequence
  Description of Artificial Sequence: Synthetic peptide
  Seed: RMKWMMAMK
RIKWMMAMM

SEQ ID NO: 167431 - protein, 9 aa, Artificial Sequence
  Description of Artificial Sequence: Synthetic peptide
  Seed: RMKWMMAMK
RIKWMMAMN

SEQ ID NO: 167432 - protein, 9 aa, Artificial Sequence
  Description of Artificial Sequence: Synthetic peptide
  Seed: RMKWMMAMK
RIKWMMAMP

SEQ ID NO: 167433 - protein, 9 aa, Artificial Sequence
  Description of Artificial Sequence: Synthetic peptide
  Seed: RMKWMMAMK
RIKWMMAMQ

SEQ ID NO: 167434 - protein, 9 aa, Artificial Sequence
  Description of Artificial Sequence: Synthetic peptide
  Seed: RMKWMMAMK
RIKWMMAMR

SEQ ID NO: 167435 - protein, 9 aa, Artificial Sequence
  Description of Artificial Sequence: Synthetic peptide
  Seed: RMKWMMAMK
RIKWMMAMS

SEQ ID NO: 167436 - protein, 9 aa, Artificial Sequence
  Description of Artificial Sequence: Synthetic peptide
  Seed: RMKWMMAMK
RIKWMMAMT

SEQ ID NO: 167437 - protein, 9 aa, Artificial Sequence
  Description of Artificial Sequence: Synthetic peptide
  Seed: RMKWMMAMK
RIKWMMAMV

SEQ ID NO: 167438 - protein, 9 aa, Artificial Sequence
  Description of Artificial Sequence: Synthetic peptide
  Seed: RMKWMMAMK
RIKWMMAMY

SEQ ID NO: 167439 - protein, 8 aa, Artificial Sequence
  Description of Artificial Sequence: Synthetic peptide
  Seed: RMKWMMAM
RIKWMMAY

SEQ ID NO: 167440 - protein, 11 aa, Artificial Sequence
  Description of Artificial Sequence: Synthetic peptide
  Seed: RELVRKTRFLP
RILVRKTRFLA

SEQ ID NO: 167441 - protein, 11 aa, Artificial Sequence
  Description of Artificial Sequence: Synthetic peptide
  Seed: RELVRKTRFLP
RILVRKTRFLF

SEQ ID NO: 167442 - protein, 11 aa, Artificial Sequence
  Description of Artificial Sequence: Synthetic peptide
  Seed: RELVRKTRFLP
RILVRKTRFLG

SEQ ID NO: 167443 - protein, 11 aa, Artificial Sequence
  Description of Artificial Sequence: Synthetic peptide
  Seed: RELVRKTRFLP
RILVRKTRFLI

SEQ ID NO: 167444 - protein, 11 aa, Artificial Sequence
  Description of Artificial Sequence: Synthetic peptide
  Seed: RELVRKTRFLP
RILVRKTRFLK

SEQ ID NO: 167445 - protein, 11 aa, Artificial Sequence
  Description of Artificial Sequence: Synthetic peptide
  Seed: RELVRKTRFLP
RILVRKTRFLL

SEQ ID NO: 167446 - protein, 11 aa, Artificial Sequence
  Description of Artificial Sequence: Synthetic peptide
  Seed: RELVRKTRFLP
RILVRKTRFLM

SEQ ID NO: 167447 - protein, 11 aa, Artificial Sequence
  Description of Artificial Sequence: Synthetic peptide
  Seed: RELVRKTRFLP
RILVRKTRFLP

SEQ ID NO: 167448 - protein, 11 aa, Artificial Sequence
  Description of Artificial Sequence: Synthetic peptide
  Seed: RELVRKTRFLP
RILVRKTRFLS

SEQ ID NO: 167449 - protein, 11 aa, Artificial Sequence
  Description of Artificial Sequence: Synthetic peptide
  Seed: RELVRKTRFLP
RILVRKTRFLT

SEQ ID NO: 167450 - protein, 11 aa, Artificial Sequence
  Description of Artificial Sequence: Synthetic peptide
  Seed: RELVRKTRFLP
RILVRKTRFLV

SEQ ID NO: 167451 - protein, 11 aa, Artificial Sequence
  Description of Artificial Sequence: Synthetic peptide
  Seed: RELVRKTRFLP
RILVRKTRFLY

SEQ ID NO: 167452 - protein, 9 aa, Artificial Sequence
  Description of Artificial Sequence: Synthetic peptide
  Seed: RLNPMHQLL
RINPMHQLA

SEQ ID NO: 167453 - protein, 9 aa, Artificial Sequence
  Description of Artificial Sequence: Synthetic peptide
  Seed: RLNPMHQLL
RINPMHQLC

SEQ ID NO: 167454 - protein, 9 aa, Artificial Sequence
  Description of Artificial Sequence: Synthetic peptide
  Seed: RLNPMHQLL
RINPMHQLF

SEQ ID NO: 167455 - protein, 9 aa, Artificial Sequence
  Description of Artificial Sequence: Synthetic peptide
  Seed: RLNPMHQLL
RINPMHQLG

SEQ ID NO: 167456 - protein, 9 aa, Artificial Sequence
  Description of Artificial Sequence: Synthetic peptide
  Seed: RLNPMHQLL
RINPMHQLH

SEQ ID NO: 167457 - protein, 9 aa, Artificial Sequence
  Description of Artificial Sequence: Synthetic peptide
  Seed: RLNPMHQLL
RINPMHQLI

SEQ ID NO: 167458 - protein, 9 aa, Artificial Sequence
  Description of Artificial Sequence: Synthetic peptide
  Seed: RLNPMHQLL
RINPMHQLK

SEQ ID NO: 167459 - protein, 9 aa, Artificial Sequence
  Description of Artificial Sequence: Synthetic peptide
  Seed: RLNPMHQLL
RINPMHQLL

SEQ ID NO: 167460 - protein, 10 aa, Artificial Sequence
  Description of Artificial Sequence: Synthetic peptide
  Seed: RLNPMHQLLR
RINPMHQLLH

SEQ ID NO: 167461 - protein, 10 aa, Artificial Sequence
  Description of Artificial Sequence: Synthetic peptide
  Seed: RLNPMHQLLR
RINPMHQLLK

SEQ ID NO: 167462 - protein, 10 aa, Artificial Sequence
  Description of Artificial Sequence: Synthetic peptide
  Seed: RLNPMHQLLR
RINPMHQLLR

SEQ ID NO: 167463 - protein, 11 aa, Artificial Sequence
  Description of Artificial Sequence: Synthetic peptide
  Seed: RLNPMHQLLRH
RINPMHQLLRA

SEQ ID NO: 167464 - protein, 11 aa, Artificial Sequence
  Description of Artificial Sequence: Synthetic peptide
  Seed: RLNPMHQLLRH
RINPMHQLLRC

SEQ ID NO: 167465 - protein, 11 aa, Artificial Sequence
  Description of Artificial Sequence: Synthetic peptide
  Seed: RLNPMHQLLRH
RINPMHQLLRD

SEQ ID NO: 167466 - protein, 11 aa, Artificial Sequence
  Description of Artificial Sequence: Synthetic peptide
  Seed: RLNPMHQLLRH
RINPMHQLLRE

SEQ ID NO: 167467 - protein, 11 aa, Artificial Sequence
  Description of Artificial Sequence: Synthetic peptide
  Seed: RLNPMHQLLRH
RINPMHQLLRF

SEQ ID NO: 167468 - protein, 11 aa, Artificial Sequence
  Description of Artificial Sequence: Synthetic peptide
  Seed: RLNPMHQLLRH
RINPMHQLLRG

SEQ ID NO: 167469 - protein, 11 aa, Artificial Sequence
  Description of Artificial Sequence: Synthetic peptide
  Seed: RLNPMHQLLRH
RINPMHQLLRH

SEQ ID NO: 167470 - protein, 11 aa, Artificial Sequence
  Description of Artificial Sequence: Synthetic peptide
  Seed: RLNPMHQLLRH
RINPMHQLLRI

SEQ ID NO: 167471 - protein, 11 aa, Artificial Sequence
  Description of Artificial Sequence: Synthetic peptide
  Seed: RLNPMHQLLRH
RINPMHQLLRK

SEQ ID NO: 167472 - protein, 11 aa, Artificial Sequence
  Description of Artificial Sequence: Synthetic peptide
  Seed: RLNPMHQLLRH
RINPMHQLLRL

SEQ ID NO: 167473 - protein, 11 aa, Artificial Sequence
  Description of Artificial Sequence: Synthetic peptide
  Seed: RLNPMHQLLRH
RINPMHQLLRM

SEQ ID NO: 167474 - protein, 11 aa, Artificial Sequence
  Description of Artificial Sequence: Synthetic peptide
  Seed: RLNPMHQLLRH
RINPMHQLLRN

SEQ ID NO: 167475 - protein, 11 aa, Artificial Sequence
  Description of Artificial Sequence: Synthetic peptide
  Seed: RLNPMHQLLRH
RINPMHQLLRP

SEQ ID NO: 167476 - protein, 11 aa, Artificial Sequence
  Description of Artificial Sequence: Synthetic peptide
  Seed: RLNPMHQLLRH
RINPMHQLLRQ

SEQ ID NO: 167477 - protein, 11 aa, Artificial Sequence
  Description of Artificial Sequence: Synthetic peptide
  Seed: RLNPMHQLLRH
RINPMHQLLRR

SEQ ID NO: 167478 - protein, 11 aa, Artificial Sequence
  Description of Artificial Sequence: Synthetic peptide
  Seed: RLNPMHQLLRH
RINPMHQLLRS

SEQ ID NO: 167479 - protein, 11 aa, Artificial Sequence
  Description of Artificial Sequence: Synthetic peptide
  Seed: RLNPMHQLLRH
RINPMHQLLRT

SEQ ID NO: 167480 - protein, 11 aa, Artificial Sequence
  Description of Artificial Sequence: Synthetic peptide
  Seed: RLNPMHQLLRH
RINPMHQLLRV

SEQ ID NO: 167481 - protein, 11 aa, Artificial Sequence
  Description of Artificial Sequence: Synthetic peptide
  Seed: RLNPMHQLLRH
RINPMHQLLRW

SEQ ID NO: 167482 - protein, 11 aa, Artificial Sequence
  Description of Artificial Sequence: Synthetic peptide
  Seed: RLNPMHQLLRH
RINPMHQLLRY

SEQ ID NO: 167483 - protein, 10 aa, Artificial Sequence
  Description of Artificial Sequence: Synthetic peptide
  Seed: RLNPMHQLLR
RINPMHQLLY

SEQ ID NO: 167484 - protein, 9 aa, Artificial Sequence
  Description of Artificial Sequence: Synthetic peptide
  Seed: RLNPMHQLL
RINPMHQLM

SEQ ID NO: 167485 - protein, 9 aa, Artificial Sequence
  Description of Artificial Sequence: Synthetic peptide
  Seed: RLNPMHQLL
RINPMHQLN

SEQ ID NO: 167486 - protein, 9 aa, Artificial Sequence
  Description of Artificial Sequence: Synthetic peptide
  Seed: RLNPMHQLL
RINPMHQLP

SEQ ID NO: 167487 - protein, 9 aa, Artificial Sequence
  Description of Artificial Sequence: Synthetic peptide
  Seed: RLNPMHQLL
RINPMHQLQ

SEQ ID NO: 167488 - protein, 9 aa, Artificial Sequence
  Description of Artificial Sequence: Synthetic peptide
  Seed: RLNPMHQLL
RINPMHQLR

SEQ ID NO: 167489 - protein, 9 aa, Artificial Sequence
  Description of Artificial Sequence: Synthetic peptide
  Seed: RLNPMHQLL
RINPMHQLS

SEQ ID NO: 167490 - protein, 9 aa, Artificial Sequence
  Description of Artificial Sequence: Synthetic peptide
  Seed: RLNPMHQLL
RINPMHQLT

SEQ ID NO: 167491 - protein, 9 aa, Artificial Sequence
  Description of Artificial Sequence: Synthetic peptide
  Seed: RLNPMHQLL
RINPMHQLV

SEQ ID NO: 167492 - protein, 9 aa, Artificial Sequence
  Description of Artificial Sequence: Synthetic peptide
  Seed: RLNPMHQLL
RINPMHQLW

SEQ ID NO: 167493 - protein, 9 aa, Artificial Sequence
  Description of Artificial Sequence: Synthetic peptide
  Seed: RLNPMHQLL
RINPMHQLY

SEQ ID NO: 167494 - protein, 9 aa, Artificial Sequence
  Description of Artificial Sequence: Synthetic peptide
  Seed: RANQRLNPM
RINQRLNPA

SEQ ID NO: 167495 - protein, 9 aa, Artificial Sequence
  Description of Artificial Sequence: Synthetic peptide
  Seed: RANQRLNPM
RINQRLNPC

SEQ ID NO: 167496 - protein, 9 aa, Artificial Sequence
  Description of Artificial Sequence: Synthetic peptide
  Seed: RANQRLNPM
RINQRLNPF

SEQ ID NO: 167497 - protein, 9 aa, Artificial Sequence
  Description of Artificial Sequence: Synthetic peptide
  Seed: RANQRLNPM
RINQRLNPG

SEQ ID NO: 167498 - protein, 9 aa, Artificial Sequence
  Description of Artificial Sequence: Synthetic peptide
  Seed: RANQRLNPM
RINQRLNPH

SEQ ID NO: 167499 - protein, 9 aa, Artificial Sequence
  Description of Artificial Sequence: Synthetic peptide
  Seed: RANQRLNPM
RINQRLNPI

SEQ ID NO: 167500 - protein, 9 aa, Artificial Sequence
  Description of Artificial Sequence: Synthetic peptide
  Seed: RANQRLNPM
RINQRLNPK

SEQ ID NO: 167501 - protein, 9 aa, Artificial Sequence
  Description of Artificial Sequence: Synthetic peptide
  Seed: RANQRLNPM
RINQRLNPL

SEQ ID NO: 167502 - protein, 9 aa, Artificial Sequence
  Description of Artificial Sequence: Synthetic peptide
  Seed: RANQRLNPM
RINQRLNPM

SEQ ID NO: 167503 - protein, 9 aa, Artificial Sequence
  Description of Artificial Sequence: Synthetic peptide
  Seed: RANQRLNPM
RINQRLNPN

SEQ ID NO: 167504 - protein, 9 aa, Artificial Sequence
  Description of Artificial Sequence: Synthetic peptide
  Seed: RANQRLNPM
RINQRLNPP

SEQ ID NO: 167505 - protein, 9 aa, Artificial Sequence
  Description of Artificial Sequence: Synthetic peptide
  Seed: RANQRLNPM
RINQRLNPQ

SEQ ID NO: 167506 - protein, 9 aa, Artificial Sequence
  Description of Artificial Sequence: Synthetic peptide
  Seed: RANQRLNPM
RINQRLNPR

SEQ ID NO: 167507 - protein, 9 aa, Artificial Sequence
  Description of Artificial Sequence: Synthetic peptide
  Seed: RANQRLNPM
RINQRLNPS

SEQ ID NO: 167508 - protein, 9 aa, Artificial Sequence
  Description of Artificial Sequence: Synthetic peptide
  Seed: RANQRLNPM
RINQRLNPT

SEQ ID NO: 167509 - protein, 9 aa, Artificial Sequence
  Description of Artificial Sequence: Synthetic peptide
  Seed: RANQRLNPM
RINQRLNPV

SEQ ID NO: 167510 - protein, 9 aa, Artificial Sequence
  Description of Artificial Sequence: Synthetic peptide
  Seed: RANQRLNPM
RINQRLNPW

SEQ ID NO: 167511 - protein, 9 aa, Artificial Sequence
  Description of Artificial Sequence: Synthetic peptide
  Seed: RANQRLNPM
RINQRLNPY

SEQ ID NO: 167512 - protein, 8 aa, Artificial Sequence
  Description of Artificial Sequence: Synthetic peptide
  Seed: RMKWMMAM
RKKWMMAF

SEQ ID NO: 167513 - protein, 8 aa, Artificial Sequence
  Description of Artificial Sequence: Synthetic peptide
  Seed: RMKWMMAM
RKKWMMAM

SEQ ID NO: 167514 - protein, 9 aa, Artificial Sequence
  Description of Artificial Sequence: Synthetic peptide
  Seed: RMKWMMAMK
RKKWMMAMK

SEQ ID NO: 167515 - protein, 10 aa, Artificial Sequence
  Description of Artificial Sequence: Synthetic peptide
  Seed: RMKWMMAMKY
RKKWMMAMKF

SEQ ID NO: 167516 - protein, 10 aa, Artificial Sequence
  Description of Artificial Sequence: Synthetic peptide
  Seed: RMKWMMAMKY
RKKWMMAMKL

SEQ ID NO: 167517 - protein, 10 aa, Artificial Sequence
  Description of Artificial Sequence: Synthetic peptide
  Seed: RMKWMMAMKY
RKKWMMAMKM

SEQ ID NO: 167518 - protein, 10 aa, Artificial Sequence
  Description of Artificial Sequence: Synthetic peptide
  Seed: RMKWMMAMKY
RKKWMMAMKY

SEQ ID NO: 167519 - protein, 9 aa, Artificial Sequence
  Description of Artificial Sequence: Synthetic peptide
  Seed: RMKWMMAMK
RKKWMMAMR

SEQ ID NO: 167520 - protein, 8 aa, Artificial Sequence
  Description of Artificial Sequence: Synthetic peptide
  Seed: RMKWMMAM
RKKWMMAY

SEQ ID NO: 167521 - protein, 9 aa, Artificial Sequence
  Description of Artificial Sequence: Synthetic peptide
  Seed: RELVRKTRF
RKLVRKTRF

SEQ ID NO: 167522 - protein, 11 aa, Artificial Sequence
  Description of Artificial Sequence: Synthetic peptide
  Seed: RELVRKTRFLP
RKLVRKTRFLA

SEQ ID NO: 167523 - protein, 11 aa, Artificial Sequence
  Description of Artificial Sequence: Synthetic peptide
  Seed: RELVRKTRFLP
RKLVRKTRFLF

SEQ ID NO: 167524 - protein, 11 aa, Artificial Sequence
  Description of Artificial Sequence: Synthetic peptide
  Seed: RELVRKTRFLP
RKLVRKTRFLG

SEQ ID NO: 167525 - protein, 11 aa, Artificial Sequence
  Description of Artificial Sequence: Synthetic peptide
  Seed: RELVRKTRFLP
RKLVRKTRFLI

SEQ ID NO: 167526 - protein, 11 aa, Artificial Sequence
  Description of Artificial Sequence: Synthetic peptide
  Seed: RELVRKTRFLP
RKLVRKTRFLK

SEQ ID NO: 167527 - protein, 11 aa, Artificial Sequence
  Description of Artificial Sequence: Synthetic peptide
  Seed: RELVRKTRFLP
RKLVRKTRFLL

SEQ ID NO: 167528 - protein, 11 aa, Artificial Sequence
  Description of Artificial Sequence: Synthetic peptide
  Seed: RELVRKTRFLP
RKLVRKTRFLM

SEQ ID NO: 167529 - protein, 11 aa, Artificial Sequence
  Description of Artificial Sequence: Synthetic peptide
  Seed: RELVRKTRFLP
RKLVRKTRFLP

SEQ ID NO: 167530 - protein, 11 aa, Artificial Sequence
  Description of Artificial Sequence: Synthetic peptide
  Seed: RELVRKTRFLP
RKLVRKTRFLS

SEQ ID NO: 167531 - protein, 11 aa, Artificial Sequence
  Description of Artificial Sequence: Synthetic peptide
  Seed: RELVRKTRFLP
RKLVRKTRFLT

SEQ ID NO: 167532 - protein, 11 aa, Artificial Sequence
  Description of Artificial Sequence: Synthetic peptide
  Seed: RELVRKTRFLP
RKLVRKTRFLV

SEQ ID NO: 167533 - protein, 11 aa, Artificial Sequence
  Description of Artificial Sequence: Synthetic peptide
  Seed: RELVRKTRFLP
RKLVRKTRFLY

SEQ ID NO: 167534 - protein, 9 aa, Artificial Sequence
  Description of Artificial Sequence: Synthetic peptide
  Seed: RELVRKTRF
RKLVRKTRM

SEQ ID NO: 167535 - protein, 9 aa, Artificial Sequence
  Description of Artificial Sequence: Synthetic peptide
  Seed: RELVRKTRF
RKLVRKTRY

SEQ ID NO: 167536 - protein, 9 aa, Artificial Sequence
  Description of Artificial Sequence: Synthetic peptide
  Seed: RLNPMHQLL
RKNPMHQLA

SEQ ID NO: 167537 - protein, 9 aa, Artificial Sequence
  Description of Artificial Sequence: Synthetic peptide
  Seed: RLNPMHQLL
RKNPMHQLF

SEQ ID NO: 167538 - protein, 9 aa, Artificial Sequence
  Description of Artificial Sequence: Synthetic peptide
  Seed: RLNPMHQLL
RKNPMHQLH

SEQ ID NO: 167539 - protein, 9 aa, Artificial Sequence
  Description of Artificial Sequence: Synthetic peptide
  Seed: RLNPMHQLL
RKNPMHQLI

SEQ ID NO: 167540 - protein, 9 aa, Artificial Sequence
  Description of Artificial Sequence: Synthetic peptide
  Seed: RLNPMHQLL
RKNPMHQLK

SEQ ID NO: 167541 - protein, 9 aa, Artificial Sequence
  Description of Artificial Sequence: Synthetic peptide
  Seed: RLNPMHQLL
RKNPMHQLL

SEQ ID NO: 167542 - protein, 10 aa, Artificial Sequence
  Description of Artificial Sequence: Synthetic peptide
  Seed: RLNPMHQLLR
RKNPMHQLLR

SEQ ID NO: 167543 - protein, 9 aa, Artificial Sequence
  Description of Artificial Sequence: Synthetic peptide
  Seed: RLNPMHQLL
RKNPMHQLM

SEQ ID NO: 167544 - protein, 9 aa, Artificial Sequence
  Description of Artificial Sequence: Synthetic peptide
  Seed: RLNPMHQLL
RKNPMHQLV

SEQ ID NO: 167545 - protein, 9 aa, Artificial Sequence
  Description of Artificial Sequence: Synthetic peptide
  Seed: RLNPMHQLL
RKNPMHQLW

SEQ ID NO: 167546 - protein, 9 aa, Artificial Sequence
  Description of Artificial Sequence: Synthetic peptide
  Seed: RLNPMHQLL
RKNPMHQLY

SEQ ID NO: 167547 - protein, 9 aa, Artificial Sequence
  Description of Artificial Sequence: Synthetic peptide
  Seed: RANQRLNPM
RKNQRLNPA

SEQ ID NO: 167548 - protein, 9 aa, Artificial Sequence
  Description of Artificial Sequence: Synthetic peptide
  Seed: RANQRLNPM
RKNQRLNPF

SEQ ID NO: 167549 - protein, 9 aa, Artificial Sequence
  Description of Artificial Sequence: Synthetic peptide
  Seed: RANQRLNPM
RKNQRLNPH

SEQ ID NO: 167550 - protein, 9 aa, Artificial Sequence
  Description of Artificial Sequence: Synthetic peptide
  Seed: RANQRLNPM
RKNQRLNPI

SEQ ID NO: 167551 - protein, 9 aa, Artificial Sequence
  Description of Artificial Sequence: Synthetic peptide
  Seed: RANQRLNPM
RKNQRLNPK

SEQ ID NO: 167552 - protein, 9 aa, Artificial Sequence
  Description of Artificial Sequence: Synthetic peptide
  Seed: RANQRLNPM
RKNQRLNPL

SEQ ID NO: 167553 - protein, 9 aa, Artificial Sequence
  Description of Artificial Sequence: Synthetic peptide
  Seed: RANQRLNPM
RKNQRLNPM

SEQ ID NO: 167554 - protein, 9 aa, Artificial Sequence
  Description of Artificial Sequence: Synthetic peptide
  Seed: RANQRLNPM
RKNQRLNPV

SEQ ID NO: 167555 - protein, 9 aa, Artificial Sequence
  Description of Artificial Sequence: Synthetic peptide
  Seed: RANQRLNPM
RKNQRLNPW

SEQ ID NO: 167556 - protein, 9 aa, Artificial Sequence
  Description of Artificial Sequence: Synthetic peptide
  Seed: RANQRLNPM
RKNQRLNPY

SEQ ID NO: 167557 - protein, 8 aa, Artificial Sequence
  Description of Artificial Sequence: Synthetic peptide
  Seed: RMKWMMAM
RLKWMMAF

SEQ ID NO: 167558 - protein, 8 aa, Artificial Sequence
  Description of Artificial Sequence: Synthetic peptide
  Seed: RMKWMMAM
RLKWMMAL

SEQ ID NO: 167559 - protein, 8 aa, Artificial Sequence
  Description of Artificial Sequence: Synthetic peptide
  Seed: RMKWMMAM
RLKWMMAM

SEQ ID NO: 167560 - protein, 9 aa, Artificial Sequence
  Description of Artificial Sequence: Synthetic peptide
  Seed: RMKWMMAMK
RLKWMMAMA

SEQ ID NO: 167561 - protein, 9 aa, Artificial Sequence
  Description of Artificial Sequence: Synthetic peptide
  Seed: RMKWMMAMK
RLKWMMAMG

SEQ ID NO: 167562 - protein, 9 aa, Artificial Sequence
  Description of Artificial Sequence: Synthetic peptide
  Seed: RMKWMMAMK
RLKWMMAMH

SEQ ID NO: 167563 - protein, 9 aa, Artificial Sequence
  Description of Artificial Sequence: Synthetic peptide
  Seed: RMKWMMAMK
RLKWMMAMI

SEQ ID NO: 167564 - protein, 9 aa, Artificial Sequence
  Description of Artificial Sequence: Synthetic peptide
  Seed: RMKWMMAMK
RLKWMMAMK

SEQ ID NO: 167565 - protein, 10 aa, Artificial Sequence
  Description of Artificial Sequence: Synthetic peptide
  Seed: RMKWMMAMKY
RLKWMMAMKA

SEQ ID NO: 167566 - protein, 10 aa, Artificial Sequence
  Description of Artificial Sequence: Synthetic peptide
  Seed: RMKWMMAMKY
RLKWMMAMKC

SEQ ID NO: 167567 - protein, 10 aa, Artificial Sequence
  Description of Artificial Sequence: Synthetic peptide
  Seed: RMKWMMAMKY
RLKWMMAMKD

SEQ ID NO: 167568 - protein, 10 aa, Artificial Sequence
  Description of Artificial Sequence: Synthetic peptide
  Seed: RMKWMMAMKY
RLKWMMAMKE

SEQ ID NO: 167569 - protein, 10 aa, Artificial Sequence
  Description of Artificial Sequence: Synthetic peptide
  Seed: RMKWMMAMKY
RLKWMMAMKF

SEQ ID NO: 167570 - protein, 10 aa, Artificial Sequence
  Description of Artificial Sequence: Synthetic peptide
  Seed: RMKWMMAMKY
RLKWMMAMKG

SEQ ID NO: 167571 - protein, 10 aa, Artificial Sequence
  Description of Artificial Sequence: Synthetic peptide
  Seed: RMKWMMAMKY
RLKWMMAMKH

SEQ ID NO: 167572 - protein, 10 aa, Artificial Sequence
  Description of Artificial Sequence: Synthetic peptide
  Seed: RMKWMMAMKY
RLKWMMAMKI

SEQ ID NO: 167573 - protein, 10 aa, Artificial Sequence
  Description of Artificial Sequence: Synthetic peptide
  Seed: RMKWMMAMKY
RLKWMMAMKK

SEQ ID NO: 167574 - protein, 10 aa, Artificial Sequence
  Description of Artificial Sequence: Synthetic peptide
  Seed: RMKWMMAMKY
RLKWMMAMKL

SEQ ID NO: 167575 - protein, 10 aa, Artificial Sequence
  Description of Artificial Sequence: Synthetic peptide
  Seed: RMKWMMAMKY
RLKWMMAMKM

SEQ ID NO: 167576 - protein, 10 aa, Artificial Sequence
  Description of Artificial Sequence: Synthetic peptide
  Seed: RMKWMMAMKY
RLKWMMAMKN

SEQ ID NO: 167577 - protein, 10 aa, Artificial Sequence
  Description of Artificial Sequence: Synthetic peptide
  Seed: RMKWMMAMKY
RLKWMMAMKP

SEQ ID NO: 167578 - protein, 10 aa, Artificial Sequence
  Description of Artificial Sequence: Synthetic peptide
  Seed: RMKWMMAMKY
RLKWMMAMKQ

SEQ ID NO: 167579 - protein, 10 aa, Artificial Sequence
  Description of Artificial Sequence: Synthetic peptide
  Seed: RMKWMMAMKY
RLKWMMAMKR

SEQ ID NO: 167580 - protein, 10 aa, Artificial Sequence
  Description of Artificial Sequence: Synthetic peptide
  Seed: RMKWMMAMKY
RLKWMMAMKS

SEQ ID NO: 167581 - protein, 10 aa, Artificial Sequence
  Description of Artificial Sequence: Synthetic peptide
  Seed: RMKWMMAMKY
RLKWMMAMKT

SEQ ID NO: 167582 - protein, 10 aa, Artificial Sequence
  Description of Artificial Sequence: Synthetic peptide
  Seed: RMKWMMAMKY
RLKWMMAMKV

SEQ ID NO: 167583 - protein, 10 aa, Artificial Sequence
  Description of Artificial Sequence: Synthetic peptide
  Seed: RMKWMMAMKY
RLKWMMAMKW

SEQ ID NO: 167584 - protein, 10 aa, Artificial Sequence
  Description of Artificial Sequence: Synthetic peptide
  Seed: RMKWMMAMKY
RLKWMMAMKY

SEQ ID NO: 167585 - protein, 9 aa, Artificial Sequence
  Description of Artificial Sequence: Synthetic peptide
  Seed: RMKWMMAMK
RLKWMMAML

SEQ ID NO: 167586 - protein, 9 aa, Artificial Sequence
  Description of Artificial Sequence: Synthetic peptide
  Seed: RMKWMMAMK
RLKWMMAMM

SEQ ID NO: 167587 - protein, 9 aa, Artificial Sequence
  Description of Artificial Sequence: Synthetic peptide
  Seed: RMKWMMAMK
RLKWMMAMN

SEQ ID NO: 167588 - protein, 9 aa, Artificial Sequence
  Description of Artificial Sequence: Synthetic peptide
  Seed: RMKWMMAMK
RLKWMMAMP

SEQ ID NO: 167589 - protein, 9 aa, Artificial Sequence
  Description of Artificial Sequence: Synthetic peptide
  Seed: RMKWMMAMK
RLKWMMAMQ

SEQ ID NO: 167590 - protein, 9 aa, Artificial Sequence
  Description of Artificial Sequence: Synthetic peptide
  Seed: RMKWMMAMK
RLKWMMAMR

SEQ ID NO: 167591 - protein, 9 aa, Artificial Sequence
  Description of Artificial Sequence: Synthetic peptide
  Seed: RMKWMMAMK
RLKWMMAMS

SEQ ID NO: 167592 - protein, 9 aa, Artificial Sequence
  Description of Artificial Sequence: Synthetic peptide
  Seed: RMKWMMAMK
RLKWMMAMT

SEQ ID NO: 167593 - protein, 9 aa, Artificial Sequence
  Description of Artificial Sequence: Synthetic peptide
  Seed: RMKWMMAMK
RLKWMMAMV

SEQ ID NO: 167594 - protein, 9 aa, Artificial Sequence
  Description of Artificial Sequence: Synthetic peptide
  Seed: RMKWMMAMK
RLKWMMAMY

SEQ ID NO: 167595 - protein, 8 aa, Artificial Sequence
  Description of Artificial Sequence: Synthetic peptide
  Seed: RMKWMMAM
RLKWMMAY

SEQ ID NO: 167596 - protein, 9 aa, Artificial Sequence
  Description of Artificial Sequence: Synthetic peptide
  Seed: RELVRKTRF
RLLVRKTRF

SEQ ID NO: 167597 - protein, 11 aa, Artificial Sequence
  Description of Artificial Sequence: Synthetic peptide
  Seed: RELVRKTRFLP
RLLVRKTRFLA

SEQ ID NO: 167598 - protein, 11 aa, Artificial Sequence
  Description of Artificial Sequence: Synthetic peptide
  Seed: RELVRKTRFLP
RLLVRKTRFLF

SEQ ID NO: 167599 - protein, 11 aa, Artificial Sequence
  Description of Artificial Sequence: Synthetic peptide
  Seed: RELVRKTRFLP
RLLVRKTRFLG

SEQ ID NO: 167600 - protein, 11 aa, Artificial Sequence
  Description of Artificial Sequence: Synthetic peptide
  Seed: RELVRKTRFLP
RLLVRKTRFLI

SEQ ID NO: 167601 - protein, 11 aa, Artificial Sequence
  Description of Artificial Sequence: Synthetic peptide
  Seed: RELVRKTRFLP
RLLVRKTRFLK

SEQ ID NO: 167602 - protein, 11 aa, Artificial Sequence
  Description of Artificial Sequence: Synthetic peptide
  Seed: RELVRKTRFLP
RLLVRKTRFLL

SEQ ID NO: 167603 - protein, 11 aa, Artificial Sequence
  Description of Artificial Sequence: Synthetic peptide
  Seed: RELVRKTRFLP
RLLVRKTRFLM

SEQ ID NO: 167604 - protein, 11 aa, Artificial Sequence
  Description of Artificial Sequence: Synthetic peptide
  Seed: RELVRKTRFLP
RLLVRKTRFLP

SEQ ID NO: 167605 - protein, 11 aa, Artificial Sequence
  Description of Artificial Sequence: Synthetic peptide
  Seed: RELVRKTRFLP
RLLVRKTRFLS

SEQ ID NO: 167606 - protein, 11 aa, Artificial Sequence
  Description of Artificial Sequence: Synthetic peptide
  Seed: RELVRKTRFLP
RLLVRKTRFLT

SEQ ID NO: 167607 - protein, 11 aa, Artificial Sequence
  Description of Artificial Sequence: Synthetic peptide
  Seed: RELVRKTRFLP
RLLVRKTRFLV

SEQ ID NO: 167608 - protein, 11 aa, Artificial Sequence
  Description of Artificial Sequence: Synthetic peptide
  Seed: RELVRKTRFLP
RLLVRKTRFLY

SEQ ID NO: 167609 - protein, 9 aa, Artificial Sequence
  Description of Artificial Sequence: Synthetic peptide
  Seed: RELVRKTRF
RLLVRKTRY

SEQ ID NO: 167610 - protein, 9 aa, Artificial Sequence
  Description of Artificial Sequence: Synthetic peptide
  Seed: RLNPMHQLL
RLNPMHQLA

SEQ ID NO: 167611 - protein, 9 aa, Artificial Sequence
  Description of Artificial Sequence: Synthetic peptide
  Seed: RLNPMHQLL
RLNPMHQLC

SEQ ID NO: 167612 - protein, 9 aa, Artificial Sequence
  Description of Artificial Sequence: Synthetic peptide
  Seed: RLNPMHQLL
RLNPMHQLF

SEQ ID NO: 167613 - protein, 9 aa, Artificial Sequence
  Description of Artificial Sequence: Synthetic peptide
  Seed: RLNPMHQLL
RLNPMHQLG

SEQ ID NO: 167614 - protein, 9 aa, Artificial Sequence
  Description of Artificial Sequence: Synthetic peptide
  Seed: RLNPMHQLL
RLNPMHQLH

SEQ ID NO: 167615 - protein, 9 aa, Artificial Sequence
  Description of Artificial Sequence: Synthetic peptide
  Seed: RLNPMHQLL
RLNPMHQLI

SEQ ID NO: 167616 - protein, 9 aa, Artificial Sequence
  Description of Artificial Sequence: Synthetic peptide
  Seed: RLNPMHQLL
RLNPMHQLK

SEQ ID NO: 167617 - protein, 10 aa, Artificial Sequence
  Description of Artificial Sequence: Synthetic peptide
  Seed: RLNPMHQLLR
RLNPMHQLLH

SEQ ID NO: 167618 - protein, 10 aa, Artificial Sequence
  Description of Artificial Sequence: Synthetic peptide
  Seed: RLNPMHQLLR
RLNPMHQLLK

SEQ ID NO: 167619 - protein, 11 aa, Artificial Sequence
  Description of Artificial Sequence: Synthetic peptide
  Seed: RLNPMHQLLRH
RLNPMHQLLRA

SEQ ID NO: 167620 - protein, 11 aa, Artificial Sequence
  Description of Artificial Sequence: Synthetic peptide
  Seed: RLNPMHQLLRH
RLNPMHQLLRC

SEQ ID NO: 167621 - protein, 11 aa, Artificial Sequence
  Description of Artificial Sequence: Synthetic peptide
  Seed: RLNPMHQLLRH
RLNPMHQLLRD

SEQ ID NO: 167622 - protein, 11 aa, Artificial Sequence
  Description of Artificial Sequence: Synthetic peptide
  Seed: RLNPMHQLLRH
RLNPMHQLLRE

SEQ ID NO: 167623 - protein, 11 aa, Artificial Sequence
  Description of Artificial Sequence: Synthetic peptide
  Seed: RLNPMHQLLRH
RLNPMHQLLRF

SEQ ID NO: 167624 - protein, 11 aa, Artificial Sequence
  Description of Artificial Sequence: Synthetic peptide
  Seed: RLNPMHQLLRH
RLNPMHQLLRG

SEQ ID NO: 167625 - protein, 11 aa, Artificial Sequence
  Description of Artificial Sequence: Synthetic peptide
  Seed: RLNPMHQLLRH
RLNPMHQLLRI

SEQ ID NO: 167626 - protein, 11 aa, Artificial Sequence
  Description of Artificial Sequence: Synthetic peptide
  Seed: RLNPMHQLLRH
RLNPMHQLLRK

SEQ ID NO: 167627 - protein, 11 aa, Artificial Sequence
  Description of Artificial Sequence: Synthetic peptide
  Seed: RLNPMHQLLRH
RLNPMHQLLRL

SEQ ID NO: 167628 - protein, 11 aa, Artificial Sequence
  Description of Artificial Sequence: Synthetic peptide
  Seed: RLNPMHQLLRH
RLNPMHQLLRM

SEQ ID NO: 167629 - protein, 11 aa, Artificial Sequence
  Description of Artificial Sequence: Synthetic peptide
  Seed: RLNPMHQLLRH
RLNPMHQLLRN

SEQ ID NO: 167630 - protein, 11 aa, Artificial Sequence
  Description of Artificial Sequence: Synthetic peptide
  Seed: RLNPMHQLLRH
RLNPMHQLLRP

SEQ ID NO: 167631 - protein, 11 aa, Artificial Sequence
  Description of Artificial Sequence: Synthetic peptide
  Seed: RLNPMHQLLRH
RLNPMHQLLRQ

SEQ ID NO: 167632 - protein, 11 aa, Artificial Sequence
  Description of Artificial Sequence: Synthetic peptide
  Seed: RLNPMHQLLRH
RLNPMHQLLRR

SEQ ID NO: 167633 - protein, 11 aa, Artificial Sequence
  Description of Artificial Sequence: Synthetic peptide
  Seed: RLNPMHQLLRH
RLNPMHQLLRS

SEQ ID NO: 167634 - protein, 11 aa, Artificial Sequence
  Description of Artificial Sequence: Synthetic peptide
  Seed: RLNPMHQLLRH
RLNPMHQLLRT

SEQ ID NO: 167635 - protein, 11 aa, Artificial Sequence
  Description of Artificial Sequence: Synthetic peptide
  Seed: RLNPMHQLLRH
RLNPMHQLLRV

SEQ ID NO: 167636 - protein, 11 aa, Artificial Sequence
  Description of Artificial Sequence: Synthetic peptide
  Seed: RLNPMHQLLRH
RLNPMHQLLRW

SEQ ID NO: 167637 - protein, 11 aa, Artificial Sequence
  Description of Artificial Sequence: Synthetic peptide
  Seed: RLNPMHQLLRH
RLNPMHQLLRY

SEQ ID NO: 167638 - protein, 10 aa, Artificial Sequence
  Description of Artificial Sequence: Synthetic peptide
  Seed: RLNPMHQLLR
RLNPMHQLLY

SEQ ID NO: 167639 - protein, 9 aa, Artificial Sequence
  Description of Artificial Sequence: Synthetic peptide
  Seed: RLNPMHQLL
RLNPMHQLM

SEQ ID NO: 167640 - protein, 9 aa, Artificial Sequence
  Description of Artificial Sequence: Synthetic peptide
  Seed: RLNPMHQLL
RLNPMHQLR

SEQ ID NO: 167641 - protein, 9 aa, Artificial Sequence
  Description of Artificial Sequence: Synthetic peptide
  Seed: RLNPMHQLL
RLNPMHQLS

SEQ ID NO: 167642 - protein, 9 aa, Artificial Sequence
  Description of Artificial Sequence: Synthetic peptide
  Seed: RLNPMHQLL
RLNPMHQLT

SEQ ID NO: 167643 - protein, 9 aa, Artificial Sequence
  Description of Artificial Sequence: Synthetic peptide
  Seed: RLNPMHQLL
RLNPMHQLV

SEQ ID NO: 167644 - protein, 9 aa, Artificial Sequence
  Description of Artificial Sequence: Synthetic peptide
  Seed: RLNPMHQLL
RLNPMHQLW

SEQ ID NO: 167645 - protein, 9 aa, Artificial Sequence
  Description of Artificial Sequence: Synthetic peptide
  Seed: RLNPMHQLL
RLNPMHQLY

SEQ ID NO: 167646 - protein, 8 aa, Artificial Sequence
  Description of Artificial Sequence: Synthetic peptide
  Seed: RLNPMHQL
RLNPMHQV

SEQ ID NO: 167647 - protein, 9 aa, Artificial Sequence
  Description of Artificial Sequence: Synthetic peptide
  Seed: RANQRLNPM
RLNQRLNPA

SEQ ID NO: 167648 - protein, 9 aa, Artificial Sequence
  Description of Artificial Sequence: Synthetic peptide
  Seed: RANQRLNPM
RLNQRLNPF

SEQ ID NO: 167649 - protein, 9 aa, Artificial Sequence
  Description of Artificial Sequence: Synthetic peptide
  Seed: RANQRLNPM
RLNQRLNPG

SEQ ID NO: 167650 - protein, 9 aa, Artificial Sequence
  Description of Artificial Sequence: Synthetic peptide
  Seed: RANQRLNPM
RLNQRLNPH

SEQ ID NO: 167651 - protein, 9 aa, Artificial Sequence
  Description of Artificial Sequence: Synthetic peptide
  Seed: RANQRLNPM
RLNQRLNPI

SEQ ID NO: 167652 - protein, 9 aa, Artificial Sequence
  Description of Artificial Sequence: Synthetic peptide
  Seed: RANQRLNPM
RLNQRLNPK

SEQ ID NO: 167653 - protein, 9 aa, Artificial Sequence
  Description of Artificial Sequence: Synthetic peptide
  Seed: RANQRLNPM
RLNQRLNPL

SEQ ID NO: 167654 - protein, 9 aa, Artificial Sequence
  Description of Artificial Sequence: Synthetic peptide
  Seed: RANQRLNPM
RLNQRLNPM

SEQ ID NO: 167655 - protein, 9 aa, Artificial Sequence
  Description of Artificial Sequence: Synthetic peptide
  Seed: RANQRLNPM
RLNQRLNPR

SEQ ID NO: 167656 - protein, 9 aa, Artificial Sequence
  Description of Artificial Sequence: Synthetic peptide
  Seed: RANQRLNPM
RLNQRLNPS

SEQ ID NO: 167657 - protein, 9 aa, Artificial Sequence
  Description of Artificial Sequence: Synthetic peptide
  Seed: RANQRLNPM
RLNQRLNPV

SEQ ID NO: 167658 - protein, 9 aa, Artificial Sequence
  Description of Artificial Sequence: Synthetic peptide
  Seed: RANQRLNPM
RLNQRLNPW

SEQ ID NO: 167659 - protein, 9 aa, Artificial Sequence
  Description of Artificial Sequence: Synthetic peptide
  Seed: RANQRLNPM
RLNQRLNPY

SEQ ID NO: 167660 - protein, 8 aa, Artificial Sequence
  Description of Artificial Sequence: Synthetic peptide
  Seed: RMKWMMAM
RMKWMMAF

SEQ ID NO: 167661 - protein, 8 aa, Artificial Sequence
  Description of Artificial Sequence: Synthetic peptide
  Seed: RMKWMMAM
RMKWMMAL

SEQ ID NO: 167662 - protein, 9 aa, Artificial Sequence
  Description of Artificial Sequence: Synthetic peptide
  Seed: RMKWMMAMK
RMKWMMAMA

SEQ ID NO: 167663 - protein, 9 aa, Artificial Sequence
  Description of Artificial Sequence: Synthetic peptide
  Seed: RMKWMMAMK
RMKWMMAMC

SEQ ID NO: 167664 - protein, 9 aa, Artificial Sequence
  Description of Artificial Sequence: Synthetic peptide
  Seed: RMKWMMAMK
RMKWMMAME

SEQ ID NO: 167665 - protein, 9 aa, Artificial Sequence
  Description of Artificial Sequence: Synthetic peptide
  Seed: RMKWMMAMK
RMKWMMAMF

SEQ ID NO: 167666 - protein, 9 aa, Artificial Sequence
  Description of Artificial Sequence: Synthetic peptide
  Seed: RMKWMMAMK
RMKWMMAMG

SEQ ID NO: 167667 - protein, 9 aa, Artificial Sequence
  Description of Artificial Sequence: Synthetic peptide
  Seed: RMKWMMAMK
RMKWMMAMH

SEQ ID NO: 167668 - protein, 9 aa, Artificial Sequence
  Description of Artificial Sequence: Synthetic peptide
  Seed: RMKWMMAMK
RMKWMMAMI

SEQ ID NO: 167669 - protein, 10 aa, Artificial Sequence
  Description of Artificial Sequence: Synthetic peptide
  Seed: RMKWMMAMKY
RMKWMMAMKA

SEQ ID NO: 167670 - protein, 10 aa, Artificial Sequence
  Description of Artificial Sequence: Synthetic peptide
  Seed: RMKWMMAMKY
RMKWMMAMKC

SEQ ID NO: 167671 - protein, 10 aa, Artificial Sequence
  Description of Artificial Sequence: Synthetic peptide
  Seed: RMKWMMAMKY
RMKWMMAMKD

SEQ ID NO: 167672 - protein, 10 aa, Artificial Sequence
  Description of Artificial Sequence: Synthetic peptide
  Seed: RMKWMMAMKY
RMKWMMAMKE

SEQ ID NO: 167673 - protein, 10 aa, Artificial Sequence
  Description of Artificial Sequence: Synthetic peptide
  Seed: RMKWMMAMKY
RMKWMMAMKF

SEQ ID NO: 167674 - protein, 10 aa, Artificial Sequence
  Description of Artificial Sequence: Synthetic peptide
  Seed: RMKWMMAMKY
RMKWMMAMKG

SEQ ID NO: 167675 - protein, 10 aa, Artificial Sequence
  Description of Artificial Sequence: Synthetic peptide
  Seed: RMKWMMAMKY
RMKWMMAMKH

SEQ ID NO: 167676 - protein, 10 aa, Artificial Sequence
  Description of Artificial Sequence: Synthetic peptide
  Seed: RMKWMMAMKY
RMKWMMAMKI

SEQ ID NO: 167677 - protein, 10 aa, Artificial Sequence
  Description of Artificial Sequence: Synthetic peptide
  Seed: RMKWMMAMKY
RMKWMMAMKK

SEQ ID NO: 167678 - protein, 10 aa, Artificial Sequence
  Description of Artificial Sequence: Synthetic peptide
  Seed: RMKWMMAMKY
RMKWMMAMKL

SEQ ID NO: 167679 - protein, 10 aa, Artificial Sequence
  Description of Artificial Sequence: Synthetic peptide
  Seed: RMKWMMAMKY
RMKWMMAMKM

SEQ ID NO: 167680 - protein, 10 aa, Artificial Sequence
  Description of Artificial Sequence: Synthetic peptide
  Seed: RMKWMMAMKY
RMKWMMAMKN

SEQ ID NO: 167681 - protein, 10 aa, Artificial Sequence
  Description of Artificial Sequence: Synthetic peptide
  Seed: RMKWMMAMKY
RMKWMMAMKP

SEQ ID NO: 167682 - protein, 10 aa, Artificial Sequence
  Description of Artificial Sequence: Synthetic peptide
  Seed: RMKWMMAMKY
RMKWMMAMKQ

SEQ ID NO: 167683 - protein, 10 aa, Artificial Sequence
  Description of Artificial Sequence: Synthetic peptide
  Seed: RMKWMMAMKY
RMKWMMAMKR

SEQ ID NO: 167684 - protein, 10 aa, Artificial Sequence
  Description of Artificial Sequence: Synthetic peptide
  Seed: RMKWMMAMKY
RMKWMMAMKS

SEQ ID NO: 167685 - protein, 10 aa, Artificial Sequence
  Description of Artificial Sequence: Synthetic peptide
  Seed: RMKWMMAMKY
RMKWMMAMKT

SEQ ID NO: 167686 - protein, 10 aa, Artificial Sequence
  Description of Artificial Sequence: Synthetic peptide
  Seed: RMKWMMAMKY
RMKWMMAMKV

SEQ ID NO: 167687 - protein, 10 aa, Artificial Sequence
  Description of Artificial Sequence: Synthetic peptide
  Seed: RMKWMMAMKY
RMKWMMAMKW

SEQ ID NO: 167688 - protein, 9 aa, Artificial Sequence
  Description of Artificial Sequence: Synthetic peptide
  Seed: RMKWMMAMK
RMKWMMAML

SEQ ID NO: 167689 - protein, 9 aa, Artificial Sequence
  Description of Artificial Sequence: Synthetic peptide
  Seed: RMKWMMAMK
RMKWMMAMM

SEQ ID NO: 167690 - protein, 9 aa, Artificial Sequence
  Description of Artificial Sequence: Synthetic peptide
  Seed: RMKWMMAMK
RMKWMMAMN

SEQ ID NO: 167691 - protein, 9 aa, Artificial Sequence
  Description of Artificial Sequence: Synthetic peptide
  Seed: RMKWMMAMK
RMKWMMAMP

SEQ ID NO: 167692 - protein, 9 aa, Artificial Sequence
  Description of Artificial Sequence: Synthetic peptide
  Seed: RMKWMMAMK
RMKWMMAMQ

SEQ ID NO: 167693 - protein, 9 aa, Artificial Sequence
  Description of Artificial Sequence: Synthetic peptide
  Seed: RMKWMMAMK
RMKWMMAMS

SEQ ID NO: 167694 - protein, 9 aa, Artificial Sequence
  Description of Artificial Sequence: Synthetic peptide
  Seed: RMKWMMAMK
RMKWMMAMT

SEQ ID NO: 167695 - protein, 9 aa, Artificial Sequence
  Description of Artificial Sequence: Synthetic peptide
  Seed: RMKWMMAMK
RMKWMMAMV

SEQ ID NO: 167696 - protein, 9 aa, Artificial Sequence
  Description of Artificial Sequence: Synthetic peptide
  Seed: RMKWMMAMK
RMKWMMAMY

SEQ ID NO: 167697 - protein, 8 aa, Artificial Sequence
  Description of Artificial Sequence: Synthetic peptide
  Seed: RMKWMMAM
RMKWMMAY

SEQ ID NO: 167698 - protein, 9 aa, Artificial Sequence
  Description of Artificial Sequence: Synthetic peptide
  Seed: RELVRKTRF
RMLVRKTRF

SEQ ID NO: 167699 - protein, 11 aa, Artificial Sequence
  Description of Artificial Sequence: Synthetic peptide
  Seed: RELVRKTRFLP
RMLVRKTRFLA

SEQ ID NO: 167700 - protein, 11 aa, Artificial Sequence
  Description of Artificial Sequence: Synthetic peptide
  Seed: RELVRKTRFLP
RMLVRKTRFLE

SEQ ID NO: 167701 - protein, 11 aa, Artificial Sequence
  Description of Artificial Sequence: Synthetic peptide
  Seed: RELVRKTRFLP
RMLVRKTRFLF

SEQ ID NO: 167702 - protein, 11 aa, Artificial Sequence
  Description of Artificial Sequence: Synthetic peptide
  Seed: RELVRKTRFLP
RMLVRKTRFLG

SEQ ID NO: 167703 - protein, 11 aa, Artificial Sequence
  Description of Artificial Sequence: Synthetic peptide
  Seed: RELVRKTRFLP
RMLVRKTRFLI

SEQ ID NO: 167704 - protein, 11 aa, Artificial Sequence
  Description of Artificial Sequence: Synthetic peptide
  Seed: RELVRKTRFLP
RMLVRKTRFLK

SEQ ID NO: 167705 - protein, 11 aa, Artificial Sequence
  Description of Artificial Sequence: Synthetic peptide
  Seed: RELVRKTRFLP
RMLVRKTRFLL

SEQ ID NO: 167706 - protein, 11 aa, Artificial Sequence
  Description of Artificial Sequence: Synthetic peptide
  Seed: RELVRKTRFLP
RMLVRKTRFLM

SEQ ID NO: 167707 - protein, 11 aa, Artificial Sequence
  Description of Artificial Sequence: Synthetic peptide
  Seed: RELVRKTRFLP
RMLVRKTRFLP

SEQ ID NO: 167708 - protein, 11 aa, Artificial Sequence
  Description of Artificial Sequence: Synthetic peptide
  Seed: RELVRKTRFLP
RMLVRKTRFLQ

SEQ ID NO: 167709 - protein, 11 aa, Artificial Sequence
  Description of Artificial Sequence: Synthetic peptide
  Seed: RELVRKTRFLP
RMLVRKTRFLR

SEQ ID NO: 167710 - protein, 11 aa, Artificial Sequence
  Description of Artificial Sequence: Synthetic peptide
  Seed: RELVRKTRFLP
RMLVRKTRFLS

SEQ ID NO: 167711 - protein, 11 aa, Artificial Sequence
  Description of Artificial Sequence: Synthetic peptide
  Seed: RELVRKTRFLP
RMLVRKTRFLT

SEQ ID NO: 167712 - protein, 11 aa, Artificial Sequence
  Description of Artificial Sequence: Synthetic peptide
  Seed: RELVRKTRFLP
RMLVRKTRFLV

SEQ ID NO: 167713 - protein, 11 aa, Artificial Sequence
  Description of Artificial Sequence: Synthetic peptide
  Seed: RELVRKTRFLP
RMLVRKTRFLY

SEQ ID NO: 167714 - protein, 9 aa, Artificial Sequence
  Description of Artificial Sequence: Synthetic peptide
  Seed: RELVRKTRF
RMLVRKTRM

SEQ ID NO: 167715 - protein, 9 aa, Artificial Sequence
  Description of Artificial Sequence: Synthetic peptide
  Seed: RELVRKTRF
RMLVRKTRY

SEQ ID NO: 167716 - protein, 8 aa, Artificial Sequence
  Description of Artificial Sequence: Synthetic peptide
  Seed: RLNPMHQL
RMNPMHQL

SEQ ID NO: 167717 - protein, 9 aa, Artificial Sequence
  Description of Artificial Sequence: Synthetic peptide
  Seed: RLNPMHQLL
RMNPMHQLA

SEQ ID NO: 167718 - protein, 9 aa, Artificial Sequence
  Description of Artificial Sequence: Synthetic peptide
  Seed: RLNPMHQLL
RMNPMHQLC

SEQ ID NO: 167719 - protein, 9 aa, Artificial Sequence
  Description of Artificial Sequence: Synthetic peptide
  Seed: RLNPMHQLL
RMNPMHQLE

SEQ ID NO: 167720 - protein, 9 aa, Artificial Sequence
  Description of Artificial Sequence: Synthetic peptide
  Seed: RLNPMHQLL
RMNPMHQLF

SEQ ID NO: 167721 - protein, 9 aa, Artificial Sequence
  Description of Artificial Sequence: Synthetic peptide
  Seed: RLNPMHQLL
RMNPMHQLG

SEQ ID NO: 167722 - protein, 9 aa, Artificial Sequence
  Description of Artificial Sequence: Synthetic peptide
  Seed: RLNPMHQLL
RMNPMHQLH

SEQ ID NO: 167723 - protein, 9 aa, Artificial Sequence
  Description of Artificial Sequence: Synthetic peptide
  Seed: RLNPMHQLL
RMNPMHQLI

SEQ ID NO: 167724 - protein, 9 aa, Artificial Sequence
  Description of Artificial Sequence: Synthetic peptide
  Seed: RLNPMHQLL
RMNPMHQLK

SEQ ID NO: 167725 - protein, 9 aa, Artificial Sequence
  Description of Artificial Sequence: Synthetic peptide
  Seed: RLNPMHQLL
RMNPMHQLL

SEQ ID NO: 167726 - protein, 10 aa, Artificial Sequence
  Description of Artificial Sequence: Synthetic peptide
  Seed: RLNPMHQLLR
RMNPMHQLLH

SEQ ID NO: 167727 - protein, 10 aa, Artificial Sequence
  Description of Artificial Sequence: Synthetic peptide
  Seed: RLNPMHQLLR
RMNPMHQLLK

SEQ ID NO: 167728 - protein, 10 aa, Artificial Sequence
  Description of Artificial Sequence: Synthetic peptide
  Seed: RLNPMHQLLR
RMNPMHQLLR

SEQ ID NO: 167729 - protein, 11 aa, Artificial Sequence
  Description of Artificial Sequence: Synthetic peptide
  Seed: RLNPMHQLLRH
RMNPMHQLLRA

SEQ ID NO: 167730 - protein, 11 aa, Artificial Sequence
  Description of Artificial Sequence: Synthetic peptide
  Seed: RLNPMHQLLRH
RMNPMHQLLRC

SEQ ID NO: 167731 - protein, 11 aa, Artificial Sequence
  Description of Artificial Sequence: Synthetic peptide
  Seed: RLNPMHQLLRH
RMNPMHQLLRD

SEQ ID NO: 167732 - protein, 11 aa, Artificial Sequence
  Description of Artificial Sequence: Synthetic peptide
  Seed: RLNPMHQLLRH
RMNPMHQLLRE

SEQ ID NO: 167733 - protein, 11 aa, Artificial Sequence
  Description of Artificial Sequence: Synthetic peptide
  Seed: RLNPMHQLLRH
RMNPMHQLLRF

SEQ ID NO: 167734 - protein, 11 aa, Artificial Sequence
  Description of Artificial Sequence: Synthetic peptide
  Seed: RLNPMHQLLRH
RMNPMHQLLRG

SEQ ID NO: 167735 - protein, 11 aa, Artificial Sequence
  Description of Artificial Sequence: Synthetic peptide
  Seed: RLNPMHQLLRH
RMNPMHQLLRH

SEQ ID NO: 167736 - protein, 11 aa, Artificial Sequence
  Description of Artificial Sequence: Synthetic peptide
  Seed: RLNPMHQLLRH
RMNPMHQLLRI

SEQ ID NO: 167737 - protein, 11 aa, Artificial Sequence
  Description of Artificial Sequence: Synthetic peptide
  Seed: RLNPMHQLLRH
RMNPMHQLLRK

SEQ ID NO: 167738 - protein, 11 aa, Artificial Sequence
  Description of Artificial Sequence: Synthetic peptide
  Seed: RLNPMHQLLRH
RMNPMHQLLRL

SEQ ID NO: 167739 - protein, 11 aa, Artificial Sequence
  Description of Artificial Sequence: Synthetic peptide
  Seed: RLNPMHQLLRH
RMNPMHQLLRM

SEQ ID NO: 167740 - protein, 11 aa, Artificial Sequence
  Description of Artificial Sequence: Synthetic peptide
  Seed: RLNPMHQLLRH
RMNPMHQLLRN

SEQ ID NO: 167741 - protein, 11 aa, Artificial Sequence
  Description of Artificial Sequence: Synthetic peptide
  Seed: RLNPMHQLLRH
RMNPMHQLLRP

SEQ ID NO: 167742 - protein, 11 aa, Artificial Sequence
  Description of Artificial Sequence: Synthetic peptide
  Seed: RLNPMHQLLRH
RMNPMHQLLRQ

SEQ ID NO: 167743 - protein, 11 aa, Artificial Sequence
  Description of Artificial Sequence: Synthetic peptide
  Seed: RLNPMHQLLRH
RMNPMHQLLRR

SEQ ID NO: 167744 - protein, 11 aa, Artificial Sequence
  Description of Artificial Sequence: Synthetic peptide
  Seed: RLNPMHQLLRH
RMNPMHQLLRS

SEQ ID NO: 167745 - protein, 11 aa, Artificial Sequence
  Description of Artificial Sequence: Synthetic peptide
  Seed: RLNPMHQLLRH
RMNPMHQLLRT

SEQ ID NO: 167746 - protein, 11 aa, Artificial Sequence
  Description of Artificial Sequence: Synthetic peptide
  Seed: RLNPMHQLLRH
RMNPMHQLLRV

SEQ ID NO: 167747 - protein, 11 aa, Artificial Sequence
  Description of Artificial Sequence: Synthetic peptide
  Seed: RLNPMHQLLRH
RMNPMHQLLRW

SEQ ID NO: 167748 - protein, 11 aa, Artificial Sequence
  Description of Artificial Sequence: Synthetic peptide
  Seed: RLNPMHQLLRH
RMNPMHQLLRY

SEQ ID NO: 167749 - protein, 10 aa, Artificial Sequence
  Description of Artificial Sequence: Synthetic peptide
  Seed: RLNPMHQLLR
RMNPMHQLLY

SEQ ID NO: 167750 - protein, 9 aa, Artificial Sequence
  Description of Artificial Sequence: Synthetic peptide
  Seed: RLNPMHQLL
RMNPMHQLM

SEQ ID NO: 167751 - protein, 9 aa, Artificial Sequence
  Description of Artificial Sequence: Synthetic peptide
  Seed: RLNPMHQLL
RMNPMHQLN

SEQ ID NO: 167752 - protein, 9 aa, Artificial Sequence
  Description of Artificial Sequence: Synthetic peptide
  Seed: RLNPMHQLL
RMNPMHQLP

SEQ ID NO: 167753 - protein, 9 aa, Artificial Sequence
  Description of Artificial Sequence: Synthetic peptide
  Seed: RLNPMHQLL
RMNPMHQLQ

SEQ ID NO: 167754 - protein, 9 aa, Artificial Sequence
  Description of Artificial Sequence: Synthetic peptide
  Seed: RLNPMHQLL
RMNPMHQLR

SEQ ID NO: 167755 - protein, 9 aa, Artificial Sequence
  Description of Artificial Sequence: Synthetic peptide
  Seed: RLNPMHQLL
RMNPMHQLS

SEQ ID NO: 167756 - protein, 9 aa, Artificial Sequence
  Description of Artificial Sequence: Synthetic peptide
  Seed: RLNPMHQLL
RMNPMHQLT

SEQ ID NO: 167757 - protein, 9 aa, Artificial Sequence
  Description of Artificial Sequence: Synthetic peptide
  Seed: RLNPMHQLL
RMNPMHQLV

SEQ ID NO: 167758 - protein, 9 aa, Artificial Sequence
  Description of Artificial Sequence: Synthetic peptide
  Seed: RLNPMHQLL
RMNPMHQLW

SEQ ID NO: 167759 - protein, 9 aa, Artificial Sequence
  Description of Artificial Sequence: Synthetic peptide
  Seed: RLNPMHQLL
RMNPMHQLY

SEQ ID NO: 167760 - protein, 8 aa, Artificial Sequence
  Description of Artificial Sequence: Synthetic peptide
  Seed: RLNPMHQL
RMNPMHQV

SEQ ID NO: 167761 - protein, 9 aa, Artificial Sequence
  Description of Artificial Sequence: Synthetic peptide
  Seed: RANQRLNPM
RMNQRLNPA

SEQ ID NO: 167762 - protein, 9 aa, Artificial Sequence
  Description of Artificial Sequence: Synthetic peptide
  Seed: RANQRLNPM
RMNQRLNPC

SEQ ID NO: 167763 - protein, 9 aa, Artificial Sequence
  Description of Artificial Sequence: Synthetic peptide
  Seed: RANQRLNPM
RMNQRLNPF

SEQ ID NO: 167764 - protein, 9 aa, Artificial Sequence
  Description of Artificial Sequence: Synthetic peptide
  Seed: RANQRLNPM
RMNQRLNPG

SEQ ID NO: 167765 - protein, 9 aa, Artificial Sequence
  Description of Artificial Sequence: Synthetic peptide
  Seed: RANQRLNPM
RMNQRLNPH

SEQ ID NO: 167766 - protein, 9 aa, Artificial Sequence
  Description of Artificial Sequence: Synthetic peptide
  Seed: RANQRLNPM
RMNQRLNPI

SEQ ID NO: 167767 - protein, 9 aa, Artificial Sequence
  Description of Artificial Sequence: Synthetic peptide
  Seed: RANQRLNPM
RMNQRLNPK

SEQ ID NO: 167768 - protein, 9 aa, Artificial Sequence
  Description of Artificial Sequence: Synthetic peptide
  Seed: RANQRLNPM
RMNQRLNPL

SEQ ID NO: 167769 - protein, 9 aa, Artificial Sequence
  Description of Artificial Sequence: Synthetic peptide
  Seed: RANQRLNPM
RMNQRLNPM

SEQ ID NO: 167770 - protein, 9 aa, Artificial Sequence
  Description of Artificial Sequence: Synthetic peptide
  Seed: RANQRLNPM
RMNQRLNPN

SEQ ID NO: 167771 - protein, 9 aa, Artificial Sequence
  Description of Artificial Sequence: Synthetic peptide
  Seed: RANQRLNPM
RMNQRLNPP

SEQ ID NO: 167772 - protein, 9 aa, Artificial Sequence
  Description of Artificial Sequence: Synthetic peptide
  Seed: RANQRLNPM
RMNQRLNPQ

SEQ ID NO: 167773 - protein, 9 aa, Artificial Sequence
  Description of Artificial Sequence: Synthetic peptide
  Seed: RANQRLNPM
RMNQRLNPR

SEQ ID NO: 167774 - protein, 9 aa, Artificial Sequence
  Description of Artificial Sequence: Synthetic peptide
  Seed: RANQRLNPM
RMNQRLNPS

SEQ ID NO: 167775 - protein, 9 aa, Artificial Sequence
  Description of Artificial Sequence: Synthetic peptide
  Seed: RANQRLNPM
RMNQRLNPT

SEQ ID NO: 167776 - protein, 9 aa, Artificial Sequence
  Description of Artificial Sequence: Synthetic peptide
  Seed: RANQRLNPM
RMNQRLNPV

SEQ ID NO: 167777 - protein, 9 aa, Artificial Sequence
  Description of Artificial Sequence: Synthetic peptide
  Seed: RANQRLNPM
RMNQRLNPW

SEQ ID NO: 167778 - protein, 9 aa, Artificial Sequence
  Description of Artificial Sequence: Synthetic peptide
  Seed: RANQRLNPM
RMNQRLNPY

SEQ ID NO: 167779 - protein, 9 aa, Artificial Sequence
  Description of Artificial Sequence: Synthetic peptide
  Seed: RMKWMMAMK
RNKWMMAMA

SEQ ID NO: 167780 - protein, 9 aa, Artificial Sequence
  Description of Artificial Sequence: Synthetic peptide
  Seed: RMKWMMAMK
RNKWMMAMG

SEQ ID NO: 167781 - protein, 9 aa, Artificial Sequence
  Description of Artificial Sequence: Synthetic peptide
  Seed: RMKWMMAMK
RNKWMMAMI

SEQ ID NO: 167782 - protein, 9 aa, Artificial Sequence
  Description of Artificial Sequence: Synthetic peptide
  Seed: RMKWMMAMK
RNKWMMAMK

SEQ ID NO: 167783 - protein, 10 aa, Artificial Sequence
  Description of Artificial Sequence: Synthetic peptide
  Seed: RMKWMMAMKY
RNKWMMAMKA

SEQ ID NO: 167784 - protein, 10 aa, Artificial Sequence
  Description of Artificial Sequence: Synthetic peptide
  Seed: RMKWMMAMKY
RNKWMMAMKF

SEQ ID NO: 167785 - protein, 10 aa, Artificial Sequence
  Description of Artificial Sequence: Synthetic peptide
  Seed: RMKWMMAMKY
RNKWMMAMKK

SEQ ID NO: 167786 - protein, 10 aa, Artificial Sequence
  Description of Artificial Sequence: Synthetic peptide
  Seed: RMKWMMAMKY
RNKWMMAMKL

SEQ ID NO: 167787 - protein, 10 aa, Artificial Sequence
  Description of Artificial Sequence: Synthetic peptide
  Seed: RMKWMMAMKY
RNKWMMAMKM

SEQ ID NO: 167788 - protein, 10 aa, Artificial Sequence
  Description of Artificial Sequence: Synthetic peptide
  Seed: RMKWMMAMKY
RNKWMMAMKR

SEQ ID NO: 167789 - protein, 10 aa, Artificial Sequence
  Description of Artificial Sequence: Synthetic peptide
  Seed: RMKWMMAMKY
RNKWMMAMKV

SEQ ID NO: 167790 - protein, 10 aa, Artificial Sequence
  Description of Artificial Sequence: Synthetic peptide
  Seed: RMKWMMAMKY
RNKWMMAMKY

SEQ ID NO: 167791 - protein, 9 aa, Artificial Sequence
  Description of Artificial Sequence: Synthetic peptide
  Seed: RMKWMMAMK
RNKWMMAML

SEQ ID NO: 167792 - protein, 9 aa, Artificial Sequence
  Description of Artificial Sequence: Synthetic peptide
  Seed: RMKWMMAMK
RNKWMMAMM

SEQ ID NO: 167793 - protein, 9 aa, Artificial Sequence
  Description of Artificial Sequence: Synthetic peptide
  Seed: RMKWMMAMK
RNKWMMAMR

SEQ ID NO: 167794 - protein, 9 aa, Artificial Sequence
  Description of Artificial Sequence: Synthetic peptide
  Seed: RMKWMMAMK
RNKWMMAMS

SEQ ID NO: 167795 - protein, 9 aa, Artificial Sequence
  Description of Artificial Sequence: Synthetic peptide
  Seed: RMKWMMAMK
RNKWMMAMV

SEQ ID NO: 167796 - protein, 9 aa, Artificial Sequence
  Description of Artificial Sequence: Synthetic peptide
  Seed: RMKWMMAMK
RNKWMMAMY

SEQ ID NO: 167797 - protein, 11 aa, Artificial Sequence
  Description of Artificial Sequence: Synthetic peptide
  Seed: RELVRKTRFLP
RNLVRKTRFLA

SEQ ID NO: 167798 - protein, 11 aa, Artificial Sequence
  Description of Artificial Sequence: Synthetic peptide
  Seed: RELVRKTRFLP
RNLVRKTRFLF

SEQ ID NO: 167799 - protein, 11 aa, Artificial Sequence
  Description of Artificial Sequence: Synthetic peptide
  Seed: RELVRKTRFLP
RNLVRKTRFLG

SEQ ID NO: 167800 - protein, 11 aa, Artificial Sequence
  Description of Artificial Sequence: Synthetic peptide
  Seed: RELVRKTRFLP
RNLVRKTRFLI

SEQ ID NO: 167801 - protein, 11 aa, Artificial Sequence
  Description of Artificial Sequence: Synthetic peptide
  Seed: RELVRKTRFLP
RNLVRKTRFLK

SEQ ID NO: 167802 - protein, 11 aa, Artificial Sequence
  Description of Artificial Sequence: Synthetic peptide
  Seed: RELVRKTRFLP
RNLVRKTRFLL

SEQ ID NO: 167803 - protein, 11 aa, Artificial Sequence
  Description of Artificial Sequence: Synthetic peptide
  Seed: RELVRKTRFLP
RNLVRKTRFLM

SEQ ID NO: 167804 - protein, 11 aa, Artificial Sequence
  Description of Artificial Sequence: Synthetic peptide
  Seed: RELVRKTRFLP
RNLVRKTRFLP

SEQ ID NO: 167805 - protein, 11 aa, Artificial Sequence
  Description of Artificial Sequence: Synthetic peptide
  Seed: RELVRKTRFLP
RNLVRKTRFLS

SEQ ID NO: 167806 - protein, 11 aa, Artificial Sequence
  Description of Artificial Sequence: Synthetic peptide
  Seed: RELVRKTRFLP
RNLVRKTRFLT

SEQ ID NO: 167807 - protein, 11 aa, Artificial Sequence
  Description of Artificial Sequence: Synthetic peptide
  Seed: RELVRKTRFLP
RNLVRKTRFLV

SEQ ID NO: 167808 - protein, 11 aa, Artificial Sequence
  Description of Artificial Sequence: Synthetic peptide
  Seed: RELVRKTRFLP
RNLVRKTRFLY

SEQ ID NO: 167809 - protein, 9 aa, Artificial Sequence
  Description of Artificial Sequence: Synthetic peptide
  Seed: RLNPMHQLL
RNNPMHQLA

SEQ ID NO: 167810 - protein, 9 aa, Artificial Sequence
  Description of Artificial Sequence: Synthetic peptide
  Seed: RLNPMHQLL
RNNPMHQLF

SEQ ID NO: 167811 - protein, 9 aa, Artificial Sequence
  Description of Artificial Sequence: Synthetic peptide
  Seed: RLNPMHQLL
RNNPMHQLI

SEQ ID NO: 167812 - protein, 9 aa, Artificial Sequence
  Description of Artificial Sequence: Synthetic peptide
  Seed: RLNPMHQLL
RNNPMHQLK

SEQ ID NO: 167813 - protein, 9 aa, Artificial Sequence
  Description of Artificial Sequence: Synthetic peptide
  Seed: RLNPMHQLL
RNNPMHQLL

SEQ ID NO: 167814 - protein, 10 aa, Artificial Sequence
  Description of Artificial Sequence: Synthetic peptide
  Seed: RLNPMHQLLR
RNNPMHQLLK

SEQ ID NO: 167815 - protein, 10 aa, Artificial Sequence
  Description of Artificial Sequence: Synthetic peptide
  Seed: RLNPMHQLLR
RNNPMHQLLR

SEQ ID NO: 167816 - protein, 11 aa, Artificial Sequence
  Description of Artificial Sequence: Synthetic peptide
  Seed: RLNPMHQLLRH
RNNPMHQLLRR

SEQ ID NO: 167817 - protein, 9 aa, Artificial Sequence
  Description of Artificial Sequence: Synthetic peptide
  Seed: RLNPMHQLL
RNNPMHQLM

SEQ ID NO: 167818 - protein, 9 aa, Artificial Sequence
  Description of Artificial Sequence: Synthetic peptide
  Seed: RLNPMHQLL
RNNPMHQLV

SEQ ID NO: 167819 - protein, 9 aa, Artificial Sequence
  Description of Artificial Sequence: Synthetic peptide
  Seed: RLNPMHQLL
RNNPMHQLY

SEQ ID NO: 167820 - protein, 9 aa, Artificial Sequence
  Description of Artificial Sequence: Synthetic peptide
  Seed: RANQRLNPM
RNNQRLNPA

SEQ ID NO: 167821 - protein, 9 aa, Artificial Sequence
  Description of Artificial Sequence: Synthetic peptide
  Seed: RANQRLNPM
RNNQRLNPF

SEQ ID NO: 167822 - protein, 9 aa, Artificial Sequence
  Description of Artificial Sequence: Synthetic peptide
  Seed: RANQRLNPM
RNNQRLNPI

SEQ ID NO: 167823 - protein, 9 aa, Artificial Sequence
  Description of Artificial Sequence: Synthetic peptide
  Seed: RANQRLNPM
RNNQRLNPK

SEQ ID NO: 167824 - protein, 9 aa, Artificial Sequence
  Description of Artificial Sequence: Synthetic peptide
  Seed: RANQRLNPM
RNNQRLNPL

SEQ ID NO: 167825 - protein, 9 aa, Artificial Sequence
  Description of Artificial Sequence: Synthetic peptide
  Seed: RANQRLNPM
RNNQRLNPM

SEQ ID NO: 167826 - protein, 9 aa, Artificial Sequence
  Description of Artificial Sequence: Synthetic peptide
  Seed: RANQRLNPM
RNNQRLNPV

SEQ ID NO: 167827 - protein, 9 aa, Artificial Sequence
  Description of Artificial Sequence: Synthetic peptide
  Seed: RANQRLNPM
RNNQRLNPY

SEQ ID NO: 167828 - protein, 8 aa, Artificial Sequence
  Description of Artificial Sequence: Synthetic peptide
  Seed: RMKWMMAM
RPKWMMAL

SEQ ID NO: 167829 - protein, 8 aa, Artificial Sequence
  Description of Artificial Sequence: Synthetic peptide
  Seed: RMKWMMAM
RPKWMMAM

SEQ ID NO: 167830 - protein, 9 aa, Artificial Sequence
  Description of Artificial Sequence: Synthetic peptide
  Seed: RMKWMMAMK
RPKWMMAMK

SEQ ID NO: 167831 - protein, 10 aa, Artificial Sequence
  Description of Artificial Sequence: Synthetic peptide
  Seed: RMKWMMAMKY
RPKWMMAMKF

SEQ ID NO: 167832 - protein, 10 aa, Artificial Sequence
  Description of Artificial Sequence: Synthetic peptide
  Seed: RMKWMMAMKY
RPKWMMAMKL

SEQ ID NO: 167833 - protein, 10 aa, Artificial Sequence
  Description of Artificial Sequence: Synthetic peptide
  Seed: RMKWMMAMKY
RPKWMMAMKM

SEQ ID NO: 167834 - protein, 10 aa, Artificial Sequence
  Description of Artificial Sequence: Synthetic peptide
  Seed: RMKWMMAMKY
RPKWMMAMKR

SEQ ID NO: 167835 - protein, 10 aa, Artificial Sequence
  Description of Artificial Sequence: Synthetic peptide
  Seed: RMKWMMAMKY
RPKWMMAMKY

SEQ ID NO: 167836 - protein, 9 aa, Artificial Sequence
  Description of Artificial Sequence: Synthetic peptide
  Seed: RMKWMMAMK
RPKWMMAMR

SEQ ID NO: 167837 - protein, 11 aa, Artificial Sequence
  Description of Artificial Sequence: Synthetic peptide
  Seed: RELVRKTRFLP
RPLVRKTRFLA

SEQ ID NO: 167838 - protein, 11 aa, Artificial Sequence
  Description of Artificial Sequence: Synthetic peptide
  Seed: RELVRKTRFLP
RPLVRKTRFLF

SEQ ID NO: 167839 - protein, 11 aa, Artificial Sequence
  Description of Artificial Sequence: Synthetic peptide
  Seed: RELVRKTRFLP
RPLVRKTRFLG

SEQ ID NO: 167840 - protein, 11 aa, Artificial Sequence
  Description of Artificial Sequence: Synthetic peptide
  Seed: RELVRKTRFLP
RPLVRKTRFLI

SEQ ID NO: 167841 - protein, 11 aa, Artificial Sequence
  Description of Artificial Sequence: Synthetic peptide
  Seed: RELVRKTRFLP
RPLVRKTRFLK

SEQ ID NO: 167842 - protein, 11 aa, Artificial Sequence
  Description of Artificial Sequence: Synthetic peptide
  Seed: RELVRKTRFLP
RPLVRKTRFLL

SEQ ID NO: 167843 - protein, 11 aa, Artificial Sequence
  Description of Artificial Sequence: Synthetic peptide
  Seed: RELVRKTRFLP
RPLVRKTRFLM

SEQ ID NO: 167844 - protein, 11 aa, Artificial Sequence
  Description of Artificial Sequence: Synthetic peptide
  Seed: RELVRKTRFLP
RPLVRKTRFLP

SEQ ID NO: 167845 - protein, 11 aa, Artificial Sequence
  Description of Artificial Sequence: Synthetic peptide
  Seed: RELVRKTRFLP
RPLVRKTRFLS

SEQ ID NO: 167846 - protein, 11 aa, Artificial Sequence
  Description of Artificial Sequence: Synthetic peptide
  Seed: RELVRKTRFLP
RPLVRKTRFLT

SEQ ID NO: 167847 - protein, 11 aa, Artificial Sequence
  Description of Artificial Sequence: Synthetic peptide
  Seed: RELVRKTRFLP
RPLVRKTRFLV

SEQ ID NO: 167848 - protein, 11 aa, Artificial Sequence
  Description of Artificial Sequence: Synthetic peptide
  Seed: RELVRKTRFLP
RPLVRKTRFLY

SEQ ID NO: 167849 - protein, 9 aa, Artificial Sequence
  Description of Artificial Sequence: Synthetic peptide
  Seed: RLNPMHQLL
RPNPMHQLA

SEQ ID NO: 167850 - protein, 9 aa, Artificial Sequence
  Description of Artificial Sequence: Synthetic peptide
  Seed: RLNPMHQLL
RPNPMHQLC

SEQ ID NO: 167851 - protein, 9 aa, Artificial Sequence
  Description of Artificial Sequence: Synthetic peptide
  Seed: RLNPMHQLL
RPNPMHQLF

SEQ ID NO: 167852 - protein, 9 aa, Artificial Sequence
  Description of Artificial Sequence: Synthetic peptide
  Seed: RLNPMHQLL
RPNPMHQLG

SEQ ID NO: 167853 - protein, 9 aa, Artificial Sequence
  Description of Artificial Sequence: Synthetic peptide
  Seed: RLNPMHQLL
RPNPMHQLI

SEQ ID NO: 167854 - protein, 9 aa, Artificial Sequence
  Description of Artificial Sequence: Synthetic peptide
  Seed: RLNPMHQLL
RPNPMHQLL

SEQ ID NO: 167855 - protein, 10 aa, Artificial Sequence
  Description of Artificial Sequence: Synthetic peptide
  Seed: RLNPMHQLLR
RPNPMHQLLR

SEQ ID NO: 167856 - protein, 9 aa, Artificial Sequence
  Description of Artificial Sequence: Synthetic peptide
  Seed: RLNPMHQLL
RPNPMHQLM

SEQ ID NO: 167857 - protein, 9 aa, Artificial Sequence
  Description of Artificial Sequence: Synthetic peptide
  Seed: RLNPMHQLL
RPNPMHQLS

SEQ ID NO: 167858 - protein, 9 aa, Artificial Sequence
  Description of Artificial Sequence: Synthetic peptide
  Seed: RLNPMHQLL
RPNPMHQLT

SEQ ID NO: 167859 - protein, 9 aa, Artificial Sequence
  Description of Artificial Sequence: Synthetic peptide
  Seed: RLNPMHQLL
RPNPMHQLV

SEQ ID NO: 167860 - protein, 9 aa, Artificial Sequence
  Description of Artificial Sequence: Synthetic peptide
  Seed: RLNPMHQLL
RPNPMHQLW

SEQ ID NO: 167861 - protein, 9 aa, Artificial Sequence
  Description of Artificial Sequence: Synthetic peptide
  Seed: RLNPMHQLL
RPNPMHQLY

SEQ ID NO: 167862 - protein, 9 aa, Artificial Sequence
  Description of Artificial Sequence: Synthetic peptide
  Seed: RANQRLNPM
RPNQRLNPA

SEQ ID NO: 167863 - protein, 9 aa, Artificial Sequence
  Description of Artificial Sequence: Synthetic peptide
  Seed: RANQRLNPM
RPNQRLNPC

SEQ ID NO: 167864 - protein, 9 aa, Artificial Sequence
  Description of Artificial Sequence: Synthetic peptide
  Seed: RANQRLNPM
RPNQRLNPE

SEQ ID NO: 167865 - protein, 9 aa, Artificial Sequence
  Description of Artificial Sequence: Synthetic peptide
  Seed: RANQRLNPM
RPNQRLNPF

SEQ ID NO: 167866 - protein, 9 aa, Artificial Sequence
  Description of Artificial Sequence: Synthetic peptide
  Seed: RANQRLNPM
RPNQRLNPG

SEQ ID NO: 167867 - protein, 9 aa, Artificial Sequence
  Description of Artificial Sequence: Synthetic peptide
  Seed: RANQRLNPM
RPNQRLNPH

SEQ ID NO: 167868 - protein, 9 aa, Artificial Sequence
  Description of Artificial Sequence: Synthetic peptide
  Seed: RANQRLNPM
RPNQRLNPI

SEQ ID NO: 167869 - protein, 9 aa, Artificial Sequence
  Description of Artificial Sequence: Synthetic peptide
  Seed: RANQRLNPM
RPNQRLNPK

SEQ ID NO: 167870 - protein, 9 aa, Artificial Sequence
  Description of Artificial Sequence: Synthetic peptide
  Seed: RANQRLNPM
RPNQRLNPL

SEQ ID NO: 167871 - protein, 9 aa, Artificial Sequence
  Description of Artificial Sequence: Synthetic peptide
  Seed: RANQRLNPM
RPNQRLNPN

SEQ ID NO: 167872 - protein, 9 aa, Artificial Sequence
  Description of Artificial Sequence: Synthetic peptide
  Seed: RANQRLNPM
RPNQRLNPP

SEQ ID NO: 167873 - protein, 9 aa, Artificial Sequence
  Description of Artificial Sequence: Synthetic peptide
  Seed: RANQRLNPM
RPNQRLNPQ

SEQ ID NO: 167874 - protein, 9 aa, Artificial Sequence
  Description of Artificial Sequence: Synthetic peptide
  Seed: RANQRLNPM
RPNQRLNPS

SEQ ID NO: 167875 - protein, 9 aa, Artificial Sequence
  Description of Artificial Sequence: Synthetic peptide
  Seed: RANQRLNPM
RPNQRLNPT

SEQ ID NO: 167876 - protein, 9 aa, Artificial Sequence
  Description of Artificial Sequence: Synthetic peptide
  Seed: RANQRLNPM
RPNQRLNPW

SEQ ID NO: 167877 - protein, 9 aa, Artificial Sequence
  Description of Artificial Sequence: Synthetic peptide
  Seed: RANQRLNPM
RPNQRLNPY

SEQ ID NO: 167878 - protein, 8 aa, Artificial Sequence
  Description of Artificial Sequence: Synthetic peptide
  Seed: RMKWMMAM
RQKWMMAA

SEQ ID NO: 167879 - protein, 8 aa, Artificial Sequence
  Description of Artificial Sequence: Synthetic peptide
  Seed: RMKWMMAM
RQKWMMAF

SEQ ID NO: 167880 - protein, 8 aa, Artificial Sequence
  Description of Artificial Sequence: Synthetic peptide
  Seed: RMKWMMAM
RQKWMMAH

SEQ ID NO: 167881 - protein, 8 aa, Artificial Sequence
  Description of Artificial Sequence: Synthetic peptide
  Seed: RMKWMMAM
RQKWMMAI

SEQ ID NO: 167882 - protein, 8 aa, Artificial Sequence
  Description of Artificial Sequence: Synthetic peptide
  Seed: RMKWMMAM
RQKWMMAL

SEQ ID NO: 167883 - protein, 8 aa, Artificial Sequence
  Description of Artificial Sequence: Synthetic peptide
  Seed: RMKWMMAM
RQKWMMAM

SEQ ID NO: 167884 - protein, 9 aa, Artificial Sequence
  Description of Artificial Sequence: Synthetic peptide
  Seed: RMKWMMAMK
RQKWMMAMA

SEQ ID NO: 167885 - protein, 9 aa, Artificial Sequence
  Description of Artificial Sequence: Synthetic peptide
  Seed: RMKWMMAMK
RQKWMMAMC

SEQ ID NO: 167886 - protein, 9 aa, Artificial Sequence
  Description of Artificial Sequence: Synthetic peptide
  Seed: RMKWMMAMK
RQKWMMAMG

SEQ ID NO: 167887 - protein, 9 aa, Artificial Sequence
  Description of Artificial Sequence: Synthetic peptide
  Seed: RMKWMMAMK
RQKWMMAMH

SEQ ID NO: 167888 - protein, 9 aa, Artificial Sequence
  Description of Artificial Sequence: Synthetic peptide
  Seed: RMKWMMAMK
RQKWMMAMI

SEQ ID NO: 167889 - protein, 9 aa, Artificial Sequence
  Description of Artificial Sequence: Synthetic peptide
  Seed: RMKWMMAMK
RQKWMMAMK

SEQ ID NO: 167890 - protein, 10 aa, Artificial Sequence
  Description of Artificial Sequence: Synthetic peptide
  Seed: RMKWMMAMKY
RQKWMMAMKA

SEQ ID NO: 167891 - protein, 10 aa, Artificial Sequence
  Description of Artificial Sequence: Synthetic peptide
  Seed: RMKWMMAMKY
RQKWMMAMKC

SEQ ID NO: 167892 - protein, 10 aa, Artificial Sequence
  Description of Artificial Sequence: Synthetic peptide
  Seed: RMKWMMAMKY
RQKWMMAMKF

SEQ ID NO: 167893 - protein, 10 aa, Artificial Sequence
  Description of Artificial Sequence: Synthetic peptide
  Seed: RMKWMMAMKY
RQKWMMAMKG

SEQ ID NO: 167894 - protein, 10 aa, Artificial Sequence
  Description of Artificial Sequence: Synthetic peptide
  Seed: RMKWMMAMKY
RQKWMMAMKH

SEQ ID NO: 167895 - protein, 10 aa, Artificial Sequence
  Description of Artificial Sequence: Synthetic peptide
  Seed: RMKWMMAMKY
RQKWMMAMKI

SEQ ID NO: 167896 - protein, 10 aa, Artificial Sequence
  Description of Artificial Sequence: Synthetic peptide
  Seed: RMKWMMAMKY
RQKWMMAMKK

SEQ ID NO: 167897 - protein, 10 aa, Artificial Sequence
  Description of Artificial Sequence: Synthetic peptide
  Seed: RMKWMMAMKY
RQKWMMAMKL

SEQ ID NO: 167898 - protein, 10 aa, Artificial Sequence
  Description of Artificial Sequence: Synthetic peptide
  Seed: RMKWMMAMKY
RQKWMMAMKM

SEQ ID NO: 167899 - protein, 10 aa, Artificial Sequence
  Description of Artificial Sequence: Synthetic peptide
  Seed: RMKWMMAMKY
RQKWMMAMKP

SEQ ID NO: 167900 - protein, 10 aa, Artificial Sequence
  Description of Artificial Sequence: Synthetic peptide
  Seed: RMKWMMAMKY
RQKWMMAMKR

SEQ ID NO: 167901 - protein, 10 aa, Artificial Sequence
  Description of Artificial Sequence: Synthetic peptide
  Seed: RMKWMMAMKY
RQKWMMAMKS

SEQ ID NO: 167902 - protein, 10 aa, Artificial Sequence
  Description of Artificial Sequence: Synthetic peptide
  Seed: RMKWMMAMKY
RQKWMMAMKT

SEQ ID NO: 167903 - protein, 10 aa, Artificial Sequence
  Description of Artificial Sequence: Synthetic peptide
  Seed: RMKWMMAMKY
RQKWMMAMKV

SEQ ID NO: 167904 - protein, 10 aa, Artificial Sequence
  Description of Artificial Sequence: Synthetic peptide
  Seed: RMKWMMAMKY
RQKWMMAMKW

SEQ ID NO: 167905 - protein, 10 aa, Artificial Sequence
  Description of Artificial Sequence: Synthetic peptide
  Seed: RMKWMMAMKY
RQKWMMAMKY

SEQ ID NO: 167906 - protein, 9 aa, Artificial Sequence
  Description of Artificial Sequence: Synthetic peptide
  Seed: RMKWMMAMK
RQKWMMAML

SEQ ID NO: 167907 - protein, 9 aa, Artificial Sequence
  Description of Artificial Sequence: Synthetic peptide
  Seed: RMKWMMAMK
RQKWMMAMM

SEQ ID NO: 167908 - protein, 9 aa, Artificial Sequence
  Description of Artificial Sequence: Synthetic peptide
  Seed: RMKWMMAMK
RQKWMMAMN

SEQ ID NO: 167909 - protein, 9 aa, Artificial Sequence
  Description of Artificial Sequence: Synthetic peptide
  Seed: RMKWMMAMK
RQKWMMAMP

SEQ ID NO: 167910 - protein, 9 aa, Artificial Sequence
  Description of Artificial Sequence: Synthetic peptide
  Seed: RMKWMMAMK
RQKWMMAMQ

SEQ ID NO: 167911 - protein, 9 aa, Artificial Sequence
  Description of Artificial Sequence: Synthetic peptide
  Seed: RMKWMMAMK
RQKWMMAMR

SEQ ID NO: 167912 - protein, 9 aa, Artificial Sequence
  Description of Artificial Sequence: Synthetic peptide
  Seed: RMKWMMAMK
RQKWMMAMS

SEQ ID NO: 167913 - protein, 9 aa, Artificial Sequence
  Description of Artificial Sequence: Synthetic peptide
  Seed: RMKWMMAMK
RQKWMMAMT

SEQ ID NO: 167914 - protein, 9 aa, Artificial Sequence
  Description of Artificial Sequence: Synthetic peptide
  Seed: RMKWMMAMK
RQKWMMAMV

SEQ ID NO: 167915 - protein, 9 aa, Artificial Sequence
  Description of Artificial Sequence: Synthetic peptide
  Seed: RMKWMMAMK
RQKWMMAMY

SEQ ID NO: 167916 - protein, 8 aa, Artificial Sequence
  Description of Artificial Sequence: Synthetic peptide
  Seed: RMKWMMAM
RQKWMMAV

SEQ ID NO: 167917 - protein, 8 aa, Artificial Sequence
  Description of Artificial Sequence: Synthetic peptide
  Seed: RMKWMMAM
RQKWMMAW

SEQ ID NO: 167918 - protein, 8 aa, Artificial Sequence
  Description of Artificial Sequence: Synthetic peptide
  Seed: RMKWMMAM
RQKWMMAY

SEQ ID NO: 167919 - protein, 9 aa, Artificial Sequence
  Description of Artificial Sequence: Synthetic peptide
  Seed: RELVRKTRF
RQLVRKTRF

SEQ ID NO: 167920 - protein, 11 aa, Artificial Sequence
  Description of Artificial Sequence: Synthetic peptide
  Seed: RELVRKTRFLP
RQLVRKTRFLA

SEQ ID NO: 167921 - protein, 11 aa, Artificial Sequence
  Description of Artificial Sequence: Synthetic peptide
  Seed: RELVRKTRFLP
RQLVRKTRFLF

SEQ ID NO: 167922 - protein, 11 aa, Artificial Sequence
  Description of Artificial Sequence: Synthetic peptide
  Seed: RELVRKTRFLP
RQLVRKTRFLG

SEQ ID NO: 167923 - protein, 11 aa, Artificial Sequence
  Description of Artificial Sequence: Synthetic peptide
  Seed: RELVRKTRFLP
RQLVRKTRFLI

SEQ ID NO: 167924 - protein, 11 aa, Artificial Sequence
  Description of Artificial Sequence: Synthetic peptide
  Seed: RELVRKTRFLP
RQLVRKTRFLK

SEQ ID NO: 167925 - protein, 11 aa, Artificial Sequence
  Description of Artificial Sequence: Synthetic peptide
  Seed: RELVRKTRFLP
RQLVRKTRFLL

SEQ ID NO: 167926 - protein, 11 aa, Artificial Sequence
  Description of Artificial Sequence: Synthetic peptide
  Seed: RELVRKTRFLP
RQLVRKTRFLM

SEQ ID NO: 167927 - protein, 11 aa, Artificial Sequence
  Description of Artificial Sequence: Synthetic peptide
  Seed: RELVRKTRFLP
RQLVRKTRFLP

SEQ ID NO: 167928 - protein, 11 aa, Artificial Sequence
  Description of Artificial Sequence: Synthetic peptide
  Seed: RELVRKTRFLP
RQLVRKTRFLS

SEQ ID NO: 167929 - protein, 11 aa, Artificial Sequence
  Description of Artificial Sequence: Synthetic peptide
  Seed: RELVRKTRFLP
RQLVRKTRFLT

SEQ ID NO: 167930 - protein, 11 aa, Artificial Sequence
  Description of Artificial Sequence: Synthetic peptide
  Seed: RELVRKTRFLP
RQLVRKTRFLV

SEQ ID NO: 167931 - protein, 11 aa, Artificial Sequence
  Description of Artificial Sequence: Synthetic peptide
  Seed: RELVRKTRFLP
RQLVRKTRFLY

SEQ ID NO: 167932 - protein, 9 aa, Artificial Sequence
  Description of Artificial Sequence: Synthetic peptide
  Seed: RELVRKTRF
RQLVRKTRL

SEQ ID NO: 167933 - protein, 9 aa, Artificial Sequence
  Description of Artificial Sequence: Synthetic peptide
  Seed: RELVRKTRF
RQLVRKTRM

SEQ ID NO: 167934 - protein, 9 aa, Artificial Sequence
  Description of Artificial Sequence: Synthetic peptide
  Seed: RELVRKTRF
RQLVRKTRY

SEQ ID NO: 167935 - protein, 9 aa, Artificial Sequence
  Description of Artificial Sequence: Synthetic peptide
  Seed: RLNPMHQLL
RQNPMHQLA

SEQ ID NO: 167936 - protein, 9 aa, Artificial Sequence
  Description of Artificial Sequence: Synthetic peptide
  Seed: RLNPMHQLL
RQNPMHQLC

SEQ ID NO: 167937 - protein, 9 aa, Artificial Sequence
  Description of Artificial Sequence: Synthetic peptide
  Seed: RLNPMHQLL
RQNPMHQLF

SEQ ID NO: 167938 - protein, 9 aa, Artificial Sequence
  Description of Artificial Sequence: Synthetic peptide
  Seed: RLNPMHQLL
RQNPMHQLG

SEQ ID NO: 167939 - protein, 9 aa, Artificial Sequence
  Description of Artificial Sequence: Synthetic peptide
  Seed: RLNPMHQLL
RQNPMHQLH

SEQ ID NO: 167940 - protein, 9 aa, Artificial Sequence
  Description of Artificial Sequence: Synthetic peptide
  Seed: RLNPMHQLL
RQNPMHQLI

SEQ ID NO: 167941 - protein, 9 aa, Artificial Sequence
  Description of Artificial Sequence: Synthetic peptide
  Seed: RLNPMHQLL
RQNPMHQLK

SEQ ID NO: 167942 - protein, 9 aa, Artificial Sequence
  Description of Artificial Sequence: Synthetic peptide
  Seed: RLNPMHQLL
RQNPMHQLL

SEQ ID NO: 167943 - protein, 10 aa, Artificial Sequence
  Description of Artificial Sequence: Synthetic peptide
  Seed: RLNPMHQLLR
RQNPMHQLLK

SEQ ID NO: 167944 - protein, 10 aa, Artificial Sequence
  Description of Artificial Sequence: Synthetic peptide
  Seed: RLNPMHQLLR
RQNPMHQLLR

SEQ ID NO: 167945 - protein, 11 aa, Artificial Sequence
  Description of Artificial Sequence: Synthetic peptide
  Seed: RLNPMHQLLRH
RQNPMHQLLRA

SEQ ID NO: 167946 - protein, 11 aa, Artificial Sequence
  Description of Artificial Sequence: Synthetic peptide
  Seed: RLNPMHQLLRH
RQNPMHQLLRC

SEQ ID NO: 167947 - protein, 11 aa, Artificial Sequence
  Description of Artificial Sequence: Synthetic peptide
  Seed: RLNPMHQLLRH
RQNPMHQLLRD

SEQ ID NO: 167948 - protein, 11 aa, Artificial Sequence
  Description of Artificial Sequence: Synthetic peptide
  Seed: RLNPMHQLLRH
RQNPMHQLLRE

SEQ ID NO: 167949 - protein, 11 aa, Artificial Sequence
  Description of Artificial Sequence: Synthetic peptide
  Seed: RLNPMHQLLRH
RQNPMHQLLRF

SEQ ID NO: 167950 - protein, 11 aa, Artificial Sequence
  Description of Artificial Sequence: Synthetic peptide
  Seed: RLNPMHQLLRH
RQNPMHQLLRG

SEQ ID NO: 167951 - protein, 11 aa, Artificial Sequence
  Description of Artificial Sequence: Synthetic peptide
  Seed: RLNPMHQLLRH
RQNPMHQLLRH

SEQ ID NO: 167952 - protein, 11 aa, Artificial Sequence
  Description of Artificial Sequence: Synthetic peptide
  Seed: RLNPMHQLLRH
RQNPMHQLLRI

SEQ ID NO: 167953 - protein, 11 aa, Artificial Sequence
  Description of Artificial Sequence: Synthetic peptide
  Seed: RLNPMHQLLRH
RQNPMHQLLRK

SEQ ID NO: 167954 - protein, 11 aa, Artificial Sequence
  Description of Artificial Sequence: Synthetic peptide
  Seed: RLNPMHQLLRH
RQNPMHQLLRL

SEQ ID NO: 167955 - protein, 11 aa, Artificial Sequence
  Description of Artificial Sequence: Synthetic peptide
  Seed: RLNPMHQLLRH
RQNPMHQLLRM

SEQ ID NO: 167956 - protein, 11 aa, Artificial Sequence
  Description of Artificial Sequence: Synthetic peptide
  Seed: RLNPMHQLLRH
RQNPMHQLLRN

SEQ ID NO: 167957 - protein, 11 aa, Artificial Sequence
  Description of Artificial Sequence: Synthetic peptide
  Seed: RLNPMHQLLRH
RQNPMHQLLRP

SEQ ID NO: 167958 - protein, 11 aa, Artificial Sequence
  Description of Artificial Sequence: Synthetic peptide
  Seed: RLNPMHQLLRH
RQNPMHQLLRQ

SEQ ID NO: 167959 - protein, 11 aa, Artificial Sequence
  Description of Artificial Sequence: Synthetic peptide
  Seed: RLNPMHQLLRH
RQNPMHQLLRR

SEQ ID NO: 167960 - protein, 11 aa, Artificial Sequence
  Description of Artificial Sequence: Synthetic peptide
  Seed: RLNPMHQLLRH
RQNPMHQLLRS

SEQ ID NO: 167961 - protein, 11 aa, Artificial Sequence
  Description of Artificial Sequence: Synthetic peptide
  Seed: RLNPMHQLLRH
RQNPMHQLLRT

SEQ ID NO: 167962 - protein, 11 aa, Artificial Sequence
  Description of Artificial Sequence: Synthetic peptide
  Seed: RLNPMHQLLRH
RQNPMHQLLRV

SEQ ID NO: 167963 - protein, 11 aa, Artificial Sequence
  Description of Artificial Sequence: Synthetic peptide
  Seed: RLNPMHQLLRH
RQNPMHQLLRW

SEQ ID NO: 167964 - protein, 11 aa, Artificial Sequence
  Description of Artificial Sequence: Synthetic peptide
  Seed: RLNPMHQLLRH
RQNPMHQLLRY

SEQ ID NO: 167965 - protein, 10 aa, Artificial Sequence
  Description of Artificial Sequence: Synthetic peptide
  Seed: RLNPMHQLLR
RQNPMHQLLY

SEQ ID NO: 167966 - protein, 9 aa, Artificial Sequence
  Description of Artificial Sequence: Synthetic peptide
  Seed: RLNPMHQLL
RQNPMHQLM

SEQ ID NO: 167967 - protein, 9 aa, Artificial Sequence
  Description of Artificial Sequence: Synthetic peptide
  Seed: RLNPMHQLL
RQNPMHQLQ

SEQ ID NO: 167968 - protein, 9 aa, Artificial Sequence
  Description of Artificial Sequence: Synthetic peptide
  Seed: RLNPMHQLL
RQNPMHQLR

SEQ ID NO: 167969 - protein, 9 aa, Artificial Sequence
  Description of Artificial Sequence: Synthetic peptide
  Seed: RLNPMHQLL
RQNPMHQLS

SEQ ID NO: 167970 - protein, 9 aa, Artificial Sequence
  Description of Artificial Sequence: Synthetic peptide
  Seed: RLNPMHQLL
RQNPMHQLT

SEQ ID NO: 167971 - protein, 9 aa, Artificial Sequence
  Description of Artificial Sequence: Synthetic peptide
  Seed: RLNPMHQLL
RQNPMHQLV

SEQ ID NO: 167972 - protein, 9 aa, Artificial Sequence
  Description of Artificial Sequence: Synthetic peptide
  Seed: RLNPMHQLL
RQNPMHQLW

SEQ ID NO: 167973 - protein, 9 aa, Artificial Sequence
  Description of Artificial Sequence: Synthetic peptide
  Seed: RLNPMHQLL
RQNPMHQLY

SEQ ID NO: 167974 - protein, 9 aa, Artificial Sequence
  Description of Artificial Sequence: Synthetic peptide
  Seed: RANQRLNPM
RQNQRLNPA

SEQ ID NO: 167975 - protein, 9 aa, Artificial Sequence
  Description of Artificial Sequence: Synthetic peptide
  Seed: RANQRLNPM
RQNQRLNPC

SEQ ID NO: 167976 - protein, 9 aa, Artificial Sequence
  Description of Artificial Sequence: Synthetic peptide
  Seed: RANQRLNPM
RQNQRLNPF

SEQ ID NO: 167977 - protein, 9 aa, Artificial Sequence
  Description of Artificial Sequence: Synthetic peptide
  Seed: RANQRLNPM
RQNQRLNPG

SEQ ID NO: 167978 - protein, 9 aa, Artificial Sequence
  Description of Artificial Sequence: Synthetic peptide
  Seed: RANQRLNPM
RQNQRLNPH

SEQ ID NO: 167979 - protein, 9 aa, Artificial Sequence
  Description of Artificial Sequence: Synthetic peptide
  Seed: RANQRLNPM
RQNQRLNPI

SEQ ID NO: 167980 - protein, 9 aa, Artificial Sequence
  Description of Artificial Sequence: Synthetic peptide
  Seed: RANQRLNPM
RQNQRLNPK

SEQ ID NO: 167981 - protein, 9 aa, Artificial Sequence
  Description of Artificial Sequence: Synthetic peptide
  Seed: RANQRLNPM
RQNQRLNPL

SEQ ID NO: 167982 - protein, 9 aa, Artificial Sequence
  Description of Artificial Sequence: Synthetic peptide
  Seed: RANQRLNPM
RQNQRLNPM

SEQ ID NO: 167983 - protein, 9 aa, Artificial Sequence
  Description of Artificial Sequence: Synthetic peptide
  Seed: RANQRLNPM
RQNQRLNPR

SEQ ID NO: 167984 - protein, 9 aa, Artificial Sequence
  Description of Artificial Sequence: Synthetic peptide
  Seed: RANQRLNPM
RQNQRLNPS

SEQ ID NO: 167985 - protein, 9 aa, Artificial Sequence
  Description of Artificial Sequence: Synthetic peptide
  Seed: RANQRLNPM
RQNQRLNPT

SEQ ID NO: 167986 - protein, 9 aa, Artificial Sequence
  Description of Artificial Sequence: Synthetic peptide
  Seed: RANQRLNPM
RQNQRLNPV

SEQ ID NO: 167987 - protein, 9 aa, Artificial Sequence
  Description of Artificial Sequence: Synthetic peptide
  Seed: RANQRLNPM
RQNQRLNPW

SEQ ID NO: 167988 - protein, 9 aa, Artificial Sequence
  Description of Artificial Sequence: Synthetic peptide
  Seed: RANQRLNPM
RQNQRLNPY

SEQ ID NO: 167989 - protein, 9 aa, Artificial Sequence
  Description of Artificial Sequence: Synthetic peptide
  Seed: RMKWMMAMK
RRKWMMAMK

SEQ ID NO: 167990 - protein, 10 aa, Artificial Sequence
  Description of Artificial Sequence: Synthetic peptide
  Seed: RMKWMMAMKY
RRKWMMAMKF

SEQ ID NO: 167991 - protein, 10 aa, Artificial Sequence
  Description of Artificial Sequence: Synthetic peptide
  Seed: RMKWMMAMKY
RRKWMMAMKL

SEQ ID NO: 167992 - protein, 10 aa, Artificial Sequence
  Description of Artificial Sequence: Synthetic peptide
  Seed: RMKWMMAMKY
RRKWMMAMKM

SEQ ID NO: 167993 - protein, 10 aa, Artificial Sequence
  Description of Artificial Sequence: Synthetic peptide
  Seed: RMKWMMAMKY
RRKWMMAMKR

SEQ ID NO: 167994 - protein, 10 aa, Artificial Sequence
  Description of Artificial Sequence: Synthetic peptide
  Seed: RMKWMMAMKY
RRKWMMAMKY

SEQ ID NO: 167995 - protein, 9 aa, Artificial Sequence
  Description of Artificial Sequence: Synthetic peptide
  Seed: RMKWMMAMK
RRKWMMAMR

SEQ ID NO: 167996 - protein, 11 aa, Artificial Sequence
  Description of Artificial Sequence: Synthetic peptide
  Seed: RELVRKTRFLP
RRLVRKTRFLA

SEQ ID NO: 167997 - protein, 11 aa, Artificial Sequence
  Description of Artificial Sequence: Synthetic peptide
  Seed: RELVRKTRFLP
RRLVRKTRFLF

SEQ ID NO: 167998 - protein, 11 aa, Artificial Sequence
  Description of Artificial Sequence: Synthetic peptide
  Seed: RELVRKTRFLP
RRLVRKTRFLG

SEQ ID NO: 167999 - protein, 11 aa, Artificial Sequence
  Description of Artificial Sequence: Synthetic peptide
  Seed: RELVRKTRFLP
RRLVRKTRFLI

SEQ ID NO: 168000 - protein, 11 aa, Artificial Sequence
  Description of Artificial Sequence: Synthetic peptide
  Seed: RELVRKTRFLP
RRLVRKTRFLK

SEQ ID NO: 168001 - protein, 11 aa, Artificial Sequence
  Description of Artificial Sequence: Synthetic peptide
  Seed: RELVRKTRFLP
RRLVRKTRFLL

SEQ ID NO: 168002 - protein, 11 aa, Artificial Sequence
  Description of Artificial Sequence: Synthetic peptide
  Seed: RELVRKTRFLP
RRLVRKTRFLM

SEQ ID NO: 168003 - protein, 11 aa, Artificial Sequence
  Description of Artificial Sequence: Synthetic peptide
  Seed: RELVRKTRFLP
RRLVRKTRFLP

SEQ ID NO: 168004 - protein, 11 aa, Artificial Sequence
  Description of Artificial Sequence: Synthetic peptide
  Seed: RELVRKTRFLP
RRLVRKTRFLS

SEQ ID NO: 168005 - protein, 11 aa, Artificial Sequence
  Description of Artificial Sequence: Synthetic peptide
  Seed: RELVRKTRFLP
RRLVRKTRFLT

SEQ ID NO: 168006 - protein, 11 aa, Artificial Sequence
  Description of Artificial Sequence: Synthetic peptide
  Seed: RELVRKTRFLP
RRLVRKTRFLV

SEQ ID NO: 168007 - protein, 11 aa, Artificial Sequence
  Description of Artificial Sequence: Synthetic peptide
  Seed: RELVRKTRFLP
RRLVRKTRFLY

SEQ ID NO: 168008 - protein, 9 aa, Artificial Sequence
  Description of Artificial Sequence: Synthetic peptide
  Seed: RELVRKTRF
RRLVRKTRY

SEQ ID NO: 168009 - protein, 9 aa, Artificial Sequence
  Description of Artificial Sequence: Synthetic peptide
  Seed: RLNPMHQLL
RRNPMHQLA

SEQ ID NO: 168010 - protein, 9 aa, Artificial Sequence
  Description of Artificial Sequence: Synthetic peptide
  Seed: RLNPMHQLL
RRNPMHQLC

SEQ ID NO: 168011 - protein, 9 aa, Artificial Sequence
  Description of Artificial Sequence: Synthetic peptide
  Seed: RLNPMHQLL
RRNPMHQLF

SEQ ID NO: 168012 - protein, 9 aa, Artificial Sequence
  Description of Artificial Sequence: Synthetic peptide
  Seed: RLNPMHQLL
RRNPMHQLG

SEQ ID NO: 168013 - protein, 9 aa, Artificial Sequence
  Description of Artificial Sequence: Synthetic peptide
  Seed: RLNPMHQLL
RRNPMHQLI

SEQ ID NO: 168014 - protein, 9 aa, Artificial Sequence
  Description of Artificial Sequence: Synthetic peptide
  Seed: RLNPMHQLL
RRNPMHQLK

SEQ ID NO: 168015 - protein, 9 aa, Artificial Sequence
  Description of Artificial Sequence: Synthetic peptide
  Seed: RLNPMHQLL
RRNPMHQLL

SEQ ID NO: 168016 - protein, 10 aa, Artificial Sequence
  Description of Artificial Sequence: Synthetic peptide
  Seed: RLNPMHQLLR
RRNPMHQLLR

SEQ ID NO: 168017 - protein, 9 aa, Artificial Sequence
  Description of Artificial Sequence: Synthetic peptide
  Seed: RLNPMHQLL
RRNPMHQLM

SEQ ID NO: 168018 - protein, 9 aa, Artificial Sequence
  Description of Artificial Sequence: Synthetic peptide
  Seed: RLNPMHQLL
RRNPMHQLP

SEQ ID NO: 168019 - protein, 9 aa, Artificial Sequence
  Description of Artificial Sequence: Synthetic peptide
  Seed: RLNPMHQLL
RRNPMHQLS

SEQ ID NO: 168020 - protein, 9 aa, Artificial Sequence
  Description of Artificial Sequence: Synthetic peptide
  Seed: RLNPMHQLL
RRNPMHQLT

SEQ ID NO: 168021 - protein, 9 aa, Artificial Sequence
  Description of Artificial Sequence: Synthetic peptide
  Seed: RLNPMHQLL
RRNPMHQLV

SEQ ID NO: 168022 - protein, 9 aa, Artificial Sequence
  Description of Artificial Sequence: Synthetic peptide
  Seed: RLNPMHQLL
RRNPMHQLW

SEQ ID NO: 168023 - protein, 9 aa, Artificial Sequence
  Description of Artificial Sequence: Synthetic peptide
  Seed: RLNPMHQLL
RRNPMHQLY

SEQ ID NO: 168024 - protein, 9 aa, Artificial Sequence
  Description of Artificial Sequence: Synthetic peptide
  Seed: RANQRLNPM
RRNQRLNPF

SEQ ID NO: 168025 - protein, 9 aa, Artificial Sequence
  Description of Artificial Sequence: Synthetic peptide
  Seed: RANQRLNPM
RRNQRLNPK

SEQ ID NO: 168026 - protein, 9 aa, Artificial Sequence
  Description of Artificial Sequence: Synthetic peptide
  Seed: RANQRLNPM
RRNQRLNPL

SEQ ID NO: 168027 - protein, 9 aa, Artificial Sequence
  Description of Artificial Sequence: Synthetic peptide
  Seed: RANQRLNPM
RRNQRLNPM

SEQ ID NO: 168028 - protein, 9 aa, Artificial Sequence
  Description of Artificial Sequence: Synthetic peptide
  Seed: RANQRLNPM
RRNQRLNPY

SEQ ID NO: 168029 - protein, 8 aa, Artificial Sequence
  Description of Artificial Sequence: Synthetic peptide
  Seed: RMKWMMAM
RSKWMMAF

SEQ ID NO: 168030 - protein, 9 aa, Artificial Sequence
  Description of Artificial Sequence: Synthetic peptide
  Seed: RMKWMMAMK
RSKWMMAMA

SEQ ID NO: 168031 - protein, 9 aa, Artificial Sequence
  Description of Artificial Sequence: Synthetic peptide
  Seed: RMKWMMAMK
RSKWMMAMC

SEQ ID NO: 168032 - protein, 9 aa, Artificial Sequence
  Description of Artificial Sequence: Synthetic peptide
  Seed: RMKWMMAMK
RSKWMMAMD

SEQ ID NO: 168033 - protein, 9 aa, Artificial Sequence
  Description of Artificial Sequence: Synthetic peptide
  Seed: RMKWMMAMK
RSKWMMAME

SEQ ID NO: 168034 - protein, 9 aa, Artificial Sequence
  Description of Artificial Sequence: Synthetic peptide
  Seed: RMKWMMAMK
RSKWMMAMF

SEQ ID NO: 168035 - protein, 9 aa, Artificial Sequence
  Description of Artificial Sequence: Synthetic peptide
  Seed: RMKWMMAMK
RSKWMMAMG

SEQ ID NO: 168036 - protein, 9 aa, Artificial Sequence
  Description of Artificial Sequence: Synthetic peptide
  Seed: RMKWMMAMK
RSKWMMAMH

SEQ ID NO: 168037 - protein, 9 aa, Artificial Sequence
  Description of Artificial Sequence: Synthetic peptide
  Seed: RMKWMMAMK
RSKWMMAMI

SEQ ID NO: 168038 - protein, 10 aa, Artificial Sequence
  Description of Artificial Sequence: Synthetic peptide
  Seed: RMKWMMAMKY
RSKWMMAMKA

SEQ ID NO: 168039 - protein, 10 aa, Artificial Sequence
  Description of Artificial Sequence: Synthetic peptide
  Seed: RMKWMMAMKY
RSKWMMAMKC

SEQ ID NO: 168040 - protein, 10 aa, Artificial Sequence
  Description of Artificial Sequence: Synthetic peptide
  Seed: RMKWMMAMKY
RSKWMMAMKD

SEQ ID NO: 168041 - protein, 10 aa, Artificial Sequence
  Description of Artificial Sequence: Synthetic peptide
  Seed: RMKWMMAMKY
RSKWMMAMKE

SEQ ID NO: 168042 - protein, 10 aa, Artificial Sequence
  Description of Artificial Sequence: Synthetic peptide
  Seed: RMKWMMAMKY
RSKWMMAMKF

SEQ ID NO: 168043 - protein, 10 aa, Artificial Sequence
  Description of Artificial Sequence: Synthetic peptide
  Seed: RMKWMMAMKY
RSKWMMAMKG

SEQ ID NO: 168044 - protein, 10 aa, Artificial Sequence
  Description of Artificial Sequence: Synthetic peptide
  Seed: RMKWMMAMKY
RSKWMMAMKH

SEQ ID NO: 168045 - protein, 10 aa, Artificial Sequence
  Description of Artificial Sequence: Synthetic peptide
  Seed: RMKWMMAMKY
RSKWMMAMKI

SEQ ID NO: 168046 - protein, 10 aa, Artificial Sequence
  Description of Artificial Sequence: Synthetic peptide
  Seed: RMKWMMAMKY
RSKWMMAMKK

SEQ ID NO: 168047 - protein, 10 aa, Artificial Sequence
  Description of Artificial Sequence: Synthetic peptide
  Seed: RMKWMMAMKY
RSKWMMAMKL

SEQ ID NO: 168048 - protein, 10 aa, Artificial Sequence
  Description of Artificial Sequence: Synthetic peptide
  Seed: RMKWMMAMKY
RSKWMMAMKM

SEQ ID NO: 168049 - protein, 10 aa, Artificial Sequence
  Description of Artificial Sequence: Synthetic peptide
  Seed: RMKWMMAMKY
RSKWMMAMKN

SEQ ID NO: 168050 - protein, 10 aa, Artificial Sequence
  Description of Artificial Sequence: Synthetic peptide
  Seed: RMKWMMAMKY
RSKWMMAMKP

SEQ ID NO: 168051 - protein, 10 aa, Artificial Sequence
  Description of Artificial Sequence: Synthetic peptide
  Seed: RMKWMMAMKY
RSKWMMAMKQ

SEQ ID NO: 168052 - protein, 10 aa, Artificial Sequence
  Description of Artificial Sequence: Synthetic peptide
  Seed: RMKWMMAMKY
RSKWMMAMKR

SEQ ID NO: 168053 - protein, 10 aa, Artificial Sequence
  Description of Artificial Sequence: Synthetic peptide
  Seed: RMKWMMAMKY
RSKWMMAMKS

SEQ ID NO: 168054 - protein, 10 aa, Artificial Sequence
  Description of Artificial Sequence: Synthetic peptide
  Seed: RMKWMMAMKY
RSKWMMAMKT

SEQ ID NO: 168055 - protein, 10 aa, Artificial Sequence
  Description of Artificial Sequence: Synthetic peptide
  Seed: RMKWMMAMKY
RSKWMMAMKV

SEQ ID NO: 168056 - protein, 10 aa, Artificial Sequence
  Description of Artificial Sequence: Synthetic peptide
  Seed: RMKWMMAMKY
RSKWMMAMKW

SEQ ID NO: 168057 - protein, 10 aa, Artificial Sequence
  Description of Artificial Sequence: Synthetic peptide
  Seed: RMKWMMAMKY
RSKWMMAMKY

SEQ ID NO: 168058 - protein, 9 aa, Artificial Sequence
  Description of Artificial Sequence: Synthetic peptide
  Seed: RMKWMMAMK
RSKWMMAML

SEQ ID NO: 168059 - protein, 9 aa, Artificial Sequence
  Description of Artificial Sequence: Synthetic peptide
  Seed: RMKWMMAMK
RSKWMMAMM

SEQ ID NO: 168060 - protein, 9 aa, Artificial Sequence
  Description of Artificial Sequence: Synthetic peptide
  Seed: RMKWMMAMK
RSKWMMAMN

SEQ ID NO: 168061 - protein, 9 aa, Artificial Sequence
  Description of Artificial Sequence: Synthetic peptide
  Seed: RMKWMMAMK
RSKWMMAMP

SEQ ID NO: 168062 - protein, 9 aa, Artificial Sequence
  Description of Artificial Sequence: Synthetic peptide
  Seed: RMKWMMAMK
RSKWMMAMQ

SEQ ID NO: 168063 - protein, 9 aa, Artificial Sequence
  Description of Artificial Sequence: Synthetic peptide
  Seed: RMKWMMAMK
RSKWMMAMR

SEQ ID NO: 168064 - protein, 9 aa, Artificial Sequence
  Description of Artificial Sequence: Synthetic peptide
  Seed: RMKWMMAMK
RSKWMMAMS

SEQ ID NO: 168065 - protein, 9 aa, Artificial Sequence
  Description of Artificial Sequence: Synthetic peptide
  Seed: RMKWMMAMK
RSKWMMAMT

SEQ ID NO: 168066 - protein, 9 aa, Artificial Sequence
  Description of Artificial Sequence: Synthetic peptide
  Seed: RMKWMMAMK
RSKWMMAMV

SEQ ID NO: 168067 - protein, 9 aa, Artificial Sequence
  Description of Artificial Sequence: Synthetic peptide
  Seed: RMKWMMAMK
RSKWMMAMY

SEQ ID NO: 168068 - protein, 8 aa, Artificial Sequence
  Description of Artificial Sequence: Synthetic peptide
  Seed: RMKWMMAM
RSKWMMAY

SEQ ID NO: 168069 - protein, 9 aa, Artificial Sequence
  Description of Artificial Sequence: Synthetic peptide
  Seed: RELVRKTRF
RSLVRKTRF

SEQ ID NO: 168070 - protein, 11 aa, Artificial Sequence
  Description of Artificial Sequence: Synthetic peptide
  Seed: RELVRKTRFLP
RSLVRKTRFLA

SEQ ID NO: 168071 - protein, 11 aa, Artificial Sequence
  Description of Artificial Sequence: Synthetic peptide
  Seed: RELVRKTRFLP
RSLVRKTRFLC

SEQ ID NO: 168072 - protein, 11 aa, Artificial Sequence
  Description of Artificial Sequence: Synthetic peptide
  Seed: RELVRKTRFLP
RSLVRKTRFLE

SEQ ID NO: 168073 - protein, 11 aa, Artificial Sequence
  Description of Artificial Sequence: Synthetic peptide
  Seed: RELVRKTRFLP
RSLVRKTRFLF

SEQ ID NO: 168074 - protein, 11 aa, Artificial Sequence
  Description of Artificial Sequence: Synthetic peptide
  Seed: RELVRKTRFLP
RSLVRKTRFLG

SEQ ID NO: 168075 - protein, 11 aa, Artificial Sequence
  Description of Artificial Sequence: Synthetic peptide
  Seed: RELVRKTRFLP
RSLVRKTRFLI

SEQ ID NO: 168076 - protein, 11 aa, Artificial Sequence
  Description of Artificial Sequence: Synthetic peptide
  Seed: RELVRKTRFLP
RSLVRKTRFLK

SEQ ID NO: 168077 - protein, 11 aa, Artificial Sequence
  Description of Artificial Sequence: Synthetic peptide
  Seed: RELVRKTRFLP
RSLVRKTRFLL

SEQ ID NO: 168078 - protein, 11 aa, Artificial Sequence
  Description of Artificial Sequence: Synthetic peptide
  Seed: RELVRKTRFLP
RSLVRKTRFLM

SEQ ID NO: 168079 - protein, 11 aa, Artificial Sequence
  Description of Artificial Sequence: Synthetic peptide
  Seed: RELVRKTRFLP
RSLVRKTRFLP

SEQ ID NO: 168080 - protein, 11 aa, Artificial Sequence
  Description of Artificial Sequence: Synthetic peptide
  Seed: RELVRKTRFLP
RSLVRKTRFLQ

SEQ ID NO: 168081 - protein, 11 aa, Artificial Sequence
  Description of Artificial Sequence: Synthetic peptide
  Seed: RELVRKTRFLP
RSLVRKTRFLR

SEQ ID NO: 168082 - protein, 11 aa, Artificial Sequence
  Description of Artificial Sequence: Synthetic peptide
  Seed: RELVRKTRFLP
RSLVRKTRFLS

SEQ ID NO: 168083 - protein, 11 aa, Artificial Sequence
  Description of Artificial Sequence: Synthetic peptide
  Seed: RELVRKTRFLP
RSLVRKTRFLT

SEQ ID NO: 168084 - protein, 11 aa, Artificial Sequence
  Description of Artificial Sequence: Synthetic peptide
  Seed: RELVRKTRFLP
RSLVRKTRFLV

SEQ ID NO: 168085 - protein, 11 aa, Artificial Sequence
  Description of Artificial Sequence: Synthetic peptide
  Seed: RELVRKTRFLP
RSLVRKTRFLY

SEQ ID NO: 168086 - protein, 9 aa, Artificial Sequence
  Description of Artificial Sequence: Synthetic peptide
  Seed: RELVRKTRF
RSLVRKTRY

SEQ ID NO: 168087 - protein, 9 aa, Artificial Sequence
  Description of Artificial Sequence: Synthetic peptide
  Seed: RLNPMHQLL
RSNPMHQLA

SEQ ID NO: 168088 - protein, 9 aa, Artificial Sequence
  Description of Artificial Sequence: Synthetic peptide
  Seed: RLNPMHQLL
RSNPMHQLC

SEQ ID NO: 168089 - protein, 9 aa, Artificial Sequence
  Description of Artificial Sequence: Synthetic peptide
  Seed: RLNPMHQLL
RSNPMHQLE

SEQ ID NO: 168090 - protein, 9 aa, Artificial Sequence
  Description of Artificial Sequence: Synthetic peptide
  Seed: RLNPMHQLL
RSNPMHQLF

SEQ ID NO: 168091 - protein, 9 aa, Artificial Sequence
  Description of Artificial Sequence: Synthetic peptide
  Seed: RLNPMHQLL
RSNPMHQLG

SEQ ID NO: 168092 - protein, 9 aa, Artificial Sequence
  Description of Artificial Sequence: Synthetic peptide
  Seed: RLNPMHQLL
RSNPMHQLH

SEQ ID NO: 168093 - protein, 9 aa, Artificial Sequence
  Description of Artificial Sequence: Synthetic peptide
  Seed: RLNPMHQLL
RSNPMHQLI

SEQ ID NO: 168094 - protein, 9 aa, Artificial Sequence
  Description of Artificial Sequence: Synthetic peptide
  Seed: RLNPMHQLL
RSNPMHQLK

SEQ ID NO: 168095 - protein, 9 aa, Artificial Sequence
  Description of Artificial Sequence: Synthetic peptide
  Seed: RLNPMHQLL
RSNPMHQLL

SEQ ID NO: 168096 - protein, 10 aa, Artificial Sequence
  Description of Artificial Sequence: Synthetic peptide
  Seed: RLNPMHQLLR
RSNPMHQLLH

SEQ ID NO: 168097 - protein, 10 aa, Artificial Sequence
  Description of Artificial Sequence: Synthetic peptide
  Seed: RLNPMHQLLR
RSNPMHQLLK

SEQ ID NO: 168098 - protein, 10 aa, Artificial Sequence
  Description of Artificial Sequence: Synthetic peptide
  Seed: RLNPMHQLLR
RSNPMHQLLR

SEQ ID NO: 168099 - protein, 11 aa, Artificial Sequence
  Description of Artificial Sequence: Synthetic peptide
  Seed: RLNPMHQLLRH
RSNPMHQLLRA

SEQ ID NO: 168100 - protein, 11 aa, Artificial Sequence
  Description of Artificial Sequence: Synthetic peptide
  Seed: RLNPMHQLLRH
RSNPMHQLLRC

SEQ ID NO: 168101 - protein, 11 aa, Artificial Sequence
  Description of Artificial Sequence: Synthetic peptide
  Seed: RLNPMHQLLRH
RSNPMHQLLRD

SEQ ID NO: 168102 - protein, 11 aa, Artificial Sequence
  Description of Artificial Sequence: Synthetic peptide
  Seed: RLNPMHQLLRH
RSNPMHQLLRE

SEQ ID NO: 168103 - protein, 11 aa, Artificial Sequence
  Description of Artificial Sequence: Synthetic peptide
  Seed: RLNPMHQLLRH
RSNPMHQLLRF

SEQ ID NO: 168104 - protein, 11 aa, Artificial Sequence
  Description of Artificial Sequence: Synthetic peptide
  Seed: RLNPMHQLLRH
RSNPMHQLLRG

SEQ ID NO: 168105 - protein, 11 aa, Artificial Sequence
  Description of Artificial Sequence: Synthetic peptide
  Seed: RLNPMHQLLRH
RSNPMHQLLRH

SEQ ID NO: 168106 - protein, 11 aa, Artificial Sequence
  Description of Artificial Sequence: Synthetic peptide
  Seed: RLNPMHQLLRH
RSNPMHQLLRI

SEQ ID NO: 168107 - protein, 11 aa, Artificial Sequence
  Description of Artificial Sequence: Synthetic peptide
  Seed: RLNPMHQLLRH
RSNPMHQLLRK

SEQ ID NO: 168108 - protein, 11 aa, Artificial Sequence
  Description of Artificial Sequence: Synthetic peptide
  Seed: RLNPMHQLLRH
RSNPMHQLLRL

SEQ ID NO: 168109 - protein, 11 aa, Artificial Sequence
  Description of Artificial Sequence: Synthetic peptide
  Seed: RLNPMHQLLRH
RSNPMHQLLRM

SEQ ID NO: 168110 - protein, 11 aa, Artificial Sequence
  Description of Artificial Sequence: Synthetic peptide
  Seed: RLNPMHQLLRH
RSNPMHQLLRN

SEQ ID NO: 168111 - protein, 11 aa, Artificial Sequence
  Description of Artificial Sequence: Synthetic peptide
  Seed: RLNPMHQLLRH
RSNPMHQLLRP

SEQ ID NO: 168112 - protein, 11 aa, Artificial Sequence
  Description of Artificial Sequence: Synthetic peptide
  Seed: RLNPMHQLLRH
RSNPMHQLLRQ

SEQ ID NO: 168113 - protein, 11 aa, Artificial Sequence
  Description of Artificial Sequence: Synthetic peptide
  Seed: RLNPMHQLLRH
RSNPMHQLLRR

SEQ ID NO: 168114 - protein, 11 aa, Artificial Sequence
  Description of Artificial Sequence: Synthetic peptide
  Seed: RLNPMHQLLRH
RSNPMHQLLRS

SEQ ID NO: 168115 - protein, 11 aa, Artificial Sequence
  Description of Artificial Sequence: Synthetic peptide
  Seed: RLNPMHQLLRH
RSNPMHQLLRT

SEQ ID NO: 168116 - protein, 11 aa, Artificial Sequence
  Description of Artificial Sequence: Synthetic peptide
  Seed: RLNPMHQLLRH
RSNPMHQLLRV

SEQ ID NO: 168117 - protein, 11 aa, Artificial Sequence
  Description of Artificial Sequence: Synthetic peptide
  Seed: RLNPMHQLLRH
RSNPMHQLLRW

SEQ ID NO: 168118 - protein, 11 aa, Artificial Sequence
  Description of Artificial Sequence: Synthetic peptide
  Seed: RLNPMHQLLRH
RSNPMHQLLRY

SEQ ID NO: 168119 - protein, 10 aa, Artificial Sequence
  Description of Artificial Sequence: Synthetic peptide
  Seed: RLNPMHQLLR
RSNPMHQLLY

SEQ ID NO: 168120 - protein, 9 aa, Artificial Sequence
  Description of Artificial Sequence: Synthetic peptide
  Seed: RLNPMHQLL
RSNPMHQLM

SEQ ID NO: 168121 - protein, 9 aa, Artificial Sequence
  Description of Artificial Sequence: Synthetic peptide
  Seed: RLNPMHQLL
RSNPMHQLN

SEQ ID NO: 168122 - protein, 9 aa, Artificial Sequence
  Description of Artificial Sequence: Synthetic peptide
  Seed: RLNPMHQLL
RSNPMHQLP

SEQ ID NO: 168123 - protein, 9 aa, Artificial Sequence
  Description of Artificial Sequence: Synthetic peptide
  Seed: RLNPMHQLL
RSNPMHQLQ

SEQ ID NO: 168124 - protein, 9 aa, Artificial Sequence
  Description of Artificial Sequence: Synthetic peptide
  Seed: RLNPMHQLL
RSNPMHQLR

SEQ ID NO: 168125 - protein, 9 aa, Artificial Sequence
  Description of Artificial Sequence: Synthetic peptide
  Seed: RLNPMHQLL
RSNPMHQLS

SEQ ID NO: 168126 - protein, 9 aa, Artificial Sequence
  Description of Artificial Sequence: Synthetic peptide
  Seed: RLNPMHQLL
RSNPMHQLT

SEQ ID NO: 168127 - protein, 9 aa, Artificial Sequence
  Description of Artificial Sequence: Synthetic peptide
  Seed: RLNPMHQLL
RSNPMHQLV

SEQ ID NO: 168128 - protein, 9 aa, Artificial Sequence
  Description of Artificial Sequence: Synthetic peptide
  Seed: RLNPMHQLL
RSNPMHQLW

SEQ ID NO: 168129 - protein, 9 aa, Artificial Sequence
  Description of Artificial Sequence: Synthetic peptide
  Seed: RLNPMHQLL
RSNPMHQLY

SEQ ID NO: 168130 - protein, 9 aa, Artificial Sequence
  Description of Artificial Sequence: Synthetic peptide
  Seed: RANQRLNPM
RSNQRLNPA

SEQ ID NO: 168131 - protein, 9 aa, Artificial Sequence
  Description of Artificial Sequence: Synthetic peptide
  Seed: RANQRLNPM
RSNQRLNPC

SEQ ID NO: 168132 - protein, 9 aa, Artificial Sequence
  Description of Artificial Sequence: Synthetic peptide
  Seed: RANQRLNPM
RSNQRLNPE

SEQ ID NO: 168133 - protein, 9 aa, Artificial Sequence
  Description of Artificial Sequence: Synthetic peptide
  Seed: RANQRLNPM
RSNQRLNPF

SEQ ID NO: 168134 - protein, 9 aa, Artificial Sequence
  Description of Artificial Sequence: Synthetic peptide
  Seed: RANQRLNPM
RSNQRLNPG

SEQ ID NO: 168135 - protein, 9 aa, Artificial Sequence
  Description of Artificial Sequence: Synthetic peptide
  Seed: RANQRLNPM
RSNQRLNPH

SEQ ID NO: 168136 - protein, 9 aa, Artificial Sequence
  Description of Artificial Sequence: Synthetic peptide
  Seed: RANQRLNPM
RSNQRLNPI

SEQ ID NO: 168137 - protein, 9 aa, Artificial Sequence
  Description of Artificial Sequence: Synthetic peptide
  Seed: RANQRLNPM
RSNQRLNPK

SEQ ID NO: 168138 - protein, 9 aa, Artificial Sequence
  Description of Artificial Sequence: Synthetic peptide
  Seed: RANQRLNPM
RSNQRLNPL

SEQ ID NO: 168139 - protein, 9 aa, Artificial Sequence
  Description of Artificial Sequence: Synthetic peptide
  Seed: RANQRLNPM
RSNQRLNPM

SEQ ID NO: 168140 - protein, 9 aa, Artificial Sequence
  Description of Artificial Sequence: Synthetic peptide
  Seed: RANQRLNPM
RSNQRLNPN

SEQ ID NO: 168141 - protein, 9 aa, Artificial Sequence
  Description of Artificial Sequence: Synthetic peptide
  Seed: RANQRLNPM
RSNQRLNPP

SEQ ID NO: 168142 - protein, 9 aa, Artificial Sequence
  Description of Artificial Sequence: Synthetic peptide
  Seed: RANQRLNPM
RSNQRLNPQ

SEQ ID NO: 168143 - protein, 9 aa, Artificial Sequence
  Description of Artificial Sequence: Synthetic peptide
  Seed: RANQRLNPM
RSNQRLNPR

SEQ ID NO: 168144 - protein, 9 aa, Artificial Sequence
  Description of Artificial Sequence: Synthetic peptide
  Seed: RANQRLNPM
RSNQRLNPS

SEQ ID NO: 168145 - protein, 9 aa, Artificial Sequence
  Description of Artificial Sequence: Synthetic peptide
  Seed: RANQRLNPM
RSNQRLNPT

SEQ ID NO: 168146 - protein, 9 aa, Artificial Sequence
  Description of Artificial Sequence: Synthetic peptide
  Seed: RANQRLNPM
RSNQRLNPV

SEQ ID NO: 168147 - protein, 9 aa, Artificial Sequence
  Description of Artificial Sequence: Synthetic peptide
  Seed: RANQRLNPM
RSNQRLNPW

SEQ ID NO: 168148 - protein, 9 aa, Artificial Sequence
  Description of Artificial Sequence: Synthetic peptide
  Seed: RANQRLNPM
RSNQRLNPY

SEQ ID NO: 168149 - protein, 8 aa, Artificial Sequence
  Description of Artificial Sequence: Synthetic peptide
  Seed: RMKWMMAM
RTKWMMAF

SEQ ID NO: 168150 - protein, 9 aa, Artificial Sequence
  Description of Artificial Sequence: Synthetic peptide
  Seed: RMKWMMAMK
RTKWMMAMA

SEQ ID NO: 168151 - protein, 9 aa, Artificial Sequence
  Description of Artificial Sequence: Synthetic peptide
  Seed: RMKWMMAMK
RTKWMMAMC

SEQ ID NO: 168152 - protein, 9 aa, Artificial Sequence
  Description of Artificial Sequence: Synthetic peptide
  Seed: RMKWMMAMK
RTKWMMAMD

SEQ ID NO: 168153 - protein, 9 aa, Artificial Sequence
  Description of Artificial Sequence: Synthetic peptide
  Seed: RMKWMMAMK
RTKWMMAME

SEQ ID NO: 168154 - protein, 9 aa, Artificial Sequence
  Description of Artificial Sequence: Synthetic peptide
  Seed: RMKWMMAMK
RTKWMMAMF

SEQ ID NO: 168155 - protein, 9 aa, Artificial Sequence
  Description of Artificial Sequence: Synthetic peptide
  Seed: RMKWMMAMK
RTKWMMAMG

SEQ ID NO: 168156 - protein, 9 aa, Artificial Sequence
  Description of Artificial Sequence: Synthetic peptide
  Seed: RMKWMMAMK
RTKWMMAMH

SEQ ID NO: 168157 - protein, 9 aa, Artificial Sequence
  Description of Artificial Sequence: Synthetic peptide
  Seed: RMKWMMAMK
RTKWMMAMI

SEQ ID NO: 168158 - protein, 10 aa, Artificial Sequence
  Description of Artificial Sequence: Synthetic peptide
  Seed: RMKWMMAMKY
RTKWMMAMKA

SEQ ID NO: 168159 - protein, 10 aa, Artificial Sequence
  Description of Artificial Sequence: Synthetic peptide
  Seed: RMKWMMAMKY
RTKWMMAMKC

SEQ ID NO: 168160 - protein, 10 aa, Artificial Sequence
  Description of Artificial Sequence: Synthetic peptide
  Seed: RMKWMMAMKY
RTKWMMAMKD

SEQ ID NO: 168161 - protein, 10 aa, Artificial Sequence
  Description of Artificial Sequence: Synthetic peptide
  Seed: RMKWMMAMKY
RTKWMMAMKE

SEQ ID NO: 168162 - protein, 10 aa, Artificial Sequence
  Description of Artificial Sequence: Synthetic peptide
  Seed: RMKWMMAMKY
RTKWMMAMKF

SEQ ID NO: 168163 - protein, 10 aa, Artificial Sequence
  Description of Artificial Sequence: Synthetic peptide
  Seed: RMKWMMAMKY
RTKWMMAMKG

SEQ ID NO: 168164 - protein, 10 aa, Artificial Sequence
  Description of Artificial Sequence: Synthetic peptide
  Seed: RMKWMMAMKY
RTKWMMAMKH

SEQ ID NO: 168165 - protein, 10 aa, Artificial Sequence
  Description of Artificial Sequence: Synthetic peptide
  Seed: RMKWMMAMKY
RTKWMMAMKI

SEQ ID NO: 168166 - protein, 10 aa, Artificial Sequence
  Description of Artificial Sequence: Synthetic peptide
  Seed: RMKWMMAMKY
RTKWMMAMKK

SEQ ID NO: 168167 - protein, 10 aa, Artificial Sequence
  Description of Artificial Sequence: Synthetic peptide
  Seed: RMKWMMAMKY
RTKWMMAMKL

SEQ ID NO: 168168 - protein, 10 aa, Artificial Sequence
  Description of Artificial Sequence: Synthetic peptide
  Seed: RMKWMMAMKY
RTKWMMAMKM

SEQ ID NO: 168169 - protein, 10 aa, Artificial Sequence
  Description of Artificial Sequence: Synthetic peptide
  Seed: RMKWMMAMKY
RTKWMMAMKN

SEQ ID NO: 168170 - protein, 10 aa, Artificial Sequence
  Description of Artificial Sequence: Synthetic peptide
  Seed: RMKWMMAMKY
RTKWMMAMKP

SEQ ID NO: 168171 - protein, 10 aa, Artificial Sequence
  Description of Artificial Sequence: Synthetic peptide
  Seed: RMKWMMAMKY
RTKWMMAMKQ

SEQ ID NO: 168172 - protein, 10 aa, Artificial Sequence
  Description of Artificial Sequence: Synthetic peptide
  Seed: RMKWMMAMKY
RTKWMMAMKR

SEQ ID NO: 168173 - protein, 10 aa, Artificial Sequence
  Description of Artificial Sequence: Synthetic peptide
  Seed: RMKWMMAMKY
RTKWMMAMKS

SEQ ID NO: 168174 - protein, 10 aa, Artificial Sequence
  Description of Artificial Sequence: Synthetic peptide
  Seed: RMKWMMAMKY
RTKWMMAMKT

SEQ ID NO: 168175 - protein, 10 aa, Artificial Sequence
  Description of Artificial Sequence: Synthetic peptide
  Seed: RMKWMMAMKY
RTKWMMAMKV

SEQ ID NO: 168176 - protein, 10 aa, Artificial Sequence
  Description of Artificial Sequence: Synthetic peptide
  Seed: RMKWMMAMKY
RTKWMMAMKW

SEQ ID NO: 168177 - protein, 10 aa, Artificial Sequence
  Description of Artificial Sequence: Synthetic peptide
  Seed: RMKWMMAMKY
RTKWMMAMKY

SEQ ID NO: 168178 - protein, 9 aa, Artificial Sequence
  Description of Artificial Sequence: Synthetic peptide
  Seed: RMKWMMAMK
RTKWMMAML

SEQ ID NO: 168179 - protein, 9 aa, Artificial Sequence
  Description of Artificial Sequence: Synthetic peptide
  Seed: RMKWMMAMK
RTKWMMAMM

SEQ ID NO: 168180 - protein, 9 aa, Artificial Sequence
  Description of Artificial Sequence: Synthetic peptide
  Seed: RMKWMMAMK
RTKWMMAMN

SEQ ID NO: 168181 - protein, 9 aa, Artificial Sequence
  Description of Artificial Sequence: Synthetic peptide
  Seed: RMKWMMAMK
RTKWMMAMP

SEQ ID NO: 168182 - protein, 9 aa, Artificial Sequence
  Description of Artificial Sequence: Synthetic peptide
  Seed: RMKWMMAMK
RTKWMMAMQ

SEQ ID NO: 168183 - protein, 9 aa, Artificial Sequence
  Description of Artificial Sequence: Synthetic peptide
  Seed: RMKWMMAMK
RTKWMMAMR

SEQ ID NO: 168184 - protein, 9 aa, Artificial Sequence
  Description of Artificial Sequence: Synthetic peptide
  Seed: RMKWMMAMK
RTKWMMAMS

SEQ ID NO: 168185 - protein, 9 aa, Artificial Sequence
  Description of Artificial Sequence: Synthetic peptide
  Seed: RMKWMMAMK
RTKWMMAMT

SEQ ID NO: 168186 - protein, 9 aa, Artificial Sequence
  Description of Artificial Sequence: Synthetic peptide
  Seed: RMKWMMAMK
RTKWMMAMV

SEQ ID NO: 168187 - protein, 9 aa, Artificial Sequence
  Description of Artificial Sequence: Synthetic peptide
  Seed: RMKWMMAMK
RTKWMMAMY

SEQ ID NO: 168188 - protein, 8 aa, Artificial Sequence
  Description of Artificial Sequence: Synthetic peptide
  Seed: RMKWMMAM
RTKWMMAY

SEQ ID NO: 168189 - protein, 11 aa, Artificial Sequence
  Description of Artificial Sequence: Synthetic peptide
  Seed: RELVRKTRFLP
RTLVRKTRFLA

SEQ ID NO: 168190 - protein, 11 aa, Artificial Sequence
  Description of Artificial Sequence: Synthetic peptide
  Seed: RELVRKTRFLP
RTLVRKTRFLC

SEQ ID NO: 168191 - protein, 11 aa, Artificial Sequence
  Description of Artificial Sequence: Synthetic peptide
  Seed: RELVRKTRFLP
RTLVRKTRFLE

SEQ ID NO: 168192 - protein, 11 aa, Artificial Sequence
  Description of Artificial Sequence: Synthetic peptide
  Seed: RELVRKTRFLP
RTLVRKTRFLF

SEQ ID NO: 168193 - protein, 11 aa, Artificial Sequence
  Description of Artificial Sequence: Synthetic peptide
  Seed: RELVRKTRFLP
RTLVRKTRFLG

SEQ ID NO: 168194 - protein, 11 aa, Artificial Sequence
  Description of Artificial Sequence: Synthetic peptide
  Seed: RELVRKTRFLP
RTLVRKTRFLI

SEQ ID NO: 168195 - protein, 11 aa, Artificial Sequence
  Description of Artificial Sequence: Synthetic peptide
  Seed: RELVRKTRFLP
RTLVRKTRFLK

SEQ ID NO: 168196 - protein, 11 aa, Artificial Sequence
  Description of Artificial Sequence: Synthetic peptide
  Seed: RELVRKTRFLP
RTLVRKTRFLL

SEQ ID NO: 168197 - protein, 11 aa, Artificial Sequence
  Description of Artificial Sequence: Synthetic peptide
  Seed: RELVRKTRFLP
RTLVRKTRFLM

SEQ ID NO: 168198 - protein, 11 aa, Artificial Sequence
  Description of Artificial Sequence: Synthetic peptide
  Seed: RELVRKTRFLP
RTLVRKTRFLN

SEQ ID NO: 168199 - protein, 11 aa, Artificial Sequence
  Description of Artificial Sequence: Synthetic peptide
  Seed: RELVRKTRFLP
RTLVRKTRFLP

SEQ ID NO: 168200 - protein, 11 aa, Artificial Sequence
  Description of Artificial Sequence: Synthetic peptide
  Seed: RELVRKTRFLP
RTLVRKTRFLQ

SEQ ID NO: 168201 - protein, 11 aa, Artificial Sequence
  Description of Artificial Sequence: Synthetic peptide
  Seed: RELVRKTRFLP
RTLVRKTRFLR

SEQ ID NO: 168202 - protein, 11 aa, Artificial Sequence
  Description of Artificial Sequence: Synthetic peptide
  Seed: RELVRKTRFLP
RTLVRKTRFLS

SEQ ID NO: 168203 - protein, 11 aa, Artificial Sequence
  Description of Artificial Sequence: Synthetic peptide
  Seed: RELVRKTRFLP
RTLVRKTRFLT

SEQ ID NO: 168204 - protein, 11 aa, Artificial Sequence
  Description of Artificial Sequence: Synthetic peptide
  Seed: RELVRKTRFLP
RTLVRKTRFLV

SEQ ID NO: 168205 - protein, 11 aa, Artificial Sequence
  Description of Artificial Sequence: Synthetic peptide
  Seed: RELVRKTRFLP
RTLVRKTRFLY

SEQ ID NO: 168206 - protein, 9 aa, Artificial Sequence
  Description of Artificial Sequence: Synthetic peptide
  Seed: RLNPMHQLL
RTNPMHQLA

SEQ ID NO: 168207 - protein, 9 aa, Artificial Sequence
  Description of Artificial Sequence: Synthetic peptide
  Seed: RLNPMHQLL
RTNPMHQLC

SEQ ID NO: 168208 - protein, 9 aa, Artificial Sequence
  Description of Artificial Sequence: Synthetic peptide
  Seed: RLNPMHQLL
RTNPMHQLE

SEQ ID NO: 168209 - protein, 9 aa, Artificial Sequence
  Description of Artificial Sequence: Synthetic peptide
  Seed: RLNPMHQLL
RTNPMHQLF

SEQ ID NO: 168210 - protein, 9 aa, Artificial Sequence
  Description of Artificial Sequence: Synthetic peptide
  Seed: RLNPMHQLL
RTNPMHQLG

SEQ ID NO: 168211 - protein, 9 aa, Artificial Sequence
  Description of Artificial Sequence: Synthetic peptide
  Seed: RLNPMHQLL
RTNPMHQLH

SEQ ID NO: 168212 - protein, 9 aa, Artificial Sequence
  Description of Artificial Sequence: Synthetic peptide
  Seed: RLNPMHQLL
RTNPMHQLI

SEQ ID NO: 168213 - protein, 9 aa, Artificial Sequence
  Description of Artificial Sequence: Synthetic peptide
  Seed: RLNPMHQLL
RTNPMHQLK

SEQ ID NO: 168214 - protein, 9 aa, Artificial Sequence
  Description of Artificial Sequence: Synthetic peptide
  Seed: RLNPMHQLL
RTNPMHQLL

SEQ ID NO: 168215 - protein, 10 aa, Artificial Sequence
  Description of Artificial Sequence: Synthetic peptide
  Seed: RLNPMHQLLR
RTNPMHQLLH

SEQ ID NO: 168216 - protein, 10 aa, Artificial Sequence
  Description of Artificial Sequence: Synthetic peptide
  Seed: RLNPMHQLLR
RTNPMHQLLK

SEQ ID NO: 168217 - protein, 10 aa, Artificial Sequence
  Description of Artificial Sequence: Synthetic peptide
  Seed: RLNPMHQLLR
RTNPMHQLLR

SEQ ID NO: 168218 - protein, 11 aa, Artificial Sequence
  Description of Artificial Sequence: Synthetic peptide
  Seed: RLNPMHQLLRH
RTNPMHQLLRA

SEQ ID NO: 168219 - protein, 11 aa, Artificial Sequence
  Description of Artificial Sequence: Synthetic peptide
  Seed: RLNPMHQLLRH
RTNPMHQLLRC

SEQ ID NO: 168220 - protein, 11 aa, Artificial Sequence
  Description of Artificial Sequence: Synthetic peptide
  Seed: RLNPMHQLLRH
RTNPMHQLLRD

SEQ ID NO: 168221 - protein, 11 aa, Artificial Sequence
  Description of Artificial Sequence: Synthetic peptide
  Seed: RLNPMHQLLRH
RTNPMHQLLRE

SEQ ID NO: 168222 - protein, 11 aa, Artificial Sequence
  Description of Artificial Sequence: Synthetic peptide
  Seed: RLNPMHQLLRH
RTNPMHQLLRF

SEQ ID NO: 168223 - protein, 11 aa, Artificial Sequence
  Description of Artificial Sequence: Synthetic peptide
  Seed: RLNPMHQLLRH
RTNPMHQLLRG

SEQ ID NO: 168224 - protein, 11 aa, Artificial Sequence
  Description of Artificial Sequence: Synthetic peptide
  Seed: RLNPMHQLLRH
RTNPMHQLLRH

SEQ ID NO: 168225 - protein, 11 aa, Artificial Sequence
  Description of Artificial Sequence: Synthetic peptide
  Seed: RLNPMHQLLRH
RTNPMHQLLRI

SEQ ID NO: 168226 - protein, 11 aa, Artificial Sequence
  Description of Artificial Sequence: Synthetic peptide
  Seed: RLNPMHQLLRH
RTNPMHQLLRK

SEQ ID NO: 168227 - protein, 11 aa, Artificial Sequence
  Description of Artificial Sequence: Synthetic peptide
  Seed: RLNPMHQLLRH
RTNPMHQLLRL

SEQ ID NO: 168228 - protein, 11 aa, Artificial Sequence
  Description of Artificial Sequence: Synthetic peptide
  Seed: RLNPMHQLLRH
RTNPMHQLLRM

SEQ ID NO: 168229 - protein, 11 aa, Artificial Sequence
  Description of Artificial Sequence: Synthetic peptide
  Seed: RLNPMHQLLRH
RTNPMHQLLRN

SEQ ID NO: 168230 - protein, 11 aa, Artificial Sequence
  Description of Artificial Sequence: Synthetic peptide
  Seed: RLNPMHQLLRH
RTNPMHQLLRP

SEQ ID NO: 168231 - protein, 11 aa, Artificial Sequence
  Description of Artificial Sequence: Synthetic peptide
  Seed: RLNPMHQLLRH
RTNPMHQLLRQ

SEQ ID NO: 168232 - protein, 11 aa, Artificial Sequence
  Description of Artificial Sequence: Synthetic peptide
  Seed: RLNPMHQLLRH
RTNPMHQLLRR

SEQ ID NO: 168233 - protein, 11 aa, Artificial Sequence
  Description of Artificial Sequence: Synthetic peptide
  Seed: RLNPMHQLLRH
RTNPMHQLLRS

SEQ ID NO: 168234 - protein, 11 aa, Artificial Sequence
  Description of Artificial Sequence: Synthetic peptide
  Seed: RLNPMHQLLRH
RTNPMHQLLRT

SEQ ID NO: 168235 - protein, 11 aa, Artificial Sequence
  Description of Artificial Sequence: Synthetic peptide
  Seed: RLNPMHQLLRH
RTNPMHQLLRV

SEQ ID NO: 168236 - protein, 11 aa, Artificial Sequence
  Description of Artificial Sequence: Synthetic peptide
  Seed: RLNPMHQLLRH
RTNPMHQLLRW

SEQ ID NO: 168237 - protein, 11 aa, Artificial Sequence
  Description of Artificial Sequence: Synthetic peptide
  Seed: RLNPMHQLLRH
RTNPMHQLLRY

SEQ ID NO: 168238 - protein, 10 aa, Artificial Sequence
  Description of Artificial Sequence: Synthetic peptide
  Seed: RLNPMHQLLR
RTNPMHQLLY

SEQ ID NO: 168239 - protein, 9 aa, Artificial Sequence
  Description of Artificial Sequence: Synthetic peptide
  Seed: RLNPMHQLL
RTNPMHQLM

SEQ ID NO: 168240 - protein, 9 aa, Artificial Sequence
  Description of Artificial Sequence: Synthetic peptide
  Seed: RLNPMHQLL
RTNPMHQLN

SEQ ID NO: 168241 - protein, 9 aa, Artificial Sequence
  Description of Artificial Sequence: Synthetic peptide
  Seed: RLNPMHQLL
RTNPMHQLP

SEQ ID NO: 168242 - protein, 9 aa, Artificial Sequence
  Description of Artificial Sequence: Synthetic peptide
  Seed: RLNPMHQLL
RTNPMHQLQ

SEQ ID NO: 168243 - protein, 9 aa, Artificial Sequence
  Description of Artificial Sequence: Synthetic peptide
  Seed: RLNPMHQLL
RTNPMHQLR

SEQ ID NO: 168244 - protein, 9 aa, Artificial Sequence
  Description of Artificial Sequence: Synthetic peptide
  Seed: RLNPMHQLL
RTNPMHQLS

SEQ ID NO: 168245 - protein, 9 aa, Artificial Sequence
  Description of Artificial Sequence: Synthetic peptide
  Seed: RLNPMHQLL
RTNPMHQLT

SEQ ID NO: 168246 - protein, 9 aa, Artificial Sequence
  Description of Artificial Sequence: Synthetic peptide
  Seed: RLNPMHQLL
RTNPMHQLV

SEQ ID NO: 168247 - protein, 9 aa, Artificial Sequence
  Description of Artificial Sequence: Synthetic peptide
  Seed: RLNPMHQLL
RTNPMHQLW

SEQ ID NO: 168248 - protein, 9 aa, Artificial Sequence
  Description of Artificial Sequence: Synthetic peptide
  Seed: RLNPMHQLL
RTNPMHQLY

SEQ ID NO: 168249 - protein, 9 aa, Artificial Sequence
  Description of Artificial Sequence: Synthetic peptide
  Seed: RANQRLNPM
RTNQRLNPA

SEQ ID NO: 168250 - protein, 9 aa, Artificial Sequence
  Description of Artificial Sequence: Synthetic peptide
  Seed: RANQRLNPM
RTNQRLNPC

SEQ ID NO: 168251 - protein, 9 aa, Artificial Sequence
  Description of Artificial Sequence: Synthetic peptide
  Seed: RANQRLNPM
RTNQRLNPE

SEQ ID NO: 168252 - protein, 9 aa, Artificial Sequence
  Description of Artificial Sequence: Synthetic peptide
  Seed: RANQRLNPM
RTNQRLNPF

SEQ ID NO: 168253 - protein, 9 aa, Artificial Sequence
  Description of Artificial Sequence: Synthetic peptide
  Seed: RANQRLNPM
RTNQRLNPG

SEQ ID NO: 168254 - protein, 9 aa, Artificial Sequence
  Description of Artificial Sequence: Synthetic peptide
  Seed: RANQRLNPM
RTNQRLNPH

SEQ ID NO: 168255 - protein, 9 aa, Artificial Sequence
  Description of Artificial Sequence: Synthetic peptide
  Seed: RANQRLNPM
RTNQRLNPI

SEQ ID NO: 168256 - protein, 9 aa, Artificial Sequence
  Description of Artificial Sequence: Synthetic peptide
  Seed: RANQRLNPM
RTNQRLNPK

SEQ ID NO: 168257 - protein, 9 aa, Artificial Sequence
  Description of Artificial Sequence: Synthetic peptide
  Seed: RANQRLNPM
RTNQRLNPL

SEQ ID NO: 168258 - protein, 9 aa, Artificial Sequence
  Description of Artificial Sequence: Synthetic peptide
  Seed: RANQRLNPM
RTNQRLNPM

SEQ ID NO: 168259 - protein, 9 aa, Artificial Sequence
  Description of Artificial Sequence: Synthetic peptide
  Seed: RANQRLNPM
RTNQRLNPN

SEQ ID NO: 168260 - protein, 9 aa, Artificial Sequence
  Description of Artificial Sequence: Synthetic peptide
  Seed: RANQRLNPM
RTNQRLNPP

SEQ ID NO: 168261 - protein, 9 aa, Artificial Sequence
  Description of Artificial Sequence: Synthetic peptide
  Seed: RANQRLNPM
RTNQRLNPQ

SEQ ID NO: 168262 - protein, 9 aa, Artificial Sequence
  Description of Artificial Sequence: Synthetic peptide
  Seed: RANQRLNPM
RTNQRLNPR

SEQ ID NO: 168263 - protein, 9 aa, Artificial Sequence
  Description of Artificial Sequence: Synthetic peptide
  Seed: RANQRLNPM
RTNQRLNPS

SEQ ID NO: 168264 - protein, 9 aa, Artificial Sequence
  Description of Artificial Sequence: Synthetic peptide
  Seed: RANQRLNPM
RTNQRLNPT

SEQ ID NO: 168265 - protein, 9 aa, Artificial Sequence
  Description of Artificial Sequence: Synthetic peptide
  Seed: RANQRLNPM
RTNQRLNPV

SEQ ID NO: 168266 - protein, 9 aa, Artificial Sequence
  Description of Artificial Sequence: Synthetic peptide
  Seed: RANQRLNPM
RTNQRLNPW

SEQ ID NO: 168267 - protein, 9 aa, Artificial Sequence
  Description of Artificial Sequence: Synthetic peptide
  Seed: RANQRLNPM
RTNQRLNPY

SEQ ID NO: 168268 - protein, 8 aa, Artificial Sequence
  Description of Artificial Sequence: Synthetic peptide
  Seed: RMKWMMAM
RVKWMMAF

SEQ ID NO: 168269 - protein, 9 aa, Artificial Sequence
  Description of Artificial Sequence: Synthetic peptide
  Seed: RMKWMMAMK
RVKWMMAMA

SEQ ID NO: 168270 - protein, 9 aa, Artificial Sequence
  Description of Artificial Sequence: Synthetic peptide
  Seed: RMKWMMAMK
RVKWMMAMC

SEQ ID NO: 168271 - protein, 9 aa, Artificial Sequence
  Description of Artificial Sequence: Synthetic peptide
  Seed: RMKWMMAMK
RVKWMMAME

SEQ ID NO: 168272 - protein, 9 aa, Artificial Sequence
  Description of Artificial Sequence: Synthetic peptide
  Seed: RMKWMMAMK
RVKWMMAMF

SEQ ID NO: 168273 - protein, 9 aa, Artificial Sequence
  Description of Artificial Sequence: Synthetic peptide
  Seed: RMKWMMAMK
RVKWMMAMG

SEQ ID NO: 168274 - protein, 9 aa, Artificial Sequence
  Description of Artificial Sequence: Synthetic peptide
  Seed: RMKWMMAMK
RVKWMMAMH

SEQ ID NO: 168275 - protein, 9 aa, Artificial Sequence
  Description of Artificial Sequence: Synthetic peptide
  Seed: RMKWMMAMK
RVKWMMAMI

SEQ ID NO: 168276 - protein, 10 aa, Artificial Sequence
  Description of Artificial Sequence: Synthetic peptide
  Seed: RMKWMMAMKY
RVKWMMAMKA

SEQ ID NO: 168277 - protein, 10 aa, Artificial Sequence
  Description of Artificial Sequence: Synthetic peptide
  Seed: RMKWMMAMKY
RVKWMMAMKC

SEQ ID NO: 168278 - protein, 10 aa, Artificial Sequence
  Description of Artificial Sequence: Synthetic peptide
  Seed: RMKWMMAMKY
RVKWMMAMKD

SEQ ID NO: 168279 - protein, 10 aa, Artificial Sequence
  Description of Artificial Sequence: Synthetic peptide
  Seed: RMKWMMAMKY
RVKWMMAMKE

SEQ ID NO: 168280 - protein, 10 aa, Artificial Sequence
  Description of Artificial Sequence: Synthetic peptide
  Seed: RMKWMMAMKY
RVKWMMAMKF

SEQ ID NO: 168281 - protein, 10 aa, Artificial Sequence
  Description of Artificial Sequence: Synthetic peptide
  Seed: RMKWMMAMKY
RVKWMMAMKG

SEQ ID NO: 168282 - protein, 10 aa, Artificial Sequence
  Description of Artificial Sequence: Synthetic peptide
  Seed: RMKWMMAMKY
RVKWMMAMKH

SEQ ID NO: 168283 - protein, 10 aa, Artificial Sequence
  Description of Artificial Sequence: Synthetic peptide
  Seed: RMKWMMAMKY
RVKWMMAMKI

SEQ ID NO: 168284 - protein, 10 aa, Artificial Sequence
  Description of Artificial Sequence: Synthetic peptide
  Seed: RMKWMMAMKY
RVKWMMAMKK

SEQ ID NO: 168285 - protein, 10 aa, Artificial Sequence
  Description of Artificial Sequence: Synthetic peptide
  Seed: RMKWMMAMKY
RVKWMMAMKL

SEQ ID NO: 168286 - protein, 10 aa, Artificial Sequence
  Description of Artificial Sequence: Synthetic peptide
  Seed: RMKWMMAMKY
RVKWMMAMKM

SEQ ID NO: 168287 - protein, 10 aa, Artificial Sequence
  Description of Artificial Sequence: Synthetic peptide
  Seed: RMKWMMAMKY
RVKWMMAMKN

SEQ ID NO: 168288 - protein, 10 aa, Artificial Sequence
  Description of Artificial Sequence: Synthetic peptide
  Seed: RMKWMMAMKY
RVKWMMAMKP

SEQ ID NO: 168289 - protein, 10 aa, Artificial Sequence
  Description of Artificial Sequence: Synthetic peptide
  Seed: RMKWMMAMKY
RVKWMMAMKQ

SEQ ID NO: 168290 - protein, 10 aa, Artificial Sequence
  Description of Artificial Sequence: Synthetic peptide
  Seed: RMKWMMAMKY
RVKWMMAMKR

SEQ ID NO: 168291 - protein, 10 aa, Artificial Sequence
  Description of Artificial Sequence: Synthetic peptide
  Seed: RMKWMMAMKY
RVKWMMAMKS

SEQ ID NO: 168292 - protein, 10 aa, Artificial Sequence
  Description of Artificial Sequence: Synthetic peptide
  Seed: RMKWMMAMKY
RVKWMMAMKT

SEQ ID NO: 168293 - protein, 10 aa, Artificial Sequence
  Description of Artificial Sequence: Synthetic peptide
  Seed: RMKWMMAMKY
RVKWMMAMKV

SEQ ID NO: 168294 - protein, 10 aa, Artificial Sequence
  Description of Artificial Sequence: Synthetic peptide
  Seed: RMKWMMAMKY
RVKWMMAMKW

SEQ ID NO: 168295 - protein, 10 aa, Artificial Sequence
  Description of Artificial Sequence: Synthetic peptide
  Seed: RMKWMMAMKY
RVKWMMAMKY

SEQ ID NO: 168296 - protein, 9 aa, Artificial Sequence
  Description of Artificial Sequence: Synthetic peptide
  Seed: RMKWMMAMK
RVKWMMAML

SEQ ID NO: 168297 - protein, 9 aa, Artificial Sequence
  Description of Artificial Sequence: Synthetic peptide
  Seed: RMKWMMAMK
RVKWMMAMM

SEQ ID NO: 168298 - protein, 9 aa, Artificial Sequence
  Description of Artificial Sequence: Synthetic peptide
  Seed: RMKWMMAMK
RVKWMMAMN

SEQ ID NO: 168299 - protein, 9 aa, Artificial Sequence
  Description of Artificial Sequence: Synthetic peptide
  Seed: RMKWMMAMK
RVKWMMAMP

SEQ ID NO: 168300 - protein, 9 aa, Artificial Sequence
  Description of Artificial Sequence: Synthetic peptide
  Seed: RMKWMMAMK
RVKWMMAMQ

SEQ ID NO: 168301 - protein, 9 aa, Artificial Sequence
  Description of Artificial Sequence: Synthetic peptide
  Seed: RMKWMMAMK
RVKWMMAMR

SEQ ID NO: 168302 - protein, 9 aa, Artificial Sequence
  Description of Artificial Sequence: Synthetic peptide
  Seed: RMKWMMAMK
RVKWMMAMS

SEQ ID NO: 168303 - protein, 9 aa, Artificial Sequence
  Description of Artificial Sequence: Synthetic peptide
  Seed: RMKWMMAMK
RVKWMMAMT

SEQ ID NO: 168304 - protein, 9 aa, Artificial Sequence
  Description of Artificial Sequence: Synthetic peptide
  Seed: RMKWMMAMK
RVKWMMAMV

SEQ ID NO: 168305 - protein, 9 aa, Artificial Sequence
  Description of Artificial Sequence: Synthetic peptide
  Seed: RMKWMMAMK
RVKWMMAMY

SEQ ID NO: 168306 - protein, 8 aa, Artificial Sequence
  Description of Artificial Sequence: Synthetic peptide
  Seed: RMKWMMAM
RVKWMMAY

SEQ ID NO: 168307 - protein, 11 aa, Artificial Sequence
  Description of Artificial Sequence: Synthetic peptide
  Seed: RELVRKTRFLP
RVLVRKTRFLA

SEQ ID NO: 168308 - protein, 11 aa, Artificial Sequence
  Description of Artificial Sequence: Synthetic peptide
  Seed: RELVRKTRFLP
RVLVRKTRFLF

SEQ ID NO: 168309 - protein, 11 aa, Artificial Sequence
  Description of Artificial Sequence: Synthetic peptide
  Seed: RELVRKTRFLP
RVLVRKTRFLG

SEQ ID NO: 168310 - protein, 11 aa, Artificial Sequence
  Description of Artificial Sequence: Synthetic peptide
  Seed: RELVRKTRFLP
RVLVRKTRFLI

SEQ ID NO: 168311 - protein, 11 aa, Artificial Sequence
  Description of Artificial Sequence: Synthetic peptide
  Seed: RELVRKTRFLP
RVLVRKTRFLK

SEQ ID NO: 168312 - protein, 11 aa, Artificial Sequence
  Description of Artificial Sequence: Synthetic peptide
  Seed: RELVRKTRFLP
RVLVRKTRFLL

SEQ ID NO: 168313 - protein, 11 aa, Artificial Sequence
  Description of Artificial Sequence: Synthetic peptide
  Seed: RELVRKTRFLP
RVLVRKTRFLM

SEQ ID NO: 168314 - protein, 11 aa, Artificial Sequence
  Description of Artificial Sequence: Synthetic peptide
  Seed: RELVRKTRFLP
RVLVRKTRFLP

SEQ ID NO: 168315 - protein, 11 aa, Artificial Sequence
  Description of Artificial Sequence: Synthetic peptide
  Seed: RELVRKTRFLP
RVLVRKTRFLS

SEQ ID NO: 168316 - protein, 11 aa, Artificial Sequence
  Description of Artificial Sequence: Synthetic peptide
  Seed: RELVRKTRFLP
RVLVRKTRFLT

SEQ ID NO: 168317 - protein, 11 aa, Artificial Sequence
  Description of Artificial Sequence: Synthetic peptide
  Seed: RELVRKTRFLP
RVLVRKTRFLV

SEQ ID NO: 168318 - protein, 11 aa, Artificial Sequence
  Description of Artificial Sequence: Synthetic peptide
  Seed: RELVRKTRFLP
RVLVRKTRFLY

SEQ ID NO: 168319 - protein, 9 aa, Artificial Sequence
  Description of Artificial Sequence: Synthetic peptide
  Seed: RELVRKTRF
RVLVRKTRY

SEQ ID NO: 168320 - protein, 9 aa, Artificial Sequence
  Description of Artificial Sequence: Synthetic peptide
  Seed: RLNPMHQLL
RVNPMHQLA

SEQ ID NO: 168321 - protein, 9 aa, Artificial Sequence
  Description of Artificial Sequence: Synthetic peptide
  Seed: RLNPMHQLL
RVNPMHQLC

SEQ ID NO: 168322 - protein, 9 aa, Artificial Sequence
  Description of Artificial Sequence: Synthetic peptide
  Seed: RLNPMHQLL
RVNPMHQLE

SEQ ID NO: 168323 - protein, 9 aa, Artificial Sequence
  Description of Artificial Sequence: Synthetic peptide
  Seed: RLNPMHQLL
RVNPMHQLF

SEQ ID NO: 168324 - protein, 9 aa, Artificial Sequence
  Description of Artificial Sequence: Synthetic peptide
  Seed: RLNPMHQLL
RVNPMHQLG

SEQ ID NO: 168325 - protein, 9 aa, Artificial Sequence
  Description of Artificial Sequence: Synthetic peptide
  Seed: RLNPMHQLL
RVNPMHQLH

SEQ ID NO: 168326 - protein, 9 aa, Artificial Sequence
  Description of Artificial Sequence: Synthetic peptide
  Seed: RLNPMHQLL
RVNPMHQLI

SEQ ID NO: 168327 - protein, 9 aa, Artificial Sequence
  Description of Artificial Sequence: Synthetic peptide
  Seed: RLNPMHQLL
RVNPMHQLK

SEQ ID NO: 168328 - protein, 9 aa, Artificial Sequence
  Description of Artificial Sequence: Synthetic peptide
  Seed: RLNPMHQLL
RVNPMHQLL

SEQ ID NO: 168329 - protein, 10 aa, Artificial Sequence
  Description of Artificial Sequence: Synthetic peptide
  Seed: RLNPMHQLLR
RVNPMHQLLH

SEQ ID NO: 168330 - protein, 10 aa, Artificial Sequence
  Description of Artificial Sequence: Synthetic peptide
  Seed: RLNPMHQLLR
RVNPMHQLLK

SEQ ID NO: 168331 - protein, 10 aa, Artificial Sequence
  Description of Artificial Sequence: Synthetic peptide
  Seed: RLNPMHQLLR
RVNPMHQLLR

SEQ ID NO: 168332 - protein, 11 aa, Artificial Sequence
  Description of Artificial Sequence: Synthetic peptide
  Seed: RLNPMHQLLRH
RVNPMHQLLRA

SEQ ID NO: 168333 - protein, 11 aa, Artificial Sequence
  Description of Artificial Sequence: Synthetic peptide
  Seed: RLNPMHQLLRH
RVNPMHQLLRC

SEQ ID NO: 168334 - protein, 11 aa, Artificial Sequence
  Description of Artificial Sequence: Synthetic peptide
  Seed: RLNPMHQLLRH
RVNPMHQLLRD

SEQ ID NO: 168335 - protein, 11 aa, Artificial Sequence
  Description of Artificial Sequence: Synthetic peptide
  Seed: RLNPMHQLLRH
RVNPMHQLLRE

SEQ ID NO: 168336 - protein, 11 aa, Artificial Sequence
  Description of Artificial Sequence: Synthetic peptide
  Seed: RLNPMHQLLRH
RVNPMHQLLRF

SEQ ID NO: 168337 - protein, 11 aa, Artificial Sequence
  Description of Artificial Sequence: Synthetic peptide
  Seed: RLNPMHQLLRH
RVNPMHQLLRG

SEQ ID NO: 168338 - protein, 11 aa, Artificial Sequence
  Description of Artificial Sequence: Synthetic peptide
  Seed: RLNPMHQLLRH
RVNPMHQLLRH

SEQ ID NO: 168339 - protein, 11 aa, Artificial Sequence
  Description of Artificial Sequence: Synthetic peptide
  Seed: RLNPMHQLLRH
RVNPMHQLLRI

SEQ ID NO: 168340 - protein, 11 aa, Artificial Sequence
  Description of Artificial Sequence: Synthetic peptide
  Seed: RLNPMHQLLRH
RVNPMHQLLRK

SEQ ID NO: 168341 - protein, 11 aa, Artificial Sequence
  Description of Artificial Sequence: Synthetic peptide
  Seed: RLNPMHQLLRH
RVNPMHQLLRL

SEQ ID NO: 168342 - protein, 11 aa, Artificial Sequence
  Description of Artificial Sequence: Synthetic peptide
  Seed: RLNPMHQLLRH
RVNPMHQLLRM

SEQ ID NO: 168343 - protein, 11 aa, Artificial Sequence
  Description of Artificial Sequence: Synthetic peptide
  Seed: RLNPMHQLLRH
RVNPMHQLLRN

SEQ ID NO: 168344 - protein, 11 aa, Artificial Sequence
  Description of Artificial Sequence: Synthetic peptide
  Seed: RLNPMHQLLRH
RVNPMHQLLRP

SEQ ID NO: 168345 - protein, 11 aa, Artificial Sequence
  Description of Artificial Sequence: Synthetic peptide
  Seed: RLNPMHQLLRH
RVNPMHQLLRQ

SEQ ID NO: 168346 - protein, 11 aa, Artificial Sequence
  Description of Artificial Sequence: Synthetic peptide
  Seed: RLNPMHQLLRH
RVNPMHQLLRR

SEQ ID NO: 168347 - protein, 11 aa, Artificial Sequence
  Description of Artificial Sequence: Synthetic peptide
  Seed: RLNPMHQLLRH
RVNPMHQLLRS

SEQ ID NO: 168348 - protein, 11 aa, Artificial Sequence
  Description of Artificial Sequence: Synthetic peptide
  Seed: RLNPMHQLLRH
RVNPMHQLLRT

SEQ ID NO: 168349 - protein, 11 aa, Artificial Sequence
  Description of Artificial Sequence: Synthetic peptide
  Seed: RLNPMHQLLRH
RVNPMHQLLRV

SEQ ID NO: 168350 - protein, 11 aa, Artificial Sequence
  Description of Artificial Sequence: Synthetic peptide
  Seed: RLNPMHQLLRH
RVNPMHQLLRW

SEQ ID NO: 168351 - protein, 11 aa, Artificial Sequence
  Description of Artificial Sequence: Synthetic peptide
  Seed: RLNPMHQLLRH
RVNPMHQLLRY

SEQ ID NO: 168352 - protein, 10 aa, Artificial Sequence
  Description of Artificial Sequence: Synthetic peptide
  Seed: RLNPMHQLLR
RVNPMHQLLY

SEQ ID NO: 168353 - protein, 9 aa, Artificial Sequence
  Description of Artificial Sequence: Synthetic peptide
  Seed: RLNPMHQLL
RVNPMHQLM

SEQ ID NO: 168354 - protein, 9 aa, Artificial Sequence
  Description of Artificial Sequence: Synthetic peptide
  Seed: RLNPMHQLL
RVNPMHQLN

SEQ ID NO: 168355 - protein, 9 aa, Artificial Sequence
  Description of Artificial Sequence: Synthetic peptide
  Seed: RLNPMHQLL
RVNPMHQLP

SEQ ID NO: 168356 - protein, 9 aa, Artificial Sequence
  Description of Artificial Sequence: Synthetic peptide
  Seed: RLNPMHQLL
RVNPMHQLQ

SEQ ID NO: 168357 - protein, 9 aa, Artificial Sequence
  Description of Artificial Sequence: Synthetic peptide
  Seed: RLNPMHQLL
RVNPMHQLR

SEQ ID NO: 168358 - protein, 9 aa, Artificial Sequence
  Description of Artificial Sequence: Synthetic peptide
  Seed: RLNPMHQLL
RVNPMHQLS

SEQ ID NO: 168359 - protein, 9 aa, Artificial Sequence
  Description of Artificial Sequence: Synthetic peptide
  Seed: RLNPMHQLL
RVNPMHQLT

SEQ ID NO: 168360 - protein, 9 aa, Artificial Sequence
  Description of Artificial Sequence: Synthetic peptide
  Seed: RLNPMHQLL
RVNPMHQLV

SEQ ID NO: 168361 - protein, 9 aa, Artificial Sequence
  Description of Artificial Sequence: Synthetic peptide
  Seed: RLNPMHQLL
RVNPMHQLW

SEQ ID NO: 168362 - protein, 9 aa, Artificial Sequence
  Description of Artificial Sequence: Synthetic peptide
  Seed: RLNPMHQLL
RVNPMHQLY

SEQ ID NO: 168363 - protein, 9 aa, Artificial Sequence
  Description of Artificial Sequence: Synthetic peptide
  Seed: RANQRLNPM
RVNQRLNPA

SEQ ID NO: 168364 - protein, 9 aa, Artificial Sequence
  Description of Artificial Sequence: Synthetic peptide
  Seed: RANQRLNPM
RVNQRLNPC

SEQ ID NO: 168365 - protein, 9 aa, Artificial Sequence
  Description of Artificial Sequence: Synthetic peptide
  Seed: RANQRLNPM
RVNQRLNPE

SEQ ID NO: 168366 - protein, 9 aa, Artificial Sequence
  Description of Artificial Sequence: Synthetic peptide
  Seed: RANQRLNPM
RVNQRLNPF

SEQ ID NO: 168367 - protein, 9 aa, Artificial Sequence
  Description of Artificial Sequence: Synthetic peptide
  Seed: RANQRLNPM
RVNQRLNPG

SEQ ID NO: 168368 - protein, 9 aa, Artificial Sequence
  Description of Artificial Sequence: Synthetic peptide
  Seed: RANQRLNPM
RVNQRLNPH

SEQ ID NO: 168369 - protein, 9 aa, Artificial Sequence
  Description of Artificial Sequence: Synthetic peptide
  Seed: RANQRLNPM
RVNQRLNPI

SEQ ID NO: 168370 - protein, 9 aa, Artificial Sequence
  Description of Artificial Sequence: Synthetic peptide
  Seed: RANQRLNPM
RVNQRLNPK

SEQ ID NO: 168371 - protein, 9 aa, Artificial Sequence
  Description of Artificial Sequence: Synthetic peptide
  Seed: RANQRLNPM
RVNQRLNPL

SEQ ID NO: 168372 - protein, 9 aa, Artificial Sequence
  Description of Artificial Sequence: Synthetic peptide
  Seed: RANQRLNPM
RVNQRLNPM

SEQ ID NO: 168373 - protein, 9 aa, Artificial Sequence
  Description of Artificial Sequence: Synthetic peptide
  Seed: RANQRLNPM
RVNQRLNPN

SEQ ID NO: 168374 - protein, 9 aa, Artificial Sequence
  Description of Artificial Sequence: Synthetic peptide
  Seed: RANQRLNPM
RVNQRLNPP

SEQ ID NO: 168375 - protein, 9 aa, Artificial Sequence
  Description of Artificial Sequence: Synthetic peptide
  Seed: RANQRLNPM
RVNQRLNPQ

SEQ ID NO: 168376 - protein, 9 aa, Artificial Sequence
  Description of Artificial Sequence: Synthetic peptide
  Seed: RANQRLNPM
RVNQRLNPR

SEQ ID NO: 168377 - protein, 9 aa, Artificial Sequence
  Description of Artificial Sequence: Synthetic peptide
  Seed: RANQRLNPM
RVNQRLNPS

SEQ ID NO: 168378 - protein, 9 aa, Artificial Sequence
  Description of Artificial Sequence: Synthetic peptide
  Seed: RANQRLNPM
RVNQRLNPT

SEQ ID NO: 168379 - protein, 9 aa, Artificial Sequence
  Description of Artificial Sequence: Synthetic peptide
  Seed: RANQRLNPM
RVNQRLNPV

SEQ ID NO: 168380 - protein, 9 aa, Artificial Sequence
  Description of Artificial Sequence: Synthetic peptide
  Seed: RANQRLNPM
RVNQRLNPW

SEQ ID NO: 168381 - protein, 9 aa, Artificial Sequence
  Description of Artificial Sequence: Synthetic peptide
  Seed: RANQRLNPM
RVNQRLNPY

SEQ ID NO: 168382 - protein, 8 aa, Artificial Sequence
  Description of Artificial Sequence: Synthetic peptide
  Seed: RYGPALSI
RWGPALSF

SEQ ID NO: 168383 - protein, 8 aa, Artificial Sequence
  Description of Artificial Sequence: Synthetic peptide
  Seed: RYGPALSI
RWGPALSI

SEQ ID NO: 168384 - protein, 8 aa, Artificial Sequence
  Description of Artificial Sequence: Synthetic peptide
  Seed: RYGPALSI
RWGPALSL

SEQ ID NO: 168385 - protein, 8 aa, Artificial Sequence
  Description of Artificial Sequence: Synthetic peptide
  Seed: RYGPALSI
RWGPALSM

SEQ ID NO: 168386 - protein, 8 aa, Artificial Sequence
  Description of Artificial Sequence: Synthetic peptide
  Seed: RYGPALSI
RWGPALSW

SEQ ID NO: 168387 - protein, 9 aa, Artificial Sequence
  Description of Artificial Sequence: Synthetic peptide
  Seed: RMKWMMAMK
RWKWMMAMA

SEQ ID NO: 168388 - protein, 9 aa, Artificial Sequence
  Description of Artificial Sequence: Synthetic peptide
  Seed: RMKWMMAMK
RWKWMMAMG

SEQ ID NO: 168389 - protein, 9 aa, Artificial Sequence
  Description of Artificial Sequence: Synthetic peptide
  Seed: RMKWMMAMK
RWKWMMAMH

SEQ ID NO: 168390 - protein, 9 aa, Artificial Sequence
  Description of Artificial Sequence: Synthetic peptide
  Seed: RMKWMMAMK
RWKWMMAMI

SEQ ID NO: 168391 - protein, 9 aa, Artificial Sequence
  Description of Artificial Sequence: Synthetic peptide
  Seed: RMKWMMAMK
RWKWMMAMK

SEQ ID NO: 168392 - protein, 10 aa, Artificial Sequence
  Description of Artificial Sequence: Synthetic peptide
  Seed: RMKWMMAMKY
RWKWMMAMKA

SEQ ID NO: 168393 - protein, 10 aa, Artificial Sequence
  Description of Artificial Sequence: Synthetic peptide
  Seed: RMKWMMAMKY
RWKWMMAMKF

SEQ ID NO: 168394 - protein, 10 aa, Artificial Sequence
  Description of Artificial Sequence: Synthetic peptide
  Seed: RMKWMMAMKY
RWKWMMAMKG

SEQ ID NO: 168395 - protein, 10 aa, Artificial Sequence
  Description of Artificial Sequence: Synthetic peptide
  Seed: RMKWMMAMKY
RWKWMMAMKH

SEQ ID NO: 168396 - protein, 10 aa, Artificial Sequence
  Description of Artificial Sequence: Synthetic peptide
  Seed: RMKWMMAMKY
RWKWMMAMKI

SEQ ID NO: 168397 - protein, 10 aa, Artificial Sequence
  Description of Artificial Sequence: Synthetic peptide
  Seed: RMKWMMAMKY
RWKWMMAMKK

SEQ ID NO: 168398 - protein, 10 aa, Artificial Sequence
  Description of Artificial Sequence: Synthetic peptide
  Seed: RMKWMMAMKY
RWKWMMAMKL

SEQ ID NO: 168399 - protein, 10 aa, Artificial Sequence
  Description of Artificial Sequence: Synthetic peptide
  Seed: RMKWMMAMKY
RWKWMMAMKM

SEQ ID NO: 168400 - protein, 10 aa, Artificial Sequence
  Description of Artificial Sequence: Synthetic peptide
  Seed: RMKWMMAMKY
RWKWMMAMKR

SEQ ID NO: 168401 - protein, 10 aa, Artificial Sequence
  Description of Artificial Sequence: Synthetic peptide
  Seed: RMKWMMAMKY
RWKWMMAMKS

SEQ ID NO: 168402 - protein, 10 aa, Artificial Sequence
  Description of Artificial Sequence: Synthetic peptide
  Seed: RMKWMMAMKY
RWKWMMAMKV

SEQ ID NO: 168403 - protein, 10 aa, Artificial Sequence
  Description of Artificial Sequence: Synthetic peptide
  Seed: RMKWMMAMKY
RWKWMMAMKY

SEQ ID NO: 168404 - protein, 9 aa, Artificial Sequence
  Description of Artificial Sequence: Synthetic peptide
  Seed: RMKWMMAMK
RWKWMMAML

SEQ ID NO: 168405 - protein, 9 aa, Artificial Sequence
  Description of Artificial Sequence: Synthetic peptide
  Seed: RMKWMMAMK
RWKWMMAMM

SEQ ID NO: 168406 - protein, 9 aa, Artificial Sequence
  Description of Artificial Sequence: Synthetic peptide
  Seed: RMKWMMAMK
RWKWMMAMP

SEQ ID NO: 168407 - protein, 9 aa, Artificial Sequence
  Description of Artificial Sequence: Synthetic peptide
  Seed: RMKWMMAMK
RWKWMMAMR

SEQ ID NO: 168408 - protein, 9 aa, Artificial Sequence
  Description of Artificial Sequence: Synthetic peptide
  Seed: RMKWMMAMK
RWKWMMAMS

SEQ ID NO: 168409 - protein, 9 aa, Artificial Sequence
  Description of Artificial Sequence: Synthetic peptide
  Seed: RMKWMMAMK
RWKWMMAMT

SEQ ID NO: 168410 - protein, 9 aa, Artificial Sequence
  Description of Artificial Sequence: Synthetic peptide
  Seed: RMKWMMAMK
RWKWMMAMV

SEQ ID NO: 168411 - protein, 9 aa, Artificial Sequence
  Description of Artificial Sequence: Synthetic peptide
  Seed: RMKWMMAMK
RWKWMMAMY

SEQ ID NO: 168412 - protein, 11 aa, Artificial Sequence
  Description of Artificial Sequence: Synthetic peptide
  Seed: RELVRKTRFLP
RWLVRKTRFLA

SEQ ID NO: 168413 - protein, 11 aa, Artificial Sequence
  Description of Artificial Sequence: Synthetic peptide
  Seed: RELVRKTRFLP
RWLVRKTRFLF

SEQ ID NO: 168414 - protein, 11 aa, Artificial Sequence
  Description of Artificial Sequence: Synthetic peptide
  Seed: RELVRKTRFLP
RWLVRKTRFLG

SEQ ID NO: 168415 - protein, 11 aa, Artificial Sequence
  Description of Artificial Sequence: Synthetic peptide
  Seed: RELVRKTRFLP
RWLVRKTRFLI

SEQ ID NO: 168416 - protein, 11 aa, Artificial Sequence
  Description of Artificial Sequence: Synthetic peptide
  Seed: RELVRKTRFLP
RWLVRKTRFLK

SEQ ID NO: 168417 - protein, 11 aa, Artificial Sequence
  Description of Artificial Sequence: Synthetic peptide
  Seed: RELVRKTRFLP
RWLVRKTRFLL

SEQ ID NO: 168418 - protein, 11 aa, Artificial Sequence
  Description of Artificial Sequence: Synthetic peptide
  Seed: RELVRKTRFLP
RWLVRKTRFLM

SEQ ID NO: 168419 - protein, 11 aa, Artificial Sequence
  Description of Artificial Sequence: Synthetic peptide
  Seed: RELVRKTRFLP
RWLVRKTRFLP

SEQ ID NO: 168420 - protein, 11 aa, Artificial Sequence
  Description of Artificial Sequence: Synthetic peptide
  Seed: RELVRKTRFLP
RWLVRKTRFLQ

SEQ ID NO: 168421 - protein, 11 aa, Artificial Sequence
  Description of Artificial Sequence: Synthetic peptide
  Seed: RELVRKTRFLP
RWLVRKTRFLS

SEQ ID NO: 168422 - protein, 11 aa, Artificial Sequence
  Description of Artificial Sequence: Synthetic peptide
  Seed: RELVRKTRFLP
RWLVRKTRFLT

SEQ ID NO: 168423 - protein, 11 aa, Artificial Sequence
  Description of Artificial Sequence: Synthetic peptide
  Seed: RELVRKTRFLP
RWLVRKTRFLV

SEQ ID NO: 168424 - protein, 11 aa, Artificial Sequence
  Description of Artificial Sequence: Synthetic peptide
  Seed: RELVRKTRFLP
RWLVRKTRFLY

SEQ ID NO: 168425 - protein, 9 aa, Artificial Sequence
  Description of Artificial Sequence: Synthetic peptide
  Seed: RLNPMHQLL
RWNPMHQLA

SEQ ID NO: 168426 - protein, 9 aa, Artificial Sequence
  Description of Artificial Sequence: Synthetic peptide
  Seed: RLNPMHQLL
RWNPMHQLC

SEQ ID NO: 168427 - protein, 9 aa, Artificial Sequence
  Description of Artificial Sequence: Synthetic peptide
  Seed: RLNPMHQLL
RWNPMHQLF

SEQ ID NO: 168428 - protein, 9 aa, Artificial Sequence
  Description of Artificial Sequence: Synthetic peptide
  Seed: RLNPMHQLL
RWNPMHQLG

SEQ ID NO: 168429 - protein, 9 aa, Artificial Sequence
  Description of Artificial Sequence: Synthetic peptide
  Seed: RLNPMHQLL
RWNPMHQLI

SEQ ID NO: 168430 - protein, 9 aa, Artificial Sequence
  Description of Artificial Sequence: Synthetic peptide
  Seed: RLNPMHQLL
RWNPMHQLK

SEQ ID NO: 168431 - protein, 9 aa, Artificial Sequence
  Description of Artificial Sequence: Synthetic peptide
  Seed: RLNPMHQLL
RWNPMHQLL

SEQ ID NO: 168432 - protein, 10 aa, Artificial Sequence
  Description of Artificial Sequence: Synthetic peptide
  Seed: RLNPMHQLLR
RWNPMHQLLH

SEQ ID NO: 168433 - protein, 10 aa, Artificial Sequence
  Description of Artificial Sequence: Synthetic peptide
  Seed: RLNPMHQLLR
RWNPMHQLLK

SEQ ID NO: 168434 - protein, 10 aa, Artificial Sequence
  Description of Artificial Sequence: Synthetic peptide
  Seed: RLNPMHQLLR
RWNPMHQLLR

SEQ ID NO: 168435 - protein, 11 aa, Artificial Sequence
  Description of Artificial Sequence: Synthetic peptide
  Seed: RLNPMHQLLRH
RWNPMHQLLRA

SEQ ID NO: 168436 - protein, 11 aa, Artificial Sequence
  Description of Artificial Sequence: Synthetic peptide
  Seed: RLNPMHQLLRH
RWNPMHQLLRC

SEQ ID NO: 168437 - protein, 11 aa, Artificial Sequence
  Description of Artificial Sequence: Synthetic peptide
  Seed: RLNPMHQLLRH
RWNPMHQLLRD

SEQ ID NO: 168438 - protein, 11 aa, Artificial Sequence
  Description of Artificial Sequence: Synthetic peptide
  Seed: RLNPMHQLLRH
RWNPMHQLLRE

SEQ ID NO: 168439 - protein, 11 aa, Artificial Sequence
  Description of Artificial Sequence: Synthetic peptide
  Seed: RLNPMHQLLRH
RWNPMHQLLRF

SEQ ID NO: 168440 - protein, 11 aa, Artificial Sequence
  Description of Artificial Sequence: Synthetic peptide
  Seed: RLNPMHQLLRH
RWNPMHQLLRG

SEQ ID NO: 168441 - protein, 11 aa, Artificial Sequence
  Description of Artificial Sequence: Synthetic peptide
  Seed: RLNPMHQLLRH
RWNPMHQLLRH

SEQ ID NO: 168442 - protein, 11 aa, Artificial Sequence
  Description of Artificial Sequence: Synthetic peptide
  Seed: RLNPMHQLLRH
RWNPMHQLLRI

SEQ ID NO: 168443 - protein, 11 aa, Artificial Sequence
  Description of Artificial Sequence: Synthetic peptide
  Seed: RLNPMHQLLRH
RWNPMHQLLRK

SEQ ID NO: 168444 - protein, 11 aa, Artificial Sequence
  Description of Artificial Sequence: Synthetic peptide
  Seed: RLNPMHQLLRH
RWNPMHQLLRL

SEQ ID NO: 168445 - protein, 11 aa, Artificial Sequence
  Description of Artificial Sequence: Synthetic peptide
  Seed: RLNPMHQLLRH
RWNPMHQLLRM

SEQ ID NO: 168446 - protein, 11 aa, Artificial Sequence
  Description of Artificial Sequence: Synthetic peptide
  Seed: RLNPMHQLLRH
RWNPMHQLLRN

SEQ ID NO: 168447 - protein, 11 aa, Artificial Sequence
  Description of Artificial Sequence: Synthetic peptide
  Seed: RLNPMHQLLRH
RWNPMHQLLRP

SEQ ID NO: 168448 - protein, 11 aa, Artificial Sequence
  Description of Artificial Sequence: Synthetic peptide
  Seed: RLNPMHQLLRH
RWNPMHQLLRQ

SEQ ID NO: 168449 - protein, 11 aa, Artificial Sequence
  Description of Artificial Sequence: Synthetic peptide
  Seed: RLNPMHQLLRH
RWNPMHQLLRR

SEQ ID NO: 168450 - protein, 11 aa, Artificial Sequence
  Description of Artificial Sequence: Synthetic peptide
  Seed: RLNPMHQLLRH
RWNPMHQLLRS

SEQ ID NO: 168451 - protein, 11 aa, Artificial Sequence
  Description of Artificial Sequence: Synthetic peptide
  Seed: RLNPMHQLLRH
RWNPMHQLLRT

SEQ ID NO: 168452 - protein, 11 aa, Artificial Sequence
  Description of Artificial Sequence: Synthetic peptide
  Seed: RLNPMHQLLRH
RWNPMHQLLRV

SEQ ID NO: 168453 - protein, 11 aa, Artificial Sequence
  Description of Artificial Sequence: Synthetic peptide
  Seed: RLNPMHQLLRH
RWNPMHQLLRW

SEQ ID NO: 168454 - protein, 11 aa, Artificial Sequence
  Description of Artificial Sequence: Synthetic peptide
  Seed: RLNPMHQLLRH
RWNPMHQLLRY

SEQ ID NO: 168455 - protein, 10 aa, Artificial Sequence
  Description of Artificial Sequence: Synthetic peptide
  Seed: RLNPMHQLLR
RWNPMHQLLY

SEQ ID NO: 168456 - protein, 9 aa, Artificial Sequence
  Description of Artificial Sequence: Synthetic peptide
  Seed: RLNPMHQLL
RWNPMHQLM

SEQ ID NO: 168457 - protein, 9 aa, Artificial Sequence
  Description of Artificial Sequence: Synthetic peptide
  Seed: RLNPMHQLL
RWNPMHQLR

SEQ ID NO: 168458 - protein, 9 aa, Artificial Sequence
  Description of Artificial Sequence: Synthetic peptide
  Seed: RLNPMHQLL
RWNPMHQLS

SEQ ID NO: 168459 - protein, 9 aa, Artificial Sequence
  Description of Artificial Sequence: Synthetic peptide
  Seed: RLNPMHQLL
RWNPMHQLV

SEQ ID NO: 168460 - protein, 9 aa, Artificial Sequence
  Description of Artificial Sequence: Synthetic peptide
  Seed: RLNPMHQLL
RWNPMHQLW

SEQ ID NO: 168461 - protein, 9 aa, Artificial Sequence
  Description of Artificial Sequence: Synthetic peptide
  Seed: RLNPMHQLL
RWNPMHQLY

SEQ ID NO: 168462 - protein, 9 aa, Artificial Sequence
  Description of Artificial Sequence: Synthetic peptide
  Seed: RANQRLNPM
RWNQRLNPA

SEQ ID NO: 168463 - protein, 9 aa, Artificial Sequence
  Description of Artificial Sequence: Synthetic peptide
  Seed: RANQRLNPM
RWNQRLNPF

SEQ ID NO: 168464 - protein, 9 aa, Artificial Sequence
  Description of Artificial Sequence: Synthetic peptide
  Seed: RANQRLNPM
RWNQRLNPG

SEQ ID NO: 168465 - protein, 9 aa, Artificial Sequence
  Description of Artificial Sequence: Synthetic peptide
  Seed: RANQRLNPM
RWNQRLNPI

SEQ ID NO: 168466 - protein, 9 aa, Artificial Sequence
  Description of Artificial Sequence: Synthetic peptide
  Seed: RANQRLNPM
RWNQRLNPK

SEQ ID NO: 168467 - protein, 9 aa, Artificial Sequence
  Description of Artificial Sequence: Synthetic peptide
  Seed: RANQRLNPM
RWNQRLNPL

SEQ ID NO: 168468 - protein, 9 aa, Artificial Sequence
  Description of Artificial Sequence: Synthetic peptide
  Seed: RANQRLNPM
RWNQRLNPM

SEQ ID NO: 168469 - protein, 9 aa, Artificial Sequence
  Description of Artificial Sequence: Synthetic peptide
  Seed: RANQRLNPM
RWNQRLNPR

SEQ ID NO: 168470 - protein, 9 aa, Artificial Sequence
  Description of Artificial Sequence: Synthetic peptide
  Seed: RANQRLNPM
RWNQRLNPS

SEQ ID NO: 168471 - protein, 9 aa, Artificial Sequence
  Description of Artificial Sequence: Synthetic peptide
  Seed: RANQRLNPM
RWNQRLNPV

SEQ ID NO: 168472 - protein, 9 aa, Artificial Sequence
  Description of Artificial Sequence: Synthetic peptide
  Seed: RANQRLNPM
RWNQRLNPW

SEQ ID NO: 168473 - protein, 9 aa, Artificial Sequence
  Description of Artificial Sequence: Synthetic peptide
  Seed: RANQRLNPM
RWNQRLNPY

SEQ ID NO: 168474 - protein, 8 aa, Artificial Sequence
  Description of Artificial Sequence: Synthetic peptide
  Seed: RYGPALSI
RYGPALSF

SEQ ID NO: 168475 - protein, 8 aa, Artificial Sequence
  Description of Artificial Sequence: Synthetic peptide
  Seed: RYGPALSI
RYGPALSL

SEQ ID NO: 168476 - protein, 8 aa, Artificial Sequence
  Description of Artificial Sequence: Synthetic peptide
  Seed: RYGPALSI
RYGPALSM

SEQ ID NO: 168477 - protein, 8 aa, Artificial Sequence
  Description of Artificial Sequence: Synthetic peptide
  Seed: RYGPALSI
RYGPALSV

SEQ ID NO: 168478 - protein, 8 aa, Artificial Sequence
  Description of Artificial Sequence: Synthetic peptide
  Seed: RYGPALSI
RYGPALSW

SEQ ID NO: 168479 - protein, 8 aa, Artificial Sequence
  Description of Artificial Sequence: Synthetic peptide
  Seed: RYGPALSI
RYGPALSY

SEQ ID NO: 168480 - protein, 8 aa, Artificial Sequence
  Description of Artificial Sequence: Synthetic peptide
  Seed: RMKWMMAM
RYKWMMAF

SEQ ID NO: 168481 - protein, 9 aa, Artificial Sequence
  Description of Artificial Sequence: Synthetic peptide
  Seed: RMKWMMAMK
RYKWMMAMA

SEQ ID NO: 168482 - protein, 9 aa, Artificial Sequence
  Description of Artificial Sequence: Synthetic peptide
  Seed: RMKWMMAMK
RYKWMMAMC

SEQ ID NO: 168483 - protein, 9 aa, Artificial Sequence
  Description of Artificial Sequence: Synthetic peptide
  Seed: RMKWMMAMK
RYKWMMAME

SEQ ID NO: 168484 - protein, 9 aa, Artificial Sequence
  Description of Artificial Sequence: Synthetic peptide
  Seed: RMKWMMAMK
RYKWMMAMF

SEQ ID NO: 168485 - protein, 9 aa, Artificial Sequence
  Description of Artificial Sequence: Synthetic peptide
  Seed: RMKWMMAMK
RYKWMMAMG

SEQ ID NO: 168486 - protein, 9 aa, Artificial Sequence
  Description of Artificial Sequence: Synthetic peptide
  Seed: RMKWMMAMK
RYKWMMAMH

SEQ ID NO: 168487 - protein, 9 aa, Artificial Sequence
  Description of Artificial Sequence: Synthetic peptide
  Seed: RMKWMMAMK
RYKWMMAMI

SEQ ID NO: 168488 - protein, 9 aa, Artificial Sequence
  Description of Artificial Sequence: Synthetic peptide
  Seed: RMKWMMAMK
RYKWMMAMK

SEQ ID NO: 168489 - protein, 10 aa, Artificial Sequence
  Description of Artificial Sequence: Synthetic peptide
  Seed: RMKWMMAMKY
RYKWMMAMKA

SEQ ID NO: 168490 - protein, 10 aa, Artificial Sequence
  Description of Artificial Sequence: Synthetic peptide
  Seed: RMKWMMAMKY
RYKWMMAMKC

SEQ ID NO: 168491 - protein, 10 aa, Artificial Sequence
  Description of Artificial Sequence: Synthetic peptide
  Seed: RMKWMMAMKY
RYKWMMAMKD

SEQ ID NO: 168492 - protein, 10 aa, Artificial Sequence
  Description of Artificial Sequence: Synthetic peptide
  Seed: RMKWMMAMKY
RYKWMMAMKE

SEQ ID NO: 168493 - protein, 10 aa, Artificial Sequence
  Description of Artificial Sequence: Synthetic peptide
  Seed: RMKWMMAMKY
RYKWMMAMKF

SEQ ID NO: 168494 - protein, 10 aa, Artificial Sequence
  Description of Artificial Sequence: Synthetic peptide
  Seed: RMKWMMAMKY
RYKWMMAMKG

SEQ ID NO: 168495 - protein, 10 aa, Artificial Sequence
  Description of Artificial Sequence: Synthetic peptide
  Seed: RMKWMMAMKY
RYKWMMAMKH

SEQ ID NO: 168496 - protein, 10 aa, Artificial Sequence
  Description of Artificial Sequence: Synthetic peptide
  Seed: RMKWMMAMKY
RYKWMMAMKI

SEQ ID NO: 168497 - protein, 10 aa, Artificial Sequence
  Description of Artificial Sequence: Synthetic peptide
  Seed: RMKWMMAMKY
RYKWMMAMKK

SEQ ID NO: 168498 - protein, 10 aa, Artificial Sequence
  Description of Artificial Sequence: Synthetic peptide
  Seed: RMKWMMAMKY
RYKWMMAMKL

SEQ ID NO: 168499 - protein, 10 aa, Artificial Sequence
  Description of Artificial Sequence: Synthetic peptide
  Seed: RMKWMMAMKY
RYKWMMAMKM

SEQ ID NO: 168500 - protein, 10 aa, Artificial Sequence
  Description of Artificial Sequence: Synthetic peptide
  Seed: RMKWMMAMKY
RYKWMMAMKN

SEQ ID NO: 168501 - protein, 10 aa, Artificial Sequence
  Description of Artificial Sequence: Synthetic peptide
  Seed: RMKWMMAMKY
RYKWMMAMKP

SEQ ID NO: 168502 - protein, 10 aa, Artificial Sequence
  Description of Artificial Sequence: Synthetic peptide
  Seed: RMKWMMAMKY
RYKWMMAMKQ

SEQ ID NO: 168503 - protein, 10 aa, Artificial Sequence
  Description of Artificial Sequence: Synthetic peptide
  Seed: RMKWMMAMKY
RYKWMMAMKR

SEQ ID NO: 168504 - protein, 10 aa, Artificial Sequence
  Description of Artificial Sequence: Synthetic peptide
  Seed: RMKWMMAMKY
RYKWMMAMKS

SEQ ID NO: 168505 - protein, 10 aa, Artificial Sequence
  Description of Artificial Sequence: Synthetic peptide
  Seed: RMKWMMAMKY
RYKWMMAMKT

SEQ ID NO: 168506 - protein, 10 aa, Artificial Sequence
  Description of Artificial Sequence: Synthetic peptide
  Seed: RMKWMMAMKY
RYKWMMAMKV

SEQ ID NO: 168507 - protein, 10 aa, Artificial Sequence
  Description of Artificial Sequence: Synthetic peptide
  Seed: RMKWMMAMKY
RYKWMMAMKW

SEQ ID NO: 168508 - protein, 9 aa, Artificial Sequence
  Description of Artificial Sequence: Synthetic peptide
  Seed: RMKWMMAMK
RYKWMMAML

SEQ ID NO: 168509 - protein, 9 aa, Artificial Sequence
  Description of Artificial Sequence: Synthetic peptide
  Seed: RMKWMMAMK
RYKWMMAMM

SEQ ID NO: 168510 - protein, 9 aa, Artificial Sequence
  Description of Artificial Sequence: Synthetic peptide
  Seed: RMKWMMAMK
RYKWMMAMN

SEQ ID NO: 168511 - protein, 9 aa, Artificial Sequence
  Description of Artificial Sequence: Synthetic peptide
  Seed: RMKWMMAMK
RYKWMMAMP

SEQ ID NO: 168512 - protein, 9 aa, Artificial Sequence
  Description of Artificial Sequence: Synthetic peptide
  Seed: RMKWMMAMK
RYKWMMAMQ

SEQ ID NO: 168513 - protein, 9 aa, Artificial Sequence
  Description of Artificial Sequence: Synthetic peptide
  Seed: RMKWMMAMK
RYKWMMAMR

SEQ ID NO: 168514 - protein, 9 aa, Artificial Sequence
  Description of Artificial Sequence: Synthetic peptide
  Seed: RMKWMMAMK
RYKWMMAMS

SEQ ID NO: 168515 - protein, 9 aa, Artificial Sequence
  Description of Artificial Sequence: Synthetic peptide
  Seed: RMKWMMAMK
RYKWMMAMT

SEQ ID NO: 168516 - protein, 9 aa, Artificial Sequence
  Description of Artificial Sequence: Synthetic peptide
  Seed: RMKWMMAMK
RYKWMMAMV

SEQ ID NO: 168517 - protein, 9 aa, Artificial Sequence
  Description of Artificial Sequence: Synthetic peptide
  Seed: RMKWMMAMK
RYKWMMAMY

SEQ ID NO: 168518 - protein, 8 aa, Artificial Sequence
  Description of Artificial Sequence: Synthetic peptide
  Seed: RMKWMMAM
RYKWMMAY

SEQ ID NO: 168519 - protein, 11 aa, Artificial Sequence
  Description of Artificial Sequence: Synthetic peptide
  Seed: RELVRKTRFLP
RYLVRKTRFLA

SEQ ID NO: 168520 - protein, 11 aa, Artificial Sequence
  Description of Artificial Sequence: Synthetic peptide
  Seed: RELVRKTRFLP
RYLVRKTRFLE

SEQ ID NO: 168521 - protein, 11 aa, Artificial Sequence
  Description of Artificial Sequence: Synthetic peptide
  Seed: RELVRKTRFLP
RYLVRKTRFLF

SEQ ID NO: 168522 - protein, 11 aa, Artificial Sequence
  Description of Artificial Sequence: Synthetic peptide
  Seed: RELVRKTRFLP
RYLVRKTRFLG

SEQ ID NO: 168523 - protein, 11 aa, Artificial Sequence
  Description of Artificial Sequence: Synthetic peptide
  Seed: RELVRKTRFLP
RYLVRKTRFLI

SEQ ID NO: 168524 - protein, 11 aa, Artificial Sequence
  Description of Artificial Sequence: Synthetic peptide
  Seed: RELVRKTRFLP
RYLVRKTRFLK

SEQ ID NO: 168525 - protein, 11 aa, Artificial Sequence
  Description of Artificial Sequence: Synthetic peptide
  Seed: RELVRKTRFLP
RYLVRKTRFLL

SEQ ID NO: 168526 - protein, 11 aa, Artificial Sequence
  Description of Artificial Sequence: Synthetic peptide
  Seed: RELVRKTRFLP
RYLVRKTRFLM

SEQ ID NO: 168527 - protein, 11 aa, Artificial Sequence
  Description of Artificial Sequence: Synthetic peptide
  Seed: RELVRKTRFLP
RYLVRKTRFLP

SEQ ID NO: 168528 - protein, 11 aa, Artificial Sequence
  Description of Artificial Sequence: Synthetic peptide
  Seed: RELVRKTRFLP
RYLVRKTRFLQ

SEQ ID NO: 168529 - protein, 11 aa, Artificial Sequence
  Description of Artificial Sequence: Synthetic peptide
  Seed: RELVRKTRFLP
RYLVRKTRFLR

SEQ ID NO: 168530 - protein, 11 aa, Artificial Sequence
  Description of Artificial Sequence: Synthetic peptide
  Seed: RELVRKTRFLP
RYLVRKTRFLS

SEQ ID NO: 168531 - protein, 11 aa, Artificial Sequence
  Description of Artificial Sequence: Synthetic peptide
  Seed: RELVRKTRFLP
RYLVRKTRFLT

SEQ ID NO: 168532 - protein, 11 aa, Artificial Sequence
  Description of Artificial Sequence: Synthetic peptide
  Seed: RELVRKTRFLP
RYLVRKTRFLV

SEQ ID NO: 168533 - protein, 11 aa, Artificial Sequence
  Description of Artificial Sequence: Synthetic peptide
  Seed: RELVRKTRFLP
RYLVRKTRFLY

SEQ ID NO: 168534 - protein, 9 aa, Artificial Sequence
  Description of Artificial Sequence: Synthetic peptide
  Seed: RLNPMHQLL
RYNPMHQLA

SEQ ID NO: 168535 - protein, 9 aa, Artificial Sequence
  Description of Artificial Sequence: Synthetic peptide
  Seed: RLNPMHQLL
RYNPMHQLC

SEQ ID NO: 168536 - protein, 9 aa, Artificial Sequence
  Description of Artificial Sequence: Synthetic peptide
  Seed: RLNPMHQLL
RYNPMHQLF

SEQ ID NO: 168537 - protein, 9 aa, Artificial Sequence
  Description of Artificial Sequence: Synthetic peptide
  Seed: RLNPMHQLL
RYNPMHQLG

SEQ ID NO: 168538 - protein, 9 aa, Artificial Sequence
  Description of Artificial Sequence: Synthetic peptide
  Seed: RLNPMHQLL
RYNPMHQLH

SEQ ID NO: 168539 - protein, 9 aa, Artificial Sequence
  Description of Artificial Sequence: Synthetic peptide
  Seed: RLNPMHQLL
RYNPMHQLI

SEQ ID NO: 168540 - protein, 9 aa, Artificial Sequence
  Description of Artificial Sequence: Synthetic peptide
  Seed: RLNPMHQLL
RYNPMHQLK

SEQ ID NO: 168541 - protein, 9 aa, Artificial Sequence
  Description of Artificial Sequence: Synthetic peptide
  Seed: RLNPMHQLL
RYNPMHQLL

SEQ ID NO: 168542 - protein, 10 aa, Artificial Sequence
  Description of Artificial Sequence: Synthetic peptide
  Seed: RLNPMHQLLR
RYNPMHQLLH

SEQ ID NO: 168543 - protein, 10 aa, Artificial Sequence
  Description of Artificial Sequence: Synthetic peptide
  Seed: RLNPMHQLLR
RYNPMHQLLK

SEQ ID NO: 168544 - protein, 10 aa, Artificial Sequence
  Description of Artificial Sequence: Synthetic peptide
  Seed: RLNPMHQLLR
RYNPMHQLLR

SEQ ID NO: 168545 - protein, 11 aa, Artificial Sequence
  Description of Artificial Sequence: Synthetic peptide
  Seed: RLNPMHQLLRH
RYNPMHQLLRA

SEQ ID NO: 168546 - protein, 11 aa, Artificial Sequence
  Description of Artificial Sequence: Synthetic peptide
  Seed: RLNPMHQLLRH
RYNPMHQLLRC

SEQ ID NO: 168547 - protein, 11 aa, Artificial Sequence
  Description of Artificial Sequence: Synthetic peptide
  Seed: RLNPMHQLLRH
RYNPMHQLLRD

SEQ ID NO: 168548 - protein, 11 aa, Artificial Sequence
  Description of Artificial Sequence: Synthetic peptide
  Seed: RLNPMHQLLRH
RYNPMHQLLRE

SEQ ID NO: 168549 - protein, 11 aa, Artificial Sequence
  Description of Artificial Sequence: Synthetic peptide
  Seed: RLNPMHQLLRH
RYNPMHQLLRF

SEQ ID NO: 168550 - protein, 11 aa, Artificial Sequence
  Description of Artificial Sequence: Synthetic peptide
  Seed: RLNPMHQLLRH
RYNPMHQLLRG

SEQ ID NO: 168551 - protein, 11 aa, Artificial Sequence
  Description of Artificial Sequence: Synthetic peptide
  Seed: RLNPMHQLLRH
RYNPMHQLLRH

SEQ ID NO: 168552 - protein, 11 aa, Artificial Sequence
  Description of Artificial Sequence: Synthetic peptide
  Seed: RLNPMHQLLRH
RYNPMHQLLRI

SEQ ID NO: 168553 - protein, 11 aa, Artificial Sequence
  Description of Artificial Sequence: Synthetic peptide
  Seed: RLNPMHQLLRH
RYNPMHQLLRK

SEQ ID NO: 168554 - protein, 11 aa, Artificial Sequence
  Description of Artificial Sequence: Synthetic peptide
  Seed: RLNPMHQLLRH
RYNPMHQLLRL

SEQ ID NO: 168555 - protein, 11 aa, Artificial Sequence
  Description of Artificial Sequence: Synthetic peptide
  Seed: RLNPMHQLLRH
RYNPMHQLLRM

SEQ ID NO: 168556 - protein, 11 aa, Artificial Sequence
  Description of Artificial Sequence: Synthetic peptide
  Seed: RLNPMHQLLRH
RYNPMHQLLRN

SEQ ID NO: 168557 - protein, 11 aa, Artificial Sequence
  Description of Artificial Sequence: Synthetic peptide
  Seed: RLNPMHQLLRH
RYNPMHQLLRP

SEQ ID NO: 168558 - protein, 11 aa, Artificial Sequence
  Description of Artificial Sequence: Synthetic peptide
  Seed: RLNPMHQLLRH
RYNPMHQLLRQ

SEQ ID NO: 168559 - protein, 11 aa, Artificial Sequence
  Description of Artificial Sequence: Synthetic peptide
  Seed: RLNPMHQLLRH
RYNPMHQLLRR

SEQ ID NO: 168560 - protein, 11 aa, Artificial Sequence
  Description of Artificial Sequence: Synthetic peptide
  Seed: RLNPMHQLLRH
RYNPMHQLLRS

SEQ ID NO: 168561 - protein, 11 aa, Artificial Sequence
  Description of Artificial Sequence: Synthetic peptide
  Seed: RLNPMHQLLRH
RYNPMHQLLRT

SEQ ID NO: 168562 - protein, 11 aa, Artificial Sequence
  Description of Artificial Sequence: Synthetic peptide
  Seed: RLNPMHQLLRH
RYNPMHQLLRV

SEQ ID NO: 168563 - protein, 11 aa, Artificial Sequence
  Description of Artificial Sequence: Synthetic peptide
  Seed: RLNPMHQLLRH
RYNPMHQLLRW

SEQ ID NO: 168564 - protein, 11 aa, Artificial Sequence
  Description of Artificial Sequence: Synthetic peptide
  Seed: RLNPMHQLLRH
RYNPMHQLLRY

SEQ ID NO: 168565 - protein, 9 aa, Artificial Sequence
  Description of Artificial Sequence: Synthetic peptide
  Seed: RLNPMHQLL
RYNPMHQLM

SEQ ID NO: 168566 - protein, 9 aa, Artificial Sequence
  Description of Artificial Sequence: Synthetic peptide
  Seed: RLNPMHQLL
RYNPMHQLP

SEQ ID NO: 168567 - protein, 9 aa, Artificial Sequence
  Description of Artificial Sequence: Synthetic peptide
  Seed: RLNPMHQLL
RYNPMHQLR

SEQ ID NO: 168568 - protein, 9 aa, Artificial Sequence
  Description of Artificial Sequence: Synthetic peptide
  Seed: RLNPMHQLL
RYNPMHQLS

SEQ ID NO: 168569 - protein, 9 aa, Artificial Sequence
  Description of Artificial Sequence: Synthetic peptide
  Seed: RLNPMHQLL
RYNPMHQLT

SEQ ID NO: 168570 - protein, 9 aa, Artificial Sequence
  Description of Artificial Sequence: Synthetic peptide
  Seed: RLNPMHQLL
RYNPMHQLV

SEQ ID NO: 168571 - protein, 9 aa, Artificial Sequence
  Description of Artificial Sequence: Synthetic peptide
  Seed: RLNPMHQLL
RYNPMHQLW

SEQ ID NO: 168572 - protein, 9 aa, Artificial Sequence
  Description of Artificial Sequence: Synthetic peptide
  Seed: RLNPMHQLL
RYNPMHQLY

SEQ ID NO: 168573 - protein, 9 aa, Artificial Sequence
  Description of Artificial Sequence: Synthetic peptide
  Seed: RANQRLNPM
RYNQRLNPA

SEQ ID NO: 168574 - protein, 9 aa, Artificial Sequence
  Description of Artificial Sequence: Synthetic peptide
  Seed: RANQRLNPM
RYNQRLNPC

SEQ ID NO: 168575 - protein, 9 aa, Artificial Sequence
  Description of Artificial Sequence: Synthetic peptide
  Seed: RANQRLNPM
RYNQRLNPF

SEQ ID NO: 168576 - protein, 9 aa, Artificial Sequence
  Description of Artificial Sequence: Synthetic peptide
  Seed: RANQRLNPM
RYNQRLNPG

SEQ ID NO: 168577 - protein, 9 aa, Artificial Sequence
  Description of Artificial Sequence: Synthetic peptide
  Seed: RANQRLNPM
RYNQRLNPH

SEQ ID NO: 168578 - protein, 9 aa, Artificial Sequence
  Description of Artificial Sequence: Synthetic peptide
  Seed: RANQRLNPM
RYNQRLNPI

SEQ ID NO: 168579 - protein, 9 aa, Artificial Sequence
  Description of Artificial Sequence: Synthetic peptide
  Seed: RANQRLNPM
RYNQRLNPK

SEQ ID NO: 168580 - protein, 9 aa, Artificial Sequence
  Description of Artificial Sequence: Synthetic peptide
  Seed: RANQRLNPM
RYNQRLNPL

SEQ ID NO: 168581 - protein, 9 aa, Artificial Sequence
  Description of Artificial Sequence: Synthetic peptide
  Seed: RANQRLNPM
RYNQRLNPM

SEQ ID NO: 168582 - protein, 9 aa, Artificial Sequence
  Description of Artificial Sequence: Synthetic peptide
  Seed: RANQRLNPM
RYNQRLNPN

SEQ ID NO: 168583 - protein, 9 aa, Artificial Sequence
  Description of Artificial Sequence: Synthetic peptide
  Seed: RANQRLNPM
RYNQRLNPP

SEQ ID NO: 168584 - protein, 9 aa, Artificial Sequence
  Description of Artificial Sequence: Synthetic peptide
  Seed: RANQRLNPM
RYNQRLNPQ

SEQ ID NO: 168585 - protein, 9 aa, Artificial Sequence
  Description of Artificial Sequence: Synthetic peptide
  Seed: RANQRLNPM
RYNQRLNPR

SEQ ID NO: 168586 - protein, 9 aa, Artificial Sequence
  Description of Artificial Sequence: Synthetic peptide
  Seed: RANQRLNPM
RYNQRLNPS

SEQ ID NO: 168587 - protein, 9 aa, Artificial Sequence
  Description of Artificial Sequence: Synthetic peptide
  Seed: RANQRLNPM
RYNQRLNPT

SEQ ID NO: 168588 - protein, 9 aa, Artificial Sequence
  Description of Artificial Sequence: Synthetic peptide
  Seed: RANQRLNPM
RYNQRLNPV

SEQ ID NO: 168589 - protein, 9 aa, Artificial Sequence
  Description of Artificial Sequence: Synthetic peptide
  Seed: RANQRLNPM
RYNQRLNPW

SEQ ID NO: 168590 - protein, 9 aa, Artificial Sequence
  Description of Artificial Sequence: Synthetic peptide
  Seed: RANQRLNPM
RYNQRLNPY

SEQ ID NO: 168591 - protein, 11 aa, Artificial Sequence
  Description of Artificial Sequence: Synthetic peptide
  Seed: SILTDSQTATK
SALTDSQTATK

SEQ ID NO: 168592 - protein, 11 aa, Artificial Sequence
  Description of Artificial Sequence: Synthetic peptide
  Seed: SILTDSQTATK
SCLTDSQTATK

SEQ ID NO: 168593 - protein, 11 aa, Artificial Sequence
  Description of Artificial Sequence: Synthetic peptide
  Seed: SILTDSQTATK
SDLTDSQTATK

SEQ ID NO: 168594 - protein, 11 aa, Artificial Sequence
  Description of Artificial Sequence: Synthetic peptide
  Seed: SILTDSQTATK
SELTDSQTATK

SEQ ID NO: 168595 - protein, 11 aa, Artificial Sequence
  Description of Artificial Sequence: Synthetic peptide
  Seed: SILTDSQTATK
SFLTDSQTATK

SEQ ID NO: 168596 - protein, 11 aa, Artificial Sequence
  Description of Artificial Sequence: Synthetic peptide
  Seed: SILTDSQTATK
SGLTDSQTATK

SEQ ID NO: 168597 - protein, 11 aa, Artificial Sequence
  Description of Artificial Sequence: Synthetic peptide
  Seed: SILTDSQTATK
SHLTDSQTATK

SEQ ID NO: 168598 - protein, 11 aa, Artificial Sequence
  Description of Artificial Sequence: Synthetic peptide
  Seed: SILTDSQTATK
SKLTDSQTATK

SEQ ID NO: 168599 - protein, 11 aa, Artificial Sequence
  Description of Artificial Sequence: Synthetic peptide
  Seed: SILTDSQTATK
SLLTDSQTATK

SEQ ID NO: 168600 - protein, 11 aa, Artificial Sequence
  Description of Artificial Sequence: Synthetic peptide
  Seed: SILTDSQTATK
SMLTDSQTATK

SEQ ID NO: 168601 - protein, 11 aa, Artificial Sequence
  Description of Artificial Sequence: Synthetic peptide
  Seed: SILTDSQTATK
SNLTDSQTATK

SEQ ID NO: 168602 - protein, 11 aa, Artificial Sequence
  Description of Artificial Sequence: Synthetic peptide
  Seed: SILTDSQTATK
SPLTDSQTATK

SEQ ID NO: 168603 - protein, 11 aa, Artificial Sequence
  Description of Artificial Sequence: Synthetic peptide
  Seed: SILTDSQTATK
SQLTDSQTATK

SEQ ID NO: 168604 - protein, 11 aa, Artificial Sequence
  Description of Artificial Sequence: Synthetic peptide
  Seed: SILTDSQTATK
SRLTDSQTATK

SEQ ID NO: 168605 - protein, 11 aa, Artificial Sequence
  Description of Artificial Sequence: Synthetic peptide
  Seed: SILTDSQTATK
SSLTDSQTATK

SEQ ID NO: 168606 - protein, 11 aa, Artificial Sequence
  Description of Artificial Sequence: Synthetic peptide
  Seed: SILTDSQTATK
STLTDSQTATK

SEQ ID NO: 168607 - protein, 11 aa, Artificial Sequence
  Description of Artificial Sequence: Synthetic peptide
  Seed: SILTDSQTATK
SVLTDSQTATK

SEQ ID NO: 168608 - protein, 11 aa, Artificial Sequence
  Description of Artificial Sequence: Synthetic peptide
  Seed: SILTDSQTATK
SWLTDSQTATK

SEQ ID NO: 168609 - protein, 11 aa, Artificial Sequence
  Description of Artificial Sequence: Synthetic peptide
  Seed: SILTDSQTATK
SYLTDSQTATK

SEQ ID NO: 168610 - protein, 9 aa, Artificial Sequence
  Description of Artificial Sequence: Synthetic peptide
  Seed: TVDHMAIIK
TADHMAIIK

SEQ ID NO: 168611 - protein, 9 aa, Artificial Sequence
  Description of Artificial Sequence: Synthetic peptide
  Seed: TTVDHMAII
TAVDHMAIA

SEQ ID NO: 168612 - protein, 9 aa, Artificial Sequence
  Description of Artificial Sequence: Synthetic peptide
  Seed: TTVDHMAII
TAVDHMAIF

SEQ ID NO: 168613 - protein, 9 aa, Artificial Sequence
  Description of Artificial Sequence: Synthetic peptide
  Seed: TTVDHMAII
TAVDHMAII

SEQ ID NO: 168614 - protein, 10 aa, Artificial Sequence
  Description of Artificial Sequence: Synthetic peptide
  Seed: TTVDHMAIIK
TAVDHMAIIK

SEQ ID NO: 168615 - protein, 10 aa, Artificial Sequence
  Description of Artificial Sequence: Synthetic peptide
  Seed: TTVDHMAIIK
TAVDHMAIIR

SEQ ID NO: 168616 - protein, 9 aa, Artificial Sequence
  Description of Artificial Sequence: Synthetic peptide
  Seed: TTVDHMAII
TAVDHMAIK

SEQ ID NO: 168617 - protein, 9 aa, Artificial Sequence
  Description of Artificial Sequence: Synthetic peptide
  Seed: TTVDHMAII
TAVDHMAIL

SEQ ID NO: 168618 - protein, 9 aa, Artificial Sequence
  Description of Artificial Sequence: Synthetic peptide
  Seed: TTVDHMAII
TAVDHMAIM

SEQ ID NO: 168619 - protein, 9 aa, Artificial Sequence
  Description of Artificial Sequence: Synthetic peptide
  Seed: TTVDHMAII
TAVDHMAIR

SEQ ID NO: 168620 - protein, 9 aa, Artificial Sequence
  Description of Artificial Sequence: Synthetic peptide
  Seed: TTVDHMAII
TAVDHMAIV

SEQ ID NO: 168621 - protein, 9 aa, Artificial Sequence
  Description of Artificial Sequence: Synthetic peptide
  Seed: TTVDHMAII
TAVDHMAIW

SEQ ID NO: 168622 - protein, 9 aa, Artificial Sequence
  Description of Artificial Sequence: Synthetic peptide
  Seed: TTVDHMAII
TAVDHMAIY

SEQ ID NO: 168623 - protein, 10 aa, Artificial Sequence
  Description of Artificial Sequence: Synthetic peptide
  Seed: TTVDHMAIIK
TCVDHMAIIK

SEQ ID NO: 168624 - protein, 10 aa, Artificial Sequence
  Description of Artificial Sequence: Synthetic peptide
  Seed: TTVDHMAIIK
TCVDHMAIIR

SEQ ID NO: 168625 - protein, 9 aa, Artificial Sequence
  Description of Artificial Sequence: Synthetic peptide
  Seed: TTVDHMAII
TCVDHMAIW

SEQ ID NO: 168626 - protein, 9 aa, Artificial Sequence
  Description of Artificial Sequence: Synthetic peptide
  Seed: TTVDHMAII
TCVDHMAIY

SEQ ID NO: 168627 - protein, 10 aa, Artificial Sequence
  Description of Artificial Sequence: Synthetic peptide
  Seed: TTVDHMAIIK
TDVDHMAIIK

SEQ ID NO: 168628 - protein, 10 aa, Artificial Sequence
  Description of Artificial Sequence: Synthetic peptide
  Seed: TTVDHMAIIK
TEVDHMAIIK

SEQ ID NO: 168629 - protein, 10 aa, Artificial Sequence
  Description of Artificial Sequence: Synthetic peptide
  Seed: TTVDHMAIIK
TFVDHMAIIK

SEQ ID NO: 168630 - protein, 10 aa, Artificial Sequence
  Description of Artificial Sequence: Synthetic peptide
  Seed: TTVDHMAIIK
TFVDHMAIIR

SEQ ID NO: 168631 - protein, 9 aa, Artificial Sequence
  Description of Artificial Sequence: Synthetic peptide
  Seed: TTVDHMAII
TFVDHMAIY

SEQ ID NO: 168632 - protein, 9 aa, Artificial Sequence
  Description of Artificial Sequence: Synthetic peptide
  Seed: TTVDHMAII
TGVDHMAIF

SEQ ID NO: 168633 - protein, 10 aa, Artificial Sequence
  Description of Artificial Sequence: Synthetic peptide
  Seed: TTVDHMAIIK
TGVDHMAIIK

SEQ ID NO: 168634 - protein, 10 aa, Artificial Sequence
  Description of Artificial Sequence: Synthetic peptide
  Seed: TTVDHMAIIK
TGVDHMAIIR

SEQ ID NO: 168635 - protein, 9 aa, Artificial Sequence
  Description of Artificial Sequence: Synthetic peptide
  Seed: TTVDHMAII
TGVDHMAIM

SEQ ID NO: 168636 - protein, 9 aa, Artificial Sequence
  Description of Artificial Sequence: Synthetic peptide
  Seed: TTVDHMAII
TGVDHMAIW

SEQ ID NO: 168637 - protein, 9 aa, Artificial Sequence
  Description of Artificial Sequence: Synthetic peptide
  Seed: TTVDHMAII
TGVDHMAIY

SEQ ID NO: 168638 - protein, 10 aa, Artificial Sequence
  Description of Artificial Sequence: Synthetic peptide
  Seed: TTVDHMAIIK
THVDHMAIIK

SEQ ID NO: 168639 - protein, 9 aa, Artificial Sequence
  Description of Artificial Sequence: Synthetic peptide
  Seed: TVDHMAIIK
TIDHMAIIK

SEQ ID NO: 168640 - protein, 9 aa, Artificial Sequence
  Description of Artificial Sequence: Synthetic peptide
  Seed: TTVDHMAII
TIVDHMAIA

SEQ ID NO: 168641 - protein, 9 aa, Artificial Sequence
  Description of Artificial Sequence: Synthetic peptide
  Seed: TTVDHMAII
TIVDHMAIF

SEQ ID NO: 168642 - protein, 9 aa, Artificial Sequence
  Description of Artificial Sequence: Synthetic peptide
  Seed: TTVDHMAII
TIVDHMAIH

SEQ ID NO: 168643 - protein, 9 aa, Artificial Sequence
  Description of Artificial Sequence: Synthetic peptide
  Seed: TTVDHMAII
TIVDHMAII

SEQ ID NO: 168644 - protein, 10 aa, Artificial Sequence
  Description of Artificial Sequence: Synthetic peptide
  Seed: TTVDHMAIIK
TIVDHMAIIK

SEQ ID NO: 168645 - protein, 10 aa, Artificial Sequence
  Description of Artificial Sequence: Synthetic peptide
  Seed: TTVDHMAIIK
TIVDHMAIIM

SEQ ID NO: 168646 - protein, 10 aa, Artificial Sequence
  Description of Artificial Sequence: Synthetic peptide
  Seed: TTVDHMAIIK
TIVDHMAIIR

SEQ ID NO: 168647 - protein, 10 aa, Artificial Sequence
  Description of Artificial Sequence: Synthetic peptide
  Seed: TTVDHMAIIK
TIVDHMAIIY

SEQ ID NO: 168648 - protein, 9 aa, Artificial Sequence
  Description of Artificial Sequence: Synthetic peptide
  Seed: TTVDHMAII
TIVDHMAIK

SEQ ID NO: 168649 - protein, 9 aa, Artificial Sequence
  Description of Artificial Sequence: Synthetic peptide
  Seed: TTVDHMAII
TIVDHMAIL

SEQ ID NO: 168650 - protein, 9 aa, Artificial Sequence
  Description of Artificial Sequence: Synthetic peptide
  Seed: TTVDHMAII
TIVDHMAIM

SEQ ID NO: 168651 - protein, 9 aa, Artificial Sequence
  Description of Artificial Sequence: Synthetic peptide
  Seed: TTVDHMAII
TIVDHMAIR

SEQ ID NO: 168652 - protein, 9 aa, Artificial Sequence
  Description of Artificial Sequence: Synthetic peptide
  Seed: TTVDHMAII
TIVDHMAIT

SEQ ID NO: 168653 - protein, 9 aa, Artificial Sequence
  Description of Artificial Sequence: Synthetic peptide
  Seed: TTVDHMAII
TIVDHMAIV

SEQ ID NO: 168654 - protein, 9 aa, Artificial Sequence
  Description of Artificial Sequence: Synthetic peptide
  Seed: TTVDHMAII
TIVDHMAIW

SEQ ID NO: 168655 - protein, 9 aa, Artificial Sequence
  Description of Artificial Sequence: Synthetic peptide
  Seed: TTVDHMAII
TIVDHMAIY

SEQ ID NO: 168656 - protein, 10 aa, Artificial Sequence
  Description of Artificial Sequence: Synthetic peptide
  Seed: TTVDHMAIIK
TKVDHMAIIK

SEQ ID NO: 168657 - protein, 9 aa, Artificial Sequence
  Description of Artificial Sequence: Synthetic peptide
  Seed: TVDHMAIIK
TLDHMAIIK

SEQ ID NO: 168658 - protein, 9 aa, Artificial Sequence
  Description of Artificial Sequence: Synthetic peptide
  Seed: TTVDHMAII
TLVDHMAIA

SEQ ID NO: 168659 - protein, 9 aa, Artificial Sequence
  Description of Artificial Sequence: Synthetic peptide
  Seed: TTVDHMAII
TLVDHMAIC

SEQ ID NO: 168660 - protein, 9 aa, Artificial Sequence
  Description of Artificial Sequence: Synthetic peptide
  Seed: TTVDHMAII
TLVDHMAIF

SEQ ID NO: 168661 - protein, 9 aa, Artificial Sequence
  Description of Artificial Sequence: Synthetic peptide
  Seed: TTVDHMAII
TLVDHMAIG

SEQ ID NO: 168662 - protein, 9 aa, Artificial Sequence
  Description of Artificial Sequence: Synthetic peptide
  Seed: TTVDHMAII
TLVDHMAII

SEQ ID NO: 168663 - protein, 10 aa, Artificial Sequence
  Description of Artificial Sequence: Synthetic peptide
  Seed: TTVDHMAIIK
TLVDHMAIIK

SEQ ID NO: 168664 - protein, 10 aa, Artificial Sequence
  Description of Artificial Sequence: Synthetic peptide
  Seed: TTVDHMAIIK
TLVDHMAIIR

SEQ ID NO: 168665 - protein, 9 aa, Artificial Sequence
  Description of Artificial Sequence: Synthetic peptide
  Seed: TTVDHMAII
TLVDHMAIK

SEQ ID NO: 168666 - protein, 9 aa, Artificial Sequence
  Description of Artificial Sequence: Synthetic peptide
  Seed: TTVDHMAII
TLVDHMAIL

SEQ ID NO: 168667 - protein, 9 aa, Artificial Sequence
  Description of Artificial Sequence: Synthetic peptide
  Seed: TTVDHMAII
TLVDHMAIM

SEQ ID NO: 168668 - protein, 9 aa, Artificial Sequence
  Description of Artificial Sequence: Synthetic peptide
  Seed: TTVDHMAII
TLVDHMAIP

SEQ ID NO: 168669 - protein, 9 aa, Artificial Sequence
  Description of Artificial Sequence: Synthetic peptide
  Seed: TTVDHMAII
TLVDHMAIR

SEQ ID NO: 168670 - protein, 9 aa, Artificial Sequence
  Description of Artificial Sequence: Synthetic peptide
  Seed: TTVDHMAII
TLVDHMAIS

SEQ ID NO: 168671 - protein, 9 aa, Artificial Sequence
  Description of Artificial Sequence: Synthetic peptide
  Seed: TTVDHMAII
TLVDHMAIT

SEQ ID NO: 168672 - protein, 9 aa, Artificial Sequence
  Description of Artificial Sequence: Synthetic peptide
  Seed: TTVDHMAII
TLVDHMAIV

SEQ ID NO: 168673 - protein, 9 aa, Artificial Sequence
  Description of Artificial Sequence: Synthetic peptide
  Seed: TTVDHMAII
TLVDHMAIW

SEQ ID NO: 168674 - protein, 9 aa, Artificial Sequence
  Description of Artificial Sequence: Synthetic peptide
  Seed: TTVDHMAII
TLVDHMAIY

SEQ ID NO: 168675 - protein, 9 aa, Artificial Sequence
  Description of Artificial Sequence: Synthetic peptide
  Seed: TVDHMAIIK
TMDHMAIIK

SEQ ID NO: 168676 - protein, 9 aa, Artificial Sequence
  Description of Artificial Sequence: Synthetic peptide
  Seed: TVDHMAIIK
TMDHMAIIR

SEQ ID NO: 168677 - protein, 9 aa, Artificial Sequence
  Description of Artificial Sequence: Synthetic peptide
  Seed: TTVDHMAII
TMVDHMAIA

SEQ ID NO: 168678 - protein, 9 aa, Artificial Sequence
  Description of Artificial Sequence: Synthetic peptide
  Seed: TTVDHMAII
TMVDHMAIC

SEQ ID NO: 168679 - protein, 9 aa, Artificial Sequence
  Description of Artificial Sequence: Synthetic peptide
  Seed: TTVDHMAII
TMVDHMAIF

SEQ ID NO: 168680 - protein, 9 aa, Artificial Sequence
  Description of Artificial Sequence: Synthetic peptide
  Seed: TTVDHMAII
TMVDHMAII

SEQ ID NO: 168681 - protein, 10 aa, Artificial Sequence
  Description of Artificial Sequence: Synthetic peptide
  Seed: TTVDHMAIIK
TMVDHMAIIK

SEQ ID NO: 168682 - protein, 10 aa, Artificial Sequence
  Description of Artificial Sequence: Synthetic peptide
  Seed: TTVDHMAIIK
TMVDHMAIIR

SEQ ID NO: 168683 - protein, 9 aa, Artificial Sequence
  Description of Artificial Sequence: Synthetic peptide
  Seed: TTVDHMAII
TMVDHMAIK

SEQ ID NO: 168684 - protein, 9 aa, Artificial Sequence
  Description of Artificial Sequence: Synthetic peptide
  Seed: TTVDHMAII
TMVDHMAIL

SEQ ID NO: 168685 - protein, 9 aa, Artificial Sequence
  Description of Artificial Sequence: Synthetic peptide
  Seed: TTVDHMAII
TMVDHMAIM

SEQ ID NO: 168686 - protein, 9 aa, Artificial Sequence
  Description of Artificial Sequence: Synthetic peptide
  Seed: TTVDHMAII
TMVDHMAIP

SEQ ID NO: 168687 - protein, 9 aa, Artificial Sequence
  Description of Artificial Sequence: Synthetic peptide
  Seed: TTVDHMAII
TMVDHMAIR

SEQ ID NO: 168688 - protein, 9 aa, Artificial Sequence
  Description of Artificial Sequence: Synthetic peptide
  Seed: TTVDHMAII
TMVDHMAIS

SEQ ID NO: 168689 - protein, 9 aa, Artificial Sequence
  Description of Artificial Sequence: Synthetic peptide
  Seed: TTVDHMAII
TMVDHMAIT

SEQ ID NO: 168690 - protein, 9 aa, Artificial Sequence
  Description of Artificial Sequence: Synthetic peptide
  Seed: TTVDHMAII
TMVDHMAIV

SEQ ID NO: 168691 - protein, 9 aa, Artificial Sequence
  Description of Artificial Sequence: Synthetic peptide
  Seed: TTVDHMAII
TMVDHMAIW

SEQ ID NO: 168692 - protein, 9 aa, Artificial Sequence
  Description of Artificial Sequence: Synthetic peptide
  Seed: TTVDHMAII
TMVDHMAIY

SEQ ID NO: 168693 - protein, 10 aa, Artificial Sequence
  Description of Artificial Sequence: Synthetic peptide
  Seed: TTVDHMAIIK
TNVDHMAIIK

SEQ ID NO: 168694 - protein, 10 aa, Artificial Sequence
  Description of Artificial Sequence: Synthetic peptide
  Seed: TTVDHMAIIK
TNVDHMAIIR

SEQ ID NO: 168695 - protein, 9 aa, Artificial Sequence
  Description of Artificial Sequence: Synthetic peptide
  Seed: TTVDHMAII
TNVDHMAIV

SEQ ID NO: 168696 - protein, 9 aa, Artificial Sequence
  Description of Artificial Sequence: Synthetic peptide
  Seed: TTVDHMAII
TNVDHMAIY

SEQ ID NO: 168697 - protein, 10 aa, Artificial Sequence
  Description of Artificial Sequence: Synthetic peptide
  Seed: TTVDHMAIIK
TPVDHMAIIK

SEQ ID NO: 168698 - protein, 10 aa, Artificial Sequence
  Description of Artificial Sequence: Synthetic peptide
  Seed: TTVDHMAIIK
TPVDHMAIIR

SEQ ID NO: 168699 - protein, 9 aa, Artificial Sequence
  Description of Artificial Sequence: Synthetic peptide
  Seed: TTVDHMAII
TPVDHMAIM

SEQ ID NO: 168700 - protein, 9 aa, Artificial Sequence
  Description of Artificial Sequence: Synthetic peptide
  Seed: TTVDHMAII
TPVDHMAIY

SEQ ID NO: 168701 - protein, 9 aa, Artificial Sequence
  Description of Artificial Sequence: Synthetic peptide
  Seed: TVDHMAIIK
TQDHMAIIK

SEQ ID NO: 168702 - protein, 9 aa, Artificial Sequence
  Description of Artificial Sequence: Synthetic peptide
  Seed: TTVDHMAII
TQVDHMAIA

SEQ ID NO: 168703 - protein, 9 aa, Artificial Sequence
  Description of Artificial Sequence: Synthetic peptide
  Seed: TTVDHMAII
TQVDHMAIC

SEQ ID NO: 168704 - protein, 9 aa, Artificial Sequence
  Description of Artificial Sequence: Synthetic peptide
  Seed: TTVDHMAII
TQVDHMAIF

SEQ ID NO: 168705 - protein, 9 aa, Artificial Sequence
  Description of Artificial Sequence: Synthetic peptide
  Seed: TTVDHMAII
TQVDHMAII

SEQ ID NO: 168706 - protein, 10 aa, Artificial Sequence
  Description of Artificial Sequence: Synthetic peptide
  Seed: TTVDHMAIIK
TQVDHMAIIK

SEQ ID NO: 168707 - protein, 10 aa, Artificial Sequence
  Description of Artificial Sequence: Synthetic peptide
  Seed: TTVDHMAIIK
TQVDHMAIIR

SEQ ID NO: 168708 - protein, 9 aa, Artificial Sequence
  Description of Artificial Sequence: Synthetic peptide
  Seed: TTVDHMAII
TQVDHMAIL

SEQ ID NO: 168709 - protein, 9 aa, Artificial Sequence
  Description of Artificial Sequence: Synthetic peptide
  Seed: TTVDHMAII
TQVDHMAIM

SEQ ID NO: 168710 - protein, 9 aa, Artificial Sequence
  Description of Artificial Sequence: Synthetic peptide
  Seed: TTVDHMAII
TQVDHMAIS

SEQ ID NO: 168711 - protein, 9 aa, Artificial Sequence
  Description of Artificial Sequence: Synthetic peptide
  Seed: TTVDHMAII
TQVDHMAIT

SEQ ID NO: 168712 - protein, 9 aa, Artificial Sequence
  Description of Artificial Sequence: Synthetic peptide
  Seed: TTVDHMAII
TQVDHMAIV

SEQ ID NO: 168713 - protein, 9 aa, Artificial Sequence
  Description of Artificial Sequence: Synthetic peptide
  Seed: TTVDHMAII
TQVDHMAIW

SEQ ID NO: 168714 - protein, 9 aa, Artificial Sequence
  Description of Artificial Sequence: Synthetic peptide
  Seed: TTVDHMAII
TQVDHMAIY

SEQ ID NO: 168715 - protein, 10 aa, Artificial Sequence
  Description of Artificial Sequence: Synthetic peptide
  Seed: TTVDHMAIIK
TRVDHMAIIK

SEQ ID NO: 168716 - protein, 9 aa, Artificial Sequence
  Description of Artificial Sequence: Synthetic peptide
  Seed: TVDHMAIIK
TSDHMAIIK

SEQ ID NO: 168717 - protein, 9 aa, Artificial Sequence
  Description of Artificial Sequence: Synthetic peptide
  Seed: TTVDHMAII
TSVDHMAIA

SEQ ID NO: 168718 - protein, 9 aa, Artificial Sequence
  Description of Artificial Sequence: Synthetic peptide
  Seed: TTVDHMAII
TSVDHMAIF

SEQ ID NO: 168719 - protein, 9 aa, Artificial Sequence
  Description of Artificial Sequence: Synthetic peptide
  Seed: TTVDHMAII
TSVDHMAII

SEQ ID NO: 168720 - protein, 10 aa, Artificial Sequence
  Description of Artificial Sequence: Synthetic peptide
  Seed: TTVDHMAIIK
TSVDHMAIIK

SEQ ID NO: 168721 - protein, 10 aa, Artificial Sequence
  Description of Artificial Sequence: Synthetic peptide
  Seed: TTVDHMAIIK
TSVDHMAIIR

SEQ ID NO: 168722 - protein, 9 aa, Artificial Sequence
  Description of Artificial Sequence: Synthetic peptide
  Seed: TTVDHMAII
TSVDHMAIK

SEQ ID NO: 168723 - protein, 9 aa, Artificial Sequence
  Description of Artificial Sequence: Synthetic peptide
  Seed: TTVDHMAII
TSVDHMAIL

SEQ ID NO: 168724 - protein, 9 aa, Artificial Sequence
  Description of Artificial Sequence: Synthetic peptide
  Seed: TTVDHMAII
TSVDHMAIM

SEQ ID NO: 168725 - protein, 9 aa, Artificial Sequence
  Description of Artificial Sequence: Synthetic peptide
  Seed: TTVDHMAII
TSVDHMAIR

SEQ ID NO: 168726 - protein, 9 aa, Artificial Sequence
  Description of Artificial Sequence: Synthetic peptide
  Seed: TTVDHMAII
TSVDHMAIV

SEQ ID NO: 168727 - protein, 9 aa, Artificial Sequence
  Description of Artificial Sequence: Synthetic peptide
  Seed: TTVDHMAII
TSVDHMAIW

SEQ ID NO: 168728 - protein, 9 aa, Artificial Sequence
  Description of Artificial Sequence: Synthetic peptide
  Seed: TTVDHMAII
TSVDHMAIY

SEQ ID NO: 168729 - protein, 9 aa, Artificial Sequence
  Description of Artificial Sequence: Synthetic peptide
  Seed: TVDHMAIIK
TTDHMAIIK

SEQ ID NO: 168730 - protein, 9 aa, Artificial Sequence
  Description of Artificial Sequence: Synthetic peptide
  Seed: TVDHMAIIK
TTDHMAIIR

SEQ ID NO: 168731 - protein, 9 aa, Artificial Sequence
  Description of Artificial Sequence: Synthetic peptide
  Seed: TTVDHMAII
TTVDHMAIA

SEQ ID NO: 168732 - protein, 9 aa, Artificial Sequence
  Description of Artificial Sequence: Synthetic peptide
  Seed: TTVDHMAII
TTVDHMAIC

SEQ ID NO: 168733 - protein, 9 aa, Artificial Sequence
  Description of Artificial Sequence: Synthetic peptide
  Seed: TTVDHMAII
TTVDHMAIF

SEQ ID NO: 168734 - protein, 9 aa, Artificial Sequence
  Description of Artificial Sequence: Synthetic peptide
  Seed: TTVDHMAII
TTVDHMAIH

SEQ ID NO: 168735 - protein, 10 aa, Artificial Sequence
  Description of Artificial Sequence: Synthetic peptide
  Seed: TTVDHMAIIK
TTVDHMAIIM

SEQ ID NO: 168736 - protein, 10 aa, Artificial Sequence
  Description of Artificial Sequence: Synthetic peptide
  Seed: TTVDHMAIIK
TTVDHMAIIR

SEQ ID NO: 168737 - protein, 10 aa, Artificial Sequence
  Description of Artificial Sequence: Synthetic peptide
  Seed: TTVDHMAIIK
TTVDHMAIIY

SEQ ID NO: 168738 - protein, 9 aa, Artificial Sequence
  Description of Artificial Sequence: Synthetic peptide
  Seed: TTVDHMAII
TTVDHMAIK

SEQ ID NO: 168739 - protein, 9 aa, Artificial Sequence
  Description of Artificial Sequence: Synthetic peptide
  Seed: TTVDHMAII
TTVDHMAIR

SEQ ID NO: 168740 - protein, 9 aa, Artificial Sequence
  Description of Artificial Sequence: Synthetic peptide
  Seed: TTVDHMAII
TTVDHMAIS

SEQ ID NO: 168741 - protein, 9 aa, Artificial Sequence
  Description of Artificial Sequence: Synthetic peptide
  Seed: TTVDHMAII
TTVDHMAIT

SEQ ID NO: 168742 - protein, 9 aa, Artificial Sequence
  Description of Artificial Sequence: Synthetic peptide
  Seed: TTVDHMAII
TTVDHMAIV

SEQ ID NO: 168743 - protein, 9 aa, Artificial Sequence
  Description of Artificial Sequence: Synthetic peptide
  Seed: TTVDHMAII
TTVDHMAIW

SEQ ID NO: 168744 - protein, 9 aa, Artificial Sequence
  Description of Artificial Sequence: Synthetic peptide
  Seed: TVDHMAIIK
TVDHMAIIR

SEQ ID NO: 168745 - protein, 9 aa, Artificial Sequence
  Description of Artificial Sequence: Synthetic peptide
  Seed: TTVDHMAII
TVVDHMAIA

SEQ ID NO: 168746 - protein, 9 aa, Artificial Sequence
  Description of Artificial Sequence: Synthetic peptide
  Seed: TTVDHMAII
TVVDHMAIF

SEQ ID NO: 168747 - protein, 9 aa, Artificial Sequence
  Description of Artificial Sequence: Synthetic peptide
  Seed: TTVDHMAII
TVVDHMAIH

SEQ ID NO: 168748 - protein, 9 aa, Artificial Sequence
  Description of Artificial Sequence: Synthetic peptide
  Seed: TTVDHMAII
TVVDHMAII

SEQ ID NO: 168749 - protein, 10 aa, Artificial Sequence
  Description of Artificial Sequence: Synthetic peptide
  Seed: TTVDHMAIIK
TVVDHMAIIM

SEQ ID NO: 168750 - protein, 10 aa, Artificial Sequence
  Description of Artificial Sequence: Synthetic peptide
  Seed: TTVDHMAIIK
TVVDHMAIIR

SEQ ID NO: 168751 - protein, 10 aa, Artificial Sequence
  Description of Artificial Sequence: Synthetic peptide
  Seed: TTVDHMAIIK
TVVDHMAIIY

SEQ ID NO: 168752 - protein, 9 aa, Artificial Sequence
  Description of Artificial Sequence: Synthetic peptide
  Seed: TTVDHMAII
TVVDHMAIK

SEQ ID NO: 168753 - protein, 9 aa, Artificial Sequence
  Description of Artificial Sequence: Synthetic peptide
  Seed: TTVDHMAII
TVVDHMAIL

SEQ ID NO: 168754 - protein, 9 aa, Artificial Sequence
  Description of Artificial Sequence: Synthetic peptide
  Seed: TTVDHMAII
TVVDHMAIM

SEQ ID NO: 168755 - protein, 9 aa, Artificial Sequence
  Description of Artificial Sequence: Synthetic peptide
  Seed: TTVDHMAII
TVVDHMAIQ

SEQ ID NO: 168756 - protein, 9 aa, Artificial Sequence
  Description of Artificial Sequence: Synthetic peptide
  Seed: TTVDHMAII
TVVDHMAIR

SEQ ID NO: 168757 - protein, 9 aa, Artificial Sequence
  Description of Artificial Sequence: Synthetic peptide
  Seed: TTVDHMAII
TVVDHMAIS

SEQ ID NO: 168758 - protein, 9 aa, Artificial Sequence
  Description of Artificial Sequence: Synthetic peptide
  Seed: TTVDHMAII
TVVDHMAIT

SEQ ID NO: 168759 - protein, 9 aa, Artificial Sequence
  Description of Artificial Sequence: Synthetic peptide
  Seed: TTVDHMAII
TVVDHMAIV

SEQ ID NO: 168760 - protein, 9 aa, Artificial Sequence
  Description of Artificial Sequence: Synthetic peptide
  Seed: TTVDHMAII
TVVDHMAIW

SEQ ID NO: 168761 - protein, 10 aa, Artificial Sequence
  Description of Artificial Sequence: Synthetic peptide
  Seed: TTVDHMAIIK
TWVDHMAIIK

SEQ ID NO: 168762 - protein, 10 aa, Artificial Sequence
  Description of Artificial Sequence: Synthetic peptide
  Seed: TTVDHMAIIK
TYVDHMAIIK

SEQ ID NO: 168763 - protein, 10 aa, Artificial Sequence
  Description of Artificial Sequence: Synthetic peptide
  Seed: TTVDHMAIIK
TYVDHMAIIR

SEQ ID NO: 168764 - protein, 9 aa, Artificial Sequence
  Description of Artificial Sequence: Synthetic peptide
  Seed: VVFPNEVGA
VAFPNEVGV

SEQ ID NO: 168765 - protein, 8 aa, Artificial Sequence
  Description of Artificial Sequence: Synthetic peptide
  Seed: VSIDRFLR
VAIDRFLR

SEQ ID NO: 168766 - protein, 9 aa, Artificial Sequence
  Description of Artificial Sequence: Synthetic peptide
  Seed: VRKTRFLPV
VAKTRFLPA

SEQ ID NO: 168767 - protein, 9 aa, Artificial Sequence
  Description of Artificial Sequence: Synthetic peptide
  Seed: VRKTRFLPV
VAKTRFLPC

SEQ ID NO: 168768 - protein, 9 aa, Artificial Sequence
  Description of Artificial Sequence: Synthetic peptide
  Seed: VRKTRFLPV
VAKTRFLPF

SEQ ID NO: 168769 - protein, 9 aa, Artificial Sequence
  Description of Artificial Sequence: Synthetic peptide
  Seed: VRKTRFLPV
VAKTRFLPG

SEQ ID NO: 168770 - protein, 9 aa, Artificial Sequence
  Description of Artificial Sequence: Synthetic peptide
  Seed: VRKTRFLPV
VAKTRFLPI

SEQ ID NO: 168771 - protein, 9 aa, Artificial Sequence
  Description of Artificial Sequence: Synthetic peptide
  Seed: VRKTRFLPV
VAKTRFLPL

SEQ ID NO: 168772 - protein, 9 aa, Artificial Sequence
  Description of Artificial Sequence: Synthetic peptide
  Seed: VRKTRFLPV
VAKTRFLPM

SEQ ID NO: 168773 - protein, 9 aa, Artificial Sequence
  Description of Artificial Sequence: Synthetic peptide
  Seed: VRKTRFLPV
VAKTRFLPS

SEQ ID NO: 168774 - protein, 9 aa, Artificial Sequence
  Description of Artificial Sequence: Synthetic peptide
  Seed: VRKTRFLPV
VAKTRFLPT

SEQ ID NO: 168775 - protein, 9 aa, Artificial Sequence
  Description of Artificial Sequence: Synthetic peptide
  Seed: VRKTRFLPV
VAKTRFLPV

SEQ ID NO: 168776 - protein, 9 aa, Artificial Sequence
  Description of Artificial Sequence: Synthetic peptide
  Seed: VRKTRFLPV
VAKTRFLPW

SEQ ID NO: 168777 - protein, 9 aa, Artificial Sequence
  Description of Artificial Sequence: Synthetic peptide
  Seed: VVLVMKRKR
VALVMKRKR

SEQ ID NO: 168778 - protein, 11 aa, Artificial Sequence
  Description of Artificial Sequence: Synthetic peptide
  Seed: VIMEVVFPNEV
VAMEVVFPNEA

SEQ ID NO: 168779 - protein, 11 aa, Artificial Sequence
  Description of Artificial Sequence: Synthetic peptide
  Seed: VIMEVVFPNEV
VAMEVVFPNEI

SEQ ID NO: 168780 - protein, 11 aa, Artificial Sequence
  Description of Artificial Sequence: Synthetic peptide
  Seed: VIMEVVFPNEV
VAMEVVFPNEL

SEQ ID NO: 168781 - protein, 11 aa, Artificial Sequence
  Description of Artificial Sequence: Synthetic peptide
  Seed: VIMEVVFPNEV
VAMEVVFPNEV

SEQ ID NO: 168782 - protein, 9 aa, Artificial Sequence
  Description of Artificial Sequence: Synthetic peptide
  Seed: VVSIDRFLR
VASIDRFLK

SEQ ID NO: 168783 - protein, 9 aa, Artificial Sequence
  Description of Artificial Sequence: Synthetic peptide
  Seed: VVSIDRFLR
VASIDRFLR

SEQ ID NO: 168784 - protein, 9 aa, Artificial Sequence
  Description of Artificial Sequence: Synthetic peptide
  Seed: VRKTRFLPV
VCKTRFLPA

SEQ ID NO: 168785 - protein, 9 aa, Artificial Sequence
  Description of Artificial Sequence: Synthetic peptide
  Seed: VRKTRFLPV
VCKTRFLPF

SEQ ID NO: 168786 - protein, 9 aa, Artificial Sequence
  Description of Artificial Sequence: Synthetic peptide
  Seed: VRKTRFLPV
VCKTRFLPI

SEQ ID NO: 168787 - protein, 9 aa, Artificial Sequence
  Description of Artificial Sequence: Synthetic peptide
  Seed: VRKTRFLPV
VCKTRFLPL

SEQ ID NO: 168788 - protein, 9 aa, Artificial Sequence
  Description of Artificial Sequence: Synthetic peptide
  Seed: VRKTRFLPV
VCKTRFLPM

SEQ ID NO: 168789 - protein, 9 aa, Artificial Sequence
  Description of Artificial Sequence: Synthetic peptide
  Seed: VRKTRFLPV
VCKTRFLPV

SEQ ID NO: 168790 - protein, 9 aa, Artificial Sequence
  Description of Artificial Sequence: Synthetic peptide
  Seed: VVSIDRFLR
VCSIDRFLR

SEQ ID NO: 168791 - protein, 9 aa, Artificial Sequence
  Description of Artificial Sequence: Synthetic peptide
  Seed: VRKTRFLPV
VDKTRFLPI

SEQ ID NO: 168792 - protein, 9 aa, Artificial Sequence
  Description of Artificial Sequence: Synthetic peptide
  Seed: VRKTRFLPV
VDKTRFLPL

SEQ ID NO: 168793 - protein, 9 aa, Artificial Sequence
  Description of Artificial Sequence: Synthetic peptide
  Seed: VRKTRFLPV
VDKTRFLPM

SEQ ID NO: 168794 - protein, 9 aa, Artificial Sequence
  Description of Artificial Sequence: Synthetic peptide
  Seed: VRKTRFLPV
VDKTRFLPV

SEQ ID NO: 168795 - protein, 9 aa, Artificial Sequence
  Description of Artificial Sequence: Synthetic peptide
  Seed: VRKTRFLPV
VEKTRFLPA

SEQ ID NO: 168796 - protein, 9 aa, Artificial Sequence
  Description of Artificial Sequence: Synthetic peptide
  Seed: VRKTRFLPV
VEKTRFLPI

SEQ ID NO: 168797 - protein, 9 aa, Artificial Sequence
  Description of Artificial Sequence: Synthetic peptide
  Seed: VRKTRFLPV
VEKTRFLPL

SEQ ID NO: 168798 - protein, 9 aa, Artificial Sequence
  Description of Artificial Sequence: Synthetic peptide
  Seed: VRKTRFLPV
VEKTRFLPM

SEQ ID NO: 168799 - protein, 9 aa, Artificial Sequence
  Description of Artificial Sequence: Synthetic peptide
  Seed: VRKTRFLPV
VEKTRFLPV

SEQ ID NO: 168800 - protein, 8 aa, Artificial Sequence
  Description of Artificial Sequence: Synthetic peptide
  Seed: VSIDRFLR
VFIDRFLK

SEQ ID NO: 168801 - protein, 8 aa, Artificial Sequence
  Description of Artificial Sequence: Synthetic peptide
  Seed: VSIDRFLR
VFIDRFLR

SEQ ID NO: 168802 - protein, 9 aa, Artificial Sequence
  Description of Artificial Sequence: Synthetic peptide
  Seed: VRKTRFLPV
VFKTRFLPA

SEQ ID NO: 168803 - protein, 9 aa, Artificial Sequence
  Description of Artificial Sequence: Synthetic peptide
  Seed: VRKTRFLPV
VFKTRFLPC

SEQ ID NO: 168804 - protein, 9 aa, Artificial Sequence
  Description of Artificial Sequence: Synthetic peptide
  Seed: VRKTRFLPV
VFKTRFLPF

SEQ ID NO: 168805 - protein, 9 aa, Artificial Sequence
  Description of Artificial Sequence: Synthetic peptide
  Seed: VRKTRFLPV
VFKTRFLPI

SEQ ID NO: 168806 - protein, 9 aa, Artificial Sequence
  Description of Artificial Sequence: Synthetic peptide
  Seed: VRKTRFLPV
VFKTRFLPL

SEQ ID NO: 168807 - protein, 9 aa, Artificial Sequence
  Description of Artificial Sequence: Synthetic peptide
  Seed: VRKTRFLPV
VFKTRFLPM

SEQ ID NO: 168808 - protein, 9 aa, Artificial Sequence
  Description of Artificial Sequence: Synthetic peptide
  Seed: VRKTRFLPV
VFKTRFLPT

SEQ ID NO: 168809 - protein, 9 aa, Artificial Sequence
  Description of Artificial Sequence: Synthetic peptide
  Seed: VRKTRFLPV
VFKTRFLPV

SEQ ID NO: 168810 - protein, 9 aa, Artificial Sequence
  Description of Artificial Sequence: Synthetic peptide
  Seed: VVLVMKRKR
VFLVMKRKK

SEQ ID NO: 168811 - protein, 9 aa, Artificial Sequence
  Description of Artificial Sequence: Synthetic peptide
  Seed: VVLVMKRKR
VFLVMKRKR

SEQ ID NO: 168812 - protein, 11 aa, Artificial Sequence
  Description of Artificial Sequence: Synthetic peptide
  Seed: VIMEVVFPNEV
VFMEVVFPNEI

SEQ ID NO: 168813 - protein, 11 aa, Artificial Sequence
  Description of Artificial Sequence: Synthetic peptide
  Seed: VIMEVVFPNEV
VFMEVVFPNEV

SEQ ID NO: 168814 - protein, 9 aa, Artificial Sequence
  Description of Artificial Sequence: Synthetic peptide
  Seed: VVSIDRFLR
VFSIDRFLK

SEQ ID NO: 168815 - protein, 9 aa, Artificial Sequence
  Description of Artificial Sequence: Synthetic peptide
  Seed: VVSIDRFLR
VFSIDRFLR

SEQ ID NO: 168816 - protein, 9 aa, Artificial Sequence
  Description of Artificial Sequence: Synthetic peptide
  Seed: VRKTRFLPV
VGKTRFLPA

SEQ ID NO: 168817 - protein, 9 aa, Artificial Sequence
  Description of Artificial Sequence: Synthetic peptide
  Seed: VRKTRFLPV
VGKTRFLPC

SEQ ID NO: 168818 - protein, 9 aa, Artificial Sequence
  Description of Artificial Sequence: Synthetic peptide
  Seed: VRKTRFLPV
VGKTRFLPF

SEQ ID NO: 168819 - protein, 9 aa, Artificial Sequence
  Description of Artificial Sequence: Synthetic peptide
  Seed: VRKTRFLPV
VGKTRFLPI

SEQ ID NO: 168820 - protein, 9 aa, Artificial Sequence
  Description of Artificial Sequence: Synthetic peptide
  Seed: VRKTRFLPV
VGKTRFLPL

SEQ ID NO: 168821 - protein, 9 aa, Artificial Sequence
  Description of Artificial Sequence: Synthetic peptide
  Seed: VRKTRFLPV
VGKTRFLPM

SEQ ID NO: 168822 - protein, 9 aa, Artificial Sequence
  Description of Artificial Sequence: Synthetic peptide
  Seed: VRKTRFLPV
VGKTRFLPT

SEQ ID NO: 168823 - protein, 9 aa, Artificial Sequence
  Description of Artificial Sequence: Synthetic peptide
  Seed: VRKTRFLPV
VGKTRFLPV

SEQ ID NO: 168824 - protein, 9 aa, Artificial Sequence
  Description of Artificial Sequence: Synthetic peptide
  Seed: VVSIDRFLR
VGSIDRFLK

SEQ ID NO: 168825 - protein, 9 aa, Artificial Sequence
  Description of Artificial Sequence: Synthetic peptide
  Seed: VVSIDRFLR
VGSIDRFLR

SEQ ID NO: 168826 - protein, 9 aa, Artificial Sequence
  Description of Artificial Sequence: Synthetic peptide
  Seed: VRKTRFLPV
VHKTRFLPI

SEQ ID NO: 168827 - protein, 9 aa, Artificial Sequence
  Description of Artificial Sequence: Synthetic peptide
  Seed: VRKTRFLPV
VHKTRFLPL

SEQ ID NO: 168828 - protein, 9 aa, Artificial Sequence
  Description of Artificial Sequence: Synthetic peptide
  Seed: VRKTRFLPV
VHKTRFLPM

SEQ ID NO: 168829 - protein, 9 aa, Artificial Sequence
  Description of Artificial Sequence: Synthetic peptide
  Seed: VRKTRFLPV
VHKTRFLPV

SEQ ID NO: 168830 - protein, 9 aa, Artificial Sequence
  Description of Artificial Sequence: Synthetic peptide
  Seed: VVSIDRFLR
VHSIDRFLR

SEQ ID NO: 168831 - protein, 9 aa, Artificial Sequence
  Description of Artificial Sequence: Synthetic peptide
  Seed: VVFPNEVGA
VIFPNEVGV

SEQ ID NO: 168832 - protein, 8 aa, Artificial Sequence
  Description of Artificial Sequence: Synthetic peptide
  Seed: VSIDRFLR
VIIDRFLR

SEQ ID NO: 168833 - protein, 9 aa, Artificial Sequence
  Description of Artificial Sequence: Synthetic peptide
  Seed: VRKTRFLPV
VIKTRFLPA

SEQ ID NO: 168834 - protein, 9 aa, Artificial Sequence
  Description of Artificial Sequence: Synthetic peptide
  Seed: VRKTRFLPV
VIKTRFLPC

SEQ ID NO: 168835 - protein, 9 aa, Artificial Sequence
  Description of Artificial Sequence: Synthetic peptide
  Seed: VRKTRFLPV
VIKTRFLPF

SEQ ID NO: 168836 - protein, 9 aa, Artificial Sequence
  Description of Artificial Sequence: Synthetic peptide
  Seed: VRKTRFLPV
VIKTRFLPG

SEQ ID NO: 168837 - protein, 9 aa, Artificial Sequence
  Description of Artificial Sequence: Synthetic peptide
  Seed: VRKTRFLPV
VIKTRFLPI

SEQ ID NO: 168838 - protein, 9 aa, Artificial Sequence
  Description of Artificial Sequence: Synthetic peptide
  Seed: VRKTRFLPV
VIKTRFLPL

SEQ ID NO: 168839 - protein, 9 aa, Artificial Sequence
  Description of Artificial Sequence: Synthetic peptide
  Seed: VRKTRFLPV
VIKTRFLPM

SEQ ID NO: 168840 - protein, 9 aa, Artificial Sequence
  Description of Artificial Sequence: Synthetic peptide
  Seed: VRKTRFLPV
VIKTRFLPS

SEQ ID NO: 168841 - protein, 9 aa, Artificial Sequence
  Description of Artificial Sequence: Synthetic peptide
  Seed: VRKTRFLPV
VIKTRFLPT

SEQ ID NO: 168842 - protein, 9 aa, Artificial Sequence
  Description of Artificial Sequence: Synthetic peptide
  Seed: VRKTRFLPV
VIKTRFLPV

SEQ ID NO: 168843 - protein, 9 aa, Artificial Sequence
  Description of Artificial Sequence: Synthetic peptide
  Seed: VRKTRFLPV
VIKTRFLPW

SEQ ID NO: 168844 - protein, 9 aa, Artificial Sequence
  Description of Artificial Sequence: Synthetic peptide
  Seed: VVLVMKRKR
VILVMKRKR

SEQ ID NO: 168845 - protein, 11 aa, Artificial Sequence
  Description of Artificial Sequence: Synthetic peptide
  Seed: VIMEVVFPNEV
VIMEVVFPNEA

SEQ ID NO: 168846 - protein, 11 aa, Artificial Sequence
  Description of Artificial Sequence: Synthetic peptide
  Seed: VIMEVVFPNEV
VIMEVVFPNEI

SEQ ID NO: 168847 - protein, 11 aa, Artificial Sequence
  Description of Artificial Sequence: Synthetic peptide
  Seed: VIMEVVFPNEV
VIMEVVFPNEL

SEQ ID NO: 168848 - protein, 11 aa, Artificial Sequence
  Description of Artificial Sequence: Synthetic peptide
  Seed: VIMEVVFPNEV
VIMEVVFPNEM

SEQ ID NO: 168849 - protein, 11 aa, Artificial Sequence
  Description of Artificial Sequence: Synthetic peptide
  Seed: VIMEVVFPNEV
VIMEVVFPNET

SEQ ID NO: 168850 - protein, 9 aa, Artificial Sequence
  Description of Artificial Sequence: Synthetic peptide
  Seed: VVSIDRFLR
VISIDRFLK

SEQ ID NO: 168851 - protein, 9 aa, Artificial Sequence
  Description of Artificial Sequence: Synthetic peptide
  Seed: VVSIDRFLR
VISIDRFLR

SEQ ID NO: 168852 - protein, 9 aa, Artificial Sequence
  Description of Artificial Sequence: Synthetic peptide
  Seed: VVSIDRFLR
VISIDRFLY

SEQ ID NO: 168853 - protein, 9 aa, Artificial Sequence
  Description of Artificial Sequence: Synthetic peptide
  Seed: VRKTRFLPV
VKKTRFLPA

SEQ ID NO: 168854 - protein, 9 aa, Artificial Sequence
  Description of Artificial Sequence: Synthetic peptide
  Seed: VRKTRFLPV
VKKTRFLPF

SEQ ID NO: 168855 - protein, 9 aa, Artificial Sequence
  Description of Artificial Sequence: Synthetic peptide
  Seed: VRKTRFLPV
VKKTRFLPI

SEQ ID NO: 168856 - protein, 9 aa, Artificial Sequence
  Description of Artificial Sequence: Synthetic peptide
  Seed: VRKTRFLPV
VKKTRFLPL

SEQ ID NO: 168857 - protein, 9 aa, Artificial Sequence
  Description of Artificial Sequence: Synthetic peptide
  Seed: VRKTRFLPV
VKKTRFLPM

SEQ ID NO: 168858 - protein, 9 aa, Artificial Sequence
  Description of Artificial Sequence: Synthetic peptide
  Seed: VRKTRFLPV
VKKTRFLPV

SEQ ID NO: 168859 - protein, 8 aa, Artificial Sequence
  Description of Artificial Sequence: Synthetic peptide
  Seed: VSIDRFLR
VLIDRFLK

SEQ ID NO: 168860 - protein, 8 aa, Artificial Sequence
  Description of Artificial Sequence: Synthetic peptide
  Seed: VSIDRFLR
VLIDRFLR

SEQ ID NO: 168861 - protein, 9 aa, Artificial Sequence
  Description of Artificial Sequence: Synthetic peptide
  Seed: VRKTRFLPV
VLKTRFLPA

SEQ ID NO: 168862 - protein, 9 aa, Artificial Sequence
  Description of Artificial Sequence: Synthetic peptide
  Seed: VRKTRFLPV
VLKTRFLPC

SEQ ID NO: 168863 - protein, 9 aa, Artificial Sequence
  Description of Artificial Sequence: Synthetic peptide
  Seed: VRKTRFLPV
VLKTRFLPE

SEQ ID NO: 168864 - protein, 9 aa, Artificial Sequence
  Description of Artificial Sequence: Synthetic peptide
  Seed: VRKTRFLPV
VLKTRFLPF

SEQ ID NO: 168865 - protein, 9 aa, Artificial Sequence
  Description of Artificial Sequence: Synthetic peptide
  Seed: VRKTRFLPV
VLKTRFLPG

SEQ ID NO: 168866 - protein, 9 aa, Artificial Sequence
  Description of Artificial Sequence: Synthetic peptide
  Seed: VRKTRFLPV
VLKTRFLPI

SEQ ID NO: 168867 - protein, 9 aa, Artificial Sequence
  Description of Artificial Sequence: Synthetic peptide
  Seed: VRKTRFLPV
VLKTRFLPL

SEQ ID NO: 168868 - protein, 9 aa, Artificial Sequence
  Description of Artificial Sequence: Synthetic peptide
  Seed: VRKTRFLPV
VLKTRFLPM

SEQ ID NO: 168869 - protein, 9 aa, Artificial Sequence
  Description of Artificial Sequence: Synthetic peptide
  Seed: VRKTRFLPV
VLKTRFLPP

SEQ ID NO: 168870 - protein, 9 aa, Artificial Sequence
  Description of Artificial Sequence: Synthetic peptide
  Seed: VRKTRFLPV
VLKTRFLPS

SEQ ID NO: 168871 - protein, 9 aa, Artificial Sequence
  Description of Artificial Sequence: Synthetic peptide
  Seed: VRKTRFLPV
VLKTRFLPT

SEQ ID NO: 168872 - protein, 9 aa, Artificial Sequence
  Description of Artificial Sequence: Synthetic peptide
  Seed: VRKTRFLPV
VLKTRFLPV

SEQ ID NO: 168873 - protein, 9 aa, Artificial Sequence
  Description of Artificial Sequence: Synthetic peptide
  Seed: VRKTRFLPV
VLKTRFLPW

SEQ ID NO: 168874 - protein, 9 aa, Artificial Sequence
  Description of Artificial Sequence: Synthetic peptide
  Seed: VRKTRFLPV
VLKTRFLPY

SEQ ID NO: 168875 - protein, 9 aa, Artificial Sequence
  Description of Artificial Sequence: Synthetic peptide
  Seed: VVLVMKRKR
VLLVMKRKR

SEQ ID NO: 168876 - protein, 11 aa, Artificial Sequence
  Description of Artificial Sequence: Synthetic peptide
  Seed: VIMEVVFPNEV
VLMEVVFPNEA

SEQ ID NO: 168877 - protein, 11 aa, Artificial Sequence
  Description of Artificial Sequence: Synthetic peptide
  Seed: VIMEVVFPNEV
VLMEVVFPNEC

SEQ ID NO: 168878 - protein, 11 aa, Artificial Sequence
  Description of Artificial Sequence: Synthetic peptide
  Seed: VIMEVVFPNEV
VLMEVVFPNEF

SEQ ID NO: 168879 - protein, 11 aa, Artificial Sequence
  Description of Artificial Sequence: Synthetic peptide
  Seed: VIMEVVFPNEV
VLMEVVFPNEG

SEQ ID NO: 168880 - protein, 11 aa, Artificial Sequence
  Description of Artificial Sequence: Synthetic peptide
  Seed: VIMEVVFPNEV
VLMEVVFPNEI

SEQ ID NO: 168881 - protein, 11 aa, Artificial Sequence
  Description of Artificial Sequence: Synthetic peptide
  Seed: VIMEVVFPNEV
VLMEVVFPNEL

SEQ ID NO: 168882 - protein, 11 aa, Artificial Sequence
  Description of Artificial Sequence: Synthetic peptide
  Seed: VIMEVVFPNEV
VLMEVVFPNEM

SEQ ID NO: 168883 - protein, 11 aa, Artificial Sequence
  Description of Artificial Sequence: Synthetic peptide
  Seed: VIMEVVFPNEV
VLMEVVFPNES

SEQ ID NO: 168884 - protein, 11 aa, Artificial Sequence
  Description of Artificial Sequence: Synthetic peptide
  Seed: VIMEVVFPNEV
VLMEVVFPNET

SEQ ID NO: 168885 - protein, 11 aa, Artificial Sequence
  Description of Artificial Sequence: Synthetic peptide
  Seed: VIMEVVFPNEV
VLMEVVFPNEV

SEQ ID NO: 168886 - protein, 9 aa, Artificial Sequence
  Description of Artificial Sequence: Synthetic peptide
  Seed: VVSIDRFLR
VLSIDRFLK

SEQ ID NO: 168887 - protein, 9 aa, Artificial Sequence
  Description of Artificial Sequence: Synthetic peptide
  Seed: VVSIDRFLR
VLSIDRFLR

SEQ ID NO: 168888 - protein, 9 aa, Artificial Sequence
  Description of Artificial Sequence: Synthetic peptide
  Seed: VVSIDRFLR
VLSIDRFLY

SEQ ID NO: 168889 - protein, 8 aa, Artificial Sequence
  Description of Artificial Sequence: Synthetic peptide
  Seed: VSIDRFLR
VMIDRFLK

SEQ ID NO: 168890 - protein, 8 aa, Artificial Sequence
  Description of Artificial Sequence: Synthetic peptide
  Seed: VSIDRFLR
VMIDRFLR

SEQ ID NO: 168891 - protein, 9 aa, Artificial Sequence
  Description of Artificial Sequence: Synthetic peptide
  Seed: VRKTRFLPV
VMKTRFLPA

SEQ ID NO: 168892 - protein, 9 aa, Artificial Sequence
  Description of Artificial Sequence: Synthetic peptide
  Seed: VRKTRFLPV
VMKTRFLPC

SEQ ID NO: 168893 - protein, 9 aa, Artificial Sequence
  Description of Artificial Sequence: Synthetic peptide
  Seed: VRKTRFLPV
VMKTRFLPE

SEQ ID NO: 168894 - protein, 9 aa, Artificial Sequence
  Description of Artificial Sequence: Synthetic peptide
  Seed: VRKTRFLPV
VMKTRFLPF

SEQ ID NO: 168895 - protein, 9 aa, Artificial Sequence
  Description of Artificial Sequence: Synthetic peptide
  Seed: VRKTRFLPV
VMKTRFLPG

SEQ ID NO: 168896 - protein, 9 aa, Artificial Sequence
  Description of Artificial Sequence: Synthetic peptide
  Seed: VRKTRFLPV
VMKTRFLPI

SEQ ID NO: 168897 - protein, 9 aa, Artificial Sequence
  Description of Artificial Sequence: Synthetic peptide
  Seed: VRKTRFLPV
VMKTRFLPL

SEQ ID NO: 168898 - protein, 9 aa, Artificial Sequence
  Description of Artificial Sequence: Synthetic peptide
  Seed: VRKTRFLPV
VMKTRFLPM

SEQ ID NO: 168899 - protein, 9 aa, Artificial Sequence
  Description of Artificial Sequence: Synthetic peptide
  Seed: VRKTRFLPV
VMKTRFLPP

SEQ ID NO: 168900 - protein, 9 aa, Artificial Sequence
  Description of Artificial Sequence: Synthetic peptide
  Seed: VRKTRFLPV
VMKTRFLPQ

SEQ ID NO: 168901 - protein, 9 aa, Artificial Sequence
  Description of Artificial Sequence: Synthetic peptide
  Seed: VRKTRFLPV
VMKTRFLPS

SEQ ID NO: 168902 - protein, 9 aa, Artificial Sequence
  Description of Artificial Sequence: Synthetic peptide
  Seed: VRKTRFLPV
VMKTRFLPT

SEQ ID NO: 168903 - protein, 9 aa, Artificial Sequence
  Description of Artificial Sequence: Synthetic peptide
  Seed: VRKTRFLPV
VMKTRFLPV

SEQ ID NO: 168904 - protein, 9 aa, Artificial Sequence
  Description of Artificial Sequence: Synthetic peptide
  Seed: VRKTRFLPV
VMKTRFLPW

SEQ ID NO: 168905 - protein, 9 aa, Artificial Sequence
  Description of Artificial Sequence: Synthetic peptide
  Seed: VRKTRFLPV
VMKTRFLPY

SEQ ID NO: 168906 - protein, 9 aa, Artificial Sequence
  Description of Artificial Sequence: Synthetic peptide
  Seed: VVLVMKRKR
VMLVMKRKK

SEQ ID NO: 168907 - protein, 9 aa, Artificial Sequence
  Description of Artificial Sequence: Synthetic peptide
  Seed: VVLVMKRKR
VMLVMKRKR

SEQ ID NO: 168908 - protein, 11 aa, Artificial Sequence
  Description of Artificial Sequence: Synthetic peptide
  Seed: VIMEVVFPNEV
VMMEVVFPNEA

SEQ ID NO: 168909 - protein, 11 aa, Artificial Sequence
  Description of Artificial Sequence: Synthetic peptide
  Seed: VIMEVVFPNEV
VMMEVVFPNEC

SEQ ID NO: 168910 - protein, 11 aa, Artificial Sequence
  Description of Artificial Sequence: Synthetic peptide
  Seed: VIMEVVFPNEV
VMMEVVFPNEF

SEQ ID NO: 168911 - protein, 11 aa, Artificial Sequence
  Description of Artificial Sequence: Synthetic peptide
  Seed: VIMEVVFPNEV
VMMEVVFPNEG

SEQ ID NO: 168912 - protein, 11 aa, Artificial Sequence
  Description of Artificial Sequence: Synthetic peptide
  Seed: VIMEVVFPNEV
VMMEVVFPNEI

SEQ ID NO: 168913 - protein, 11 aa, Artificial Sequence
  Description of Artificial Sequence: Synthetic peptide
  Seed: VIMEVVFPNEV
VMMEVVFPNEL

SEQ ID NO: 168914 - protein, 11 aa, Artificial Sequence
  Description of Artificial Sequence: Synthetic peptide
  Seed: VIMEVVFPNEV
VMMEVVFPNEM

SEQ ID NO: 168915 - protein, 11 aa, Artificial Sequence
  Description of Artificial Sequence: Synthetic peptide
  Seed: VIMEVVFPNEV
VMMEVVFPNEP

SEQ ID NO: 168916 - protein, 11 aa, Artificial Sequence
  Description of Artificial Sequence: Synthetic peptide
  Seed: VIMEVVFPNEV
VMMEVVFPNES

SEQ ID NO: 168917 - protein, 11 aa, Artificial Sequence
  Description of Artificial Sequence: Synthetic peptide
  Seed: VIMEVVFPNEV
VMMEVVFPNET

SEQ ID NO: 168918 - protein, 11 aa, Artificial Sequence
  Description of Artificial Sequence: Synthetic peptide
  Seed: VIMEVVFPNEV
VMMEVVFPNEV

SEQ ID NO: 168919 - protein, 9 aa, Artificial Sequence
  Description of Artificial Sequence: Synthetic peptide
  Seed: VVSIDRFLR
VMSIDRFLH

SEQ ID NO: 168920 - protein, 9 aa, Artificial Sequence
  Description of Artificial Sequence: Synthetic peptide
  Seed: VVSIDRFLR
VMSIDRFLK

SEQ ID NO: 168921 - protein, 9 aa, Artificial Sequence
  Description of Artificial Sequence: Synthetic peptide
  Seed: VVSIDRFLR
VMSIDRFLR

SEQ ID NO: 168922 - protein, 9 aa, Artificial Sequence
  Description of Artificial Sequence: Synthetic peptide
  Seed: VVSIDRFLR
VMSIDRFLY

SEQ ID NO: 168923 - protein, 9 aa, Artificial Sequence
  Description of Artificial Sequence: Synthetic peptide
  Seed: VRKTRFLPV
VNKTRFLPA

SEQ ID NO: 168924 - protein, 9 aa, Artificial Sequence
  Description of Artificial Sequence: Synthetic peptide
  Seed: VRKTRFLPV
VNKTRFLPC

SEQ ID NO: 168925 - protein, 9 aa, Artificial Sequence
  Description of Artificial Sequence: Synthetic peptide
  Seed: VRKTRFLPV
VNKTRFLPF

SEQ ID NO: 168926 - protein, 9 aa, Artificial Sequence
  Description of Artificial Sequence: Synthetic peptide
  Seed: VRKTRFLPV
VNKTRFLPI

SEQ ID NO: 168927 - protein, 9 aa, Artificial Sequence
  Description of Artificial Sequence: Synthetic peptide
  Seed: VRKTRFLPV
VNKTRFLPL

SEQ ID NO: 168928 - protein, 9 aa, Artificial Sequence
  Description of Artificial Sequence: Synthetic peptide
  Seed: VRKTRFLPV
VNKTRFLPM

SEQ ID NO: 168929 - protein, 9 aa, Artificial Sequence
  Description of Artificial Sequence: Synthetic peptide
  Seed: VRKTRFLPV
VNKTRFLPT

SEQ ID NO: 168930 - protein, 9 aa, Artificial Sequence
  Description of Artificial Sequence: Synthetic peptide
  Seed: VRKTRFLPV
VNKTRFLPV

SEQ ID NO: 168931 - protein, 9 aa, Artificial Sequence
  Description of Artificial Sequence: Synthetic peptide
  Seed: VVSIDRFLR
VNSIDRFLK

SEQ ID NO: 168932 - protein, 9 aa, Artificial Sequence
  Description of Artificial Sequence: Synthetic peptide
  Seed: VVSIDRFLR
VNSIDRFLR

SEQ ID NO: 168933 - protein, 9 aa, Artificial Sequence
  Description of Artificial Sequence: Synthetic peptide
  Seed: VRKTRFLPV
VPKTRFLPA

SEQ ID NO: 168934 - protein, 9 aa, Artificial Sequence
  Description of Artificial Sequence: Synthetic peptide
  Seed: VRKTRFLPV
VPKTRFLPC

SEQ ID NO: 168935 - protein, 9 aa, Artificial Sequence
  Description of Artificial Sequence: Synthetic peptide
  Seed: VRKTRFLPV
VPKTRFLPE

SEQ ID NO: 168936 - protein, 9 aa, Artificial Sequence
  Description of Artificial Sequence: Synthetic peptide
  Seed: VRKTRFLPV
VPKTRFLPF

SEQ ID NO: 168937 - protein, 9 aa, Artificial Sequence
  Description of Artificial Sequence: Synthetic peptide
  Seed: VRKTRFLPV
VPKTRFLPG

SEQ ID NO: 168938 - protein, 9 aa, Artificial Sequence
  Description of Artificial Sequence: Synthetic peptide
  Seed: VRKTRFLPV
VPKTRFLPI

SEQ ID NO: 168939 - protein, 9 aa, Artificial Sequence
  Description of Artificial Sequence: Synthetic peptide
  Seed: VRKTRFLPV
VPKTRFLPL

SEQ ID NO: 168940 - protein, 9 aa, Artificial Sequence
  Description of Artificial Sequence: Synthetic peptide
  Seed: VRKTRFLPV
VPKTRFLPM

SEQ ID NO: 168941 - protein, 9 aa, Artificial Sequence
  Description of Artificial Sequence: Synthetic peptide
  Seed: VRKTRFLPV
VPKTRFLPP

SEQ ID NO: 168942 - protein, 9 aa, Artificial Sequence
  Description of Artificial Sequence: Synthetic peptide
  Seed: VRKTRFLPV
VPKTRFLPS

SEQ ID NO: 168943 - protein, 9 aa, Artificial Sequence
  Description of Artificial Sequence: Synthetic peptide
  Seed: VRKTRFLPV
VPKTRFLPT

SEQ ID NO: 168944 - protein, 9 aa, Artificial Sequence
  Description of Artificial Sequence: Synthetic peptide
  Seed: VRKTRFLPV
VPKTRFLPV

SEQ ID NO: 168945 - protein, 9 aa, Artificial Sequence
  Description of Artificial Sequence: Synthetic peptide
  Seed: VRKTRFLPV
VPKTRFLPW

SEQ ID NO: 168946 - protein, 9 aa, Artificial Sequence
  Description of Artificial Sequence: Synthetic peptide
  Seed: VRKTRFLPV
VPKTRFLPY

SEQ ID NO: 168947 - protein, 9 aa, Artificial Sequence
  Description of Artificial Sequence: Synthetic peptide
  Seed: VVSIDRFLR
VPSIDRFLR

SEQ ID NO: 168948 - protein, 8 aa, Artificial Sequence
  Description of Artificial Sequence: Synthetic peptide
  Seed: VSIDRFLR
VQIDRFLR

SEQ ID NO: 168949 - protein, 9 aa, Artificial Sequence
  Description of Artificial Sequence: Synthetic peptide
  Seed: VRKTRFLPV
VQKTRFLPA

SEQ ID NO: 168950 - protein, 9 aa, Artificial Sequence
  Description of Artificial Sequence: Synthetic peptide
  Seed: VRKTRFLPV
VQKTRFLPC

SEQ ID NO: 168951 - protein, 9 aa, Artificial Sequence
  Description of Artificial Sequence: Synthetic peptide
  Seed: VRKTRFLPV
VQKTRFLPF

SEQ ID NO: 168952 - protein, 9 aa, Artificial Sequence
  Description of Artificial Sequence: Synthetic peptide
  Seed: VRKTRFLPV
VQKTRFLPI

SEQ ID NO: 168953 - protein, 9 aa, Artificial Sequence
  Description of Artificial Sequence: Synthetic peptide
  Seed: VRKTRFLPV
VQKTRFLPL

SEQ ID NO: 168954 - protein, 9 aa, Artificial Sequence
  Description of Artificial Sequence: Synthetic peptide
  Seed: VRKTRFLPV
VQKTRFLPM

SEQ ID NO: 168955 - protein, 9 aa, Artificial Sequence
  Description of Artificial Sequence: Synthetic peptide
  Seed: VRKTRFLPV
VQKTRFLPT

SEQ ID NO: 168956 - protein, 9 aa, Artificial Sequence
  Description of Artificial Sequence: Synthetic peptide
  Seed: VRKTRFLPV
VQKTRFLPV

SEQ ID NO: 168957 - protein, 9 aa, Artificial Sequence
  Description of Artificial Sequence: Synthetic peptide
  Seed: VVLVMKRKR
VQLVMKRKR

SEQ ID NO: 168958 - protein, 11 aa, Artificial Sequence
  Description of Artificial Sequence: Synthetic peptide
  Seed: VIMEVVFPNEV
VQMEVVFPNEA

SEQ ID NO: 168959 - protein, 11 aa, Artificial Sequence
  Description of Artificial Sequence: Synthetic peptide
  Seed: VIMEVVFPNEV
VQMEVVFPNEF

SEQ ID NO: 168960 - protein, 11 aa, Artificial Sequence
  Description of Artificial Sequence: Synthetic peptide
  Seed: VIMEVVFPNEV
VQMEVVFPNEI

SEQ ID NO: 168961 - protein, 11 aa, Artificial Sequence
  Description of Artificial Sequence: Synthetic peptide
  Seed: VIMEVVFPNEV
VQMEVVFPNEL

SEQ ID NO: 168962 - protein, 11 aa, Artificial Sequence
  Description of Artificial Sequence: Synthetic peptide
  Seed: VIMEVVFPNEV
VQMEVVFPNEM

SEQ ID NO: 168963 - protein, 11 aa, Artificial Sequence
  Description of Artificial Sequence: Synthetic peptide
  Seed: VIMEVVFPNEV
VQMEVVFPNES

SEQ ID NO: 168964 - protein, 11 aa, Artificial Sequence
  Description of Artificial Sequence: Synthetic peptide
  Seed: VIMEVVFPNEV
VQMEVVFPNET

SEQ ID NO: 168965 - protein, 11 aa, Artificial Sequence
  Description of Artificial Sequence: Synthetic peptide
  Seed: VIMEVVFPNEV
VQMEVVFPNEV

SEQ ID NO: 168966 - protein, 9 aa, Artificial Sequence
  Description of Artificial Sequence: Synthetic peptide
  Seed: VVSIDRFLR
VQSIDRFLK

SEQ ID NO: 168967 - protein, 9 aa, Artificial Sequence
  Description of Artificial Sequence: Synthetic peptide
  Seed: VVSIDRFLR
VQSIDRFLR

SEQ ID NO: 168968 - protein, 9 aa, Artificial Sequence
  Description of Artificial Sequence: Synthetic peptide
  Seed: VRKTRFLPV
VRKTRFLPA

SEQ ID NO: 168969 - protein, 9 aa, Artificial Sequence
  Description of Artificial Sequence: Synthetic peptide
  Seed: VRKTRFLPV
VRKTRFLPF

SEQ ID NO: 168970 - protein, 9 aa, Artificial Sequence
  Description of Artificial Sequence: Synthetic peptide
  Seed: VRKTRFLPV
VRKTRFLPI

SEQ ID NO: 168971 - protein, 9 aa, Artificial Sequence
  Description of Artificial Sequence: Synthetic peptide
  Seed: VRKTRFLPV
VRKTRFLPK

SEQ ID NO: 168972 - protein, 9 aa, Artificial Sequence
  Description of Artificial Sequence: Synthetic peptide
  Seed: VRKTRFLPV
VRKTRFLPL

SEQ ID NO: 168973 - protein, 9 aa, Artificial Sequence
  Description of Artificial Sequence: Synthetic peptide
  Seed: VRKTRFLPV
VRKTRFLPM

SEQ ID NO: 168974 - protein, 9 aa, Artificial Sequence
  Description of Artificial Sequence: Synthetic peptide
  Seed: VRKTRFLPV
VRKTRFLPR

SEQ ID NO: 168975 - protein, 9 aa, Artificial Sequence
  Description of Artificial Sequence: Synthetic peptide
  Seed: VRKTRFLPV
VRKTRFLPW

SEQ ID NO: 168976 - protein, 9 aa, Artificial Sequence
  Description of Artificial Sequence: Synthetic peptide
  Seed: VRKTRFLPV
VRKTRFLPY

SEQ ID NO: 168977 - protein, 9 aa, Artificial Sequence
  Description of Artificial Sequence: Synthetic peptide
  Seed: VVFPNEVGA
VSFPNEVGV

SEQ ID NO: 168978 - protein, 9 aa, Artificial Sequence
  Description of Artificial Sequence: Synthetic peptide
  Seed: VRKTRFLPV
VSKTRFLPA

SEQ ID NO: 168979 - protein, 9 aa, Artificial Sequence
  Description of Artificial Sequence: Synthetic peptide
  Seed: VRKTRFLPV
VSKTRFLPC

SEQ ID NO: 168980 - protein, 9 aa, Artificial Sequence
  Description of Artificial Sequence: Synthetic peptide
  Seed: VRKTRFLPV
VSKTRFLPF

SEQ ID NO: 168981 - protein, 9 aa, Artificial Sequence
  Description of Artificial Sequence: Synthetic peptide
  Seed: VRKTRFLPV
VSKTRFLPI

SEQ ID NO: 168982 - protein, 9 aa, Artificial Sequence
  Description of Artificial Sequence: Synthetic peptide
  Seed: VRKTRFLPV
VSKTRFLPL

SEQ ID NO: 168983 - protein, 9 aa, Artificial Sequence
  Description of Artificial Sequence: Synthetic peptide
  Seed: VRKTRFLPV
VSKTRFLPM

SEQ ID NO: 168984 - protein, 9 aa, Artificial Sequence
  Description of Artificial Sequence: Synthetic peptide
  Seed: VRKTRFLPV
VSKTRFLPT

SEQ ID NO: 168985 - protein, 9 aa, Artificial Sequence
  Description of Artificial Sequence: Synthetic peptide
  Seed: VRKTRFLPV
VSKTRFLPV

SEQ ID NO: 168986 - protein, 9 aa, Artificial Sequence
  Description of Artificial Sequence: Synthetic peptide
  Seed: VVLVMKRKR
VSLVMKRKR

SEQ ID NO: 168987 - protein, 11 aa, Artificial Sequence
  Description of Artificial Sequence: Synthetic peptide
  Seed: VIMEVVFPNEV
VSMEVVFPNEA

SEQ ID NO: 168988 - protein, 11 aa, Artificial Sequence
  Description of Artificial Sequence: Synthetic peptide
  Seed: VIMEVVFPNEV
VSMEVVFPNEI

SEQ ID NO: 168989 - protein, 11 aa, Artificial Sequence
  Description of Artificial Sequence: Synthetic peptide
  Seed: VIMEVVFPNEV
VSMEVVFPNEL

SEQ ID NO: 168990 - protein, 11 aa, Artificial Sequence
  Description of Artificial Sequence: Synthetic peptide
  Seed: VIMEVVFPNEV
VSMEVVFPNEV

SEQ ID NO: 168991 - protein, 9 aa, Artificial Sequence
  Description of Artificial Sequence: Synthetic peptide
  Seed: VVSIDRFLR
VSSIDRFLK

SEQ ID NO: 168992 - protein, 9 aa, Artificial Sequence
  Description of Artificial Sequence: Synthetic peptide
  Seed: VVSIDRFLR
VSSIDRFLR

SEQ ID NO: 168993 - protein, 9 aa, Artificial Sequence
  Description of Artificial Sequence: Synthetic peptide
  Seed: VVSIDRFLR
VSSIDRFLY

SEQ ID NO: 168994 - protein, 9 aa, Artificial Sequence
  Description of Artificial Sequence: Synthetic peptide
  Seed: VVFPNEVGA
VTFPNEVGA

SEQ ID NO: 168995 - protein, 9 aa, Artificial Sequence
  Description of Artificial Sequence: Synthetic peptide
  Seed: VVFPNEVGA
VTFPNEVGI

SEQ ID NO: 168996 - protein, 9 aa, Artificial Sequence
  Description of Artificial Sequence: Synthetic peptide
  Seed: VVFPNEVGA
VTFPNEVGL

SEQ ID NO: 168997 - protein, 9 aa, Artificial Sequence
  Description of Artificial Sequence: Synthetic peptide
  Seed: VVFPNEVGA
VTFPNEVGM

SEQ ID NO: 168998 - protein, 9 aa, Artificial Sequence
  Description of Artificial Sequence: Synthetic peptide
  Seed: VVFPNEVGA
VTFPNEVGV

SEQ ID NO: 168999 - protein, 8 aa, Artificial Sequence
  Description of Artificial Sequence: Synthetic peptide
  Seed: VSIDRFLR
VTIDRFLR

SEQ ID NO: 169000 - protein, 9 aa, Artificial Sequence
  Description of Artificial Sequence: Synthetic peptide
  Seed: VRKTRFLPV
VTKTRFLPA

SEQ ID NO: 169001 - protein, 9 aa, Artificial Sequence
  Description of Artificial Sequence: Synthetic peptide
  Seed: VRKTRFLPV
VTKTRFLPC

SEQ ID NO: 169002 - protein, 9 aa, Artificial Sequence
  Description of Artificial Sequence: Synthetic peptide
  Seed: VRKTRFLPV
VTKTRFLPF

SEQ ID NO: 169003 - protein, 9 aa, Artificial Sequence
  Description of Artificial Sequence: Synthetic peptide
  Seed: VRKTRFLPV
VTKTRFLPI

SEQ ID NO: 169004 - protein, 9 aa, Artificial Sequence
  Description of Artificial Sequence: Synthetic peptide
  Seed: VRKTRFLPV
VTKTRFLPL

SEQ ID NO: 169005 - protein, 9 aa, Artificial Sequence
  Description of Artificial Sequence: Synthetic peptide
  Seed: VRKTRFLPV
VTKTRFLPM

SEQ ID NO: 169006 - protein, 9 aa, Artificial Sequence
  Description of Artificial Sequence: Synthetic peptide
  Seed: VRKTRFLPV
VTKTRFLPT

SEQ ID NO: 169007 - protein, 9 aa, Artificial Sequence
  Description of Artificial Sequence: Synthetic peptide
  Seed: VRKTRFLPV
VTKTRFLPV

SEQ ID NO: 169008 - protein, 9 aa, Artificial Sequence
  Description of Artificial Sequence: Synthetic peptide
  Seed: VVLVMKRKR
VTLVMKRKR

SEQ ID NO: 169009 - protein, 11 aa, Artificial Sequence
  Description of Artificial Sequence: Synthetic peptide
  Seed: VIMEVVFPNEV
VTMEVVFPNEA

SEQ ID NO: 169010 - protein, 11 aa, Artificial Sequence
  Description of Artificial Sequence: Synthetic peptide
  Seed: VIMEVVFPNEV
VTMEVVFPNEI

SEQ ID NO: 169011 - protein, 11 aa, Artificial Sequence
  Description of Artificial Sequence: Synthetic peptide
  Seed: VIMEVVFPNEV
VTMEVVFPNEL

SEQ ID NO: 169012 - protein, 11 aa, Artificial Sequence
  Description of Artificial Sequence: Synthetic peptide
  Seed: VIMEVVFPNEV
VTMEVVFPNEM

SEQ ID NO: 169013 - protein, 11 aa, Artificial Sequence
  Description of Artificial Sequence: Synthetic peptide
  Seed: VIMEVVFPNEV
VTMEVVFPNET

SEQ ID NO: 169014 - protein, 11 aa, Artificial Sequence
  Description of Artificial Sequence: Synthetic peptide
  Seed: VIMEVVFPNEV
VTMEVVFPNEV

SEQ ID NO: 169015 - protein, 9 aa, Artificial Sequence
  Description of Artificial Sequence: Synthetic peptide
  Seed: VVSIDRFLR
VTSIDRFLK

SEQ ID NO: 169016 - protein, 9 aa, Artificial Sequence
  Description of Artificial Sequence: Synthetic peptide
  Seed: VVSIDRFLR
VTSIDRFLY

SEQ ID NO: 169017 - protein, 9 aa, Artificial Sequence
  Description of Artificial Sequence: Synthetic peptide
  Seed: VVFPNEVGA
VVFPNEVGI

SEQ ID NO: 169018 - protein, 9 aa, Artificial Sequence
  Description of Artificial Sequence: Synthetic peptide
  Seed: VVFPNEVGA
VVFPNEVGV

SEQ ID NO: 169019 - protein, 8 aa, Artificial Sequence
  Description of Artificial Sequence: Synthetic peptide
  Seed: VSIDRFLR
VVIDRFLR

SEQ ID NO: 169020 - protein, 9 aa, Artificial Sequence
  Description of Artificial Sequence: Synthetic peptide
  Seed: VRKTRFLPV
VVKTRFLPA

SEQ ID NO: 169021 - protein, 9 aa, Artificial Sequence
  Description of Artificial Sequence: Synthetic peptide
  Seed: VRKTRFLPV
VVKTRFLPC

SEQ ID NO: 169022 - protein, 9 aa, Artificial Sequence
  Description of Artificial Sequence: Synthetic peptide
  Seed: VRKTRFLPV
VVKTRFLPF

SEQ ID NO: 169023 - protein, 9 aa, Artificial Sequence
  Description of Artificial Sequence: Synthetic peptide
  Seed: VRKTRFLPV
VVKTRFLPG

SEQ ID NO: 169024 - protein, 9 aa, Artificial Sequence
  Description of Artificial Sequence: Synthetic peptide
  Seed: VRKTRFLPV
VVKTRFLPI

SEQ ID NO: 169025 - protein, 9 aa, Artificial Sequence
  Description of Artificial Sequence: Synthetic peptide
  Seed: VRKTRFLPV
VVKTRFLPL

SEQ ID NO: 169026 - protein, 9 aa, Artificial Sequence
  Description of Artificial Sequence: Synthetic peptide
  Seed: VRKTRFLPV
VVKTRFLPM

SEQ ID NO: 169027 - protein, 9 aa, Artificial Sequence
  Description of Artificial Sequence: Synthetic peptide
  Seed: VRKTRFLPV
VVKTRFLPS

SEQ ID NO: 169028 - protein, 9 aa, Artificial Sequence
  Description of Artificial Sequence: Synthetic peptide
  Seed: VRKTRFLPV
VVKTRFLPT

SEQ ID NO: 169029 - protein, 9 aa, Artificial Sequence
  Description of Artificial Sequence: Synthetic peptide
  Seed: VRKTRFLPV
VVKTRFLPV

SEQ ID NO: 169030 - protein, 11 aa, Artificial Sequence
  Description of Artificial Sequence: Synthetic peptide
  Seed: VIMEVVFPNEV
VVMEVVFPNEA

SEQ ID NO: 169031 - protein, 11 aa, Artificial Sequence
  Description of Artificial Sequence: Synthetic peptide
  Seed: VIMEVVFPNEV
VVMEVVFPNEI

SEQ ID NO: 169032 - protein, 11 aa, Artificial Sequence
  Description of Artificial Sequence: Synthetic peptide
  Seed: VIMEVVFPNEV
VVMEVVFPNEL

SEQ ID NO: 169033 - protein, 11 aa, Artificial Sequence
  Description of Artificial Sequence: Synthetic peptide
  Seed: VIMEVVFPNEV
VVMEVVFPNEM

SEQ ID NO: 169034 - protein, 11 aa, Artificial Sequence
  Description of Artificial Sequence: Synthetic peptide
  Seed: VIMEVVFPNEV
VVMEVVFPNET

SEQ ID NO: 169035 - protein, 11 aa, Artificial Sequence
  Description of Artificial Sequence: Synthetic peptide
  Seed: VIMEVVFPNEV
VVMEVVFPNEV

SEQ ID NO: 169036 - protein, 9 aa, Artificial Sequence
  Description of Artificial Sequence: Synthetic peptide
  Seed: VVSIDRFLR
VVSIDRFLK

SEQ ID NO: 169037 - protein, 9 aa, Artificial Sequence
  Description of Artificial Sequence: Synthetic peptide
  Seed: VVSIDRFLR
VVSIDRFLY

SEQ ID NO: 169038 - protein, 8 aa, Artificial Sequence
  Description of Artificial Sequence: Synthetic peptide
  Seed: VSIDRFLR
VWIDRFLK

SEQ ID NO: 169039 - protein, 8 aa, Artificial Sequence
  Description of Artificial Sequence: Synthetic peptide
  Seed: VSIDRFLR
VWIDRFLR

SEQ ID NO: 169040 - protein, 9 aa, Artificial Sequence
  Description of Artificial Sequence: Synthetic peptide
  Seed: VRKTRFLPV
VWKTRFLPA

SEQ ID NO: 169041 - protein, 9 aa, Artificial Sequence
  Description of Artificial Sequence: Synthetic peptide
  Seed: VRKTRFLPV
VWKTRFLPF

SEQ ID NO: 169042 - protein, 9 aa, Artificial Sequence
  Description of Artificial Sequence: Synthetic peptide
  Seed: VRKTRFLPV
VWKTRFLPI

SEQ ID NO: 169043 - protein, 9 aa, Artificial Sequence
  Description of Artificial Sequence: Synthetic peptide
  Seed: VRKTRFLPV
VWKTRFLPL

SEQ ID NO: 169044 - protein, 9 aa, Artificial Sequence
  Description of Artificial Sequence: Synthetic peptide
  Seed: VRKTRFLPV
VWKTRFLPM

SEQ ID NO: 169045 - protein, 9 aa, Artificial Sequence
  Description of Artificial Sequence: Synthetic peptide
  Seed: VRKTRFLPV
VWKTRFLPV

SEQ ID NO: 169046 - protein, 9 aa, Artificial Sequence
  Description of Artificial Sequence: Synthetic peptide
  Seed: VVLVMKRKR
VWLVMKRKR

SEQ ID NO: 169047 - protein, 9 aa, Artificial Sequence
  Description of Artificial Sequence: Synthetic peptide
  Seed: VVSIDRFLR
VWSIDRFLK

SEQ ID NO: 169048 - protein, 9 aa, Artificial Sequence
  Description of Artificial Sequence: Synthetic peptide
  Seed: VVSIDRFLR
VWSIDRFLR

SEQ ID NO: 169049 - protein, 8 aa, Artificial Sequence
  Description of Artificial Sequence: Synthetic peptide
  Seed: VSIDRFLR
VYIDRFLK

SEQ ID NO: 169050 - protein, 8 aa, Artificial Sequence
  Description of Artificial Sequence: Synthetic peptide
  Seed: VSIDRFLR
VYIDRFLR

SEQ ID NO: 169051 - protein, 9 aa, Artificial Sequence
  Description of Artificial Sequence: Synthetic peptide
  Seed: VRKTRFLPV
VYKTRFLPA

SEQ ID NO: 169052 - protein, 9 aa, Artificial Sequence
  Description of Artificial Sequence: Synthetic peptide
  Seed: VRKTRFLPV
VYKTRFLPF

SEQ ID NO: 169053 - protein, 9 aa, Artificial Sequence
  Description of Artificial Sequence: Synthetic peptide
  Seed: VRKTRFLPV
VYKTRFLPI

SEQ ID NO: 169054 - protein, 9 aa, Artificial Sequence
  Description of Artificial Sequence: Synthetic peptide
  Seed: VRKTRFLPV
VYKTRFLPL

SEQ ID NO: 169055 - protein, 9 aa, Artificial Sequence
  Description of Artificial Sequence: Synthetic peptide
  Seed: VRKTRFLPV
VYKTRFLPM

SEQ ID NO: 169056 - protein, 9 aa, Artificial Sequence
  Description of Artificial Sequence: Synthetic peptide
  Seed: VRKTRFLPV
VYKTRFLPV

SEQ ID NO: 169057 - protein, 9 aa, Artificial Sequence
  Description of Artificial Sequence: Synthetic peptide
  Seed: VRKTRFLPV
VYKTRFLPY

SEQ ID NO: 169058 - protein, 9 aa, Artificial Sequence
  Description of Artificial Sequence: Synthetic peptide
  Seed: VVLVMKRKR
VYLVMKRKK

SEQ ID NO: 169059 - protein, 9 aa, Artificial Sequence
  Description of Artificial Sequence: Synthetic peptide
  Seed: VVLVMKRKR
VYLVMKRKR

SEQ ID NO: 169060 - protein, 11 aa, Artificial Sequence
  Description of Artificial Sequence: Synthetic peptide
  Seed: VIMEVVFPNEV
VYMEVVFPNEV

SEQ ID NO: 169061 - protein, 9 aa, Artificial Sequence
  Description of Artificial Sequence: Synthetic peptide
  Seed: VVSIDRFLR
VYSIDRFLK

SEQ ID NO: 169062 - protein, 9 aa, Artificial Sequence
  Description of Artificial Sequence: Synthetic peptide
  Seed: VVSIDRFLR
VYSIDRFLR

SEQ ID NO: 169063 - protein, 9 aa, Artificial Sequence
  Description of Artificial Sequence: Synthetic peptide
  Seed: WMMAMKYPI
WAMAMKYPA

SEQ ID NO: 169064 - protein, 9 aa, Artificial Sequence
  Description of Artificial Sequence: Synthetic peptide
  Seed: WMMAMKYPI
WAMAMKYPF

SEQ ID NO: 169065 - protein, 9 aa, Artificial Sequence
  Description of Artificial Sequence: Synthetic peptide
  Seed: WMMAMKYPI
WAMAMKYPH

SEQ ID NO: 169066 - protein, 9 aa, Artificial Sequence
  Description of Artificial Sequence: Synthetic peptide
  Seed: WMMAMKYPI
WAMAMKYPI

SEQ ID NO: 169067 - protein, 10 aa, Artificial Sequence
  Description of Artificial Sequence: Synthetic peptide
  Seed: WMMAMKYPIT
WAMAMKYPIA

SEQ ID NO: 169068 - protein, 10 aa, Artificial Sequence
  Description of Artificial Sequence: Synthetic peptide
  Seed: WMMAMKYPIT
WAMAMKYPII

SEQ ID NO: 169069 - protein, 10 aa, Artificial Sequence
  Description of Artificial Sequence: Synthetic peptide
  Seed: WMMAMKYPIT
WAMAMKYPIL

SEQ ID NO: 169070 - protein, 11 aa, Artificial Sequence
  Description of Artificial Sequence: Synthetic peptide
  Seed: WMMAMKYPITA
WAMAMKYPITV

SEQ ID NO: 169071 - protein, 10 aa, Artificial Sequence
  Description of Artificial Sequence: Synthetic peptide
  Seed: WMMAMKYPIT
WAMAMKYPIV

SEQ ID NO: 169072 - protein, 9 aa, Artificial Sequence
  Description of Artificial Sequence: Synthetic peptide
  Seed: WMMAMKYPI
WAMAMKYPK

SEQ ID NO: 169073 - protein, 9 aa, Artificial Sequence
  Description of Artificial Sequence: Synthetic peptide
  Seed: WMMAMKYPI
WAMAMKYPL

SEQ ID NO: 169074 - protein, 9 aa, Artificial Sequence
  Description of Artificial Sequence: Synthetic peptide
  Seed: WMMAMKYPI
WAMAMKYPM

SEQ ID NO: 169075 - protein, 9 aa, Artificial Sequence
  Description of Artificial Sequence: Synthetic peptide
  Seed: WMMAMKYPI
WAMAMKYPR

SEQ ID NO: 169076 - protein, 9 aa, Artificial Sequence
  Description of Artificial Sequence: Synthetic peptide
  Seed: WMMAMKYPI
WAMAMKYPV

SEQ ID NO: 169077 - protein, 9 aa, Artificial Sequence
  Description of Artificial Sequence: Synthetic peptide
  Seed: WMMAMKYPI
WAMAMKYPW

SEQ ID NO: 169078 - protein, 9 aa, Artificial Sequence
  Description of Artificial Sequence: Synthetic peptide
  Seed: WMMAMKYPI
WAMAMKYPY

SEQ ID NO: 169079 - protein, 9 aa, Artificial Sequence
  Description of Artificial Sequence: Synthetic peptide
  Seed: WMMAMKYPI
WCMAMKYPF

SEQ ID NO: 169080 - protein, 9 aa, Artificial Sequence
  Description of Artificial Sequence: Synthetic peptide
  Seed: WMMAMKYPI
WCMAMKYPI

SEQ ID NO: 169081 - protein, 10 aa, Artificial Sequence
  Description of Artificial Sequence: Synthetic peptide
  Seed: WMMAMKYPIT
WCMAMKYPIA

SEQ ID NO: 169082 - protein, 10 aa, Artificial Sequence
  Description of Artificial Sequence: Synthetic peptide
  Seed: WMMAMKYPIT
WCMAMKYPII

SEQ ID NO: 169083 - protein, 10 aa, Artificial Sequence
  Description of Artificial Sequence: Synthetic peptide
  Seed: WMMAMKYPIT
WCMAMKYPIL

SEQ ID NO: 169084 - protein, 11 aa, Artificial Sequence
  Description of Artificial Sequence: Synthetic peptide
  Seed: WMMAMKYPITA
WCMAMKYPITV

SEQ ID NO: 169085 - protein, 10 aa, Artificial Sequence
  Description of Artificial Sequence: Synthetic peptide
  Seed: WMMAMKYPIT
WCMAMKYPIV

SEQ ID NO: 169086 - protein, 9 aa, Artificial Sequence
  Description of Artificial Sequence: Synthetic peptide
  Seed: WMMAMKYPI
WCMAMKYPL

SEQ ID NO: 169087 - protein, 9 aa, Artificial Sequence
  Description of Artificial Sequence: Synthetic peptide
  Seed: WMMAMKYPI
WCMAMKYPM

SEQ ID NO: 169088 - protein, 9 aa, Artificial Sequence
  Description of Artificial Sequence: Synthetic peptide
  Seed: WMMAMKYPI
WCMAMKYPR

SEQ ID NO: 169089 - protein, 9 aa, Artificial Sequence
  Description of Artificial Sequence: Synthetic peptide
  Seed: WMMAMKYPI
WCMAMKYPV

SEQ ID NO: 169090 - protein, 9 aa, Artificial Sequence
  Description of Artificial Sequence: Synthetic peptide
  Seed: WMMAMKYPI
WCMAMKYPY

SEQ ID NO: 169091 - protein, 9 aa, Artificial Sequence
  Description of Artificial Sequence: Synthetic peptide
  Seed: WMMAMKYPI
WDMAMKYPA

SEQ ID NO: 169092 - protein, 9 aa, Artificial Sequence
  Description of Artificial Sequence: Synthetic peptide
  Seed: WMMAMKYPI
WDMAMKYPF

SEQ ID NO: 169093 - protein, 9 aa, Artificial Sequence
  Description of Artificial Sequence: Synthetic peptide
  Seed: WMMAMKYPI
WDMAMKYPI

SEQ ID NO: 169094 - protein, 10 aa, Artificial Sequence
  Description of Artificial Sequence: Synthetic peptide
  Seed: WMMAMKYPIT
WDMAMKYPIA

SEQ ID NO: 169095 - protein, 10 aa, Artificial Sequence
  Description of Artificial Sequence: Synthetic peptide
  Seed: WMMAMKYPIT
WDMAMKYPII

SEQ ID NO: 169096 - protein, 10 aa, Artificial Sequence
  Description of Artificial Sequence: Synthetic peptide
  Seed: WMMAMKYPIT
WDMAMKYPIL

SEQ ID NO: 169097 - protein, 10 aa, Artificial Sequence
  Description of Artificial Sequence: Synthetic peptide
  Seed: WMMAMKYPIT
WDMAMKYPIV

SEQ ID NO: 169098 - protein, 9 aa, Artificial Sequence
  Description of Artificial Sequence: Synthetic peptide
  Seed: WMMAMKYPI
WDMAMKYPL

SEQ ID NO: 169099 - protein, 9 aa, Artificial Sequence
  Description of Artificial Sequence: Synthetic peptide
  Seed: WMMAMKYPI
WDMAMKYPM

SEQ ID NO: 169100 - protein, 9 aa, Artificial Sequence
  Description of Artificial Sequence: Synthetic peptide
  Seed: WMMAMKYPI
WDMAMKYPT

SEQ ID NO: 169101 - protein, 9 aa, Artificial Sequence
  Description of Artificial Sequence: Synthetic peptide
  Seed: WMMAMKYPI
WDMAMKYPV

SEQ ID NO: 169102 - protein, 9 aa, Artificial Sequence
  Description of Artificial Sequence: Synthetic peptide
  Seed: WMMAMKYPI
WDMAMKYPW

SEQ ID NO: 169103 - protein, 9 aa, Artificial Sequence
  Description of Artificial Sequence: Synthetic peptide
  Seed: WMMAMKYPI
WDMAMKYPY

SEQ ID NO: 169104 - protein, 9 aa, Artificial Sequence
  Description of Artificial Sequence: Synthetic peptide
  Seed: WMMAMKYPI
WEMAMKYPA

SEQ ID NO: 169105 - protein, 9 aa, Artificial Sequence
  Description of Artificial Sequence: Synthetic peptide
  Seed: WMMAMKYPI
WEMAMKYPC

SEQ ID NO: 169106 - protein, 9 aa, Artificial Sequence
  Description of Artificial Sequence: Synthetic peptide
  Seed: WMMAMKYPI
WEMAMKYPD

SEQ ID NO: 169107 - protein, 9 aa, Artificial Sequence
  Description of Artificial Sequence: Synthetic peptide
  Seed: WMMAMKYPI
WEMAMKYPE

SEQ ID NO: 169108 - protein, 9 aa, Artificial Sequence
  Description of Artificial Sequence: Synthetic peptide
  Seed: WMMAMKYPI
WEMAMKYPF

SEQ ID NO: 169109 - protein, 9 aa, Artificial Sequence
  Description of Artificial Sequence: Synthetic peptide
  Seed: WMMAMKYPI
WEMAMKYPG

SEQ ID NO: 169110 - protein, 9 aa, Artificial Sequence
  Description of Artificial Sequence: Synthetic peptide
  Seed: WMMAMKYPI
WEMAMKYPH

SEQ ID NO: 169111 - protein, 9 aa, Artificial Sequence
  Description of Artificial Sequence: Synthetic peptide
  Seed: WMMAMKYPI
WEMAMKYPI

SEQ ID NO: 169112 - protein, 10 aa, Artificial Sequence
  Description of Artificial Sequence: Synthetic peptide
  Seed: WMMAMKYPIT
WEMAMKYPIA

SEQ ID NO: 169113 - protein, 10 aa, Artificial Sequence
  Description of Artificial Sequence: Synthetic peptide
  Seed: WMMAMKYPIT
WEMAMKYPII

SEQ ID NO: 169114 - protein, 10 aa, Artificial Sequence
  Description of Artificial Sequence: Synthetic peptide
  Seed: WMMAMKYPIT
WEMAMKYPIL

SEQ ID NO: 169115 - protein, 10 aa, Artificial Sequence
  Description of Artificial Sequence: Synthetic peptide
  Seed: WMMAMKYPIT
WEMAMKYPIV

SEQ ID NO: 169116 - protein, 9 aa, Artificial Sequence
  Description of Artificial Sequence: Synthetic peptide
  Seed: WMMAMKYPI
WEMAMKYPK

SEQ ID NO: 169117 - protein, 9 aa, Artificial Sequence
  Description of Artificial Sequence: Synthetic peptide
  Seed: WMMAMKYPI
WEMAMKYPL

SEQ ID NO: 169118 - protein, 9 aa, Artificial Sequence
  Description of Artificial Sequence: Synthetic peptide
  Seed: WMMAMKYPI
WEMAMKYPM

SEQ ID NO: 169119 - protein, 9 aa, Artificial Sequence
  Description of Artificial Sequence: Synthetic peptide
  Seed: WMMAMKYPI
WEMAMKYPN

SEQ ID NO: 169120 - protein, 9 aa, Artificial Sequence
  Description of Artificial Sequence: Synthetic peptide
  Seed: WMMAMKYPI
WEMAMKYPP

SEQ ID NO: 169121 - protein, 9 aa, Artificial Sequence
  Description of Artificial Sequence: Synthetic peptide
  Seed: WMMAMKYPI
WEMAMKYPQ

SEQ ID NO: 169122 - protein, 9 aa, Artificial Sequence
  Description of Artificial Sequence: Synthetic peptide
  Seed: WMMAMKYPI
WEMAMKYPR

SEQ ID NO: 169123 - protein, 9 aa, Artificial Sequence
  Description of Artificial Sequence: Synthetic peptide
  Seed: WMMAMKYPI
WEMAMKYPS

SEQ ID NO: 169124 - protein, 9 aa, Artificial Sequence
  Description of Artificial Sequence: Synthetic peptide
  Seed: WMMAMKYPI
WEMAMKYPT

SEQ ID NO: 169125 - protein, 9 aa, Artificial Sequence
  Description of Artificial Sequence: Synthetic peptide
  Seed: WMMAMKYPI
WEMAMKYPV

SEQ ID NO: 169126 - protein, 9 aa, Artificial Sequence
  Description of Artificial Sequence: Synthetic peptide
  Seed: WMMAMKYPI
WEMAMKYPW

SEQ ID NO: 169127 - protein, 9 aa, Artificial Sequence
  Description of Artificial Sequence: Synthetic peptide
  Seed: WMMAMKYPI
WEMAMKYPY

SEQ ID NO: 169128 - protein, 9 aa, Artificial Sequence
  Description of Artificial Sequence: Synthetic peptide
  Seed: WMMAMKYPI
WFMAMKYPA

SEQ ID NO: 169129 - protein, 9 aa, Artificial Sequence
  Description of Artificial Sequence: Synthetic peptide
  Seed: WMMAMKYPI
WFMAMKYPF

SEQ ID NO: 169130 - protein, 9 aa, Artificial Sequence
  Description of Artificial Sequence: Synthetic peptide
  Seed: WMMAMKYPI
WFMAMKYPH

SEQ ID NO: 169131 - protein, 9 aa, Artificial Sequence
  Description of Artificial Sequence: Synthetic peptide
  Seed: WMMAMKYPI
WFMAMKYPI

SEQ ID NO: 169132 - protein, 10 aa, Artificial Sequence
  Description of Artificial Sequence: Synthetic peptide
  Seed: WMMAMKYPIT
WFMAMKYPIA

SEQ ID NO: 169133 - protein, 10 aa, Artificial Sequence
  Description of Artificial Sequence: Synthetic peptide
  Seed: WMMAMKYPIT
WFMAMKYPII

SEQ ID NO: 169134 - protein, 10 aa, Artificial Sequence
  Description of Artificial Sequence: Synthetic peptide
  Seed: WMMAMKYPIT
WFMAMKYPIL

SEQ ID NO: 169135 - protein, 11 aa, Artificial Sequence
  Description of Artificial Sequence: Synthetic peptide
  Seed: WMMAMKYPITA
WFMAMKYPITA

SEQ ID NO: 169136 - protein, 11 aa, Artificial Sequence
  Description of Artificial Sequence: Synthetic peptide
  Seed: WMMAMKYPITA
WFMAMKYPITI

SEQ ID NO: 169137 - protein, 11 aa, Artificial Sequence
  Description of Artificial Sequence: Synthetic peptide
  Seed: WMMAMKYPITA
WFMAMKYPITL

SEQ ID NO: 169138 - protein, 11 aa, Artificial Sequence
  Description of Artificial Sequence: Synthetic peptide
  Seed: WMMAMKYPITA
WFMAMKYPITM

SEQ ID NO: 169139 - protein, 11 aa, Artificial Sequence
  Description of Artificial Sequence: Synthetic peptide
  Seed: WMMAMKYPITA
WFMAMKYPITV

SEQ ID NO: 169140 - protein, 10 aa, Artificial Sequence
  Description of Artificial Sequence: Synthetic peptide
  Seed: WMMAMKYPIT
WFMAMKYPIV

SEQ ID NO: 169141 - protein, 9 aa, Artificial Sequence
  Description of Artificial Sequence: Synthetic peptide
  Seed: WMMAMKYPI
WFMAMKYPK

SEQ ID NO: 169142 - protein, 9 aa, Artificial Sequence
  Description of Artificial Sequence: Synthetic peptide
  Seed: WMMAMKYPI
WFMAMKYPL

SEQ ID NO: 169143 - protein, 9 aa, Artificial Sequence
  Description of Artificial Sequence: Synthetic peptide
  Seed: WMMAMKYPI
WFMAMKYPM

SEQ ID NO: 169144 - protein, 9 aa, Artificial Sequence
  Description of Artificial Sequence: Synthetic peptide
  Seed: WMMAMKYPI
WFMAMKYPR

SEQ ID NO: 169145 - protein, 9 aa, Artificial Sequence
  Description of Artificial Sequence: Synthetic peptide
  Seed: WMMAMKYPI
WFMAMKYPV

SEQ ID NO: 169146 - protein, 9 aa, Artificial Sequence
  Description of Artificial Sequence: Synthetic peptide
  Seed: WMMAMKYPI
WFMAMKYPW

SEQ ID NO: 169147 - protein, 9 aa, Artificial Sequence
  Description of Artificial Sequence: Synthetic peptide
  Seed: WMMAMKYPI
WFMAMKYPY

SEQ ID NO: 169148 - protein, 9 aa, Artificial Sequence
  Description of Artificial Sequence: Synthetic peptide
  Seed: WMMAMKYPI
WGMAMKYPA

SEQ ID NO: 169149 - protein, 9 aa, Artificial Sequence
  Description of Artificial Sequence: Synthetic peptide
  Seed: WMMAMKYPI
WGMAMKYPF

SEQ ID NO: 169150 - protein, 9 aa, Artificial Sequence
  Description of Artificial Sequence: Synthetic peptide
  Seed: WMMAMKYPI
WGMAMKYPI

SEQ ID NO: 169151 - protein, 10 aa, Artificial Sequence
  Description of Artificial Sequence: Synthetic peptide
  Seed: WMMAMKYPIT
WGMAMKYPIA

SEQ ID NO: 169152 - protein, 10 aa, Artificial Sequence
  Description of Artificial Sequence: Synthetic peptide
  Seed: WMMAMKYPIT
WGMAMKYPII

SEQ ID NO: 169153 - protein, 10 aa, Artificial Sequence
  Description of Artificial Sequence: Synthetic peptide
  Seed: WMMAMKYPIT
WGMAMKYPIL

SEQ ID NO: 169154 - protein, 11 aa, Artificial Sequence
  Description of Artificial Sequence: Synthetic peptide
  Seed: WMMAMKYPITA
WGMAMKYPITV

SEQ ID NO: 169155 - protein, 10 aa, Artificial Sequence
  Description of Artificial Sequence: Synthetic peptide
  Seed: WMMAMKYPIT
WGMAMKYPIV

SEQ ID NO: 169156 - protein, 9 aa, Artificial Sequence
  Description of Artificial Sequence: Synthetic peptide
  Seed: WMMAMKYPI
WGMAMKYPK

SEQ ID NO: 169157 - protein, 9 aa, Artificial Sequence
  Description of Artificial Sequence: Synthetic peptide
  Seed: WMMAMKYPI
WGMAMKYPL

SEQ ID NO: 169158 - protein, 9 aa, Artificial Sequence
  Description of Artificial Sequence: Synthetic peptide
  Seed: WMMAMKYPI
WGMAMKYPM

SEQ ID NO: 169159 - protein, 9 aa, Artificial Sequence
  Description of Artificial Sequence: Synthetic peptide
  Seed: WMMAMKYPI
WGMAMKYPR

SEQ ID NO: 169160 - protein, 9 aa, Artificial Sequence
  Description of Artificial Sequence: Synthetic peptide
  Seed: WMMAMKYPI
WGMAMKYPV

SEQ ID NO: 169161 - protein, 9 aa, Artificial Sequence
  Description of Artificial Sequence: Synthetic peptide
  Seed: WMMAMKYPI
WGMAMKYPW

SEQ ID NO: 169162 - protein, 9 aa, Artificial Sequence
  Description of Artificial Sequence: Synthetic peptide
  Seed: WMMAMKYPI
WGMAMKYPY

SEQ ID NO: 169163 - protein, 9 aa, Artificial Sequence
  Description of Artificial Sequence: Synthetic peptide
  Seed: WMMAMKYPI
WHMAMKYPA

SEQ ID NO: 169164 - protein, 9 aa, Artificial Sequence
  Description of Artificial Sequence: Synthetic peptide
  Seed: WMMAMKYPI
WHMAMKYPC

SEQ ID NO: 169165 - protein, 9 aa, Artificial Sequence
  Description of Artificial Sequence: Synthetic peptide
  Seed: WMMAMKYPI
WHMAMKYPD

SEQ ID NO: 169166 - protein, 9 aa, Artificial Sequence
  Description of Artificial Sequence: Synthetic peptide
  Seed: WMMAMKYPI
WHMAMKYPE

SEQ ID NO: 169167 - protein, 9 aa, Artificial Sequence
  Description of Artificial Sequence: Synthetic peptide
  Seed: WMMAMKYPI
WHMAMKYPF

SEQ ID NO: 169168 - protein, 9 aa, Artificial Sequence
  Description of Artificial Sequence: Synthetic peptide
  Seed: WMMAMKYPI
WHMAMKYPG

SEQ ID NO: 169169 - protein, 9 aa, Artificial Sequence
  Description of Artificial Sequence: Synthetic peptide
  Seed: WMMAMKYPI
WHMAMKYPH

SEQ ID NO: 169170 - protein, 9 aa, Artificial Sequence
  Description of Artificial Sequence: Synthetic peptide
  Seed: WMMAMKYPI
WHMAMKYPI

SEQ ID NO: 169171 - protein, 10 aa, Artificial Sequence
  Description of Artificial Sequence: Synthetic peptide
  Seed: WMMAMKYPIT
WHMAMKYPIA

SEQ ID NO: 169172 - protein, 10 aa, Artificial Sequence
  Description of Artificial Sequence: Synthetic peptide
  Seed: WMMAMKYPIT
WHMAMKYPII

SEQ ID NO: 169173 - protein, 10 aa, Artificial Sequence
  Description of Artificial Sequence: Synthetic peptide
  Seed: WMMAMKYPIT
WHMAMKYPIL

SEQ ID NO: 169174 - protein, 11 aa, Artificial Sequence
  Description of Artificial Sequence: Synthetic peptide
  Seed: WMMAMKYPITA
WHMAMKYPITV

SEQ ID NO: 169175 - protein, 10 aa, Artificial Sequence
  Description of Artificial Sequence: Synthetic peptide
  Seed: WMMAMKYPIT
WHMAMKYPIV

SEQ ID NO: 169176 - protein, 9 aa, Artificial Sequence
  Description of Artificial Sequence: Synthetic peptide
  Seed: WMMAMKYPI
WHMAMKYPL

SEQ ID NO: 169177 - protein, 9 aa, Artificial Sequence
  Description of Artificial Sequence: Synthetic peptide
  Seed: WMMAMKYPI
WHMAMKYPM

SEQ ID NO: 169178 - protein, 9 aa, Artificial Sequence
  Description of Artificial Sequence: Synthetic peptide
  Seed: WMMAMKYPI
WHMAMKYPP

SEQ ID NO: 169179 - protein, 9 aa, Artificial Sequence
  Description of Artificial Sequence: Synthetic peptide
  Seed: WMMAMKYPI
WHMAMKYPQ

SEQ ID NO: 169180 - protein, 9 aa, Artificial Sequence
  Description of Artificial Sequence: Synthetic peptide
  Seed: WMMAMKYPI
WHMAMKYPR

SEQ ID NO: 169181 - protein, 9 aa, Artificial Sequence
  Description of Artificial Sequence: Synthetic peptide
  Seed: WMMAMKYPI
WHMAMKYPS

SEQ ID NO: 169182 - protein, 9 aa, Artificial Sequence
  Description of Artificial Sequence: Synthetic peptide
  Seed: WMMAMKYPI
WHMAMKYPT

SEQ ID NO: 169183 - protein, 9 aa, Artificial Sequence
  Description of Artificial Sequence: Synthetic peptide
  Seed: WMMAMKYPI
WHMAMKYPV

SEQ ID NO: 169184 - protein, 9 aa, Artificial Sequence
  Description of Artificial Sequence: Synthetic peptide
  Seed: WMMAMKYPI
WHMAMKYPW

SEQ ID NO: 169185 - protein, 9 aa, Artificial Sequence
  Description of Artificial Sequence: Synthetic peptide
  Seed: WMMAMKYPI
WHMAMKYPY

SEQ ID NO: 169186 - protein, 9 aa, Artificial Sequence
  Description of Artificial Sequence: Synthetic peptide
  Seed: WMMAMKYPI
WIMAMKYPA

SEQ ID NO: 169187 - protein, 9 aa, Artificial Sequence
  Description of Artificial Sequence: Synthetic peptide
  Seed: WMMAMKYPI
WIMAMKYPF

SEQ ID NO: 169188 - protein, 9 aa, Artificial Sequence
  Description of Artificial Sequence: Synthetic peptide
  Seed: WMMAMKYPI
WIMAMKYPI

SEQ ID NO: 169189 - protein, 10 aa, Artificial Sequence
  Description of Artificial Sequence: Synthetic peptide
  Seed: WMMAMKYPIT
WIMAMKYPIA

SEQ ID NO: 169190 - protein, 10 aa, Artificial Sequence
  Description of Artificial Sequence: Synthetic peptide
  Seed: WMMAMKYPIT
WIMAMKYPII

SEQ ID NO: 169191 - protein, 10 aa, Artificial Sequence
  Description of Artificial Sequence: Synthetic peptide
  Seed: WMMAMKYPIT
WIMAMKYPIL

SEQ ID NO: 169192 - protein, 10 aa, Artificial Sequence
  Description of Artificial Sequence: Synthetic peptide
  Seed: WMMAMKYPIT
WIMAMKYPIM

SEQ ID NO: 169193 - protein, 11 aa, Artificial Sequence
  Description of Artificial Sequence: Synthetic peptide
  Seed: WMMAMKYPITA
WIMAMKYPITA

SEQ ID NO: 169194 - protein, 11 aa, Artificial Sequence
  Description of Artificial Sequence: Synthetic peptide
  Seed: WMMAMKYPITA
WIMAMKYPITI

SEQ ID NO: 169195 - protein, 11 aa, Artificial Sequence
  Description of Artificial Sequence: Synthetic peptide
  Seed: WMMAMKYPITA
WIMAMKYPITL

SEQ ID NO: 169196 - protein, 11 aa, Artificial Sequence
  Description of Artificial Sequence: Synthetic peptide
  Seed: WMMAMKYPITA
WIMAMKYPITV

SEQ ID NO: 169197 - protein, 10 aa, Artificial Sequence
  Description of Artificial Sequence: Synthetic peptide
  Seed: WMMAMKYPIT
WIMAMKYPIV

SEQ ID NO: 169198 - protein, 9 aa, Artificial Sequence
  Description of Artificial Sequence: Synthetic peptide
  Seed: WMMAMKYPI
WIMAMKYPK

SEQ ID NO: 169199 - protein, 9 aa, Artificial Sequence
  Description of Artificial Sequence: Synthetic peptide
  Seed: WMMAMKYPI
WIMAMKYPL

SEQ ID NO: 169200 - protein, 9 aa, Artificial Sequence
  Description of Artificial Sequence: Synthetic peptide
  Seed: WMMAMKYPI
WIMAMKYPM

SEQ ID NO: 169201 - protein, 9 aa, Artificial Sequence
  Description of Artificial Sequence: Synthetic peptide
  Seed: WMMAMKYPI
WIMAMKYPR

SEQ ID NO: 169202 - protein, 9 aa, Artificial Sequence
  Description of Artificial Sequence: Synthetic peptide
  Seed: WMMAMKYPI
WIMAMKYPT

SEQ ID NO: 169203 - protein, 9 aa, Artificial Sequence
  Description of Artificial Sequence: Synthetic peptide
  Seed: WMMAMKYPI
WIMAMKYPV

SEQ ID NO: 169204 - protein, 9 aa, Artificial Sequence
  Description of Artificial Sequence: Synthetic peptide
  Seed: WMMAMKYPI
WIMAMKYPW

SEQ ID NO: 169205 - protein, 9 aa, Artificial Sequence
  Description of Artificial Sequence: Synthetic peptide
  Seed: WMMAMKYPI
WIMAMKYPY

SEQ ID NO: 169206 - protein, 9 aa, Artificial Sequence
  Description of Artificial Sequence: Synthetic peptide
  Seed: WMMAMKYPI
WKMAMKYPA

SEQ ID NO: 169207 - protein, 9 aa, Artificial Sequence
  Description of Artificial Sequence: Synthetic peptide
  Seed: WMMAMKYPI
WKMAMKYPC

SEQ ID NO: 169208 - protein, 9 aa, Artificial Sequence
  Description of Artificial Sequence: Synthetic peptide
  Seed: WMMAMKYPI
WKMAMKYPF

SEQ ID NO: 169209 - protein, 9 aa, Artificial Sequence
  Description of Artificial Sequence: Synthetic peptide
  Seed: WMMAMKYPI
WKMAMKYPH

SEQ ID NO: 169210 - protein, 9 aa, Artificial Sequence
  Description of Artificial Sequence: Synthetic peptide
  Seed: WMMAMKYPI
WKMAMKYPI

SEQ ID NO: 169211 - protein, 10 aa, Artificial Sequence
  Description of Artificial Sequence: Synthetic peptide
  Seed: WMMAMKYPIT
WKMAMKYPIA

SEQ ID NO: 169212 - protein, 10 aa, Artificial Sequence
  Description of Artificial Sequence: Synthetic peptide
  Seed: WMMAMKYPIT
WKMAMKYPII

SEQ ID NO: 169213 - protein, 10 aa, Artificial Sequence
  Description of Artificial Sequence: Synthetic peptide
  Seed: WMMAMKYPIT
WKMAMKYPIL

SEQ ID NO: 169214 - protein, 11 aa, Artificial Sequence
  Description of Artificial Sequence: Synthetic peptide
  Seed: WMMAMKYPITA
WKMAMKYPITV

SEQ ID NO: 169215 - protein, 10 aa, Artificial Sequence
  Description of Artificial Sequence: Synthetic peptide
  Seed: WMMAMKYPIT
WKMAMKYPIV

SEQ ID NO: 169216 - protein, 9 aa, Artificial Sequence
  Description of Artificial Sequence: Synthetic peptide
  Seed: WMMAMKYPI
WKMAMKYPL

SEQ ID NO: 169217 - protein, 9 aa, Artificial Sequence
  Description of Artificial Sequence: Synthetic peptide
  Seed: WMMAMKYPI
WKMAMKYPM

SEQ ID NO: 169218 - protein, 9 aa, Artificial Sequence
  Description of Artificial Sequence: Synthetic peptide
  Seed: WMMAMKYPI
WKMAMKYPP

SEQ ID NO: 169219 - protein, 9 aa, Artificial Sequence
  Description of Artificial Sequence: Synthetic peptide
  Seed: WMMAMKYPI
WKMAMKYPR

SEQ ID NO: 169220 - protein, 9 aa, Artificial Sequence
  Description of Artificial Sequence: Synthetic peptide
  Seed: WMMAMKYPI
WKMAMKYPT

SEQ ID NO: 169221 - protein, 9 aa, Artificial Sequence
  Description of Artificial Sequence: Synthetic peptide
  Seed: WMMAMKYPI
WKMAMKYPV

SEQ ID NO: 169222 - protein, 9 aa, Artificial Sequence
  Description of Artificial Sequence: Synthetic peptide
  Seed: WMMAMKYPI
WKMAMKYPW

SEQ ID NO: 169223 - protein, 9 aa, Artificial Sequence
  Description of Artificial Sequence: Synthetic peptide
  Seed: WMMAMKYPI
WKMAMKYPY

SEQ ID NO: 169224 - protein, 9 aa, Artificial Sequence
  Description of Artificial Sequence: Synthetic peptide
  Seed: WMMAMKYPI
WLMAMKYPA

SEQ ID NO: 169225 - protein, 9 aa, Artificial Sequence
  Description of Artificial Sequence: Synthetic peptide
  Seed: WMMAMKYPI
WLMAMKYPC

SEQ ID NO: 169226 - protein, 9 aa, Artificial Sequence
  Description of Artificial Sequence: Synthetic peptide
  Seed: WMMAMKYPI
WLMAMKYPF

SEQ ID NO: 169227 - protein, 9 aa, Artificial Sequence
  Description of Artificial Sequence: Synthetic peptide
  Seed: WMMAMKYPI
WLMAMKYPG

SEQ ID NO: 169228 - protein, 9 aa, Artificial Sequence
  Description of Artificial Sequence: Synthetic peptide
  Seed: WMMAMKYPI
WLMAMKYPH

SEQ ID NO: 169229 - protein, 9 aa, Artificial Sequence
  Description of Artificial Sequence: Synthetic peptide
  Seed: WMMAMKYPI
WLMAMKYPI

SEQ ID NO: 169230 - protein, 10 aa, Artificial Sequence
  Description of Artificial Sequence: Synthetic peptide
  Seed: WMMAMKYPIT
WLMAMKYPIA

SEQ ID NO: 169231 - protein, 10 aa, Artificial Sequence
  Description of Artificial Sequence: Synthetic peptide
  Seed: WMMAMKYPIT
WLMAMKYPIC

SEQ ID NO: 169232 - protein, 10 aa, Artificial Sequence
  Description of Artificial Sequence: Synthetic peptide
  Seed: WMMAMKYPIT
WLMAMKYPID

SEQ ID NO: 169233 - protein, 10 aa, Artificial Sequence
  Description of Artificial Sequence: Synthetic peptide
  Seed: WMMAMKYPIT
WLMAMKYPIE

SEQ ID NO: 169234 - protein, 10 aa, Artificial Sequence
  Description of Artificial Sequence: Synthetic peptide
  Seed: WMMAMKYPIT
WLMAMKYPIF

SEQ ID NO: 169235 - protein, 10 aa, Artificial Sequence
  Description of Artificial Sequence: Synthetic peptide
  Seed: WMMAMKYPIT
WLMAMKYPIG

SEQ ID NO: 169236 - protein, 10 aa, Artificial Sequence
  Description of Artificial Sequence: Synthetic peptide
  Seed: WMMAMKYPIT
WLMAMKYPIH

SEQ ID NO: 169237 - protein, 10 aa, Artificial Sequence
  Description of Artificial Sequence: Synthetic peptide
  Seed: WMMAMKYPIT
WLMAMKYPII

SEQ ID NO: 169238 - protein, 10 aa, Artificial Sequence
  Description of Artificial Sequence: Synthetic peptide
  Seed: WMMAMKYPIT
WLMAMKYPIK

SEQ ID NO: 169239 - protein, 10 aa, Artificial Sequence
  Description of Artificial Sequence: Synthetic peptide
  Seed: WMMAMKYPIT
WLMAMKYPIL

SEQ ID NO: 169240 - protein, 10 aa, Artificial Sequence
  Description of Artificial Sequence: Synthetic peptide
  Seed: WMMAMKYPIT
WLMAMKYPIM

SEQ ID NO: 169241 - protein, 10 aa, Artificial Sequence
  Description of Artificial Sequence: Synthetic peptide
  Seed: WMMAMKYPIT
WLMAMKYPIN

SEQ ID NO: 169242 - protein, 10 aa, Artificial Sequence
  Description of Artificial Sequence: Synthetic peptide
  Seed: WMMAMKYPIT
WLMAMKYPIP

SEQ ID NO: 169243 - protein, 10 aa, Artificial Sequence
  Description of Artificial Sequence: Synthetic peptide
  Seed: WMMAMKYPIT
WLMAMKYPIQ

SEQ ID NO: 169244 - protein, 10 aa, Artificial Sequence
  Description of Artificial Sequence: Synthetic peptide
  Seed: WMMAMKYPIT
WLMAMKYPIR

SEQ ID NO: 169245 - protein, 10 aa, Artificial Sequence
  Description of Artificial Sequence: Synthetic peptide
  Seed: WMMAMKYPIT
WLMAMKYPIS

SEQ ID NO: 169246 - protein, 10 aa, Artificial Sequence
  Description of Artificial Sequence: Synthetic peptide
  Seed: WMMAMKYPIT
WLMAMKYPIT

SEQ ID NO: 169247 - protein, 11 aa, Artificial Sequence
  Description of Artificial Sequence: Synthetic peptide
  Seed: WMMAMKYPITA
WLMAMKYPITA

SEQ ID NO: 169248 - protein, 11 aa, Artificial Sequence
  Description of Artificial Sequence: Synthetic peptide
  Seed: WMMAMKYPITA
WLMAMKYPITC

SEQ ID NO: 169249 - protein, 11 aa, Artificial Sequence
  Description of Artificial Sequence: Synthetic peptide
  Seed: WMMAMKYPITA
WLMAMKYPITI

SEQ ID NO: 169250 - protein, 11 aa, Artificial Sequence
  Description of Artificial Sequence: Synthetic peptide
  Seed: WMMAMKYPITA
WLMAMKYPITL

SEQ ID NO: 169251 - protein, 11 aa, Artificial Sequence
  Description of Artificial Sequence: Synthetic peptide
  Seed: WMMAMKYPITA
WLMAMKYPITM

SEQ ID NO: 169252 - protein, 11 aa, Artificial Sequence
  Description of Artificial Sequence: Synthetic peptide
  Seed: WMMAMKYPITA
WLMAMKYPITS

SEQ ID NO: 169253 - protein, 11 aa, Artificial Sequence
  Description of Artificial Sequence: Synthetic peptide
  Seed: WMMAMKYPITA
WLMAMKYPITT

SEQ ID NO: 169254 - protein, 11 aa, Artificial Sequence
  Description of Artificial Sequence: Synthetic peptide
  Seed: WMMAMKYPITA
WLMAMKYPITV

SEQ ID NO: 169255 - protein, 10 aa, Artificial Sequence
  Description of Artificial Sequence: Synthetic peptide
  Seed: WMMAMKYPIT
WLMAMKYPIV

SEQ ID NO: 169256 - protein, 10 aa, Artificial Sequence
  Description of Artificial Sequence: Synthetic peptide
  Seed: WMMAMKYPIT
WLMAMKYPIW

SEQ ID NO: 169257 - protein, 10 aa, Artificial Sequence
  Description of Artificial Sequence: Synthetic peptide
  Seed: WMMAMKYPIT
WLMAMKYPIY

SEQ ID NO: 169258 - protein, 9 aa, Artificial Sequence
  Description of Artificial Sequence: Synthetic peptide
  Seed: WMMAMKYPI
WLMAMKYPK

SEQ ID NO: 169259 - protein, 9 aa, Artificial Sequence
  Description of Artificial Sequence: Synthetic peptide
  Seed: WMMAMKYPI
WLMAMKYPL

SEQ ID NO: 169260 - protein, 9 aa, Artificial Sequence
  Description of Artificial Sequence: Synthetic peptide
  Seed: WMMAMKYPI
WLMAMKYPM

SEQ ID NO: 169261 - protein, 9 aa, Artificial Sequence
  Description of Artificial Sequence: Synthetic peptide
  Seed: WMMAMKYPI
WLMAMKYPP

SEQ ID NO: 169262 - protein, 9 aa, Artificial Sequence
  Description of Artificial Sequence: Synthetic peptide
  Seed: WMMAMKYPI
WLMAMKYPR

SEQ ID NO: 169263 - protein, 9 aa, Artificial Sequence
  Description of Artificial Sequence: Synthetic peptide
  Seed: WMMAMKYPI
WLMAMKYPS

SEQ ID NO: 169264 - protein, 9 aa, Artificial Sequence
  Description of Artificial Sequence: Synthetic peptide
  Seed: WMMAMKYPI
WLMAMKYPT

SEQ ID NO: 169265 - protein, 9 aa, Artificial Sequence
  Description of Artificial Sequence: Synthetic peptide
  Seed: WMMAMKYPI
WLMAMKYPV

SEQ ID NO: 169266 - protein, 9 aa, Artificial Sequence
  Description of Artificial Sequence: Synthetic peptide
  Seed: WMMAMKYPI
WLMAMKYPW

SEQ ID NO: 169267 - protein, 9 aa, Artificial Sequence
  Description of Artificial Sequence: Synthetic peptide
  Seed: WMMAMKYPI
WLMAMKYPY

SEQ ID NO: 169268 - protein, 9 aa, Artificial Sequence
  Description of Artificial Sequence: Synthetic peptide
  Seed: WMMAMKYPI
WMMAMKYPA

SEQ ID NO: 169269 - protein, 9 aa, Artificial Sequence
  Description of Artificial Sequence: Synthetic peptide
  Seed: WMMAMKYPI
WMMAMKYPC

SEQ ID NO: 169270 - protein, 9 aa, Artificial Sequence
  Description of Artificial Sequence: Synthetic peptide
  Seed: WMMAMKYPI
WMMAMKYPE

SEQ ID NO: 169271 - protein, 9 aa, Artificial Sequence
  Description of Artificial Sequence: Synthetic peptide
  Seed: WMMAMKYPI
WMMAMKYPF

SEQ ID NO: 169272 - protein, 9 aa, Artificial Sequence
  Description of Artificial Sequence: Synthetic peptide
  Seed: WMMAMKYPI
WMMAMKYPG

SEQ ID NO: 169273 - protein, 9 aa, Artificial Sequence
  Description of Artificial Sequence: Synthetic peptide
  Seed: WMMAMKYPI
WMMAMKYPH

SEQ ID NO: 169274 - protein, 10 aa, Artificial Sequence
  Description of Artificial Sequence: Synthetic peptide
  Seed: WMMAMKYPIT
WMMAMKYPIA

SEQ ID NO: 169275 - protein, 10 aa, Artificial Sequence
  Description of Artificial Sequence: Synthetic peptide
  Seed: WMMAMKYPIT
WMMAMKYPIC

SEQ ID NO: 169276 - protein, 10 aa, Artificial Sequence
  Description of Artificial Sequence: Synthetic peptide
  Seed: WMMAMKYPIT
WMMAMKYPID

SEQ ID NO: 169277 - protein, 10 aa, Artificial Sequence
  Description of Artificial Sequence: Synthetic peptide
  Seed: WMMAMKYPIT
WMMAMKYPIE

SEQ ID NO: 169278 - protein, 10 aa, Artificial Sequence
  Description of Artificial Sequence: Synthetic peptide
  Seed: WMMAMKYPIT
WMMAMKYPIF

SEQ ID NO: 169279 - protein, 10 aa, Artificial Sequence
  Description of Artificial Sequence: Synthetic peptide
  Seed: WMMAMKYPIT
WMMAMKYPIG

SEQ ID NO: 169280 - protein, 10 aa, Artificial Sequence
  Description of Artificial Sequence: Synthetic peptide
  Seed: WMMAMKYPIT
WMMAMKYPIH

SEQ ID NO: 169281 - protein, 10 aa, Artificial Sequence
  Description of Artificial Sequence: Synthetic peptide
  Seed: WMMAMKYPIT
WMMAMKYPII

SEQ ID NO: 169282 - protein, 10 aa, Artificial Sequence
  Description of Artificial Sequence: Synthetic peptide
  Seed: WMMAMKYPIT
WMMAMKYPIK

SEQ ID NO: 169283 - protein, 10 aa, Artificial Sequence
  Description of Artificial Sequence: Synthetic peptide
  Seed: WMMAMKYPIT
WMMAMKYPIL

SEQ ID NO: 169284 - protein, 10 aa, Artificial Sequence
  Description of Artificial Sequence: Synthetic peptide
  Seed: WMMAMKYPIT
WMMAMKYPIM

SEQ ID NO: 169285 - protein, 10 aa, Artificial Sequence
  Description of Artificial Sequence: Synthetic peptide
  Seed: WMMAMKYPIT
WMMAMKYPIN

SEQ ID NO: 169286 - protein, 10 aa, Artificial Sequence
  Description of Artificial Sequence: Synthetic peptide
  Seed: WMMAMKYPIT
WMMAMKYPIP

SEQ ID NO: 169287 - protein, 10 aa, Artificial Sequence
  Description of Artificial Sequence: Synthetic peptide
  Seed: WMMAMKYPIT
WMMAMKYPIQ

SEQ ID NO: 169288 - protein, 10 aa, Artificial Sequence
  Description of Artificial Sequence: Synthetic peptide
  Seed: WMMAMKYPIT
WMMAMKYPIR

SEQ ID NO: 169289 - protein, 10 aa, Artificial Sequence
  Description of Artificial Sequence: Synthetic peptide
  Seed: WMMAMKYPIT
WMMAMKYPIS

SEQ ID NO: 169290 - protein, 11 aa, Artificial Sequence
  Description of Artificial Sequence: Synthetic peptide
  Seed: WMMAMKYPITA
WMMAMKYPITC

SEQ ID NO: 169291 - protein, 11 aa, Artificial Sequence
  Description of Artificial Sequence: Synthetic peptide
  Seed: WMMAMKYPITA
WMMAMKYPITF

SEQ ID NO: 169292 - protein, 11 aa, Artificial Sequence
  Description of Artificial Sequence: Synthetic peptide
  Seed: WMMAMKYPITA
WMMAMKYPITI

SEQ ID NO: 169293 - protein, 11 aa, Artificial Sequence
  Description of Artificial Sequence: Synthetic peptide
  Seed: WMMAMKYPITA
WMMAMKYPITL

SEQ ID NO: 169294 - protein, 11 aa, Artificial Sequence
  Description of Artificial Sequence: Synthetic peptide
  Seed: WMMAMKYPITA
WMMAMKYPITM

SEQ ID NO: 169295 - protein, 11 aa, Artificial Sequence
  Description of Artificial Sequence: Synthetic peptide
  Seed: WMMAMKYPITA
WMMAMKYPITT

SEQ ID NO: 169296 - protein, 11 aa, Artificial Sequence
  Description of Artificial Sequence: Synthetic peptide
  Seed: WMMAMKYPITA
WMMAMKYPITV

SEQ ID NO: 169297 - protein, 10 aa, Artificial Sequence
  Description of Artificial Sequence: Synthetic peptide
  Seed: WMMAMKYPIT
WMMAMKYPIV

SEQ ID NO: 169298 - protein, 10 aa, Artificial Sequence
  Description of Artificial Sequence: Synthetic peptide
  Seed: WMMAMKYPIT
WMMAMKYPIW

SEQ ID NO: 169299 - protein, 10 aa, Artificial Sequence
  Description of Artificial Sequence: Synthetic peptide
  Seed: WMMAMKYPIT
WMMAMKYPIY

SEQ ID NO: 169300 - protein, 9 aa, Artificial Sequence
  Description of Artificial Sequence: Synthetic peptide
  Seed: WMMAMKYPI
WMMAMKYPK

SEQ ID NO: 169301 - protein, 9 aa, Artificial Sequence
  Description of Artificial Sequence: Synthetic peptide
  Seed: WMMAMKYPI
WMMAMKYPL

SEQ ID NO: 169302 - protein, 9 aa, Artificial Sequence
  Description of Artificial Sequence: Synthetic peptide
  Seed: WMMAMKYPI
WMMAMKYPP

SEQ ID NO: 169303 - protein, 9 aa, Artificial Sequence
  Description of Artificial Sequence: Synthetic peptide
  Seed: WMMAMKYPI
WMMAMKYPR

SEQ ID NO: 169304 - protein, 9 aa, Artificial Sequence
  Description of Artificial Sequence: Synthetic peptide
  Seed: WMMAMKYPI
WMMAMKYPS

SEQ ID NO: 169305 - protein, 9 aa, Artificial Sequence
  Description of Artificial Sequence: Synthetic peptide
  Seed: WMMAMKYPI
WMMAMKYPT

SEQ ID NO: 169306 - protein, 9 aa, Artificial Sequence
  Description of Artificial Sequence: Synthetic peptide
  Seed: WMMAMKYPI
WMMAMKYPV

SEQ ID NO: 169307 - protein, 9 aa, Artificial Sequence
  Description of Artificial Sequence: Synthetic peptide
  Seed: WMMAMKYPI
WMMAMKYPW

SEQ ID NO: 169308 - protein, 9 aa, Artificial Sequence
  Description of Artificial Sequence: Synthetic peptide
  Seed: WMMAMKYPI
WMMAMKYPY

SEQ ID NO: 169309 - protein, 9 aa, Artificial Sequence
  Description of Artificial Sequence: Synthetic peptide
  Seed: WMMAMKYPI
WNMAMKYPA

SEQ ID NO: 169310 - protein, 9 aa, Artificial Sequence
  Description of Artificial Sequence: Synthetic peptide
  Seed: WMMAMKYPI
WNMAMKYPF

SEQ ID NO: 169311 - protein, 9 aa, Artificial Sequence
  Description of Artificial Sequence: Synthetic peptide
  Seed: WMMAMKYPI
WNMAMKYPI

SEQ ID NO: 169312 - protein, 10 aa, Artificial Sequence
  Description of Artificial Sequence: Synthetic peptide
  Seed: WMMAMKYPIT
WNMAMKYPIA

SEQ ID NO: 169313 - protein, 10 aa, Artificial Sequence
  Description of Artificial Sequence: Synthetic peptide
  Seed: WMMAMKYPIT
WNMAMKYPII

SEQ ID NO: 169314 - protein, 10 aa, Artificial Sequence
  Description of Artificial Sequence: Synthetic peptide
  Seed: WMMAMKYPIT
WNMAMKYPIL

SEQ ID NO: 169315 - protein, 11 aa, Artificial Sequence
  Description of Artificial Sequence: Synthetic peptide
  Seed: WMMAMKYPITA
WNMAMKYPITV

SEQ ID NO: 169316 - protein, 10 aa, Artificial Sequence
  Description of Artificial Sequence: Synthetic peptide
  Seed: WMMAMKYPIT
WNMAMKYPIV

SEQ ID NO: 169317 - protein, 9 aa, Artificial Sequence
  Description of Artificial Sequence: Synthetic peptide
  Seed: WMMAMKYPI
WNMAMKYPK

SEQ ID NO: 169318 - protein, 9 aa, Artificial Sequence
  Description of Artificial Sequence: Synthetic peptide
  Seed: WMMAMKYPI
WNMAMKYPL

SEQ ID NO: 169319 - protein, 9 aa, Artificial Sequence
  Description of Artificial Sequence: Synthetic peptide
  Seed: WMMAMKYPI
WNMAMKYPM

SEQ ID NO: 169320 - protein, 9 aa, Artificial Sequence
  Description of Artificial Sequence: Synthetic peptide
  Seed: WMMAMKYPI
WNMAMKYPR

SEQ ID NO: 169321 - protein, 9 aa, Artificial Sequence
  Description of Artificial Sequence: Synthetic peptide
  Seed: WMMAMKYPI
WNMAMKYPV

SEQ ID NO: 169322 - protein, 9 aa, Artificial Sequence
  Description of Artificial Sequence: Synthetic peptide
  Seed: WMMAMKYPI
WNMAMKYPY

SEQ ID NO: 169323 - protein, 9 aa, Artificial Sequence
  Description of Artificial Sequence: Synthetic peptide
  Seed: WMMAMKYPI
WPMAMKYPA

SEQ ID NO: 169324 - protein, 9 aa, Artificial Sequence
  Description of Artificial Sequence: Synthetic peptide
  Seed: WMMAMKYPI
WPMAMKYPC

SEQ ID NO: 169325 - protein, 9 aa, Artificial Sequence
  Description of Artificial Sequence: Synthetic peptide
  Seed: WMMAMKYPI
WPMAMKYPD

SEQ ID NO: 169326 - protein, 9 aa, Artificial Sequence
  Description of Artificial Sequence: Synthetic peptide
  Seed: WMMAMKYPI
WPMAMKYPE

SEQ ID NO: 169327 - protein, 9 aa, Artificial Sequence
  Description of Artificial Sequence: Synthetic peptide
  Seed: WMMAMKYPI
WPMAMKYPF

SEQ ID NO: 169328 - protein, 9 aa, Artificial Sequence
  Description of Artificial Sequence: Synthetic peptide
  Seed: WMMAMKYPI
WPMAMKYPG

SEQ ID NO: 169329 - protein, 9 aa, Artificial Sequence
  Description of Artificial Sequence: Synthetic peptide
  Seed: WMMAMKYPI
WPMAMKYPH

SEQ ID NO: 169330 - protein, 9 aa, Artificial Sequence
  Description of Artificial Sequence: Synthetic peptide
  Seed: WMMAMKYPI
WPMAMKYPI

SEQ ID NO: 169331 - protein, 10 aa, Artificial Sequence
  Description of Artificial Sequence: Synthetic peptide
  Seed: WMMAMKYPIT
WPMAMKYPIA

SEQ ID NO: 169332 - protein, 10 aa, Artificial Sequence
  Description of Artificial Sequence: Synthetic peptide
  Seed: WMMAMKYPIT
WPMAMKYPII

SEQ ID NO: 169333 - protein, 10 aa, Artificial Sequence
  Description of Artificial Sequence: Synthetic peptide
  Seed: WMMAMKYPIT
WPMAMKYPIL

SEQ ID NO: 169334 - protein, 10 aa, Artificial Sequence
  Description of Artificial Sequence: Synthetic peptide
  Seed: WMMAMKYPIT
WPMAMKYPIV

SEQ ID NO: 169335 - protein, 9 aa, Artificial Sequence
  Description of Artificial Sequence: Synthetic peptide
  Seed: WMMAMKYPI
WPMAMKYPK

SEQ ID NO: 169336 - protein, 9 aa, Artificial Sequence
  Description of Artificial Sequence: Synthetic peptide
  Seed: WMMAMKYPI
WPMAMKYPL

SEQ ID NO: 169337 - protein, 9 aa, Artificial Sequence
  Description of Artificial Sequence: Synthetic peptide
  Seed: WMMAMKYPI
WPMAMKYPM

SEQ ID NO: 169338 - protein, 9 aa, Artificial Sequence
  Description of Artificial Sequence: Synthetic peptide
  Seed: WMMAMKYPI
WPMAMKYPN

SEQ ID NO: 169339 - protein, 9 aa, Artificial Sequence
  Description of Artificial Sequence: Synthetic peptide
  Seed: WMMAMKYPI
WPMAMKYPP

SEQ ID NO: 169340 - protein, 9 aa, Artificial Sequence
  Description of Artificial Sequence: Synthetic peptide
  Seed: WMMAMKYPI
WPMAMKYPQ

SEQ ID NO: 169341 - protein, 9 aa, Artificial Sequence
  Description of Artificial Sequence: Synthetic peptide
  Seed: WMMAMKYPI
WPMAMKYPS

SEQ ID NO: 169342 - protein, 9 aa, Artificial Sequence
  Description of Artificial Sequence: Synthetic peptide
  Seed: WMMAMKYPI
WPMAMKYPT

SEQ ID NO: 169343 - protein, 9 aa, Artificial Sequence
  Description of Artificial Sequence: Synthetic peptide
  Seed: WMMAMKYPI
WPMAMKYPV

SEQ ID NO: 169344 - protein, 9 aa, Artificial Sequence
  Description of Artificial Sequence: Synthetic peptide
  Seed: WMMAMKYPI
WPMAMKYPW

SEQ ID NO: 169345 - protein, 9 aa, Artificial Sequence
  Description of Artificial Sequence: Synthetic peptide
  Seed: WMMAMKYPI
WPMAMKYPY

SEQ ID NO: 169346 - protein, 9 aa, Artificial Sequence
  Description of Artificial Sequence: Synthetic peptide
  Seed: WMMAMKYPI
WQMAMKYPA

SEQ ID NO: 169347 - protein, 9 aa, Artificial Sequence
  Description of Artificial Sequence: Synthetic peptide
  Seed: WMMAMKYPI
WQMAMKYPC

SEQ ID NO: 169348 - protein, 9 aa, Artificial Sequence
  Description of Artificial Sequence: Synthetic peptide
  Seed: WMMAMKYPI
WQMAMKYPF

SEQ ID NO: 169349 - protein, 9 aa, Artificial Sequence
  Description of Artificial Sequence: Synthetic peptide
  Seed: WMMAMKYPI
WQMAMKYPG

SEQ ID NO: 169350 - protein, 9 aa, Artificial Sequence
  Description of Artificial Sequence: Synthetic peptide
  Seed: WMMAMKYPI
WQMAMKYPH

SEQ ID NO: 169351 - protein, 9 aa, Artificial Sequence
  Description of Artificial Sequence: Synthetic peptide
  Seed: WMMAMKYPI
WQMAMKYPI

SEQ ID NO: 169352 - protein, 10 aa, Artificial Sequence
  Description of Artificial Sequence: Synthetic peptide
  Seed: WMMAMKYPIT
WQMAMKYPIA

SEQ ID NO: 169353 - protein, 10 aa, Artificial Sequence
  Description of Artificial Sequence: Synthetic peptide
  Seed: WMMAMKYPIT
WQMAMKYPII

SEQ ID NO: 169354 - protein, 10 aa, Artificial Sequence
  Description of Artificial Sequence: Synthetic peptide
  Seed: WMMAMKYPIT
WQMAMKYPIL

SEQ ID NO: 169355 - protein, 10 aa, Artificial Sequence
  Description of Artificial Sequence: Synthetic peptide
  Seed: WMMAMKYPIT
WQMAMKYPIM

SEQ ID NO: 169356 - protein, 11 aa, Artificial Sequence
  Description of Artificial Sequence: Synthetic peptide
  Seed: WMMAMKYPITA
WQMAMKYPITA

SEQ ID NO: 169357 - protein, 11 aa, Artificial Sequence
  Description of Artificial Sequence: Synthetic peptide
  Seed: WMMAMKYPITA
WQMAMKYPITI

SEQ ID NO: 169358 - protein, 11 aa, Artificial Sequence
  Description of Artificial Sequence: Synthetic peptide
  Seed: WMMAMKYPITA
WQMAMKYPITL

SEQ ID NO: 169359 - protein, 11 aa, Artificial Sequence
  Description of Artificial Sequence: Synthetic peptide
  Seed: WMMAMKYPITA
WQMAMKYPITM

SEQ ID NO: 169360 - protein, 11 aa, Artificial Sequence
  Description of Artificial Sequence: Synthetic peptide
  Seed: WMMAMKYPITA
WQMAMKYPITV

SEQ ID NO: 169361 - protein, 10 aa, Artificial Sequence
  Description of Artificial Sequence: Synthetic peptide
  Seed: WMMAMKYPIT
WQMAMKYPIV

SEQ ID NO: 169362 - protein, 9 aa, Artificial Sequence
  Description of Artificial Sequence: Synthetic peptide
  Seed: WMMAMKYPI
WQMAMKYPK

SEQ ID NO: 169363 - protein, 9 aa, Artificial Sequence
  Description of Artificial Sequence: Synthetic peptide
  Seed: WMMAMKYPI
WQMAMKYPL

SEQ ID NO: 169364 - protein, 9 aa, Artificial Sequence
  Description of Artificial Sequence: Synthetic peptide
  Seed: WMMAMKYPI
WQMAMKYPM

SEQ ID NO: 169365 - protein, 9 aa, Artificial Sequence
  Description of Artificial Sequence: Synthetic peptide
  Seed: WMMAMKYPI
WQMAMKYPP

SEQ ID NO: 169366 - protein, 9 aa, Artificial Sequence
  Description of Artificial Sequence: Synthetic peptide
  Seed: WMMAMKYPI
WQMAMKYPR

SEQ ID NO: 169367 - protein, 9 aa, Artificial Sequence
  Description of Artificial Sequence: Synthetic peptide
  Seed: WMMAMKYPI
WQMAMKYPS

SEQ ID NO: 169368 - protein, 9 aa, Artificial Sequence
  Description of Artificial Sequence: Synthetic peptide
  Seed: WMMAMKYPI
WQMAMKYPT

SEQ ID NO: 169369 - protein, 9 aa, Artificial Sequence
  Description of Artificial Sequence: Synthetic peptide
  Seed: WMMAMKYPI
WQMAMKYPW

SEQ ID NO: 169370 - protein, 9 aa, Artificial Sequence
  Description of Artificial Sequence: Synthetic peptide
  Seed: WMMAMKYPI
WQMAMKYPY

SEQ ID NO: 169371 - protein, 9 aa, Artificial Sequence
  Description of Artificial Sequence: Synthetic peptide
  Seed: WMMAMKYPI
WRMAMKYPA

SEQ ID NO: 169372 - protein, 9 aa, Artificial Sequence
  Description of Artificial Sequence: Synthetic peptide
  Seed: WMMAMKYPI
WRMAMKYPC

SEQ ID NO: 169373 - protein, 9 aa, Artificial Sequence
  Description of Artificial Sequence: Synthetic peptide
  Seed: WMMAMKYPI
WRMAMKYPE

SEQ ID NO: 169374 - protein, 9 aa, Artificial Sequence
  Description of Artificial Sequence: Synthetic peptide
  Seed: WMMAMKYPI
WRMAMKYPF

SEQ ID NO: 169375 - protein, 9 aa, Artificial Sequence
  Description of Artificial Sequence: Synthetic peptide
  Seed: WMMAMKYPI
WRMAMKYPG

SEQ ID NO: 169376 - protein, 9 aa, Artificial Sequence
  Description of Artificial Sequence: Synthetic peptide
  Seed: WMMAMKYPI
WRMAMKYPH

SEQ ID NO: 169377 - protein, 9 aa, Artificial Sequence
  Description of Artificial Sequence: Synthetic peptide
  Seed: WMMAMKYPI
WRMAMKYPI

SEQ ID NO: 169378 - protein, 10 aa, Artificial Sequence
  Description of Artificial Sequence: Synthetic peptide
  Seed: WMMAMKYPIT
WRMAMKYPIA

SEQ ID NO: 169379 - protein, 10 aa, Artificial Sequence
  Description of Artificial Sequence: Synthetic peptide
  Seed: WMMAMKYPIT
WRMAMKYPII

SEQ ID NO: 169380 - protein, 10 aa, Artificial Sequence
  Description of Artificial Sequence: Synthetic peptide
  Seed: WMMAMKYPIT
WRMAMKYPIL

SEQ ID NO: 169381 - protein, 11 aa, Artificial Sequence
  Description of Artificial Sequence: Synthetic peptide
  Seed: WMMAMKYPITA
WRMAMKYPITV

SEQ ID NO: 169382 - protein, 10 aa, Artificial Sequence
  Description of Artificial Sequence: Synthetic peptide
  Seed: WMMAMKYPIT
WRMAMKYPIV

SEQ ID NO: 169383 - protein, 9 aa, Artificial Sequence
  Description of Artificial Sequence: Synthetic peptide
  Seed: WMMAMKYPI
WRMAMKYPK

SEQ ID NO: 169384 - protein, 9 aa, Artificial Sequence
  Description of Artificial Sequence: Synthetic peptide
  Seed: WMMAMKYPI
WRMAMKYPL

SEQ ID NO: 169385 - protein, 9 aa, Artificial Sequence
  Description of Artificial Sequence: Synthetic peptide
  Seed: WMMAMKYPI
WRMAMKYPM

SEQ ID NO: 169386 - protein, 9 aa, Artificial Sequence
  Description of Artificial Sequence: Synthetic peptide
  Seed: WMMAMKYPI
WRMAMKYPN

SEQ ID NO: 169387 - protein, 9 aa, Artificial Sequence
  Description of Artificial Sequence: Synthetic peptide
  Seed: WMMAMKYPI
WRMAMKYPP

SEQ ID NO: 169388 - protein, 9 aa, Artificial Sequence
  Description of Artificial Sequence: Synthetic peptide
  Seed: WMMAMKYPI
WRMAMKYPQ

SEQ ID NO: 169389 - protein, 9 aa, Artificial Sequence
  Description of Artificial Sequence: Synthetic peptide
  Seed: WMMAMKYPI
WRMAMKYPR

SEQ ID NO: 169390 - protein, 9 aa, Artificial Sequence
  Description of Artificial Sequence: Synthetic peptide
  Seed: WMMAMKYPI
WRMAMKYPS

SEQ ID NO: 169391 - protein, 9 aa, Artificial Sequence
  Description of Artificial Sequence: Synthetic peptide
  Seed: WMMAMKYPI
WRMAMKYPT

SEQ ID NO: 169392 - protein, 9 aa, Artificial Sequence
  Description of Artificial Sequence: Synthetic peptide
  Seed: WMMAMKYPI
WRMAMKYPV

SEQ ID NO: 169393 - protein, 9 aa, Artificial Sequence
  Description of Artificial Sequence: Synthetic peptide
  Seed: WMMAMKYPI
WRMAMKYPW

SEQ ID NO: 169394 - protein, 9 aa, Artificial Sequence
  Description of Artificial Sequence: Synthetic peptide
  Seed: WMMAMKYPI
WRMAMKYPY

SEQ ID NO: 169395 - protein, 9 aa, Artificial Sequence
  Description of Artificial Sequence: Synthetic peptide
  Seed: WMMAMKYPI
WSMAMKYPA

SEQ ID NO: 169396 - protein, 9 aa, Artificial Sequence
  Description of Artificial Sequence: Synthetic peptide
  Seed: WMMAMKYPI
WSMAMKYPF

SEQ ID NO: 169397 - protein, 9 aa, Artificial Sequence
  Description of Artificial Sequence: Synthetic peptide
  Seed: WMMAMKYPI
WSMAMKYPH

SEQ ID NO: 169398 - protein, 9 aa, Artificial Sequence
  Description of Artificial Sequence: Synthetic peptide
  Seed: WMMAMKYPI
WSMAMKYPI

SEQ ID NO: 169399 - protein, 10 aa, Artificial Sequence
  Description of Artificial Sequence: Synthetic peptide
  Seed: WMMAMKYPIT
WSMAMKYPIA

SEQ ID NO: 169400 - protein, 10 aa, Artificial Sequence
  Description of Artificial Sequence: Synthetic peptide
  Seed: WMMAMKYPIT
WSMAMKYPII

SEQ ID NO: 169401 - protein, 10 aa, Artificial Sequence
  Description of Artificial Sequence: Synthetic peptide
  Seed: WMMAMKYPIT
WSMAMKYPIL

SEQ ID NO: 169402 - protein, 11 aa, Artificial Sequence
  Description of Artificial Sequence: Synthetic peptide
  Seed: WMMAMKYPITA
WSMAMKYPITI

SEQ ID NO: 169403 - protein, 11 aa, Artificial Sequence
  Description of Artificial Sequence: Synthetic peptide
  Seed: WMMAMKYPITA
WSMAMKYPITL

SEQ ID NO: 169404 - protein, 11 aa, Artificial Sequence
  Description of Artificial Sequence: Synthetic peptide
  Seed: WMMAMKYPITA
WSMAMKYPITV

SEQ ID NO: 169405 - protein, 10 aa, Artificial Sequence
  Description of Artificial Sequence: Synthetic peptide
  Seed: WMMAMKYPIT
WSMAMKYPIV

SEQ ID NO: 169406 - protein, 9 aa, Artificial Sequence
  Description of Artificial Sequence: Synthetic peptide
  Seed: WMMAMKYPI
WSMAMKYPK

SEQ ID NO: 169407 - protein, 9 aa, Artificial Sequence
  Description of Artificial Sequence: Synthetic peptide
  Seed: WMMAMKYPI
WSMAMKYPL

SEQ ID NO: 169408 - protein, 9 aa, Artificial Sequence
  Description of Artificial Sequence: Synthetic peptide
  Seed: WMMAMKYPI
WSMAMKYPM

SEQ ID NO: 169409 - protein, 9 aa, Artificial Sequence
  Description of Artificial Sequence: Synthetic peptide
  Seed: WMMAMKYPI
WSMAMKYPR

SEQ ID NO: 169410 - protein, 9 aa, Artificial Sequence
  Description of Artificial Sequence: Synthetic peptide
  Seed: WMMAMKYPI
WSMAMKYPV

SEQ ID NO: 169411 - protein, 9 aa, Artificial Sequence
  Description of Artificial Sequence: Synthetic peptide
  Seed: WMMAMKYPI
WSMAMKYPW

SEQ ID NO: 169412 - protein, 9 aa, Artificial Sequence
  Description of Artificial Sequence: Synthetic peptide
  Seed: WMMAMKYPI
WSMAMKYPY

SEQ ID NO: 169413 - protein, 9 aa, Artificial Sequence
  Description of Artificial Sequence: Synthetic peptide
  Seed: WMMAMKYPI
WTMAMKYPA

SEQ ID NO: 169414 - protein, 9 aa, Artificial Sequence
  Description of Artificial Sequence: Synthetic peptide
  Seed: WMMAMKYPI
WTMAMKYPF

SEQ ID NO: 169415 - protein, 9 aa, Artificial Sequence
  Description of Artificial Sequence: Synthetic peptide
  Seed: WMMAMKYPI
WTMAMKYPH

SEQ ID NO: 169416 - protein, 9 aa, Artificial Sequence
  Description of Artificial Sequence: Synthetic peptide
  Seed: WMMAMKYPI
WTMAMKYPI

SEQ ID NO: 169417 - protein, 10 aa, Artificial Sequence
  Description of Artificial Sequence: Synthetic peptide
  Seed: WMMAMKYPIT
WTMAMKYPIA

SEQ ID NO: 169418 - protein, 10 aa, Artificial Sequence
  Description of Artificial Sequence: Synthetic peptide
  Seed: WMMAMKYPIT
WTMAMKYPII

SEQ ID NO: 169419 - protein, 10 aa, Artificial Sequence
  Description of Artificial Sequence: Synthetic peptide
  Seed: WMMAMKYPIT
WTMAMKYPIL

SEQ ID NO: 169420 - protein, 11 aa, Artificial Sequence
  Description of Artificial Sequence: Synthetic peptide
  Seed: WMMAMKYPITA
WTMAMKYPITI

SEQ ID NO: 169421 - protein, 11 aa, Artificial Sequence
  Description of Artificial Sequence: Synthetic peptide
  Seed: WMMAMKYPITA
WTMAMKYPITL

SEQ ID NO: 169422 - protein, 11 aa, Artificial Sequence
  Description of Artificial Sequence: Synthetic peptide
  Seed: WMMAMKYPITA
WTMAMKYPITV

SEQ ID NO: 169423 - protein, 10 aa, Artificial Sequence
  Description of Artificial Sequence: Synthetic peptide
  Seed: WMMAMKYPIT
WTMAMKYPIV

SEQ ID NO: 169424 - protein, 9 aa, Artificial Sequence
  Description of Artificial Sequence: Synthetic peptide
  Seed: WMMAMKYPI
WTMAMKYPK

SEQ ID NO: 169425 - protein, 9 aa, Artificial Sequence
  Description of Artificial Sequence: Synthetic peptide
  Seed: WMMAMKYPI
WTMAMKYPL

SEQ ID NO: 169426 - protein, 9 aa, Artificial Sequence
  Description of Artificial Sequence: Synthetic peptide
  Seed: WMMAMKYPI
WTMAMKYPM

SEQ ID NO: 169427 - protein, 9 aa, Artificial Sequence
  Description of Artificial Sequence: Synthetic peptide
  Seed: WMMAMKYPI
WTMAMKYPR

SEQ ID NO: 169428 - protein, 9 aa, Artificial Sequence
  Description of Artificial Sequence: Synthetic peptide
  Seed: WMMAMKYPI
WTMAMKYPS

SEQ ID NO: 169429 - protein, 9 aa, Artificial Sequence
  Description of Artificial Sequence: Synthetic peptide
  Seed: WMMAMKYPI
WTMAMKYPT

SEQ ID NO: 169430 - protein, 9 aa, Artificial Sequence
  Description of Artificial Sequence: Synthetic peptide
  Seed: WMMAMKYPI
WTMAMKYPV

SEQ ID NO: 169431 - protein, 9 aa, Artificial Sequence
  Description of Artificial Sequence: Synthetic peptide
  Seed: WMMAMKYPI
WTMAMKYPW

SEQ ID NO: 169432 - protein, 9 aa, Artificial Sequence
  Description of Artificial Sequence: Synthetic peptide
  Seed: WMMAMKYPI
WTMAMKYPY

SEQ ID NO: 169433 - protein, 9 aa, Artificial Sequence
  Description of Artificial Sequence: Synthetic peptide
  Seed: WMMAMKYPI
WVMAMKYPA

SEQ ID NO: 169434 - protein, 9 aa, Artificial Sequence
  Description of Artificial Sequence: Synthetic peptide
  Seed: WMMAMKYPI
WVMAMKYPF

SEQ ID NO: 169435 - protein, 9 aa, Artificial Sequence
  Description of Artificial Sequence: Synthetic peptide
  Seed: WMMAMKYPI
WVMAMKYPH

SEQ ID NO: 169436 - protein, 9 aa, Artificial Sequence
  Description of Artificial Sequence: Synthetic peptide
  Seed: WMMAMKYPI
WVMAMKYPI

SEQ ID NO: 169437 - protein, 10 aa, Artificial Sequence
  Description of Artificial Sequence: Synthetic peptide
  Seed: WMMAMKYPIT
WVMAMKYPIA

SEQ ID NO: 169438 - protein, 10 aa, Artificial Sequence
  Description of Artificial Sequence: Synthetic peptide
  Seed: WMMAMKYPIT
WVMAMKYPII

SEQ ID NO: 169439 - protein, 10 aa, Artificial Sequence
  Description of Artificial Sequence: Synthetic peptide
  Seed: WMMAMKYPIT
WVMAMKYPIL

SEQ ID NO: 169440 - protein, 11 aa, Artificial Sequence
  Description of Artificial Sequence: Synthetic peptide
  Seed: WMMAMKYPITA
WVMAMKYPITI

SEQ ID NO: 169441 - protein, 11 aa, Artificial Sequence
  Description of Artificial Sequence: Synthetic peptide
  Seed: WMMAMKYPITA
WVMAMKYPITL

SEQ ID NO: 169442 - protein, 11 aa, Artificial Sequence
  Description of Artificial Sequence: Synthetic peptide
  Seed: WMMAMKYPITA
WVMAMKYPITV

SEQ ID NO: 169443 - protein, 10 aa, Artificial Sequence
  Description of Artificial Sequence: Synthetic peptide
  Seed: WMMAMKYPIT
WVMAMKYPIV

SEQ ID NO: 169444 - protein, 9 aa, Artificial Sequence
  Description of Artificial Sequence: Synthetic peptide
  Seed: WMMAMKYPI
WVMAMKYPK

SEQ ID NO: 169445 - protein, 9 aa, Artificial Sequence
  Description of Artificial Sequence: Synthetic peptide
  Seed: WMMAMKYPI
WVMAMKYPL

SEQ ID NO: 169446 - protein, 9 aa, Artificial Sequence
  Description of Artificial Sequence: Synthetic peptide
  Seed: WMMAMKYPI
WVMAMKYPM

SEQ ID NO: 169447 - protein, 9 aa, Artificial Sequence
  Description of Artificial Sequence: Synthetic peptide
  Seed: WMMAMKYPI
WVMAMKYPR

SEQ ID NO: 169448 - protein, 9 aa, Artificial Sequence
  Description of Artificial Sequence: Synthetic peptide
  Seed: WMMAMKYPI
WVMAMKYPT

SEQ ID NO: 169449 - protein, 9 aa, Artificial Sequence
  Description of Artificial Sequence: Synthetic peptide
  Seed: WMMAMKYPI
WVMAMKYPV

SEQ ID NO: 169450 - protein, 9 aa, Artificial Sequence
  Description of Artificial Sequence: Synthetic peptide
  Seed: WMMAMKYPI
WVMAMKYPW

SEQ ID NO: 169451 - protein, 9 aa, Artificial Sequence
  Description of Artificial Sequence: Synthetic peptide
  Seed: WMMAMKYPI
WVMAMKYPY

SEQ ID NO: 169452 - protein, 9 aa, Artificial Sequence
  Description of Artificial Sequence: Synthetic peptide
  Seed: WMMAMKYPI
WWMAMKYPF

SEQ ID NO: 169453 - protein, 9 aa, Artificial Sequence
  Description of Artificial Sequence: Synthetic peptide
  Seed: WMMAMKYPI
WWMAMKYPI

SEQ ID NO: 169454 - protein, 10 aa, Artificial Sequence
  Description of Artificial Sequence: Synthetic peptide
  Seed: WMMAMKYPIT
WWMAMKYPIA

SEQ ID NO: 169455 - protein, 10 aa, Artificial Sequence
  Description of Artificial Sequence: Synthetic peptide
  Seed: WMMAMKYPIT
WWMAMKYPII

SEQ ID NO: 169456 - protein, 10 aa, Artificial Sequence
  Description of Artificial Sequence: Synthetic peptide
  Seed: WMMAMKYPIT
WWMAMKYPIL

SEQ ID NO: 169457 - protein, 11 aa, Artificial Sequence
  Description of Artificial Sequence: Synthetic peptide
  Seed: WMMAMKYPITA
WWMAMKYPITI

SEQ ID NO: 169458 - protein, 11 aa, Artificial Sequence
  Description of Artificial Sequence: Synthetic peptide
  Seed: WMMAMKYPITA
WWMAMKYPITL

SEQ ID NO: 169459 - protein, 11 aa, Artificial Sequence
  Description of Artificial Sequence: Synthetic peptide
  Seed: WMMAMKYPITA
WWMAMKYPITV

SEQ ID NO: 169460 - protein, 10 aa, Artificial Sequence
  Description of Artificial Sequence: Synthetic peptide
  Seed: WMMAMKYPIT
WWMAMKYPIV

SEQ ID NO: 169461 - protein, 9 aa, Artificial Sequence
  Description of Artificial Sequence: Synthetic peptide
  Seed: WMMAMKYPI
WWMAMKYPK

SEQ ID NO: 169462 - protein, 9 aa, Artificial Sequence
  Description of Artificial Sequence: Synthetic peptide
  Seed: WMMAMKYPI
WWMAMKYPL

SEQ ID NO: 169463 - protein, 9 aa, Artificial Sequence
  Description of Artificial Sequence: Synthetic peptide
  Seed: WMMAMKYPI
WWMAMKYPM

SEQ ID NO: 169464 - protein, 9 aa, Artificial Sequence
  Description of Artificial Sequence: Synthetic peptide
  Seed: WMMAMKYPI
WWMAMKYPR

SEQ ID NO: 169465 - protein, 9 aa, Artificial Sequence
  Description of Artificial Sequence: Synthetic peptide
  Seed: WMMAMKYPI
WWMAMKYPV

SEQ ID NO: 169466 - protein, 9 aa, Artificial Sequence
  Description of Artificial Sequence: Synthetic peptide
  Seed: WMMAMKYPI
WWMAMKYPW

SEQ ID NO: 169467 - protein, 9 aa, Artificial Sequence
  Description of Artificial Sequence: Synthetic peptide
  Seed: WMMAMKYPI
WWMAMKYPY

SEQ ID NO: 169468 - protein, 9 aa, Artificial Sequence
  Description of Artificial Sequence: Synthetic peptide
  Seed: WMMAMKYPI
WYMAMKYPA

SEQ ID NO: 169469 - protein, 9 aa, Artificial Sequence
  Description of Artificial Sequence: Synthetic peptide
  Seed: WMMAMKYPI
WYMAMKYPF

SEQ ID NO: 169470 - protein, 9 aa, Artificial Sequence
  Description of Artificial Sequence: Synthetic peptide
  Seed: WMMAMKYPI
WYMAMKYPG

SEQ ID NO: 169471 - protein, 9 aa, Artificial Sequence
  Description of Artificial Sequence: Synthetic peptide
  Seed: WMMAMKYPI
WYMAMKYPH

SEQ ID NO: 169472 - protein, 9 aa, Artificial Sequence
  Description of Artificial Sequence: Synthetic peptide
  Seed: WMMAMKYPI
WYMAMKYPI

SEQ ID NO: 169473 - protein, 10 aa, Artificial Sequence
  Description of Artificial Sequence: Synthetic peptide
  Seed: WMMAMKYPIT
WYMAMKYPIA

SEQ ID NO: 169474 - protein, 10 aa, Artificial Sequence
  Description of Artificial Sequence: Synthetic peptide
  Seed: WMMAMKYPIT
WYMAMKYPII

SEQ ID NO: 169475 - protein, 10 aa, Artificial Sequence
  Description of Artificial Sequence: Synthetic peptide
  Seed: WMMAMKYPIT
WYMAMKYPIL

SEQ ID NO: 169476 - protein, 11 aa, Artificial Sequence
  Description of Artificial Sequence: Synthetic peptide
  Seed: WMMAMKYPITA
WYMAMKYPITA

SEQ ID NO: 169477 - protein, 11 aa, Artificial Sequence
  Description of Artificial Sequence: Synthetic peptide
  Seed: WMMAMKYPITA
WYMAMKYPITI

SEQ ID NO: 169478 - protein, 11 aa, Artificial Sequence
  Description of Artificial Sequence: Synthetic peptide
  Seed: WMMAMKYPITA
WYMAMKYPITL

SEQ ID NO: 169479 - protein, 11 aa, Artificial Sequence
  Description of Artificial Sequence: Synthetic peptide
  Seed: WMMAMKYPITA
WYMAMKYPITM

SEQ ID NO: 169480 - protein, 11 aa, Artificial Sequence
  Description of Artificial Sequence: Synthetic peptide
  Seed: WMMAMKYPITA
WYMAMKYPITV

SEQ ID NO: 169481 - protein, 10 aa, Artificial Sequence
  Description of Artificial Sequence: Synthetic peptide
  Seed: WMMAMKYPIT
WYMAMKYPIV

SEQ ID NO: 169482 - protein, 9 aa, Artificial Sequence
  Description of Artificial Sequence: Synthetic peptide
  Seed: WMMAMKYPI
WYMAMKYPK

SEQ ID NO: 169483 - protein, 9 aa, Artificial Sequence
  Description of Artificial Sequence: Synthetic peptide
  Seed: WMMAMKYPI
WYMAMKYPL

SEQ ID NO: 169484 - protein, 9 aa, Artificial Sequence
  Description of Artificial Sequence: Synthetic peptide
  Seed: WMMAMKYPI
WYMAMKYPM

SEQ ID NO: 169485 - protein, 9 aa, Artificial Sequence
  Description of Artificial Sequence: Synthetic peptide
  Seed: WMMAMKYPI
WYMAMKYPR

SEQ ID NO: 169486 - protein, 9 aa, Artificial Sequence
  Description of Artificial Sequence: Synthetic peptide
  Seed: WMMAMKYPI
WYMAMKYPV

SEQ ID NO: 169487 - protein, 9 aa, Artificial Sequence
  Description of Artificial Sequence: Synthetic peptide
  Seed: WMMAMKYPI
WYMAMKYPW

SEQ ID NO: 169488 - protein, 9 aa, Artificial Sequence
  Description of Artificial Sequence: Synthetic peptide
  Seed: WMMAMKYPI
WYMAMKYPY

SEQ ID NO: 169489 - protein, 9 aa, Artificial Sequence
  Description of Artificial Sequence: Synthetic peptide
  Seed: ALLKHRFEI
AALKHRFEF

SEQ ID NO: 169490 - protein, 9 aa, Artificial Sequence
  Description of Artificial Sequence: Synthetic peptide
  Seed: ALLKHRFEI
AALKHRFEL

SEQ ID NO: 169491 - protein, 9 aa, Artificial Sequence
  Description of Artificial Sequence: Synthetic peptide
  Seed: ALLKHRFEI
AALKHRFEM

SEQ ID NO: 169492 - protein, 9 aa, Artificial Sequence
  Description of Artificial Sequence: Synthetic peptide
  Seed: ALLKHRFEI
AALKHRFEV

SEQ ID NO: 169493 - protein, 9 aa, Artificial Sequence
  Description of Artificial Sequence: Synthetic peptide
  Seed: ALLKHRFEI
AALKHRFEW

SEQ ID NO: 169494 - protein, 9 aa, Artificial Sequence
  Description of Artificial Sequence: Synthetic peptide
  Seed: ALLKHRFEI
AILKHRFEA

SEQ ID NO: 169495 - protein, 9 aa, Artificial Sequence
  Description of Artificial Sequence: Synthetic peptide
  Seed: ALLKHRFEI
AILKHRFEF

SEQ ID NO: 169496 - protein, 9 aa, Artificial Sequence
  Description of Artificial Sequence: Synthetic peptide
  Seed: ALLKHRFEI
AILKHRFEI

SEQ ID NO: 169497 - protein, 9 aa, Artificial Sequence
  Description of Artificial Sequence: Synthetic peptide
  Seed: ALLKHRFEI
AILKHRFEL

SEQ ID NO: 169498 - protein, 9 aa, Artificial Sequence
  Description of Artificial Sequence: Synthetic peptide
  Seed: ALLKHRFEI
AILKHRFEM

SEQ ID NO: 169499 - protein, 9 aa, Artificial Sequence
  Description of Artificial Sequence: Synthetic peptide
  Seed: ALLKHRFEI
AILKHRFEV

SEQ ID NO: 169500 - protein, 9 aa, Artificial Sequence
  Description of Artificial Sequence: Synthetic peptide
  Seed: ALLKHRFEI
AILKHRFEW

SEQ ID NO: 169501 - protein, 9 aa, Artificial Sequence
  Description of Artificial Sequence: Synthetic peptide
  Seed: ALLKHRFEI
ALLKHRFEA

SEQ ID NO: 169502 - protein, 9 aa, Artificial Sequence
  Description of Artificial Sequence: Synthetic peptide
  Seed: ALLKHRFEI
ALLKHRFEC

SEQ ID NO: 169503 - protein, 9 aa, Artificial Sequence
  Description of Artificial Sequence: Synthetic peptide
  Seed: ALLKHRFEI
ALLKHRFEF

SEQ ID NO: 169504 - protein, 9 aa, Artificial Sequence
  Description of Artificial Sequence: Synthetic peptide
  Seed: ALLKHRFEI
ALLKHRFEM

SEQ ID NO: 169505 - protein, 9 aa, Artificial Sequence
  Description of Artificial Sequence: Synthetic peptide
  Seed: ALLKHRFEI
ALLKHRFES

SEQ ID NO: 169506 - protein, 9 aa, Artificial Sequence
  Description of Artificial Sequence: Synthetic peptide
  Seed: ALLKHRFEI
ALLKHRFET

SEQ ID NO: 169507 - protein, 9 aa, Artificial Sequence
  Description of Artificial Sequence: Synthetic peptide
  Seed: ALLKHRFEI
ALLKHRFEW

SEQ ID NO: 169508 - protein, 9 aa, Artificial Sequence
  Description of Artificial Sequence: Synthetic peptide
  Seed: ALLKHRFEI
ALLKHRFEY

SEQ ID NO: 169509 - protein, 9 aa, Artificial Sequence
  Description of Artificial Sequence: Synthetic peptide
  Seed: ALLKHRFEI
AMLKHRFEA

SEQ ID NO: 169510 - protein, 9 aa, Artificial Sequence
  Description of Artificial Sequence: Synthetic peptide
  Seed: ALLKHRFEI
AMLKHRFEC

SEQ ID NO: 169511 - protein, 9 aa, Artificial Sequence
  Description of Artificial Sequence: Synthetic peptide
  Seed: ALLKHRFEI
AMLKHRFEF

SEQ ID NO: 169512 - protein, 9 aa, Artificial Sequence
  Description of Artificial Sequence: Synthetic peptide
  Seed: ALLKHRFEI
AMLKHRFEI

SEQ ID NO: 169513 - protein, 9 aa, Artificial Sequence
  Description of Artificial Sequence: Synthetic peptide
  Seed: ALLKHRFEI
AMLKHRFEM

SEQ ID NO: 169514 - protein, 9 aa, Artificial Sequence
  Description of Artificial Sequence: Synthetic peptide
  Seed: ALLKHRFEI
AMLKHRFES

SEQ ID NO: 169515 - protein, 9 aa, Artificial Sequence
  Description of Artificial Sequence: Synthetic peptide
  Seed: ALLKHRFEI
AMLKHRFET

SEQ ID NO: 169516 - protein, 9 aa, Artificial Sequence
  Description of Artificial Sequence: Synthetic peptide
  Seed: ALLKHRFEI
AMLKHRFEW

SEQ ID NO: 169517 - protein, 9 aa, Artificial Sequence
  Description of Artificial Sequence: Synthetic peptide
  Seed: ALLKHRFEI
AMLKHRFEY

SEQ ID NO: 169518 - protein, 9 aa, Artificial Sequence
  Description of Artificial Sequence: Synthetic peptide
  Seed: ALLKHRFEI
APLKHRFEF

SEQ ID NO: 169519 - protein, 9 aa, Artificial Sequence
  Description of Artificial Sequence: Synthetic peptide
  Seed: ALLKHRFEI
APLKHRFEI

SEQ ID NO: 169520 - protein, 9 aa, Artificial Sequence
  Description of Artificial Sequence: Synthetic peptide
  Seed: ALLKHRFEI
APLKHRFEL

SEQ ID NO: 169521 - protein, 9 aa, Artificial Sequence
  Description of Artificial Sequence: Synthetic peptide
  Seed: ALLKHRFEI
APLKHRFEM

SEQ ID NO: 169522 - protein, 9 aa, Artificial Sequence
  Description of Artificial Sequence: Synthetic peptide
  Seed: ALLKHRFEI
APLKHRFEV

SEQ ID NO: 169523 - protein, 9 aa, Artificial Sequence
  Description of Artificial Sequence: Synthetic peptide
  Seed: ALLKHRFEI
AQLKHRFEA

SEQ ID NO: 169524 - protein, 9 aa, Artificial Sequence
  Description of Artificial Sequence: Synthetic peptide
  Seed: ALLKHRFEI
AQLKHRFEF

SEQ ID NO: 169525 - protein, 9 aa, Artificial Sequence
  Description of Artificial Sequence: Synthetic peptide
  Seed: ALLKHRFEI
AQLKHRFEI

SEQ ID NO: 169526 - protein, 9 aa, Artificial Sequence
  Description of Artificial Sequence: Synthetic peptide
  Seed: ALLKHRFEI
AQLKHRFEL

SEQ ID NO: 169527 - protein, 9 aa, Artificial Sequence
  Description of Artificial Sequence: Synthetic peptide
  Seed: ALLKHRFEI
AQLKHRFEM

SEQ ID NO: 169528 - protein, 9 aa, Artificial Sequence
  Description of Artificial Sequence: Synthetic peptide
  Seed: ALLKHRFEI
AQLKHRFEV

SEQ ID NO: 169529 - protein, 9 aa, Artificial Sequence
  Description of Artificial Sequence: Synthetic peptide
  Seed: ALLKHRFEI
AQLKHRFEW

SEQ ID NO: 169530 - protein, 9 aa, Artificial Sequence
  Description of Artificial Sequence: Synthetic peptide
  Seed: ALLKHRFEI
ASLKHRFEF

SEQ ID NO: 169531 - protein, 9 aa, Artificial Sequence
  Description of Artificial Sequence: Synthetic peptide
  Seed: ALLKHRFEI
ASLKHRFEI

SEQ ID NO: 169532 - protein, 9 aa, Artificial Sequence
  Description of Artificial Sequence: Synthetic peptide
  Seed: ALLKHRFEI
ASLKHRFEV

SEQ ID NO: 169533 - protein, 9 aa, Artificial Sequence
  Description of Artificial Sequence: Synthetic peptide
  Seed: ALLKHRFEI
ASLKHRFEW

SEQ ID NO: 169534 - protein, 9 aa, Artificial Sequence
  Description of Artificial Sequence: Synthetic peptide
  Seed: ALLKHRFEI
ATLKHRFEA

SEQ ID NO: 169535 - protein, 9 aa, Artificial Sequence
  Description of Artificial Sequence: Synthetic peptide
  Seed: ALLKHRFEI
ATLKHRFEI

SEQ ID NO: 169536 - protein, 9 aa, Artificial Sequence
  Description of Artificial Sequence: Synthetic peptide
  Seed: ALLKHRFEI
ATLKHRFEL

SEQ ID NO: 169537 - protein, 9 aa, Artificial Sequence
  Description of Artificial Sequence: Synthetic peptide
  Seed: ALLKHRFEI
ATLKHRFEM

SEQ ID NO: 169538 - protein, 9 aa, Artificial Sequence
  Description of Artificial Sequence: Synthetic peptide
  Seed: ALLKHRFEI
ATLKHRFEV

SEQ ID NO: 169539 - protein, 9 aa, Artificial Sequence
  Description of Artificial Sequence: Synthetic peptide
  Seed: ALLKHRFEI
ATLKHRFEY

SEQ ID NO: 169540 - protein, 9 aa, Artificial Sequence
  Description of Artificial Sequence: Synthetic peptide
  Seed: ALLKHRFEI
AVLKHRFEA

SEQ ID NO: 169541 - protein, 9 aa, Artificial Sequence
  Description of Artificial Sequence: Synthetic peptide
  Seed: ALLKHRFEI
AVLKHRFEF

SEQ ID NO: 169542 - protein, 9 aa, Artificial Sequence
  Description of Artificial Sequence: Synthetic peptide
  Seed: ALLKHRFEI
AVLKHRFEI

SEQ ID NO: 169543 - protein, 9 aa, Artificial Sequence
  Description of Artificial Sequence: Synthetic peptide
  Seed: ALLKHRFEI
AVLKHRFEL

SEQ ID NO: 169544 - protein, 9 aa, Artificial Sequence
  Description of Artificial Sequence: Synthetic peptide
  Seed: ALLKHRFEI
AVLKHRFEV

SEQ ID NO: 169545 - protein, 9 aa, Artificial Sequence
  Description of Artificial Sequence: Synthetic peptide
  Seed: ALLKHRFEI
AVLKHRFEY

SEQ ID NO: 169546 - protein, 10 aa, Artificial Sequence
  Description of Artificial Sequence: Synthetic peptide
  Seed: CLINDPWVLL
CAINDPWVLV

SEQ ID NO: 169547 - protein, 9 aa, Artificial Sequence
  Description of Artificial Sequence: Synthetic peptide
  Seed: CLINDPWVL
CAINDPWVV

SEQ ID NO: 169548 - protein, 10 aa, Artificial Sequence
  Description of Artificial Sequence: Synthetic peptide
  Seed: CRTLLAKSVF
CATLLAKSVF

SEQ ID NO: 169549 - protein, 10 aa, Artificial Sequence
  Description of Artificial Sequence: Synthetic peptide
  Seed: CRTLLAKSVF
CATLLAKSVW

SEQ ID NO: 169550 - protein, 10 aa, Artificial Sequence
  Description of Artificial Sequence: Synthetic peptide
  Seed: CRTLLAKSVF
CATLLAKSVY

SEQ ID NO: 169551 - protein, 10 aa, Artificial Sequence
  Description of Artificial Sequence: Synthetic peptide
  Seed: CLINDPWVLL
CCINDPWVLV

SEQ ID NO: 169552 - protein, 10 aa, Artificial Sequence
  Description of Artificial Sequence: Synthetic peptide
  Seed: CRTLLAKSVF
CCTLLAKSVF

SEQ ID NO: 169553 - protein, 10 aa, Artificial Sequence
  Description of Artificial Sequence: Synthetic peptide
  Seed: CRTLLAKSVF
CCTLLAKSVW

SEQ ID NO: 169554 - protein, 10 aa, Artificial Sequence
  Description of Artificial Sequence: Synthetic peptide
  Seed: CRTLLAKSVF
CCTLLAKSVY

SEQ ID NO: 169555 - protein, 10 aa, Artificial Sequence
  Description of Artificial Sequence: Synthetic peptide
  Seed: CLINDPWVLL
CDINDPWVLV

SEQ ID NO: 169556 - protein, 10 aa, Artificial Sequence
  Description of Artificial Sequence: Synthetic peptide
  Seed: CRTLLAKSVF
CDTLLAKSVF

SEQ ID NO: 169557 - protein, 10 aa, Artificial Sequence
  Description of Artificial Sequence: Synthetic peptide
  Seed: CRTLLAKSVF
CDTLLAKSVW

SEQ ID NO: 169558 - protein, 10 aa, Artificial Sequence
  Description of Artificial Sequence: Synthetic peptide
  Seed: CRTLLAKSVF
CDTLLAKSVY

SEQ ID NO: 169559 - protein, 9 aa, Artificial Sequence
  Description of Artificial Sequence: Synthetic peptide
  Seed: CLINDPWVL
CEINDPWVI

SEQ ID NO: 169560 - protein, 10 aa, Artificial Sequence
  Description of Artificial Sequence: Synthetic peptide
  Seed: CLINDPWVLL
CEINDPWVLV

SEQ ID NO: 169561 - protein, 10 aa, Artificial Sequence
  Description of Artificial Sequence: Synthetic peptide
  Seed: CRTLLAKSVF
CETLLAKSVF

SEQ ID NO: 169562 - protein, 10 aa, Artificial Sequence
  Description of Artificial Sequence: Synthetic peptide
  Seed: CRTLLAKSVF
CETLLAKSVW

SEQ ID NO: 169563 - protein, 10 aa, Artificial Sequence
  Description of Artificial Sequence: Synthetic peptide
  Seed: CRTLLAKSVF
CETLLAKSVY

SEQ ID NO: 169564 - protein, 10 aa, Artificial Sequence
  Description of Artificial Sequence: Synthetic peptide
  Seed: CLINDPWVLL
CFINDPWVLI

SEQ ID NO: 169565 - protein, 10 aa, Artificial Sequence
  Description of Artificial Sequence: Synthetic peptide
  Seed: CLINDPWVLL
CFINDPWVLL

SEQ ID NO: 169566 - protein, 10 aa, Artificial Sequence
  Description of Artificial Sequence: Synthetic peptide
  Seed: CLINDPWVLL
CFINDPWVLV

SEQ ID NO: 169567 - protein, 10 aa, Artificial Sequence
  Description of Artificial Sequence: Synthetic peptide
  Seed: CRTLLAKSVF
CFTLLAKSVF

SEQ ID NO: 169568 - protein, 10 aa, Artificial Sequence
  Description of Artificial Sequence: Synthetic peptide
  Seed: CRTLLAKSVF
CFTLLAKSVW

SEQ ID NO: 169569 - protein, 10 aa, Artificial Sequence
  Description of Artificial Sequence: Synthetic peptide
  Seed: CRTLLAKSVF
CFTLLAKSVY

SEQ ID NO: 169570 - protein, 10 aa, Artificial Sequence
  Description of Artificial Sequence: Synthetic peptide
  Seed: CLINDPWVLL
CGINDPWVLV

SEQ ID NO: 169571 - protein, 10 aa, Artificial Sequence
  Description of Artificial Sequence: Synthetic peptide
  Seed: CRTLLAKSVF
CGTLLAKSVF

SEQ ID NO: 169572 - protein, 10 aa, Artificial Sequence
  Description of Artificial Sequence: Synthetic peptide
  Seed: CRTLLAKSVF
CGTLLAKSVW

SEQ ID NO: 169573 - protein, 10 aa, Artificial Sequence
  Description of Artificial Sequence: Synthetic peptide
  Seed: CRTLLAKSVF
CGTLLAKSVY

SEQ ID NO: 169574 - protein, 10 aa, Artificial Sequence
  Description of Artificial Sequence: Synthetic peptide
  Seed: CLINDPWVLL
CHINDPWVLV

SEQ ID NO: 169575 - protein, 10 aa, Artificial Sequence
  Description of Artificial Sequence: Synthetic peptide
  Seed: CRTLLAKSVF
CHTLLAKSVF

SEQ ID NO: 169576 - protein, 10 aa, Artificial Sequence
  Description of Artificial Sequence: Synthetic peptide
  Seed: CRTLLAKSVF
CHTLLAKSVW

SEQ ID NO: 169577 - protein, 10 aa, Artificial Sequence
  Description of Artificial Sequence: Synthetic peptide
  Seed: CRTLLAKSVF
CHTLLAKSVY

SEQ ID NO: 169578 - protein, 9 aa, Artificial Sequence
  Description of Artificial Sequence: Synthetic peptide
  Seed: CLINDPWVL
CIINDPWVA

SEQ ID NO: 169579 - protein, 9 aa, Artificial Sequence
  Description of Artificial Sequence: Synthetic peptide
  Seed: CLINDPWVL
CIINDPWVI

SEQ ID NO: 169580 - protein, 9 aa, Artificial Sequence
  Description of Artificial Sequence: Synthetic peptide
  Seed: CLINDPWVL
CIINDPWVL

SEQ ID NO: 169581 - protein, 10 aa, Artificial Sequence
  Description of Artificial Sequence: Synthetic peptide
  Seed: CLINDPWVLL
CIINDPWVLA

SEQ ID NO: 169582 - protein, 10 aa, Artificial Sequence
  Description of Artificial Sequence: Synthetic peptide
  Seed: CLINDPWVLL
CIINDPWVLI

SEQ ID NO: 169583 - protein, 10 aa, Artificial Sequence
  Description of Artificial Sequence: Synthetic peptide
  Seed: CLINDPWVLL
CIINDPWVLL

SEQ ID NO: 169584 - protein, 10 aa, Artificial Sequence
  Description of Artificial Sequence: Synthetic peptide
  Seed: CLINDPWVLL
CIINDPWVLV

SEQ ID NO: 169585 - protein, 9 aa, Artificial Sequence
  Description of Artificial Sequence: Synthetic peptide
  Seed: CLINDPWVL
CIINDPWVV

SEQ ID NO: 169586 - protein, 10 aa, Artificial Sequence
  Description of Artificial Sequence: Synthetic peptide
  Seed: CRTLLAKSVF
CITLLAKSVF

SEQ ID NO: 169587 - protein, 10 aa, Artificial Sequence
  Description of Artificial Sequence: Synthetic peptide
  Seed: CRTLLAKSVF
CITLLAKSVW

SEQ ID NO: 169588 - protein, 10 aa, Artificial Sequence
  Description of Artificial Sequence: Synthetic peptide
  Seed: CRTLLAKSVF
CITLLAKSVY

SEQ ID NO: 169589 - protein, 10 aa, Artificial Sequence
  Description of Artificial Sequence: Synthetic peptide
  Seed: CLINDPWVLL
CKINDPWVLV

SEQ ID NO: 169590 - protein, 10 aa, Artificial Sequence
  Description of Artificial Sequence: Synthetic peptide
  Seed: CRTLLAKSVF
CKTLLAKSVF

SEQ ID NO: 169591 - protein, 10 aa, Artificial Sequence
  Description of Artificial Sequence: Synthetic peptide
  Seed: CRTLLAKSVF
CKTLLAKSVM

SEQ ID NO: 169592 - protein, 10 aa, Artificial Sequence
  Description of Artificial Sequence: Synthetic peptide
  Seed: CRTLLAKSVF
CKTLLAKSVW

SEQ ID NO: 169593 - protein, 10 aa, Artificial Sequence
  Description of Artificial Sequence: Synthetic peptide
  Seed: CRTLLAKSVF
CKTLLAKSVY

SEQ ID NO: 169594 - protein, 9 aa, Artificial Sequence
  Description of Artificial Sequence: Synthetic peptide
  Seed: CLINDPWVL
CLINDPWVA

SEQ ID NO: 169595 - protein, 9 aa, Artificial Sequence
  Description of Artificial Sequence: Synthetic peptide
  Seed: CLINDPWVL
CLINDPWVC

SEQ ID NO: 169596 - protein, 9 aa, Artificial Sequence
  Description of Artificial Sequence: Synthetic peptide
  Seed: CLINDPWVL
CLINDPWVI

SEQ ID NO: 169597 - protein, 10 aa, Artificial Sequence
  Description of Artificial Sequence: Synthetic peptide
  Seed: CLINDPWVLL
CLINDPWVLA

SEQ ID NO: 169598 - protein, 10 aa, Artificial Sequence
  Description of Artificial Sequence: Synthetic peptide
  Seed: CLINDPWVLL
CLINDPWVLC

SEQ ID NO: 169599 - protein, 10 aa, Artificial Sequence
  Description of Artificial Sequence: Synthetic peptide
  Seed: CLINDPWVLL
CLINDPWVLI

SEQ ID NO: 169600 - protein, 10 aa, Artificial Sequence
  Description of Artificial Sequence: Synthetic peptide
  Seed: CLINDPWVLL
CLINDPWVLM

SEQ ID NO: 169601 - protein, 10 aa, Artificial Sequence
  Description of Artificial Sequence: Synthetic peptide
  Seed: CLINDPWVLL
CLINDPWVLT

SEQ ID NO: 169602 - protein, 10 aa, Artificial Sequence
  Description of Artificial Sequence: Synthetic peptide
  Seed: CLINDPWVLL
CLINDPWVLV

SEQ ID NO: 169603 - protein, 9 aa, Artificial Sequence
  Description of Artificial Sequence: Synthetic peptide
  Seed: CLINDPWVL
CLINDPWVM

SEQ ID NO: 169604 - protein, 9 aa, Artificial Sequence
  Description of Artificial Sequence: Synthetic peptide
  Seed: CLINDPWVL
CLINDPWVS

SEQ ID NO: 169605 - protein, 9 aa, Artificial Sequence
  Description of Artificial Sequence: Synthetic peptide
  Seed: CLINDPWVL
CLINDPWVT

SEQ ID NO: 169606 - protein, 9 aa, Artificial Sequence
  Description of Artificial Sequence: Synthetic peptide
  Seed: CLINDPWVL
CLINDPWVV

SEQ ID NO: 169607 - protein, 10 aa, Artificial Sequence
  Description of Artificial Sequence: Synthetic peptide
  Seed: CRTLLAKSVF
CLTLLAKSVF

SEQ ID NO: 169608 - protein, 10 aa, Artificial Sequence
  Description of Artificial Sequence: Synthetic peptide
  Seed: CRTLLAKSVF
CLTLLAKSVW

SEQ ID NO: 169609 - protein, 10 aa, Artificial Sequence
  Description of Artificial Sequence: Synthetic peptide
  Seed: CRTLLAKSVF
CLTLLAKSVY

SEQ ID NO: 169610 - protein, 8 aa, Artificial Sequence
  Description of Artificial Sequence: Synthetic peptide
  Seed: CLINDPWV
CMINDPWV

SEQ ID NO: 169611 - protein, 9 aa, Artificial Sequence
  Description of Artificial Sequence: Synthetic peptide
  Seed: CLINDPWVL
CMINDPWVA

SEQ ID NO: 169612 - protein, 9 aa, Artificial Sequence
  Description of Artificial Sequence: Synthetic peptide
  Seed: CLINDPWVL
CMINDPWVC

SEQ ID NO: 169613 - protein, 9 aa, Artificial Sequence
  Description of Artificial Sequence: Synthetic peptide
  Seed: CLINDPWVL
CMINDPWVF

SEQ ID NO: 169614 - protein, 9 aa, Artificial Sequence
  Description of Artificial Sequence: Synthetic peptide
  Seed: CLINDPWVL
CMINDPWVI

SEQ ID NO: 169615 - protein, 9 aa, Artificial Sequence
  Description of Artificial Sequence: Synthetic peptide
  Seed: CLINDPWVL
CMINDPWVL

SEQ ID NO: 169616 - protein, 10 aa, Artificial Sequence
  Description of Artificial Sequence: Synthetic peptide
  Seed: CLINDPWVLL
CMINDPWVLA

SEQ ID NO: 169617 - protein, 10 aa, Artificial Sequence
  Description of Artificial Sequence: Synthetic peptide
  Seed: CLINDPWVLL
CMINDPWVLC

SEQ ID NO: 169618 - protein, 10 aa, Artificial Sequence
  Description of Artificial Sequence: Synthetic peptide
  Seed: CLINDPWVLL
CMINDPWVLI

SEQ ID NO: 169619 - protein, 10 aa, Artificial Sequence
  Description of Artificial Sequence: Synthetic peptide
  Seed: CLINDPWVLL
CMINDPWVLL

SEQ ID NO: 169620 - protein, 10 aa, Artificial Sequence
  Description of Artificial Sequence: Synthetic peptide
  Seed: CLINDPWVLL
CMINDPWVLM

SEQ ID NO: 169621 - protein, 10 aa, Artificial Sequence
  Description of Artificial Sequence: Synthetic peptide
  Seed: CLINDPWVLL
CMINDPWVLT

SEQ ID NO: 169622 - protein, 10 aa, Artificial Sequence
  Description of Artificial Sequence: Synthetic peptide
  Seed: CLINDPWVLL
CMINDPWVLV

SEQ ID NO: 169623 - protein, 9 aa, Artificial Sequence
  Description of Artificial Sequence: Synthetic peptide
  Seed: CLINDPWVL
CMINDPWVM

SEQ ID NO: 169624 - protein, 9 aa, Artificial Sequence
  Description of Artificial Sequence: Synthetic peptide
  Seed: CLINDPWVL
CMINDPWVS

SEQ ID NO: 169625 - protein, 9 aa, Artificial Sequence
  Description of Artificial Sequence: Synthetic peptide
  Seed: CLINDPWVL
CMINDPWVT

SEQ ID NO: 169626 - protein, 10 aa, Artificial Sequence
  Description of Artificial Sequence: Synthetic peptide
  Seed: CRTLLAKSVF
CMTLLAKSVF

SEQ ID NO: 169627 - protein, 10 aa, Artificial Sequence
  Description of Artificial Sequence: Synthetic peptide
  Seed: CRTLLAKSVF
CMTLLAKSVM

SEQ ID NO: 169628 - protein, 10 aa, Artificial Sequence
  Description of Artificial Sequence: Synthetic peptide
  Seed: CRTLLAKSVF
CMTLLAKSVW

SEQ ID NO: 169629 - protein, 10 aa, Artificial Sequence
  Description of Artificial Sequence: Synthetic peptide
  Seed: CRTLLAKSVF
CMTLLAKSVY

SEQ ID NO: 169630 - protein, 10 aa, Artificial Sequence
  Description of Artificial Sequence: Synthetic peptide
  Seed: CLINDPWVLL
CNINDPWVLV

SEQ ID NO: 169631 - protein, 10 aa, Artificial Sequence
  Description of Artificial Sequence: Synthetic peptide
  Seed: CRTLLAKSVF
CNTLLAKSVF

SEQ ID NO: 169632 - protein, 10 aa, Artificial Sequence
  Description of Artificial Sequence: Synthetic peptide
  Seed: CRTLLAKSVF
CNTLLAKSVW

SEQ ID NO: 169633 - protein, 10 aa, Artificial Sequence
  Description of Artificial Sequence: Synthetic peptide
  Seed: CRTLLAKSVF
CNTLLAKSVY

SEQ ID NO: 169634 - protein, 10 aa, Artificial Sequence
  Description of Artificial Sequence: Synthetic peptide
  Seed: CLINDPWVLL
CPINDPWVLV

SEQ ID NO: 169635 - protein, 10 aa, Artificial Sequence
  Description of Artificial Sequence: Synthetic peptide
  Seed: CRTLLAKSVF
CPTLLAKSVF

SEQ ID NO: 169636 - protein, 10 aa, Artificial Sequence
  Description of Artificial Sequence: Synthetic peptide
  Seed: CRTLLAKSVF
CPTLLAKSVW

SEQ ID NO: 169637 - protein, 10 aa, Artificial Sequence
  Description of Artificial Sequence: Synthetic peptide
  Seed: CRTLLAKSVF
CPTLLAKSVY

SEQ ID NO: 169638 - protein, 9 aa, Artificial Sequence
  Description of Artificial Sequence: Synthetic peptide
  Seed: CLINDPWVL
CQINDPWVA

SEQ ID NO: 169639 - protein, 9 aa, Artificial Sequence
  Description of Artificial Sequence: Synthetic peptide
  Seed: CLINDPWVL
CQINDPWVF

SEQ ID NO: 169640 - protein, 9 aa, Artificial Sequence
  Description of Artificial Sequence: Synthetic peptide
  Seed: CLINDPWVL
CQINDPWVI

SEQ ID NO: 169641 - protein, 9 aa, Artificial Sequence
  Description of Artificial Sequence: Synthetic peptide
  Seed: CLINDPWVL
CQINDPWVL

SEQ ID NO: 169642 - protein, 10 aa, Artificial Sequence
  Description of Artificial Sequence: Synthetic peptide
  Seed: CLINDPWVLL
CQINDPWVLA

SEQ ID NO: 169643 - protein, 10 aa, Artificial Sequence
  Description of Artificial Sequence: Synthetic peptide
  Seed: CLINDPWVLL
CQINDPWVLI

SEQ ID NO: 169644 - protein, 10 aa, Artificial Sequence
  Description of Artificial Sequence: Synthetic peptide
  Seed: CLINDPWVLL
CQINDPWVLL

SEQ ID NO: 169645 - protein, 10 aa, Artificial Sequence
  Description of Artificial Sequence: Synthetic peptide
  Seed: CLINDPWVLL
CQINDPWVLM

SEQ ID NO: 169646 - protein, 10 aa, Artificial Sequence
  Description of Artificial Sequence: Synthetic peptide
  Seed: CLINDPWVLL
CQINDPWVLV

SEQ ID NO: 169647 - protein, 9 aa, Artificial Sequence
  Description of Artificial Sequence: Synthetic peptide
  Seed: CLINDPWVL
CQINDPWVM

SEQ ID NO: 169648 - protein, 9 aa, Artificial Sequence
  Description of Artificial Sequence: Synthetic peptide
  Seed: CLINDPWVL
CQINDPWVT

SEQ ID NO: 169649 - protein, 9 aa, Artificial Sequence
  Description of Artificial Sequence: Synthetic peptide
  Seed: CLINDPWVL
CQINDPWVV

SEQ ID NO: 169650 - protein, 10 aa, Artificial Sequence
  Description of Artificial Sequence: Synthetic peptide
  Seed: CRTLLAKSVF
CQTLLAKSVF

SEQ ID NO: 169651 - protein, 10 aa, Artificial Sequence
  Description of Artificial Sequence: Synthetic peptide
  Seed: CRTLLAKSVF
CQTLLAKSVL

SEQ ID NO: 169652 - protein, 10 aa, Artificial Sequence
  Description of Artificial Sequence: Synthetic peptide
  Seed: CRTLLAKSVF
CQTLLAKSVM

SEQ ID NO: 169653 - protein, 10 aa, Artificial Sequence
  Description of Artificial Sequence: Synthetic peptide
  Seed: CRTLLAKSVF
CQTLLAKSVW

SEQ ID NO: 169654 - protein, 10 aa, Artificial Sequence
  Description of Artificial Sequence: Synthetic peptide
  Seed: CRTLLAKSVF
CQTLLAKSVY

SEQ ID NO: 169655 - protein, 9 aa, Artificial Sequence
  Description of Artificial Sequence: Synthetic peptide
  Seed: CRATEYIMK
CRATEYIMF

SEQ ID NO: 169656 - protein, 9 aa, Artificial Sequence
  Description of Artificial Sequence: Synthetic peptide
  Seed: CRATEYIMK
CRATEYIML

SEQ ID NO: 169657 - protein, 9 aa, Artificial Sequence
  Description of Artificial Sequence: Synthetic peptide
  Seed: CRATEYIMK
CRATEYIMR

SEQ ID NO: 169658 - protein, 10 aa, Artificial Sequence
  Description of Artificial Sequence: Synthetic peptide
  Seed: CLINDPWVLL
CRINDPWVLV

SEQ ID NO: 169659 - protein, 9 aa, Artificial Sequence
  Description of Artificial Sequence: Synthetic peptide
  Seed: CRTLLAKSV
CRTLLAKSF

SEQ ID NO: 169660 - protein, 9 aa, Artificial Sequence
  Description of Artificial Sequence: Synthetic peptide
  Seed: CRTLLAKSV
CRTLLAKSI

SEQ ID NO: 169661 - protein, 9 aa, Artificial Sequence
  Description of Artificial Sequence: Synthetic peptide
  Seed: CRTLLAKSV
CRTLLAKSK

SEQ ID NO: 169662 - protein, 9 aa, Artificial Sequence
  Description of Artificial Sequence: Synthetic peptide
  Seed: CRTLLAKSV
CRTLLAKSL

SEQ ID NO: 169663 - protein, 9 aa, Artificial Sequence
  Description of Artificial Sequence: Synthetic peptide
  Seed: CRTLLAKSV
CRTLLAKSM

SEQ ID NO: 169664 - protein, 9 aa, Artificial Sequence
  Description of Artificial Sequence: Synthetic peptide
  Seed: CRTLLAKSV
CRTLLAKSR

SEQ ID NO: 169665 - protein, 10 aa, Artificial Sequence
  Description of Artificial Sequence: Synthetic peptide
  Seed: CRTLLAKSVF
CRTLLAKSVK

SEQ ID NO: 169666 - protein, 10 aa, Artificial Sequence
  Description of Artificial Sequence: Synthetic peptide
  Seed: CRTLLAKSVF
CRTLLAKSVL

SEQ ID NO: 169667 - protein, 10 aa, Artificial Sequence
  Description of Artificial Sequence: Synthetic peptide
  Seed: CRTLLAKSVF
CRTLLAKSVM

SEQ ID NO: 169668 - protein, 10 aa, Artificial Sequence
  Description of Artificial Sequence: Synthetic peptide
  Seed: CRTLLAKSVF
CRTLLAKSVR

SEQ ID NO: 169669 - protein, 10 aa, Artificial Sequence
  Description of Artificial Sequence: Synthetic peptide
  Seed: CRTLLAKSVF
CRTLLAKSVW

SEQ ID NO: 169670 - protein, 10 aa, Artificial Sequence
  Description of Artificial Sequence: Synthetic peptide
  Seed: CRTLLAKSVF
CRTLLAKSVY

SEQ ID NO: 169671 - protein, 9 aa, Artificial Sequence
  Description of Artificial Sequence: Synthetic peptide
  Seed: CRTLLAKSV
CRTLLAKSY

SEQ ID NO: 169672 - protein, 10 aa, Artificial Sequence
  Description of Artificial Sequence: Synthetic peptide
  Seed: CLINDPWVLL
CSINDPWVLV

SEQ ID NO: 169673 - protein, 9 aa, Artificial Sequence
  Description of Artificial Sequence: Synthetic peptide
  Seed: CLINDPWVL
CSINDPWVV

SEQ ID NO: 169674 - protein, 10 aa, Artificial Sequence
  Description of Artificial Sequence: Synthetic peptide
  Seed: CRTLLAKSVF
CSTLLAKSVF

SEQ ID NO: 169675 - protein, 10 aa, Artificial Sequence
  Description of Artificial Sequence: Synthetic peptide
  Seed: CRTLLAKSVF
CSTLLAKSVW

SEQ ID NO: 169676 - protein, 10 aa, Artificial Sequence
  Description of Artificial Sequence: Synthetic peptide
  Seed: CRTLLAKSVF
CSTLLAKSVY

SEQ ID NO: 169677 - protein, 9 aa, Artificial Sequence
  Description of Artificial Sequence: Synthetic peptide
  Seed: CLINDPWVL
CTINDPWVA

SEQ ID NO: 169678 - protein, 9 aa, Artificial Sequence
  Description of Artificial Sequence: Synthetic peptide
  Seed: CLINDPWVL
CTINDPWVI

SEQ ID NO: 169679 - protein, 9 aa, Artificial Sequence
  Description of Artificial Sequence: Synthetic peptide
  Seed: CLINDPWVL
CTINDPWVL

SEQ ID NO: 169680 - protein, 10 aa, Artificial Sequence
  Description of Artificial Sequence: Synthetic peptide
  Seed: CLINDPWVLL
CTINDPWVLA

SEQ ID NO: 169681 - protein, 10 aa, Artificial Sequence
  Description of Artificial Sequence: Synthetic peptide
  Seed: CLINDPWVLL
CTINDPWVLV

SEQ ID NO: 169682 - protein, 9 aa, Artificial Sequence
  Description of Artificial Sequence: Synthetic peptide
  Seed: CLINDPWVL
CTINDPWVV

SEQ ID NO: 169683 - protein, 10 aa, Artificial Sequence
  Description of Artificial Sequence: Synthetic peptide
  Seed: CRTLLAKSVF
CTTLLAKSVF

SEQ ID NO: 169684 - protein, 10 aa, Artificial Sequence
  Description of Artificial Sequence: Synthetic peptide
  Seed: CRTLLAKSVF
CTTLLAKSVW

SEQ ID NO: 169685 - protein, 10 aa, Artificial Sequence
  Description of Artificial Sequence: Synthetic peptide
  Seed: CRTLLAKSVF
CTTLLAKSVY

SEQ ID NO: 169686 - protein, 9 aa, Artificial Sequence
  Description of Artificial Sequence: Synthetic peptide
  Seed: CLINDPWVL
CVINDPWVA

SEQ ID NO: 169687 - protein, 9 aa, Artificial Sequence
  Description of Artificial Sequence: Synthetic peptide
  Seed: CLINDPWVL
CVINDPWVI

SEQ ID NO: 169688 - protein, 9 aa, Artificial Sequence
  Description of Artificial Sequence: Synthetic peptide
  Seed: CLINDPWVL
CVINDPWVL

SEQ ID NO: 169689 - protein, 10 aa, Artificial Sequence
  Description of Artificial Sequence: Synthetic peptide
  Seed: CLINDPWVLL
CVINDPWVLA

SEQ ID NO: 169690 - protein, 10 aa, Artificial Sequence
  Description of Artificial Sequence: Synthetic peptide
  Seed: CLINDPWVLL
CVINDPWVLL

SEQ ID NO: 169691 - protein, 10 aa, Artificial Sequence
  Description of Artificial Sequence: Synthetic peptide
  Seed: CLINDPWVLL
CVINDPWVLV

SEQ ID NO: 169692 - protein, 9 aa, Artificial Sequence
  Description of Artificial Sequence: Synthetic peptide
  Seed: CLINDPWVL
CVINDPWVV

SEQ ID NO: 169693 - protein, 10 aa, Artificial Sequence
  Description of Artificial Sequence: Synthetic peptide
  Seed: CRTLLAKSVF
CVTLLAKSVF

SEQ ID NO: 169694 - protein, 10 aa, Artificial Sequence
  Description of Artificial Sequence: Synthetic peptide
  Seed: CRTLLAKSVF
CVTLLAKSVW

SEQ ID NO: 169695 - protein, 10 aa, Artificial Sequence
  Description of Artificial Sequence: Synthetic peptide
  Seed: CRTLLAKSVF
CVTLLAKSVY

SEQ ID NO: 169696 - protein, 10 aa, Artificial Sequence
  Description of Artificial Sequence: Synthetic peptide
  Seed: CLINDPWVLL
CWINDPWVLV

SEQ ID NO: 169697 - protein, 10 aa, Artificial Sequence
  Description of Artificial Sequence: Synthetic peptide
  Seed: CRTLLAKSVF
CWTLLAKSVF

SEQ ID NO: 169698 - protein, 10 aa, Artificial Sequence
  Description of Artificial Sequence: Synthetic peptide
  Seed: CRTLLAKSVF
CWTLLAKSVW

SEQ ID NO: 169699 - protein, 10 aa, Artificial Sequence
  Description of Artificial Sequence: Synthetic peptide
  Seed: CRTLLAKSVF
CWTLLAKSVY

SEQ ID NO: 169700 - protein, 10 aa, Artificial Sequence
  Description of Artificial Sequence: Synthetic peptide
  Seed: CLINDPWVLL
CYINDPWVLL

SEQ ID NO: 169701 - protein, 10 aa, Artificial Sequence
  Description of Artificial Sequence: Synthetic peptide
  Seed: CLINDPWVLL
CYINDPWVLV

SEQ ID NO: 169702 - protein, 10 aa, Artificial Sequence
  Description of Artificial Sequence: Synthetic peptide
  Seed: CRTLLAKSVF
CYTLLAKSVF

SEQ ID NO: 169703 - protein, 10 aa, Artificial Sequence
  Description of Artificial Sequence: Synthetic peptide
  Seed: CRTLLAKSVF
CYTLLAKSVW

SEQ ID NO: 169704 - protein, 10 aa, Artificial Sequence
  Description of Artificial Sequence: Synthetic peptide
  Seed: CRTLLAKSVF
CYTLLAKSVY

SEQ ID NO: 169705 - protein, 10 aa, Artificial Sequence
  Description of Artificial Sequence: Synthetic peptide
  Seed: DPWVLLNASW
DAWVLLNASW

SEQ ID NO: 169706 - protein, 9 aa, Artificial Sequence
  Description of Artificial Sequence: Synthetic peptide
  Seed: EECLINDPW
EECLINDPF

SEQ ID NO: 169707 - protein, 9 aa, Artificial Sequence
  Description of Artificial Sequence: Synthetic peptide
  Seed: EECLINDPW
EECLINDPY

SEQ ID NO: 169708 - protein, 8 aa, Artificial Sequence
  Description of Artificial Sequence: Synthetic peptide
  Seed: FMYSDFHF
FAYSDFHF

SEQ ID NO: 169709 - protein, 8 aa, Artificial Sequence
  Description of Artificial Sequence: Synthetic peptide
  Seed: FMYSDFHF
FAYSDFHI

SEQ ID NO: 169710 - protein, 8 aa, Artificial Sequence
  Description of Artificial Sequence: Synthetic peptide
  Seed: FMYSDFHF
FAYSDFHL

SEQ ID NO: 169711 - protein, 8 aa, Artificial Sequence
  Description of Artificial Sequence: Synthetic peptide
  Seed: FMYSDFHF
FAYSDFHM

SEQ ID NO: 169712 - protein, 8 aa, Artificial Sequence
  Description of Artificial Sequence: Synthetic peptide
  Seed: FMYSDFHF
FAYSDFHV

SEQ ID NO: 169713 - protein, 8 aa, Artificial Sequence
  Description of Artificial Sequence: Synthetic peptide
  Seed: FMYSDFHF
FEYSDFHF

SEQ ID NO: 169714 - protein, 8 aa, Artificial Sequence
  Description of Artificial Sequence: Synthetic peptide
  Seed: FMYSDFHF
FEYSDFHY

SEQ ID NO: 169715 - protein, 8 aa, Artificial Sequence
  Description of Artificial Sequence: Synthetic peptide
  Seed: FMYSDFHF
FFYSDFHF

SEQ ID NO: 169716 - protein, 8 aa, Artificial Sequence
  Description of Artificial Sequence: Synthetic peptide
  Seed: FMYSDFHF
FFYSDFHW

SEQ ID NO: 169717 - protein, 8 aa, Artificial Sequence
  Description of Artificial Sequence: Synthetic peptide
  Seed: FMYSDFHF
FGYSDFHY

SEQ ID NO: 169718 - protein, 8 aa, Artificial Sequence
  Description of Artificial Sequence: Synthetic peptide
  Seed: FMYSDFHF
FHYSDFHF

SEQ ID NO: 169719 - protein, 8 aa, Artificial Sequence
  Description of Artificial Sequence: Synthetic peptide
  Seed: FMYSDFHF
FHYSDFHY

SEQ ID NO: 169720 - protein, 8 aa, Artificial Sequence
  Description of Artificial Sequence: Synthetic peptide
  Seed: FMYSDFHF
FIYSDFHA

SEQ ID NO: 169721 - protein, 8 aa, Artificial Sequence
  Description of Artificial Sequence: Synthetic peptide
  Seed: FMYSDFHF
FIYSDFHF

SEQ ID NO: 169722 - protein, 8 aa, Artificial Sequence
  Description of Artificial Sequence: Synthetic peptide
  Seed: FMYSDFHF
FIYSDFHI

SEQ ID NO: 169723 - protein, 8 aa, Artificial Sequence
  Description of Artificial Sequence: Synthetic peptide
  Seed: FMYSDFHF
FIYSDFHL

SEQ ID NO: 169724 - protein, 8 aa, Artificial Sequence
  Description of Artificial Sequence: Synthetic peptide
  Seed: FMYSDFHF
FIYSDFHM

SEQ ID NO: 169725 - protein, 8 aa, Artificial Sequence
  Description of Artificial Sequence: Synthetic peptide
  Seed: FMYSDFHF
FIYSDFHV

SEQ ID NO: 169726 - protein, 8 aa, Artificial Sequence
  Description of Artificial Sequence: Synthetic peptide
  Seed: FMYSDFHF
FIYSDFHY

SEQ ID NO: 169727 - protein, 8 aa, Artificial Sequence
  Description of Artificial Sequence: Synthetic peptide
  Seed: FMYSDFHF
FKYSDFHF

SEQ ID NO: 169728 - protein, 8 aa, Artificial Sequence
  Description of Artificial Sequence: Synthetic peptide
  Seed: FMYSDFHF
FKYSDFHL

SEQ ID NO: 169729 - protein, 8 aa, Artificial Sequence
  Description of Artificial Sequence: Synthetic peptide
  Seed: FMYSDFHF
FKYSDFHM

SEQ ID NO: 169730 - protein, 8 aa, Artificial Sequence
  Description of Artificial Sequence: Synthetic peptide
  Seed: FMYSDFHF
FKYSDFHY

SEQ ID NO: 169731 - protein, 8 aa, Artificial Sequence
  Description of Artificial Sequence: Synthetic peptide
  Seed: FMYSDFHF
FLYSDFHA

SEQ ID NO: 169732 - protein, 8 aa, Artificial Sequence
  Description of Artificial Sequence: Synthetic peptide
  Seed: FMYSDFHF
FLYSDFHC

SEQ ID NO: 169733 - protein, 8 aa, Artificial Sequence
  Description of Artificial Sequence: Synthetic peptide
  Seed: FMYSDFHF
FLYSDFHF

SEQ ID NO: 169734 - protein, 8 aa, Artificial Sequence
  Description of Artificial Sequence: Synthetic peptide
  Seed: FMYSDFHF
FLYSDFHI

SEQ ID NO: 169735 - protein, 8 aa, Artificial Sequence
  Description of Artificial Sequence: Synthetic peptide
  Seed: FMYSDFHF
FLYSDFHL

SEQ ID NO: 169736 - protein, 8 aa, Artificial Sequence
  Description of Artificial Sequence: Synthetic peptide
  Seed: FMYSDFHF
FLYSDFHM

SEQ ID NO: 169737 - protein, 8 aa, Artificial Sequence
  Description of Artificial Sequence: Synthetic peptide
  Seed: FMYSDFHF
FLYSDFHS

SEQ ID NO: 169738 - protein, 8 aa, Artificial Sequence
  Description of Artificial Sequence: Synthetic peptide
  Seed: FMYSDFHF
FLYSDFHT

SEQ ID NO: 169739 - protein, 8 aa, Artificial Sequence
  Description of Artificial Sequence: Synthetic peptide
  Seed: FMYSDFHF
FLYSDFHV

SEQ ID NO: 169740 - protein, 8 aa, Artificial Sequence
  Description of Artificial Sequence: Synthetic peptide
  Seed: FMYSDFHF
FLYSDFHY

SEQ ID NO: 169741 - protein, 8 aa, Artificial Sequence
  Description of Artificial Sequence: Synthetic peptide
  Seed: FMYSDFHF
FMYSDFHA

SEQ ID NO: 169742 - protein, 8 aa, Artificial Sequence
  Description of Artificial Sequence: Synthetic peptide
  Seed: FMYSDFHF
FMYSDFHI

SEQ ID NO: 169743 - protein, 8 aa, Artificial Sequence
  Description of Artificial Sequence: Synthetic peptide
  Seed: FMYSDFHF
FMYSDFHL

SEQ ID NO: 169744 - protein, 8 aa, Artificial Sequence
  Description of Artificial Sequence: Synthetic peptide
  Seed: FMYSDFHF
FMYSDFHM

SEQ ID NO: 169745 - protein, 8 aa, Artificial Sequence
  Description of Artificial Sequence: Synthetic peptide
  Seed: FMYSDFHF
FMYSDFHT

SEQ ID NO: 169746 - protein, 8 aa, Artificial Sequence
  Description of Artificial Sequence: Synthetic peptide
  Seed: FMYSDFHF
FMYSDFHV

SEQ ID NO: 169747 - protein, 8 aa, Artificial Sequence
  Description of Artificial Sequence: Synthetic peptide
  Seed: FMYSDFHF
FMYSDFHW

SEQ ID NO: 169748 - protein, 8 aa, Artificial Sequence
  Description of Artificial Sequence: Synthetic peptide
  Seed: FMYSDFHF
FMYSDFHY

SEQ ID NO: 169749 - protein, 8 aa, Artificial Sequence
  Description of Artificial Sequence: Synthetic peptide
  Seed: FMYSDFHF
FPYSDFHY

SEQ ID NO: 169750 - protein, 8 aa, Artificial Sequence
  Description of Artificial Sequence: Synthetic peptide
  Seed: FMYSDFHF
FQYSDFHA

SEQ ID NO: 169751 - protein, 8 aa, Artificial Sequence
  Description of Artificial Sequence: Synthetic peptide
  Seed: FMYSDFHF
FQYSDFHF

SEQ ID NO: 169752 - protein, 8 aa, Artificial Sequence
  Description of Artificial Sequence: Synthetic peptide
  Seed: FMYSDFHF
FQYSDFHH

SEQ ID NO: 169753 - protein, 8 aa, Artificial Sequence
  Description of Artificial Sequence: Synthetic peptide
  Seed: FMYSDFHF
FQYSDFHI

SEQ ID NO: 169754 - protein, 8 aa, Artificial Sequence
  Description of Artificial Sequence: Synthetic peptide
  Seed: FMYSDFHF
FQYSDFHL

SEQ ID NO: 169755 - protein, 8 aa, Artificial Sequence
  Description of Artificial Sequence: Synthetic peptide
  Seed: FMYSDFHF
FQYSDFHM

SEQ ID NO: 169756 - protein, 8 aa, Artificial Sequence
  Description of Artificial Sequence: Synthetic peptide
  Seed: FMYSDFHF
FQYSDFHP

SEQ ID NO: 169757 - protein, 8 aa, Artificial Sequence
  Description of Artificial Sequence: Synthetic peptide
  Seed: FMYSDFHF
FQYSDFHV

SEQ ID NO: 169758 - protein, 8 aa, Artificial Sequence
  Description of Artificial Sequence: Synthetic peptide
  Seed: FMYSDFHF
FQYSDFHW

SEQ ID NO: 169759 - protein, 8 aa, Artificial Sequence
  Description of Artificial Sequence: Synthetic peptide
  Seed: FMYSDFHF
FQYSDFHY

SEQ ID NO: 169760 - protein, 8 aa, Artificial Sequence
  Description of Artificial Sequence: Synthetic peptide
  Seed: FMYSDFHF
FRYSDFHF

SEQ ID NO: 169761 - protein, 8 aa, Artificial Sequence
  Description of Artificial Sequence: Synthetic peptide
  Seed: FMYSDFHF
FRYSDFHY

SEQ ID NO: 169762 - protein, 8 aa, Artificial Sequence
  Description of Artificial Sequence: Synthetic peptide
  Seed: FMYSDFHF
FSYSDFHF

SEQ ID NO: 169763 - protein, 8 aa, Artificial Sequence
  Description of Artificial Sequence: Synthetic peptide
  Seed: FMYSDFHF
FSYSDFHL

SEQ ID NO: 169764 - protein, 8 aa, Artificial Sequence
  Description of Artificial Sequence: Synthetic peptide
  Seed: FMYSDFHF
FSYSDFHM

SEQ ID NO: 169765 - protein, 8 aa, Artificial Sequence
  Description of Artificial Sequence: Synthetic peptide
  Seed: FMYSDFHF
FSYSDFHY

SEQ ID NO: 169766 - protein, 8 aa, Artificial Sequence
  Description of Artificial Sequence: Synthetic peptide
  Seed: FMYSDFHF
FTYSDFHF

SEQ ID NO: 169767 - protein, 8 aa, Artificial Sequence
  Description of Artificial Sequence: Synthetic peptide
  Seed: FMYSDFHF
FTYSDFHL

SEQ ID NO: 169768 - protein, 8 aa, Artificial Sequence
  Description of Artificial Sequence: Synthetic peptide
  Seed: FMYSDFHF
FTYSDFHM

SEQ ID NO: 169769 - protein, 8 aa, Artificial Sequence
  Description of Artificial Sequence: Synthetic peptide
  Seed: FMYSDFHF
FTYSDFHV

SEQ ID NO: 169770 - protein, 8 aa, Artificial Sequence
  Description of Artificial Sequence: Synthetic peptide
  Seed: FMYSDFHF
FTYSDFHY

SEQ ID NO: 169771 - protein, 8 aa, Artificial Sequence
  Description of Artificial Sequence: Synthetic peptide
  Seed: FMYSDFHF
FVYSDFHF

SEQ ID NO: 169772 - protein, 8 aa, Artificial Sequence
  Description of Artificial Sequence: Synthetic peptide
  Seed: FMYSDFHF
FVYSDFHI

SEQ ID NO: 169773 - protein, 8 aa, Artificial Sequence
  Description of Artificial Sequence: Synthetic peptide
  Seed: FMYSDFHF
FVYSDFHL

SEQ ID NO: 169774 - protein, 8 aa, Artificial Sequence
  Description of Artificial Sequence: Synthetic peptide
  Seed: FMYSDFHF
FVYSDFHM

SEQ ID NO: 169775 - protein, 8 aa, Artificial Sequence
  Description of Artificial Sequence: Synthetic peptide
  Seed: FMYSDFHF
FVYSDFHV

SEQ ID NO: 169776 - protein, 8 aa, Artificial Sequence
  Description of Artificial Sequence: Synthetic peptide
  Seed: FMYSDFHF
FVYSDFHY

SEQ ID NO: 169777 - protein, 8 aa, Artificial Sequence
  Description of Artificial Sequence: Synthetic peptide
  Seed: FMYSDFHF
FWYSDFHF

SEQ ID NO: 169778 - protein, 8 aa, Artificial Sequence
  Description of Artificial Sequence: Synthetic peptide
  Seed: FMYSDFHF
FWYSDFHI

SEQ ID NO: 169779 - protein, 8 aa, Artificial Sequence
  Description of Artificial Sequence: Synthetic peptide
  Seed: FMYSDFHF
FWYSDFHL

SEQ ID NO: 169780 - protein, 8 aa, Artificial Sequence
  Description of Artificial Sequence: Synthetic peptide
  Seed: FMYSDFHF
FWYSDFHW

SEQ ID NO: 169781 - protein, 8 aa, Artificial Sequence
  Description of Artificial Sequence: Synthetic peptide
  Seed: FMYSDFHF
FYYSDFHI

SEQ ID NO: 169782 - protein, 8 aa, Artificial Sequence
  Description of Artificial Sequence: Synthetic peptide
  Seed: FMYSDFHF
FYYSDFHL

SEQ ID NO: 169783 - protein, 8 aa, Artificial Sequence
  Description of Artificial Sequence: Synthetic peptide
  Seed: FMYSDFHF
FYYSDFHM

SEQ ID NO: 169784 - protein, 8 aa, Artificial Sequence
  Description of Artificial Sequence: Synthetic peptide
  Seed: FMYSDFHF
FYYSDFHW

SEQ ID NO: 169785 - protein, 9 aa, Artificial Sequence
  Description of Artificial Sequence: Synthetic peptide
  Seed: GTSKIKMKW
GASKIKMKF

SEQ ID NO: 169786 - protein, 9 aa, Artificial Sequence
  Description of Artificial Sequence: Synthetic peptide
  Seed: GTSKIKMKW
GASKIKMKW

SEQ ID NO: 169787 - protein, 9 aa, Artificial Sequence
  Description of Artificial Sequence: Synthetic peptide
  Seed: GTSKIKMKW
GASKIKMKY

SEQ ID NO: 169788 - protein, 10 aa, Artificial Sequence
  Description of Artificial Sequence: Synthetic peptide
  Seed: GKVCRTLLAK
GAVCRTLLAK

SEQ ID NO: 169789 - protein, 10 aa, Artificial Sequence
  Description of Artificial Sequence: Synthetic peptide
  Seed: GKVCRTLLAK
GAVCRTLLAR

SEQ ID NO: 169790 - protein, 9 aa, Artificial Sequence
  Description of Artificial Sequence: Synthetic peptide
  Seed: GTSKIKMKW
GCSKIKMKW

SEQ ID NO: 169791 - protein, 10 aa, Artificial Sequence
  Description of Artificial Sequence: Synthetic peptide
  Seed: GKVCRTLLAK
GCVCRTLLAK

SEQ ID NO: 169792 - protein, 10 aa, Artificial Sequence
  Description of Artificial Sequence: Synthetic peptide
  Seed: GKVCRTLLAK
GCVCRTLLAR

SEQ ID NO: 169793 - protein, 10 aa, Artificial Sequence
  Description of Artificial Sequence: Synthetic peptide
  Seed: GKVCRTLLAK
GDVCRTLLAK

SEQ ID NO: 169794 - protein, 10 aa, Artificial Sequence
  Description of Artificial Sequence: Synthetic peptide
  Seed: GKVCRTLLAK
GDVCRTLLAR

SEQ ID NO: 169795 - protein, 10 aa, Artificial Sequence
  Description of Artificial Sequence: Synthetic peptide
  Seed: GKVCRTLLAK
GEVCRTLLAK

SEQ ID NO: 169796 - protein, 10 aa, Artificial Sequence
  Description of Artificial Sequence: Synthetic peptide
  Seed: GKVCRTLLAK
GEVCRTLLAR

SEQ ID NO: 169797 - protein, 10 aa, Artificial Sequence
  Description of Artificial Sequence: Synthetic peptide
  Seed: GKVCRTLLAK
GFVCRTLLAK

SEQ ID NO: 169798 - protein, 10 aa, Artificial Sequence
  Description of Artificial Sequence: Synthetic peptide
  Seed: GKVCRTLLAK
GFVCRTLLAR

SEQ ID NO: 169799 - protein, 9 aa, Artificial Sequence
  Description of Artificial Sequence: Synthetic peptide
  Seed: GTSKIKMKW
GGSKIKMKW

SEQ ID NO: 169800 - protein, 10 aa, Artificial Sequence
  Description of Artificial Sequence: Synthetic peptide
  Seed: GKVCRTLLAK
GGVCRTLLAK

SEQ ID NO: 169801 - protein, 10 aa, Artificial Sequence
  Description of Artificial Sequence: Synthetic peptide
  Seed: GKVCRTLLAK
GGVCRTLLAR

SEQ ID NO: 169802 - protein, 10 aa, Artificial Sequence
  Description of Artificial Sequence: Synthetic peptide
  Seed: GKVCRTLLAK
GHVCRTLLAK

SEQ ID NO: 169803 - protein, 10 aa, Artificial Sequence
  Description of Artificial Sequence: Synthetic peptide
  Seed: GKVCRTLLAK
GHVCRTLLAR

SEQ ID NO: 169804 - protein, 9 aa, Artificial Sequence
  Description of Artificial Sequence: Synthetic peptide
  Seed: GTSKIKMKW
GISKIKMKW

SEQ ID NO: 169805 - protein, 10 aa, Artificial Sequence
  Description of Artificial Sequence: Synthetic peptide
  Seed: GKVCRTLLAK
GIVCRTLLAK

SEQ ID NO: 169806 - protein, 10 aa, Artificial Sequence
  Description of Artificial Sequence: Synthetic peptide
  Seed: GKVCRTLLAK
GIVCRTLLAR

SEQ ID NO: 169807 - protein, 10 aa, Artificial Sequence
  Description of Artificial Sequence: Synthetic peptide
  Seed: GKVCRTLLAK
GIVCRTLLAY

SEQ ID NO: 169808 - protein, 10 aa, Artificial Sequence
  Description of Artificial Sequence: Synthetic peptide
  Seed: GKVCRTLLAK
GKVCRTLLAR

SEQ ID NO: 169809 - protein, 9 aa, Artificial Sequence
  Description of Artificial Sequence: Synthetic peptide
  Seed: GTSKIKMKW
GLSKIKMKF

SEQ ID NO: 169810 - protein, 9 aa, Artificial Sequence
  Description of Artificial Sequence: Synthetic peptide
  Seed: GTSKIKMKW
GLSKIKMKW

SEQ ID NO: 169811 - protein, 10 aa, Artificial Sequence
  Description of Artificial Sequence: Synthetic peptide
  Seed: GKVCRTLLAK
GLVCRTLLAK

SEQ ID NO: 169812 - protein, 10 aa, Artificial Sequence
  Description of Artificial Sequence: Synthetic peptide
  Seed: GKVCRTLLAK
GLVCRTLLAR

SEQ ID NO: 169813 - protein, 10 aa, Artificial Sequence
  Description of Artificial Sequence: Synthetic peptide
  Seed: GKVCRTLLAK
GLVCRTLLAY

SEQ ID NO: 169814 - protein, 9 aa, Artificial Sequence
  Description of Artificial Sequence: Synthetic peptide
  Seed: GTSKIKMKW
GMSKIKMKF

SEQ ID NO: 169815 - protein, 9 aa, Artificial Sequence
  Description of Artificial Sequence: Synthetic peptide
  Seed: GTSKIKMKW
GMSKIKMKW

SEQ ID NO: 169816 - protein, 10 aa, Artificial Sequence
  Description of Artificial Sequence: Synthetic peptide
  Seed: GKVCRTLLAK
GMVCRTLLAK

SEQ ID NO: 169817 - protein, 10 aa, Artificial Sequence
  Description of Artificial Sequence: Synthetic peptide
  Seed: GKVCRTLLAK
GMVCRTLLAR

SEQ ID NO: 169818 - protein, 10 aa, Artificial Sequence
  Description of Artificial Sequence: Synthetic peptide
  Seed: GKVCRTLLAK
GMVCRTLLAY

SEQ ID NO: 169819 - protein, 10 aa, Artificial Sequence
  Description of Artificial Sequence: Synthetic peptide
  Seed: GKVCRTLLAK
GNVCRTLLAK

SEQ ID NO: 169820 - protein, 10 aa, Artificial Sequence
  Description of Artificial Sequence: Synthetic peptide
  Seed: GKVCRTLLAK
GNVCRTLLAR

SEQ ID NO: 169821 - protein, 10 aa, Artificial Sequence
  Description of Artificial Sequence: Synthetic peptide
  Seed: GKVCRTLLAK
GPVCRTLLAK

SEQ ID NO: 169822 - protein, 10 aa, Artificial Sequence
  Description of Artificial Sequence: Synthetic peptide
  Seed: GKVCRTLLAK
GPVCRTLLAR

SEQ ID NO: 169823 - protein, 10 aa, Artificial Sequence
  Description of Artificial Sequence: Synthetic peptide
  Seed: GKVCRTLLAK
GQVCRTLLAK

SEQ ID NO: 169824 - protein, 10 aa, Artificial Sequence
  Description of Artificial Sequence: Synthetic peptide
  Seed: GKVCRTLLAK
GQVCRTLLAR

SEQ ID NO: 169825 - protein, 10 aa, Artificial Sequence
  Description of Artificial Sequence: Synthetic peptide
  Seed: GKVCRTLLAK
GRVCRTLLAK

SEQ ID NO: 169826 - protein, 10 aa, Artificial Sequence
  Description of Artificial Sequence: Synthetic peptide
  Seed: GKVCRTLLAK
GRVCRTLLAR

SEQ ID NO: 169827 - protein, 9 aa, Artificial Sequence
  Description of Artificial Sequence: Synthetic peptide
  Seed: GTSKIKMKW
GSSKIKMKF

SEQ ID NO: 169828 - protein, 9 aa, Artificial Sequence
  Description of Artificial Sequence: Synthetic peptide
  Seed: GTSKIKMKW
GSSKIKMKL

SEQ ID NO: 169829 - protein, 9 aa, Artificial Sequence
  Description of Artificial Sequence: Synthetic peptide
  Seed: GTSKIKMKW
GSSKIKMKM

SEQ ID NO: 169830 - protein, 9 aa, Artificial Sequence
  Description of Artificial Sequence: Synthetic peptide
  Seed: GTSKIKMKW
GSSKIKMKW

SEQ ID NO: 169831 - protein, 9 aa, Artificial Sequence
  Description of Artificial Sequence: Synthetic peptide
  Seed: GTSKIKMKW
GSSKIKMKY

SEQ ID NO: 169832 - protein, 10 aa, Artificial Sequence
  Description of Artificial Sequence: Synthetic peptide
  Seed: GKVCRTLLAK
GSVCRTLLAK

SEQ ID NO: 169833 - protein, 10 aa, Artificial Sequence
  Description of Artificial Sequence: Synthetic peptide
  Seed: GKVCRTLLAK
GSVCRTLLAR

SEQ ID NO: 169834 - protein, 10 aa, Artificial Sequence
  Description of Artificial Sequence: Synthetic peptide
  Seed: GKVCRTLLAK
GSVCRTLLAY

SEQ ID NO: 169835 - protein, 9 aa, Artificial Sequence
  Description of Artificial Sequence: Synthetic peptide
  Seed: GTSKIKMKW
GTSKIKMKF

SEQ ID NO: 169836 - protein, 9 aa, Artificial Sequence
  Description of Artificial Sequence: Synthetic peptide
  Seed: GTSKIKMKW
GTSKIKMKL

SEQ ID NO: 169837 - protein, 9 aa, Artificial Sequence
  Description of Artificial Sequence: Synthetic peptide
  Seed: GTSKIKMKW
GTSKIKMKM

SEQ ID NO: 169838 - protein, 9 aa, Artificial Sequence
  Description of Artificial Sequence: Synthetic peptide
  Seed: GTSKIKMKW
GTSKIKMKY

SEQ ID NO: 169839 - protein, 10 aa, Artificial Sequence
  Description of Artificial Sequence: Synthetic peptide
  Seed: GKVCRTLLAK
GTVCRTLLAK

SEQ ID NO: 169840 - protein, 10 aa, Artificial Sequence
  Description of Artificial Sequence: Synthetic peptide
  Seed: GKVCRTLLAK
GTVCRTLLAR

SEQ ID NO: 169841 - protein, 10 aa, Artificial Sequence
  Description of Artificial Sequence: Synthetic peptide
  Seed: GKVCRTLLAK
GTVCRTLLAY

SEQ ID NO: 169842 - protein, 9 aa, Artificial Sequence
  Description of Artificial Sequence: Synthetic peptide
  Seed: GTSKIKMKW
GVSKIKMKF

SEQ ID NO: 169843 - protein, 9 aa, Artificial Sequence
  Description of Artificial Sequence: Synthetic peptide
  Seed: GTSKIKMKW
GVSKIKMKW

SEQ ID NO: 169844 - protein, 10 aa, Artificial Sequence
  Description of Artificial Sequence: Synthetic peptide
  Seed: GKVCRTLLAK
GVVCRTLLAK

SEQ ID NO: 169845 - protein, 10 aa, Artificial Sequence
  Description of Artificial Sequence: Synthetic peptide
  Seed: GKVCRTLLAK
GVVCRTLLAR

SEQ ID NO: 169846 - protein, 10 aa, Artificial Sequence
  Description of Artificial Sequence: Synthetic peptide
  Seed: GKVCRTLLAK
GVVCRTLLAY

SEQ ID NO: 169847 - protein, 10 aa, Artificial Sequence
  Description of Artificial Sequence: Synthetic peptide
  Seed: GKVCRTLLAK
GWVCRTLLAK

SEQ ID NO: 169848 - protein, 10 aa, Artificial Sequence
  Description of Artificial Sequence: Synthetic peptide
  Seed: GKVCRTLLAK
GWVCRTLLAR

SEQ ID NO: 169849 - protein, 10 aa, Artificial Sequence
  Description of Artificial Sequence: Synthetic peptide
  Seed: GKVCRTLLAK
GYVCRTLLAK

SEQ ID NO: 169850 - protein, 10 aa, Artificial Sequence
  Description of Artificial Sequence: Synthetic peptide
  Seed: GKVCRTLLAK
GYVCRTLLAR

SEQ ID NO: 169851 - protein, 8 aa, Artificial Sequence
  Description of Artificial Sequence: Synthetic peptide
  Seed: HEGEGIPL
HEGEGIPI

SEQ ID NO: 169852 - protein, 8 aa, Artificial Sequence
  Description of Artificial Sequence: Synthetic peptide
  Seed: HEGEGIPL
HEGEGIPM

SEQ ID NO: 169853 - protein, 9 aa, Artificial Sequence
  Description of Artificial Sequence: Synthetic peptide
  Seed: HLRNDTDVV
HLRNDTDVI

SEQ ID NO: 169854 - protein, 9 aa, Artificial Sequence
  Description of Artificial Sequence: Synthetic peptide
  Seed: HLRNDTDVV
HLRNDTDVL

SEQ ID NO: 169855 - protein, 9 aa, Artificial Sequence
  Description of Artificial Sequence: Synthetic peptide
  Seed: HLRNDTDVV
HMRNDTDVI

SEQ ID NO: 169856 - protein, 9 aa, Artificial Sequence
  Description of Artificial Sequence: Synthetic peptide
  Seed: HLRNDTDVV
HMRNDTDVL

SEQ ID NO: 169857 - protein, 9 aa, Artificial Sequence
  Description of Artificial Sequence: Synthetic peptide
  Seed: HLRNDTDVV
HMRNDTDVV

SEQ ID NO: 169858 - protein, 9 aa, Artificial Sequence
  Description of Artificial Sequence: Synthetic peptide
  Seed: KVCRTLLAK
KACRTLLAK

SEQ ID NO: 169859 - protein, 10 aa, Artificial Sequence
  Description of Artificial Sequence: Synthetic peptide
  Seed: KVCRTLLAKS
KACRTLLAKA

SEQ ID NO: 169860 - protein, 10 aa, Artificial Sequence
  Description of Artificial Sequence: Synthetic peptide
  Seed: KVCRTLLAKS
KACRTLLAKI

SEQ ID NO: 169861 - protein, 10 aa, Artificial Sequence
  Description of Artificial Sequence: Synthetic peptide
  Seed: KVCRTLLAKS
KACRTLLAKK

SEQ ID NO: 169862 - protein, 10 aa, Artificial Sequence
  Description of Artificial Sequence: Synthetic peptide
  Seed: KVCRTLLAKS
KACRTLLAKM

SEQ ID NO: 169863 - protein, 10 aa, Artificial Sequence
  Description of Artificial Sequence: Synthetic peptide
  Seed: KVCRTLLAKS
KACRTLLAKV

SEQ ID NO: 169864 - protein, 9 aa, Artificial Sequence
  Description of Artificial Sequence: Synthetic peptide
  Seed: KVCRTLLAK
KACRTLLAR

SEQ ID NO: 169865 - protein, 9 aa, Artificial Sequence
  Description of Artificial Sequence: Synthetic peptide
  Seed: KVCRTLLAK
KCCRTLLAR

SEQ ID NO: 169866 - protein, 9 aa, Artificial Sequence
  Description of Artificial Sequence: Synthetic peptide
  Seed: KVCRTLLAK
KFCRTLLAK

SEQ ID NO: 169867 - protein, 10 aa, Artificial Sequence
  Description of Artificial Sequence: Synthetic peptide
  Seed: KVCRTLLAKS
KFCRTLLAKA

SEQ ID NO: 169868 - protein, 10 aa, Artificial Sequence
  Description of Artificial Sequence: Synthetic peptide
  Seed: KVCRTLLAKS
KFCRTLLAKI

SEQ ID NO: 169869 - protein, 10 aa, Artificial Sequence
  Description of Artificial Sequence: Synthetic peptide
  Seed: KVCRTLLAKS
KFCRTLLAKK

SEQ ID NO: 169870 - protein, 10 aa, Artificial Sequence
  Description of Artificial Sequence: Synthetic peptide
  Seed: KVCRTLLAKS
KFCRTLLAKV

SEQ ID NO: 169871 - protein, 9 aa, Artificial Sequence
  Description of Artificial Sequence: Synthetic peptide
  Seed: KVCRTLLAK
KFCRTLLAR

SEQ ID NO: 169872 - protein, 9 aa, Artificial Sequence
  Description of Artificial Sequence: Synthetic peptide
  Seed: KVCRTLLAK
KGCRTLLAK

SEQ ID NO: 169873 - protein, 10 aa, Artificial Sequence
  Description of Artificial Sequence: Synthetic peptide
  Seed: KVCRTLLAKS
KGCRTLLAKA

SEQ ID NO: 169874 - protein, 10 aa, Artificial Sequence
  Description of Artificial Sequence: Synthetic peptide
  Seed: KVCRTLLAKS
KGCRTLLAKK

SEQ ID NO: 169875 - protein, 9 aa, Artificial Sequence
  Description of Artificial Sequence: Synthetic peptide
  Seed: KVCRTLLAK
KGCRTLLAR

SEQ ID NO: 169876 - protein, 10 aa, Artificial Sequence
  Description of Artificial Sequence: Synthetic peptide
  Seed: KVCRTLLAKS
KHCRTLLAKK

SEQ ID NO: 169877 - protein, 9 aa, Artificial Sequence
  Description of Artificial Sequence: Synthetic peptide
  Seed: KVCRTLLAK
KHCRTLLAR

SEQ ID NO: 169878 - protein, 9 aa, Artificial Sequence
  Description of Artificial Sequence: Synthetic peptide
  Seed: KVCRTLLAK
KICRTLLAK

SEQ ID NO: 169879 - protein, 10 aa, Artificial Sequence
  Description of Artificial Sequence: Synthetic peptide
  Seed: KVCRTLLAKS
KICRTLLAKA

SEQ ID NO: 169880 - protein, 10 aa, Artificial Sequence
  Description of Artificial Sequence: Synthetic peptide
  Seed: KVCRTLLAKS
KICRTLLAKI

SEQ ID NO: 169881 - protein, 10 aa, Artificial Sequence
  Description of Artificial Sequence: Synthetic peptide
  Seed: KVCRTLLAKS
KICRTLLAKK

SEQ ID NO: 169882 - protein, 10 aa, Artificial Sequence
  Description of Artificial Sequence: Synthetic peptide
  Seed: KVCRTLLAKS
KICRTLLAKL

SEQ ID NO: 169883 - protein, 10 aa, Artificial Sequence
  Description of Artificial Sequence: Synthetic peptide
  Seed: KVCRTLLAKS
KICRTLLAKM

SEQ ID NO: 169884 - protein, 10 aa, Artificial Sequence
  Description of Artificial Sequence: Synthetic peptide
  Seed: KVCRTLLAKS
KICRTLLAKV

SEQ ID NO: 169885 - protein, 9 aa, Artificial Sequence
  Description of Artificial Sequence: Synthetic peptide
  Seed: KVCRTLLAK
KICRTLLAR

SEQ ID NO: 169886 - protein, 9 aa, Artificial Sequence
  Description of Artificial Sequence: Synthetic peptide
  Seed: KVCRTLLAK
KICRTLLAY

SEQ ID NO: 169887 - protein, 9 aa, Artificial Sequence
  Description of Artificial Sequence: Synthetic peptide
  Seed: KVCRTLLAK
KLCRTLLAH

SEQ ID NO: 169888 - protein, 10 aa, Artificial Sequence
  Description of Artificial Sequence: Synthetic peptide
  Seed: KVCRTLLAKS
KLCRTLLAKA

SEQ ID NO: 169889 - protein, 10 aa, Artificial Sequence
  Description of Artificial Sequence: Synthetic peptide
  Seed: KVCRTLLAKS
KLCRTLLAKK

SEQ ID NO: 169890 - protein, 9 aa, Artificial Sequence
  Description of Artificial Sequence: Synthetic peptide
  Seed: KVCRTLLAK
KLCRTLLAR

SEQ ID NO: 169891 - protein, 9 aa, Artificial Sequence
  Description of Artificial Sequence: Synthetic peptide
  Seed: KVCRTLLAK
KLCRTLLAY

SEQ ID NO: 169892 - protein, 9 aa, Artificial Sequence
  Description of Artificial Sequence: Synthetic peptide
  Seed: KVCRTLLAK
KMCRTLLAA

SEQ ID NO: 169893 - protein, 9 aa, Artificial Sequence
  Description of Artificial Sequence: Synthetic peptide
  Seed: KVCRTLLAK
KMCRTLLAH

SEQ ID NO: 169894 - protein, 10 aa, Artificial Sequence
  Description of Artificial Sequence: Synthetic peptide
  Seed: KVCRTLLAKS
KMCRTLLAKA

SEQ ID NO: 169895 - protein, 10 aa, Artificial Sequence
  Description of Artificial Sequence: Synthetic peptide
  Seed: KVCRTLLAKS
KMCRTLLAKI

SEQ ID NO: 169896 - protein, 10 aa, Artificial Sequence
  Description of Artificial Sequence: Synthetic peptide
  Seed: KVCRTLLAKS
KMCRTLLAKK

SEQ ID NO: 169897 - protein, 10 aa, Artificial Sequence
  Description of Artificial Sequence: Synthetic peptide
  Seed: KVCRTLLAKS
KMCRTLLAKL

SEQ ID NO: 169898 - protein, 10 aa, Artificial Sequence
  Description of Artificial Sequence: Synthetic peptide
  Seed: KVCRTLLAKS
KMCRTLLAKM

SEQ ID NO: 169899 - protein, 10 aa, Artificial Sequence
  Description of Artificial Sequence: Synthetic peptide
  Seed: KVCRTLLAKS
KMCRTLLAKV

SEQ ID NO: 169900 - protein, 10 aa, Artificial Sequence
  Description of Artificial Sequence: Synthetic peptide
  Seed: KVCRTLLAKS
KMCRTLLAKY

SEQ ID NO: 169901 - protein, 9 aa, Artificial Sequence
  Description of Artificial Sequence: Synthetic peptide
  Seed: KVCRTLLAK
KMCRTLLAR

SEQ ID NO: 169902 - protein, 9 aa, Artificial Sequence
  Description of Artificial Sequence: Synthetic peptide
  Seed: KVCRTLLAK
KMCRTLLAY

SEQ ID NO: 169903 - protein, 9 aa, Artificial Sequence
  Description of Artificial Sequence: Synthetic peptide
  Seed: KVCRTLLAK
KNCRTLLAK

SEQ ID NO: 169904 - protein, 10 aa, Artificial Sequence
  Description of Artificial Sequence: Synthetic peptide
  Seed: KVCRTLLAKS
KNCRTLLAKK

SEQ ID NO: 169905 - protein, 9 aa, Artificial Sequence
  Description of Artificial Sequence: Synthetic peptide
  Seed: KVCRTLLAK
KNCRTLLAR

SEQ ID NO: 169906 - protein, 9 aa, Artificial Sequence
  Description of Artificial Sequence: Synthetic peptide
  Seed: KVCRTLLAK
KQCRTLLAK

SEQ ID NO: 169907 - protein, 10 aa, Artificial Sequence
  Description of Artificial Sequence: Synthetic peptide
  Seed: KVCRTLLAKS
KQCRTLLAKA

SEQ ID NO: 169908 - protein, 10 aa, Artificial Sequence
  Description of Artificial Sequence: Synthetic peptide
  Seed: KVCRTLLAKS
KQCRTLLAKK

SEQ ID NO: 169909 - protein, 9 aa, Artificial Sequence
  Description of Artificial Sequence: Synthetic peptide
  Seed: KVCRTLLAK
KQCRTLLAR

SEQ ID NO: 169910 - protein, 9 aa, Artificial Sequence
  Description of Artificial Sequence: Synthetic peptide
  Seed: KVCRTLLAK
KSCRTLLAA

SEQ ID NO: 169911 - protein, 10 aa, Artificial Sequence
  Description of Artificial Sequence: Synthetic peptide
  Seed: KVCRTLLAKS
KSCRTLLAKA

SEQ ID NO: 169912 - protein, 10 aa, Artificial Sequence
  Description of Artificial Sequence: Synthetic peptide
  Seed: KVCRTLLAKS
KSCRTLLAKG

SEQ ID NO: 169913 - protein, 10 aa, Artificial Sequence
  Description of Artificial Sequence: Synthetic peptide
  Seed: KVCRTLLAKS
KSCRTLLAKI

SEQ ID NO: 169914 - protein, 10 aa, Artificial Sequence
  Description of Artificial Sequence: Synthetic peptide
  Seed: KVCRTLLAKS
KSCRTLLAKK

SEQ ID NO: 169915 - protein, 10 aa, Artificial Sequence
  Description of Artificial Sequence: Synthetic peptide
  Seed: KVCRTLLAKS
KSCRTLLAKL

SEQ ID NO: 169916 - protein, 10 aa, Artificial Sequence
  Description of Artificial Sequence: Synthetic peptide
  Seed: KVCRTLLAKS
KSCRTLLAKM

SEQ ID NO: 169917 - protein, 10 aa, Artificial Sequence
  Description of Artificial Sequence: Synthetic peptide
  Seed: KVCRTLLAKS
KSCRTLLAKR

SEQ ID NO: 169918 - protein, 10 aa, Artificial Sequence
  Description of Artificial Sequence: Synthetic peptide
  Seed: KVCRTLLAKS
KSCRTLLAKS

SEQ ID NO: 169919 - protein, 10 aa, Artificial Sequence
  Description of Artificial Sequence: Synthetic peptide
  Seed: KVCRTLLAKS
KSCRTLLAKT

SEQ ID NO: 169920 - protein, 10 aa, Artificial Sequence
  Description of Artificial Sequence: Synthetic peptide
  Seed: KVCRTLLAKS
KSCRTLLAKV

SEQ ID NO: 169921 - protein, 10 aa, Artificial Sequence
  Description of Artificial Sequence: Synthetic peptide
  Seed: KVCRTLLAKS
KSCRTLLAKY

SEQ ID NO: 169922 - protein, 9 aa, Artificial Sequence
  Description of Artificial Sequence: Synthetic peptide
  Seed: KVCRTLLAK
KSCRTLLAR

SEQ ID NO: 169923 - protein, 9 aa, Artificial Sequence
  Description of Artificial Sequence: Synthetic peptide
  Seed: KVCRTLLAK
KSCRTLLAV

SEQ ID NO: 169924 - protein, 9 aa, Artificial Sequence
  Description of Artificial Sequence: Synthetic peptide
  Seed: KVCRTLLAK
KSCRTLLAY

SEQ ID NO: 169925 - protein, 9 aa, Artificial Sequence
  Description of Artificial Sequence: Synthetic peptide
  Seed: KVCRTLLAK
KTCRTLLAA

SEQ ID NO: 169926 - protein, 9 aa, Artificial Sequence
  Description of Artificial Sequence: Synthetic peptide
  Seed: KVCRTLLAK
KTCRTLLAH

SEQ ID NO: 169927 - protein, 9 aa, Artificial Sequence
  Description of Artificial Sequence: Synthetic peptide
  Seed: KVCRTLLAK
KTCRTLLAI

SEQ ID NO: 169928 - protein, 10 aa, Artificial Sequence
  Description of Artificial Sequence: Synthetic peptide
  Seed: KVCRTLLAKS
KTCRTLLAKA

SEQ ID NO: 169929 - protein, 10 aa, Artificial Sequence
  Description of Artificial Sequence: Synthetic peptide
  Seed: KVCRTLLAKS
KTCRTLLAKC

SEQ ID NO: 169930 - protein, 10 aa, Artificial Sequence
  Description of Artificial Sequence: Synthetic peptide
  Seed: KVCRTLLAKS
KTCRTLLAKF

SEQ ID NO: 169931 - protein, 10 aa, Artificial Sequence
  Description of Artificial Sequence: Synthetic peptide
  Seed: KVCRTLLAKS
KTCRTLLAKG

SEQ ID NO: 169932 - protein, 10 aa, Artificial Sequence
  Description of Artificial Sequence: Synthetic peptide
  Seed: KVCRTLLAKS
KTCRTLLAKI

SEQ ID NO: 169933 - protein, 10 aa, Artificial Sequence
  Description of Artificial Sequence: Synthetic peptide
  Seed: KVCRTLLAKS
KTCRTLLAKK

SEQ ID NO: 169934 - protein, 10 aa, Artificial Sequence
  Description of Artificial Sequence: Synthetic peptide
  Seed: KVCRTLLAKS
KTCRTLLAKL

SEQ ID NO: 169935 - protein, 10 aa, Artificial Sequence
  Description of Artificial Sequence: Synthetic peptide
  Seed: KVCRTLLAKS
KTCRTLLAKM

SEQ ID NO: 169936 - protein, 10 aa, Artificial Sequence
  Description of Artificial Sequence: Synthetic peptide
  Seed: KVCRTLLAKS
KTCRTLLAKP

SEQ ID NO: 169937 - protein, 10 aa, Artificial Sequence
  Description of Artificial Sequence: Synthetic peptide
  Seed: KVCRTLLAKS
KTCRTLLAKQ

SEQ ID NO: 169938 - protein, 10 aa, Artificial Sequence
  Description of Artificial Sequence: Synthetic peptide
  Seed: KVCRTLLAKS
KTCRTLLAKR

SEQ ID NO: 169939 - protein, 10 aa, Artificial Sequence
  Description of Artificial Sequence: Synthetic peptide
  Seed: KVCRTLLAKS
KTCRTLLAKS

SEQ ID NO: 169940 - protein, 10 aa, Artificial Sequence
  Description of Artificial Sequence: Synthetic peptide
  Seed: KVCRTLLAKS
KTCRTLLAKT

SEQ ID NO: 169941 - protein, 10 aa, Artificial Sequence
  Description of Artificial Sequence: Synthetic peptide
  Seed: KVCRTLLAKS
KTCRTLLAKV

SEQ ID NO: 169942 - protein, 10 aa, Artificial Sequence
  Description of Artificial Sequence: Synthetic peptide
  Seed: KVCRTLLAKS
KTCRTLLAKY

SEQ ID NO: 169943 - protein, 9 aa, Artificial Sequence
  Description of Artificial Sequence: Synthetic peptide
  Seed: KVCRTLLAK
KTCRTLLAL

SEQ ID NO: 169944 - protein, 9 aa, Artificial Sequence
  Description of Artificial Sequence: Synthetic peptide
  Seed: KVCRTLLAK
KTCRTLLAM

SEQ ID NO: 169945 - protein, 9 aa, Artificial Sequence
  Description of Artificial Sequence: Synthetic peptide
  Seed: KVCRTLLAK
KTCRTLLAR

SEQ ID NO: 169946 - protein, 9 aa, Artificial Sequence
  Description of Artificial Sequence: Synthetic peptide
  Seed: KVCRTLLAK
KTCRTLLAV

SEQ ID NO: 169947 - protein, 9 aa, Artificial Sequence
  Description of Artificial Sequence: Synthetic peptide
  Seed: KVCRTLLAK
KTCRTLLAY

SEQ ID NO: 169948 - protein, 9 aa, Artificial Sequence
  Description of Artificial Sequence: Synthetic peptide
  Seed: KVCRTLLAK
KVCRTLLAA

SEQ ID NO: 169949 - protein, 10 aa, Artificial Sequence
  Description of Artificial Sequence: Synthetic peptide
  Seed: KVCRTLLAKS
KVCRTLLAKA

SEQ ID NO: 169950 - protein, 10 aa, Artificial Sequence
  Description of Artificial Sequence: Synthetic peptide
  Seed: KVCRTLLAKS
KVCRTLLAKG

SEQ ID NO: 169951 - protein, 10 aa, Artificial Sequence
  Description of Artificial Sequence: Synthetic peptide
  Seed: KVCRTLLAKS
KVCRTLLAKI

SEQ ID NO: 169952 - protein, 10 aa, Artificial Sequence
  Description of Artificial Sequence: Synthetic peptide
  Seed: KVCRTLLAKS
KVCRTLLAKK

SEQ ID NO: 169953 - protein, 10 aa, Artificial Sequence
  Description of Artificial Sequence: Synthetic peptide
  Seed: KVCRTLLAKS
KVCRTLLAKL

SEQ ID NO: 169954 - protein, 10 aa, Artificial Sequence
  Description of Artificial Sequence: Synthetic peptide
  Seed: KVCRTLLAKS
KVCRTLLAKM

SEQ ID NO: 169955 - protein, 10 aa, Artificial Sequence
  Description of Artificial Sequence: Synthetic peptide
  Seed: KVCRTLLAKS
KVCRTLLAKT

SEQ ID NO: 169956 - protein, 10 aa, Artificial Sequence
  Description of Artificial Sequence: Synthetic peptide
  Seed: KVCRTLLAKS
KVCRTLLAKV

SEQ ID NO: 169957 - protein, 10 aa, Artificial Sequence
  Description of Artificial Sequence: Synthetic peptide
  Seed: KVCRTLLAKS
KVCRTLLAKY

SEQ ID NO: 169958 - protein, 9 aa, Artificial Sequence
  Description of Artificial Sequence: Synthetic peptide
  Seed: KVCRTLLAK
KVCRTLLAR

SEQ ID NO: 169959 - protein, 9 aa, Artificial Sequence
  Description of Artificial Sequence: Synthetic peptide
  Seed: KVCRTLLAK
KVCRTLLAV

SEQ ID NO: 169960 - protein, 9 aa, Artificial Sequence
  Description of Artificial Sequence: Synthetic peptide
  Seed: KVCRTLLAK
KVCRTLLAY

SEQ ID NO: 169961 - protein, 9 aa, Artificial Sequence
  Description of Artificial Sequence: Synthetic peptide
  Seed: KVCRTLLAK
KWCRTLLAK

SEQ ID NO: 169962 - protein, 10 aa, Artificial Sequence
  Description of Artificial Sequence: Synthetic peptide
  Seed: KVCRTLLAKS
KWCRTLLAKA

SEQ ID NO: 169963 - protein, 10 aa, Artificial Sequence
  Description of Artificial Sequence: Synthetic peptide
  Seed: KVCRTLLAKS
KWCRTLLAKI

SEQ ID NO: 169964 - protein, 10 aa, Artificial Sequence
  Description of Artificial Sequence: Synthetic peptide
  Seed: KVCRTLLAKS
KWCRTLLAKK

SEQ ID NO: 169965 - protein, 10 aa, Artificial Sequence
  Description of Artificial Sequence: Synthetic peptide
  Seed: KVCRTLLAKS
KWCRTLLAKV

SEQ ID NO: 169966 - protein, 9 aa, Artificial Sequence
  Description of Artificial Sequence: Synthetic peptide
  Seed: KVCRTLLAK
KWCRTLLAR

SEQ ID NO: 169967 - protein, 9 aa, Artificial Sequence
  Description of Artificial Sequence: Synthetic peptide
  Seed: KVCRTLLAK
KYCRTLLAA

SEQ ID NO: 169968 - protein, 9 aa, Artificial Sequence
  Description of Artificial Sequence: Synthetic peptide
  Seed: KVCRTLLAK
KYCRTLLAK

SEQ ID NO: 169969 - protein, 10 aa, Artificial Sequence
  Description of Artificial Sequence: Synthetic peptide
  Seed: KVCRTLLAKS
KYCRTLLAKA

SEQ ID NO: 169970 - protein, 10 aa, Artificial Sequence
  Description of Artificial Sequence: Synthetic peptide
  Seed: KVCRTLLAKS
KYCRTLLAKI

SEQ ID NO: 169971 - protein, 10 aa, Artificial Sequence
  Description of Artificial Sequence: Synthetic peptide
  Seed: KVCRTLLAKS
KYCRTLLAKK

SEQ ID NO: 169972 - protein, 10 aa, Artificial Sequence
  Description of Artificial Sequence: Synthetic peptide
  Seed: KVCRTLLAKS
KYCRTLLAKL

SEQ ID NO: 169973 - protein, 10 aa, Artificial Sequence
  Description of Artificial Sequence: Synthetic peptide
  Seed: KVCRTLLAKS
KYCRTLLAKM

SEQ ID NO: 169974 - protein, 10 aa, Artificial Sequence
  Description of Artificial Sequence: Synthetic peptide
  Seed: KVCRTLLAKS
KYCRTLLAKS

SEQ ID NO: 169975 - protein, 10 aa, Artificial Sequence
  Description of Artificial Sequence: Synthetic peptide
  Seed: KVCRTLLAKS
KYCRTLLAKV

SEQ ID NO: 169976 - protein, 9 aa, Artificial Sequence
  Description of Artificial Sequence: Synthetic peptide
  Seed: LNASWFNSF
LAASWFNSA

SEQ ID NO: 169977 - protein, 9 aa, Artificial Sequence
  Description of Artificial Sequence: Synthetic peptide
  Seed: LNASWFNSF
LAASWFNSF

SEQ ID NO: 169978 - protein, 10 aa, Artificial Sequence
  Description of Artificial Sequence: Synthetic peptide
  Seed: LNASWFNSFL
LAASWFNSFA

SEQ ID NO: 169979 - protein, 10 aa, Artificial Sequence
  Description of Artificial Sequence: Synthetic peptide
  Seed: LNASWFNSFL
LAASWFNSFI

SEQ ID NO: 169980 - protein, 10 aa, Artificial Sequence
  Description of Artificial Sequence: Synthetic peptide
  Seed: LNASWFNSFL
LAASWFNSFL

SEQ ID NO: 169981 - protein, 10 aa, Artificial Sequence
  Description of Artificial Sequence: Synthetic peptide
  Seed: LNASWFNSFL
LAASWFNSFM

SEQ ID NO: 169982 - protein, 10 aa, Artificial Sequence
  Description of Artificial Sequence: Synthetic peptide
  Seed: LNASWFNSFL
LAASWFNSFV

SEQ ID NO: 169983 - protein, 9 aa, Artificial Sequence
  Description of Artificial Sequence: Synthetic peptide
  Seed: LNASWFNSF
LAASWFNSH

SEQ ID NO: 169984 - protein, 9 aa, Artificial Sequence
  Description of Artificial Sequence: Synthetic peptide
  Seed: LNASWFNSF
LAASWFNSI

SEQ ID NO: 169985 - protein, 9 aa, Artificial Sequence
  Description of Artificial Sequence: Synthetic peptide
  Seed: LNASWFNSF
LAASWFNSL

SEQ ID NO: 169986 - protein, 9 aa, Artificial Sequence
  Description of Artificial Sequence: Synthetic peptide
  Seed: LNASWFNSF
LAASWFNSM

SEQ ID NO: 169987 - protein, 9 aa, Artificial Sequence
  Description of Artificial Sequence: Synthetic peptide
  Seed: LNASWFNSF
LAASWFNSV

SEQ ID NO: 169988 - protein, 9 aa, Artificial Sequence
  Description of Artificial Sequence: Synthetic peptide
  Seed: LNASWFNSF
LAASWFNSW

SEQ ID NO: 169989 - protein, 9 aa, Artificial Sequence
  Description of Artificial Sequence: Synthetic peptide
  Seed: LNASWFNSF
LAASWFNSY

SEQ ID NO: 169990 - protein, 8 aa, Artificial Sequence
  Description of Artificial Sequence: Synthetic peptide
  Seed: LLKHRFEI
LAKHRFEA

SEQ ID NO: 169991 - protein, 8 aa, Artificial Sequence
  Description of Artificial Sequence: Synthetic peptide
  Seed: LLKHRFEI
LAKHRFEF

SEQ ID NO: 169992 - protein, 8 aa, Artificial Sequence
  Description of Artificial Sequence: Synthetic peptide
  Seed: LLKHRFEI
LAKHRFEI

SEQ ID NO: 169993 - protein, 8 aa, Artificial Sequence
  Description of Artificial Sequence: Synthetic peptide
  Seed: LLKHRFEI
LAKHRFEL

SEQ ID NO: 169994 - protein, 8 aa, Artificial Sequence
  Description of Artificial Sequence: Synthetic peptide
  Seed: LLKHRFEI
LAKHRFEM

SEQ ID NO: 169995 - protein, 8 aa, Artificial Sequence
  Description of Artificial Sequence: Synthetic peptide
  Seed: LLKHRFEI
LAKHRFEV

SEQ ID NO: 169996 - protein, 9 aa, Artificial Sequence
  Description of Artificial Sequence: Synthetic peptide
  Seed: LLNASWFNS
LANASWFNI

SEQ ID NO: 169997 - protein, 10 aa, Artificial Sequence
  Description of Artificial Sequence: Synthetic peptide
  Seed: LLNASWFNSF
LANASWFNSF

SEQ ID NO: 169998 - protein, 10 aa, Artificial Sequence
  Description of Artificial Sequence: Synthetic peptide
  Seed: LLNASWFNSF
LANASWFNSM

SEQ ID NO: 169999 - protein, 10 aa, Artificial Sequence
  Description of Artificial Sequence: Synthetic peptide
  Seed: LLNASWFNSF
LANASWFNSW

SEQ ID NO: 170000 - protein, 10 aa, Artificial Sequence
  Description of Artificial Sequence: Synthetic peptide
  Seed: LLNASWFNSF
LANASWFNSY

SEQ ID NO: 170001 - protein, 9 aa, Artificial Sequence
  Description of Artificial Sequence: Synthetic peptide
  Seed: LLNASWFNS
LANASWFNV

SEQ ID NO: 170002 - protein, 9 aa, Artificial Sequence
  Description of Artificial Sequence: Synthetic peptide
  Seed: LINDPWVLL
LANDPWVLF

SEQ ID NO: 170003 - protein, 9 aa, Artificial Sequence
  Description of Artificial Sequence: Synthetic peptide
  Seed: LINDPWVLL
LANDPWVLI

SEQ ID NO: 170004 - protein, 9 aa, Artificial Sequence
  Description of Artificial Sequence: Synthetic peptide
  Seed: LINDPWVLL
LANDPWVLM

SEQ ID NO: 170005 - protein, 9 aa, Artificial Sequence
  Description of Artificial Sequence: Synthetic peptide
  Seed: LINDPWVLL
LANDPWVLV

SEQ ID NO: 170006 - protein, 9 aa, Artificial Sequence
  Description of Artificial Sequence: Synthetic peptide
  Seed: LNASWFNSF
LCASWFNSF

SEQ ID NO: 170007 - protein, 10 aa, Artificial Sequence
  Description of Artificial Sequence: Synthetic peptide
  Seed: LNASWFNSFL
LCASWFNSFA

SEQ ID NO: 170008 - protein, 10 aa, Artificial Sequence
  Description of Artificial Sequence: Synthetic peptide
  Seed: LNASWFNSFL
LCASWFNSFI

SEQ ID NO: 170009 - protein, 10 aa, Artificial Sequence
  Description of Artificial Sequence: Synthetic peptide
  Seed: LNASWFNSFL
LCASWFNSFL

SEQ ID NO: 170010 - protein, 10 aa, Artificial Sequence
  Description of Artificial Sequence: Synthetic peptide
  Seed: LNASWFNSFL
LCASWFNSFV

SEQ ID NO: 170011 - protein, 9 aa, Artificial Sequence
  Description of Artificial Sequence: Synthetic peptide
  Seed: LNASWFNSF
LCASWFNSM

SEQ ID NO: 170012 - protein, 9 aa, Artificial Sequence
  Description of Artificial Sequence: Synthetic peptide
  Seed: LNASWFNSF
LCASWFNSY

SEQ ID NO: 170013 - protein, 8 aa, Artificial Sequence
  Description of Artificial Sequence: Synthetic peptide
  Seed: LLKHRFEI
LCKHRFEL

SEQ ID NO: 170014 - protein, 10 aa, Artificial Sequence
  Description of Artificial Sequence: Synthetic peptide
  Seed: LLNASWFNSF
LCNASWFNSF

SEQ ID NO: 170015 - protein, 10 aa, Artificial Sequence
  Description of Artificial Sequence: Synthetic peptide
  Seed: LLNASWFNSF
LCNASWFNSY

SEQ ID NO: 170016 - protein, 10 aa, Artificial Sequence
  Description of Artificial Sequence: Synthetic peptide
  Seed: LNASWFNSFL
LDASWFNSFA

SEQ ID NO: 170017 - protein, 10 aa, Artificial Sequence
  Description of Artificial Sequence: Synthetic peptide
  Seed: LNASWFNSFL
LDASWFNSFI

SEQ ID NO: 170018 - protein, 10 aa, Artificial Sequence
  Description of Artificial Sequence: Synthetic peptide
  Seed: LNASWFNSFL
LDASWFNSFL

SEQ ID NO: 170019 - protein, 10 aa, Artificial Sequence
  Description of Artificial Sequence: Synthetic peptide
  Seed: LNASWFNSFL
LDASWFNSFV

SEQ ID NO: 170020 - protein, 10 aa, Artificial Sequence
  Description of Artificial Sequence: Synthetic peptide
  Seed: LLNASWFNSF
LDNASWFNSF

SEQ ID NO: 170021 - protein, 9 aa, Artificial Sequence
  Description of Artificial Sequence: Synthetic peptide
  Seed: LNASWFNSF
LEASWFNSF

SEQ ID NO: 170022 - protein, 10 aa, Artificial Sequence
  Description of Artificial Sequence: Synthetic peptide
  Seed: LNASWFNSFL
LEASWFNSFA

SEQ ID NO: 170023 - protein, 10 aa, Artificial Sequence
  Description of Artificial Sequence: Synthetic peptide
  Seed: LNASWFNSFL
LEASWFNSFI

SEQ ID NO: 170024 - protein, 10 aa, Artificial Sequence
  Description of Artificial Sequence: Synthetic peptide
  Seed: LNASWFNSFL
LEASWFNSFL

SEQ ID NO: 170025 - protein, 10 aa, Artificial Sequence
  Description of Artificial Sequence: Synthetic peptide
  Seed: LNASWFNSFL
LEASWFNSFV

SEQ ID NO: 170026 - protein, 9 aa, Artificial Sequence
  Description of Artificial Sequence: Synthetic peptide
  Seed: LNASWFNSF
LEASWFNSH

SEQ ID NO: 170027 - protein, 9 aa, Artificial Sequence
  Description of Artificial Sequence: Synthetic peptide
  Seed: LNASWFNSF
LEASWFNSI

SEQ ID NO: 170028 - protein, 9 aa, Artificial Sequence
  Description of Artificial Sequence: Synthetic peptide
  Seed: LNASWFNSF
LEASWFNSL

SEQ ID NO: 170029 - protein, 9 aa, Artificial Sequence
  Description of Artificial Sequence: Synthetic peptide
  Seed: LNASWFNSF
LEASWFNSM

SEQ ID NO: 170030 - protein, 9 aa, Artificial Sequence
  Description of Artificial Sequence: Synthetic peptide
  Seed: LNASWFNSF
LEASWFNSW

SEQ ID NO: 170031 - protein, 9 aa, Artificial Sequence
  Description of Artificial Sequence: Synthetic peptide
  Seed: LNASWFNSF
LEASWFNSY

SEQ ID NO: 170032 - protein, 10 aa, Artificial Sequence
  Description of Artificial Sequence: Synthetic peptide
  Seed: LLNASWFNSF
LENASWFNSF

SEQ ID NO: 170033 - protein, 10 aa, Artificial Sequence
  Description of Artificial Sequence: Synthetic peptide
  Seed: LLNASWFNSF
LENASWFNSM

SEQ ID NO: 170034 - protein, 10 aa, Artificial Sequence
  Description of Artificial Sequence: Synthetic peptide
  Seed: LLNASWFNSF
LENASWFNSY

SEQ ID NO: 170035 - protein, 9 aa, Artificial Sequence
  Description of Artificial Sequence: Synthetic peptide
  Seed: LNASWFNSF
LFASWFNSF

SEQ ID NO: 170036 - protein, 10 aa, Artificial Sequence
  Description of Artificial Sequence: Synthetic peptide
  Seed: LNASWFNSFL
LFASWFNSFA

SEQ ID NO: 170037 - protein, 10 aa, Artificial Sequence
  Description of Artificial Sequence: Synthetic peptide
  Seed: LNASWFNSFL
LFASWFNSFI

SEQ ID NO: 170038 - protein, 10 aa, Artificial Sequence
  Description of Artificial Sequence: Synthetic peptide
  Seed: LNASWFNSFL
LFASWFNSFL

SEQ ID NO: 170039 - protein, 10 aa, Artificial Sequence
  Description of Artificial Sequence: Synthetic peptide
  Seed: LNASWFNSFL
LFASWFNSFV

SEQ ID NO: 170040 - protein, 9 aa, Artificial Sequence
  Description of Artificial Sequence: Synthetic peptide
  Seed: LNASWFNSF
LFASWFNSM

SEQ ID NO: 170041 - protein, 9 aa, Artificial Sequence
  Description of Artificial Sequence: Synthetic peptide
  Seed: LNASWFNSF
LFASWFNSY

SEQ ID NO: 170042 - protein, 8 aa, Artificial Sequence
  Description of Artificial Sequence: Synthetic peptide
  Seed: LLKHRFEI
LFKHRFEI

SEQ ID NO: 170043 - protein, 8 aa, Artificial Sequence
  Description of Artificial Sequence: Synthetic peptide
  Seed: LLKHRFEI
LFKHRFEL

SEQ ID NO: 170044 - protein, 8 aa, Artificial Sequence
  Description of Artificial Sequence: Synthetic peptide
  Seed: LLKHRFEI
LFKHRFEM

SEQ ID NO: 170045 - protein, 10 aa, Artificial Sequence
  Description of Artificial Sequence: Synthetic peptide
  Seed: LLNASWFNSF
LFNASWFNSF

SEQ ID NO: 170046 - protein, 10 aa, Artificial Sequence
  Description of Artificial Sequence: Synthetic peptide
  Seed: LLNASWFNSF
LFNASWFNSY

SEQ ID NO: 170047 - protein, 9 aa, Artificial Sequence
  Description of Artificial Sequence: Synthetic peptide
  Seed: LLNASWFNS
LFNASWFNV

SEQ ID NO: 170048 - protein, 9 aa, Artificial Sequence
  Description of Artificial Sequence: Synthetic peptide
  Seed: LINDPWVLL
LFNDPWVLV

SEQ ID NO: 170049 - protein, 9 aa, Artificial Sequence
  Description of Artificial Sequence: Synthetic peptide
  Seed: LNASWFNSF
LGASWFNSF

SEQ ID NO: 170050 - protein, 10 aa, Artificial Sequence
  Description of Artificial Sequence: Synthetic peptide
  Seed: LNASWFNSFL
LGASWFNSFA

SEQ ID NO: 170051 - protein, 10 aa, Artificial Sequence
  Description of Artificial Sequence: Synthetic peptide
  Seed: LNASWFNSFL
LGASWFNSFI

SEQ ID NO: 170052 - protein, 10 aa, Artificial Sequence
  Description of Artificial Sequence: Synthetic peptide
  Seed: LNASWFNSFL
LGASWFNSFL

SEQ ID NO: 170053 - protein, 10 aa, Artificial Sequence
  Description of Artificial Sequence: Synthetic peptide
  Seed: LNASWFNSFL
LGASWFNSFV

SEQ ID NO: 170054 - protein, 9 aa, Artificial Sequence
  Description of Artificial Sequence: Synthetic peptide
  Seed: LNASWFNSF
LGASWFNSL

SEQ ID NO: 170055 - protein, 9 aa, Artificial Sequence
  Description of Artificial Sequence: Synthetic peptide
  Seed: LNASWFNSF
LGASWFNSM

SEQ ID NO: 170056 - protein, 9 aa, Artificial Sequence
  Description of Artificial Sequence: Synthetic peptide
  Seed: LNASWFNSF
LGASWFNSY

SEQ ID NO: 170057 - protein, 8 aa, Artificial Sequence
  Description of Artificial Sequence: Synthetic peptide
  Seed: LLKHRFEI
LGKHRFEL

SEQ ID NO: 170058 - protein, 8 aa, Artificial Sequence
  Description of Artificial Sequence: Synthetic peptide
  Seed: LLKHRFEI
LGKHRFEM

SEQ ID NO: 170059 - protein, 10 aa, Artificial Sequence
  Description of Artificial Sequence: Synthetic peptide
  Seed: LLNASWFNSF
LGNASWFNSF

SEQ ID NO: 170060 - protein, 10 aa, Artificial Sequence
  Description of Artificial Sequence: Synthetic peptide
  Seed: LLNASWFNSF
LGNASWFNSY

SEQ ID NO: 170061 - protein, 9 aa, Artificial Sequence
  Description of Artificial Sequence: Synthetic peptide
  Seed: LNASWFNSF
LHASWFNSF

SEQ ID NO: 170062 - protein, 10 aa, Artificial Sequence
  Description of Artificial Sequence: Synthetic peptide
  Seed: LNASWFNSFL
LHASWFNSFA

SEQ ID NO: 170063 - protein, 10 aa, Artificial Sequence
  Description of Artificial Sequence: Synthetic peptide
  Seed: LNASWFNSFL
LHASWFNSFI

SEQ ID NO: 170064 - protein, 10 aa, Artificial Sequence
  Description of Artificial Sequence: Synthetic peptide
  Seed: LNASWFNSFL
LHASWFNSFL

SEQ ID NO: 170065 - protein, 10 aa, Artificial Sequence
  Description of Artificial Sequence: Synthetic peptide
  Seed: LNASWFNSFL
LHASWFNSFV

SEQ ID NO: 170066 - protein, 9 aa, Artificial Sequence
  Description of Artificial Sequence: Synthetic peptide
  Seed: LNASWFNSF
LHASWFNSH

SEQ ID NO: 170067 - protein, 9 aa, Artificial Sequence
  Description of Artificial Sequence: Synthetic peptide
  Seed: LNASWFNSF
LHASWFNSI

SEQ ID NO: 170068 - protein, 9 aa, Artificial Sequence
  Description of Artificial Sequence: Synthetic peptide
  Seed: LNASWFNSF
LHASWFNSL

SEQ ID NO: 170069 - protein, 9 aa, Artificial Sequence
  Description of Artificial Sequence: Synthetic peptide
  Seed: LNASWFNSF
LHASWFNSM

SEQ ID NO: 170070 - protein, 9 aa, Artificial Sequence
  Description of Artificial Sequence: Synthetic peptide
  Seed: LNASWFNSF
LHASWFNSV

SEQ ID NO: 170071 - protein, 9 aa, Artificial Sequence
  Description of Artificial Sequence: Synthetic peptide
  Seed: LNASWFNSF
LHASWFNSW

SEQ ID NO: 170072 - protein, 9 aa, Artificial Sequence
  Description of Artificial Sequence: Synthetic peptide
  Seed: LNASWFNSF
LHASWFNSY

SEQ ID NO: 170073 - protein, 8 aa, Artificial Sequence
  Description of Artificial Sequence: Synthetic peptide
  Seed: LLKHRFEI
LHKHRFEL

SEQ ID NO: 170074 - protein, 10 aa, Artificial Sequence
  Description of Artificial Sequence: Synthetic peptide
  Seed: LLNASWFNSF
LHNASWFNSF

SEQ ID NO: 170075 - protein, 10 aa, Artificial Sequence
  Description of Artificial Sequence: Synthetic peptide
  Seed: LLNASWFNSF
LHNASWFNSL

SEQ ID NO: 170076 - protein, 10 aa, Artificial Sequence
  Description of Artificial Sequence: Synthetic peptide
  Seed: LLNASWFNSF
LHNASWFNSM

SEQ ID NO: 170077 - protein, 10 aa, Artificial Sequence
  Description of Artificial Sequence: Synthetic peptide
  Seed: LLNASWFNSF
LHNASWFNSY

SEQ ID NO: 170078 - protein, 9 aa, Artificial Sequence
  Description of Artificial Sequence: Synthetic peptide
  Seed: LNASWFNSF
LIASWFNSF

SEQ ID NO: 170079 - protein, 10 aa, Artificial Sequence
  Description of Artificial Sequence: Synthetic peptide
  Seed: LNASWFNSFL
LIASWFNSFA

SEQ ID NO: 170080 - protein, 10 aa, Artificial Sequence
  Description of Artificial Sequence: Synthetic peptide
  Seed: LNASWFNSFL
LIASWFNSFI

SEQ ID NO: 170081 - protein, 10 aa, Artificial Sequence
  Description of Artificial Sequence: Synthetic peptide
  Seed: LNASWFNSFL
LIASWFNSFL

SEQ ID NO: 170082 - protein, 10 aa, Artificial Sequence
  Description of Artificial Sequence: Synthetic peptide
  Seed: LNASWFNSFL
LIASWFNSFM

SEQ ID NO: 170083 - protein, 10 aa, Artificial Sequence
  Description of Artificial Sequence: Synthetic peptide
  Seed: LNASWFNSFL
LIASWFNSFV

SEQ ID NO: 170084 - protein, 9 aa, Artificial Sequence
  Description of Artificial Sequence: Synthetic peptide
  Seed: LNASWFNSF
LIASWFNSL

SEQ ID NO: 170085 - protein, 9 aa, Artificial Sequence
  Description of Artificial Sequence: Synthetic peptide
  Seed: LNASWFNSF
LIASWFNSM

SEQ ID NO: 170086 - protein, 9 aa, Artificial Sequence
  Description of Artificial Sequence: Synthetic peptide
  Seed: LNASWFNSF
LIASWFNSW

SEQ ID NO: 170087 - protein, 9 aa, Artificial Sequence
  Description of Artificial Sequence: Synthetic peptide
  Seed: LNASWFNSF
LIASWFNSY

SEQ ID NO: 170088 - protein, 8 aa, Artificial Sequence
  Description of Artificial Sequence: Synthetic peptide
  Seed: LLKHRFEI
LIKHRFEA

SEQ ID NO: 170089 - protein, 8 aa, Artificial Sequence
  Description of Artificial Sequence: Synthetic peptide
  Seed: LLKHRFEI
LIKHRFEF

SEQ ID NO: 170090 - protein, 8 aa, Artificial Sequence
  Description of Artificial Sequence: Synthetic peptide
  Seed: LLKHRFEI
LIKHRFEI

SEQ ID NO: 170091 - protein, 8 aa, Artificial Sequence
  Description of Artificial Sequence: Synthetic peptide
  Seed: LLKHRFEI
LIKHRFEL

SEQ ID NO: 170092 - protein, 8 aa, Artificial Sequence
  Description of Artificial Sequence: Synthetic peptide
  Seed: LLKHRFEI
LIKHRFEM

SEQ ID NO: 170093 - protein, 8 aa, Artificial Sequence
  Description of Artificial Sequence: Synthetic peptide
  Seed: LLKHRFEI
LIKHRFEV

SEQ ID NO: 170094 - protein, 9 aa, Artificial Sequence
  Description of Artificial Sequence: Synthetic peptide
  Seed: LLNASWFNS
LINASWFNA

SEQ ID NO: 170095 - protein, 9 aa, Artificial Sequence
  Description of Artificial Sequence: Synthetic peptide
  Seed: LLNASWFNS
LINASWFNI

SEQ ID NO: 170096 - protein, 9 aa, Artificial Sequence
  Description of Artificial Sequence: Synthetic peptide
  Seed: LLNASWFNS
LINASWFNL

SEQ ID NO: 170097 - protein, 9 aa, Artificial Sequence
  Description of Artificial Sequence: Synthetic peptide
  Seed: LLNASWFNS
LINASWFNM

SEQ ID NO: 170098 - protein, 10 aa, Artificial Sequence
  Description of Artificial Sequence: Synthetic peptide
  Seed: LLNASWFNSF
LINASWFNSF

SEQ ID NO: 170099 - protein, 11 aa, Artificial Sequence
  Description of Artificial Sequence: Synthetic peptide
  Seed: LLNASWFNSFL
LINASWFNSFL

SEQ ID NO: 170100 - protein, 11 aa, Artificial Sequence
  Description of Artificial Sequence: Synthetic peptide
  Seed: LLNASWFNSFL
LINASWFNSFV

SEQ ID NO: 170101 - protein, 10 aa, Artificial Sequence
  Description of Artificial Sequence: Synthetic peptide
  Seed: LLNASWFNSF
LINASWFNSM

SEQ ID NO: 170102 - protein, 10 aa, Artificial Sequence
  Description of Artificial Sequence: Synthetic peptide
  Seed: LLNASWFNSF
LINASWFNSW

SEQ ID NO: 170103 - protein, 10 aa, Artificial Sequence
  Description of Artificial Sequence: Synthetic peptide
  Seed: LLNASWFNSF
LINASWFNSY

SEQ ID NO: 170104 - protein, 9 aa, Artificial Sequence
  Description of Artificial Sequence: Synthetic peptide
  Seed: LLNASWFNS
LINASWFNV

SEQ ID NO: 170105 - protein, 9 aa, Artificial Sequence
  Description of Artificial Sequence: Synthetic peptide
  Seed: LINDPWVLL
LINDPWVLA

SEQ ID NO: 170106 - protein, 9 aa, Artificial Sequence
  Description of Artificial Sequence: Synthetic peptide
  Seed: LINDPWVLL
LINDPWVLI

SEQ ID NO: 170107 - protein, 9 aa, Artificial Sequence
  Description of Artificial Sequence: Synthetic peptide
  Seed: LINDPWVLL
LINDPWVLM

SEQ ID NO: 170108 - protein, 9 aa, Artificial Sequence
  Description of Artificial Sequence: Synthetic peptide
  Seed: LINDPWVLL
LINDPWVLV

SEQ ID NO: 170109 - protein, 9 aa, Artificial Sequence
  Description of Artificial Sequence: Synthetic peptide
  Seed: LNASWFNSF
LKASWFNSA

SEQ ID NO: 170110 - protein, 9 aa, Artificial Sequence
  Description of Artificial Sequence: Synthetic peptide
  Seed: LNASWFNSF
LKASWFNSF

SEQ ID NO: 170111 - protein, 10 aa, Artificial Sequence
  Description of Artificial Sequence: Synthetic peptide
  Seed: LNASWFNSFL
LKASWFNSFA

SEQ ID NO: 170112 - protein, 10 aa, Artificial Sequence
  Description of Artificial Sequence: Synthetic peptide
  Seed: LNASWFNSFL
LKASWFNSFI

SEQ ID NO: 170113 - protein, 10 aa, Artificial Sequence
  Description of Artificial Sequence: Synthetic peptide
  Seed: LNASWFNSFL
LKASWFNSFL

SEQ ID NO: 170114 - protein, 10 aa, Artificial Sequence
  Description of Artificial Sequence: Synthetic peptide
  Seed: LNASWFNSFL
LKASWFNSFV

SEQ ID NO: 170115 - protein, 9 aa, Artificial Sequence
  Description of Artificial Sequence: Synthetic peptide
  Seed: LNASWFNSF
LKASWFNSH

SEQ ID NO: 170116 - protein, 9 aa, Artificial Sequence
  Description of Artificial Sequence: Synthetic peptide
  Seed: LNASWFNSF
LKASWFNSI

SEQ ID NO: 170117 - protein, 9 aa, Artificial Sequence
  Description of Artificial Sequence: Synthetic peptide
  Seed: LNASWFNSF
LKASWFNSL

SEQ ID NO: 170118 - protein, 9 aa, Artificial Sequence
  Description of Artificial Sequence: Synthetic peptide
  Seed: LNASWFNSF
LKASWFNSM

SEQ ID NO: 170119 - protein, 9 aa, Artificial Sequence
  Description of Artificial Sequence: Synthetic peptide
  Seed: LNASWFNSF
LKASWFNSV

SEQ ID NO: 170120 - protein, 9 aa, Artificial Sequence
  Description of Artificial Sequence: Synthetic peptide
  Seed: LNASWFNSF
LKASWFNSW

SEQ ID NO: 170121 - protein, 9 aa, Artificial Sequence
  Description of Artificial Sequence: Synthetic peptide
  Seed: LNASWFNSF
LKASWFNSY

SEQ ID NO: 170122 - protein, 8 aa, Artificial Sequence
  Description of Artificial Sequence: Synthetic peptide
  Seed: LLKHRFEI
LKKHRFEL

SEQ ID NO: 170123 - protein, 8 aa, Artificial Sequence
  Description of Artificial Sequence: Synthetic peptide
  Seed: LLKHRFEI
LKKHRFEM

SEQ ID NO: 170124 - protein, 10 aa, Artificial Sequence
  Description of Artificial Sequence: Synthetic peptide
  Seed: LLNASWFNSF
LKNASWFNSF

SEQ ID NO: 170125 - protein, 10 aa, Artificial Sequence
  Description of Artificial Sequence: Synthetic peptide
  Seed: LLNASWFNSF
LKNASWFNSI

SEQ ID NO: 170126 - protein, 10 aa, Artificial Sequence
  Description of Artificial Sequence: Synthetic peptide
  Seed: LLNASWFNSF
LKNASWFNSL

SEQ ID NO: 170127 - protein, 10 aa, Artificial Sequence
  Description of Artificial Sequence: Synthetic peptide
  Seed: LLNASWFNSF
LKNASWFNSM

SEQ ID NO: 170128 - protein, 10 aa, Artificial Sequence
  Description of Artificial Sequence: Synthetic peptide
  Seed: LLNASWFNSF
LKNASWFNSW

SEQ ID NO: 170129 - protein, 10 aa, Artificial Sequence
  Description of Artificial Sequence: Synthetic peptide
  Seed: LLNASWFNSF
LKNASWFNSY

SEQ ID NO: 170130 - protein, 9 aa, Artificial Sequence
  Description of Artificial Sequence: Synthetic peptide
  Seed: LNASWFNSF
LLASWFNSF

SEQ ID NO: 170131 - protein, 10 aa, Artificial Sequence
  Description of Artificial Sequence: Synthetic peptide
  Seed: LNASWFNSFL
LLASWFNSFA

SEQ ID NO: 170132 - protein, 10 aa, Artificial Sequence
  Description of Artificial Sequence: Synthetic peptide
  Seed: LNASWFNSFL
LLASWFNSFC

SEQ ID NO: 170133 - protein, 10 aa, Artificial Sequence
  Description of Artificial Sequence: Synthetic peptide
  Seed: LNASWFNSFL
LLASWFNSFF

SEQ ID NO: 170134 - protein, 10 aa, Artificial Sequence
  Description of Artificial Sequence: Synthetic peptide
  Seed: LNASWFNSFL
LLASWFNSFG

SEQ ID NO: 170135 - protein, 10 aa, Artificial Sequence
  Description of Artificial Sequence: Synthetic peptide
  Seed: LNASWFNSFL
LLASWFNSFI

SEQ ID NO: 170136 - protein, 10 aa, Artificial Sequence
  Description of Artificial Sequence: Synthetic peptide
  Seed: LNASWFNSFL
LLASWFNSFL

SEQ ID NO: 170137 - protein, 10 aa, Artificial Sequence
  Description of Artificial Sequence: Synthetic peptide
  Seed: LNASWFNSFL
LLASWFNSFM

SEQ ID NO: 170138 - protein, 10 aa, Artificial Sequence
  Description of Artificial Sequence: Synthetic peptide
  Seed: LNASWFNSFL
LLASWFNSFP

SEQ ID NO: 170139 - protein, 10 aa, Artificial Sequence
  Description of Artificial Sequence: Synthetic peptide
  Seed: LNASWFNSFL
LLASWFNSFS

SEQ ID NO: 170140 - protein, 10 aa, Artificial Sequence
  Description of Artificial Sequence: Synthetic peptide
  Seed: LNASWFNSFL
LLASWFNSFT

SEQ ID NO: 170141 - protein, 10 aa, Artificial Sequence
  Description of Artificial Sequence: Synthetic peptide
  Seed: LNASWFNSFL
LLASWFNSFV

SEQ ID NO: 170142 - protein, 9 aa, Artificial Sequence
  Description of Artificial Sequence: Synthetic peptide
  Seed: LNASWFNSF
LLASWFNSH

SEQ ID NO: 170143 - protein, 9 aa, Artificial Sequence
  Description of Artificial Sequence: Synthetic peptide
  Seed: LNASWFNSF
LLASWFNSI

SEQ ID NO: 170144 - protein, 9 aa, Artificial Sequence
  Description of Artificial Sequence: Synthetic peptide
  Seed: LNASWFNSF
LLASWFNSL

SEQ ID NO: 170145 - protein, 9 aa, Artificial Sequence
  Description of Artificial Sequence: Synthetic peptide
  Seed: LNASWFNSF
LLASWFNSM

SEQ ID NO: 170146 - protein, 9 aa, Artificial Sequence
  Description of Artificial Sequence: Synthetic peptide
  Seed: LNASWFNSF
LLASWFNSW

SEQ ID NO: 170147 - protein, 9 aa, Artificial Sequence
  Description of Artificial Sequence: Synthetic peptide
  Seed: LNASWFNSF
LLASWFNSY

SEQ ID NO: 170148 - protein, 8 aa, Artificial Sequence
  Description of Artificial Sequence: Synthetic peptide
  Seed: LLKHRFEI
LLKHRFEA

SEQ ID NO: 170149 - protein, 8 aa, Artificial Sequence
  Description of Artificial Sequence: Synthetic peptide
  Seed: LLKHRFEI
LLKHRFEF

SEQ ID NO: 170150 - protein, 8 aa, Artificial Sequence
  Description of Artificial Sequence: Synthetic peptide
  Seed: LLKHRFEI
LLKHRFEL

SEQ ID NO: 170151 - protein, 8 aa, Artificial Sequence
  Description of Artificial Sequence: Synthetic peptide
  Seed: LLKHRFEI
LLKHRFEV

SEQ ID NO: 170152 - protein, 9 aa, Artificial Sequence
  Description of Artificial Sequence: Synthetic peptide
  Seed: LLNASWFNS
LLNASWFNA

SEQ ID NO: 170153 - protein, 9 aa, Artificial Sequence
  Description of Artificial Sequence: Synthetic peptide
  Seed: LLNASWFNS
LLNASWFNC

SEQ ID NO: 170154 - protein, 9 aa, Artificial Sequence
  Description of Artificial Sequence: Synthetic peptide
  Seed: LLNASWFNS
LLNASWFNF

SEQ ID NO: 170155 - protein, 9 aa, Artificial Sequence
  Description of Artificial Sequence: Synthetic peptide
  Seed: LLNASWFNS
LLNASWFNI

SEQ ID NO: 170156 - protein, 9 aa, Artificial Sequence
  Description of Artificial Sequence: Synthetic peptide
  Seed: LLNASWFNS
LLNASWFNL

SEQ ID NO: 170157 - protein, 9 aa, Artificial Sequence
  Description of Artificial Sequence: Synthetic peptide
  Seed: LLNASWFNS
LLNASWFNM

SEQ ID NO: 170158 - protein, 11 aa, Artificial Sequence
  Description of Artificial Sequence: Synthetic peptide
  Seed: LLNASWFNSFL
LLNASWFNSFA

SEQ ID NO: 170159 - protein, 11 aa, Artificial Sequence
  Description of Artificial Sequence: Synthetic peptide
  Seed: LLNASWFNSFL
LLNASWFNSFI

SEQ ID NO: 170160 - protein, 11 aa, Artificial Sequence
  Description of Artificial Sequence: Synthetic peptide
  Seed: LLNASWFNSFL
LLNASWFNSFM

SEQ ID NO: 170161 - protein, 11 aa, Artificial Sequence
  Description of Artificial Sequence: Synthetic peptide
  Seed: LLNASWFNSFL
LLNASWFNSFV

SEQ ID NO: 170162 - protein, 10 aa, Artificial Sequence
  Description of Artificial Sequence: Synthetic peptide
  Seed: LLNASWFNSF
LLNASWFNSL

SEQ ID NO: 170163 - protein, 10 aa, Artificial Sequence
  Description of Artificial Sequence: Synthetic peptide
  Seed: LLNASWFNSF
LLNASWFNSM

SEQ ID NO: 170164 - protein, 10 aa, Artificial Sequence
  Description of Artificial Sequence: Synthetic peptide
  Seed: LLNASWFNSF
LLNASWFNSW

SEQ ID NO: 170165 - protein, 10 aa, Artificial Sequence
  Description of Artificial Sequence: Synthetic peptide
  Seed: LLNASWFNSF
LLNASWFNSY

SEQ ID NO: 170166 - protein, 9 aa, Artificial Sequence
  Description of Artificial Sequence: Synthetic peptide
  Seed: LLNASWFNS
LLNASWFNT

SEQ ID NO: 170167 - protein, 9 aa, Artificial Sequence
  Description of Artificial Sequence: Synthetic peptide
  Seed: LLNASWFNS
LLNASWFNV

SEQ ID NO: 170168 - protein, 9 aa, Artificial Sequence
  Description of Artificial Sequence: Synthetic peptide
  Seed: LINDPWVLL
LLNDPWVLA

SEQ ID NO: 170169 - protein, 9 aa, Artificial Sequence
  Description of Artificial Sequence: Synthetic peptide
  Seed: LINDPWVLL
LLNDPWVLC

SEQ ID NO: 170170 - protein, 9 aa, Artificial Sequence
  Description of Artificial Sequence: Synthetic peptide
  Seed: LINDPWVLL
LLNDPWVLF

SEQ ID NO: 170171 - protein, 9 aa, Artificial Sequence
  Description of Artificial Sequence: Synthetic peptide
  Seed: LINDPWVLL
LLNDPWVLI

SEQ ID NO: 170172 - protein, 9 aa, Artificial Sequence
  Description of Artificial Sequence: Synthetic peptide
  Seed: LINDPWVLL
LLNDPWVLL

SEQ ID NO: 170173 - protein, 9 aa, Artificial Sequence
  Description of Artificial Sequence: Synthetic peptide
  Seed: LINDPWVLL
LLNDPWVLM

SEQ ID NO: 170174 - protein, 9 aa, Artificial Sequence
  Description of Artificial Sequence: Synthetic peptide
  Seed: LINDPWVLL
LLNDPWVLS

SEQ ID NO: 170175 - protein, 9 aa, Artificial Sequence
  Description of Artificial Sequence: Synthetic peptide
  Seed: LINDPWVLL
LLNDPWVLT

SEQ ID NO: 170176 - protein, 9 aa, Artificial Sequence
  Description of Artificial Sequence: Synthetic peptide
  Seed: LINDPWVLL
LLNDPWVLV

SEQ ID NO: 170177 - protein, 9 aa, Artificial Sequence
  Description of Artificial Sequence: Synthetic peptide
  Seed: LNASWFNSF
LMASWFNSA

SEQ ID NO: 170178 - protein, 9 aa, Artificial Sequence
  Description of Artificial Sequence: Synthetic peptide
  Seed: LNASWFNSF
LMASWFNSF

SEQ ID NO: 170179 - protein, 10 aa, Artificial Sequence
  Description of Artificial Sequence: Synthetic peptide
  Seed: LNASWFNSFL
LMASWFNSFA

SEQ ID NO: 170180 - protein, 10 aa, Artificial Sequence
  Description of Artificial Sequence: Synthetic peptide
  Seed: LNASWFNSFL
LMASWFNSFC

SEQ ID NO: 170181 - protein, 10 aa, Artificial Sequence
  Description of Artificial Sequence: Synthetic peptide
  Seed: LNASWFNSFL
LMASWFNSFF

SEQ ID NO: 170182 - protein, 10 aa, Artificial Sequence
  Description of Artificial Sequence: Synthetic peptide
  Seed: LNASWFNSFL
LMASWFNSFG

SEQ ID NO: 170183 - protein, 10 aa, Artificial Sequence
  Description of Artificial Sequence: Synthetic peptide
  Seed: LNASWFNSFL
LMASWFNSFI

SEQ ID NO: 170184 - protein, 10 aa, Artificial Sequence
  Description of Artificial Sequence: Synthetic peptide
  Seed: LNASWFNSFL
LMASWFNSFL

SEQ ID NO: 170185 - protein, 10 aa, Artificial Sequence
  Description of Artificial Sequence: Synthetic peptide
  Seed: LNASWFNSFL
LMASWFNSFM

SEQ ID NO: 170186 - protein, 10 aa, Artificial Sequence
  Description of Artificial Sequence: Synthetic peptide
  Seed: LNASWFNSFL
LMASWFNSFP

SEQ ID NO: 170187 - protein, 10 aa, Artificial Sequence
  Description of Artificial Sequence: Synthetic peptide
  Seed: LNASWFNSFL
LMASWFNSFS

SEQ ID NO: 170188 - protein, 10 aa, Artificial Sequence
  Description of Artificial Sequence: Synthetic peptide
  Seed: LNASWFNSFL
LMASWFNSFT

SEQ ID NO: 170189 - protein, 10 aa, Artificial Sequence
  Description of Artificial Sequence: Synthetic peptide
  Seed: LNASWFNSFL
LMASWFNSFV

SEQ ID NO: 170190 - protein, 9 aa, Artificial Sequence
  Description of Artificial Sequence: Synthetic peptide
  Seed: LNASWFNSF
LMASWFNSG

SEQ ID NO: 170191 - protein, 9 aa, Artificial Sequence
  Description of Artificial Sequence: Synthetic peptide
  Seed: LNASWFNSF
LMASWFNSH

SEQ ID NO: 170192 - protein, 9 aa, Artificial Sequence
  Description of Artificial Sequence: Synthetic peptide
  Seed: LNASWFNSF
LMASWFNSI

SEQ ID NO: 170193 - protein, 9 aa, Artificial Sequence
  Description of Artificial Sequence: Synthetic peptide
  Seed: LNASWFNSF
LMASWFNSL

SEQ ID NO: 170194 - protein, 9 aa, Artificial Sequence
  Description of Artificial Sequence: Synthetic peptide
  Seed: LNASWFNSF
LMASWFNSM

SEQ ID NO: 170195 - protein, 9 aa, Artificial Sequence
  Description of Artificial Sequence: Synthetic peptide
  Seed: LNASWFNSF
LMASWFNSV

SEQ ID NO: 170196 - protein, 9 aa, Artificial Sequence
  Description of Artificial Sequence: Synthetic peptide
  Seed: LNASWFNSF
LMASWFNSW

SEQ ID NO: 170197 - protein, 9 aa, Artificial Sequence
  Description of Artificial Sequence: Synthetic peptide
  Seed: LNASWFNSF
LMASWFNSY

SEQ ID NO: 170198 - protein, 8 aa, Artificial Sequence
  Description of Artificial Sequence: Synthetic peptide
  Seed: LLKHRFEI
LMKHRFEA

SEQ ID NO: 170199 - protein, 8 aa, Artificial Sequence
  Description of Artificial Sequence: Synthetic peptide
  Seed: LLKHRFEI
LMKHRFEC

SEQ ID NO: 170200 - protein, 8 aa, Artificial Sequence
  Description of Artificial Sequence: Synthetic peptide
  Seed: LLKHRFEI
LMKHRFEF

SEQ ID NO: 170201 - protein, 8 aa, Artificial Sequence
  Description of Artificial Sequence: Synthetic peptide
  Seed: LLKHRFEI
LMKHRFEI

SEQ ID NO: 170202 - protein, 8 aa, Artificial Sequence
  Description of Artificial Sequence: Synthetic peptide
  Seed: LLKHRFEI
LMKHRFEM

SEQ ID NO: 170203 - protein, 9 aa, Artificial Sequence
  Description of Artificial Sequence: Synthetic peptide
  Seed: LLNASWFNS
LMNASWFNA

SEQ ID NO: 170204 - protein, 9 aa, Artificial Sequence
  Description of Artificial Sequence: Synthetic peptide
  Seed: LLNASWFNS
LMNASWFNC

SEQ ID NO: 170205 - protein, 9 aa, Artificial Sequence
  Description of Artificial Sequence: Synthetic peptide
  Seed: LLNASWFNS
LMNASWFNF

SEQ ID NO: 170206 - protein, 9 aa, Artificial Sequence
  Description of Artificial Sequence: Synthetic peptide
  Seed: LLNASWFNS
LMNASWFNI

SEQ ID NO: 170207 - protein, 9 aa, Artificial Sequence
  Description of Artificial Sequence: Synthetic peptide
  Seed: LLNASWFNS
LMNASWFNL

SEQ ID NO: 170208 - protein, 9 aa, Artificial Sequence
  Description of Artificial Sequence: Synthetic peptide
  Seed: LLNASWFNS
LMNASWFNM

SEQ ID NO: 170209 - protein, 9 aa, Artificial Sequence
  Description of Artificial Sequence: Synthetic peptide
  Seed: LLNASWFNS
LMNASWFNS

SEQ ID NO: 170210 - protein, 11 aa, Artificial Sequence
  Description of Artificial Sequence: Synthetic peptide
  Seed: LLNASWFNSFL
LMNASWFNSFA

SEQ ID NO: 170211 - protein, 11 aa, Artificial Sequence
  Description of Artificial Sequence: Synthetic peptide
  Seed: LLNASWFNSFL
LMNASWFNSFI

SEQ ID NO: 170212 - protein, 11 aa, Artificial Sequence
  Description of Artificial Sequence: Synthetic peptide
  Seed: LLNASWFNSFL
LMNASWFNSFL

SEQ ID NO: 170213 - protein, 11 aa, Artificial Sequence
  Description of Artificial Sequence: Synthetic peptide
  Seed: LLNASWFNSFL
LMNASWFNSFM

SEQ ID NO: 170214 - protein, 11 aa, Artificial Sequence
  Description of Artificial Sequence: Synthetic peptide
  Seed: LLNASWFNSFL
LMNASWFNSFV

SEQ ID NO: 170215 - protein, 10 aa, Artificial Sequence
  Description of Artificial Sequence: Synthetic peptide
  Seed: LLNASWFNSF
LMNASWFNSH

SEQ ID NO: 170216 - protein, 10 aa, Artificial Sequence
  Description of Artificial Sequence: Synthetic peptide
  Seed: LLNASWFNSF
LMNASWFNSI

SEQ ID NO: 170217 - protein, 10 aa, Artificial Sequence
  Description of Artificial Sequence: Synthetic peptide
  Seed: LLNASWFNSF
LMNASWFNSL

SEQ ID NO: 170218 - protein, 10 aa, Artificial Sequence
  Description of Artificial Sequence: Synthetic peptide
  Seed: LLNASWFNSF
LMNASWFNSM

SEQ ID NO: 170219 - protein, 10 aa, Artificial Sequence
  Description of Artificial Sequence: Synthetic peptide
  Seed: LLNASWFNSF
LMNASWFNSW

SEQ ID NO: 170220 - protein, 9 aa, Artificial Sequence
  Description of Artificial Sequence: Synthetic peptide
  Seed: LLNASWFNS
LMNASWFNT

SEQ ID NO: 170221 - protein, 9 aa, Artificial Sequence
  Description of Artificial Sequence: Synthetic peptide
  Seed: LLNASWFNS
LMNASWFNV

SEQ ID NO: 170222 - protein, 9 aa, Artificial Sequence
  Description of Artificial Sequence: Synthetic peptide
  Seed: LINDPWVLL
LMNDPWVLA

SEQ ID NO: 170223 - protein, 9 aa, Artificial Sequence
  Description of Artificial Sequence: Synthetic peptide
  Seed: LINDPWVLL
LMNDPWVLC

SEQ ID NO: 170224 - protein, 9 aa, Artificial Sequence
  Description of Artificial Sequence: Synthetic peptide
  Seed: LINDPWVLL
LMNDPWVLF

SEQ ID NO: 170225 - protein, 9 aa, Artificial Sequence
  Description of Artificial Sequence: Synthetic peptide
  Seed: LINDPWVLL
LMNDPWVLI

SEQ ID NO: 170226 - protein, 9 aa, Artificial Sequence
  Description of Artificial Sequence: Synthetic peptide
  Seed: LINDPWVLL
LMNDPWVLL

SEQ ID NO: 170227 - protein, 9 aa, Artificial Sequence
  Description of Artificial Sequence: Synthetic peptide
  Seed: LINDPWVLL
LMNDPWVLM

SEQ ID NO: 170228 - protein, 9 aa, Artificial Sequence
  Description of Artificial Sequence: Synthetic peptide
  Seed: LINDPWVLL
LMNDPWVLS

SEQ ID NO: 170229 - protein, 9 aa, Artificial Sequence
  Description of Artificial Sequence: Synthetic peptide
  Seed: LINDPWVLL
LMNDPWVLT

SEQ ID NO: 170230 - protein, 9 aa, Artificial Sequence
  Description of Artificial Sequence: Synthetic peptide
  Seed: LINDPWVLL
LMNDPWVLV

SEQ ID NO: 170231 - protein, 10 aa, Artificial Sequence
  Description of Artificial Sequence: Synthetic peptide
  Seed: LNASWFNSFL
LNASWFNSFA

SEQ ID NO: 170232 - protein, 10 aa, Artificial Sequence
  Description of Artificial Sequence: Synthetic peptide
  Seed: LNASWFNSFL
LNASWFNSFI

SEQ ID NO: 170233 - protein, 10 aa, Artificial Sequence
  Description of Artificial Sequence: Synthetic peptide
  Seed: LNASWFNSFL
LNASWFNSFV

SEQ ID NO: 170234 - protein, 9 aa, Artificial Sequence
  Description of Artificial Sequence: Synthetic peptide
  Seed: LNASWFNSF
LNASWFNSL

SEQ ID NO: 170235 - protein, 9 aa, Artificial Sequence
  Description of Artificial Sequence: Synthetic peptide
  Seed: LNASWFNSF
LNASWFNSM

SEQ ID NO: 170236 - protein, 9 aa, Artificial Sequence
  Description of Artificial Sequence: Synthetic peptide
  Seed: LNASWFNSF
LNASWFNSY

SEQ ID NO: 170237 - protein, 8 aa, Artificial Sequence
  Description of Artificial Sequence: Synthetic peptide
  Seed: LLKHRFEI
LNKHRFEI

SEQ ID NO: 170238 - protein, 8 aa, Artificial Sequence
  Description of Artificial Sequence: Synthetic peptide
  Seed: LLKHRFEI
LNKHRFEL

SEQ ID NO: 170239 - protein, 8 aa, Artificial Sequence
  Description of Artificial Sequence: Synthetic peptide
  Seed: LLKHRFEI
LNKHRFEM

SEQ ID NO: 170240 - protein, 10 aa, Artificial Sequence
  Description of Artificial Sequence: Synthetic peptide
  Seed: LLNASWFNSF
LNNASWFNSF

SEQ ID NO: 170241 - protein, 10 aa, Artificial Sequence
  Description of Artificial Sequence: Synthetic peptide
  Seed: LLNASWFNSF
LNNASWFNSY

SEQ ID NO: 170242 - protein, 9 aa, Artificial Sequence
  Description of Artificial Sequence: Synthetic peptide
  Seed: LNASWFNSF
LPASWFNSF

SEQ ID NO: 170243 - protein, 10 aa, Artificial Sequence
  Description of Artificial Sequence: Synthetic peptide
  Seed: LNASWFNSFL
LPASWFNSFA

SEQ ID NO: 170244 - protein, 10 aa, Artificial Sequence
  Description of Artificial Sequence: Synthetic peptide
  Seed: LNASWFNSFL
LPASWFNSFI

SEQ ID NO: 170245 - protein, 10 aa, Artificial Sequence
  Description of Artificial Sequence: Synthetic peptide
  Seed: LNASWFNSFL
LPASWFNSFL

SEQ ID NO: 170246 - protein, 10 aa, Artificial Sequence
  Description of Artificial Sequence: Synthetic peptide
  Seed: LNASWFNSFL
LPASWFNSFV

SEQ ID NO: 170247 - protein, 9 aa, Artificial Sequence
  Description of Artificial Sequence: Synthetic peptide
  Seed: LNASWFNSF
LPASWFNSM

SEQ ID NO: 170248 - protein, 9 aa, Artificial Sequence
  Description of Artificial Sequence: Synthetic peptide
  Seed: LNASWFNSF
LPASWFNSY

SEQ ID NO: 170249 - protein, 8 aa, Artificial Sequence
  Description of Artificial Sequence: Synthetic peptide
  Seed: LLKHRFEI
LPKHRFEA

SEQ ID NO: 170250 - protein, 8 aa, Artificial Sequence
  Description of Artificial Sequence: Synthetic peptide
  Seed: LLKHRFEI
LPKHRFEF

SEQ ID NO: 170251 - protein, 8 aa, Artificial Sequence
  Description of Artificial Sequence: Synthetic peptide
  Seed: LLKHRFEI
LPKHRFEI

SEQ ID NO: 170252 - protein, 8 aa, Artificial Sequence
  Description of Artificial Sequence: Synthetic peptide
  Seed: LLKHRFEI
LPKHRFEV

SEQ ID NO: 170253 - protein, 10 aa, Artificial Sequence
  Description of Artificial Sequence: Synthetic peptide
  Seed: LLNASWFNSF
LPNASWFNSF

SEQ ID NO: 170254 - protein, 10 aa, Artificial Sequence
  Description of Artificial Sequence: Synthetic peptide
  Seed: LLNASWFNSF
LPNASWFNSY

SEQ ID NO: 170255 - protein, 9 aa, Artificial Sequence
  Description of Artificial Sequence: Synthetic peptide
  Seed: LINDPWVLL
LPNDPWVLV

SEQ ID NO: 170256 - protein, 9 aa, Artificial Sequence
  Description of Artificial Sequence: Synthetic peptide
  Seed: LNASWFNSF
LQASWFNSA

SEQ ID NO: 170257 - protein, 9 aa, Artificial Sequence
  Description of Artificial Sequence: Synthetic peptide
  Seed: LNASWFNSF
LQASWFNSC

SEQ ID NO: 170258 - protein, 9 aa, Artificial Sequence
  Description of Artificial Sequence: Synthetic peptide
  Seed: LNASWFNSF
LQASWFNSF

SEQ ID NO: 170259 - protein, 10 aa, Artificial Sequence
  Description of Artificial Sequence: Synthetic peptide
  Seed: LNASWFNSFL
LQASWFNSFA

SEQ ID NO: 170260 - protein, 10 aa, Artificial Sequence
  Description of Artificial Sequence: Synthetic peptide
  Seed: LNASWFNSFL
LQASWFNSFF

SEQ ID NO: 170261 - protein, 10 aa, Artificial Sequence
  Description of Artificial Sequence: Synthetic peptide
  Seed: LNASWFNSFL
LQASWFNSFI

SEQ ID NO: 170262 - protein, 10 aa, Artificial Sequence
  Description of Artificial Sequence: Synthetic peptide
  Seed: LNASWFNSFL
LQASWFNSFL

SEQ ID NO: 170263 - protein, 10 aa, Artificial Sequence
  Description of Artificial Sequence: Synthetic peptide
  Seed: LNASWFNSFL
LQASWFNSFM

SEQ ID NO: 170264 - protein, 10 aa, Artificial Sequence
  Description of Artificial Sequence: Synthetic peptide
  Seed: LNASWFNSFL
LQASWFNSFS

SEQ ID NO: 170265 - protein, 10 aa, Artificial Sequence
  Description of Artificial Sequence: Synthetic peptide
  Seed: LNASWFNSFL
LQASWFNSFT

SEQ ID NO: 170266 - protein, 10 aa, Artificial Sequence
  Description of Artificial Sequence: Synthetic peptide
  Seed: LNASWFNSFL
LQASWFNSFV

SEQ ID NO: 170267 - protein, 9 aa, Artificial Sequence
  Description of Artificial Sequence: Synthetic peptide
  Seed: LNASWFNSF
LQASWFNSG

SEQ ID NO: 170268 - protein, 9 aa, Artificial Sequence
  Description of Artificial Sequence: Synthetic peptide
  Seed: LNASWFNSF
LQASWFNSH

SEQ ID NO: 170269 - protein, 9 aa, Artificial Sequence
  Description of Artificial Sequence: Synthetic peptide
  Seed: LNASWFNSF
LQASWFNSI

SEQ ID NO: 170270 - protein, 9 aa, Artificial Sequence
  Description of Artificial Sequence: Synthetic peptide
  Seed: LNASWFNSF
LQASWFNSL

SEQ ID NO: 170271 - protein, 9 aa, Artificial Sequence
  Description of Artificial Sequence: Synthetic peptide
  Seed: LNASWFNSF
LQASWFNSM

SEQ ID NO: 170272 - protein, 9 aa, Artificial Sequence
  Description of Artificial Sequence: Synthetic peptide
  Seed: LNASWFNSF
LQASWFNSN

SEQ ID NO: 170273 - protein, 9 aa, Artificial Sequence
  Description of Artificial Sequence: Synthetic peptide
  Seed: LNASWFNSF
LQASWFNSQ

SEQ ID NO: 170274 - protein, 9 aa, Artificial Sequence
  Description of Artificial Sequence: Synthetic peptide
  Seed: LNASWFNSF
LQASWFNSS

SEQ ID NO: 170275 - protein, 9 aa, Artificial Sequence
  Description of Artificial Sequence: Synthetic peptide
  Seed: LNASWFNSF
LQASWFNST

SEQ ID NO: 170276 - protein, 9 aa, Artificial Sequence
  Description of Artificial Sequence: Synthetic peptide
  Seed: LNASWFNSF
LQASWFNSV

SEQ ID NO: 170277 - protein, 9 aa, Artificial Sequence
  Description of Artificial Sequence: Synthetic peptide
  Seed: LNASWFNSF
LQASWFNSW

SEQ ID NO: 170278 - protein, 9 aa, Artificial Sequence
  Description of Artificial Sequence: Synthetic peptide
  Seed: LNASWFNSF
LQASWFNSY

SEQ ID NO: 170279 - protein, 8 aa, Artificial Sequence
  Description of Artificial Sequence: Synthetic peptide
  Seed: LLKHRFEI
LQKHRFEI

SEQ ID NO: 170280 - protein, 8 aa, Artificial Sequence
  Description of Artificial Sequence: Synthetic peptide
  Seed: LLKHRFEI
LQKHRFEL

SEQ ID NO: 170281 - protein, 8 aa, Artificial Sequence
  Description of Artificial Sequence: Synthetic peptide
  Seed: LLKHRFEI
LQKHRFEM

SEQ ID NO: 170282 - protein, 8 aa, Artificial Sequence
  Description of Artificial Sequence: Synthetic peptide
  Seed: LLKHRFEI
LQKHRFEV

SEQ ID NO: 170283 - protein, 9 aa, Artificial Sequence
  Description of Artificial Sequence: Synthetic peptide
  Seed: LLNASWFNS
LQNASWFNA

SEQ ID NO: 170284 - protein, 9 aa, Artificial Sequence
  Description of Artificial Sequence: Synthetic peptide
  Seed: LLNASWFNS
LQNASWFNI

SEQ ID NO: 170285 - protein, 9 aa, Artificial Sequence
  Description of Artificial Sequence: Synthetic peptide
  Seed: LLNASWFNS
LQNASWFNL

SEQ ID NO: 170286 - protein, 9 aa, Artificial Sequence
  Description of Artificial Sequence: Synthetic peptide
  Seed: LLNASWFNS
LQNASWFNM

SEQ ID NO: 170287 - protein, 10 aa, Artificial Sequence
  Description of Artificial Sequence: Synthetic peptide
  Seed: LLNASWFNSF
LQNASWFNSA

SEQ ID NO: 170288 - protein, 10 aa, Artificial Sequence
  Description of Artificial Sequence: Synthetic peptide
  Seed: LLNASWFNSF
LQNASWFNSF

SEQ ID NO: 170289 - protein, 11 aa, Artificial Sequence
  Description of Artificial Sequence: Synthetic peptide
  Seed: LLNASWFNSFL
LQNASWFNSFL

SEQ ID NO: 170290 - protein, 11 aa, Artificial Sequence
  Description of Artificial Sequence: Synthetic peptide
  Seed: LLNASWFNSFL
LQNASWFNSFV

SEQ ID NO: 170291 - protein, 10 aa, Artificial Sequence
  Description of Artificial Sequence: Synthetic peptide
  Seed: LLNASWFNSF
LQNASWFNSH

SEQ ID NO: 170292 - protein, 10 aa, Artificial Sequence
  Description of Artificial Sequence: Synthetic peptide
  Seed: LLNASWFNSF
LQNASWFNSI

SEQ ID NO: 170293 - protein, 10 aa, Artificial Sequence
  Description of Artificial Sequence: Synthetic peptide
  Seed: LLNASWFNSF
LQNASWFNSL

SEQ ID NO: 170294 - protein, 10 aa, Artificial Sequence
  Description of Artificial Sequence: Synthetic peptide
  Seed: LLNASWFNSF
LQNASWFNSM

SEQ ID NO: 170295 - protein, 10 aa, Artificial Sequence
  Description of Artificial Sequence: Synthetic peptide
  Seed: LLNASWFNSF
LQNASWFNSV

SEQ ID NO: 170296 - protein, 10 aa, Artificial Sequence
  Description of Artificial Sequence: Synthetic peptide
  Seed: LLNASWFNSF
LQNASWFNSW

SEQ ID NO: 170297 - protein, 10 aa, Artificial Sequence
  Description of Artificial Sequence: Synthetic peptide
  Seed: LLNASWFNSF
LQNASWFNSY

SEQ ID NO: 170298 - protein, 9 aa, Artificial Sequence
  Description of Artificial Sequence: Synthetic peptide
  Seed: LLNASWFNS
LQNASWFNV

SEQ ID NO: 170299 - protein, 9 aa, Artificial Sequence
  Description of Artificial Sequence: Synthetic peptide
  Seed: LINDPWVLL
LQNDPWVLA

SEQ ID NO: 170300 - protein, 9 aa, Artificial Sequence
  Description of Artificial Sequence: Synthetic peptide
  Seed: LINDPWVLL
LQNDPWVLF

SEQ ID NO: 170301 - protein, 9 aa, Artificial Sequence
  Description of Artificial Sequence: Synthetic peptide
  Seed: LINDPWVLL
LQNDPWVLI

SEQ ID NO: 170302 - protein, 9 aa, Artificial Sequence
  Description of Artificial Sequence: Synthetic peptide
  Seed: LINDPWVLL
LQNDPWVLL

SEQ ID NO: 170303 - protein, 9 aa, Artificial Sequence
  Description of Artificial Sequence: Synthetic peptide
  Seed: LINDPWVLL
LQNDPWVLM

SEQ ID NO: 170304 - protein, 9 aa, Artificial Sequence
  Description of Artificial Sequence: Synthetic peptide
  Seed: LINDPWVLL
LQNDPWVLV

SEQ ID NO: 170305 - protein, 9 aa, Artificial Sequence
  Description of Artificial Sequence: Synthetic peptide
  Seed: LNASWFNSF
LRASWFNSF

SEQ ID NO: 170306 - protein, 10 aa, Artificial Sequence
  Description of Artificial Sequence: Synthetic peptide
  Seed: LNASWFNSFL
LRASWFNSFA

SEQ ID NO: 170307 - protein, 10 aa, Artificial Sequence
  Description of Artificial Sequence: Synthetic peptide
  Seed: LNASWFNSFL
LRASWFNSFI

SEQ ID NO: 170308 - protein, 10 aa, Artificial Sequence
  Description of Artificial Sequence: Synthetic peptide
  Seed: LNASWFNSFL
LRASWFNSFL

SEQ ID NO: 170309 - protein, 10 aa, Artificial Sequence
  Description of Artificial Sequence: Synthetic peptide
  Seed: LNASWFNSFL
LRASWFNSFV

SEQ ID NO: 170310 - protein, 9 aa, Artificial Sequence
  Description of Artificial Sequence: Synthetic peptide
  Seed: LNASWFNSF
LRASWFNSI

SEQ ID NO: 170311 - protein, 9 aa, Artificial Sequence
  Description of Artificial Sequence: Synthetic peptide
  Seed: LNASWFNSF
LRASWFNSL

SEQ ID NO: 170312 - protein, 9 aa, Artificial Sequence
  Description of Artificial Sequence: Synthetic peptide
  Seed: LNASWFNSF
LRASWFNSM

SEQ ID NO: 170313 - protein, 9 aa, Artificial Sequence
  Description of Artificial Sequence: Synthetic peptide
  Seed: LNASWFNSF
LRASWFNSW

SEQ ID NO: 170314 - protein, 9 aa, Artificial Sequence
  Description of Artificial Sequence: Synthetic peptide
  Seed: LNASWFNSF
LRASWFNSY

SEQ ID NO: 170315 - protein, 8 aa, Artificial Sequence
  Description of Artificial Sequence: Synthetic peptide
  Seed: LLKHRFEI
LRKHRFEL

SEQ ID NO: 170316 - protein, 8 aa, Artificial Sequence
  Description of Artificial Sequence: Synthetic peptide
  Seed: LLKHRFEI
LRKHRFEM

SEQ ID NO: 170317 - protein, 10 aa, Artificial Sequence
  Description of Artificial Sequence: Synthetic peptide
  Seed: LLNASWFNSF
LRNASWFNSF

SEQ ID NO: 170318 - protein, 10 aa, Artificial Sequence
  Description of Artificial Sequence: Synthetic peptide
  Seed: LLNASWFNSF
LRNASWFNSM

SEQ ID NO: 170319 - protein, 10 aa, Artificial Sequence
  Description of Artificial Sequence: Synthetic peptide
  Seed: LLNASWFNSF
LRNASWFNSY

SEQ ID NO: 170320 - protein, 9 aa, Artificial Sequence
  Description of Artificial Sequence: Synthetic peptide
  Seed: LNASWFNSF
LSASWFNSF

SEQ ID NO: 170321 - protein, 10 aa, Artificial Sequence
  Description of Artificial Sequence: Synthetic peptide
  Seed: LNASWFNSFL
LSASWFNSFA

SEQ ID NO: 170322 - protein, 10 aa, Artificial Sequence
  Description of Artificial Sequence: Synthetic peptide
  Seed: LNASWFNSFL
LSASWFNSFI

SEQ ID NO: 170323 - protein, 10 aa, Artificial Sequence
  Description of Artificial Sequence: Synthetic peptide
  Seed: LNASWFNSFL
LSASWFNSFL

SEQ ID NO: 170324 - protein, 10 aa, Artificial Sequence
  Description of Artificial Sequence: Synthetic peptide
  Seed: LNASWFNSFL
LSASWFNSFM

SEQ ID NO: 170325 - protein, 10 aa, Artificial Sequence
  Description of Artificial Sequence: Synthetic peptide
  Seed: LNASWFNSFL
LSASWFNSFV

SEQ ID NO: 170326 - protein, 9 aa, Artificial Sequence
  Description of Artificial Sequence: Synthetic peptide
  Seed: LNASWFNSF
LSASWFNSH

SEQ ID NO: 170327 - protein, 9 aa, Artificial Sequence
  Description of Artificial Sequence: Synthetic peptide
  Seed: LNASWFNSF
LSASWFNSI

SEQ ID NO: 170328 - protein, 9 aa, Artificial Sequence
  Description of Artificial Sequence: Synthetic peptide
  Seed: LNASWFNSF
LSASWFNSL

SEQ ID NO: 170329 - protein, 9 aa, Artificial Sequence
  Description of Artificial Sequence: Synthetic peptide
  Seed: LNASWFNSF
LSASWFNSM

SEQ ID NO: 170330 - protein, 9 aa, Artificial Sequence
  Description of Artificial Sequence: Synthetic peptide
  Seed: LNASWFNSF
LSASWFNSV

SEQ ID NO: 170331 - protein, 9 aa, Artificial Sequence
  Description of Artificial Sequence: Synthetic peptide
  Seed: LNASWFNSF
LSASWFNSW

SEQ ID NO: 170332 - protein, 8 aa, Artificial Sequence
  Description of Artificial Sequence: Synthetic peptide
  Seed: LLKHRFEI
LSKHRFEL

SEQ ID NO: 170333 - protein, 8 aa, Artificial Sequence
  Description of Artificial Sequence: Synthetic peptide
  Seed: LLKHRFEI
LSKHRFEM

SEQ ID NO: 170334 - protein, 10 aa, Artificial Sequence
  Description of Artificial Sequence: Synthetic peptide
  Seed: LLNASWFNSF
LSNASWFNSF

SEQ ID NO: 170335 - protein, 10 aa, Artificial Sequence
  Description of Artificial Sequence: Synthetic peptide
  Seed: LLNASWFNSF
LSNASWFNSM

SEQ ID NO: 170336 - protein, 10 aa, Artificial Sequence
  Description of Artificial Sequence: Synthetic peptide
  Seed: LLNASWFNSF
LSNASWFNSW

SEQ ID NO: 170337 - protein, 10 aa, Artificial Sequence
  Description of Artificial Sequence: Synthetic peptide
  Seed: LLNASWFNSF
LSNASWFNSY

SEQ ID NO: 170338 - protein, 9 aa, Artificial Sequence
  Description of Artificial Sequence: Synthetic peptide
  Seed: LLNASWFNS
LSNASWFNV

SEQ ID NO: 170339 - protein, 9 aa, Artificial Sequence
  Description of Artificial Sequence: Synthetic peptide
  Seed: LINDPWVLL
LSNDPWVLI

SEQ ID NO: 170340 - protein, 9 aa, Artificial Sequence
  Description of Artificial Sequence: Synthetic peptide
  Seed: LINDPWVLL
LSNDPWVLL

SEQ ID NO: 170341 - protein, 9 aa, Artificial Sequence
  Description of Artificial Sequence: Synthetic peptide
  Seed: LINDPWVLL
LSNDPWVLM

SEQ ID NO: 170342 - protein, 9 aa, Artificial Sequence
  Description of Artificial Sequence: Synthetic peptide
  Seed: LINDPWVLL
LSNDPWVLV

SEQ ID NO: 170343 - protein, 9 aa, Artificial Sequence
  Description of Artificial Sequence: Synthetic peptide
  Seed: LNASWFNSF
LTASWFNSF

SEQ ID NO: 170344 - protein, 10 aa, Artificial Sequence
  Description of Artificial Sequence: Synthetic peptide
  Seed: LNASWFNSFL
LTASWFNSFA

SEQ ID NO: 170345 - protein, 10 aa, Artificial Sequence
  Description of Artificial Sequence: Synthetic peptide
  Seed: LNASWFNSFL
LTASWFNSFI

SEQ ID NO: 170346 - protein, 10 aa, Artificial Sequence
  Description of Artificial Sequence: Synthetic peptide
  Seed: LNASWFNSFL
LTASWFNSFL

SEQ ID NO: 170347 - protein, 10 aa, Artificial Sequence
  Description of Artificial Sequence: Synthetic peptide
  Seed: LNASWFNSFL
LTASWFNSFM

SEQ ID NO: 170348 - protein, 10 aa, Artificial Sequence
  Description of Artificial Sequence: Synthetic peptide
  Seed: LNASWFNSFL
LTASWFNSFT

SEQ ID NO: 170349 - protein, 10 aa, Artificial Sequence
  Description of Artificial Sequence: Synthetic peptide
  Seed: LNASWFNSFL
LTASWFNSFV

SEQ ID NO: 170350 - protein, 9 aa, Artificial Sequence
  Description of Artificial Sequence: Synthetic peptide
  Seed: LNASWFNSF
LTASWFNSI

SEQ ID NO: 170351 - protein, 9 aa, Artificial Sequence
  Description of Artificial Sequence: Synthetic peptide
  Seed: LNASWFNSF
LTASWFNSL

SEQ ID NO: 170352 - protein, 9 aa, Artificial Sequence
  Description of Artificial Sequence: Synthetic peptide
  Seed: LNASWFNSF
LTASWFNSM

SEQ ID NO: 170353 - protein, 9 aa, Artificial Sequence
  Description of Artificial Sequence: Synthetic peptide
  Seed: LNASWFNSF
LTASWFNSV

SEQ ID NO: 170354 - protein, 9 aa, Artificial Sequence
  Description of Artificial Sequence: Synthetic peptide
  Seed: LNASWFNSF
LTASWFNSW

SEQ ID NO: 170355 - protein, 8 aa, Artificial Sequence
  Description of Artificial Sequence: Synthetic peptide
  Seed: LLKHRFEI
LTKHRFEL

SEQ ID NO: 170356 - protein, 8 aa, Artificial Sequence
  Description of Artificial Sequence: Synthetic peptide
  Seed: LLKHRFEI
LTKHRFEM

SEQ ID NO: 170357 - protein, 9 aa, Artificial Sequence
  Description of Artificial Sequence: Synthetic peptide
  Seed: LLNASWFNS
LTNASWFNI

SEQ ID NO: 170358 - protein, 9 aa, Artificial Sequence
  Description of Artificial Sequence: Synthetic peptide
  Seed: LLNASWFNS
LTNASWFNL

SEQ ID NO: 170359 - protein, 10 aa, Artificial Sequence
  Description of Artificial Sequence: Synthetic peptide
  Seed: LLNASWFNSF
LTNASWFNSF

SEQ ID NO: 170360 - protein, 11 aa, Artificial Sequence
  Description of Artificial Sequence: Synthetic peptide
  Seed: LLNASWFNSFL
LTNASWFNSFV

SEQ ID NO: 170361 - protein, 10 aa, Artificial Sequence
  Description of Artificial Sequence: Synthetic peptide
  Seed: LLNASWFNSF
LTNASWFNSM

SEQ ID NO: 170362 - protein, 10 aa, Artificial Sequence
  Description of Artificial Sequence: Synthetic peptide
  Seed: LLNASWFNSF
LTNASWFNSW

SEQ ID NO: 170363 - protein, 10 aa, Artificial Sequence
  Description of Artificial Sequence: Synthetic peptide
  Seed: LLNASWFNSF
LTNASWFNSY

SEQ ID NO: 170364 - protein, 9 aa, Artificial Sequence
  Description of Artificial Sequence: Synthetic peptide
  Seed: LLNASWFNS
LTNASWFNV

SEQ ID NO: 170365 - protein, 9 aa, Artificial Sequence
  Description of Artificial Sequence: Synthetic peptide
  Seed: LINDPWVLL
LTNDPWVLA

SEQ ID NO: 170366 - protein, 9 aa, Artificial Sequence
  Description of Artificial Sequence: Synthetic peptide
  Seed: LINDPWVLL
LTNDPWVLI

SEQ ID NO: 170367 - protein, 9 aa, Artificial Sequence
  Description of Artificial Sequence: Synthetic peptide
  Seed: LINDPWVLL
LTNDPWVLL

SEQ ID NO: 170368 - protein, 9 aa, Artificial Sequence
  Description of Artificial Sequence: Synthetic peptide
  Seed: LINDPWVLL
LTNDPWVLM

SEQ ID NO: 170369 - protein, 9 aa, Artificial Sequence
  Description of Artificial Sequence: Synthetic peptide
  Seed: LINDPWVLL
LTNDPWVLV

SEQ ID NO: 170370 - protein, 9 aa, Artificial Sequence
  Description of Artificial Sequence: Synthetic peptide
  Seed: LNASWFNSF
LVASWFNSF

SEQ ID NO: 170371 - protein, 10 aa, Artificial Sequence
  Description of Artificial Sequence: Synthetic peptide
  Seed: LNASWFNSFL
LVASWFNSFA

SEQ ID NO: 170372 - protein, 10 aa, Artificial Sequence
  Description of Artificial Sequence: Synthetic peptide
  Seed: LNASWFNSFL
LVASWFNSFI

SEQ ID NO: 170373 - protein, 10 aa, Artificial Sequence
  Description of Artificial Sequence: Synthetic peptide
  Seed: LNASWFNSFL
LVASWFNSFL

SEQ ID NO: 170374 - protein, 10 aa, Artificial Sequence
  Description of Artificial Sequence: Synthetic peptide
  Seed: LNASWFNSFL
LVASWFNSFM

SEQ ID NO: 170375 - protein, 10 aa, Artificial Sequence
  Description of Artificial Sequence: Synthetic peptide
  Seed: LNASWFNSFL
LVASWFNSFT

SEQ ID NO: 170376 - protein, 10 aa, Artificial Sequence
  Description of Artificial Sequence: Synthetic peptide
  Seed: LNASWFNSFL
LVASWFNSFV

SEQ ID NO: 170377 - protein, 9 aa, Artificial Sequence
  Description of Artificial Sequence: Synthetic peptide
  Seed: LNASWFNSF
LVASWFNSI

SEQ ID NO: 170378 - protein, 9 aa, Artificial Sequence
  Description of Artificial Sequence: Synthetic peptide
  Seed: LNASWFNSF
LVASWFNSL

SEQ ID NO: 170379 - protein, 9 aa, Artificial Sequence
  Description of Artificial Sequence: Synthetic peptide
  Seed: LNASWFNSF
LVASWFNSM

SEQ ID NO: 170380 - protein, 9 aa, Artificial Sequence
  Description of Artificial Sequence: Synthetic peptide
  Seed: LNASWFNSF
LVASWFNSV

SEQ ID NO: 170381 - protein, 9 aa, Artificial Sequence
  Description of Artificial Sequence: Synthetic peptide
  Seed: LNASWFNSF
LVASWFNSW

SEQ ID NO: 170382 - protein, 9 aa, Artificial Sequence
  Description of Artificial Sequence: Synthetic peptide
  Seed: LNASWFNSF
LVASWFNSY

SEQ ID NO: 170383 - protein, 8 aa, Artificial Sequence
  Description of Artificial Sequence: Synthetic peptide
  Seed: LLKHRFEI
LVKHRFEF

SEQ ID NO: 170384 - protein, 8 aa, Artificial Sequence
  Description of Artificial Sequence: Synthetic peptide
  Seed: LLKHRFEI
LVKHRFEI

SEQ ID NO: 170385 - protein, 8 aa, Artificial Sequence
  Description of Artificial Sequence: Synthetic peptide
  Seed: LLKHRFEI
LVKHRFEM

SEQ ID NO: 170386 - protein, 8 aa, Artificial Sequence
  Description of Artificial Sequence: Synthetic peptide
  Seed: LLKHRFEI
LVKHRFEV

SEQ ID NO: 170387 - protein, 9 aa, Artificial Sequence
  Description of Artificial Sequence: Synthetic peptide
  Seed: LLNASWFNS
LVNASWFNA

SEQ ID NO: 170388 - protein, 9 aa, Artificial Sequence
  Description of Artificial Sequence: Synthetic peptide
  Seed: LLNASWFNS
LVNASWFNI

SEQ ID NO: 170389 - protein, 9 aa, Artificial Sequence
  Description of Artificial Sequence: Synthetic peptide
  Seed: LLNASWFNS
LVNASWFNL

SEQ ID NO: 170390 - protein, 9 aa, Artificial Sequence
  Description of Artificial Sequence: Synthetic peptide
  Seed: LLNASWFNS
LVNASWFNM

SEQ ID NO: 170391 - protein, 10 aa, Artificial Sequence
  Description of Artificial Sequence: Synthetic peptide
  Seed: LLNASWFNSF
LVNASWFNSF

SEQ ID NO: 170392 - protein, 11 aa, Artificial Sequence
  Description of Artificial Sequence: Synthetic peptide
  Seed: LLNASWFNSFL
LVNASWFNSFL

SEQ ID NO: 170393 - protein, 11 aa, Artificial Sequence
  Description of Artificial Sequence: Synthetic peptide
  Seed: LLNASWFNSFL
LVNASWFNSFV

SEQ ID NO: 170394 - protein, 10 aa, Artificial Sequence
  Description of Artificial Sequence: Synthetic peptide
  Seed: LLNASWFNSF
LVNASWFNSM

SEQ ID NO: 170395 - protein, 10 aa, Artificial Sequence
  Description of Artificial Sequence: Synthetic peptide
  Seed: LLNASWFNSF
LVNASWFNSW

SEQ ID NO: 170396 - protein, 10 aa, Artificial Sequence
  Description of Artificial Sequence: Synthetic peptide
  Seed: LLNASWFNSF
LVNASWFNSY

SEQ ID NO: 170397 - protein, 9 aa, Artificial Sequence
  Description of Artificial Sequence: Synthetic peptide
  Seed: LLNASWFNS
LVNASWFNV

SEQ ID NO: 170398 - protein, 9 aa, Artificial Sequence
  Description of Artificial Sequence: Synthetic peptide
  Seed: LINDPWVLL
LVNDPWVLA

SEQ ID NO: 170399 - protein, 9 aa, Artificial Sequence
  Description of Artificial Sequence: Synthetic peptide
  Seed: LINDPWVLL
LVNDPWVLI

SEQ ID NO: 170400 - protein, 9 aa, Artificial Sequence
  Description of Artificial Sequence: Synthetic peptide
  Seed: LINDPWVLL
LVNDPWVLL

SEQ ID NO: 170401 - protein, 9 aa, Artificial Sequence
  Description of Artificial Sequence: Synthetic peptide
  Seed: LINDPWVLL
LVNDPWVLM

SEQ ID NO: 170402 - protein, 9 aa, Artificial Sequence
  Description of Artificial Sequence: Synthetic peptide
  Seed: LINDPWVLL
LVNDPWVLV

SEQ ID NO: 170403 - protein, 9 aa, Artificial Sequence
  Description of Artificial Sequence: Synthetic peptide
  Seed: LNASWFNSF
LWASWFNSF

SEQ ID NO: 170404 - protein, 10 aa, Artificial Sequence
  Description of Artificial Sequence: Synthetic peptide
  Seed: LNASWFNSFL
LWASWFNSFA

SEQ ID NO: 170405 - protein, 10 aa, Artificial Sequence
  Description of Artificial Sequence: Synthetic peptide
  Seed: LNASWFNSFL
LWASWFNSFI

SEQ ID NO: 170406 - protein, 10 aa, Artificial Sequence
  Description of Artificial Sequence: Synthetic peptide
  Seed: LNASWFNSFL
LWASWFNSFL

SEQ ID NO: 170407 - protein, 10 aa, Artificial Sequence
  Description of Artificial Sequence: Synthetic peptide
  Seed: LNASWFNSFL
LWASWFNSFV

SEQ ID NO: 170408 - protein, 9 aa, Artificial Sequence
  Description of Artificial Sequence: Synthetic peptide
  Seed: LNASWFNSF
LWASWFNSM

SEQ ID NO: 170409 - protein, 9 aa, Artificial Sequence
  Description of Artificial Sequence: Synthetic peptide
  Seed: LNASWFNSF
LWASWFNSY

SEQ ID NO: 170410 - protein, 8 aa, Artificial Sequence
  Description of Artificial Sequence: Synthetic peptide
  Seed: LLKHRFEI
LWKHRFEL

SEQ ID NO: 170411 - protein, 10 aa, Artificial Sequence
  Description of Artificial Sequence: Synthetic peptide
  Seed: LLNASWFNSF
LWNASWFNSF

SEQ ID NO: 170412 - protein, 9 aa, Artificial Sequence
  Description of Artificial Sequence: Synthetic peptide
  Seed: LNASWFNSF
LYASWFNSF

SEQ ID NO: 170413 - protein, 10 aa, Artificial Sequence
  Description of Artificial Sequence: Synthetic peptide
  Seed: LNASWFNSFL
LYASWFNSFA

SEQ ID NO: 170414 - protein, 10 aa, Artificial Sequence
  Description of Artificial Sequence: Synthetic peptide
  Seed: LNASWFNSFL
LYASWFNSFI

SEQ ID NO: 170415 - protein, 10 aa, Artificial Sequence
  Description of Artificial Sequence: Synthetic peptide
  Seed: LNASWFNSFL
LYASWFNSFL

SEQ ID NO: 170416 - protein, 10 aa, Artificial Sequence
  Description of Artificial Sequence: Synthetic peptide
  Seed: LNASWFNSFL
LYASWFNSFV

SEQ ID NO: 170417 - protein, 9 aa, Artificial Sequence
  Description of Artificial Sequence: Synthetic peptide
  Seed: LNASWFNSF
LYASWFNSI

SEQ ID NO: 170418 - protein, 9 aa, Artificial Sequence
  Description of Artificial Sequence: Synthetic peptide
  Seed: LNASWFNSF
LYASWFNSL

SEQ ID NO: 170419 - protein, 9 aa, Artificial Sequence
  Description of Artificial Sequence: Synthetic peptide
  Seed: LNASWFNSF
LYASWFNSM

SEQ ID NO: 170420 - protein, 9 aa, Artificial Sequence
  Description of Artificial Sequence: Synthetic peptide
  Seed: LNASWFNSF
LYASWFNSY

SEQ ID NO: 170421 - protein, 8 aa, Artificial Sequence
  Description of Artificial Sequence: Synthetic peptide
  Seed: LLKHRFEI
LYKHRFEL

SEQ ID NO: 170422 - protein, 10 aa, Artificial Sequence
  Description of Artificial Sequence: Synthetic peptide
  Seed: LLNASWFNSF
LYNASWFNSF

SEQ ID NO: 170423 - protein, 10 aa, Artificial Sequence
  Description of Artificial Sequence: Synthetic peptide
  Seed: LLNASWFNSF
LYNASWFNSY

SEQ ID NO: 170424 - protein, 9 aa, Artificial Sequence
  Description of Artificial Sequence: Synthetic peptide
  Seed: NASWFNSFL
NASWFNSFA

SEQ ID NO: 170425 - protein, 9 aa, Artificial Sequence
  Description of Artificial Sequence: Synthetic peptide
  Seed: NASWFNSFL
NASWFNSFF

SEQ ID NO: 170426 - protein, 9 aa, Artificial Sequence
  Description of Artificial Sequence: Synthetic peptide
  Seed: NASWFNSFL
NASWFNSFI

SEQ ID NO: 170427 - protein, 9 aa, Artificial Sequence
  Description of Artificial Sequence: Synthetic peptide
  Seed: NASWFNSFL
NASWFNSFS

SEQ ID NO: 170428 - protein, 9 aa, Artificial Sequence
  Description of Artificial Sequence: Synthetic peptide
  Seed: NASWFNSFL
NASWFNSFT

SEQ ID NO: 170429 - protein, 9 aa, Artificial Sequence
  Description of Artificial Sequence: Synthetic peptide
  Seed: NASWFNSFL
NASWFNSFV

SEQ ID NO: 170430 - protein, 8 aa, Artificial Sequence
  Description of Artificial Sequence: Synthetic peptide
  Seed: NASWFNSF
NASWFNSL

SEQ ID NO: 170431 - protein, 8 aa, Artificial Sequence
  Description of Artificial Sequence: Synthetic peptide
  Seed: NASWFNSF
NASWFNSM

SEQ ID NO: 170432 - protein, 8 aa, Artificial Sequence
  Description of Artificial Sequence: Synthetic peptide
  Seed: NASWFNSF
NASWFNSY

SEQ ID NO: 170433 - protein, 10 aa, Artificial Sequence
  Description of Artificial Sequence: Synthetic peptide
  Seed: NGTSKIKMKW
NATSKIKMKW

SEQ ID NO: 170434 - protein, 9 aa, Artificial Sequence
  Description of Artificial Sequence: Synthetic peptide
  Seed: NASWFNSFL
NCSWFNSFI

SEQ ID NO: 170435 - protein, 9 aa, Artificial Sequence
  Description of Artificial Sequence: Synthetic peptide
  Seed: NASWFNSFL
NCSWFNSFV

SEQ ID NO: 170436 - protein, 9 aa, Artificial Sequence
  Description of Artificial Sequence: Synthetic peptide
  Seed: NASWFNSFL
NCSWFNSFY

SEQ ID NO: 170437 - protein, 10 aa, Artificial Sequence
  Description of Artificial Sequence: Synthetic peptide
  Seed: NGTSKIKMKW
NCTSKIKMKW

SEQ ID NO: 170438 - protein, 9 aa, Artificial Sequence
  Description of Artificial Sequence: Synthetic peptide
  Seed: NASWFNSFL
NDSWFNSFV

SEQ ID NO: 170439 - protein, 10 aa, Artificial Sequence
  Description of Artificial Sequence: Synthetic peptide
  Seed: NGTSKIKMKW
NDTSKIKMKW

SEQ ID NO: 170440 - protein, 10 aa, Artificial Sequence
  Description of Artificial Sequence: Synthetic peptide
  Seed: NGTSKIKMKW
NETSKIKMKW

SEQ ID NO: 170441 - protein, 9 aa, Artificial Sequence
  Description of Artificial Sequence: Synthetic peptide
  Seed: NASWFNSFL
NFSWFNSFA

SEQ ID NO: 170442 - protein, 9 aa, Artificial Sequence
  Description of Artificial Sequence: Synthetic peptide
  Seed: NASWFNSFL
NFSWFNSFI

SEQ ID NO: 170443 - protein, 9 aa, Artificial Sequence
  Description of Artificial Sequence: Synthetic peptide
  Seed: NASWFNSFL
NFSWFNSFL

SEQ ID NO: 170444 - protein, 9 aa, Artificial Sequence
  Description of Artificial Sequence: Synthetic peptide
  Seed: NASWFNSFL
NFSWFNSFV

SEQ ID NO: 170445 - protein, 9 aa, Artificial Sequence
  Description of Artificial Sequence: Synthetic peptide
  Seed: NASWFNSFL
NFSWFNSFY

SEQ ID NO: 170446 - protein, 10 aa, Artificial Sequence
  Description of Artificial Sequence: Synthetic peptide
  Seed: NGTSKIKMKW
NFTSKIKMKW

SEQ ID NO: 170447 - protein, 9 aa, Artificial Sequence
  Description of Artificial Sequence: Synthetic peptide
  Seed: NASWFNSFL
NGSWFNSFI

SEQ ID NO: 170448 - protein, 9 aa, Artificial Sequence
  Description of Artificial Sequence: Synthetic peptide
  Seed: NASWFNSFL
NGSWFNSFL

SEQ ID NO: 170449 - protein, 9 aa, Artificial Sequence
  Description of Artificial Sequence: Synthetic peptide
  Seed: NASWFNSFL
NGSWFNSFM

SEQ ID NO: 170450 - protein, 9 aa, Artificial Sequence
  Description of Artificial Sequence: Synthetic peptide
  Seed: NASWFNSFL
NGSWFNSFV

SEQ ID NO: 170451 - protein, 9 aa, Artificial Sequence
  Description of Artificial Sequence: Synthetic peptide
  Seed: NASWFNSFL
NGSWFNSFY

SEQ ID NO: 170452 - protein, 10 aa, Artificial Sequence
  Description of Artificial Sequence: Synthetic peptide
  Seed: NGTSKIKMKW
NHTSKIKMKW

SEQ ID NO: 170453 - protein, 9 aa, Artificial Sequence
  Description of Artificial Sequence: Synthetic peptide
  Seed: NASWFNSFL
NISWFNSFA

SEQ ID NO: 170454 - protein, 9 aa, Artificial Sequence
  Description of Artificial Sequence: Synthetic peptide
  Seed: NASWFNSFL
NISWFNSFF

SEQ ID NO: 170455 - protein, 9 aa, Artificial Sequence
  Description of Artificial Sequence: Synthetic peptide
  Seed: NASWFNSFL
NISWFNSFI

SEQ ID NO: 170456 - protein, 9 aa, Artificial Sequence
  Description of Artificial Sequence: Synthetic peptide
  Seed: NASWFNSFL
NISWFNSFL

SEQ ID NO: 170457 - protein, 9 aa, Artificial Sequence
  Description of Artificial Sequence: Synthetic peptide
  Seed: NASWFNSFL
NISWFNSFM

SEQ ID NO: 170458 - protein, 9 aa, Artificial Sequence
  Description of Artificial Sequence: Synthetic peptide
  Seed: NASWFNSFL
NISWFNSFS

SEQ ID NO: 170459 - protein, 9 aa, Artificial Sequence
  Description of Artificial Sequence: Synthetic peptide
  Seed: NASWFNSFL
NISWFNSFT

SEQ ID NO: 170460 - protein, 9 aa, Artificial Sequence
  Description of Artificial Sequence: Synthetic peptide
  Seed: NASWFNSFL
NISWFNSFV

SEQ ID NO: 170461 - protein, 9 aa, Artificial Sequence
  Description of Artificial Sequence: Synthetic peptide
  Seed: NASWFNSFL
NISWFNSFY

SEQ ID NO: 170462 - protein, 10 aa, Artificial Sequence
  Description of Artificial Sequence: Synthetic peptide
  Seed: NGTSKIKMKW
NITSKIKMKW

SEQ ID NO: 170463 - protein, 10 aa, Artificial Sequence
  Description of Artificial Sequence: Synthetic peptide
  Seed: NGTSKIKMKW
NKTSKIKMKW

SEQ ID NO: 170464 - protein, 9 aa, Artificial Sequence
  Description of Artificial Sequence: Synthetic peptide
  Seed: NASWFNSFL
NLSWFNSFA

SEQ ID NO: 170465 - protein, 9 aa, Artificial Sequence
  Description of Artificial Sequence: Synthetic peptide
  Seed: NASWFNSFL
NLSWFNSFC

SEQ ID NO: 170466 - protein, 9 aa, Artificial Sequence
  Description of Artificial Sequence: Synthetic peptide
  Seed: NASWFNSFL
NLSWFNSFF

SEQ ID NO: 170467 - protein, 9 aa, Artificial Sequence
  Description of Artificial Sequence: Synthetic peptide
  Seed: NASWFNSFL
NLSWFNSFG

SEQ ID NO: 170468 - protein, 9 aa, Artificial Sequence
  Description of Artificial Sequence: Synthetic peptide
  Seed: NASWFNSFL
NLSWFNSFI

SEQ ID NO: 170469 - protein, 9 aa, Artificial Sequence
  Description of Artificial Sequence: Synthetic peptide
  Seed: NASWFNSFL
NLSWFNSFL

SEQ ID NO: 170470 - protein, 9 aa, Artificial Sequence
  Description of Artificial Sequence: Synthetic peptide
  Seed: NASWFNSFL
NLSWFNSFM

SEQ ID NO: 170471 - protein, 9 aa, Artificial Sequence
  Description of Artificial Sequence: Synthetic peptide
  Seed: NASWFNSFL
NLSWFNSFP

SEQ ID NO: 170472 - protein, 9 aa, Artificial Sequence
  Description of Artificial Sequence: Synthetic peptide
  Seed: NASWFNSFL
NLSWFNSFS

SEQ ID NO: 170473 - protein, 9 aa, Artificial Sequence
  Description of Artificial Sequence: Synthetic peptide
  Seed: NASWFNSFL
NLSWFNSFT

SEQ ID NO: 170474 - protein, 9 aa, Artificial Sequence
  Description of Artificial Sequence: Synthetic peptide
  Seed: NASWFNSFL
NLSWFNSFY

SEQ ID NO: 170475 - protein, 10 aa, Artificial Sequence
  Description of Artificial Sequence: Synthetic peptide
  Seed: NGTSKIKMKW
NLTSKIKMKW

SEQ ID NO: 170476 - protein, 9 aa, Artificial Sequence
  Description of Artificial Sequence: Synthetic peptide
  Seed: NASWFNSFL
NMSWFNSFA

SEQ ID NO: 170477 - protein, 9 aa, Artificial Sequence
  Description of Artificial Sequence: Synthetic peptide
  Seed: NASWFNSFL
NMSWFNSFC

SEQ ID NO: 170478 - protein, 9 aa, Artificial Sequence
  Description of Artificial Sequence: Synthetic peptide
  Seed: NASWFNSFL
NMSWFNSFF

SEQ ID NO: 170479 - protein, 9 aa, Artificial Sequence
  Description of Artificial Sequence: Synthetic peptide
  Seed: NASWFNSFL
NMSWFNSFG

SEQ ID NO: 170480 - protein, 9 aa, Artificial Sequence
  Description of Artificial Sequence: Synthetic peptide
  Seed: NASWFNSFL
NMSWFNSFI

SEQ ID NO: 170481 - protein, 9 aa, Artificial Sequence
  Description of Artificial Sequence: Synthetic peptide
  Seed: NASWFNSFL
NMSWFNSFL

SEQ ID NO: 170482 - protein, 9 aa, Artificial Sequence
  Description of Artificial Sequence: Synthetic peptide
  Seed: NASWFNSFL
NMSWFNSFM

SEQ ID NO: 170483 - protein, 9 aa, Artificial Sequence
  Description of Artificial Sequence: Synthetic peptide
  Seed: NASWFNSFL
NMSWFNSFP

SEQ ID NO: 170484 - protein, 9 aa, Artificial Sequence
  Description of Artificial Sequence: Synthetic peptide
  Seed: NASWFNSFL
NMSWFNSFS

SEQ ID NO: 170485 - protein, 9 aa, Artificial Sequence
  Description of Artificial Sequence: Synthetic peptide
  Seed: NASWFNSFL
NMSWFNSFT

SEQ ID NO: 170486 - protein, 9 aa, Artificial Sequence
  Description of Artificial Sequence: Synthetic peptide
  Seed: NASWFNSFL
NMSWFNSFV

SEQ ID NO: 170487 - protein, 9 aa, Artificial Sequence
  Description of Artificial Sequence: Synthetic peptide
  Seed: NASWFNSFL
NMSWFNSFY

SEQ ID NO: 170488 - protein, 10 aa, Artificial Sequence
  Description of Artificial Sequence: Synthetic peptide
  Seed: NGTSKIKMKW
NMTSKIKMKW

SEQ ID NO: 170489 - protein, 9 aa, Artificial Sequence
  Description of Artificial Sequence: Synthetic peptide
  Seed: NASWFNSFL
NNSWFNSFA

SEQ ID NO: 170490 - protein, 9 aa, Artificial Sequence
  Description of Artificial Sequence: Synthetic peptide
  Seed: NASWFNSFL
NNSWFNSFI

SEQ ID NO: 170491 - protein, 9 aa, Artificial Sequence
  Description of Artificial Sequence: Synthetic peptide
  Seed: NASWFNSFL
NNSWFNSFL

SEQ ID NO: 170492 - protein, 9 aa, Artificial Sequence
  Description of Artificial Sequence: Synthetic peptide
  Seed: NASWFNSFL
NNSWFNSFV

SEQ ID NO: 170493 - protein, 10 aa, Artificial Sequence
  Description of Artificial Sequence: Synthetic peptide
  Seed: NGTSKIKMKW
NNTSKIKMKW

SEQ ID NO: 170494 - protein, 9 aa, Artificial Sequence
  Description of Artificial Sequence: Synthetic peptide
  Seed: NASWFNSFL
NPSWFNSFA

SEQ ID NO: 170495 - protein, 9 aa, Artificial Sequence
  Description of Artificial Sequence: Synthetic peptide
  Seed: NASWFNSFL
NPSWFNSFF

SEQ ID NO: 170496 - protein, 9 aa, Artificial Sequence
  Description of Artificial Sequence: Synthetic peptide
  Seed: NASWFNSFL
NPSWFNSFH

SEQ ID NO: 170497 - protein, 9 aa, Artificial Sequence
  Description of Artificial Sequence: Synthetic peptide
  Seed: NASWFNSFL
NPSWFNSFI

SEQ ID NO: 170498 - protein, 9 aa, Artificial Sequence
  Description of Artificial Sequence: Synthetic peptide
  Seed: NASWFNSFL
NPSWFNSFL

SEQ ID NO: 170499 - protein, 9 aa, Artificial Sequence
  Description of Artificial Sequence: Synthetic peptide
  Seed: NASWFNSFL
NPSWFNSFM

SEQ ID NO: 170500 - protein, 9 aa, Artificial Sequence
  Description of Artificial Sequence: Synthetic peptide
  Seed: NASWFNSFL
NPSWFNSFV

SEQ ID NO: 170501 - protein, 9 aa, Artificial Sequence
  Description of Artificial Sequence: Synthetic peptide
  Seed: NASWFNSFL
NPSWFNSFW

SEQ ID NO: 170502 - protein, 9 aa, Artificial Sequence
  Description of Artificial Sequence: Synthetic peptide
  Seed: NASWFNSFL
NPSWFNSFY

SEQ ID NO: 170503 - protein, 10 aa, Artificial Sequence
  Description of Artificial Sequence: Synthetic peptide
  Seed: NGTSKIKMKW
NPTSKIKMKW

SEQ ID NO: 170504 - protein, 9 aa, Artificial Sequence
  Description of Artificial Sequence: Synthetic peptide
  Seed: NASWFNSFL
NQSWFNSFA

SEQ ID NO: 170505 - protein, 9 aa, Artificial Sequence
  Description of Artificial Sequence: Synthetic peptide
  Seed: NASWFNSFL
NQSWFNSFF

SEQ ID NO: 170506 - protein, 9 aa, Artificial Sequence
  Description of Artificial Sequence: Synthetic peptide
  Seed: NASWFNSFL
NQSWFNSFI

SEQ ID NO: 170507 - protein, 9 aa, Artificial Sequence
  Description of Artificial Sequence: Synthetic peptide
  Seed: NASWFNSFL
NQSWFNSFL

SEQ ID NO: 170508 - protein, 9 aa, Artificial Sequence
  Description of Artificial Sequence: Synthetic peptide
  Seed: NASWFNSFL
NQSWFNSFM

SEQ ID NO: 170509 - protein, 9 aa, Artificial Sequence
  Description of Artificial Sequence: Synthetic peptide
  Seed: NASWFNSFL
NQSWFNSFV

SEQ ID NO: 170510 - protein, 9 aa, Artificial Sequence
  Description of Artificial Sequence: Synthetic peptide
  Seed: NASWFNSFL
NQSWFNSFY

SEQ ID NO: 170511 - protein, 10 aa, Artificial Sequence
  Description of Artificial Sequence: Synthetic peptide
  Seed: NGTSKIKMKW
NQTSKIKMKW

SEQ ID NO: 170512 - protein, 10 aa, Artificial Sequence
  Description of Artificial Sequence: Synthetic peptide
  Seed: NGTSKIKMKW
NRTSKIKMKW

SEQ ID NO: 170513 - protein, 8 aa, Artificial Sequence
  Description of Artificial Sequence: Synthetic peptide
  Seed: NASWFNSF
NSSWFNSF

SEQ ID NO: 170514 - protein, 9 aa, Artificial Sequence
  Description of Artificial Sequence: Synthetic peptide
  Seed: NASWFNSFL
NSSWFNSFA

SEQ ID NO: 170515 - protein, 9 aa, Artificial Sequence
  Description of Artificial Sequence: Synthetic peptide
  Seed: NASWFNSFL
NSSWFNSFF

SEQ ID NO: 170516 - protein, 9 aa, Artificial Sequence
  Description of Artificial Sequence: Synthetic peptide
  Seed: NASWFNSFL
NSSWFNSFI

SEQ ID NO: 170517 - protein, 9 aa, Artificial Sequence
  Description of Artificial Sequence: Synthetic peptide
  Seed: NASWFNSFL
NSSWFNSFL

SEQ ID NO: 170518 - protein, 9 aa, Artificial Sequence
  Description of Artificial Sequence: Synthetic peptide
  Seed: NASWFNSFL
NSSWFNSFS

SEQ ID NO: 170519 - protein, 9 aa, Artificial Sequence
  Description of Artificial Sequence: Synthetic peptide
  Seed: NASWFNSFL
NSSWFNSFT

SEQ ID NO: 170520 - protein, 9 aa, Artificial Sequence
  Description of Artificial Sequence: Synthetic peptide
  Seed: NASWFNSFL
NSSWFNSFV

SEQ ID NO: 170521 - protein, 9 aa, Artificial Sequence
  Description of Artificial Sequence: Synthetic peptide
  Seed: NASWFNSFL
NSSWFNSFY

SEQ ID NO: 170522 - protein, 8 aa, Artificial Sequence
  Description of Artificial Sequence: Synthetic peptide
  Seed: NASWFNSF
NSSWFNSL

SEQ ID NO: 170523 - protein, 8 aa, Artificial Sequence
  Description of Artificial Sequence: Synthetic peptide
  Seed: NASWFNSF
NSSWFNSM

SEQ ID NO: 170524 - protein, 8 aa, Artificial Sequence
  Description of Artificial Sequence: Synthetic peptide
  Seed: NASWFNSF
NSSWFNSY

SEQ ID NO: 170525 - protein, 10 aa, Artificial Sequence
  Description of Artificial Sequence: Synthetic peptide
  Seed: NGTSKIKMKW
NSTSKIKMKW

SEQ ID NO: 170526 - protein, 9 aa, Artificial Sequence
  Description of Artificial Sequence: Synthetic peptide
  Seed: NASWFNSFL
NTSWFNSFA

SEQ ID NO: 170527 - protein, 9 aa, Artificial Sequence
  Description of Artificial Sequence: Synthetic peptide
  Seed: NASWFNSFL
NTSWFNSFC

SEQ ID NO: 170528 - protein, 9 aa, Artificial Sequence
  Description of Artificial Sequence: Synthetic peptide
  Seed: NASWFNSFL
NTSWFNSFF

SEQ ID NO: 170529 - protein, 9 aa, Artificial Sequence
  Description of Artificial Sequence: Synthetic peptide
  Seed: NASWFNSFL
NTSWFNSFG

SEQ ID NO: 170530 - protein, 9 aa, Artificial Sequence
  Description of Artificial Sequence: Synthetic peptide
  Seed: NASWFNSFL
NTSWFNSFI

SEQ ID NO: 170531 - protein, 9 aa, Artificial Sequence
  Description of Artificial Sequence: Synthetic peptide
  Seed: NASWFNSFL
NTSWFNSFM

SEQ ID NO: 170532 - protein, 9 aa, Artificial Sequence
  Description of Artificial Sequence: Synthetic peptide
  Seed: NASWFNSFL
NTSWFNSFP

SEQ ID NO: 170533 - protein, 9 aa, Artificial Sequence
  Description of Artificial Sequence: Synthetic peptide
  Seed: NASWFNSFL
NTSWFNSFS

SEQ ID NO: 170534 - protein, 9 aa, Artificial Sequence
  Description of Artificial Sequence: Synthetic peptide
  Seed: NASWFNSFL
NTSWFNSFT

SEQ ID NO: 170535 - protein, 9 aa, Artificial Sequence
  Description of Artificial Sequence: Synthetic peptide
  Seed: NASWFNSFL
NTSWFNSFV

SEQ ID NO: 170536 - protein, 9 aa, Artificial Sequence
  Description of Artificial Sequence: Synthetic peptide
  Seed: NASWFNSFL
NTSWFNSFY

SEQ ID NO: 170537 - protein, 8 aa, Artificial Sequence
  Description of Artificial Sequence: Synthetic peptide
  Seed: NASWFNSF
NTSWFNSM

SEQ ID NO: 170538 - protein, 10 aa, Artificial Sequence
  Description of Artificial Sequence: Synthetic peptide
  Seed: NGTSKIKMKW
NTTSKIKMKW

SEQ ID NO: 170539 - protein, 9 aa, Artificial Sequence
  Description of Artificial Sequence: Synthetic peptide
  Seed: NASWFNSFL
NVSWFNSFA

SEQ ID NO: 170540 - protein, 9 aa, Artificial Sequence
  Description of Artificial Sequence: Synthetic peptide
  Seed: NASWFNSFL
NVSWFNSFC

SEQ ID NO: 170541 - protein, 9 aa, Artificial Sequence
  Description of Artificial Sequence: Synthetic peptide
  Seed: NASWFNSFL
NVSWFNSFF

SEQ ID NO: 170542 - protein, 9 aa, Artificial Sequence
  Description of Artificial Sequence: Synthetic peptide
  Seed: NASWFNSFL
NVSWFNSFL

SEQ ID NO: 170543 - protein, 9 aa, Artificial Sequence
  Description of Artificial Sequence: Synthetic peptide
  Seed: NASWFNSFL
NVSWFNSFM

SEQ ID NO: 170544 - protein, 9 aa, Artificial Sequence
  Description of Artificial Sequence: Synthetic peptide
  Seed: NASWFNSFL
NVSWFNSFP

SEQ ID NO: 170545 - protein, 9 aa, Artificial Sequence
  Description of Artificial Sequence: Synthetic peptide
  Seed: NASWFNSFL
NVSWFNSFS

SEQ ID NO: 170546 - protein, 9 aa, Artificial Sequence
  Description of Artificial Sequence: Synthetic peptide
  Seed: NASWFNSFL
NVSWFNSFT

SEQ ID NO: 170547 - protein, 9 aa, Artificial Sequence
  Description of Artificial Sequence: Synthetic peptide
  Seed: NASWFNSFL
NVSWFNSFV

SEQ ID NO: 170548 - protein, 9 aa, Artificial Sequence
  Description of Artificial Sequence: Synthetic peptide
  Seed: NASWFNSFL
NVSWFNSFY

SEQ ID NO: 170549 - protein, 10 aa, Artificial Sequence
  Description of Artificial Sequence: Synthetic peptide
  Seed: NGTSKIKMKW
NVTSKIKMKW

SEQ ID NO: 170550 - protein, 10 aa, Artificial Sequence
  Description of Artificial Sequence: Synthetic peptide
  Seed: NGTSKIKMKW
NWTSKIKMKW

SEQ ID NO: 170551 - protein, 9 aa, Artificial Sequence
  Description of Artificial Sequence: Synthetic peptide
  Seed: NASWFNSFL
NYSWFNSFV

SEQ ID NO: 170552 - protein, 10 aa, Artificial Sequence
  Description of Artificial Sequence: Synthetic peptide
  Seed: NGTSKIKMKW
NYTSKIKMKW

SEQ ID NO: 170553 - protein, 9 aa, Artificial Sequence
  Description of Artificial Sequence: Synthetic peptide
  Seed: PWVLLNASW
PFVLLNASF

SEQ ID NO: 170554 - protein, 9 aa, Artificial Sequence
  Description of Artificial Sequence: Synthetic peptide
  Seed: PWVLLNASW
PFVLLNASW

SEQ ID NO: 170555 - protein, 9 aa, Artificial Sequence
  Description of Artificial Sequence: Synthetic peptide
  Seed: PWVLLNASW
PWVLLNASF

SEQ ID NO: 170556 - protein, 9 aa, Artificial Sequence
  Description of Artificial Sequence: Synthetic peptide
  Seed: PWVLLNASW
PWVLLNASI

SEQ ID NO: 170557 - protein, 9 aa, Artificial Sequence
  Description of Artificial Sequence: Synthetic peptide
  Seed: PWVLLNASW
PWVLLNASL

SEQ ID NO: 170558 - protein, 9 aa, Artificial Sequence
  Description of Artificial Sequence: Synthetic peptide
  Seed: PWVLLNASW
PYVLLNASI

SEQ ID NO: 170559 - protein, 9 aa, Artificial Sequence
  Description of Artificial Sequence: Synthetic peptide
  Seed: PWVLLNASW
PYVLLNASL

SEQ ID NO: 170560 - protein, 9 aa, Artificial Sequence
  Description of Artificial Sequence: Synthetic peptide
  Seed: PWVLLNASW
PYVLLNASM

SEQ ID NO: 170561 - protein, 9 aa, Artificial Sequence
  Description of Artificial Sequence: Synthetic peptide
  Seed: PWVLLNASW
PYVLLNASW

SEQ ID NO: 170562 - protein, 10 aa, Artificial Sequence
  Description of Artificial Sequence: Synthetic peptide
  Seed: PWVLLNASWF
PYVLLNASWF

SEQ ID NO: 170563 - protein, 10 aa, Artificial Sequence
  Description of Artificial Sequence: Synthetic peptide
  Seed: PWVLLNASWF
PYVLLNASWW

SEQ ID NO: 170564 - protein, 10 aa, Artificial Sequence
  Description of Artificial Sequence: Synthetic peptide
  Seed: RSHLRNDTDV
RAHLRNDTDK

SEQ ID NO: 170565 - protein, 9 aa, Artificial Sequence
  Description of Artificial Sequence: Synthetic peptide
  Seed: RTLLAKSVF
RALLAKSVA

SEQ ID NO: 170566 - protein, 9 aa, Artificial Sequence
  Description of Artificial Sequence: Synthetic peptide
  Seed: RTLLAKSVF
RALLAKSVF

SEQ ID NO: 170567 - protein, 9 aa, Artificial Sequence
  Description of Artificial Sequence: Synthetic peptide
  Seed: RTLLAKSVF
RALLAKSVI

SEQ ID NO: 170568 - protein, 9 aa, Artificial Sequence
  Description of Artificial Sequence: Synthetic peptide
  Seed: RTLLAKSVF
RALLAKSVK

SEQ ID NO: 170569 - protein, 9 aa, Artificial Sequence
  Description of Artificial Sequence: Synthetic peptide
  Seed: RTLLAKSVF
RALLAKSVL

SEQ ID NO: 170570 - protein, 9 aa, Artificial Sequence
  Description of Artificial Sequence: Synthetic peptide
  Seed: RTLLAKSVF
RALLAKSVM

SEQ ID NO: 170571 - protein, 9 aa, Artificial Sequence
  Description of Artificial Sequence: Synthetic peptide
  Seed: RTLLAKSVF
RALLAKSVV

SEQ ID NO: 170572 - protein, 9 aa, Artificial Sequence
  Description of Artificial Sequence: Synthetic peptide
  Seed: RTLLAKSVF
RALLAKSVW

SEQ ID NO: 170573 - protein, 9 aa, Artificial Sequence
  Description of Artificial Sequence: Synthetic peptide
  Seed: RTLLAKSVF
RALLAKSVY

SEQ ID NO: 170574 - protein, 10 aa, Artificial Sequence
  Description of Artificial Sequence: Synthetic peptide
  Seed: RATEYIMKGV
RATEYIMKGI

SEQ ID NO: 170575 - protein, 10 aa, Artificial Sequence
  Description of Artificial Sequence: Synthetic peptide
  Seed: RATEYIMKGV
RATEYIMKGL

SEQ ID NO: 170576 - protein, 9 aa, Artificial Sequence
  Description of Artificial Sequence: Synthetic peptide
  Seed: RTLLAKSVF
RCLLAKSVF

SEQ ID NO: 170577 - protein, 9 aa, Artificial Sequence
  Description of Artificial Sequence: Synthetic peptide
  Seed: RTLLAKSVF
RCLLAKSVK

SEQ ID NO: 170578 - protein, 9 aa, Artificial Sequence
  Description of Artificial Sequence: Synthetic peptide
  Seed: RTLLAKSVF
RCLLAKSVW

SEQ ID NO: 170579 - protein, 9 aa, Artificial Sequence
  Description of Artificial Sequence: Synthetic peptide
  Seed: RTLLAKSVF
RCLLAKSVY

SEQ ID NO: 170580 - protein, 9 aa, Artificial Sequence
  Description of Artificial Sequence: Synthetic peptide
  Seed: RTLLAKSVF
RELLAKSVF

SEQ ID NO: 170581 - protein, 9 aa, Artificial Sequence
  Description of Artificial Sequence: Synthetic peptide
  Seed: RTLLAKSVF
RELLAKSVI

SEQ ID NO: 170582 - protein, 9 aa, Artificial Sequence
  Description of Artificial Sequence: Synthetic peptide
  Seed: RTLLAKSVF
RELLAKSVL

SEQ ID NO: 170583 - protein, 9 aa, Artificial Sequence
  Description of Artificial Sequence: Synthetic peptide
  Seed: RTLLAKSVF
RELLAKSVM

SEQ ID NO: 170584 - protein, 9 aa, Artificial Sequence
  Description of Artificial Sequence: Synthetic peptide
  Seed: RTLLAKSVF
RELLAKSVY

SEQ ID NO: 170585 - protein, 10 aa, Artificial Sequence
  Description of Artificial Sequence: Synthetic peptide
  Seed: RSHLRNDTDV
RFHLRNDTDK

SEQ ID NO: 170586 - protein, 9 aa, Artificial Sequence
  Description of Artificial Sequence: Synthetic peptide
  Seed: RTLLAKSVF
RFLLAKSVA

SEQ ID NO: 170587 - protein, 9 aa, Artificial Sequence
  Description of Artificial Sequence: Synthetic peptide
  Seed: RTLLAKSVF
RFLLAKSVF

SEQ ID NO: 170588 - protein, 9 aa, Artificial Sequence
  Description of Artificial Sequence: Synthetic peptide
  Seed: RTLLAKSVF
RFLLAKSVI

SEQ ID NO: 170589 - protein, 9 aa, Artificial Sequence
  Description of Artificial Sequence: Synthetic peptide
  Seed: RTLLAKSVF
RFLLAKSVK

SEQ ID NO: 170590 - protein, 9 aa, Artificial Sequence
  Description of Artificial Sequence: Synthetic peptide
  Seed: RTLLAKSVF
RFLLAKSVM

SEQ ID NO: 170591 - protein, 9 aa, Artificial Sequence
  Description of Artificial Sequence: Synthetic peptide
  Seed: RTLLAKSVF
RFLLAKSVV

SEQ ID NO: 170592 - protein, 9 aa, Artificial Sequence
  Description of Artificial Sequence: Synthetic peptide
  Seed: RTLLAKSVF
RFLLAKSVY

SEQ ID NO: 170593 - protein, 9 aa, Artificial Sequence
  Description of Artificial Sequence: Synthetic peptide
  Seed: RTLLAKSVF
RGLLAKSVF

SEQ ID NO: 170594 - protein, 9 aa, Artificial Sequence
  Description of Artificial Sequence: Synthetic peptide
  Seed: RTLLAKSVF
RGLLAKSVK

SEQ ID NO: 170595 - protein, 9 aa, Artificial Sequence
  Description of Artificial Sequence: Synthetic peptide
  Seed: RTLLAKSVF
RGLLAKSVM

SEQ ID NO: 170596 - protein, 9 aa, Artificial Sequence
  Description of Artificial Sequence: Synthetic peptide
  Seed: RTLLAKSVF
RGLLAKSVW

SEQ ID NO: 170597 - protein, 9 aa, Artificial Sequence
  Description of Artificial Sequence: Synthetic peptide
  Seed: RTLLAKSVF
RGLLAKSVY

SEQ ID NO: 170598 - protein, 9 aa, Artificial Sequence
  Description of Artificial Sequence: Synthetic peptide
  Seed: RTLLAKSVF
RHLLAKSVF

SEQ ID NO: 170599 - protein, 9 aa, Artificial Sequence
  Description of Artificial Sequence: Synthetic peptide
  Seed: RTLLAKSVF
RHLLAKSVI

SEQ ID NO: 170600 - protein, 9 aa, Artificial Sequence
  Description of Artificial Sequence: Synthetic peptide
  Seed: RTLLAKSVF
RHLLAKSVL

SEQ ID NO: 170601 - protein, 9 aa, Artificial Sequence
  Description of Artificial Sequence: Synthetic peptide
  Seed: RTLLAKSVF
RHLLAKSVM

SEQ ID NO: 170602 - protein, 9 aa, Artificial Sequence
  Description of Artificial Sequence: Synthetic peptide
  Seed: RTLLAKSVF
RHLLAKSVW

SEQ ID NO: 170603 - protein, 9 aa, Artificial Sequence
  Description of Artificial Sequence: Synthetic peptide
  Seed: RTLLAKSVF
RHLLAKSVY

SEQ ID NO: 170604 - protein, 10 aa, Artificial Sequence
  Description of Artificial Sequence: Synthetic peptide
  Seed: RSHLRNDTDV
RIHLRNDTDK

SEQ ID NO: 170605 - protein, 9 aa, Artificial Sequence
  Description of Artificial Sequence: Synthetic peptide
  Seed: RTLLAKSVF
RILLAKSVA

SEQ ID NO: 170606 - protein, 9 aa, Artificial Sequence
  Description of Artificial Sequence: Synthetic peptide
  Seed: RTLLAKSVF
RILLAKSVF

SEQ ID NO: 170607 - protein, 9 aa, Artificial Sequence
  Description of Artificial Sequence: Synthetic peptide
  Seed: RTLLAKSVF
RILLAKSVI

SEQ ID NO: 170608 - protein, 9 aa, Artificial Sequence
  Description of Artificial Sequence: Synthetic peptide
  Seed: RTLLAKSVF
RILLAKSVL

SEQ ID NO: 170609 - protein, 9 aa, Artificial Sequence
  Description of Artificial Sequence: Synthetic peptide
  Seed: RTLLAKSVF
RILLAKSVM

SEQ ID NO: 170610 - protein, 9 aa, Artificial Sequence
  Description of Artificial Sequence: Synthetic peptide
  Seed: RTLLAKSVF
RILLAKSVV

SEQ ID NO: 170611 - protein, 9 aa, Artificial Sequence
  Description of Artificial Sequence: Synthetic peptide
  Seed: RTLLAKSVF
RILLAKSVW

SEQ ID NO: 170612 - protein, 9 aa, Artificial Sequence
  Description of Artificial Sequence: Synthetic peptide
  Seed: RTLLAKSVF
RILLAKSVY

SEQ ID NO: 170613 - protein, 10 aa, Artificial Sequence
  Description of Artificial Sequence: Synthetic peptide
  Seed: RATEYIMKGV
RITEYIMKGA

SEQ ID NO: 170614 - protein, 10 aa, Artificial Sequence
  Description of Artificial Sequence: Synthetic peptide
  Seed: RATEYIMKGV
RITEYIMKGI

SEQ ID NO: 170615 - protein, 10 aa, Artificial Sequence
  Description of Artificial Sequence: Synthetic peptide
  Seed: RATEYIMKGV
RITEYIMKGL

SEQ ID NO: 170616 - protein, 10 aa, Artificial Sequence
  Description of Artificial Sequence: Synthetic peptide
  Seed: RATEYIMKGV
RITEYIMKGV

SEQ ID NO: 170617 - protein, 9 aa, Artificial Sequence
  Description of Artificial Sequence: Synthetic peptide
  Seed: RTLLAKSVF
RKLLAKSVF

SEQ ID NO: 170618 - protein, 9 aa, Artificial Sequence
  Description of Artificial Sequence: Synthetic peptide
  Seed: RTLLAKSVF
RKLLAKSVH

SEQ ID NO: 170619 - protein, 9 aa, Artificial Sequence
  Description of Artificial Sequence: Synthetic peptide
  Seed: RTLLAKSVF
RKLLAKSVI

SEQ ID NO: 170620 - protein, 9 aa, Artificial Sequence
  Description of Artificial Sequence: Synthetic peptide
  Seed: RTLLAKSVF
RKLLAKSVL

SEQ ID NO: 170621 - protein, 9 aa, Artificial Sequence
  Description of Artificial Sequence: Synthetic peptide
  Seed: RTLLAKSVF
RKLLAKSVM

SEQ ID NO: 170622 - protein, 9 aa, Artificial Sequence
  Description of Artificial Sequence: Synthetic peptide
  Seed: RTLLAKSVF
RKLLAKSVV

SEQ ID NO: 170623 - protein, 9 aa, Artificial Sequence
  Description of Artificial Sequence: Synthetic peptide
  Seed: RTLLAKSVF
RKLLAKSVW

SEQ ID NO: 170624 - protein, 9 aa, Artificial Sequence
  Description of Artificial Sequence: Synthetic peptide
  Seed: RTLLAKSVF
RKLLAKSVY

SEQ ID NO: 170625 - protein, 10 aa, Artificial Sequence
  Description of Artificial Sequence: Synthetic peptide
  Seed: RSHLRNDTDV
RLHLRNDTDK

SEQ ID NO: 170626 - protein, 9 aa, Artificial Sequence
  Description of Artificial Sequence: Synthetic peptide
  Seed: RTLLAKSVF
RLLLAKSVA

SEQ ID NO: 170627 - protein, 9 aa, Artificial Sequence
  Description of Artificial Sequence: Synthetic peptide
  Seed: RTLLAKSVF
RLLLAKSVF

SEQ ID NO: 170628 - protein, 9 aa, Artificial Sequence
  Description of Artificial Sequence: Synthetic peptide
  Seed: RTLLAKSVF
RLLLAKSVI

SEQ ID NO: 170629 - protein, 9 aa, Artificial Sequence
  Description of Artificial Sequence: Synthetic peptide
  Seed: RTLLAKSVF
RLLLAKSVK

SEQ ID NO: 170630 - protein, 9 aa, Artificial Sequence
  Description of Artificial Sequence: Synthetic peptide
  Seed: RTLLAKSVF
RLLLAKSVL

SEQ ID NO: 170631 - protein, 9 aa, Artificial Sequence
  Description of Artificial Sequence: Synthetic peptide
  Seed: RTLLAKSVF
RLLLAKSVM

SEQ ID NO: 170632 - protein, 9 aa, Artificial Sequence
  Description of Artificial Sequence: Synthetic peptide
  Seed: RTLLAKSVF
RLLLAKSVW

SEQ ID NO: 170633 - protein, 9 aa, Artificial Sequence
  Description of Artificial Sequence: Synthetic peptide
  Seed: RTLLAKSVF
RLLLAKSVY

SEQ ID NO: 170634 - protein, 10 aa, Artificial Sequence
  Description of Artificial Sequence: Synthetic peptide
  Seed: RATEYIMKGV
RLTEYIMKGA

SEQ ID NO: 170635 - protein, 10 aa, Artificial Sequence
  Description of Artificial Sequence: Synthetic peptide
  Seed: RATEYIMKGV
RLTEYIMKGC

SEQ ID NO: 170636 - protein, 10 aa, Artificial Sequence
  Description of Artificial Sequence: Synthetic peptide
  Seed: RATEYIMKGV
RLTEYIMKGI

SEQ ID NO: 170637 - protein, 10 aa, Artificial Sequence
  Description of Artificial Sequence: Synthetic peptide
  Seed: RATEYIMKGV
RLTEYIMKGL

SEQ ID NO: 170638 - protein, 10 aa, Artificial Sequence
  Description of Artificial Sequence: Synthetic peptide
  Seed: RATEYIMKGV
RLTEYIMKGM

SEQ ID NO: 170639 - protein, 10 aa, Artificial Sequence
  Description of Artificial Sequence: Synthetic peptide
  Seed: RATEYIMKGV
RLTEYIMKGS

SEQ ID NO: 170640 - protein, 10 aa, Artificial Sequence
  Description of Artificial Sequence: Synthetic peptide
  Seed: RATEYIMKGV
RLTEYIMKGT

SEQ ID NO: 170641 - protein, 10 aa, Artificial Sequence
  Description of Artificial Sequence: Synthetic peptide
  Seed: RATEYIMKGV
RLTEYIMKGV

SEQ ID NO: 170642 - protein, 10 aa, Artificial Sequence
  Description of Artificial Sequence: Synthetic peptide
  Seed: RSHLRNDTDV
RMHLRNDTDK

SEQ ID NO: 170643 - protein, 9 aa, Artificial Sequence
  Description of Artificial Sequence: Synthetic peptide
  Seed: RTLLAKSVF
RMLLAKSVA

SEQ ID NO: 170644 - protein, 9 aa, Artificial Sequence
  Description of Artificial Sequence: Synthetic peptide
  Seed: RTLLAKSVF
RMLLAKSVF

SEQ ID NO: 170645 - protein, 9 aa, Artificial Sequence
  Description of Artificial Sequence: Synthetic peptide
  Seed: RTLLAKSVF
RMLLAKSVH

SEQ ID NO: 170646 - protein, 9 aa, Artificial Sequence
  Description of Artificial Sequence: Synthetic peptide
  Seed: RTLLAKSVF
RMLLAKSVI

SEQ ID NO: 170647 - protein, 9 aa, Artificial Sequence
  Description of Artificial Sequence: Synthetic peptide
  Seed: RTLLAKSVF
RMLLAKSVK

SEQ ID NO: 170648 - protein, 9 aa, Artificial Sequence
  Description of Artificial Sequence: Synthetic peptide
  Seed: RTLLAKSVF
RMLLAKSVL

SEQ ID NO: 170649 - protein, 9 aa, Artificial Sequence
  Description of Artificial Sequence: Synthetic peptide
  Seed: RTLLAKSVF
RMLLAKSVM

SEQ ID NO: 170650 - protein, 9 aa, Artificial Sequence
  Description of Artificial Sequence: Synthetic peptide
  Seed: RTLLAKSVF
RMLLAKSVR

SEQ ID NO: 170651 - protein, 9 aa, Artificial Sequence
  Description of Artificial Sequence: Synthetic peptide
  Seed: RTLLAKSVF
RMLLAKSVS

SEQ ID NO: 170652 - protein, 9 aa, Artificial Sequence
  Description of Artificial Sequence: Synthetic peptide
  Seed: RTLLAKSVF
RMLLAKSVV

SEQ ID NO: 170653 - protein, 9 aa, Artificial Sequence
  Description of Artificial Sequence: Synthetic peptide
  Seed: RTLLAKSVF
RMLLAKSVW

SEQ ID NO: 170654 - protein, 9 aa, Artificial Sequence
  Description of Artificial Sequence: Synthetic peptide
  Seed: RTLLAKSVF
RMLLAKSVY

SEQ ID NO: 170655 - protein, 10 aa, Artificial Sequence
  Description of Artificial Sequence: Synthetic peptide
  Seed: RATEYIMKGV
RMTEYIMKGA

SEQ ID NO: 170656 - protein, 10 aa, Artificial Sequence
  Description of Artificial Sequence: Synthetic peptide
  Seed: RATEYIMKGV
RMTEYIMKGC

SEQ ID NO: 170657 - protein, 10 aa, Artificial Sequence
  Description of Artificial Sequence: Synthetic peptide
  Seed: RATEYIMKGV
RMTEYIMKGI

SEQ ID NO: 170658 - protein, 10 aa, Artificial Sequence
  Description of Artificial Sequence: Synthetic peptide
  Seed: RATEYIMKGV
RMTEYIMKGL

SEQ ID NO: 170659 - protein, 10 aa, Artificial Sequence
  Description of Artificial Sequence: Synthetic peptide
  Seed: RATEYIMKGV
RMTEYIMKGM

SEQ ID NO: 170660 - protein, 10 aa, Artificial Sequence
  Description of Artificial Sequence: Synthetic peptide
  Seed: RATEYIMKGV
RMTEYIMKGS

SEQ ID NO: 170661 - protein, 10 aa, Artificial Sequence
  Description of Artificial Sequence: Synthetic peptide
  Seed: RATEYIMKGV
RMTEYIMKGT

SEQ ID NO: 170662 - protein, 10 aa, Artificial Sequence
  Description of Artificial Sequence: Synthetic peptide
  Seed: RATEYIMKGV
RMTEYIMKGV

SEQ ID NO: 170663 - protein, 9 aa, Artificial Sequence
  Description of Artificial Sequence: Synthetic peptide
  Seed: RTLLAKSVF
RNLLAKSVF

SEQ ID NO: 170664 - protein, 9 aa, Artificial Sequence
  Description of Artificial Sequence: Synthetic peptide
  Seed: RTLLAKSVF
RNLLAKSVK

SEQ ID NO: 170665 - protein, 9 aa, Artificial Sequence
  Description of Artificial Sequence: Synthetic peptide
  Seed: RTLLAKSVF
RNLLAKSVM

SEQ ID NO: 170666 - protein, 9 aa, Artificial Sequence
  Description of Artificial Sequence: Synthetic peptide
  Seed: RTLLAKSVF
RNLLAKSVW

SEQ ID NO: 170667 - protein, 9 aa, Artificial Sequence
  Description of Artificial Sequence: Synthetic peptide
  Seed: RTLLAKSVF
RNLLAKSVY

SEQ ID NO: 170668 - protein, 9 aa, Artificial Sequence
  Description of Artificial Sequence: Synthetic peptide
  Seed: RTLLAKSVF
RPLLAKSVF

SEQ ID NO: 170669 - protein, 9 aa, Artificial Sequence
  Description of Artificial Sequence: Synthetic peptide
  Seed: RTLLAKSVF
RPLLAKSVY

SEQ ID NO: 170670 - protein, 10 aa, Artificial Sequence
  Description of Artificial Sequence: Synthetic peptide
  Seed: RSHLRNDTDV
RQHLRNDTDK

SEQ ID NO: 170671 - protein, 9 aa, Artificial Sequence
  Description of Artificial Sequence: Synthetic peptide
  Seed: RTLLAKSVF
RQLLAKSVA

SEQ ID NO: 170672 - protein, 9 aa, Artificial Sequence
  Description of Artificial Sequence: Synthetic peptide
  Seed: RTLLAKSVF
RQLLAKSVC

SEQ ID NO: 170673 - protein, 9 aa, Artificial Sequence
  Description of Artificial Sequence: Synthetic peptide
  Seed: RTLLAKSVF
RQLLAKSVF

SEQ ID NO: 170674 - protein, 9 aa, Artificial Sequence
  Description of Artificial Sequence: Synthetic peptide
  Seed: RTLLAKSVF
RQLLAKSVG

SEQ ID NO: 170675 - protein, 9 aa, Artificial Sequence
  Description of Artificial Sequence: Synthetic peptide
  Seed: RTLLAKSVF
RQLLAKSVH

SEQ ID NO: 170676 - protein, 9 aa, Artificial Sequence
  Description of Artificial Sequence: Synthetic peptide
  Seed: RTLLAKSVF
RQLLAKSVI

SEQ ID NO: 170677 - protein, 9 aa, Artificial Sequence
  Description of Artificial Sequence: Synthetic peptide
  Seed: RTLLAKSVF
RQLLAKSVK

SEQ ID NO: 170678 - protein, 9 aa, Artificial Sequence
  Description of Artificial Sequence: Synthetic peptide
  Seed: RTLLAKSVF
RQLLAKSVL

SEQ ID NO: 170679 - protein, 9 aa, Artificial Sequence
  Description of Artificial Sequence: Synthetic peptide
  Seed: RTLLAKSVF
RQLLAKSVM

SEQ ID NO: 170680 - protein, 9 aa, Artificial Sequence
  Description of Artificial Sequence: Synthetic peptide
  Seed: RTLLAKSVF
RQLLAKSVS

SEQ ID NO: 170681 - protein, 9 aa, Artificial Sequence
  Description of Artificial Sequence: Synthetic peptide
  Seed: RTLLAKSVF
RQLLAKSVT

SEQ ID NO: 170682 - protein, 9 aa, Artificial Sequence
  Description of Artificial Sequence: Synthetic peptide
  Seed: RTLLAKSVF
RQLLAKSVV

SEQ ID NO: 170683 - protein, 9 aa, Artificial Sequence
  Description of Artificial Sequence: Synthetic peptide
  Seed: RTLLAKSVF
RQLLAKSVW

SEQ ID NO: 170684 - protein, 9 aa, Artificial Sequence
  Description of Artificial Sequence: Synthetic peptide
  Seed: RTLLAKSVF
RQLLAKSVY

SEQ ID NO: 170685 - protein, 10 aa, Artificial Sequence
  Description of Artificial Sequence: Synthetic peptide
  Seed: RATEYIMKGV
RQTEYIMKGA

SEQ ID NO: 170686 - protein, 10 aa, Artificial Sequence
  Description of Artificial Sequence: Synthetic peptide
  Seed: RATEYIMKGV
RQTEYIMKGI

SEQ ID NO: 170687 - protein, 10 aa, Artificial Sequence
  Description of Artificial Sequence: Synthetic peptide
  Seed: RATEYIMKGV
RQTEYIMKGL

SEQ ID NO: 170688 - protein, 10 aa, Artificial Sequence
  Description of Artificial Sequence: Synthetic peptide
  Seed: RATEYIMKGV
RQTEYIMKGM

SEQ ID NO: 170689 - protein, 10 aa, Artificial Sequence
  Description of Artificial Sequence: Synthetic peptide
  Seed: RATEYIMKGV
RQTEYIMKGV

SEQ ID NO: 170690 - protein, 9 aa, Artificial Sequence
  Description of Artificial Sequence: Synthetic peptide
  Seed: RTLLAKSVF
RRLLAKSVF

SEQ ID NO: 170691 - protein, 9 aa, Artificial Sequence
  Description of Artificial Sequence: Synthetic peptide
  Seed: RTLLAKSVF
RRLLAKSVL

SEQ ID NO: 170692 - protein, 9 aa, Artificial Sequence
  Description of Artificial Sequence: Synthetic peptide
  Seed: RTLLAKSVF
RRLLAKSVM

SEQ ID NO: 170693 - protein, 9 aa, Artificial Sequence
  Description of Artificial Sequence: Synthetic peptide
  Seed: RTLLAKSVF
RRLLAKSVY

SEQ ID NO: 170694 - protein, 10 aa, Artificial Sequence
  Description of Artificial Sequence: Synthetic peptide
  Seed: RSHLRNDTDV
RSHLRNDTDA

SEQ ID NO: 170695 - protein, 10 aa, Artificial Sequence
  Description of Artificial Sequence: Synthetic peptide
  Seed: RSHLRNDTDV
RSHLRNDTDK

SEQ ID NO: 170696 - protein, 9 aa, Artificial Sequence
  Description of Artificial Sequence: Synthetic peptide
  Seed: RTLLAKSVF
RSLLAKSVA

SEQ ID NO: 170697 - protein, 9 aa, Artificial Sequence
  Description of Artificial Sequence: Synthetic peptide
  Seed: RTLLAKSVF
RSLLAKSVF

SEQ ID NO: 170698 - protein, 9 aa, Artificial Sequence
  Description of Artificial Sequence: Synthetic peptide
  Seed: RTLLAKSVF
RSLLAKSVG

SEQ ID NO: 170699 - protein, 9 aa, Artificial Sequence
  Description of Artificial Sequence: Synthetic peptide
  Seed: RTLLAKSVF
RSLLAKSVI

SEQ ID NO: 170700 - protein, 9 aa, Artificial Sequence
  Description of Artificial Sequence: Synthetic peptide
  Seed: RTLLAKSVF
RSLLAKSVL

SEQ ID NO: 170701 - protein, 9 aa, Artificial Sequence
  Description of Artificial Sequence: Synthetic peptide
  Seed: RTLLAKSVF
RSLLAKSVM

SEQ ID NO: 170702 - protein, 9 aa, Artificial Sequence
  Description of Artificial Sequence: Synthetic peptide
  Seed: RTLLAKSVF
RSLLAKSVR

SEQ ID NO: 170703 - protein, 9 aa, Artificial Sequence
  Description of Artificial Sequence: Synthetic peptide
  Seed: RTLLAKSVF
RSLLAKSVS

SEQ ID NO: 170704 - protein, 9 aa, Artificial Sequence
  Description of Artificial Sequence: Synthetic peptide
  Seed: RTLLAKSVF
RSLLAKSVT

SEQ ID NO: 170705 - protein, 9 aa, Artificial Sequence
  Description of Artificial Sequence: Synthetic peptide
  Seed: RTLLAKSVF
RSLLAKSVV

SEQ ID NO: 170706 - protein, 9 aa, Artificial Sequence
  Description of Artificial Sequence: Synthetic peptide
  Seed: RTLLAKSVF
RSLLAKSVY

SEQ ID NO: 170707 - protein, 10 aa, Artificial Sequence
  Description of Artificial Sequence: Synthetic peptide
  Seed: RATEYIMKGV
RSTEYIMKGI

SEQ ID NO: 170708 - protein, 10 aa, Artificial Sequence
  Description of Artificial Sequence: Synthetic peptide
  Seed: RATEYIMKGV
RSTEYIMKGL

SEQ ID NO: 170709 - protein, 10 aa, Artificial Sequence
  Description of Artificial Sequence: Synthetic peptide
  Seed: RATEYIMKGV
RSTEYIMKGM

SEQ ID NO: 170710 - protein, 10 aa, Artificial Sequence
  Description of Artificial Sequence: Synthetic peptide
  Seed: RATEYIMKGV
RSTEYIMKGV

SEQ ID NO: 170711 - protein, 10 aa, Artificial Sequence
  Description of Artificial Sequence: Synthetic peptide
  Seed: RSHLRNDTDV
RTHLRNDTDA

SEQ ID NO: 170712 - protein, 10 aa, Artificial Sequence
  Description of Artificial Sequence: Synthetic peptide
  Seed: RSHLRNDTDV
RTHLRNDTDI

SEQ ID NO: 170713 - protein, 10 aa, Artificial Sequence
  Description of Artificial Sequence: Synthetic peptide
  Seed: RSHLRNDTDV
RTHLRNDTDK

SEQ ID NO: 170714 - protein, 10 aa, Artificial Sequence
  Description of Artificial Sequence: Synthetic peptide
  Seed: RSHLRNDTDV
RTHLRNDTDM

SEQ ID NO: 170715 - protein, 10 aa, Artificial Sequence
  Description of Artificial Sequence: Synthetic peptide
  Seed: RSHLRNDTDV
RTHLRNDTDV

SEQ ID NO: 170716 - protein, 9 aa, Artificial Sequence
  Description of Artificial Sequence: Synthetic peptide
  Seed: RTLLAKSVF
RTLLAKSVA

SEQ ID NO: 170717 - protein, 9 aa, Artificial Sequence
  Description of Artificial Sequence: Synthetic peptide
  Seed: RTLLAKSVF
RTLLAKSVC

SEQ ID NO: 170718 - protein, 9 aa, Artificial Sequence
  Description of Artificial Sequence: Synthetic peptide
  Seed: RTLLAKSVF
RTLLAKSVG

SEQ ID NO: 170719 - protein, 9 aa, Artificial Sequence
  Description of Artificial Sequence: Synthetic peptide
  Seed: RTLLAKSVF
RTLLAKSVH

SEQ ID NO: 170720 - protein, 9 aa, Artificial Sequence
  Description of Artificial Sequence: Synthetic peptide
  Seed: RTLLAKSVF
RTLLAKSVI

SEQ ID NO: 170721 - protein, 9 aa, Artificial Sequence
  Description of Artificial Sequence: Synthetic peptide
  Seed: RTLLAKSVF
RTLLAKSVK

SEQ ID NO: 170722 - protein, 9 aa, Artificial Sequence
  Description of Artificial Sequence: Synthetic peptide
  Seed: RTLLAKSVF
RTLLAKSVL

SEQ ID NO: 170723 - protein, 9 aa, Artificial Sequence
  Description of Artificial Sequence: Synthetic peptide
  Seed: RTLLAKSVF
RTLLAKSVM

SEQ ID NO: 170724 - protein, 9 aa, Artificial Sequence
  Description of Artificial Sequence: Synthetic peptide
  Seed: RTLLAKSVF
RTLLAKSVP

SEQ ID NO: 170725 - protein, 9 aa, Artificial Sequence
  Description of Artificial Sequence: Synthetic peptide
  Seed: RTLLAKSVF
RTLLAKSVR

SEQ ID NO: 170726 - protein, 9 aa, Artificial Sequence
  Description of Artificial Sequence: Synthetic peptide
  Seed: RTLLAKSVF
RTLLAKSVS

SEQ ID NO: 170727 - protein, 9 aa, Artificial Sequence
  Description of Artificial Sequence: Synthetic peptide
  Seed: RTLLAKSVF
RTLLAKSVT

SEQ ID NO: 170728 - protein, 9 aa, Artificial Sequence
  Description of Artificial Sequence: Synthetic peptide
  Seed: RTLLAKSVF
RTLLAKSVV

SEQ ID NO: 170729 - protein, 9 aa, Artificial Sequence
  Description of Artificial Sequence: Synthetic peptide
  Seed: RTLLAKSVF
RTLLAKSVY

SEQ ID NO: 170730 - protein, 10 aa, Artificial Sequence
  Description of Artificial Sequence: Synthetic peptide
  Seed: RATEYIMKGV
RTTEYIMKGI

SEQ ID NO: 170731 - protein, 10 aa, Artificial Sequence
  Description of Artificial Sequence: Synthetic peptide
  Seed: RATEYIMKGV
RTTEYIMKGL

SEQ ID NO: 170732 - protein, 10 aa, Artificial Sequence
  Description of Artificial Sequence: Synthetic peptide
  Seed: RATEYIMKGV
RTTEYIMKGV

SEQ ID NO: 170733 - protein, 10 aa, Artificial Sequence
  Description of Artificial Sequence: Synthetic peptide
  Seed: RSHLRNDTDV
RVHLRNDTDA

SEQ ID NO: 170734 - protein, 10 aa, Artificial Sequence
  Description of Artificial Sequence: Synthetic peptide
  Seed: RSHLRNDTDV
RVHLRNDTDK

SEQ ID NO: 170735 - protein, 10 aa, Artificial Sequence
  Description of Artificial Sequence: Synthetic peptide
  Seed: RSHLRNDTDV
RVHLRNDTDV

SEQ ID NO: 170736 - protein, 9 aa, Artificial Sequence
  Description of Artificial Sequence: Synthetic peptide
  Seed: RTLLAKSVF
RVLLAKSVA

SEQ ID NO: 170737 - protein, 9 aa, Artificial Sequence
  Description of Artificial Sequence: Synthetic peptide
  Seed: RTLLAKSVF
RVLLAKSVF

SEQ ID NO: 170738 - protein, 9 aa, Artificial Sequence
  Description of Artificial Sequence: Synthetic peptide
  Seed: RTLLAKSVF
RVLLAKSVG

SEQ ID NO: 170739 - protein, 9 aa, Artificial Sequence
  Description of Artificial Sequence: Synthetic peptide
  Seed: RTLLAKSVF
RVLLAKSVI

SEQ ID NO: 170740 - protein, 9 aa, Artificial Sequence
  Description of Artificial Sequence: Synthetic peptide
  Seed: RTLLAKSVF
RVLLAKSVK

SEQ ID NO: 170741 - protein, 9 aa, Artificial Sequence
  Description of Artificial Sequence: Synthetic peptide
  Seed: RTLLAKSVF
RVLLAKSVL

SEQ ID NO: 170742 - protein, 9 aa, Artificial Sequence
  Description of Artificial Sequence: Synthetic peptide
  Seed: RTLLAKSVF
RVLLAKSVM

SEQ ID NO: 170743 - protein, 9 aa, Artificial Sequence
  Description of Artificial Sequence: Synthetic peptide
  Seed: RTLLAKSVF
RVLLAKSVR

SEQ ID NO: 170744 - protein, 9 aa, Artificial Sequence
  Description of Artificial Sequence: Synthetic peptide
  Seed: RTLLAKSVF
RVLLAKSVS

SEQ ID NO: 170745 - protein, 9 aa, Artificial Sequence
  Description of Artificial Sequence: Synthetic peptide
  Seed: RTLLAKSVF
RVLLAKSVV

SEQ ID NO: 170746 - protein, 9 aa, Artificial Sequence
  Description of Artificial Sequence: Synthetic peptide
  Seed: RTLLAKSVF
RVLLAKSVY

SEQ ID NO: 170747 - protein, 10 aa, Artificial Sequence
  Description of Artificial Sequence: Synthetic peptide
  Seed: RATEYIMKGV
RVTEYIMKGA

SEQ ID NO: 170748 - protein, 10 aa, Artificial Sequence
  Description of Artificial Sequence: Synthetic peptide
  Seed: RATEYIMKGV
RVTEYIMKGI

SEQ ID NO: 170749 - protein, 10 aa, Artificial Sequence
  Description of Artificial Sequence: Synthetic peptide
  Seed: RATEYIMKGV
RVTEYIMKGL

SEQ ID NO: 170750 - protein, 10 aa, Artificial Sequence
  Description of Artificial Sequence: Synthetic peptide
  Seed: RATEYIMKGV
RVTEYIMKGV

SEQ ID NO: 170751 - protein, 9 aa, Artificial Sequence
  Description of Artificial Sequence: Synthetic peptide
  Seed: RTLLAKSVF
RWLLAKSVA

SEQ ID NO: 170752 - protein, 9 aa, Artificial Sequence
  Description of Artificial Sequence: Synthetic peptide
  Seed: RTLLAKSVF
RWLLAKSVF

SEQ ID NO: 170753 - protein, 9 aa, Artificial Sequence
  Description of Artificial Sequence: Synthetic peptide
  Seed: RTLLAKSVF
RWLLAKSVK

SEQ ID NO: 170754 - protein, 9 aa, Artificial Sequence
  Description of Artificial Sequence: Synthetic peptide
  Seed: RTLLAKSVF
RWLLAKSVV

SEQ ID NO: 170755 - protein, 9 aa, Artificial Sequence
  Description of Artificial Sequence: Synthetic peptide
  Seed: RTLLAKSVF
RWLLAKSVY

SEQ ID NO: 170756 - protein, 10 aa, Artificial Sequence
  Description of Artificial Sequence: Synthetic peptide
  Seed: RSHLRNDTDV
RYHLRNDTDK

SEQ ID NO: 170757 - protein, 9 aa, Artificial Sequence
  Description of Artificial Sequence: Synthetic peptide
  Seed: RTLLAKSVF
RYLLAKSVA

SEQ ID NO: 170758 - protein, 9 aa, Artificial Sequence
  Description of Artificial Sequence: Synthetic peptide
  Seed: RTLLAKSVF
RYLLAKSVF

SEQ ID NO: 170759 - protein, 9 aa, Artificial Sequence
  Description of Artificial Sequence: Synthetic peptide
  Seed: RTLLAKSVF
RYLLAKSVI

SEQ ID NO: 170760 - protein, 9 aa, Artificial Sequence
  Description of Artificial Sequence: Synthetic peptide
  Seed: RTLLAKSVF
RYLLAKSVM

SEQ ID NO: 170761 - protein, 9 aa, Artificial Sequence
  Description of Artificial Sequence: Synthetic peptide
  Seed: RTLLAKSVF
RYLLAKSVS

SEQ ID NO: 170762 - protein, 9 aa, Artificial Sequence
  Description of Artificial Sequence: Synthetic peptide
  Seed: RTLLAKSVF
RYLLAKSVV

SEQ ID NO: 170763 - protein, 9 aa, Artificial Sequence
  Description of Artificial Sequence: Synthetic peptide
  Seed: RTLLAKSVF
RYLLAKSVY

SEQ ID NO: 170764 - protein, 9 aa, Artificial Sequence
  Description of Artificial Sequence: Synthetic peptide
  Seed: SKIKMKWGM
SAIKMKWGF

SEQ ID NO: 170765 - protein, 9 aa, Artificial Sequence
  Description of Artificial Sequence: Synthetic peptide
  Seed: SKIKMKWGM
SAIKMKWGY

SEQ ID NO: 170766 - protein, 10 aa, Artificial Sequence
  Description of Artificial Sequence: Synthetic peptide
  Seed: SHLRNDTDVV
SALRNDTDVV

SEQ ID NO: 170767 - protein, 10 aa, Artificial Sequence
  Description of Artificial Sequence: Synthetic peptide
  Seed: SHLRNDTDVV
SCLRNDTDVV

SEQ ID NO: 170768 - protein, 10 aa, Artificial Sequence
  Description of Artificial Sequence: Synthetic peptide
  Seed: SHLRNDTDVV
SDLRNDTDVV

SEQ ID NO: 170769 - protein, 9 aa, Artificial Sequence
  Description of Artificial Sequence: Synthetic peptide
  Seed: SKIKMKWGM
SEIKMKWGF

SEQ ID NO: 170770 - protein, 9 aa, Artificial Sequence
  Description of Artificial Sequence: Synthetic peptide
  Seed: SKIKMKWGM
SEIKMKWGY

SEQ ID NO: 170771 - protein, 10 aa, Artificial Sequence
  Description of Artificial Sequence: Synthetic peptide
  Seed: SHLRNDTDVV
SELRNDTDVV

SEQ ID NO: 170772 - protein, 10 aa, Artificial Sequence
  Description of Artificial Sequence: Synthetic peptide
  Seed: SHLRNDTDVV
SFLRNDTDVI

SEQ ID NO: 170773 - protein, 10 aa, Artificial Sequence
  Description of Artificial Sequence: Synthetic peptide
  Seed: SHLRNDTDVV
SFLRNDTDVL

SEQ ID NO: 170774 - protein, 10 aa, Artificial Sequence
  Description of Artificial Sequence: Synthetic peptide
  Seed: SHLRNDTDVV
SFLRNDTDVV

SEQ ID NO: 170775 - protein, 10 aa, Artificial Sequence
  Description of Artificial Sequence: Synthetic peptide
  Seed: SHLRNDTDVV
SGLRNDTDVV

SEQ ID NO: 170776 - protein, 9 aa, Artificial Sequence
  Description of Artificial Sequence: Synthetic peptide
  Seed: SKIKMKWGM
SHIKMKWGF

SEQ ID NO: 170777 - protein, 9 aa, Artificial Sequence
  Description of Artificial Sequence: Synthetic peptide
  Seed: SKIKMKWGM
SHIKMKWGL

SEQ ID NO: 170778 - protein, 9 aa, Artificial Sequence
  Description of Artificial Sequence: Synthetic peptide
  Seed: SKIKMKWGM
SHIKMKWGY

SEQ ID NO: 170779 - protein, 10 aa, Artificial Sequence
  Description of Artificial Sequence: Synthetic peptide
  Seed: SHLRNDTDVV
SILRNDTDVV

SEQ ID NO: 170780 - protein, 9 aa, Artificial Sequence
  Description of Artificial Sequence: Synthetic peptide
  Seed: SKIKMKWGM
SKIKMKWGF

SEQ ID NO: 170781 - protein, 9 aa, Artificial Sequence
  Description of Artificial Sequence: Synthetic peptide
  Seed: SKIKMKWGM
SKIKMKWGI

SEQ ID NO: 170782 - protein, 9 aa, Artificial Sequence
  Description of Artificial Sequence: Synthetic peptide
  Seed: SKIKMKWGM
SKIKMKWGL

SEQ ID NO: 170783 - protein, 9 aa, Artificial Sequence
  Description of Artificial Sequence: Synthetic peptide
  Seed: SKIKMKWGM
SKIKMKWGV

SEQ ID NO: 170784 - protein, 9 aa, Artificial Sequence
  Description of Artificial Sequence: Synthetic peptide
  Seed: SKIKMKWGM
SKIKMKWGY

SEQ ID NO: 170785 - protein, 10 aa, Artificial Sequence
  Description of Artificial Sequence: Synthetic peptide
  Seed: SHLRNDTDVV
SKLRNDTDVV

SEQ ID NO: 170786 - protein, 9 aa, Artificial Sequence
  Description of Artificial Sequence: Synthetic peptide
  Seed: SKIKMKWGM
SLIKMKWGF

SEQ ID NO: 170787 - protein, 9 aa, Artificial Sequence
  Description of Artificial Sequence: Synthetic peptide
  Seed: SKIKMKWGM
SLIKMKWGY

SEQ ID NO: 170788 - protein, 10 aa, Artificial Sequence
  Description of Artificial Sequence: Synthetic peptide
  Seed: SHLRNDTDVV
SLLRNDTDVV

SEQ ID NO: 170789 - protein, 9 aa, Artificial Sequence
  Description of Artificial Sequence: Synthetic peptide
  Seed: SKIKMKWGM
SMIKMKWGF

SEQ ID NO: 170790 - protein, 9 aa, Artificial Sequence
  Description of Artificial Sequence: Synthetic peptide
  Seed: SKIKMKWGM
SMIKMKWGL

SEQ ID NO: 170791 - protein, 9 aa, Artificial Sequence
  Description of Artificial Sequence: Synthetic peptide
  Seed: SKIKMKWGM
SMIKMKWGM

SEQ ID NO: 170792 - protein, 9 aa, Artificial Sequence
  Description of Artificial Sequence: Synthetic peptide
  Seed: SKIKMKWGM
SMIKMKWGY

SEQ ID NO: 170793 - protein, 10 aa, Artificial Sequence
  Description of Artificial Sequence: Synthetic peptide
  Seed: SHLRNDTDVV
SMLRNDTDVV

SEQ ID NO: 170794 - protein, 10 aa, Artificial Sequence
  Description of Artificial Sequence: Synthetic peptide
  Seed: SHLRNDTDVV
SNLRNDTDVV

SEQ ID NO: 170795 - protein, 10 aa, Artificial Sequence
  Description of Artificial Sequence: Synthetic peptide
  Seed: SHLRNDTDVV
SPLRNDTDVV

SEQ ID NO: 170796 - protein, 9 aa, Artificial Sequence
  Description of Artificial Sequence: Synthetic peptide
  Seed: SKIKMKWGM
SQIKMKWGF

SEQ ID NO: 170797 - protein, 9 aa, Artificial Sequence
  Description of Artificial Sequence: Synthetic peptide
  Seed: SKIKMKWGM
SQIKMKWGI

SEQ ID NO: 170798 - protein, 9 aa, Artificial Sequence
  Description of Artificial Sequence: Synthetic peptide
  Seed: SKIKMKWGM
SQIKMKWGL

SEQ ID NO: 170799 - protein, 9 aa, Artificial Sequence
  Description of Artificial Sequence: Synthetic peptide
  Seed: SKIKMKWGM
SQIKMKWGM

SEQ ID NO: 170800 - protein, 9 aa, Artificial Sequence
  Description of Artificial Sequence: Synthetic peptide
  Seed: SKIKMKWGM
SQIKMKWGV

SEQ ID NO: 170801 - protein, 9 aa, Artificial Sequence
  Description of Artificial Sequence: Synthetic peptide
  Seed: SKIKMKWGM
SQIKMKWGY

SEQ ID NO: 170802 - protein, 10 aa, Artificial Sequence
  Description of Artificial Sequence: Synthetic peptide
  Seed: SHLRNDTDVV
SQLRNDTDVV

SEQ ID NO: 170803 - protein, 9 aa, Artificial Sequence
  Description of Artificial Sequence: Synthetic peptide
  Seed: SKIKMKWGM
SRIKMKWGA

SEQ ID NO: 170804 - protein, 9 aa, Artificial Sequence
  Description of Artificial Sequence: Synthetic peptide
  Seed: SKIKMKWGM
SRIKMKWGC

SEQ ID NO: 170805 - protein, 9 aa, Artificial Sequence
  Description of Artificial Sequence: Synthetic peptide
  Seed: SKIKMKWGM
SRIKMKWGF

SEQ ID NO: 170806 - protein, 9 aa, Artificial Sequence
  Description of Artificial Sequence: Synthetic peptide
  Seed: SKIKMKWGM
SRIKMKWGG

SEQ ID NO: 170807 - protein, 9 aa, Artificial Sequence
  Description of Artificial Sequence: Synthetic peptide
  Seed: SKIKMKWGM
SRIKMKWGI

SEQ ID NO: 170808 - protein, 9 aa, Artificial Sequence
  Description of Artificial Sequence: Synthetic peptide
  Seed: SKIKMKWGM
SRIKMKWGL

SEQ ID NO: 170809 - protein, 9 aa, Artificial Sequence
  Description of Artificial Sequence: Synthetic peptide
  Seed: SKIKMKWGM
SRIKMKWGM

SEQ ID NO: 170810 - protein, 9 aa, Artificial Sequence
  Description of Artificial Sequence: Synthetic peptide
  Seed: SKIKMKWGM
SRIKMKWGP

SEQ ID NO: 170811 - protein, 9 aa, Artificial Sequence
  Description of Artificial Sequence: Synthetic peptide
  Seed: SKIKMKWGM
SRIKMKWGS

SEQ ID NO: 170812 - protein, 9 aa, Artificial Sequence
  Description of Artificial Sequence: Synthetic peptide
  Seed: SKIKMKWGM
SRIKMKWGT

SEQ ID NO: 170813 - protein, 9 aa, Artificial Sequence
  Description of Artificial Sequence: Synthetic peptide
  Seed: SKIKMKWGM
SRIKMKWGV

SEQ ID NO: 170814 - protein, 9 aa, Artificial Sequence
  Description of Artificial Sequence: Synthetic peptide
  Seed: SKIKMKWGM
SRIKMKWGW

SEQ ID NO: 170815 - protein, 9 aa, Artificial Sequence
  Description of Artificial Sequence: Synthetic peptide
  Seed: SKIKMKWGM
SRIKMKWGY

SEQ ID NO: 170816 - protein, 10 aa, Artificial Sequence
  Description of Artificial Sequence: Synthetic peptide
  Seed: SHLRNDTDVV
SRLRNDTDVV

SEQ ID NO: 170817 - protein, 9 aa, Artificial Sequence
  Description of Artificial Sequence: Synthetic peptide
  Seed: SKIKMKWGM
SSIKMKWGF

SEQ ID NO: 170818 - protein, 9 aa, Artificial Sequence
  Description of Artificial Sequence: Synthetic peptide
  Seed: SKIKMKWGM
SSIKMKWGY

SEQ ID NO: 170819 - protein, 10 aa, Artificial Sequence
  Description of Artificial Sequence: Synthetic peptide
  Seed: SHLRNDTDVV
SSLRNDTDVV

SEQ ID NO: 170820 - protein, 10 aa, Artificial Sequence
  Description of Artificial Sequence: Synthetic peptide
  Seed: SHLRNDTDVV
STLRNDTDVV

SEQ ID NO: 170821 - protein, 10 aa, Artificial Sequence
  Description of Artificial Sequence: Synthetic peptide
  Seed: SHLRNDTDVV
SVLRNDTDVV

SEQ ID NO: 170822 - protein, 10 aa, Artificial Sequence
  Description of Artificial Sequence: Synthetic peptide
  Seed: SHLRNDTDVV
SWLRNDTDVV

SEQ ID NO: 170823 - protein, 10 aa, Artificial Sequence
  Description of Artificial Sequence: Synthetic peptide
  Seed: SHLRNDTDVV
SYLRNDTDVV

SEQ ID NO: 170824 - protein, 11 aa, Artificial Sequence
  Description of Artificial Sequence: Synthetic peptide
  Seed: TNGTSKIKMKW
TAGTSKIKMKW

SEQ ID NO: 170825 - protein, 8 aa, Artificial Sequence
  Description of Artificial Sequence: Synthetic peptide
  Seed: THIHIFSF
TAIHIFSF

SEQ ID NO: 170826 - protein, 8 aa, Artificial Sequence
  Description of Artificial Sequence: Synthetic peptide
  Seed: THIHIFSF
TAIHIFSY

SEQ ID NO: 170827 - protein, 8 aa, Artificial Sequence
  Description of Artificial Sequence: Synthetic peptide
  Seed: TSKIKMKW
TAKIKMKW

SEQ ID NO: 170828 - protein, 11 aa, Artificial Sequence
  Description of Artificial Sequence: Synthetic peptide
  Seed: TNGTSKIKMKW
TCGTSKIKMKW

SEQ ID NO: 170829 - protein, 11 aa, Artificial Sequence
  Description of Artificial Sequence: Synthetic peptide
  Seed: TNGTSKIKMKW
TDGTSKIKMKW

SEQ ID NO: 170830 - protein, 11 aa, Artificial Sequence
  Description of Artificial Sequence: Synthetic peptide
  Seed: TNGTSKIKMKW
TEGTSKIKMKW

SEQ ID NO: 170831 - protein, 11 aa, Artificial Sequence
  Description of Artificial Sequence: Synthetic peptide
  Seed: TNGTSKIKMKW
TFGTSKIKMKW

SEQ ID NO: 170832 - protein, 8 aa, Artificial Sequence
  Description of Artificial Sequence: Synthetic peptide
  Seed: TSKIKMKW
TFKIKMKW

SEQ ID NO: 170833 - protein, 11 aa, Artificial Sequence
  Description of Artificial Sequence: Synthetic peptide
  Seed: TNGTSKIKMKW
TGGTSKIKMKW

SEQ ID NO: 170834 - protein, 11 aa, Artificial Sequence
  Description of Artificial Sequence: Synthetic peptide
  Seed: TNGTSKIKMKW
THGTSKIKMKW

SEQ ID NO: 170835 - protein, 8 aa, Artificial Sequence
  Description of Artificial Sequence: Synthetic peptide
  Seed: THIHIFSF
THIHIFSM

SEQ ID NO: 170836 - protein, 8 aa, Artificial Sequence
  Description of Artificial Sequence: Synthetic peptide
  Seed: THIHIFSF
THIHIFSY

SEQ ID NO: 170837 - protein, 11 aa, Artificial Sequence
  Description of Artificial Sequence: Synthetic peptide
  Seed: TNGTSKIKMKW
TIGTSKIKMKW

SEQ ID NO: 170838 - protein, 8 aa, Artificial Sequence
  Description of Artificial Sequence: Synthetic peptide
  Seed: TSKIKMKW
TIKIKMKW

SEQ ID NO: 170839 - protein, 11 aa, Artificial Sequence
  Description of Artificial Sequence: Synthetic peptide
  Seed: TNGTSKIKMKW
TKGTSKIKMKW

SEQ ID NO: 170840 - protein, 8 aa, Artificial Sequence
  Description of Artificial Sequence: Synthetic peptide
  Seed: THIHIFSF
TKIHIFSF

SEQ ID NO: 170841 - protein, 8 aa, Artificial Sequence
  Description of Artificial Sequence: Synthetic peptide
  Seed: THIHIFSF
TKIHIFSM

SEQ ID NO: 170842 - protein, 8 aa, Artificial Sequence
  Description of Artificial Sequence: Synthetic peptide
  Seed: THIHIFSF
TKIHIFSY

SEQ ID NO: 170843 - protein, 11 aa, Artificial Sequence
  Description of Artificial Sequence: Synthetic peptide
  Seed: TNGTSKIKMKW
TLGTSKIKMKW

SEQ ID NO: 170844 - protein, 8 aa, Artificial Sequence
  Description of Artificial Sequence: Synthetic peptide
  Seed: THIHIFSF
TLIHIFSF

SEQ ID NO: 170845 - protein, 8 aa, Artificial Sequence
  Description of Artificial Sequence: Synthetic peptide
  Seed: THIHIFSF
TLIHIFSY

SEQ ID NO: 170846 - protein, 8 aa, Artificial Sequence
  Description of Artificial Sequence: Synthetic peptide
  Seed: TSKIKMKW
TLKIKMKW

SEQ ID NO: 170847 - protein, 11 aa, Artificial Sequence
  Description of Artificial Sequence: Synthetic peptide
  Seed: TNGTSKIKMKW
TMGTSKIKMKW

SEQ ID NO: 170848 - protein, 8 aa, Artificial Sequence
  Description of Artificial Sequence: Synthetic peptide
  Seed: THIHIFSF
TMIHIFSF

SEQ ID NO: 170849 - protein, 8 aa, Artificial Sequence
  Description of Artificial Sequence: Synthetic peptide
  Seed: THIHIFSF
TMIHIFSM

SEQ ID NO: 170850 - protein, 8 aa, Artificial Sequence
  Description of Artificial Sequence: Synthetic peptide
  Seed: THIHIFSF
TMIHIFSY

SEQ ID NO: 170851 - protein, 8 aa, Artificial Sequence
  Description of Artificial Sequence: Synthetic peptide
  Seed: TSKIKMKW
TMKIKMKW

SEQ ID NO: 170852 - protein, 11 aa, Artificial Sequence
  Description of Artificial Sequence: Synthetic peptide
  Seed: TNGTSKIKMKW
TPGTSKIKMKW

SEQ ID NO: 170853 - protein, 11 aa, Artificial Sequence
  Description of Artificial Sequence: Synthetic peptide
  Seed: TNGTSKIKMKW
TQGTSKIKMKW

SEQ ID NO: 170854 - protein, 8 aa, Artificial Sequence
  Description of Artificial Sequence: Synthetic peptide
  Seed: THIHIFSF
TQIHIFSF

SEQ ID NO: 170855 - protein, 8 aa, Artificial Sequence
  Description of Artificial Sequence: Synthetic peptide
  Seed: THIHIFSF
TQIHIFSI

SEQ ID NO: 170856 - protein, 8 aa, Artificial Sequence
  Description of Artificial Sequence: Synthetic peptide
  Seed: THIHIFSF
TQIHIFSL

SEQ ID NO: 170857 - protein, 8 aa, Artificial Sequence
  Description of Artificial Sequence: Synthetic peptide
  Seed: THIHIFSF
TQIHIFSM

SEQ ID NO: 170858 - protein, 8 aa, Artificial Sequence
  Description of Artificial Sequence: Synthetic peptide
  Seed: THIHIFSF
TQIHIFSY

SEQ ID NO: 170859 - protein, 11 aa, Artificial Sequence
  Description of Artificial Sequence: Synthetic peptide
  Seed: TNGTSKIKMKW
TRGTSKIKMKW

SEQ ID NO: 170860 - protein, 8 aa, Artificial Sequence
  Description of Artificial Sequence: Synthetic peptide
  Seed: THIHIFSF
TRIHIFSY

SEQ ID NO: 170861 - protein, 11 aa, Artificial Sequence
  Description of Artificial Sequence: Synthetic peptide
  Seed: TNGTSKIKMKW
TSGTSKIKMKW

SEQ ID NO: 170862 - protein, 8 aa, Artificial Sequence
  Description of Artificial Sequence: Synthetic peptide
  Seed: THIHIFSF
TSIHIFSF

SEQ ID NO: 170863 - protein, 8 aa, Artificial Sequence
  Description of Artificial Sequence: Synthetic peptide
  Seed: THIHIFSF
TSIHIFSY

SEQ ID NO: 170864 - protein, 11 aa, Artificial Sequence
  Description of Artificial Sequence: Synthetic peptide
  Seed: TNGTSKIKMKW
TTGTSKIKMKW

SEQ ID NO: 170865 - protein, 8 aa, Artificial Sequence
  Description of Artificial Sequence: Synthetic peptide
  Seed: TSKIKMKW
TTKIKMKW

SEQ ID NO: 170866 - protein, 11 aa, Artificial Sequence
  Description of Artificial Sequence: Synthetic peptide
  Seed: TNGTSKIKMKW
TVGTSKIKMKW

SEQ ID NO: 170867 - protein, 8 aa, Artificial Sequence
  Description of Artificial Sequence: Synthetic peptide
  Seed: TSKIKMKW
TVKIKMKW

SEQ ID NO: 170868 - protein, 11 aa, Artificial Sequence
  Description of Artificial Sequence: Synthetic peptide
  Seed: TNGTSKIKMKW
TWGTSKIKMKW

SEQ ID NO: 170869 - protein, 8 aa, Artificial Sequence
  Description of Artificial Sequence: Synthetic peptide
  Seed: TSKIKMKW
TWKIKMKW

SEQ ID NO: 170870 - protein, 11 aa, Artificial Sequence
  Description of Artificial Sequence: Synthetic peptide
  Seed: TNGTSKIKMKW
TYGTSKIKMKW

SEQ ID NO: 170871 - protein, 8 aa, Artificial Sequence
  Description of Artificial Sequence: Synthetic peptide
  Seed: TSKIKMKW
TYKIKMKW

SEQ ID NO: 170872 - protein, 10 aa, Artificial Sequence
  Description of Artificial Sequence: Synthetic peptide
  Seed: VLLNASWFNS
VALNASWFNA

SEQ ID NO: 170873 - protein, 10 aa, Artificial Sequence
  Description of Artificial Sequence: Synthetic peptide
  Seed: VLLNASWFNS
VALNASWFNI

SEQ ID NO: 170874 - protein, 10 aa, Artificial Sequence
  Description of Artificial Sequence: Synthetic peptide
  Seed: VLLNASWFNS
VALNASWFNL

SEQ ID NO: 170875 - protein, 10 aa, Artificial Sequence
  Description of Artificial Sequence: Synthetic peptide
  Seed: VLLNASWFNS
VALNASWFNM

SEQ ID NO: 170876 - protein, 11 aa, Artificial Sequence
  Description of Artificial Sequence: Synthetic peptide
  Seed: VLLNASWFNSF
VALNASWFNSF

SEQ ID NO: 170877 - protein, 11 aa, Artificial Sequence
  Description of Artificial Sequence: Synthetic peptide
  Seed: VLLNASWFNSF
VALNASWFNSY

SEQ ID NO: 170878 - protein, 10 aa, Artificial Sequence
  Description of Artificial Sequence: Synthetic peptide
  Seed: VLLNASWFNS
VALNASWFNV

SEQ ID NO: 170879 - protein, 11 aa, Artificial Sequence
  Description of Artificial Sequence: Synthetic peptide
  Seed: VCRTLLAKSVF
VARTLLAKSVF

SEQ ID NO: 170880 - protein, 11 aa, Artificial Sequence
  Description of Artificial Sequence: Synthetic peptide
  Seed: VCRTLLAKSVF
VARTLLAKSVW

SEQ ID NO: 170881 - protein, 11 aa, Artificial Sequence
  Description of Artificial Sequence: Synthetic peptide
  Seed: VCRTLLAKSVF
VARTLLAKSVY

SEQ ID NO: 170882 - protein, 10 aa, Artificial Sequence
  Description of Artificial Sequence: Synthetic peptide
  Seed: VLLNASWFNS
VCLNASWFNA

SEQ ID NO: 170883 - protein, 10 aa, Artificial Sequence
  Description of Artificial Sequence: Synthetic peptide
  Seed: VLLNASWFNS
VCLNASWFNI

SEQ ID NO: 170884 - protein, 10 aa, Artificial Sequence
  Description of Artificial Sequence: Synthetic peptide
  Seed: VLLNASWFNS
VCLNASWFNL

SEQ ID NO: 170885 - protein, 10 aa, Artificial Sequence
  Description of Artificial Sequence: Synthetic peptide
  Seed: VLLNASWFNS
VCLNASWFNM

SEQ ID NO: 170886 - protein, 10 aa, Artificial Sequence
  Description of Artificial Sequence: Synthetic peptide
  Seed: VLLNASWFNS
VCLNASWFNV

SEQ ID NO: 170887 - protein, 11 aa, Artificial Sequence
  Description of Artificial Sequence: Synthetic peptide
  Seed: VCRTLLAKSVF
VCRTLLAKSVW

SEQ ID NO: 170888 - protein, 11 aa, Artificial Sequence
  Description of Artificial Sequence: Synthetic peptide
  Seed: VCRTLLAKSVF
VCRTLLAKSVY

SEQ ID NO: 170889 - protein, 10 aa, Artificial Sequence
  Description of Artificial Sequence: Synthetic peptide
  Seed: VLLNASWFNS
VDLNASWFNA

SEQ ID NO: 170890 - protein, 10 aa, Artificial Sequence
  Description of Artificial Sequence: Synthetic peptide
  Seed: VLLNASWFNS
VDLNASWFNI

SEQ ID NO: 170891 - protein, 10 aa, Artificial Sequence
  Description of Artificial Sequence: Synthetic peptide
  Seed: VLLNASWFNS
VDLNASWFNL

SEQ ID NO: 170892 - protein, 10 aa, Artificial Sequence
  Description of Artificial Sequence: Synthetic peptide
  Seed: VLLNASWFNS
VDLNASWFNM

SEQ ID NO: 170893 - protein, 10 aa, Artificial Sequence
  Description of Artificial Sequence: Synthetic peptide
  Seed: VLLNASWFNS
VDLNASWFNV

SEQ ID NO: 170894 - protein, 11 aa, Artificial Sequence
  Description of Artificial Sequence: Synthetic peptide
  Seed: VCRTLLAKSVF
VDRTLLAKSVF

SEQ ID NO: 170895 - protein, 11 aa, Artificial Sequence
  Description of Artificial Sequence: Synthetic peptide
  Seed: VCRTLLAKSVF
VDRTLLAKSVW

SEQ ID NO: 170896 - protein, 11 aa, Artificial Sequence
  Description of Artificial Sequence: Synthetic peptide
  Seed: VCRTLLAKSVF
VDRTLLAKSVY

SEQ ID NO: 170897 - protein, 10 aa, Artificial Sequence
  Description of Artificial Sequence: Synthetic peptide
  Seed: VLLNASWFNS
VELNASWFNA

SEQ ID NO: 170898 - protein, 10 aa, Artificial Sequence
  Description of Artificial Sequence: Synthetic peptide
  Seed: VLLNASWFNS
VELNASWFNI

SEQ ID NO: 170899 - protein, 10 aa, Artificial Sequence
  Description of Artificial Sequence: Synthetic peptide
  Seed: VLLNASWFNS
VELNASWFNL

SEQ ID NO: 170900 - protein, 10 aa, Artificial Sequence
  Description of Artificial Sequence: Synthetic peptide
  Seed: VLLNASWFNS
VELNASWFNM

SEQ ID NO: 170901 - protein, 11 aa, Artificial Sequence
  Description of Artificial Sequence: Synthetic peptide
  Seed: VLLNASWFNSF
VELNASWFNSF

SEQ ID NO: 170902 - protein, 11 aa, Artificial Sequence
  Description of Artificial Sequence: Synthetic peptide
  Seed: VLLNASWFNSF
VELNASWFNSY

SEQ ID NO: 170903 - protein, 10 aa, Artificial Sequence
  Description of Artificial Sequence: Synthetic peptide
  Seed: VLLNASWFNS
VELNASWFNV

SEQ ID NO: 170904 - protein, 11 aa, Artificial Sequence
  Description of Artificial Sequence: Synthetic peptide
  Seed: VCRTLLAKSVF
VERTLLAKSVF

SEQ ID NO: 170905 - protein, 11 aa, Artificial Sequence
  Description of Artificial Sequence: Synthetic peptide
  Seed: VCRTLLAKSVF
VERTLLAKSVW

SEQ ID NO: 170906 - protein, 11 aa, Artificial Sequence
  Description of Artificial Sequence: Synthetic peptide
  Seed: VCRTLLAKSVF
VERTLLAKSVY

SEQ ID NO: 170907 - protein, 10 aa, Artificial Sequence
  Description of Artificial Sequence: Synthetic peptide
  Seed: VLLNASWFNS
VFLNASWFNA

SEQ ID NO: 170908 - protein, 10 aa, Artificial Sequence
  Description of Artificial Sequence: Synthetic peptide
  Seed: VLLNASWFNS
VFLNASWFNI

SEQ ID NO: 170909 - protein, 10 aa, Artificial Sequence
  Description of Artificial Sequence: Synthetic peptide
  Seed: VLLNASWFNS
VFLNASWFNL

SEQ ID NO: 170910 - protein, 10 aa, Artificial Sequence
  Description of Artificial Sequence: Synthetic peptide
  Seed: VLLNASWFNS
VFLNASWFNM

SEQ ID NO: 170911 - protein, 11 aa, Artificial Sequence
  Description of Artificial Sequence: Synthetic peptide
  Seed: VLLNASWFNSF
VFLNASWFNSF

SEQ ID NO: 170912 - protein, 11 aa, Artificial Sequence
  Description of Artificial Sequence: Synthetic peptide
  Seed: VLLNASWFNSF
VFLNASWFNSI

SEQ ID NO: 170913 - protein, 11 aa, Artificial Sequence
  Description of Artificial Sequence: Synthetic peptide
  Seed: VLLNASWFNSF
VFLNASWFNSL

SEQ ID NO: 170914 - protein, 11 aa, Artificial Sequence
  Description of Artificial Sequence: Synthetic peptide
  Seed: VLLNASWFNSF
VFLNASWFNSW

SEQ ID NO: 170915 - protein, 10 aa, Artificial Sequence
  Description of Artificial Sequence: Synthetic peptide
  Seed: VLLNASWFNS
VFLNASWFNV

SEQ ID NO: 170916 - protein, 11 aa, Artificial Sequence
  Description of Artificial Sequence: Synthetic peptide
  Seed: VCRTLLAKSVF
VFRTLLAKSVF

SEQ ID NO: 170917 - protein, 11 aa, Artificial Sequence
  Description of Artificial Sequence: Synthetic peptide
  Seed: VCRTLLAKSVF
VFRTLLAKSVW

SEQ ID NO: 170918 - protein, 11 aa, Artificial Sequence
  Description of Artificial Sequence: Synthetic peptide
  Seed: VCRTLLAKSVF
VFRTLLAKSVY

SEQ ID NO: 170919 - protein, 10 aa, Artificial Sequence
  Description of Artificial Sequence: Synthetic peptide
  Seed: VLLNASWFNS
VGLNASWFNA

SEQ ID NO: 170920 - protein, 10 aa, Artificial Sequence
  Description of Artificial Sequence: Synthetic peptide
  Seed: VLLNASWFNS
VGLNASWFNI

SEQ ID NO: 170921 - protein, 10 aa, Artificial Sequence
  Description of Artificial Sequence: Synthetic peptide
  Seed: VLLNASWFNS
VGLNASWFNL

SEQ ID NO: 170922 - protein, 10 aa, Artificial Sequence
  Description of Artificial Sequence: Synthetic peptide
  Seed: VLLNASWFNS
VGLNASWFNM

SEQ ID NO: 170923 - protein, 10 aa, Artificial Sequence
  Description of Artificial Sequence: Synthetic peptide
  Seed: VLLNASWFNS
VGLNASWFNV

SEQ ID NO: 170924 - protein, 11 aa, Artificial Sequence
  Description of Artificial Sequence: Synthetic peptide
  Seed: VCRTLLAKSVF
VGRTLLAKSVF

SEQ ID NO: 170925 - protein, 11 aa, Artificial Sequence
  Description of Artificial Sequence: Synthetic peptide
  Seed: VCRTLLAKSVF
VGRTLLAKSVW

SEQ ID NO: 170926 - protein, 11 aa, Artificial Sequence
  Description of Artificial Sequence: Synthetic peptide
  Seed: VCRTLLAKSVF
VGRTLLAKSVY

SEQ ID NO: 170927 - protein, 10 aa, Artificial Sequence
  Description of Artificial Sequence: Synthetic peptide
  Seed: VLLNASWFNS
VHLNASWFNA

SEQ ID NO: 170928 - protein, 10 aa, Artificial Sequence
  Description of Artificial Sequence: Synthetic peptide
  Seed: VLLNASWFNS
VHLNASWFNI

SEQ ID NO: 170929 - protein, 10 aa, Artificial Sequence
  Description of Artificial Sequence: Synthetic peptide
  Seed: VLLNASWFNS
VHLNASWFNL

SEQ ID NO: 170930 - protein, 10 aa, Artificial Sequence
  Description of Artificial Sequence: Synthetic peptide
  Seed: VLLNASWFNS
VHLNASWFNM

SEQ ID NO: 170931 - protein, 11 aa, Artificial Sequence
  Description of Artificial Sequence: Synthetic peptide
  Seed: VLLNASWFNSF
VHLNASWFNSF

SEQ ID NO: 170932 - protein, 11 aa, Artificial Sequence
  Description of Artificial Sequence: Synthetic peptide
  Seed: VLLNASWFNSF
VHLNASWFNSY

SEQ ID NO: 170933 - protein, 10 aa, Artificial Sequence
  Description of Artificial Sequence: Synthetic peptide
  Seed: VLLNASWFNS
VHLNASWFNV

SEQ ID NO: 170934 - protein, 11 aa, Artificial Sequence
  Description of Artificial Sequence: Synthetic peptide
  Seed: VCRTLLAKSVF
VHRTLLAKSVF

SEQ ID NO: 170935 - protein, 11 aa, Artificial Sequence
  Description of Artificial Sequence: Synthetic peptide
  Seed: VCRTLLAKSVF
VHRTLLAKSVW

SEQ ID NO: 170936 - protein, 11 aa, Artificial Sequence
  Description of Artificial Sequence: Synthetic peptide
  Seed: VCRTLLAKSVF
VHRTLLAKSVY

SEQ ID NO: 170937 - protein, 10 aa, Artificial Sequence
  Description of Artificial Sequence: Synthetic peptide
  Seed: VLLNASWFNS
VILNASWFNA

SEQ ID NO: 170938 - protein, 10 aa, Artificial Sequence
  Description of Artificial Sequence: Synthetic peptide
  Seed: VLLNASWFNS
VILNASWFNI

SEQ ID NO: 170939 - protein, 10 aa, Artificial Sequence
  Description of Artificial Sequence: Synthetic peptide
  Seed: VLLNASWFNS
VILNASWFNL

SEQ ID NO: 170940 - protein, 10 aa, Artificial Sequence
  Description of Artificial Sequence: Synthetic peptide
  Seed: VLLNASWFNS
VILNASWFNM

SEQ ID NO: 170941 - protein, 11 aa, Artificial Sequence
  Description of Artificial Sequence: Synthetic peptide
  Seed: VLLNASWFNSF
VILNASWFNSF

SEQ ID NO: 170942 - protein, 11 aa, Artificial Sequence
  Description of Artificial Sequence: Synthetic peptide
  Seed: VLLNASWFNSF
VILNASWFNSY

SEQ ID NO: 170943 - protein, 10 aa, Artificial Sequence
  Description of Artificial Sequence: Synthetic peptide
  Seed: VLLNASWFNS
VILNASWFNV

SEQ ID NO: 170944 - protein, 11 aa, Artificial Sequence
  Description of Artificial Sequence: Synthetic peptide
  Seed: VCRTLLAKSVF
VIRTLLAKSVF

SEQ ID NO: 170945 - protein, 11 aa, Artificial Sequence
  Description of Artificial Sequence: Synthetic peptide
  Seed: VCRTLLAKSVF
VIRTLLAKSVW

SEQ ID NO: 170946 - protein, 11 aa, Artificial Sequence
  Description of Artificial Sequence: Synthetic peptide
  Seed: VCRTLLAKSVF
VIRTLLAKSVY

SEQ ID NO: 170947 - protein, 10 aa, Artificial Sequence
  Description of Artificial Sequence: Synthetic peptide
  Seed: VLLNASWFNS
VKLNASWFNA

SEQ ID NO: 170948 - protein, 10 aa, Artificial Sequence
  Description of Artificial Sequence: Synthetic peptide
  Seed: VLLNASWFNS
VKLNASWFNI

SEQ ID NO: 170949 - protein, 10 aa, Artificial Sequence
  Description of Artificial Sequence: Synthetic peptide
  Seed: VLLNASWFNS
VKLNASWFNL

SEQ ID NO: 170950 - protein, 10 aa, Artificial Sequence
  Description of Artificial Sequence: Synthetic peptide
  Seed: VLLNASWFNS
VKLNASWFNM

SEQ ID NO: 170951 - protein, 11 aa, Artificial Sequence
  Description of Artificial Sequence: Synthetic peptide
  Seed: VLLNASWFNSF
VKLNASWFNSF

SEQ ID NO: 170952 - protein, 11 aa, Artificial Sequence
  Description of Artificial Sequence: Synthetic peptide
  Seed: VLLNASWFNSF
VKLNASWFNSM

SEQ ID NO: 170953 - protein, 11 aa, Artificial Sequence
  Description of Artificial Sequence: Synthetic peptide
  Seed: VLLNASWFNSF
VKLNASWFNSY

SEQ ID NO: 170954 - protein, 10 aa, Artificial Sequence
  Description of Artificial Sequence: Synthetic peptide
  Seed: VLLNASWFNS
VKLNASWFNV

SEQ ID NO: 170955 - protein, 11 aa, Artificial Sequence
  Description of Artificial Sequence: Synthetic peptide
  Seed: VCRTLLAKSVF
VKRTLLAKSVF

SEQ ID NO: 170956 - protein, 11 aa, Artificial Sequence
  Description of Artificial Sequence: Synthetic peptide
  Seed: VCRTLLAKSVF
VKRTLLAKSVW

SEQ ID NO: 170957 - protein, 11 aa, Artificial Sequence
  Description of Artificial Sequence: Synthetic peptide
  Seed: VCRTLLAKSVF
VKRTLLAKSVY

SEQ ID NO: 170958 - protein, 10 aa, Artificial Sequence
  Description of Artificial Sequence: Synthetic peptide
  Seed: VLLNASWFNS
VLLNASWFNA

SEQ ID NO: 170959 - protein, 10 aa, Artificial Sequence
  Description of Artificial Sequence: Synthetic peptide
  Seed: VLLNASWFNS
VLLNASWFNC

SEQ ID NO: 170960 - protein, 10 aa, Artificial Sequence
  Description of Artificial Sequence: Synthetic peptide
  Seed: VLLNASWFNS
VLLNASWFNI

SEQ ID NO: 170961 - protein, 10 aa, Artificial Sequence
  Description of Artificial Sequence: Synthetic peptide
  Seed: VLLNASWFNS
VLLNASWFNL

SEQ ID NO: 170962 - protein, 10 aa, Artificial Sequence
  Description of Artificial Sequence: Synthetic peptide
  Seed: VLLNASWFNS
VLLNASWFNM

SEQ ID NO: 170963 - protein, 11 aa, Artificial Sequence
  Description of Artificial Sequence: Synthetic peptide
  Seed: VLLNASWFNSF
VLLNASWFNSM

SEQ ID NO: 170964 - protein, 11 aa, Artificial Sequence
  Description of Artificial Sequence: Synthetic peptide
  Seed: VLLNASWFNSF
VLLNASWFNSY

SEQ ID NO: 170965 - protein, 10 aa, Artificial Sequence
  Description of Artificial Sequence: Synthetic peptide
  Seed: VLLNASWFNS
VLLNASWFNT

SEQ ID NO: 170966 - protein, 10 aa, Artificial Sequence
  Description of Artificial Sequence: Synthetic peptide
  Seed: VLLNASWFNS
VLLNASWFNV

SEQ ID NO: 170967 - protein, 11 aa, Artificial Sequence
  Description of Artificial Sequence: Synthetic peptide
  Seed: VCRTLLAKSVF
VLRTLLAKSVF

SEQ ID NO: 170968 - protein, 11 aa, Artificial Sequence
  Description of Artificial Sequence: Synthetic peptide
  Seed: VCRTLLAKSVF
VLRTLLAKSVW

SEQ ID NO: 170969 - protein, 11 aa, Artificial Sequence
  Description of Artificial Sequence: Synthetic peptide
  Seed: VCRTLLAKSVF
VLRTLLAKSVY

SEQ ID NO: 170970 - protein, 10 aa, Artificial Sequence
  Description of Artificial Sequence: Synthetic peptide
  Seed: VLLNASWFNS
VMLNASWFNA

SEQ ID NO: 170971 - protein, 10 aa, Artificial Sequence
  Description of Artificial Sequence: Synthetic peptide
  Seed: VLLNASWFNS
VMLNASWFNC

SEQ ID NO: 170972 - protein, 10 aa, Artificial Sequence
  Description of Artificial Sequence: Synthetic peptide
  Seed: VLLNASWFNS
VMLNASWFNI

SEQ ID NO: 170973 - protein, 10 aa, Artificial Sequence
  Description of Artificial Sequence: Synthetic peptide
  Seed: VLLNASWFNS
VMLNASWFNL

SEQ ID NO: 170974 - protein, 10 aa, Artificial Sequence
  Description of Artificial Sequence: Synthetic peptide
  Seed: VLLNASWFNS
VMLNASWFNM

SEQ ID NO: 170975 - protein, 10 aa, Artificial Sequence
  Description of Artificial Sequence: Synthetic peptide
  Seed: VLLNASWFNS
VMLNASWFNS

SEQ ID NO: 170976 - protein, 11 aa, Artificial Sequence
  Description of Artificial Sequence: Synthetic peptide
  Seed: VLLNASWFNSF
VMLNASWFNSF

SEQ ID NO: 170977 - protein, 11 aa, Artificial Sequence
  Description of Artificial Sequence: Synthetic peptide
  Seed: VLLNASWFNSF
VMLNASWFNSL

SEQ ID NO: 170978 - protein, 11 aa, Artificial Sequence
  Description of Artificial Sequence: Synthetic peptide
  Seed: VLLNASWFNSF
VMLNASWFNSM

SEQ ID NO: 170979 - protein, 11 aa, Artificial Sequence
  Description of Artificial Sequence: Synthetic peptide
  Seed: VLLNASWFNSF
VMLNASWFNSW

SEQ ID NO: 170980 - protein, 11 aa, Artificial Sequence
  Description of Artificial Sequence: Synthetic peptide
  Seed: VLLNASWFNSF
VMLNASWFNSY

SEQ ID NO: 170981 - protein, 10 aa, Artificial Sequence
  Description of Artificial Sequence: Synthetic peptide
  Seed: VLLNASWFNS
VMLNASWFNT

SEQ ID NO: 170982 - protein, 10 aa, Artificial Sequence
  Description of Artificial Sequence: Synthetic peptide
  Seed: VLLNASWFNS
VMLNASWFNV

SEQ ID NO: 170983 - protein, 11 aa, Artificial Sequence
  Description of Artificial Sequence: Synthetic peptide
  Seed: VCRTLLAKSVF
VMRTLLAKSVF

SEQ ID NO: 170984 - protein, 11 aa, Artificial Sequence
  Description of Artificial Sequence: Synthetic peptide
  Seed: VCRTLLAKSVF
VMRTLLAKSVW

SEQ ID NO: 170985 - protein, 11 aa, Artificial Sequence
  Description of Artificial Sequence: Synthetic peptide
  Seed: VCRTLLAKSVF
VMRTLLAKSVY

SEQ ID NO: 170986 - protein, 10 aa, Artificial Sequence
  Description of Artificial Sequence: Synthetic peptide
  Seed: VLLNASWFNS
VNLNASWFNA

SEQ ID NO: 170987 - protein, 10 aa, Artificial Sequence
  Description of Artificial Sequence: Synthetic peptide
  Seed: VLLNASWFNS
VNLNASWFNI

SEQ ID NO: 170988 - protein, 10 aa, Artificial Sequence
  Description of Artificial Sequence: Synthetic peptide
  Seed: VLLNASWFNS
VNLNASWFNL

SEQ ID NO: 170989 - protein, 10 aa, Artificial Sequence
  Description of Artificial Sequence: Synthetic peptide
  Seed: VLLNASWFNS
VNLNASWFNM

SEQ ID NO: 170990 - protein, 10 aa, Artificial Sequence
  Description of Artificial Sequence: Synthetic peptide
  Seed: VLLNASWFNS
VNLNASWFNV

SEQ ID NO: 170991 - protein, 11 aa, Artificial Sequence
  Description of Artificial Sequence: Synthetic peptide
  Seed: VCRTLLAKSVF
VNRTLLAKSVF

SEQ ID NO: 170992 - protein, 11 aa, Artificial Sequence
  Description of Artificial Sequence: Synthetic peptide
  Seed: VCRTLLAKSVF
VNRTLLAKSVW

SEQ ID NO: 170993 - protein, 11 aa, Artificial Sequence
  Description of Artificial Sequence: Synthetic peptide
  Seed: VCRTLLAKSVF
VNRTLLAKSVY

SEQ ID NO: 170994 - protein, 10 aa, Artificial Sequence
  Description of Artificial Sequence: Synthetic peptide
  Seed: VLLNASWFNS
VPLNASWFNA

SEQ ID NO: 170995 - protein, 10 aa, Artificial Sequence
  Description of Artificial Sequence: Synthetic peptide
  Seed: VLLNASWFNS
VPLNASWFNI

SEQ ID NO: 170996 - protein, 10 aa, Artificial Sequence
  Description of Artificial Sequence: Synthetic peptide
  Seed: VLLNASWFNS
VPLNASWFNL

SEQ ID NO: 170997 - protein, 10 aa, Artificial Sequence
  Description of Artificial Sequence: Synthetic peptide
  Seed: VLLNASWFNS
VPLNASWFNM

SEQ ID NO: 170998 - protein, 10 aa, Artificial Sequence
  Description of Artificial Sequence: Synthetic peptide
  Seed: VLLNASWFNS
VPLNASWFNV

SEQ ID NO: 170999 - protein, 11 aa, Artificial Sequence
  Description of Artificial Sequence: Synthetic peptide
  Seed: VCRTLLAKSVF
VPRTLLAKSVF

SEQ ID NO: 171000 - protein, 11 aa, Artificial Sequence
  Description of Artificial Sequence: Synthetic peptide
  Seed: VCRTLLAKSVF
VPRTLLAKSVW

SEQ ID NO: 171001 - protein, 11 aa, Artificial Sequence
  Description of Artificial Sequence: Synthetic peptide
  Seed: VCRTLLAKSVF
VPRTLLAKSVY

SEQ ID NO: 171002 - protein, 10 aa, Artificial Sequence
  Description of Artificial Sequence: Synthetic peptide
  Seed: VLLNASWFNS
VQLNASWFNA

SEQ ID NO: 171003 - protein, 10 aa, Artificial Sequence
  Description of Artificial Sequence: Synthetic peptide
  Seed: VLLNASWFNS
VQLNASWFNI

SEQ ID NO: 171004 - protein, 10 aa, Artificial Sequence
  Description of Artificial Sequence: Synthetic peptide
  Seed: VLLNASWFNS
VQLNASWFNL

SEQ ID NO: 171005 - protein, 10 aa, Artificial Sequence
  Description of Artificial Sequence: Synthetic peptide
  Seed: VLLNASWFNS
VQLNASWFNM

SEQ ID NO: 171006 - protein, 11 aa, Artificial Sequence
  Description of Artificial Sequence: Synthetic peptide
  Seed: VLLNASWFNSF
VQLNASWFNSF

SEQ ID NO: 171007 - protein, 11 aa, Artificial Sequence
  Description of Artificial Sequence: Synthetic peptide
  Seed: VLLNASWFNSF
VQLNASWFNSI

SEQ ID NO: 171008 - protein, 11 aa, Artificial Sequence
  Description of Artificial Sequence: Synthetic peptide
  Seed: VLLNASWFNSF
VQLNASWFNSL

SEQ ID NO: 171009 - protein, 11 aa, Artificial Sequence
  Description of Artificial Sequence: Synthetic peptide
  Seed: VLLNASWFNSF
VQLNASWFNSM

SEQ ID NO: 171010 - protein, 11 aa, Artificial Sequence
  Description of Artificial Sequence: Synthetic peptide
  Seed: VLLNASWFNSF
VQLNASWFNSY

SEQ ID NO: 171011 - protein, 10 aa, Artificial Sequence
  Description of Artificial Sequence: Synthetic peptide
  Seed: VLLNASWFNS
VQLNASWFNV

SEQ ID NO: 171012 - protein, 11 aa, Artificial Sequence
  Description of Artificial Sequence: Synthetic peptide
  Seed: VCRTLLAKSVF
VQRTLLAKSVF

SEQ ID NO: 171013 - protein, 11 aa, Artificial Sequence
  Description of Artificial Sequence: Synthetic peptide
  Seed: VCRTLLAKSVF
VQRTLLAKSVW

SEQ ID NO: 171014 - protein, 11 aa, Artificial Sequence
  Description of Artificial Sequence: Synthetic peptide
  Seed: VCRTLLAKSVF
VQRTLLAKSVY

SEQ ID NO: 171015 - protein, 10 aa, Artificial Sequence
  Description of Artificial Sequence: Synthetic peptide
  Seed: VLLNASWFNS
VRLNASWFNA

SEQ ID NO: 171016 - protein, 10 aa, Artificial Sequence
  Description of Artificial Sequence: Synthetic peptide
  Seed: VLLNASWFNS
VRLNASWFNI

SEQ ID NO: 171017 - protein, 10 aa, Artificial Sequence
  Description of Artificial Sequence: Synthetic peptide
  Seed: VLLNASWFNS
VRLNASWFNL

SEQ ID NO: 171018 - protein, 10 aa, Artificial Sequence
  Description of Artificial Sequence: Synthetic peptide
  Seed: VLLNASWFNS
VRLNASWFNM

SEQ ID NO: 171019 - protein, 11 aa, Artificial Sequence
  Description of Artificial Sequence: Synthetic peptide
  Seed: VLLNASWFNSF
VRLNASWFNSF

SEQ ID NO: 171020 - protein, 11 aa, Artificial Sequence
  Description of Artificial Sequence: Synthetic peptide
  Seed: VLLNASWFNSF
VRLNASWFNSY

SEQ ID NO: 171021 - protein, 10 aa, Artificial Sequence
  Description of Artificial Sequence: Synthetic peptide
  Seed: VLLNASWFNS
VRLNASWFNV

SEQ ID NO: 171022 - protein, 11 aa, Artificial Sequence
  Description of Artificial Sequence: Synthetic peptide
  Seed: VCRTLLAKSVF
VRRTLLAKSVF

SEQ ID NO: 171023 - protein, 11 aa, Artificial Sequence
  Description of Artificial Sequence: Synthetic peptide
  Seed: VCRTLLAKSVF
VRRTLLAKSVW

SEQ ID NO: 171024 - protein, 11 aa, Artificial Sequence
  Description of Artificial Sequence: Synthetic peptide
  Seed: VCRTLLAKSVF
VRRTLLAKSVY

SEQ ID NO: 171025 - protein, 10 aa, Artificial Sequence
  Description of Artificial Sequence: Synthetic peptide
  Seed: VLLNASWFNS
VSLNASWFNA

SEQ ID NO: 171026 - protein, 10 aa, Artificial Sequence
  Description of Artificial Sequence: Synthetic peptide
  Seed: VLLNASWFNS
VSLNASWFNI

SEQ ID NO: 171027 - protein, 10 aa, Artificial Sequence
  Description of Artificial Sequence: Synthetic peptide
  Seed: VLLNASWFNS
VSLNASWFNL

SEQ ID NO: 171028 - protein, 10 aa, Artificial Sequence
  Description of Artificial Sequence: Synthetic peptide
  Seed: VLLNASWFNS
VSLNASWFNM

SEQ ID NO: 171029 - protein, 11 aa, Artificial Sequence
  Description of Artificial Sequence: Synthetic peptide
  Seed: VLLNASWFNSF
VSLNASWFNSF

SEQ ID NO: 171030 - protein, 11 aa, Artificial Sequence
  Description of Artificial Sequence: Synthetic peptide
  Seed: VLLNASWFNSF
VSLNASWFNSY

SEQ ID NO: 171031 - protein, 10 aa, Artificial Sequence
  Description of Artificial Sequence: Synthetic peptide
  Seed: VLLNASWFNS
VSLNASWFNV

SEQ ID NO: 171032 - protein, 11 aa, Artificial Sequence
  Description of Artificial Sequence: Synthetic peptide
  Seed: VCRTLLAKSVF
VSRTLLAKSVF

SEQ ID NO: 171033 - protein, 11 aa, Artificial Sequence
  Description of Artificial Sequence: Synthetic peptide
  Seed: VCRTLLAKSVF
VSRTLLAKSVM

SEQ ID NO: 171034 - protein, 11 aa, Artificial Sequence
  Description of Artificial Sequence: Synthetic peptide
  Seed: VCRTLLAKSVF
VSRTLLAKSVW

SEQ ID NO: 171035 - protein, 11 aa, Artificial Sequence
  Description of Artificial Sequence: Synthetic peptide
  Seed: VCRTLLAKSVF
VSRTLLAKSVY

SEQ ID NO: 171036 - protein, 10 aa, Artificial Sequence
  Description of Artificial Sequence: Synthetic peptide
  Seed: VLLNASWFNS
VTLNASWFNA

SEQ ID NO: 171037 - protein, 10 aa, Artificial Sequence
  Description of Artificial Sequence: Synthetic peptide
  Seed: VLLNASWFNS
VTLNASWFNI

SEQ ID NO: 171038 - protein, 10 aa, Artificial Sequence
  Description of Artificial Sequence: Synthetic peptide
  Seed: VLLNASWFNS
VTLNASWFNL

SEQ ID NO: 171039 - protein, 10 aa, Artificial Sequence
  Description of Artificial Sequence: Synthetic peptide
  Seed: VLLNASWFNS
VTLNASWFNM

SEQ ID NO: 171040 - protein, 11 aa, Artificial Sequence
  Description of Artificial Sequence: Synthetic peptide
  Seed: VLLNASWFNSF
VTLNASWFNSF

SEQ ID NO: 171041 - protein, 11 aa, Artificial Sequence
  Description of Artificial Sequence: Synthetic peptide
  Seed: VLLNASWFNSF
VTLNASWFNSY

SEQ ID NO: 171042 - protein, 10 aa, Artificial Sequence
  Description of Artificial Sequence: Synthetic peptide
  Seed: VLLNASWFNS
VTLNASWFNV

SEQ ID NO: 171043 - protein, 11 aa, Artificial Sequence
  Description of Artificial Sequence: Synthetic peptide
  Seed: VCRTLLAKSVF
VTRTLLAKSVF

SEQ ID NO: 171044 - protein, 11 aa, Artificial Sequence
  Description of Artificial Sequence: Synthetic peptide
  Seed: VCRTLLAKSVF
VTRTLLAKSVM

SEQ ID NO: 171045 - protein, 11 aa, Artificial Sequence
  Description of Artificial Sequence: Synthetic peptide
  Seed: VCRTLLAKSVF
VTRTLLAKSVW

SEQ ID NO: 171046 - protein, 11 aa, Artificial Sequence
  Description of Artificial Sequence: Synthetic peptide
  Seed: VCRTLLAKSVF
VTRTLLAKSVY

SEQ ID NO: 171047 - protein, 10 aa, Artificial Sequence
  Description of Artificial Sequence: Synthetic peptide
  Seed: VLLNASWFNS
VVLNASWFNA

SEQ ID NO: 171048 - protein, 10 aa, Artificial Sequence
  Description of Artificial Sequence: Synthetic peptide
  Seed: VLLNASWFNS
VVLNASWFNI

SEQ ID NO: 171049 - protein, 10 aa, Artificial Sequence
  Description of Artificial Sequence: Synthetic peptide
  Seed: VLLNASWFNS
VVLNASWFNL

SEQ ID NO: 171050 - protein, 10 aa, Artificial Sequence
  Description of Artificial Sequence: Synthetic peptide
  Seed: VLLNASWFNS
VVLNASWFNM

SEQ ID NO: 171051 - protein, 11 aa, Artificial Sequence
  Description of Artificial Sequence: Synthetic peptide
  Seed: VLLNASWFNSF
VVLNASWFNSF

SEQ ID NO: 171052 - protein, 11 aa, Artificial Sequence
  Description of Artificial Sequence: Synthetic peptide
  Seed: VLLNASWFNSF
VVLNASWFNSY

SEQ ID NO: 171053 - protein, 10 aa, Artificial Sequence
  Description of Artificial Sequence: Synthetic peptide
  Seed: VLLNASWFNS
VVLNASWFNV

SEQ ID NO: 171054 - protein, 11 aa, Artificial Sequence
  Description of Artificial Sequence: Synthetic peptide
  Seed: VCRTLLAKSVF
VVRTLLAKSVF

SEQ ID NO: 171055 - protein, 11 aa, Artificial Sequence
  Description of Artificial Sequence: Synthetic peptide
  Seed: VCRTLLAKSVF
VVRTLLAKSVW

SEQ ID NO: 171056 - protein, 11 aa, Artificial Sequence
  Description of Artificial Sequence: Synthetic peptide
  Seed: VCRTLLAKSVF
VVRTLLAKSVY

SEQ ID NO: 171057 - protein, 10 aa, Artificial Sequence
  Description of Artificial Sequence: Synthetic peptide
  Seed: VLLNASWFNS
VWLNASWFNA

SEQ ID NO: 171058 - protein, 10 aa, Artificial Sequence
  Description of Artificial Sequence: Synthetic peptide
  Seed: VLLNASWFNS
VWLNASWFNI

SEQ ID NO: 171059 - protein, 10 aa, Artificial Sequence
  Description of Artificial Sequence: Synthetic peptide
  Seed: VLLNASWFNS
VWLNASWFNL

SEQ ID NO: 171060 - protein, 10 aa, Artificial Sequence
  Description of Artificial Sequence: Synthetic peptide
  Seed: VLLNASWFNS
VWLNASWFNM

SEQ ID NO: 171061 - protein, 11 aa, Artificial Sequence
  Description of Artificial Sequence: Synthetic peptide
  Seed: VLLNASWFNSF
VWLNASWFNSF

SEQ ID NO: 171062 - protein, 11 aa, Artificial Sequence
  Description of Artificial Sequence: Synthetic peptide
  Seed: VLLNASWFNSF
VWLNASWFNSI

SEQ ID NO: 171063 - protein, 11 aa, Artificial Sequence
  Description of Artificial Sequence: Synthetic peptide
  Seed: VLLNASWFNSF
VWLNASWFNSL

SEQ ID NO: 171064 - protein, 11 aa, Artificial Sequence
  Description of Artificial Sequence: Synthetic peptide
  Seed: VLLNASWFNSF
VWLNASWFNSM

SEQ ID NO: 171065 - protein, 11 aa, Artificial Sequence
  Description of Artificial Sequence: Synthetic peptide
  Seed: VLLNASWFNSF
VWLNASWFNSV

SEQ ID NO: 171066 - protein, 11 aa, Artificial Sequence
  Description of Artificial Sequence: Synthetic peptide
  Seed: VLLNASWFNSF
VWLNASWFNSW

SEQ ID NO: 171067 - protein, 10 aa, Artificial Sequence
  Description of Artificial Sequence: Synthetic peptide
  Seed: VLLNASWFNS
VWLNASWFNV

SEQ ID NO: 171068 - protein, 11 aa, Artificial Sequence
  Description of Artificial Sequence: Synthetic peptide
  Seed: VCRTLLAKSVF
VWRTLLAKSVF

SEQ ID NO: 171069 - protein, 11 aa, Artificial Sequence
  Description of Artificial Sequence: Synthetic peptide
  Seed: VCRTLLAKSVF
VWRTLLAKSVW

SEQ ID NO: 171070 - protein, 11 aa, Artificial Sequence
  Description of Artificial Sequence: Synthetic peptide
  Seed: VCRTLLAKSVF
VWRTLLAKSVY

SEQ ID NO: 171071 - protein, 10 aa, Artificial Sequence
  Description of Artificial Sequence: Synthetic peptide
  Seed: VLLNASWFNS
VYLNASWFNA

SEQ ID NO: 171072 - protein, 10 aa, Artificial Sequence
  Description of Artificial Sequence: Synthetic peptide
  Seed: VLLNASWFNS
VYLNASWFNI

SEQ ID NO: 171073 - protein, 10 aa, Artificial Sequence
  Description of Artificial Sequence: Synthetic peptide
  Seed: VLLNASWFNS
VYLNASWFNL

SEQ ID NO: 171074 - protein, 10 aa, Artificial Sequence
  Description of Artificial Sequence: Synthetic peptide
  Seed: VLLNASWFNS
VYLNASWFNM

SEQ ID NO: 171075 - protein, 11 aa, Artificial Sequence
  Description of Artificial Sequence: Synthetic peptide
  Seed: VLLNASWFNSF
VYLNASWFNSI

SEQ ID NO: 171076 - protein, 11 aa, Artificial Sequence
  Description of Artificial Sequence: Synthetic peptide
  Seed: VLLNASWFNSF
VYLNASWFNSM

SEQ ID NO: 171077 - protein, 11 aa, Artificial Sequence
  Description of Artificial Sequence: Synthetic peptide
  Seed: VLLNASWFNSF
VYLNASWFNSV

SEQ ID NO: 171078 - protein, 11 aa, Artificial Sequence
  Description of Artificial Sequence: Synthetic peptide
  Seed: VLLNASWFNSF
VYLNASWFNSW

SEQ ID NO: 171079 - protein, 11 aa, Artificial Sequence
  Description of Artificial Sequence: Synthetic peptide
  Seed: VLLNASWFNSF
VYLNASWFNSY

SEQ ID NO: 171080 - protein, 10 aa, Artificial Sequence
  Description of Artificial Sequence: Synthetic peptide
  Seed: VLLNASWFNS
VYLNASWFNV

SEQ ID NO: 171081 - protein, 11 aa, Artificial Sequence
  Description of Artificial Sequence: Synthetic peptide
  Seed: VCRTLLAKSVF
VYRTLLAKSVF

SEQ ID NO: 171082 - protein, 11 aa, Artificial Sequence
  Description of Artificial Sequence: Synthetic peptide
  Seed: VCRTLLAKSVF
VYRTLLAKSVW

SEQ ID NO: 171083 - protein, 11 aa, Artificial Sequence
  Description of Artificial Sequence: Synthetic peptide
  Seed: VCRTLLAKSVF
VYRTLLAKSVY

SEQ ID NO: 171084 - protein, 8 aa, Artificial Sequence
  Description of Artificial Sequence: Synthetic peptide
  Seed: FSFTGEEM
FAFTGEEF

SEQ ID NO: 171085 - protein, 8 aa, Artificial Sequence
  Description of Artificial Sequence: Synthetic peptide
  Seed: FSFTGEEM
FAFTGEEI

SEQ ID NO: 171086 - protein, 9 aa, Artificial Sequence
  Description of Artificial Sequence: Synthetic peptide
  Seed: FSFTGEEMA
FAFTGEEMA

SEQ ID NO: 171087 - protein, 11 aa, Artificial Sequence
  Description of Artificial Sequence: Synthetic peptide
  Seed: FSFTGEEMATK
FAFTGEEMATK

SEQ ID NO: 171088 - protein, 11 aa, Artificial Sequence
  Description of Artificial Sequence: Synthetic peptide
  Seed: FSFTGEEMATK
FAFTGEEMATR

SEQ ID NO: 171089 - protein, 9 aa, Artificial Sequence
  Description of Artificial Sequence: Synthetic peptide
  Seed: FSFTGEEMA
FAFTGEEMI

SEQ ID NO: 171090 - protein, 9 aa, Artificial Sequence
  Description of Artificial Sequence: Synthetic peptide
  Seed: FSFTGEEMA
FAFTGEEML

SEQ ID NO: 171091 - protein, 9 aa, Artificial Sequence
  Description of Artificial Sequence: Synthetic peptide
  Seed: FSFTGEEMA
FAFTGEEMM

SEQ ID NO: 171092 - protein, 9 aa, Artificial Sequence
  Description of Artificial Sequence: Synthetic peptide
  Seed: FSFTGEEMA
FAFTGEEMV

SEQ ID NO: 171093 - protein, 8 aa, Artificial Sequence
  Description of Artificial Sequence: Synthetic peptide
  Seed: FSFTGEEM
FAFTGEEV

SEQ ID NO: 171094 - protein, 8 aa, Artificial Sequence
  Description of Artificial Sequence: Synthetic peptide
  Seed: FSFTGEEM
FAFTGEEW

SEQ ID NO: 171095 - protein, 8 aa, Artificial Sequence
  Description of Artificial Sequence: Synthetic peptide
  Seed: FSFTGEEM
FAFTGEEY

SEQ ID NO: 171096 - protein, 9 aa, Artificial Sequence
  Description of Artificial Sequence: Synthetic peptide
  Seed: FTGEEMATK
FAGEEMATK

SEQ ID NO: 171097 - protein, 9 aa, Artificial Sequence
  Description of Artificial Sequence: Synthetic peptide
  Seed: FTGEEMATK
FAGEEMATR

SEQ ID NO: 171098 - protein, 11 aa, Artificial Sequence
  Description of Artificial Sequence: Synthetic peptide
  Seed: FSFTGEEMATK
FFFTGEEMATR

SEQ ID NO: 171099 - protein, 9 aa, Artificial Sequence
  Description of Artificial Sequence: Synthetic peptide
  Seed: FSFTGEEMA
FFFTGEEML

SEQ ID NO: 171100 - protein, 9 aa, Artificial Sequence
  Description of Artificial Sequence: Synthetic peptide
  Seed: FSFTGEEMA
FFFTGEEMV

SEQ ID NO: 171101 - protein, 11 aa, Artificial Sequence
  Description of Artificial Sequence: Synthetic peptide
  Seed: FSFTGEEMATK
FGFTGEEMATR

SEQ ID NO: 171102 - protein, 9 aa, Artificial Sequence
  Description of Artificial Sequence: Synthetic peptide
  Seed: FSFTGEEMA
FGFTGEEMV

SEQ ID NO: 171103 - protein, 8 aa, Artificial Sequence
  Description of Artificial Sequence: Synthetic peptide
  Seed: FSFTGEEM
FGFTGEEY

SEQ ID NO: 171104 - protein, 8 aa, Artificial Sequence
  Description of Artificial Sequence: Synthetic peptide
  Seed: FSFTGEEM
FIFTGEEF

SEQ ID NO: 171105 - protein, 8 aa, Artificial Sequence
  Description of Artificial Sequence: Synthetic peptide
  Seed: FSFTGEEM
FIFTGEEL

SEQ ID NO: 171106 - protein, 8 aa, Artificial Sequence
  Description of Artificial Sequence: Synthetic peptide
  Seed: FSFTGEEM
FIFTGEEM

SEQ ID NO: 171107 - protein, 9 aa, Artificial Sequence
  Description of Artificial Sequence: Synthetic peptide
  Seed: FSFTGEEMA
FIFTGEEMA

SEQ ID NO: 171108 - protein, 11 aa, Artificial Sequence
  Description of Artificial Sequence: Synthetic peptide
  Seed: FSFTGEEMATK
FIFTGEEMATK

SEQ ID NO: 171109 - protein, 11 aa, Artificial Sequence
  Description of Artificial Sequence: Synthetic peptide
  Seed: FSFTGEEMATK
FIFTGEEMATR

SEQ ID NO: 171110 - protein, 9 aa, Artificial Sequence
  Description of Artificial Sequence: Synthetic peptide
  Seed: FSFTGEEMA
FIFTGEEMF

SEQ ID NO: 171111 - protein, 9 aa, Artificial Sequence
  Description of Artificial Sequence: Synthetic peptide
  Seed: FSFTGEEMA
FIFTGEEMI

SEQ ID NO: 171112 - protein, 9 aa, Artificial Sequence
  Description of Artificial Sequence: Synthetic peptide
  Seed: FSFTGEEMA
FIFTGEEML

SEQ ID NO: 171113 - protein, 9 aa, Artificial Sequence
  Description of Artificial Sequence: Synthetic peptide
  Seed: FSFTGEEMA
FIFTGEEMM

SEQ ID NO: 171114 - protein, 9 aa, Artificial Sequence
  Description of Artificial Sequence: Synthetic peptide
  Seed: FSFTGEEMA
FIFTGEEMV

SEQ ID NO: 171115 - protein, 8 aa, Artificial Sequence
  Description of Artificial Sequence: Synthetic peptide
  Seed: FSFTGEEM
FIFTGEEY

SEQ ID NO: 171116 - protein, 9 aa, Artificial Sequence
  Description of Artificial Sequence: Synthetic peptide
  Seed: FTGEEMATK
FIGEEMATK

SEQ ID NO: 171117 - protein, 9 aa, Artificial Sequence
  Description of Artificial Sequence: Synthetic peptide
  Seed: FTGEEMATK
FIGEEMATR

SEQ ID NO: 171118 - protein, 8 aa, Artificial Sequence
  Description of Artificial Sequence: Synthetic peptide
  Seed: FSFTGEEM
FLFTGEEF

SEQ ID NO: 171119 - protein, 8 aa, Artificial Sequence
  Description of Artificial Sequence: Synthetic peptide
  Seed: FSFTGEEM
FLFTGEEM

SEQ ID NO: 171120 - protein, 9 aa, Artificial Sequence
  Description of Artificial Sequence: Synthetic peptide
  Seed: FSFTGEEMA
FLFTGEEMA

SEQ ID NO: 171121 - protein, 11 aa, Artificial Sequence
  Description of Artificial Sequence: Synthetic peptide
  Seed: FSFTGEEMATK
FLFTGEEMATK

SEQ ID NO: 171122 - protein, 11 aa, Artificial Sequence
  Description of Artificial Sequence: Synthetic peptide
  Seed: FSFTGEEMATK
FLFTGEEMATR

SEQ ID NO: 171123 - protein, 9 aa, Artificial Sequence
  Description of Artificial Sequence: Synthetic peptide
  Seed: FSFTGEEMA
FLFTGEEMC

SEQ ID NO: 171124 - protein, 9 aa, Artificial Sequence
  Description of Artificial Sequence: Synthetic peptide
  Seed: FSFTGEEMA
FLFTGEEMF

SEQ ID NO: 171125 - protein, 9 aa, Artificial Sequence
  Description of Artificial Sequence: Synthetic peptide
  Seed: FSFTGEEMA
FLFTGEEMG

SEQ ID NO: 171126 - protein, 9 aa, Artificial Sequence
  Description of Artificial Sequence: Synthetic peptide
  Seed: FSFTGEEMA
FLFTGEEMI

SEQ ID NO: 171127 - protein, 9 aa, Artificial Sequence
  Description of Artificial Sequence: Synthetic peptide
  Seed: FSFTGEEMA
FLFTGEEML

SEQ ID NO: 171128 - protein, 9 aa, Artificial Sequence
  Description of Artificial Sequence: Synthetic peptide
  Seed: FSFTGEEMA
FLFTGEEMM

SEQ ID NO: 171129 - protein, 9 aa, Artificial Sequence
  Description of Artificial Sequence: Synthetic peptide
  Seed: FSFTGEEMA
FLFTGEEMS

SEQ ID NO: 171130 - protein, 9 aa, Artificial Sequence
  Description of Artificial Sequence: Synthetic peptide
  Seed: FSFTGEEMA
FLFTGEEMT

SEQ ID NO: 171131 - protein, 9 aa, Artificial Sequence
  Description of Artificial Sequence: Synthetic peptide
  Seed: FSFTGEEMA
FLFTGEEMV

SEQ ID NO: 171132 - protein, 8 aa, Artificial Sequence
  Description of Artificial Sequence: Synthetic peptide
  Seed: FSFTGEEM
FLFTGEEY

SEQ ID NO: 171133 - protein, 9 aa, Artificial Sequence
  Description of Artificial Sequence: Synthetic peptide
  Seed: FTGEEMATK
FLGEEMATR

SEQ ID NO: 171134 - protein, 8 aa, Artificial Sequence
  Description of Artificial Sequence: Synthetic peptide
  Seed: FSFTGEEM
FMFTGEEF

SEQ ID NO: 171135 - protein, 8 aa, Artificial Sequence
  Description of Artificial Sequence: Synthetic peptide
  Seed: FSFTGEEM
FMFTGEEL

SEQ ID NO: 171136 - protein, 8 aa, Artificial Sequence
  Description of Artificial Sequence: Synthetic peptide
  Seed: FSFTGEEM
FMFTGEEM

SEQ ID NO: 171137 - protein, 9 aa, Artificial Sequence
  Description of Artificial Sequence: Synthetic peptide
  Seed: FSFTGEEMA
FMFTGEEMA

SEQ ID NO: 171138 - protein, 11 aa, Artificial Sequence
  Description of Artificial Sequence: Synthetic peptide
  Seed: FSFTGEEMATK
FMFTGEEMATK

SEQ ID NO: 171139 - protein, 11 aa, Artificial Sequence
  Description of Artificial Sequence: Synthetic peptide
  Seed: FSFTGEEMATK
FMFTGEEMATR

SEQ ID NO: 171140 - protein, 9 aa, Artificial Sequence
  Description of Artificial Sequence: Synthetic peptide
  Seed: FSFTGEEMA
FMFTGEEMC

SEQ ID NO: 171141 - protein, 9 aa, Artificial Sequence
  Description of Artificial Sequence: Synthetic peptide
  Seed: FSFTGEEMA
FMFTGEEMF

SEQ ID NO: 171142 - protein, 9 aa, Artificial Sequence
  Description of Artificial Sequence: Synthetic peptide
  Seed: FSFTGEEMA
FMFTGEEMG

SEQ ID NO: 171143 - protein, 9 aa, Artificial Sequence
  Description of Artificial Sequence: Synthetic peptide
  Seed: FSFTGEEMA
FMFTGEEMI

SEQ ID NO: 171144 - protein, 9 aa, Artificial Sequence
  Description of Artificial Sequence: Synthetic peptide
  Seed: FSFTGEEMA
FMFTGEEML

SEQ ID NO: 171145 - protein, 9 aa, Artificial Sequence
  Description of Artificial Sequence: Synthetic peptide
  Seed: FSFTGEEMA
FMFTGEEMM

SEQ ID NO: 171146 - protein, 9 aa, Artificial Sequence
  Description of Artificial Sequence: Synthetic peptide
  Seed: FSFTGEEMA
FMFTGEEMS

SEQ ID NO: 171147 - protein, 9 aa, Artificial Sequence
  Description of Artificial Sequence: Synthetic peptide
  Seed: FSFTGEEMA
FMFTGEEMT

SEQ ID NO: 171148 - protein, 9 aa, Artificial Sequence
  Description of Artificial Sequence: Synthetic peptide
  Seed: FSFTGEEMA
FMFTGEEMV

SEQ ID NO: 171149 - protein, 8 aa, Artificial Sequence
  Description of Artificial Sequence: Synthetic peptide
  Seed: FSFTGEEM
FMFTGEEY

SEQ ID NO: 171150 - protein, 9 aa, Artificial Sequence
  Description of Artificial Sequence: Synthetic peptide
  Seed: FTGEEMATK
FMGEEMATR

SEQ ID NO: 171151 - protein, 11 aa, Artificial Sequence
  Description of Artificial Sequence: Synthetic peptide
  Seed: FSFTGEEMATK
FNFTGEEMATR

SEQ ID NO: 171152 - protein, 11 aa, Artificial Sequence
  Description of Artificial Sequence: Synthetic peptide
  Seed: FSFTGEEMATK
FPFTGEEMATR

SEQ ID NO: 171153 - protein, 9 aa, Artificial Sequence
  Description of Artificial Sequence: Synthetic peptide
  Seed: FSFTGEEMA
FQFTGEEMA

SEQ ID NO: 171154 - protein, 9 aa, Artificial Sequence
  Description of Artificial Sequence: Synthetic peptide
  Seed: FSFTGEEMA
FQFTGEEMF

SEQ ID NO: 171155 - protein, 9 aa, Artificial Sequence
  Description of Artificial Sequence: Synthetic peptide
  Seed: FSFTGEEMA
FQFTGEEMI

SEQ ID NO: 171156 - protein, 9 aa, Artificial Sequence
  Description of Artificial Sequence: Synthetic peptide
  Seed: FSFTGEEMA
FQFTGEEML

SEQ ID NO: 171157 - protein, 9 aa, Artificial Sequence
  Description of Artificial Sequence: Synthetic peptide
  Seed: FSFTGEEMA
FQFTGEEMM

SEQ ID NO: 171158 - protein, 9 aa, Artificial Sequence
  Description of Artificial Sequence: Synthetic peptide
  Seed: FSFTGEEMA
FQFTGEEMT

SEQ ID NO: 171159 - protein, 9 aa, Artificial Sequence
  Description of Artificial Sequence: Synthetic peptide
  Seed: FSFTGEEMA
FQFTGEEMV

SEQ ID NO: 171160 - protein, 8 aa, Artificial Sequence
  Description of Artificial Sequence: Synthetic peptide
  Seed: FSFTGEEM
FQFTGEEY

SEQ ID NO: 171161 - protein, 8 aa, Artificial Sequence
  Description of Artificial Sequence: Synthetic peptide
  Seed: FSFTGEEM
FSFTGEEF

SEQ ID NO: 171162 - protein, 8 aa, Artificial Sequence
  Description of Artificial Sequence: Synthetic peptide
  Seed: FSFTGEEM
FSFTGEEI

SEQ ID NO: 171163 - protein, 11 aa, Artificial Sequence
  Description of Artificial Sequence: Synthetic peptide
  Seed: FSFTGEEMATK
FSFTGEEMATR

SEQ ID NO: 171164 - protein, 9 aa, Artificial Sequence
  Description of Artificial Sequence: Synthetic peptide
  Seed: FSFTGEEMA
FSFTGEEMI

SEQ ID NO: 171165 - protein, 9 aa, Artificial Sequence
  Description of Artificial Sequence: Synthetic peptide
  Seed: FSFTGEEMA
FSFTGEEML

SEQ ID NO: 171166 - protein, 9 aa, Artificial Sequence
  Description of Artificial Sequence: Synthetic peptide
  Seed: FSFTGEEMA
FSFTGEEMM

SEQ ID NO: 171167 - protein, 8 aa, Artificial Sequence
  Description of Artificial Sequence: Synthetic peptide
  Seed: FSFTGEEM
FSFTGEEV

SEQ ID NO: 171168 - protein, 9 aa, Artificial Sequence
  Description of Artificial Sequence: Synthetic peptide
  Seed: FTGEEMATK
FSGEEMATK

SEQ ID NO: 171169 - protein, 9 aa, Artificial Sequence
  Description of Artificial Sequence: Synthetic peptide
  Seed: FTGEEMATK
FSGEEMATR

SEQ ID NO: 171170 - protein, 8 aa, Artificial Sequence
  Description of Artificial Sequence: Synthetic peptide
  Seed: FSFTGEEM
FTFTGEEF

SEQ ID NO: 171171 - protein, 8 aa, Artificial Sequence
  Description of Artificial Sequence: Synthetic peptide
  Seed: FSFTGEEM
FTFTGEEL

SEQ ID NO: 171172 - protein, 8 aa, Artificial Sequence
  Description of Artificial Sequence: Synthetic peptide
  Seed: FSFTGEEM
FTFTGEEM

SEQ ID NO: 171173 - protein, 9 aa, Artificial Sequence
  Description of Artificial Sequence: Synthetic peptide
  Seed: FSFTGEEMA
FTFTGEEMA

SEQ ID NO: 171174 - protein, 11 aa, Artificial Sequence
  Description of Artificial Sequence: Synthetic peptide
  Seed: FSFTGEEMATK
FTFTGEEMATR

SEQ ID NO: 171175 - protein, 9 aa, Artificial Sequence
  Description of Artificial Sequence: Synthetic peptide
  Seed: FSFTGEEMA
FTFTGEEMF

SEQ ID NO: 171176 - protein, 9 aa, Artificial Sequence
  Description of Artificial Sequence: Synthetic peptide
  Seed: FSFTGEEMA
FTFTGEEMM

SEQ ID NO: 171177 - protein, 9 aa, Artificial Sequence
  Description of Artificial Sequence: Synthetic peptide
  Seed: FSFTGEEMA
FTFTGEEMT

SEQ ID NO: 171178 - protein, 8 aa, Artificial Sequence
  Description of Artificial Sequence: Synthetic peptide
  Seed: FSFTGEEM
FVFTGEEF

SEQ ID NO: 171179 - protein, 8 aa, Artificial Sequence
  Description of Artificial Sequence: Synthetic peptide
  Seed: FSFTGEEM
FVFTGEEL

SEQ ID NO: 171180 - protein, 8 aa, Artificial Sequence
  Description of Artificial Sequence: Synthetic peptide
  Seed: FSFTGEEM
FVFTGEEM

SEQ ID NO: 171181 - protein, 9 aa, Artificial Sequence
  Description of Artificial Sequence: Synthetic peptide
  Seed: FSFTGEEMA
FVFTGEEMA

SEQ ID NO: 171182 - protein, 11 aa, Artificial Sequence
  Description of Artificial Sequence: Synthetic peptide
  Seed: FSFTGEEMATK
FVFTGEEMATK

SEQ ID NO: 171183 - protein, 9 aa, Artificial Sequence
  Description of Artificial Sequence: Synthetic peptide
  Seed: FSFTGEEMA
FVFTGEEMF

SEQ ID NO: 171184 - protein, 9 aa, Artificial Sequence
  Description of Artificial Sequence: Synthetic peptide
  Seed: FSFTGEEMA
FVFTGEEML

SEQ ID NO: 171185 - protein, 9 aa, Artificial Sequence
  Description of Artificial Sequence: Synthetic peptide
  Seed: FSFTGEEMA
FVFTGEEMM

SEQ ID NO: 171186 - protein, 8 aa, Artificial Sequence
  Description of Artificial Sequence: Synthetic peptide
  Seed: FSFTGEEM
FVFTGEEY

SEQ ID NO: 171187 - protein, 9 aa, Artificial Sequence
  Description of Artificial Sequence: Synthetic peptide
  Seed: FTGEEMATK
FVGEEMATK

SEQ ID NO: 171188 - protein, 10 aa, Artificial Sequence
  Description of Artificial Sequence: Synthetic peptide
  Seed: HIFSFTGEEM
HAFSFTGEEA

SEQ ID NO: 171189 - protein, 10 aa, Artificial Sequence
  Description of Artificial Sequence: Synthetic peptide
  Seed: HIFSFTGEEM
HAFSFTGEEF

SEQ ID NO: 171190 - protein, 10 aa, Artificial Sequence
  Description of Artificial Sequence: Synthetic peptide
  Seed: HIFSFTGEEM
HAFSFTGEEI

SEQ ID NO: 171191 - protein, 10 aa, Artificial Sequence
  Description of Artificial Sequence: Synthetic peptide
  Seed: HIFSFTGEEM
HAFSFTGEEK

SEQ ID NO: 171192 - protein, 10 aa, Artificial Sequence
  Description of Artificial Sequence: Synthetic peptide
  Seed: HIFSFTGEEM
HAFSFTGEEL

SEQ ID NO: 171193 - protein, 10 aa, Artificial Sequence
  Description of Artificial Sequence: Synthetic peptide
  Seed: HIFSFTGEEM
HAFSFTGEEM

SEQ ID NO: 171194 - protein, 10 aa, Artificial Sequence
  Description of Artificial Sequence: Synthetic peptide
  Seed: HIFSFTGEEM
HAFSFTGEER

SEQ ID NO: 171195 - protein, 10 aa, Artificial Sequence
  Description of Artificial Sequence: Synthetic peptide
  Seed: HIFSFTGEEM
HAFSFTGEEV

SEQ ID NO: 171196 - protein, 10 aa, Artificial Sequence
  Description of Artificial Sequence: Synthetic peptide
  Seed: HIFSFTGEEM
HAFSFTGEEY

SEQ ID NO: 171197 - protein, 10 aa, Artificial Sequence
  Description of Artificial Sequence: Synthetic peptide
  Seed: HIFSFTGEEM
HCFSFTGEEF

SEQ ID NO: 171198 - protein, 10 aa, Artificial Sequence
  Description of Artificial Sequence: Synthetic peptide
  Seed: HIFSFTGEEM
HEFSFTGEEF

SEQ ID NO: 171199 - protein, 10 aa, Artificial Sequence
  Description of Artificial Sequence: Synthetic peptide
  Seed: HIFSFTGEEM
HEFSFTGEEM

SEQ ID NO: 171200 - protein, 10 aa, Artificial Sequence
  Description of Artificial Sequence: Synthetic peptide
  Seed: HIFSFTGEEM
HEFSFTGEEY

SEQ ID NO: 171201 - protein, 10 aa, Artificial Sequence
  Description of Artificial Sequence: Synthetic peptide
  Seed: HIFSFTGEEM
HFFSFTGEEF

SEQ ID NO: 171202 - protein, 10 aa, Artificial Sequence
  Description of Artificial Sequence: Synthetic peptide
  Seed: HIFSFTGEEM
HFFSFTGEEI

SEQ ID NO: 171203 - protein, 10 aa, Artificial Sequence
  Description of Artificial Sequence: Synthetic peptide
  Seed: HIFSFTGEEM
HFFSFTGEEL

SEQ ID NO: 171204 - protein, 10 aa, Artificial Sequence
  Description of Artificial Sequence: Synthetic peptide
  Seed: HIFSFTGEEM
HFFSFTGEEM

SEQ ID NO: 171205 - protein, 10 aa, Artificial Sequence
  Description of Artificial Sequence: Synthetic peptide
  Seed: HIFSFTGEEM
HFFSFTGEEY

SEQ ID NO: 171206 - protein, 10 aa, Artificial Sequence
  Description of Artificial Sequence: Synthetic peptide
  Seed: HIFSFTGEEM
HGFSFTGEEF

SEQ ID NO: 171207 - protein, 10 aa, Artificial Sequence
  Description of Artificial Sequence: Synthetic peptide
  Seed: HIFSFTGEEM
HGFSFTGEEV

SEQ ID NO: 171208 - protein, 10 aa, Artificial Sequence
  Description of Artificial Sequence: Synthetic peptide
  Seed: HIFSFTGEEM
HGFSFTGEEY

SEQ ID NO: 171209 - protein, 10 aa, Artificial Sequence
  Description of Artificial Sequence: Synthetic peptide
  Seed: HIFSFTGEEM
HHFSFTGEEF

SEQ ID NO: 171210 - protein, 10 aa, Artificial Sequence
  Description of Artificial Sequence: Synthetic peptide
  Seed: HIFSFTGEEM
HHFSFTGEEM

SEQ ID NO: 171211 - protein, 10 aa, Artificial Sequence
  Description of Artificial Sequence: Synthetic peptide
  Seed: HIFSFTGEEM
HHFSFTGEEY

SEQ ID NO: 171212 - protein, 10 aa, Artificial Sequence
  Description of Artificial Sequence: Synthetic peptide
  Seed: HIFSFTGEEM
HIFSFTGEEA

SEQ ID NO: 171213 - protein, 10 aa, Artificial Sequence
  Description of Artificial Sequence: Synthetic peptide
  Seed: HIFSFTGEEM
HIFSFTGEEF

SEQ ID NO: 171214 - protein, 10 aa, Artificial Sequence
  Description of Artificial Sequence: Synthetic peptide
  Seed: HIFSFTGEEM
HIFSFTGEEI

SEQ ID NO: 171215 - protein, 10 aa, Artificial Sequence
  Description of Artificial Sequence: Synthetic peptide
  Seed: HIFSFTGEEM
HIFSFTGEEK

SEQ ID NO: 171216 - protein, 10 aa, Artificial Sequence
  Description of Artificial Sequence: Synthetic peptide
  Seed: HIFSFTGEEM
HIFSFTGEEL

SEQ ID NO: 171217 - protein, 10 aa, Artificial Sequence
  Description of Artificial Sequence: Synthetic peptide
  Seed: HIFSFTGEEM
HIFSFTGEER

SEQ ID NO: 171218 - protein, 10 aa, Artificial Sequence
  Description of Artificial Sequence: Synthetic peptide
  Seed: HIFSFTGEEM
HIFSFTGEEV

SEQ ID NO: 171219 - protein, 10 aa, Artificial Sequence
  Description of Artificial Sequence: Synthetic peptide
  Seed: HIFSFTGEEM
HIFSFTGEEY

SEQ ID NO: 171220 - protein, 10 aa, Artificial Sequence
  Description of Artificial Sequence: Synthetic peptide
  Seed: HIFSFTGEEM
HKFSFTGEEF

SEQ ID NO: 171221 - protein, 10 aa, Artificial Sequence
  Description of Artificial Sequence: Synthetic peptide
  Seed: HIFSFTGEEM
HKFSFTGEEL

SEQ ID NO: 171222 - protein, 10 aa, Artificial Sequence
  Description of Artificial Sequence: Synthetic peptide
  Seed: HIFSFTGEEM
HKFSFTGEEM

SEQ ID NO: 171223 - protein, 10 aa, Artificial Sequence
  Description of Artificial Sequence: Synthetic peptide
  Seed: HIFSFTGEEM
HKFSFTGEEW

SEQ ID NO: 171224 - protein, 10 aa, Artificial Sequence
  Description of Artificial Sequence: Synthetic peptide
  Seed: HIFSFTGEEM
HKFSFTGEEY

SEQ ID NO: 171225 - protein, 10 aa, Artificial Sequence
  Description of Artificial Sequence: Synthetic peptide
  Seed: HIFSFTGEEM
HLFSFTGEEA

SEQ ID NO: 171226 - protein, 10 aa, Artificial Sequence
  Description of Artificial Sequence: Synthetic peptide
  Seed: HIFSFTGEEM
HLFSFTGEEF

SEQ ID NO: 171227 - protein, 10 aa, Artificial Sequence
  Description of Artificial Sequence: Synthetic peptide
  Seed: HIFSFTGEEM
HLFSFTGEEI

SEQ ID NO: 171228 - protein, 10 aa, Artificial Sequence
  Description of Artificial Sequence: Synthetic peptide
  Seed: HIFSFTGEEM
HLFSFTGEEL

SEQ ID NO: 171229 - protein, 10 aa, Artificial Sequence
  Description of Artificial Sequence: Synthetic peptide
  Seed: HIFSFTGEEM
HLFSFTGEEM

SEQ ID NO: 171230 - protein, 10 aa, Artificial Sequence
  Description of Artificial Sequence: Synthetic peptide
  Seed: HIFSFTGEEM
HLFSFTGEER

SEQ ID NO: 171231 - protein, 10 aa, Artificial Sequence
  Description of Artificial Sequence: Synthetic peptide
  Seed: HIFSFTGEEM
HLFSFTGEES

SEQ ID NO: 171232 - protein, 10 aa, Artificial Sequence
  Description of Artificial Sequence: Synthetic peptide
  Seed: HIFSFTGEEM
HLFSFTGEET

SEQ ID NO: 171233 - protein, 10 aa, Artificial Sequence
  Description of Artificial Sequence: Synthetic peptide
  Seed: HIFSFTGEEM
HLFSFTGEEV

SEQ ID NO: 171234 - protein, 10 aa, Artificial Sequence
  Description of Artificial Sequence: Synthetic peptide
  Seed: HIFSFTGEEM
HMFSFTGEEA

SEQ ID NO: 171235 - protein, 10 aa, Artificial Sequence
  Description of Artificial Sequence: Synthetic peptide
  Seed: HIFSFTGEEM
HMFSFTGEEH

SEQ ID NO: 171236 - protein, 10 aa, Artificial Sequence
  Description of Artificial Sequence: Synthetic peptide
  Seed: HIFSFTGEEM
HMFSFTGEEI

SEQ ID NO: 171237 - protein, 10 aa, Artificial Sequence
  Description of Artificial Sequence: Synthetic peptide
  Seed: HIFSFTGEEM
HMFSFTGEEK

SEQ ID NO: 171238 - protein, 10 aa, Artificial Sequence
  Description of Artificial Sequence: Synthetic peptide
  Seed: HIFSFTGEEM
HMFSFTGEEL

SEQ ID NO: 171239 - protein, 10 aa, Artificial Sequence
  Description of Artificial Sequence: Synthetic peptide
  Seed: HIFSFTGEEM
HMFSFTGEEM

SEQ ID NO: 171240 - protein, 10 aa, Artificial Sequence
  Description of Artificial Sequence: Synthetic peptide
  Seed: HIFSFTGEEM
HMFSFTGEER

SEQ ID NO: 171241 - protein, 10 aa, Artificial Sequence
  Description of Artificial Sequence: Synthetic peptide
  Seed: HIFSFTGEEM
HMFSFTGEES

SEQ ID NO: 171242 - protein, 10 aa, Artificial Sequence
  Description of Artificial Sequence: Synthetic peptide
  Seed: HIFSFTGEEM
HMFSFTGEET

SEQ ID NO: 171243 - protein, 10 aa, Artificial Sequence
  Description of Artificial Sequence: Synthetic peptide
  Seed: HIFSFTGEEM
HMFSFTGEEV

SEQ ID NO: 171244 - protein, 10 aa, Artificial Sequence
  Description of Artificial Sequence: Synthetic peptide
  Seed: HIFSFTGEEM
HMFSFTGEEW

SEQ ID NO: 171245 - protein, 10 aa, Artificial Sequence
  Description of Artificial Sequence: Synthetic peptide
  Seed: HIFSFTGEEM
HNFSFTGEEF

SEQ ID NO: 171246 - protein, 10 aa, Artificial Sequence
  Description of Artificial Sequence: Synthetic peptide
  Seed: HIFSFTGEEM
HNFSFTGEEV

SEQ ID NO: 171247 - protein, 10 aa, Artificial Sequence
  Description of Artificial Sequence: Synthetic peptide
  Seed: HIFSFTGEEM
HNFSFTGEEY

SEQ ID NO: 171248 - protein, 10 aa, Artificial Sequence
  Description of Artificial Sequence: Synthetic peptide
  Seed: HIFSFTGEEM
HPFSFTGEEF

SEQ ID NO: 171249 - protein, 10 aa, Artificial Sequence
  Description of Artificial Sequence: Synthetic peptide
  Seed: HIFSFTGEEM
HPFSFTGEEM

SEQ ID NO: 171250 - protein, 10 aa, Artificial Sequence
  Description of Artificial Sequence: Synthetic peptide
  Seed: HIFSFTGEEM
HPFSFTGEEY

SEQ ID NO: 171251 - protein, 10 aa, Artificial Sequence
  Description of Artificial Sequence: Synthetic peptide
  Seed: HIFSFTGEEM
HQFSFTGEEA

SEQ ID NO: 171252 - protein, 10 aa, Artificial Sequence
  Description of Artificial Sequence: Synthetic peptide
  Seed: HIFSFTGEEM
HQFSFTGEEF

SEQ ID NO: 171253 - protein, 10 aa, Artificial Sequence
  Description of Artificial Sequence: Synthetic peptide
  Seed: HIFSFTGEEM
HQFSFTGEEH

SEQ ID NO: 171254 - protein, 10 aa, Artificial Sequence
  Description of Artificial Sequence: Synthetic peptide
  Seed: HIFSFTGEEM
HQFSFTGEEI

SEQ ID NO: 171255 - protein, 10 aa, Artificial Sequence
  Description of Artificial Sequence: Synthetic peptide
  Seed: HIFSFTGEEM
HQFSFTGEEL

SEQ ID NO: 171256 - protein, 10 aa, Artificial Sequence
  Description of Artificial Sequence: Synthetic peptide
  Seed: HIFSFTGEEM
HQFSFTGEEM

SEQ ID NO: 171257 - protein, 10 aa, Artificial Sequence
  Description of Artificial Sequence: Synthetic peptide
  Seed: HIFSFTGEEM
HQFSFTGEEV

SEQ ID NO: 171258 - protein, 10 aa, Artificial Sequence
  Description of Artificial Sequence: Synthetic peptide
  Seed: HIFSFTGEEM
HQFSFTGEEW

SEQ ID NO: 171259 - protein, 10 aa, Artificial Sequence
  Description of Artificial Sequence: Synthetic peptide
  Seed: HIFSFTGEEM
HQFSFTGEEY

SEQ ID NO: 171260 - protein, 10 aa, Artificial Sequence
  Description of Artificial Sequence: Synthetic peptide
  Seed: HIFSFTGEEM
HRFSFTGEEF

SEQ ID NO: 171261 - protein, 10 aa, Artificial Sequence
  Description of Artificial Sequence: Synthetic peptide
  Seed: HIFSFTGEEM
HRFSFTGEEM

SEQ ID NO: 171262 - protein, 10 aa, Artificial Sequence
  Description of Artificial Sequence: Synthetic peptide
  Seed: HIFSFTGEEM
HRFSFTGEEY

SEQ ID NO: 171263 - protein, 10 aa, Artificial Sequence
  Description of Artificial Sequence: Synthetic peptide
  Seed: HIFSFTGEEM
HSFSFTGEEA

SEQ ID NO: 171264 - protein, 10 aa, Artificial Sequence
  Description of Artificial Sequence: Synthetic peptide
  Seed: HIFSFTGEEM
HSFSFTGEEF

SEQ ID NO: 171265 - protein, 10 aa, Artificial Sequence
  Description of Artificial Sequence: Synthetic peptide
  Seed: HIFSFTGEEM
HSFSFTGEEI

SEQ ID NO: 171266 - protein, 10 aa, Artificial Sequence
  Description of Artificial Sequence: Synthetic peptide
  Seed: HIFSFTGEEM
HSFSFTGEEL

SEQ ID NO: 171267 - protein, 10 aa, Artificial Sequence
  Description of Artificial Sequence: Synthetic peptide
  Seed: HIFSFTGEEM
HSFSFTGEEM

SEQ ID NO: 171268 - protein, 10 aa, Artificial Sequence
  Description of Artificial Sequence: Synthetic peptide
  Seed: HIFSFTGEEM
HSFSFTGEER

SEQ ID NO: 171269 - protein, 10 aa, Artificial Sequence
  Description of Artificial Sequence: Synthetic peptide
  Seed: HIFSFTGEEM
HSFSFTGEEV

SEQ ID NO: 171270 - protein, 10 aa, Artificial Sequence
  Description of Artificial Sequence: Synthetic peptide
  Seed: HIFSFTGEEM
HSFSFTGEEY

SEQ ID NO: 171271 - protein, 10 aa, Artificial Sequence
  Description of Artificial Sequence: Synthetic peptide
  Seed: HIFSFTGEEM
HTFSFTGEEA

SEQ ID NO: 171272 - protein, 10 aa, Artificial Sequence
  Description of Artificial Sequence: Synthetic peptide
  Seed: HIFSFTGEEM
HTFSFTGEEF

SEQ ID NO: 171273 - protein, 10 aa, Artificial Sequence
  Description of Artificial Sequence: Synthetic peptide
  Seed: HIFSFTGEEM
HTFSFTGEEI

SEQ ID NO: 171274 - protein, 10 aa, Artificial Sequence
  Description of Artificial Sequence: Synthetic peptide
  Seed: HIFSFTGEEM
HTFSFTGEEK

SEQ ID NO: 171275 - protein, 10 aa, Artificial Sequence
  Description of Artificial Sequence: Synthetic peptide
  Seed: HIFSFTGEEM
HTFSFTGEEL

SEQ ID NO: 171276 - protein, 10 aa, Artificial Sequence
  Description of Artificial Sequence: Synthetic peptide
  Seed: HIFSFTGEEM
HTFSFTGEEM

SEQ ID NO: 171277 - protein, 10 aa, Artificial Sequence
  Description of Artificial Sequence: Synthetic peptide
  Seed: HIFSFTGEEM
HTFSFTGEER

SEQ ID NO: 171278 - protein, 10 aa, Artificial Sequence
  Description of Artificial Sequence: Synthetic peptide
  Seed: HIFSFTGEEM
HTFSFTGEET

SEQ ID NO: 171279 - protein, 10 aa, Artificial Sequence
  Description of Artificial Sequence: Synthetic peptide
  Seed: HIFSFTGEEM
HTFSFTGEEV

SEQ ID NO: 171280 - protein, 10 aa, Artificial Sequence
  Description of Artificial Sequence: Synthetic peptide
  Seed: HIFSFTGEEM
HTFSFTGEEY

SEQ ID NO: 171281 - protein, 10 aa, Artificial Sequence
  Description of Artificial Sequence: Synthetic peptide
  Seed: HIFSFTGEEM
HVFSFTGEEA

SEQ ID NO: 171282 - protein, 10 aa, Artificial Sequence
  Description of Artificial Sequence: Synthetic peptide
  Seed: HIFSFTGEEM
HVFSFTGEEF

SEQ ID NO: 171283 - protein, 10 aa, Artificial Sequence
  Description of Artificial Sequence: Synthetic peptide
  Seed: HIFSFTGEEM
HVFSFTGEEI

SEQ ID NO: 171284 - protein, 10 aa, Artificial Sequence
  Description of Artificial Sequence: Synthetic peptide
  Seed: HIFSFTGEEM
HVFSFTGEEK

SEQ ID NO: 171285 - protein, 10 aa, Artificial Sequence
  Description of Artificial Sequence: Synthetic peptide
  Seed: HIFSFTGEEM
HVFSFTGEEL

SEQ ID NO: 171286 - protein, 10 aa, Artificial Sequence
  Description of Artificial Sequence: Synthetic peptide
  Seed: HIFSFTGEEM
HVFSFTGEEM

SEQ ID NO: 171287 - protein, 10 aa, Artificial Sequence
  Description of Artificial Sequence: Synthetic peptide
  Seed: HIFSFTGEEM
HVFSFTGEER

SEQ ID NO: 171288 - protein, 10 aa, Artificial Sequence
  Description of Artificial Sequence: Synthetic peptide
  Seed: HIFSFTGEEM
HVFSFTGEET

SEQ ID NO: 171289 - protein, 10 aa, Artificial Sequence
  Description of Artificial Sequence: Synthetic peptide
  Seed: HIFSFTGEEM
HVFSFTGEEV

SEQ ID NO: 171290 - protein, 10 aa, Artificial Sequence
  Description of Artificial Sequence: Synthetic peptide
  Seed: HIFSFTGEEM
HVFSFTGEEY

SEQ ID NO: 171291 - protein, 10 aa, Artificial Sequence
  Description of Artificial Sequence: Synthetic peptide
  Seed: HIFSFTGEEM
HWFSFTGEEF

SEQ ID NO: 171292 - protein, 10 aa, Artificial Sequence
  Description of Artificial Sequence: Synthetic peptide
  Seed: HIFSFTGEEM
HWFSFTGEEL

SEQ ID NO: 171293 - protein, 10 aa, Artificial Sequence
  Description of Artificial Sequence: Synthetic peptide
  Seed: HIFSFTGEEM
HWFSFTGEEM

SEQ ID NO: 171294 - protein, 10 aa, Artificial Sequence
  Description of Artificial Sequence: Synthetic peptide
  Seed: HIFSFTGEEM
HWFSFTGEEY

SEQ ID NO: 171295 - protein, 10 aa, Artificial Sequence
  Description of Artificial Sequence: Synthetic peptide
  Seed: HIFSFTGEEM
HYFSFTGEEF

SEQ ID NO: 171296 - protein, 10 aa, Artificial Sequence
  Description of Artificial Sequence: Synthetic peptide
  Seed: HIFSFTGEEM
HYFSFTGEEI

SEQ ID NO: 171297 - protein, 10 aa, Artificial Sequence
  Description of Artificial Sequence: Synthetic peptide
  Seed: HIFSFTGEEM
HYFSFTGEEL

SEQ ID NO: 171298 - protein, 10 aa, Artificial Sequence
  Description of Artificial Sequence: Synthetic peptide
  Seed: HIFSFTGEEM
HYFSFTGEEM

SEQ ID NO: 171299 - protein, 10 aa, Artificial Sequence
  Description of Artificial Sequence: Synthetic peptide
  Seed: HIFSFTGEEM
HYFSFTGEEV

SEQ ID NO: 171300 - protein, 9 aa, Artificial Sequence
  Description of Artificial Sequence: Synthetic peptide
  Seed: IFSFTGEEM
IFSFTGEEI

SEQ ID NO: 171301 - protein, 9 aa, Artificial Sequence
  Description of Artificial Sequence: Synthetic peptide
  Seed: IFSFTGEEM
IFSFTGEEL

SEQ ID NO: 171302 - protein, 9 aa, Artificial Sequence
  Description of Artificial Sequence: Synthetic peptide
  Seed: IFSFTGEEM
IFSFTGEEV

SEQ ID NO: 171303 - protein, 9 aa, Artificial Sequence
  Description of Artificial Sequence: Synthetic peptide
  Seed: IFSFTGEEM
IFSFTGEEW

SEQ ID NO: 171304 - protein, 9 aa, Artificial Sequence
  Description of Artificial Sequence: Synthetic peptide
  Seed: IFSFTGEEM
IFSFTGEEY

SEQ ID NO: 171305 - protein, 9 aa, Artificial Sequence
  Description of Artificial Sequence: Synthetic peptide
  Seed: IFSFTGEEM
IMSFTGEEF

SEQ ID NO: 171306 - protein, 9 aa, Artificial Sequence
  Description of Artificial Sequence: Synthetic peptide
  Seed: IFSFTGEEM
IMSFTGEEL

SEQ ID NO: 171307 - protein, 9 aa, Artificial Sequence
  Description of Artificial Sequence: Synthetic peptide
  Seed: IFSFTGEEM
IMSFTGEEM

SEQ ID NO: 171308 - protein, 9 aa, Artificial Sequence
  Description of Artificial Sequence: Synthetic peptide
  Seed: IFSFTGEEM
IMSFTGEEW

SEQ ID NO: 171309 - protein, 9 aa, Artificial Sequence
  Description of Artificial Sequence: Synthetic peptide
  Seed: IFSFTGEEM
IMSFTGEEY

SEQ ID NO: 171310 - protein, 9 aa, Artificial Sequence
  Description of Artificial Sequence: Synthetic peptide
  Seed: IFSFTGEEM
IWSFTGEEF

SEQ ID NO: 171311 - protein, 9 aa, Artificial Sequence
  Description of Artificial Sequence: Synthetic peptide
  Seed: IFSFTGEEM
IWSFTGEEI

SEQ ID NO: 171312 - protein, 9 aa, Artificial Sequence
  Description of Artificial Sequence: Synthetic peptide
  Seed: IFSFTGEEM
IWSFTGEEL

SEQ ID NO: 171313 - protein, 9 aa, Artificial Sequence
  Description of Artificial Sequence: Synthetic peptide
  Seed: IFSFTGEEM
IWSFTGEEM

SEQ ID NO: 171314 - protein, 9 aa, Artificial Sequence
  Description of Artificial Sequence: Synthetic peptide
  Seed: IFSFTGEEM
IWSFTGEEW

SEQ ID NO: 171315 - protein, 9 aa, Artificial Sequence
  Description of Artificial Sequence: Synthetic peptide
  Seed: IFSFTGEEM
IWSFTGEEY

SEQ ID NO: 171316 - protein, 9 aa, Artificial Sequence
  Description of Artificial Sequence: Synthetic peptide
  Seed: IFSFTGEEM
IYSFTGEEH

SEQ ID NO: 171317 - protein, 9 aa, Artificial Sequence
  Description of Artificial Sequence: Synthetic peptide
  Seed: IFSFTGEEM
IYSFTGEEM

SEQ ID NO: 171318 - protein, 9 aa, Artificial Sequence
  Description of Artificial Sequence: Synthetic peptide
  Seed: IFSFTGEEM
IYSFTGEEV

SEQ ID NO: 171319 - protein, 9 aa, Artificial Sequence
  Description of Artificial Sequence: Synthetic peptide
  Seed: IFSFTGEEM
IYSFTGEEW

SEQ ID NO: 171320 - protein, 9 aa, Artificial Sequence
  Description of Artificial Sequence: Synthetic peptide
  Seed: IFSFTGEEM
IYSFTGEEY

SEQ ID NO: 171321 - protein, 10 aa, Artificial Sequence
  Description of Artificial Sequence: Synthetic peptide
  Seed: SFTGEEMATK
SATGEEMATK

SEQ ID NO: 171322 - protein, 10 aa, Artificial Sequence
  Description of Artificial Sequence: Synthetic peptide
  Seed: SFTGEEMATK
SCTGEEMATK

SEQ ID NO: 171323 - protein, 10 aa, Artificial Sequence
  Description of Artificial Sequence: Synthetic peptide
  Seed: SFTGEEMATK
SDTGEEMATK

SEQ ID NO: 171324 - protein, 10 aa, Artificial Sequence
  Description of Artificial Sequence: Synthetic peptide
  Seed: SFTGEEMATK
SETGEEMATK

SEQ ID NO: 171325 - protein, 10 aa, Artificial Sequence
  Description of Artificial Sequence: Synthetic peptide
  Seed: SFTGEEMATK
SGTGEEMATK

SEQ ID NO: 171326 - protein, 10 aa, Artificial Sequence
  Description of Artificial Sequence: Synthetic peptide
  Seed: SFTGEEMATK
SHTGEEMATK

SEQ ID NO: 171327 - protein, 10 aa, Artificial Sequence
  Description of Artificial Sequence: Synthetic peptide
  Seed: SFTGEEMATK
SITGEEMATK

SEQ ID NO: 171328 - protein, 10 aa, Artificial Sequence
  Description of Artificial Sequence: Synthetic peptide
  Seed: SFTGEEMATK
SKTGEEMATK

SEQ ID NO: 171329 - protein, 10 aa, Artificial Sequence
  Description of Artificial Sequence: Synthetic peptide
  Seed: SFTGEEMATK
SLTGEEMATK

SEQ ID NO: 171330 - protein, 10 aa, Artificial Sequence
  Description of Artificial Sequence: Synthetic peptide
  Seed: SFTGEEMATK
SMTGEEMATK

SEQ ID NO: 171331 - protein, 10 aa, Artificial Sequence
  Description of Artificial Sequence: Synthetic peptide
  Seed: SFTGEEMATK
SNTGEEMATK

SEQ ID NO: 171332 - protein, 10 aa, Artificial Sequence
  Description of Artificial Sequence: Synthetic peptide
  Seed: SFTGEEMATK
SPTGEEMATK

SEQ ID NO: 171333 - protein, 10 aa, Artificial Sequence
  Description of Artificial Sequence: Synthetic peptide
  Seed: SFTGEEMATK
SQTGEEMATK

SEQ ID NO: 171334 - protein, 10 aa, Artificial Sequence
  Description of Artificial Sequence: Synthetic peptide
  Seed: SFTGEEMATK
SRTGEEMATK

SEQ ID NO: 171335 - protein, 10 aa, Artificial Sequence
  Description of Artificial Sequence: Synthetic peptide
  Seed: SFTGEEMATK
SSTGEEMATK

SEQ ID NO: 171336 - protein, 10 aa, Artificial Sequence
  Description of Artificial Sequence: Synthetic peptide
  Seed: SFTGEEMATK
STTGEEMATK

SEQ ID NO: 171337 - protein, 10 aa, Artificial Sequence
  Description of Artificial Sequence: Synthetic peptide
  Seed: SFTGEEMATK
SVTGEEMATK

SEQ ID NO: 171338 - protein, 10 aa, Artificial Sequence
  Description of Artificial Sequence: Synthetic peptide
  Seed: SFTGEEMATK
SWTGEEMATK

SEQ ID NO: 171339 - protein, 10 aa, Artificial Sequence
  Description of Artificial Sequence: Synthetic peptide
  Seed: SFTGEEMATK
SYTGEEMATK

SEQ ID NO: 171340 - protein, 13 aa, Influenza A virus
AATALANTIEVFR

SEQ ID NO: 171341 - protein, 14 aa, Influenza A virus
AATALANTIEVFRS

SEQ ID NO: 171342 - protein, 15 aa, Influenza A virus
AATALANTIEVFRSN

SEQ ID NO: 171343 - protein, 16 aa, Influenza A virus
AATALANTIEVFRSNG

SEQ ID NO: 171344 - protein, 14 aa, Influenza A virus
ADMSIGVTVIKNNM

SEQ ID NO: 171345 - protein, 15 aa, Influenza A virus
ADMSIGVTVIKNNMI

SEQ ID NO: 171346 - protein, 16 aa, Influenza A virus
ADMSIGVTVIKNNMIN

SEQ ID NO: 171347 - protein, 17 aa, Influenza A virus
ADMSIGVTVIKNNMINN

SEQ ID NO: 171348 - protein, 18 aa, Influenza A virus
ADMSIGVTVIKNNMINND

SEQ ID NO: 171349 - protein, 19 aa, Influenza A virus
ADMSIGVTVIKNNMINNDL

SEQ ID NO: 171350 - protein, 20 aa, Influenza A virus
ADMSIGVTVIKNNMINNDLG

SEQ ID NO: 171351 - protein, 21 aa, Influenza A virus
ADMSIGVTVIKNNMINNDLGP

SEQ ID NO: 171352 - protein, 22 aa, Influenza A virus
ADMSIGVTVIKNNMINNDLGPA

SEQ ID NO: 171353 - protein, 23 aa, Influenza A virus
ADMSIGVTVIKNNMINNDLGPAT

SEQ ID NO: 171354 - protein, 24 aa, Influenza A virus
ADMSIGVTVIKNNMINNDLGPATA

SEQ ID NO: 171355 - protein, 25 aa, Influenza A virus
ADMSIGVTVIKNNMINNDLGPATAQ

SEQ ID NO: 171356 - protein, 14 aa, Influenza A virus
AERGKLKRRAIATP

SEQ ID NO: 171357 - protein, 15 aa, Influenza A virus
AERGKLKRRAIATPG

SEQ ID NO: 171358 - protein, 16 aa, Influenza A virus
AERGKLKRRAIATPGM

SEQ ID NO: 171359 - protein, 17 aa, Influenza A virus
AERGKLKRRAIATPGMQ

SEQ ID NO: 171360 - protein, 18 aa, Influenza A virus
AERGKLKRRAIATPGMQI

SEQ ID NO: 171361 - protein, 19 aa, Influenza A virus
AERGKLKRRAIATPGMQIR

SEQ ID NO: 171362 - protein, 20 aa, Influenza A virus
AERGKLKRRAIATPGMQIRG

SEQ ID NO: 171363 - protein, 21 aa, Influenza A virus
AERGKLKRRAIATPGMQIRGF

SEQ ID NO: 171364 - protein, 22 aa, Influenza A virus
AERGKLKRRAIATPGMQIRGFV

SEQ ID NO: 171365 - protein, 23 aa, Influenza A virus
AERGKLKRRAIATPGMQIRGFVY

SEQ ID NO: 171366 - protein, 24 aa, Influenza A virus
AERGKLKRRAIATPGMQIRGFVYF

SEQ ID NO: 171367 - protein, 25 aa, Influenza A virus
AERGKLKRRAIATPGMQIRGFVYFV

SEQ ID NO: 171368 - protein, 15 aa, Influenza A virus
AGLLVSDGGPNLYNI

SEQ ID NO: 171369 - protein, 16 aa, Influenza A virus
AGLLVSDGGPNLYNIR

SEQ ID NO: 171370 - protein, 17 aa, Influenza A virus
AGLLVSDGGPNLYNIRN

SEQ ID NO: 171371 - protein, 19 aa, Influenza A virus
AGLLVSDGGPNLYNIRNLH

SEQ ID NO: 171372 - protein, 20 aa, Influenza A virus
AGLLVSDGGPNLYNIRNLHI

SEQ ID NO: 171373 - protein, 21 aa, Influenza A virus
AGLLVSDGGPNLYNIRNLHIP

SEQ ID NO: 171374 - protein, 22 aa, Influenza A virus
AGLLVSDGGPNLYNIRNLHIPE

SEQ ID NO: 171375 - protein, 23 aa, Influenza A virus
AGLLVSDGGPNLYNIRNLHIPEV

SEQ ID NO: 171376 - protein, 24 aa, Influenza A virus
AGLLVSDGGPNLYNIRNLHIPEVC

SEQ ID NO: 171377 - protein, 25 aa, Influenza A virus
AGLLVSDGGPNLYNIRNLHIPEVCL

SEQ ID NO: 171378 - protein, 15 aa, Influenza A virus
AIATPGMQIRGFVYF

SEQ ID NO: 171379 - protein, 16 aa, Influenza A virus
AIATPGMQIRGFVYFV

SEQ ID NO: 171380 - protein, 17 aa, Influenza A virus
AIATPGMQIRGFVYFVE

SEQ ID NO: 171381 - protein, 18 aa, Influenza A virus
AIATPGMQIRGFVYFVET

SEQ ID NO: 171382 - protein, 19 aa, Influenza A virus
AIATPGMQIRGFVYFVETL

SEQ ID NO: 171383 - protein, 20 aa, Influenza A virus
AIATPGMQIRGFVYFVETLA

SEQ ID NO: 171384 - protein, 21 aa, Influenza A virus
AIATPGMQIRGFVYFVETLAR

SEQ ID NO: 171385 - protein, 22 aa, Influenza A virus
AIATPGMQIRGFVYFVETLARS

SEQ ID NO: 171386 - protein, 23 aa, Influenza A virus
AIATPGMQIRGFVYFVETLARSI

SEQ ID NO: 171387 - protein, 24 aa, Influenza A virus
AIATPGMQIRGFVYFVETLARSIC

SEQ ID NO: 171388 - protein, 25 aa, Influenza A virus
AIATPGMQIRGFVYFVETLARSICE

SEQ ID NO: 171389 - protein, 15 aa, Influenza A virus
AISTTFPYTGDPPYS

SEQ ID NO: 171390 - protein, 16 aa, Influenza A virus
AISTTFPYTGDPPYSH

SEQ ID NO: 171391 - protein, 17 aa, Influenza A virus
AISTTFPYTGDPPYSHG

SEQ ID NO: 171392 - protein, 19 aa, Influenza A virus
AISTTFPYTGDPPYSHGTG

SEQ ID NO: 171393 - protein, 20 aa, Influenza A virus
AISTTFPYTGDPPYSHGTGT

SEQ ID NO: 171394 - protein, 24 aa, Influenza A virus
AISTTFPYTGDPPYSHGTGTGYTM

SEQ ID NO: 171395 - protein, 25 aa, Influenza A virus
AISTTFPYTGDPPYSHGTGTGYTMD

SEQ ID NO: 171396 - protein, 13 aa, Influenza A virus
AKLANVVRKMMTN

SEQ ID NO: 171397 - protein, 14 aa, Influenza A virus
AKLANVVRKMMTNS

SEQ ID NO: 171398 - protein, 15 aa, Influenza A virus
AKLANVVRKMMTNSQ

SEQ ID NO: 171399 - protein, 16 aa, Influenza A virus
AKLANVVRKMMTNSQD

SEQ ID NO: 171400 - protein, 17 aa, Influenza A virus
AKLANVVRKMMTNSQDT

SEQ ID NO: 171401 - protein, 18 aa, Influenza A virus
AKLANVVRKMMTNSQDTE

SEQ ID NO: 171402 - protein, 19 aa, Influenza A virus
AKLANVVRKMMTNSQDTEL

SEQ ID NO: 171403 - protein, 20 aa, Influenza A virus
AKLANVVRKMMTNSQDTELS

SEQ ID NO: 171404 - protein, 21 aa, Influenza A virus
AKLANVVRKMMTNSQDTELSF

SEQ ID NO: 171405 - protein, 22 aa, Influenza A virus
AKLANVVRKMMTNSQDTELSFT

SEQ ID NO: 171406 - protein, 23 aa, Influenza A virus
AKLANVVRKMMTNSQDTELSFTI

SEQ ID NO: 171407 - protein, 24 aa, Influenza A virus
AKLANVVRKMMTNSQDTELSFTIT

SEQ ID NO: 171408 - protein, 25 aa, Influenza A virus
AKLANVVRKMMTNSQDTELSFTITG

SEQ ID NO: 171409 - protein, 14 aa, Influenza A virus
ALIVNAPNHEGIQA

SEQ ID NO: 171410 - protein, 15 aa, Influenza A virus
ALIVNAPNHEGIQAG

SEQ ID NO: 171411 - protein, 16 aa, Influenza A virus
ALIVNAPNHEGIQAGV

SEQ ID NO: 171412 - protein, 13 aa, Influenza A virus
ALQLFIKDYRYTY

SEQ ID NO: 171413 - protein, 14 aa, Influenza A virus
ALQLFIKDYRYTYR

SEQ ID NO: 171414 - protein, 15 aa, Influenza A virus
ALQLFIKDYRYTYRC

SEQ ID NO: 171415 - protein, 16 aa, Influenza A virus
ALQLFIKDYRYTYRCH

SEQ ID NO: 171416 - protein, 17 aa, Influenza A virus
ALQLFIKDYRYTYRCHR

SEQ ID NO: 171417 - protein, 18 aa, Influenza A virus
ALQLFIKDYRYTYRCHRG

SEQ ID NO: 171418 - protein, 19 aa, Influenza A virus
ALQLFIKDYRYTYRCHRGD

SEQ ID NO: 171419 - protein, 20 aa, Influenza A virus
ALQLFIKDYRYTYRCHRGDT

SEQ ID NO: 171420 - protein, 21 aa, Influenza A virus
ALQLFIKDYRYTYRCHRGDTQ

SEQ ID NO: 171421 - protein, 22 aa, Influenza A virus
ALQLFIKDYRYTYRCHRGDTQI

SEQ ID NO: 171422 - protein, 23 aa, Influenza A virus
ALQLFIKDYRYTYRCHRGDTQIQ

SEQ ID NO: 171423 - protein, 24 aa, Influenza A virus
ALQLFIKDYRYTYRCHRGDTQIQT

SEQ ID NO: 171424 - protein, 25 aa, Influenza A virus
ALQLFIKDYRYTYRCHRGDTQIQTR

SEQ ID NO: 171425 - protein, 15 aa, Influenza A virus
ALTLNTMTKDAERGK

SEQ ID NO: 171426 - protein, 20 aa, Influenza A virus
ALTLNTMTKDAERGKLKRRA

SEQ ID NO: 171427 - protein, 22 aa, Influenza A virus
ALTLNTMTKDAERGKLKRRAIA

SEQ ID NO: 171428 - protein, 23 aa, Influenza A virus
ALTLNTMTKDAERGKLKRRAIAT

SEQ ID NO: 171429 - protein, 24 aa, Influenza A virus
ALTLNTMTKDAERGKLKRRAIATP

SEQ ID NO: 171430 - protein, 25 aa, Influenza A virus
ALTLNTMTKDAERGKLKRRAIATPG

SEQ ID NO: 171431 - protein, 15 aa, Influenza A virus
AMAFLEESHPGIFEN

SEQ ID NO: 171432 - protein, 15 aa, Influenza A virus
AMVSRARIDARIDFE

SEQ ID NO: 171433 - protein, 16 aa, Influenza A virus
AMVSRARIDARIDFES

SEQ ID NO: 171434 - protein, 17 aa, Influenza A virus
AMVSRARIDARIDFESG

SEQ ID NO: 171435 - protein, 19 aa, Influenza A virus
AMVSRARIDARIDFESGRI

SEQ ID NO: 171436 - protein, 20 aa, Influenza A virus
AMVSRARIDARIDFESGRIK

SEQ ID NO: 171437 - protein, 21 aa, Influenza A virus
AMVSRARIDARIDFESGRIKK

SEQ ID NO: 171438 - protein, 22 aa, Influenza A virus
AMVSRARIDARIDFESGRIKKE

SEQ ID NO: 171439 - protein, 23 aa, Influenza A virus
AMVSRARIDARIDFESGRIKKEE

SEQ ID NO: 171440 - protein, 24 aa, Influenza A virus
AMVSRARIDARIDFESGRIKKEEF

SEQ ID NO: 171441 - protein, 14 aa, Influenza A virus
ANESGRLIDFLKDV

SEQ ID NO: 171442 - protein, 13 aa, Influenza A virus
ANFSMELPSFGVS

SEQ ID NO: 171443 - protein, 14 aa, Influenza A virus
ANFSMELPSFGVSG

SEQ ID NO: 171444 - protein, 15 aa, Influenza A virus
ANFSMELPSFGVSGI

SEQ ID NO: 171445 - protein, 16 aa, Influenza A virus
ANFSMELPSFGVSGIN

SEQ ID NO: 171446 - protein, 17 aa, Influenza A virus
ANFSMELPSFGVSGINE

SEQ ID NO: 171447 - protein, 18 aa, Influenza A virus
ANFSMELPSFGVSGINES

SEQ ID NO: 171448 - protein, 19 aa, Influenza A virus
ANFSMELPSFGVSGINESA

SEQ ID NO: 171449 - protein, 20 aa, Influenza A virus
ANFSMELPSFGVSGINESAD

SEQ ID NO: 171450 - protein, 21 aa, Influenza A virus
ANFSMELPSFGVSGINESADM

SEQ ID NO: 171451 - protein, 22 aa, Influenza A virus
ANFSMELPSFGVSGINESADMS

SEQ ID NO: 171452 - protein, 23 aa, Influenza A virus
ANFSMELPSFGVSGINESADMSI

SEQ ID NO: 171453 - protein, 24 aa, Influenza A virus
ANFSMELPSFGVSGINESADMSIG

SEQ ID NO: 171454 - protein, 25 aa, Influenza A virus
ANFSMELPSFGVSGINESADMSIGV

SEQ ID NO: 171455 - protein, 13 aa, Influenza A virus
ANVVRKMMTNSQD

SEQ ID NO: 171456 - protein, 14 aa, Influenza A virus
ANVVRKMMTNSQDT

SEQ ID NO: 171457 - protein, 15 aa, Influenza A virus
ANVVRKMMTNSQDTE

SEQ ID NO: 171458 - protein, 16 aa, Influenza A virus
ANVVRKMMTNSQDTEL

SEQ ID NO: 171459 - protein, 17 aa, Influenza A virus
ANVVRKMMTNSQDTELS

SEQ ID NO: 171460 - protein, 19 aa, Influenza A virus
ANVVRKMMTNSQDTELSFT

SEQ ID NO: 171461 - protein, 20 aa, Influenza A virus
ANVVRKMMTNSQDTELSFTI

SEQ ID NO: 171462 - protein, 21 aa, Influenza A virus
ANVVRKMMTNSQDTELSFTIT

SEQ ID NO: 171463 - protein, 22 aa, Influenza A virus
ANVVRKMMTNSQDTELSFTITG

SEQ ID NO: 171464 - protein, 23 aa, Influenza A virus
ANVVRKMMTNSQDTELSFTITGD

SEQ ID NO: 171465 - protein, 24 aa, Influenza A virus
ANVVRKMMTNSQDTELSFTITGDN

SEQ ID NO: 171466 - protein, 25 aa, Influenza A virus
ANVVRKMMTNSQDTELSFTITGDNT

SEQ ID NO: 171467 - protein, 13 aa, Influenza A virus
APIMFSNKMARLG

SEQ ID NO: 171468 - protein, 14 aa, Influenza A virus
APIMFSNKMARLGK

SEQ ID NO: 171469 - protein, 15 aa, Influenza A virus
APIMFSNKMARLGKG

SEQ ID NO: 171470 - protein, 16 aa, Influenza A virus
APIMFSNKMARLGKGY

SEQ ID NO: 171471 - protein, 17 aa, Influenza A virus
APIMFSNKMARLGKGYM

SEQ ID NO: 171472 - protein, 18 aa, Influenza A virus
APIMFSNKMARLGKGYMF

SEQ ID NO: 171473 - protein, 19 aa, Influenza A virus
APIMFSNKMARLGKGYMFE

SEQ ID NO: 171474 - protein, 20 aa, Influenza A virus
APIMFSNKMARLGKGYMFES

SEQ ID NO: 171475 - protein, 21 aa, Influenza A virus
APIMFSNKMARLGKGYMFESK

SEQ ID NO: 171476 - protein, 15 aa, Influenza A virus
APNHEGIQAGVDRFY

SEQ ID NO: 171477 - protein, 16 aa, Influenza A virus
APNHEGIQAGVDRFYR

SEQ ID NO: 171478 - protein, 17 aa, Influenza A virus
APNHEGIQAGVDRFYRT

SEQ ID NO: 171479 - protein, 18 aa, Influenza A virus
APNHEGIQAGVDRFYRTC

SEQ ID NO: 171480 - protein, 19 aa, Influenza A virus
APNHEGIQAGVDRFYRTCK

SEQ ID NO: 171481 - protein, 20 aa, Influenza A virus
APNHEGIQAGVDRFYRTCKL

SEQ ID NO: 171482 - protein, 13 aa, Influenza A virus
AQMALQLFIKDYR

SEQ ID NO: 171483 - protein, 14 aa, Influenza A virus
AQMALQLFIKDYRY

SEQ ID NO: 171484 - protein, 15 aa, Influenza A virus
AQMALQLFIKDYRYT

SEQ ID NO: 171485 - protein, 16 aa, Influenza A virus
AQMALQLFIKDYRYTY

SEQ ID NO: 171486 - protein, 17 aa, Influenza A virus
AQMALQLFIKDYRYTYR

SEQ ID NO: 171487 - protein, 18 aa, Influenza A virus
AQMALQLFIKDYRYTYRC

SEQ ID NO: 171488 - protein, 19 aa, Influenza A virus
AQMALQLFIKDYRYTYRCH

SEQ ID NO: 171489 - protein, 20 aa, Influenza A virus
AQMALQLFIKDYRYTYRCHR

SEQ ID NO: 171490 - protein, 21 aa, Influenza A virus
AQMALQLFIKDYRYTYRCHRG

SEQ ID NO: 171491 - protein, 22 aa, Influenza A virus
AQMALQLFIKDYRYTYRCHRGD

SEQ ID NO: 171492 - protein, 23 aa, Influenza A virus
AQMALQLFIKDYRYTYRCHRGDT

SEQ ID NO: 171493 - protein, 24 aa, Influenza A virus
AQMALQLFIKDYRYTYRCHRGDTQ

SEQ ID NO: 171494 - protein, 25 aa, Influenza A virus
AQMALQLFIKDYRYTYRCHRGDTQI

SEQ ID NO: 171495 - protein, 15 aa, Influenza A virus
AQNAISTTFPYTGDP

SEQ ID NO: 171496 - protein, 16 aa, Influenza A virus
AQNAISTTFPYTGDPP

SEQ ID NO: 171497 - protein, 17 aa, Influenza A virus
AQNAISTTFPYTGDPPY

SEQ ID NO: 171498 - protein, 19 aa, Influenza A virus
AQNAISTTFPYTGDPPYSH

SEQ ID NO: 171499 - protein, 20 aa, Influenza A virus
AQNAISTTFPYTGDPPYSHG

SEQ ID NO: 171500 - protein, 21 aa, Influenza A virus
AQNAISTTFPYTGDPPYSHGT

SEQ ID NO: 171501 - protein, 22 aa, Influenza A virus
AQNAISTTFPYTGDPPYSHGTG

SEQ ID NO: 171502 - protein, 23 aa, Influenza A virus
AQNAISTTFPYTGDPPYSHGTGT

SEQ ID NO: 171503 - protein, 24 aa, Influenza A virus
AQNAISTTFPYTGDPPYSHGTGTG

SEQ ID NO: 171504 - protein, 25 aa, Influenza A virus
AQNAISTTFPYTGDPPYSHGTGTGY

SEQ ID NO: 171505 - protein, 14 aa, Influenza A virus
AQTDCVLEAMAFLE

SEQ ID NO: 171506 - protein, 15 aa, Influenza A virus
AQTDCVLEAMAFLEE

SEQ ID NO: 171507 - protein, 16 aa, Influenza A virus
AQTDCVLEAMAFLEES

SEQ ID NO: 171508 - protein, 17 aa, Influenza A virus
AQTDCVLEAMAFLEESH

SEQ ID NO: 171509 - protein, 18 aa, Influenza A virus
AQTDCVLEAMAFLEESHP

SEQ ID NO: 171510 - protein, 19 aa, Influenza A virus
AQTDCVLEAMAFLEESHPG

SEQ ID NO: 171511 - protein, 20 aa, Influenza A virus
AQTDCVLEAMAFLEESHPGI

SEQ ID NO: 171512 - protein, 21 aa, Influenza A virus
AQTDCVLEAMAFLEESHPGIF

SEQ ID NO: 171513 - protein, 22 aa, Influenza A virus
AQTDCVLEAMAFLEESHPGIFE

SEQ ID NO: 171514 - protein, 23 aa, Influenza A virus
AQTDCVLEAMAFLEESHPGIFEN

SEQ ID NO: 171515 - protein, 24 aa, Influenza A virus
AQTDCVLEAMAFLEESHPGIFENS

SEQ ID NO: 171516 - protein, 25 aa, Influenza A virus
AQTDCVLEAMAFLEESHPGIFENSC

SEQ ID NO: 171517 - protein, 15 aa, Influenza A virus
ARIDFESGRIKKEEF

SEQ ID NO: 171518 - protein, 17 aa, Influenza A virus
ARSICEKLEQSGLPVGG

SEQ ID NO: 171519 - protein, 19 aa, Influenza A virus
ARSICEKLEQSGLPVGGNE

SEQ ID NO: 171520 - protein, 20 aa, Influenza A virus
ARSICEKLEQSGLPVGGNEK

SEQ ID NO: 171521 - protein, 21 aa, Influenza A virus
ARSICEKLEQSGLPVGGNEKK

SEQ ID NO: 171522 - protein, 22 aa, Influenza A virus
ARSICEKLEQSGLPVGGNEKKA

SEQ ID NO: 171523 - protein, 23 aa, Influenza A virus
ARSICEKLEQSGLPVGGNEKKAK

SEQ ID NO: 171524 - protein, 24 aa, Influenza A virus
ARSICEKLEQSGLPVGGNEKKAKL

SEQ ID NO: 171525 - protein, 25 aa, Influenza A virus
ARSICEKLEQSGLPVGGNEKKAKLA

SEQ ID NO: 171526 - protein, 14 aa, Influenza A virus
ASLSPGMMMGMFNM

SEQ ID NO: 171527 - protein, 15 aa, Influenza A virus
ASLSPGMMMGMFNML

SEQ ID NO: 171528 - protein, 16 aa, Influenza A virus
ASLSPGMMMGMFNMLS

SEQ ID NO: 171529 - protein, 17 aa, Influenza A virus
ASLSPGMMMGMFNMLST

SEQ ID NO: 171530 - protein, 18 aa, Influenza A virus
ASLSPGMMMGMFNMLSTV

SEQ ID NO: 171531 - protein, 19 aa, Influenza A virus
ASLSPGMMMGMFNMLSTVL

SEQ ID NO: 171532 - protein, 20 aa, Influenza A virus
ASLSPGMMMGMFNMLSTVLG

SEQ ID NO: 171533 - protein, 21 aa, Influenza A virus
ASLSPGMMMGMFNMLSTVLGV

SEQ ID NO: 171534 - protein, 22 aa, Influenza A virus
ASLSPGMMMGMFNMLSTVLGVS

SEQ ID NO: 171535 - protein, 23 aa, Influenza A virus
ASLSPGMMMGMFNMLSTVLGVSI

SEQ ID NO: 171536 - protein, 24 aa, Influenza A virus
ASLSPGMMMGMFNMLSTVLGVSIL

SEQ ID NO: 171537 - protein, 25 aa, Influenza A virus
ASLSPGMMMGMFNMLSTVLGVSILN

SEQ ID NO: 171538 - protein, 14 aa, Influenza A virus
ATALANTIEVFRSN

SEQ ID NO: 171539 - protein, 15 aa, Influenza A virus
ATALANTIEVFRSNG

SEQ ID NO: 171540 - protein, 13 aa, Influenza A virus
ATAQMALQLFIKD

SEQ ID NO: 171541 - protein, 14 aa, Influenza A virus
ATAQMALQLFIKDY

SEQ ID NO: 171542 - protein, 15 aa, Influenza A virus
ATAQMALQLFIKDYR

SEQ ID NO: 171543 - protein, 16 aa, Influenza A virus
ATAQMALQLFIKDYRY

SEQ ID NO: 171544 - protein, 17 aa, Influenza A virus
ATAQMALQLFIKDYRYT

SEQ ID NO: 171545 - protein, 18 aa, Influenza A virus
ATAQMALQLFIKDYRYTY

SEQ ID NO: 171546 - protein, 19 aa, Influenza A virus
ATAQMALQLFIKDYRYTYR

SEQ ID NO: 171547 - protein, 20 aa, Influenza A virus
ATAQMALQLFIKDYRYTYRC

SEQ ID NO: 171548 - protein, 21 aa, Influenza A virus
ATAQMALQLFIKDYRYTYRCH

SEQ ID NO: 171549 - protein, 22 aa, Influenza A virus
ATAQMALQLFIKDYRYTYRCHR

SEQ ID NO: 171550 - protein, 23 aa, Influenza A virus
ATAQMALQLFIKDYRYTYRCHRG

SEQ ID NO: 171551 - protein, 24 aa, Influenza A virus
ATAQMALQLFIKDYRYTYRCHRGD

SEQ ID NO: 171552 - protein, 25 aa, Influenza A virus
ATAQMALQLFIKDYRYTYRCHRGDT

SEQ ID NO: 171553 - protein, 15 aa, Influenza A virus
ATPGMQIRGFVYFVE

SEQ ID NO: 171554 - protein, 16 aa, Influenza A virus
ATPGMQIRGFVYFVET

SEQ ID NO: 171555 - protein, 17 aa, Influenza A virus
ATPGMQIRGFVYFVETL

SEQ ID NO: 171556 - protein, 18 aa, Influenza A virus
ATPGMQIRGFVYFVETLA

SEQ ID NO: 171557 - protein, 19 aa, Influenza A virus
ATPGMQIRGFVYFVETLAR

SEQ ID NO: 171558 - protein, 20 aa, Influenza A virus
ATPGMQIRGFVYFVETLARS

SEQ ID NO: 171559 - protein, 21 aa, Influenza A virus
ATPGMQIRGFVYFVETLARSI

SEQ ID NO: 171560 - protein, 22 aa, Influenza A virus
ATPGMQIRGFVYFVETLARSIC

SEQ ID NO: 171561 - protein, 23 aa, Influenza A virus
ATPGMQIRGFVYFVETLARSICE

SEQ ID NO: 171562 - protein, 24 aa, Influenza A virus
ATPGMQIRGFVYFVETLARSICEK

SEQ ID NO: 171563 - protein, 25 aa, Influenza A virus
ATPGMQIRGFVYFVETLARSICEKL

SEQ ID NO: 171564 - protein, 14 aa, Influenza A virus
CCNLFEKFFPSSSY

SEQ ID NO: 171565 - protein, 15 aa, Influenza A virus
CCNLFEKFFPSSSYR

SEQ ID NO: 171566 - protein, 16 aa, Influenza A virus
CCNLFEKFFPSSSYRR

SEQ ID NO: 171567 - protein, 17 aa, Influenza A virus
CCNLFEKFFPSSSYRRP

SEQ ID NO: 171568 - protein, 18 aa, Influenza A virus
CCNLFEKFFPSSSYRRPV

SEQ ID NO: 171569 - protein, 19 aa, Influenza A virus
CCNLFEKFFPSSSYRRPVG

SEQ ID NO: 171570 - protein, 20 aa, Influenza A virus
CCNLFEKFFPSSSYRRPVGI

SEQ ID NO: 171571 - protein, 21 aa, Influenza A virus
CCNLFEKFFPSSSYRRPVGIS

SEQ ID NO: 171572 - protein, 22 aa, Influenza A virus
CCNLFEKFFPSSSYRRPVGISS

SEQ ID NO: 171573 - protein, 23 aa, Influenza A virus
CCNLFEKFFPSSSYRRPVGISSM

SEQ ID NO: 171574 - protein, 24 aa, Influenza A virus
CCNLFEKFFPSSSYRRPVGISSMV

SEQ ID NO: 171575 - protein, 25 aa, Influenza A virus
CCNLFEKFFPSSSYRRPVGISSMVE

SEQ ID NO: 171576 - protein, 14 aa, Influenza A virus
CEKLEQSGLPVGGN

SEQ ID NO: 171577 - protein, 15 aa, Influenza A virus
CEKLEQSGLPVGGNE

SEQ ID NO: 171578 - protein, 16 aa, Influenza A virus
CEKLEQSGLPVGGNEK

SEQ ID NO: 171579 - protein, 17 aa, Influenza A virus
CEKLEQSGLPVGGNEKK

SEQ ID NO: 171580 - protein, 18 aa, Influenza A virus
CEKLEQSGLPVGGNEKKA

SEQ ID NO: 171581 - protein, 19 aa, Influenza A virus
CEKLEQSGLPVGGNEKKAK

SEQ ID NO: 171582 - protein, 20 aa, Influenza A virus
CEKLEQSGLPVGGNEKKAKL

SEQ ID NO: 171583 - protein, 21 aa, Influenza A virus
CEKLEQSGLPVGGNEKKAKLA

SEQ ID NO: 171584 - protein, 22 aa, Influenza A virus
CEKLEQSGLPVGGNEKKAKLAN

SEQ ID NO: 171585 - protein, 23 aa, Influenza A virus
CEKLEQSGLPVGGNEKKAKLANV

SEQ ID NO: 171586 - protein, 24 aa, Influenza A virus
CEKLEQSGLPVGGNEKKAKLANVV

SEQ ID NO: 171587 - protein, 25 aa, Influenza A virus
CEKLEQSGLPVGGNEKKAKLANVVR

SEQ ID NO: 171588 - protein, 15 aa, Influenza A virus
CHRGDTQIQTRRSFE

SEQ ID NO: 171589 - protein, 20 aa, Influenza A virus
CLKWELMDEDYQGRLCNPLN

SEQ ID NO: 171590 - protein, 23 aa, Influenza A virus
CLKWELMDEDYQGRLCNPLNPFV

SEQ ID NO: 171591 - protein, 24 aa, Influenza A virus
CLKWELMDEDYQGRLCNPLNPFVS

SEQ ID NO: 171592 - protein, 25 aa, Influenza A virus
CLKWELMDEDYQGRLCNPLNPFVSH

SEQ ID NO: 171593 - protein, 14 aa, Influenza A virus
CNLFEKFFPSSSYR

SEQ ID NO: 171594 - protein, 15 aa, Influenza A virus
CNLFEKFFPSSSYRR

SEQ ID NO: 171595 - protein, 16 aa, Influenza A virus
CNLFEKFFPSSSYRRP

SEQ ID NO: 171596 - protein, 17 aa, Influenza A virus
CNLFEKFFPSSSYRRPV

SEQ ID NO: 171597 - protein, 18 aa, Influenza A virus
CNLFEKFFPSSSYRRPVG

SEQ ID NO: 171598 - protein, 19 aa, Influenza A virus
CNLFEKFFPSSSYRRPVGI

SEQ ID NO: 171599 - protein, 20 aa, Influenza A virus
CNLFEKFFPSSSYRRPVGIS

SEQ ID NO: 171600 - protein, 21 aa, Influenza A virus
CNLFEKFFPSSSYRRPVGISS

SEQ ID NO: 171601 - protein, 22 aa, Influenza A virus
CNLFEKFFPSSSYRRPVGISSM

SEQ ID NO: 171602 - protein, 23 aa, Influenza A virus
CNLFEKFFPSSSYRRPVGISSMV

SEQ ID NO: 171603 - protein, 24 aa, Influenza A virus
CNLFEKFFPSSSYRRPVGISSMVE

SEQ ID NO: 171604 - protein, 25 aa, Influenza A virus
CNLFEKFFPSSSYRRPVGISSMVEA

SEQ ID NO: 171605 - protein, 15 aa, Influenza A virus
CNPLNPFVSHKEIES

SEQ ID NO: 171606 - protein, 16 aa, Influenza A virus
CNPLNPFVSHKEIESV

SEQ ID NO: 171607 - protein, 19 aa, Influenza A virus
CNPLNPFVSHKEIESVNNA

SEQ ID NO: 171608 - protein, 20 aa, Influenza A virus
CNPLNPFVSHKEIESVNNAV

SEQ ID NO: 171609 - protein, 13 aa, Influenza A virus
CVLEAMAFLEESH

SEQ ID NO: 171610 - protein, 14 aa, Influenza A virus
CVLEAMAFLEESHP

SEQ ID NO: 171611 - protein, 15 aa, Influenza A virus
CVLEAMAFLEESHPG

SEQ ID NO: 171612 - protein, 16 aa, Influenza A virus
CVLEAMAFLEESHPGI

SEQ ID NO: 171613 - protein, 17 aa, Influenza A virus
CVLEAMAFLEESHPGIF

SEQ ID NO: 171614 - protein, 18 aa, Influenza A virus
CVLEAMAFLEESHPGIFE

SEQ ID NO: 171615 - protein, 19 aa, Influenza A virus
CVLEAMAFLEESHPGIFEN

SEQ ID NO: 171616 - protein, 20 aa, Influenza A virus
CVLEAMAFLEESHPGIFENS

SEQ ID NO: 171617 - protein, 21 aa, Influenza A virus
CVLEAMAFLEESHPGIFENSC

SEQ ID NO: 171618 - protein, 14 aa, Influenza A virus
DAERGKLKRRAIAT

SEQ ID NO: 171619 - protein, 15 aa, Influenza A virus
DAERGKLKRRAIATP

SEQ ID NO: 171620 - protein, 16 aa, Influenza A virus
DAERGKLKRRAIATPG

SEQ ID NO: 171621 - protein, 17 aa, Influenza A virus
DAERGKLKRRAIATPGM

SEQ ID NO: 171622 - protein, 18 aa, Influenza A virus
DAERGKLKRRAIATPGMQ

SEQ ID NO: 171623 - protein, 19 aa, Influenza A virus
DAERGKLKRRAIATPGMQI

SEQ ID NO: 171624 - protein, 20 aa, Influenza A virus
DAERGKLKRRAIATPGMQIR

SEQ ID NO: 171625 - protein, 21 aa, Influenza A virus
DAERGKLKRRAIATPGMQIRG

SEQ ID NO: 171626 - protein, 22 aa, Influenza A virus
DAERGKLKRRAIATPGMQIRGF

SEQ ID NO: 171627 - protein, 23 aa, Influenza A virus
DAERGKLKRRAIATPGMQIRGFV

SEQ ID NO: 171628 - protein, 24 aa, Influenza A virus
DAERGKLKRRAIATPGMQIRGFVY

SEQ ID NO: 171629 - protein, 25 aa, Influenza A virus
DAERGKLKRRAIATPGMQIRGFVYF

SEQ ID NO: 171630 - protein, 13 aa, Influenza A virus
DCVLEAMAFLEES

SEQ ID NO: 171631 - protein, 14 aa, Influenza A virus
DCVLEAMAFLEESH

SEQ ID NO: 171632 - protein, 15 aa, Influenza A virus
DCVLEAMAFLEESHP

SEQ ID NO: 171633 - protein, 16 aa, Influenza A virus
DCVLEAMAFLEESHPG

SEQ ID NO: 171634 - protein, 17 aa, Influenza A virus
DCVLEAMAFLEESHPGI

SEQ ID NO: 171635 - protein, 18 aa, Influenza A virus
DCVLEAMAFLEESHPGIF

SEQ ID NO: 171636 - protein, 19 aa, Influenza A virus
DCVLEAMAFLEESHPGIFE

SEQ ID NO: 171637 - protein, 20 aa, Influenza A virus
DCVLEAMAFLEESHPGIFEN

SEQ ID NO: 171638 - protein, 21 aa, Influenza A virus
DCVLEAMAFLEESHPGIFENS

SEQ ID NO: 171639 - protein, 22 aa, Influenza A virus
DCVLEAMAFLEESHPGIFENSC

SEQ ID NO: 171640 - protein, 13 aa, Influenza A virus
DDFALIVNAPNHE

SEQ ID NO: 171641 - protein, 14 aa, Influenza A virus
DDFALIVNAPNHEG

SEQ ID NO: 171642 - protein, 15 aa, Influenza A virus
DDFALIVNAPNHEGI

SEQ ID NO: 171643 - protein, 16 aa, Influenza A virus
DDFALIVNAPNHEGIQ

SEQ ID NO: 171644 - protein, 17 aa, Influenza A virus
DDFALIVNAPNHEGIQA

SEQ ID NO: 171645 - protein, 18 aa, Influenza A virus
DDFALIVNAPNHEGIQAG

SEQ ID NO: 171646 - protein, 19 aa, Influenza A virus
DDFALIVNAPNHEGIQAGV

SEQ ID NO: 171647 - protein, 20 aa, Influenza A virus
DEDYQGRLCNPLNPFVSHKE

SEQ ID NO: 171648 - protein, 21 aa, Influenza A virus
DEDYQGRLCNPLNPFVSHKEI

SEQ ID NO: 171649 - protein, 22 aa, Influenza A virus
DEDYQGRLCNPLNPFVSHKEIE

SEQ ID NO: 171650 - protein, 23 aa, Influenza A virus
DEDYQGRLCNPLNPFVSHKEIES

SEQ ID NO: 171651 - protein, 13 aa, Influenza A virus
DFALIVNAPNHEG

SEQ ID NO: 171652 - protein, 14 aa, Influenza A virus
DFALIVNAPNHEGI

SEQ ID NO: 171653 - protein, 15 aa, Influenza A virus
DFALIVNAPNHEGIQ

SEQ ID NO: 171654 - protein, 16 aa, Influenza A virus
DFALIVNAPNHEGIQA

SEQ ID NO: 171655 - protein, 17 aa, Influenza A virus
DFALIVNAPNHEGIQAG

SEQ ID NO: 171656 - protein, 18 aa, Influenza A virus
DFALIVNAPNHEGIQAGV

SEQ ID NO: 171657 - protein, 14 aa, Influenza A virus
DGGPNLYNIRNLHI

SEQ ID NO: 171658 - protein, 15 aa, Influenza A virus
DGGPNLYNIRNLHIP

SEQ ID NO: 171659 - protein, 16 aa, Influenza A virus
DGGPNLYNIRNLHIPE

SEQ ID NO: 171660 - protein, 17 aa, Influenza A virus
DGGPNLYNIRNLHIPEV

SEQ ID NO: 171661 - protein, 18 aa, Influenza A virus
DGGPNLYNIRNLHIPEVC

SEQ ID NO: 171662 - protein, 19 aa, Influenza A virus
DGGPNLYNIRNLHIPEVCL

SEQ ID NO: 171663 - protein, 20 aa, Influenza A virus
DGGPNLYNIRNLHIPEVCLK

SEQ ID NO: 171664 - protein, 21 aa, Influenza A virus
DGGPNLYNIRNLHIPEVCLKW

SEQ ID NO: 171665 - protein, 22 aa, Influenza A virus
DGGPNLYNIRNLHIPEVCLKWE

SEQ ID NO: 171666 - protein, 23 aa, Influenza A virus
DGGPNLYNIRNLHIPEVCLKWEL

SEQ ID NO: 171667 - protein, 24 aa, Influenza A virus
DGGPNLYNIRNLHIPEVCLKWELM

SEQ ID NO: 171668 - protein, 25 aa, Influenza A virus
DGGPNLYNIRNLHIPEVCLKWELMD

SEQ ID NO: 171669 - protein, 13 aa, Influenza A virus
DGLQSSDDFALIV

SEQ ID NO: 171670 - protein, 14 aa, Influenza A virus
DGLQSSDDFALIVN

SEQ ID NO: 171671 - protein, 15 aa, Influenza A virus
DGLQSSDDFALIVNA

SEQ ID NO: 171672 - protein, 16 aa, Influenza A virus
DGLQSSDDFALIVNAP

SEQ ID NO: 171673 - protein, 17 aa, Influenza A virus
DGLQSSDDFALIVNAPN

SEQ ID NO: 171674 - protein, 18 aa, Influenza A virus
DGLQSSDDFALIVNAPNH

SEQ ID NO: 171675 - protein, 19 aa, Influenza A virus
DGLQSSDDFALIVNAPNHE

SEQ ID NO: 171676 - protein, 20 aa, Influenza A virus
DGLQSSDDFALIVNAPNHEG

SEQ ID NO: 171677 - protein, 21 aa, Influenza A virus
DGLQSSDDFALIVNAPNHEGI

SEQ ID NO: 171678 - protein, 22 aa, Influenza A virus
DGLQSSDDFALIVNAPNHEGIQ

SEQ ID NO: 171679 - protein, 23 aa, Influenza A virus
DGLQSSDDFALIVNAPNHEGIQA

SEQ ID NO: 171680 - protein, 24 aa, Influenza A virus
DGLQSSDDFALIVNAPNHEGIQAG

SEQ ID NO: 171681 - protein, 25 aa, Influenza A virus
DGLQSSDDFALIVNAPNHEGIQAGV

SEQ ID NO: 171682 - protein, 13 aa, Influenza A virus
DLGPATAQMALQL

SEQ ID NO: 171683 - protein, 14 aa, Influenza A virus
DLGPATAQMALQLF

SEQ ID NO: 171684 - protein, 15 aa, Influenza A virus
DLGPATAQMALQLFI

SEQ ID NO: 171685 - protein, 16 aa, Influenza A virus
DLGPATAQMALQLFIK

SEQ ID NO: 171686 - protein, 17 aa, Influenza A virus
DLGPATAQMALQLFIKD

SEQ ID NO: 171687 - protein, 18 aa, Influenza A virus
DLGPATAQMALQLFIKDY

SEQ ID NO: 171688 - protein, 19 aa, Influenza A virus
DLGPATAQMALQLFIKDYR

SEQ ID NO: 171689 - protein, 20 aa, Influenza A virus
DLGPATAQMALQLFIKDYRY

SEQ ID NO: 171690 - protein, 21 aa, Influenza A virus
DLGPATAQMALQLFIKDYRYT

SEQ ID NO: 171691 - protein, 22 aa, Influenza A virus
DLGPATAQMALQLFIKDYRYTY

SEQ ID NO: 171692 - protein, 23 aa, Influenza A virus
DLGPATAQMALQLFIKDYRYTYR

SEQ ID NO: 171693 - protein, 24 aa, Influenza A virus
DLGPATAQMALQLFIKDYRYTYRC

SEQ ID NO: 171694 - protein, 25 aa, Influenza A virus
DLGPATAQMALQLFIKDYRYTYRCH

SEQ ID NO: 171695 - protein, 14 aa, Influenza A virus
DMSIGVTVIKNNMI

SEQ ID NO: 171696 - protein, 15 aa, Influenza A virus
DMSIGVTVIKNNMIN

SEQ ID NO: 171697 - protein, 16 aa, Influenza A virus
DMSIGVTVIKNNMINN

SEQ ID NO: 171698 - protein, 17 aa, Influenza A virus
DMSIGVTVIKNNMINND

SEQ ID NO: 171699 - protein, 18 aa, Influenza A virus
DMSIGVTVIKNNMINNDL

SEQ ID NO: 171700 - protein, 19 aa, Influenza A virus
DMSIGVTVIKNNMINNDLG

SEQ ID NO: 171701 - protein, 20 aa, Influenza A virus
DMSIGVTVIKNNMINNDLGP

SEQ ID NO: 171702 - protein, 21 aa, Influenza A virus
DMSIGVTVIKNNMINNDLGPA

SEQ ID NO: 171703 - protein, 22 aa, Influenza A virus
DMSIGVTVIKNNMINNDLGPAT

SEQ ID NO: 171704 - protein, 23 aa, Influenza A virus
DMSIGVTVIKNNMINNDLGPATA

SEQ ID NO: 171705 - protein, 24 aa, Influenza A virus
DMSIGVTVIKNNMINNDLGPATAQ

SEQ ID NO: 171706 - protein, 25 aa, Influenza A virus
DMSIGVTVIKNNMINNDLGPATAQM

SEQ ID NO: 171707 - protein, 19 aa, Influenza A virus
DNEPSGYAQTDCVLEAMAF

SEQ ID NO: 171708 - protein, 20 aa, Influenza A virus
DNEPSGYAQTDCVLEAMAFL

SEQ ID NO: 171709 - protein, 21 aa, Influenza A virus
DNEPSGYAQTDCVLEAMAFLE

SEQ ID NO: 171710 - protein, 22 aa, Influenza A virus
DNEPSGYAQTDCVLEAMAFLEE

SEQ ID NO: 171711 - protein, 23 aa, Influenza A virus
DNEPSGYAQTDCVLEAMAFLEES

SEQ ID NO: 171712 - protein, 24 aa, Influenza A virus
DNEPSGYAQTDCVLEAMAFLEESH

SEQ ID NO: 171713 - protein, 25 aa, Influenza A virus
DNEPSGYAQTDCVLEAMAFLEESHP

SEQ ID NO: 171714 - protein, 15 aa, Influenza A virus
DNTKWNENQNPRMFL

SEQ ID NO: 171715 - protein, 16 aa, Influenza A virus
DNTKWNENQNPRMFLA

SEQ ID NO: 171716 - protein, 17 aa, Influenza A virus
DNTKWNENQNPRMFLAM

SEQ ID NO: 171717 - protein, 19 aa, Influenza A virus
DNTKWNENQNPRMFLAMIT

SEQ ID NO: 171718 - protein, 20 aa, Influenza A virus
DNTKWNENQNPRMFLAMITY

SEQ ID NO: 171719 - protein, 21 aa, Influenza A virus
DNTKWNENQNPRMFLAMITYI

SEQ ID NO: 171720 - protein, 22 aa, Influenza A virus
DNTKWNENQNPRMFLAMITYIT

SEQ ID NO: 171721 - protein, 15 aa, Influenza A virus
DPPYSHGTGTGYTMD

SEQ ID NO: 171722 - protein, 16 aa, Influenza A virus
DPPYSHGTGTGYTMDT

SEQ ID NO: 171723 - protein, 17 aa, Influenza A virus
DPPYSHGTGTGYTMDTV

SEQ ID NO: 171724 - protein, 19 aa, Influenza A virus
DPPYSHGTGTGYTMDTVNR

SEQ ID NO: 171725 - protein, 20 aa, Influenza A virus
DPPYSHGTGTGYTMDTVNRT

SEQ ID NO: 171726 - protein, 21 aa, Influenza A virus
DPPYSHGTGTGYTMDTVNRTH

SEQ ID NO: 171727 - protein, 22 aa, Influenza A virus
DPPYSHGTGTGYTMDTVNRTHQ

SEQ ID NO: 171728 - protein, 23 aa, Influenza A virus
DPPYSHGTGTGYTMDTVNRTHQY

SEQ ID NO: 171729 - protein, 24 aa, Influenza A virus
DPPYSHGTGTGYTMDTVNRTHQYS

SEQ ID NO: 171730 - protein, 25 aa, Influenza A virus
DPPYSHGTGTGYTMDTVNRTHQYSE

SEQ ID NO: 171731 - protein, 15 aa, Influenza A virus
DTELSFTITGDNTKW

SEQ ID NO: 171732 - protein, 20 aa, Influenza A virus
DTELSFTITGDNTKWNENQN

SEQ ID NO: 171733 - protein, 14 aa, Influenza A virus
DVNPTLLFLKVPAQ

SEQ ID NO: 171734 - protein, 15 aa, Influenza A virus
DVNPTLLFLKVPAQN

SEQ ID NO: 171735 - protein, 16 aa, Influenza A virus
DVNPTLLFLKVPAQNA

SEQ ID NO: 171736 - protein, 17 aa, Influenza A virus
DVNPTLLFLKVPAQNAI

SEQ ID NO: 171737 - protein, 18 aa, Influenza A virus
DVNPTLLFLKVPAQNAIS

SEQ ID NO: 171738 - protein, 19 aa, Influenza A virus
DVNPTLLFLKVPAQNAIST

SEQ ID NO: 171739 - protein, 20 aa, Influenza A virus
DVNPTLLFLKVPAQNAISTT

SEQ ID NO: 171740 - protein, 21 aa, Influenza A virus
DVNPTLLFLKVPAQNAISTTF

SEQ ID NO: 171741 - protein, 22 aa, Influenza A virus
DVNPTLLFLKVPAQNAISTTFP

SEQ ID NO: 171742 - protein, 23 aa, Influenza A virus
DVNPTLLFLKVPAQNAISTTFPY

SEQ ID NO: 171743 - protein, 24 aa, Influenza A virus
DVNPTLLFLKVPAQNAISTTFPYT

SEQ ID NO: 171744 - protein, 25 aa, Influenza A virus
DVNPTLLFLKVPAQNAISTTFPYTG

SEQ ID NO: 171745 - protein, 13 aa, Influenza A virus
DWTLNRNQPAATA

SEQ ID NO: 171746 - protein, 14 aa, Influenza A virus
DWTLNRNQPAATAL

SEQ ID NO: 171747 - protein, 15 aa, Influenza A virus
DWTLNRNQPAATALA

SEQ ID NO: 171748 - protein, 16 aa, Influenza A virus
DWTLNRNQPAATALAN

SEQ ID NO: 171749 - protein, 17 aa, Influenza A virus
DWTLNRNQPAATALANT

SEQ ID NO: 171750 - protein, 18 aa, Influenza A virus
DWTLNRNQPAATALANTI

SEQ ID NO: 171751 - protein, 19 aa, Influenza A virus
DWTLNRNQPAATALANTIE

SEQ ID NO: 171752 - protein, 20 aa, Influenza A virus
DWTLNRNQPAATALANTIEV

SEQ ID NO: 171753 - protein, 21 aa, Influenza A virus
DWTLNRNQPAATALANTIEVF

SEQ ID NO: 171754 - protein, 22 aa, Influenza A virus
DWTLNRNQPAATALANTIEVFR

SEQ ID NO: 171755 - protein, 23 aa, Influenza A virus
DWTLNRNQPAATALANTIEVFRS

SEQ ID NO: 171756 - protein, 24 aa, Influenza A virus
DWTLNRNQPAATALANTIEVFRSN

SEQ ID NO: 171757 - protein, 15 aa, Influenza A virus
DYQGRLCNPLNPFVS

SEQ ID NO: 171758 - protein, 17 aa, Influenza A virus
DYQGRLCNPLNPFVSHK

SEQ ID NO: 171759 - protein, 19 aa, Influenza A virus
DYQGRLCNPLNPFVSHKEI

SEQ ID NO: 171760 - protein, 20 aa, Influenza A virus
DYQGRLCNPLNPFVSHKEIE

SEQ ID NO: 171761 - protein, 21 aa, Influenza A virus
DYQGRLCNPLNPFVSHKEIES

SEQ ID NO: 171762 - protein, 22 aa, Influenza A virus
DYQGRLCNPLNPFVSHKEIESV

SEQ ID NO: 171763 - protein, 23 aa, Influenza A virus
DYQGRLCNPLNPFVSHKEIESVN

SEQ ID NO: 171764 - protein, 24 aa, Influenza A virus
DYQGRLCNPLNPFVSHKEIESVNN

SEQ ID NO: 171765 - protein, 25 aa, Influenza A virus
DYQGRLCNPLNPFVSHKEIESVNNA

SEQ ID NO: 171766 - protein, 15 aa, Influenza A virus
DYRYTYRCHRGDTQI

SEQ ID NO: 171767 - protein, 22 aa, Influenza A virus
DYRYTYRCHRGDTQIQTRRSFE

SEQ ID NO: 171768 - protein, 15 aa, Influenza A virus
EAMAFLEESHPGIFE

SEQ ID NO: 171769 - protein, 16 aa, Influenza A virus
EAMAFLEESHPGIFEN

SEQ ID NO: 171770 - protein, 14 aa, Influenza A virus
EAMVSRARIDARID

SEQ ID NO: 171771 - protein, 15 aa, Influenza A virus
EAMVSRARIDARIDF

SEQ ID NO: 171772 - protein, 16 aa, Influenza A virus
EAMVSRARIDARIDFE

SEQ ID NO: 171773 - protein, 17 aa, Influenza A virus
EAMVSRARIDARIDFES

SEQ ID NO: 171774 - protein, 19 aa, Influenza A virus
EAMVSRARIDARIDFESGR

SEQ ID NO: 171775 - protein, 20 aa, Influenza A virus
EAMVSRARIDARIDFESGRI

SEQ ID NO: 171776 - protein, 21 aa, Influenza A virus
EAMVSRARIDARIDFESGRIK

SEQ ID NO: 171777 - protein, 22 aa, Influenza A virus
EAMVSRARIDARIDFESGRIKK

SEQ ID NO: 171778 - protein, 23 aa, Influenza A virus
EAMVSRARIDARIDFESGRIKKE

SEQ ID NO: 171779 - protein, 24 aa, Influenza A virus
EAMVSRARIDARIDFESGRIKKEE

SEQ ID NO: 171780 - protein, 25 aa, Influenza A virus
EAMVSRARIDARIDFESGRIKKEEF

SEQ ID NO: 171781 - protein, 20 aa, Influenza A virus
EDYQGRLCNPLNPFVSHKEI

SEQ ID NO: 171782 - protein, 21 aa, Influenza A virus
EDYQGRLCNPLNPFVSHKEIE

SEQ ID NO: 171783 - protein, 22 aa, Influenza A virus
EDYQGRLCNPLNPFVSHKEIES

SEQ ID NO: 171784 - protein, 13 aa, Influenza A virus
EFTSFFYRYGFVA

SEQ ID NO: 171785 - protein, 14 aa, Influenza A virus
EFTSFFYRYGFVAN

SEQ ID NO: 171786 - protein, 15 aa, Influenza A virus
EFTSFFYRYGFVANF

SEQ ID NO: 171787 - protein, 16 aa, Influenza A virus
EFTSFFYRYGFVANFS

SEQ ID NO: 171788 - protein, 17 aa, Influenza A virus
EFTSFFYRYGFVANFSM

SEQ ID NO: 171789 - protein, 18 aa, Influenza A virus
EFTSFFYRYGFVANFSME

SEQ ID NO: 171790 - protein, 19 aa, Influenza A virus
EFTSFFYRYGFVANFSMEL

SEQ ID NO: 171791 - protein, 20 aa, Influenza A virus
EFTSFFYRYGFVANFSMELP

SEQ ID NO: 171792 - protein, 21 aa, Influenza A virus
EFTSFFYRYGFVANFSMELPS

SEQ ID NO: 171793 - protein, 22 aa, Influenza A virus
EFTSFFYRYGFVANFSMELPSF

SEQ ID NO: 171794 - protein, 23 aa, Influenza A virus
EFTSFFYRYGFVANFSMELPSFG

SEQ ID NO: 171795 - protein, 24 aa, Influenza A virus
EFTSFFYRYGFVANFSMELPSFGV

SEQ ID NO: 171796 - protein, 25 aa, Influenza A virus
EFTSFFYRYGFVANFSMELPSFGVS

SEQ ID NO: 171797 - protein, 14 aa, Influenza A virus
EGIQAGVDRFYRTC

SEQ ID NO: 171798 - protein, 15 aa, Influenza A virus
EGIQAGVDRFYRTCK

SEQ ID NO: 171799 - protein, 16 aa, Influenza A virus
EGIQAGVDRFYRTCKL

SEQ ID NO: 171800 - protein, 14 aa, Influenza A virus
EKFFPSSSYRRPVG

SEQ ID NO: 171801 - protein, 15 aa, Influenza A virus
EKFFPSSSYRRPVGI

SEQ ID NO: 171802 - protein, 16 aa, Influenza A virus
EKFFPSSSYRRPVGIS

SEQ ID NO: 171803 - protein, 17 aa, Influenza A virus
EKFFPSSSYRRPVGISS

SEQ ID NO: 171804 - protein, 19 aa, Influenza A virus
EKFFPSSSYRRPVGISSMV

SEQ ID NO: 171805 - protein, 20 aa, Influenza A virus
EKFFPSSSYRRPVGISSMVE

SEQ ID NO: 171806 - protein, 21 aa, Influenza A virus
EKFFPSSSYRRPVGISSMVEA

SEQ ID NO: 171807 - protein, 22 aa, Influenza A virus
EKFFPSSSYRRPVGISSMVEAM

SEQ ID NO: 171808 - protein, 23 aa, Influenza A virus
EKFFPSSSYRRPVGISSMVEAMV

SEQ ID NO: 171809 - protein, 24 aa, Influenza A virus
EKFFPSSSYRRPVGISSMVEAMVS

SEQ ID NO: 171810 - protein, 25 aa, Influenza A virus
EKFFPSSSYRRPVGISSMVEAMVSR

SEQ ID NO: 171811 - protein, 14 aa, Influenza A virus
EKKAKLANVVRKMM

SEQ ID NO: 171812 - protein, 15 aa, Influenza A virus
EKKAKLANVVRKMMT

SEQ ID NO: 171813 - protein, 16 aa, Influenza A virus
EKKAKLANVVRKMMTN

SEQ ID NO: 171814 - protein, 17 aa, Influenza A virus
EKKAKLANVVRKMMTNS

SEQ ID NO: 171815 - protein, 18 aa, Influenza A virus
EKKAKLANVVRKMMTNSQ

SEQ ID NO: 171816 - protein, 19 aa, Influenza A virus
EKKAKLANVVRKMMTNSQD

SEQ ID NO: 171817 - protein, 20 aa, Influenza A virus
EKKAKLANVVRKMMTNSQDT

SEQ ID NO: 171818 - protein, 21 aa, Influenza A virus
EKKAKLANVVRKMMTNSQDTE

SEQ ID NO: 171819 - protein, 22 aa, Influenza A virus
EKKAKLANVVRKMMTNSQDTEL

SEQ ID NO: 171820 - protein, 23 aa, Influenza A virus
EKKAKLANVVRKMMTNSQDTELS

SEQ ID NO: 171821 - protein, 24 aa, Influenza A virus
EKKAKLANVVRKMMTNSQDTELSF

SEQ ID NO: 171822 - protein, 25 aa, Influenza A virus
EKKAKLANVVRKMMTNSQDTELSFT

SEQ ID NO: 171823 - protein, 13 aa, Influenza A virus
EKLEQSGLPVGGN

SEQ ID NO: 171824 - protein, 14 aa, Influenza A virus
EKLEQSGLPVGGNE

SEQ ID NO: 171825 - protein, 15 aa, Influenza A virus
EKLEQSGLPVGGNEK

SEQ ID NO: 171826 - protein, 16 aa, Influenza A virus
EKLEQSGLPVGGNEKK

SEQ ID NO: 171827 - protein, 17 aa, Influenza A virus
EKLEQSGLPVGGNEKKA

SEQ ID NO: 171828 - protein, 18 aa, Influenza A virus
EKLEQSGLPVGGNEKKAK

SEQ ID NO: 171829 - protein, 19 aa, Influenza A virus
EKLEQSGLPVGGNEKKAKL

SEQ ID NO: 171830 - protein, 20 aa, Influenza A virus
EKLEQSGLPVGGNEKKAKLA

SEQ ID NO: 171831 - protein, 21 aa, Influenza A virus
EKLEQSGLPVGGNEKKAKLAN

SEQ ID NO: 171832 - protein, 22 aa, Influenza A virus
EKLEQSGLPVGGNEKKAKLANV

SEQ ID NO: 171833 - protein, 23 aa, Influenza A virus
EKLEQSGLPVGGNEKKAKLANVV

SEQ ID NO: 171834 - protein, 24 aa, Influenza A virus
EKLEQSGLPVGGNEKKAKLANVVR

SEQ ID NO: 171835 - protein, 25 aa, Influenza A virus
EKLEQSGLPVGGNEKKAKLANVVRK

SEQ ID NO: 171836 - protein, 20 aa, Influenza A virus
ELMDEDYQGRLCNPLNPFVS

SEQ ID NO: 171837 - protein, 22 aa, Influenza A virus
ELMDEDYQGRLCNPLNPFVSHK

SEQ ID NO: 171838 - protein, 23 aa, Influenza A virus
ELMDEDYQGRLCNPLNPFVSHKE

SEQ ID NO: 171839 - protein, 24 aa, Influenza A virus
ELMDEDYQGRLCNPLNPFVSHKEI

SEQ ID NO: 171840 - protein, 25 aa, Influenza A virus
ELMDEDYQGRLCNPLNPFVSHKEIE

SEQ ID NO: 171841 - protein, 13 aa, Influenza A virus
ELPSFGVSGINES

SEQ ID NO: 171842 - protein, 14 aa, Influenza A virus
ELPSFGVSGINESA

SEQ ID NO: 171843 - protein, 15 aa, Influenza A virus
ELPSFGVSGINESAD

SEQ ID NO: 171844 - protein, 16 aa, Influenza A virus
ELPSFGVSGINESADM

SEQ ID NO: 171845 - protein, 17 aa, Influenza A virus
ELPSFGVSGINESADMS

SEQ ID NO: 171846 - protein, 18 aa, Influenza A virus
ELPSFGVSGINESADMSI

SEQ ID NO: 171847 - protein, 19 aa, Influenza A virus
ELPSFGVSGINESADMSIG

SEQ ID NO: 171848 - protein, 20 aa, Influenza A virus
ELPSFGVSGINESADMSIGV

SEQ ID NO: 171849 - protein, 21 aa, Influenza A virus
ELPSFGVSGINESADMSIGVT

SEQ ID NO: 171850 - protein, 22 aa, Influenza A virus
ELPSFGVSGINESADMSIGVTV

SEQ ID NO: 171851 - protein, 23 aa, Influenza A virus
ELPSFGVSGINESADMSIGVTVI

SEQ ID NO: 171852 - protein, 24 aa, Influenza A virus
ELPSFGVSGINESADMSIGVTVIK

SEQ ID NO: 171853 - protein, 25 aa, Influenza A virus
ELPSFGVSGINESADMSIGVTVIKN

SEQ ID NO: 171854 - protein, 14 aa, Influenza A virus
ENQNPRMFLAMITY

SEQ ID NO: 171855 - protein, 15 aa, Influenza A virus
ENQNPRMFLAMITYI

SEQ ID NO: 171856 - protein, 16 aa, Influenza A virus
ENQNPRMFLAMITYIT

SEQ ID NO: 171857 - protein, 17 aa, Influenza A virus
EPSGYAQTDCVLEAMAF

SEQ ID NO: 171858 - protein, 18 aa, Influenza A virus
EPSGYAQTDCVLEAMAFL

SEQ ID NO: 171859 - protein, 19 aa, Influenza A virus
EPSGYAQTDCVLEAMAFLE

SEQ ID NO: 171860 - protein, 20 aa, Influenza A virus
EPSGYAQTDCVLEAMAFLEE

SEQ ID NO: 171861 - protein, 21 aa, Influenza A virus
EPSGYAQTDCVLEAMAFLEES

SEQ ID NO: 171862 - protein, 22 aa, Influenza A virus
EPSGYAQTDCVLEAMAFLEESH

SEQ ID NO: 171863 - protein, 23 aa, Influenza A virus
EPSGYAQTDCVLEAMAFLEESHP

SEQ ID NO: 171864 - protein, 24 aa, Influenza A virus
EPSGYAQTDCVLEAMAFLEESHPG

SEQ ID NO: 171865 - protein, 25 aa, Influenza A virus
EPSGYAQTDCVLEAMAFLEESHPGI

SEQ ID NO: 171866 - protein, 23 aa, Influenza A virus
EQSGLPVGGNEKKAKLANVVRKM

SEQ ID NO: 171867 - protein, 24 aa, Influenza A virus
EQSGLPVGGNEKKAKLANVVRKMM

SEQ ID NO: 171868 - protein, 25 aa, Influenza A virus
EQSGLPVGGNEKKAKLANVVRKMMT

SEQ ID NO: 171869 - protein, 15 aa, Influenza A virus
ERGKLKRRAIATPGM

SEQ ID NO: 171870 - protein, 16 aa, Influenza A virus
ERGKLKRRAIATPGMQ

SEQ ID NO: 171871 - protein, 17 aa, Influenza A virus
ERGKLKRRAIATPGMQI

SEQ ID NO: 171872 - protein, 18 aa, Influenza A virus
ERGKLKRRAIATPGMQIR

SEQ ID NO: 171873 - protein, 19 aa, Influenza A virus
ERGKLKRRAIATPGMQIRG

SEQ ID NO: 171874 - protein, 20 aa, Influenza A virus
ERGKLKRRAIATPGMQIRGF

SEQ ID NO: 171875 - protein, 21 aa, Influenza A virus
ERGKLKRRAIATPGMQIRGFV

SEQ ID NO: 171876 - protein, 22 aa, Influenza A virus
ERGKLKRRAIATPGMQIRGFVY

SEQ ID NO: 171877 - protein, 23 aa, Influenza A virus
ERGKLKRRAIATPGMQIRGFVYF

SEQ ID NO: 171878 - protein, 24 aa, Influenza A virus
ERGKLKRRAIATPGMQIRGFVYFV

SEQ ID NO: 171879 - protein, 25 aa, Influenza A virus
ERGKLKRRAIATPGMQIRGFVYFVE

SEQ ID NO: 171880 - protein, 14 aa, Influenza A virus
ESADMSIGVTVIKN

SEQ ID NO: 171881 - protein, 15 aa, Influenza A virus
ESADMSIGVTVIKNN

SEQ ID NO: 171882 - protein, 16 aa, Influenza A virus
ESADMSIGVTVIKNNM

SEQ ID NO: 171883 - protein, 17 aa, Influenza A virus
ESADMSIGVTVIKNNMI

SEQ ID NO: 171884 - protein, 18 aa, Influenza A virus
ESADMSIGVTVIKNNMIN

SEQ ID NO: 171885 - protein, 19 aa, Influenza A virus
ESADMSIGVTVIKNNMINN

SEQ ID NO: 171886 - protein, 20 aa, Influenza A virus
ESADMSIGVTVIKNNMINND

SEQ ID NO: 171887 - protein, 21 aa, Influenza A virus
ESADMSIGVTVIKNNMINNDL

SEQ ID NO: 171888 - protein, 22 aa, Influenza A virus
ESADMSIGVTVIKNNMINNDLG

SEQ ID NO: 171889 - protein, 23 aa, Influenza A virus
ESADMSIGVTVIKNNMINNDLGP

SEQ ID NO: 171890 - protein, 24 aa, Influenza A virus
ESADMSIGVTVIKNNMINNDLGPA

SEQ ID NO: 171891 - protein, 25 aa, Influenza A virus
ESADMSIGVTVIKNNMINNDLGPAT

SEQ ID NO: 171892 - protein, 13 aa, Influenza A virus
ESGRLIDFLKDVM

SEQ ID NO: 171893 - protein, 14 aa, Influenza A virus
ESGRLIDFLKDVME

SEQ ID NO: 171894 - protein, 15 aa, Influenza A virus
ESGRLIDFLKDVMES

SEQ ID NO: 171895 - protein, 16 aa, Influenza A virus
ESGRLIDFLKDVMESM

SEQ ID NO: 171896 - protein, 20 aa, Influenza A virus
ETLARSICEKLEQSGLPVGG

SEQ ID NO: 171897 - protein, 22 aa, Influenza A virus
ETLARSICEKLEQSGLPVGGNE

SEQ ID NO: 171898 - protein, 23 aa, Influenza A virus
ETLARSICEKLEQSGLPVGGNEK

SEQ ID NO: 171899 - protein, 24 aa, Influenza A virus
ETLARSICEKLEQSGLPVGGNEKK

SEQ ID NO: 171900 - protein, 25 aa, Influenza A virus
ETLARSICEKLEQSGLPVGGNEKKA

SEQ ID NO: 171901 - protein, 14 aa, Influenza A virus
EVCLKWELMDEDYQ

SEQ ID NO: 171902 - protein, 15 aa, Influenza A virus
EVCLKWELMDEDYQG

SEQ ID NO: 171903 - protein, 16 aa, Influenza A virus
EVCLKWELMDEDYQGR

SEQ ID NO: 171904 - protein, 17 aa, Influenza A virus
EVCLKWELMDEDYQGRL

SEQ ID NO: 171905 - protein, 19 aa, Influenza A virus
EVCLKWELMDEDYQGRLCN

SEQ ID NO: 171906 - protein, 20 aa, Influenza A virus
EVCLKWELMDEDYQGRLCNP

SEQ ID NO: 171907 - protein, 21 aa, Influenza A virus
EVCLKWELMDEDYQGRLCNPL

SEQ ID NO: 171908 - protein, 22 aa, Influenza A virus
EVCLKWELMDEDYQGRLCNPLN

SEQ ID NO: 171909 - protein, 23 aa, Influenza A virus
EVCLKWELMDEDYQGRLCNPLNP

SEQ ID NO: 171910 - protein, 24 aa, Influenza A virus
EVCLKWELMDEDYQGRLCNPLNPF

SEQ ID NO: 171911 - protein, 25 aa, Influenza A virus
EVCLKWELMDEDYQGRLCNPLNPFV

SEQ ID NO: 171912 - protein, 13 aa, Influenza A virus
FALIVNAPNHEGI

SEQ ID NO: 171913 - protein, 14 aa, Influenza A virus
FALIVNAPNHEGIQ

SEQ ID NO: 171914 - protein, 15 aa, Influenza A virus
FALIVNAPNHEGIQA

SEQ ID NO: 171915 - protein, 16 aa, Influenza A virus
FALIVNAPNHEGIQAG

SEQ ID NO: 171916 - protein, 17 aa, Influenza A virus
FALIVNAPNHEGIQAGV

SEQ ID NO: 171917 - protein, 13 aa, Influenza A virus
FEFTSFFYRYGFV

SEQ ID NO: 171918 - protein, 14 aa, Influenza A virus
FEFTSFFYRYGFVA

SEQ ID NO: 171919 - protein, 15 aa, Influenza A virus
FEFTSFFYRYGFVAN

SEQ ID NO: 171920 - protein, 16 aa, Influenza A virus
FEFTSFFYRYGFVANF

SEQ ID NO: 171921 - protein, 17 aa, Influenza A virus
FEFTSFFYRYGFVANFS

SEQ ID NO: 171922 - protein, 18 aa, Influenza A virus
FEFTSFFYRYGFVANFSM

SEQ ID NO: 171923 - protein, 19 aa, Influenza A virus
FEFTSFFYRYGFVANFSME

SEQ ID NO: 171924 - protein, 20 aa, Influenza A virus
FEFTSFFYRYGFVANFSMEL

SEQ ID NO: 171925 - protein, 21 aa, Influenza A virus
FEFTSFFYRYGFVANFSMELP

SEQ ID NO: 171926 - protein, 22 aa, Influenza A virus
FEFTSFFYRYGFVANFSMELPS

SEQ ID NO: 171927 - protein, 23 aa, Influenza A virus
FEFTSFFYRYGFVANFSMELPSF

SEQ ID NO: 171928 - protein, 24 aa, Influenza A virus
FEFTSFFYRYGFVANFSMELPSFG

SEQ ID NO: 171929 - protein, 25 aa, Influenza A virus
FEFTSFFYRYGFVANFSMELPSFGV

SEQ ID NO: 171930 - protein, 13 aa, Influenza A virus
FEKFFPSSSYRRP

SEQ ID NO: 171931 - protein, 14 aa, Influenza A virus
FEKFFPSSSYRRPV

SEQ ID NO: 171932 - protein, 15 aa, Influenza A virus
FEKFFPSSSYRRPVG

SEQ ID NO: 171933 - protein, 16 aa, Influenza A virus
FEKFFPSSSYRRPVGI

SEQ ID NO: 171934 - protein, 17 aa, Influenza A virus
FEKFFPSSSYRRPVGIS

SEQ ID NO: 171935 - protein, 18 aa, Influenza A virus
FEKFFPSSSYRRPVGISS

SEQ ID NO: 171936 - protein, 19 aa, Influenza A virus
FEKFFPSSSYRRPVGISSM

SEQ ID NO: 171937 - protein, 20 aa, Influenza A virus
FEKFFPSSSYRRPVGISSMV

SEQ ID NO: 171938 - protein, 21 aa, Influenza A virus
FEKFFPSSSYRRPVGISSMVE

SEQ ID NO: 171939 - protein, 22 aa, Influenza A virus
FEKFFPSSSYRRPVGISSMVEA

SEQ ID NO: 171940 - protein, 23 aa, Influenza A virus
FEKFFPSSSYRRPVGISSMVEAM

SEQ ID NO: 171941 - protein, 24 aa, Influenza A virus
FEKFFPSSSYRRPVGISSMVEAMV

SEQ ID NO: 171942 - protein, 25 aa, Influenza A virus
FEKFFPSSSYRRPVGISSMVEAMVS

SEQ ID NO: 171943 - protein, 15 aa, Influenza A virus
FFPSSSYRRPVGISS

SEQ ID NO: 171944 - protein, 16 aa, Influenza A virus
FFPSSSYRRPVGISSM

SEQ ID NO: 171945 - protein, 17 aa, Influenza A virus
FFPSSSYRRPVGISSMV

SEQ ID NO: 171946 - protein, 19 aa, Influenza A virus
FFPSSSYRRPVGISSMVEA

SEQ ID NO: 171947 - protein, 20 aa, Influenza A virus
FFPSSSYRRPVGISSMVEAM

SEQ ID NO: 171948 - protein, 21 aa, Influenza A virus
FFPSSSYRRPVGISSMVEAMV

SEQ ID NO: 171949 - protein, 22 aa, Influenza A virus
FFPSSSYRRPVGISSMVEAMVS

SEQ ID NO: 171950 - protein, 23 aa, Influenza A virus
FFPSSSYRRPVGISSMVEAMVSR

SEQ ID NO: 171951 - protein, 24 aa, Influenza A virus
FFPSSSYRRPVGISSMVEAMVSRA

SEQ ID NO: 171952 - protein, 25 aa, Influenza A virus
FFPSSSYRRPVGISSMVEAMVSRAR

SEQ ID NO: 171953 - protein, 13 aa, Influenza A virus
FFYRYGFVANFSM

SEQ ID NO: 171954 - protein, 14 aa, Influenza A virus
FFYRYGFVANFSME

SEQ ID NO: 171955 - protein, 15 aa, Influenza A virus
FFYRYGFVANFSMEL

SEQ ID NO: 171956 - protein, 16 aa, Influenza A virus
FFYRYGFVANFSMELP

SEQ ID NO: 171957 - protein, 17 aa, Influenza A virus
FFYRYGFVANFSMELPS

SEQ ID NO: 171958 - protein, 18 aa, Influenza A virus
FFYRYGFVANFSMELPSF

SEQ ID NO: 171959 - protein, 19 aa, Influenza A virus
FFYRYGFVANFSMELPSFG

SEQ ID NO: 171960 - protein, 20 aa, Influenza A virus
FFYRYGFVANFSMELPSFGV

SEQ ID NO: 171961 - protein, 21 aa, Influenza A virus
FFYRYGFVANFSMELPSFGVS

SEQ ID NO: 171962 - protein, 22 aa, Influenza A virus
FFYRYGFVANFSMELPSFGVSG

SEQ ID NO: 171963 - protein, 23 aa, Influenza A virus
FFYRYGFVANFSMELPSFGVSGI

SEQ ID NO: 171964 - protein, 24 aa, Influenza A virus
FFYRYGFVANFSMELPSFGVSGIN

SEQ ID NO: 171965 - protein, 25 aa, Influenza A virus
FFYRYGFVANFSMELPSFGVSGINE

SEQ ID NO: 171966 - protein, 14 aa, Influenza A virus
FGVSGINESADMSI

SEQ ID NO: 171967 - protein, 15 aa, Influenza A virus
FGVSGINESADMSIG

SEQ ID NO: 171968 - protein, 16 aa, Influenza A virus
FGVSGINESADMSIGV

SEQ ID NO: 171969 - protein, 17 aa, Influenza A virus
FGVSGINESADMSIGVT

SEQ ID NO: 171970 - protein, 18 aa, Influenza A virus
FGVSGINESADMSIGVTV

SEQ ID NO: 171971 - protein, 19 aa, Influenza A virus
FGVSGINESADMSIGVTVI

SEQ ID NO: 171972 - protein, 20 aa, Influenza A virus
FGVSGINESADMSIGVTVIK

SEQ ID NO: 171973 - protein, 21 aa, Influenza A virus
FGVSGINESADMSIGVTVIKN

SEQ ID NO: 171974 - protein, 22 aa, Influenza A virus
FGVSGINESADMSIGVTVIKNN

SEQ ID NO: 171975 - protein, 23 aa, Influenza A virus
FGVSGINESADMSIGVTVIKNNM

SEQ ID NO: 171976 - protein, 24 aa, Influenza A virus
FGVSGINESADMSIGVTVIKNNMI

SEQ ID NO: 171977 - protein, 25 aa, Influenza A virus
FGVSGINESADMSIGVTVIKNNMIN

SEQ ID NO: 171978 - protein, 14 aa, Influenza A virus
FIKDYRYTYRCHRG

SEQ ID NO: 171979 - protein, 15 aa, Influenza A virus
FIKDYRYTYRCHRGD

SEQ ID NO: 171980 - protein, 16 aa, Influenza A virus
FIKDYRYTYRCHRGDT

SEQ ID NO: 171981 - protein, 17 aa, Influenza A virus
FIKDYRYTYRCHRGDTQ

SEQ ID NO: 171982 - protein, 19 aa, Influenza A virus
FIKDYRYTYRCHRGDTQIQ

SEQ ID NO: 171983 - protein, 20 aa, Influenza A virus
FIKDYRYTYRCHRGDTQIQT

SEQ ID NO: 171984 - protein, 21 aa, Influenza A virus
FIKDYRYTYRCHRGDTQIQTR

SEQ ID NO: 171985 - protein, 22 aa, Influenza A virus
FIKDYRYTYRCHRGDTQIQTRR

SEQ ID NO: 171986 - protein, 23 aa, Influenza A virus
FIKDYRYTYRCHRGDTQIQTRRS

SEQ ID NO: 171987 - protein, 24 aa, Influenza A virus
FIKDYRYTYRCHRGDTQIQTRRSF

SEQ ID NO: 171988 - protein, 25 aa, Influenza A virus
FIKDYRYTYRCHRGDTQIQTRRSFE

SEQ ID NO: 171989 - protein, 13 aa, Influenza A virus
FLKVPAQNAISTT

SEQ ID NO: 171990 - protein, 14 aa, Influenza A virus
FLKVPAQNAISTTF

SEQ ID NO: 171991 - protein, 15 aa, Influenza A virus
FLKVPAQNAISTTFP

SEQ ID NO: 171992 - protein, 16 aa, Influenza A virus
FLKVPAQNAISTTFPY

SEQ ID NO: 171993 - protein, 17 aa, Influenza A virus
FLKVPAQNAISTTFPYT

SEQ ID NO: 171994 - protein, 19 aa, Influenza A virus
FLKVPAQNAISTTFPYTGD

SEQ ID NO: 171995 - protein, 20 aa, Influenza A virus
FLKVPAQNAISTTFPYTGDP

SEQ ID NO: 171996 - protein, 21 aa, Influenza A virus
FLKVPAQNAISTTFPYTGDPP

SEQ ID NO: 171997 - protein, 22 aa, Influenza A virus
FLKVPAQNAISTTFPYTGDPPY

SEQ ID NO: 171998 - protein, 23 aa, Influenza A virus
FLKVPAQNAISTTFPYTGDPPYS

SEQ ID NO: 171999 - protein, 24 aa, Influenza A virus
FLKVPAQNAISTTFPYTGDPPYSH

SEQ ID NO: 172000 - protein, 25 aa, Influenza A virus
FLKVPAQNAISTTFPYTGDPPYSHG

SEQ ID NO: 172001 - protein, 13 aa, Influenza A virus
FNMLSTVLGVSIL

SEQ ID NO: 172002 - protein, 14 aa, Influenza A virus
FNMLSTVLGVSILN

SEQ ID NO: 172003 - protein, 15 aa, Influenza A virus
FNMLSTVLGVSILNL

SEQ ID NO: 172004 - protein, 16 aa, Influenza A virus
FNMLSTVLGVSILNLG

SEQ ID NO: 172005 - protein, 17 aa, Influenza A virus
FNMLSTVLGVSILNLGQ

SEQ ID NO: 172006 - protein, 18 aa, Influenza A virus
FNMLSTVLGVSILNLGQK

SEQ ID NO: 172007 - protein, 15 aa, Influenza A virus
FPSSSYRRPVGISSM

SEQ ID NO: 172008 - protein, 16 aa, Influenza A virus
FPSSSYRRPVGISSMV

SEQ ID NO: 172009 - protein, 17 aa, Influenza A virus
FPSSSYRRPVGISSMVE

SEQ ID NO: 172010 - protein, 19 aa, Influenza A virus
FPSSSYRRPVGISSMVEAM

SEQ ID NO: 172011 - protein, 20 aa, Influenza A virus
FPSSSYRRPVGISSMVEAMV

SEQ ID NO: 172012 - protein, 21 aa, Influenza A virus
FPSSSYRRPVGISSMVEAMVS

SEQ ID NO: 172013 - protein, 22 aa, Influenza A virus
FPSSSYRRPVGISSMVEAMVSR

SEQ ID NO: 172014 - protein, 23 aa, Influenza A virus
FPSSSYRRPVGISSMVEAMVSRA

SEQ ID NO: 172015 - protein, 24 aa, Influenza A virus
FPSSSYRRPVGISSMVEAMVSRAR

SEQ ID NO: 172016 - protein, 25 aa, Influenza A virus
FPSSSYRRPVGISSMVEAMVSRARI

SEQ ID NO: 172017 - protein, 15 aa, Influenza A virus
FPYTGDPPYSHGTGT

SEQ ID NO: 172018 - protein, 19 aa, Influenza A virus
FPYTGDPPYSHGTGTGYTM

SEQ ID NO: 172019 - protein, 20 aa, Influenza A virus
FPYTGDPPYSHGTGTGYTMD

SEQ ID NO: 172020 - protein, 22 aa, Influenza A virus
FPYTGDPPYSHGTGTGYTMDTV

SEQ ID NO: 172021 - protein, 23 aa, Influenza A virus
FPYTGDPPYSHGTGTGYTMDTVN

SEQ ID NO: 172022 - protein, 24 aa, Influenza A virus
FPYTGDPPYSHGTGTGYTMDTVNR

SEQ ID NO: 172023 - protein, 25 aa, Influenza A virus
FPYTGDPPYSHGTGTGYTMDTVNRT

SEQ ID NO: 172024 - protein, 14 aa, Influenza A virus
FSMELPSFGVSGIN

SEQ ID NO: 172025 - protein, 15 aa, Influenza A virus
FSMELPSFGVSGINE

SEQ ID NO: 172026 - protein, 16 aa, Influenza A virus
FSMELPSFGVSGINES

SEQ ID NO: 172027 - protein, 17 aa, Influenza A virus
FSMELPSFGVSGINESA

SEQ ID NO: 172028 - protein, 18 aa, Influenza A virus
FSMELPSFGVSGINESAD

SEQ ID NO: 172029 - protein, 19 aa, Influenza A virus
FSMELPSFGVSGINESADM

SEQ ID NO: 172030 - protein, 20 aa, Influenza A virus
FSMELPSFGVSGINESADMS

SEQ ID NO: 172031 - protein, 21 aa, Influenza A virus
FSMELPSFGVSGINESADMSI

SEQ ID NO: 172032 - protein, 22 aa, Influenza A virus
FSMELPSFGVSGINESADMSIG

SEQ ID NO: 172033 - protein, 23 aa, Influenza A virus
FSMELPSFGVSGINESADMSIGV

SEQ ID NO: 172034 - protein, 24 aa, Influenza A virus
FSMELPSFGVSGINESADMSIGVT

SEQ ID NO: 172035 - protein, 25 aa, Influenza A virus
FSMELPSFGVSGINESADMSIGVTV

SEQ ID NO: 172036 - protein, 14 aa, Influenza A virus
FSNKMARLGKGYMF

SEQ ID NO: 172037 - protein, 15 aa, Influenza A virus
FSNKMARLGKGYMFE

SEQ ID NO: 172038 - protein, 16 aa, Influenza A virus
FSNKMARLGKGYMFES

SEQ ID NO: 172039 - protein, 17 aa, Influenza A virus
FSNKMARLGKGYMFESK

SEQ ID NO: 172040 - protein, 20 aa, Influenza A virus
FTITGDNTKWNENQNPRMFL

SEQ ID NO: 172041 - protein, 21 aa, Influenza A virus
FTITGDNTKWNENQNPRMFLA

SEQ ID NO: 172042 - protein, 22 aa, Influenza A virus
FTITGDNTKWNENQNPRMFLAM

SEQ ID NO: 172043 - protein, 23 aa, Influenza A virus
FTITGDNTKWNENQNPRMFLAMI

SEQ ID NO: 172044 - protein, 24 aa, Influenza A virus
FTITGDNTKWNENQNPRMFLAMIT

SEQ ID NO: 172045 - protein, 25 aa, Influenza A virus
FTITGDNTKWNENQNPRMFLAMITY

SEQ ID NO: 172046 - protein, 13 aa, Influenza A virus
FTSFFYRYGFVAN

SEQ ID NO: 172047 - protein, 14 aa, Influenza A virus
FTSFFYRYGFVANF

SEQ ID NO: 172048 - protein, 15 aa, Influenza A virus
FTSFFYRYGFVANFS

SEQ ID NO: 172049 - protein, 16 aa, Influenza A virus
FTSFFYRYGFVANFSM

SEQ ID NO: 172050 - protein, 17 aa, Influenza A virus
FTSFFYRYGFVANFSME

SEQ ID NO: 172051 - protein, 18 aa, Influenza A virus
FTSFFYRYGFVANFSMEL

SEQ ID NO: 172052 - protein, 19 aa, Influenza A virus
FTSFFYRYGFVANFSMELP

SEQ ID NO: 172053 - protein, 20 aa, Influenza A virus
FTSFFYRYGFVANFSMELPS

SEQ ID NO: 172054 - protein, 21 aa, Influenza A virus
FTSFFYRYGFVANFSMELPSF

SEQ ID NO: 172055 - protein, 22 aa, Influenza A virus
FTSFFYRYGFVANFSMELPSFG

SEQ ID NO: 172056 - protein, 23 aa, Influenza A virus
FTSFFYRYGFVANFSMELPSFGV

SEQ ID NO: 172057 - protein, 24 aa, Influenza A virus
FTSFFYRYGFVANFSMELPSFGVS

SEQ ID NO: 172058 - protein, 25 aa, Influenza A virus
FTSFFYRYGFVANFSMELPSFGVSG

SEQ ID NO: 172059 - protein, 13 aa, Influenza A virus
FVANFSMELPSFG

SEQ ID NO: 172060 - protein, 14 aa, Influenza A virus
FVANFSMELPSFGV

SEQ ID NO: 172061 - protein, 15 aa, Influenza A virus
FVANFSMELPSFGVS

SEQ ID NO: 172062 - protein, 16 aa, Influenza A virus
FVANFSMELPSFGVSG

SEQ ID NO: 172063 - protein, 17 aa, Influenza A virus
FVANFSMELPSFGVSGI

SEQ ID NO: 172064 - protein, 18 aa, Influenza A virus
FVANFSMELPSFGVSGIN

SEQ ID NO: 172065 - protein, 19 aa, Influenza A virus
FVANFSMELPSFGVSGINE

SEQ ID NO: 172066 - protein, 20 aa, Influenza A virus
FVANFSMELPSFGVSGINES

SEQ ID NO: 172067 - protein, 21 aa, Influenza A virus
FVANFSMELPSFGVSGINESA

SEQ ID NO: 172068 - protein, 22 aa, Influenza A virus
FVANFSMELPSFGVSGINESAD

SEQ ID NO: 172069 - protein, 23 aa, Influenza A virus
FVANFSMELPSFGVSGINESADM

SEQ ID NO: 172070 - protein, 24 aa, Influenza A virus
FVANFSMELPSFGVSGINESADMS

SEQ ID NO: 172071 - protein, 25 aa, Influenza A virus
FVANFSMELPSFGVSGINESADMSI

SEQ ID NO: 172072 - protein, 13 aa, Influenza A virus
FVETLARSICEKL

SEQ ID NO: 172073 - protein, 14 aa, Influenza A virus
FVETLARSICEKLE

SEQ ID NO: 172074 - protein, 15 aa, Influenza A virus
FVETLARSICEKLEQ

SEQ ID NO: 172075 - protein, 16 aa, Influenza A virus
FVETLARSICEKLEQS

SEQ ID NO: 172076 - protein, 17 aa, Influenza A virus
FVETLARSICEKLEQSG

SEQ ID NO: 172077 - protein, 19 aa, Influenza A virus
FVETLARSICEKLEQSGLP

SEQ ID NO: 172078 - protein, 20 aa, Influenza A virus
FVETLARSICEKLEQSGLPV

SEQ ID NO: 172079 - protein, 21 aa, Influenza A virus
FVETLARSICEKLEQSGLPVG

SEQ ID NO: 172080 - protein, 22 aa, Influenza A virus
FVETLARSICEKLEQSGLPVGG

SEQ ID NO: 172081 - protein, 23 aa, Influenza A virus
FVETLARSICEKLEQSGLPVGGN

SEQ ID NO: 172082 - protein, 24 aa, Influenza A virus
FVETLARSICEKLEQSGLPVGGNE

SEQ ID NO: 172083 - protein, 25 aa, Influenza A virus
FVETLARSICEKLEQSGLPVGGNEK

SEQ ID NO: 172084 - protein, 13 aa, Influenza A virus
FVYFVETLARSIC

SEQ ID NO: 172085 - protein, 14 aa, Influenza A virus
FVYFVETLARSICE

SEQ ID NO: 172086 - protein, 15 aa, Influenza A virus
FVYFVETLARSICEK

SEQ ID NO: 172087 - protein, 16 aa, Influenza A virus
FVYFVETLARSICEKL

SEQ ID NO: 172088 - protein, 17 aa, Influenza A virus
FVYFVETLARSICEKLE

SEQ ID NO: 172089 - protein, 18 aa, Influenza A virus
FVYFVETLARSICEKLEQ

SEQ ID NO: 172090 - protein, 19 aa, Influenza A virus
FVYFVETLARSICEKLEQS

SEQ ID NO: 172091 - protein, 20 aa, Influenza A virus
FVYFVETLARSICEKLEQSG

SEQ ID NO: 172092 - protein, 21 aa, Influenza A virus
FVYFVETLARSICEKLEQSGL

SEQ ID NO: 172093 - protein, 22 aa, Influenza A virus
FVYFVETLARSICEKLEQSGLP

SEQ ID NO: 172094 - protein, 23 aa, Influenza A virus
FVYFVETLARSICEKLEQSGLPV

SEQ ID NO: 172095 - protein, 24 aa, Influenza A virus
FVYFVETLARSICEKLEQSGLPVG

SEQ ID NO: 172096 - protein, 25 aa, Influenza A virus
FVYFVETLARSICEKLEQSGLPVGG

SEQ ID NO: 172097 - protein, 13 aa, Influenza A virus
FYRYGFVANFSME

SEQ ID NO: 172098 - protein, 14 aa, Influenza A virus
FYRYGFVANFSMEL

SEQ ID NO: 172099 - protein, 15 aa, Influenza A virus
FYRYGFVANFSMELP

SEQ ID NO: 172100 - protein, 16 aa, Influenza A virus
FYRYGFVANFSMELPS

SEQ ID NO: 172101 - protein, 17 aa, Influenza A virus
FYRYGFVANFSMELPSF

SEQ ID NO: 172102 - protein, 18 aa, Influenza A virus
FYRYGFVANFSMELPSFG

SEQ ID NO: 172103 - protein, 19 aa, Influenza A virus
FYRYGFVANFSMELPSFGV

SEQ ID NO: 172104 - protein, 20 aa, Influenza A virus
FYRYGFVANFSMELPSFGVS

SEQ ID NO: 172105 - protein, 21 aa, Influenza A virus
FYRYGFVANFSMELPSFGVSG

SEQ ID NO: 172106 - protein, 22 aa, Influenza A virus
FYRYGFVANFSMELPSFGVSGI

SEQ ID NO: 172107 - protein, 23 aa, Influenza A virus
FYRYGFVANFSMELPSFGVSGIN

SEQ ID NO: 172108 - protein, 24 aa, Influenza A virus
FYRYGFVANFSMELPSFGVSGINE

SEQ ID NO: 172109 - protein, 25 aa, Influenza A virus
FYRYGFVANFSMELPSFGVSGINES

SEQ ID NO: 172110 - protein, 15 aa, Influenza A virus
GDNTKWNENQNPRMF

SEQ ID NO: 172111 - protein, 16 aa, Influenza A virus
GDNTKWNENQNPRMFL

SEQ ID NO: 172112 - protein, 17 aa, Influenza A virus
GDNTKWNENQNPRMFLA

SEQ ID NO: 172113 - protein, 19 aa, Influenza A virus
GDNTKWNENQNPRMFLAMI

SEQ ID NO: 172114 - protein, 20 aa, Influenza A virus
GDNTKWNENQNPRMFLAMIT

SEQ ID NO: 172115 - protein, 21 aa, Influenza A virus
GDNTKWNENQNPRMFLAMITY

SEQ ID NO: 172116 - protein, 22 aa, Influenza A virus
GDNTKWNENQNPRMFLAMITYI

SEQ ID NO: 172117 - protein, 23 aa, Influenza A virus
GDNTKWNENQNPRMFLAMITYIT

SEQ ID NO: 172118 - protein, 15 aa, Influenza A virus
GDPPYSHGTGTGYTM

SEQ ID NO: 172119 - protein, 16 aa, Influenza A virus
GDPPYSHGTGTGYTMD

SEQ ID NO: 172120 - protein, 17 aa, Influenza A virus
GDPPYSHGTGTGYTMDT

SEQ ID NO: 172121 - protein, 19 aa, Influenza A virus
GDPPYSHGTGTGYTMDTVN

SEQ ID NO: 172122 - protein, 20 aa, Influenza A virus
GDPPYSHGTGTGYTMDTVNR

SEQ ID NO: 172123 - protein, 21 aa, Influenza A virus
GDPPYSHGTGTGYTMDTVNRT

SEQ ID NO: 172124 - protein, 22 aa, Influenza A virus
GDPPYSHGTGTGYTMDTVNRTH

SEQ ID NO: 172125 - protein, 23 aa, Influenza A virus
GDPPYSHGTGTGYTMDTVNRTHQ

SEQ ID NO: 172126 - protein, 24 aa, Influenza A virus
GDPPYSHGTGTGYTMDTVNRTHQY

SEQ ID NO: 172127 - protein, 25 aa, Influenza A virus
GDPPYSHGTGTGYTMDTVNRTHQYS

SEQ ID NO: 172128 - protein, 13 aa, Influenza A virus
GFVANFSMELPSF

SEQ ID NO: 172129 - protein, 14 aa, Influenza A virus
GFVANFSMELPSFG

SEQ ID NO: 172130 - protein, 15 aa, Influenza A virus
GFVANFSMELPSFGV

SEQ ID NO: 172131 - protein, 16 aa, Influenza A virus
GFVANFSMELPSFGVS

SEQ ID NO: 172132 - protein, 17 aa, Influenza A virus
GFVANFSMELPSFGVSG

SEQ ID NO: 172133 - protein, 18 aa, Influenza A virus
GFVANFSMELPSFGVSGI

SEQ ID NO: 172134 - protein, 19 aa, Influenza A virus
GFVANFSMELPSFGVSGIN

SEQ ID NO: 172135 - protein, 20 aa, Influenza A virus
GFVANFSMELPSFGVSGINE

SEQ ID NO: 172136 - protein, 21 aa, Influenza A virus
GFVANFSMELPSFGVSGINES

SEQ ID NO: 172137 - protein, 22 aa, Influenza A virus
GFVANFSMELPSFGVSGINESA

SEQ ID NO: 172138 - protein, 23 aa, Influenza A virus
GFVANFSMELPSFGVSGINESAD

SEQ ID NO: 172139 - protein, 24 aa, Influenza A virus
GFVANFSMELPSFGVSGINESADM

SEQ ID NO: 172140 - protein, 25 aa, Influenza A virus
GFVANFSMELPSFGVSGINESADMS

SEQ ID NO: 172141 - protein, 13 aa, Influenza A virus
GFVYFVETLARSI

SEQ ID NO: 172142 - protein, 14 aa, Influenza A virus
GFVYFVETLARSIC

SEQ ID NO: 172143 - protein, 15 aa, Influenza A virus
GFVYFVETLARSICE

SEQ ID NO: 172144 - protein, 16 aa, Influenza A virus
GFVYFVETLARSICEK

SEQ ID NO: 172145 - protein, 17 aa, Influenza A virus
GFVYFVETLARSICEKL

SEQ ID NO: 172146 - protein, 18 aa, Influenza A virus
GFVYFVETLARSICEKLE

SEQ ID NO: 172147 - protein, 19 aa, Influenza A virus
GFVYFVETLARSICEKLEQ

SEQ ID NO: 172148 - protein, 20 aa, Influenza A virus
GFVYFVETLARSICEKLEQS

SEQ ID NO: 172149 - protein, 21 aa, Influenza A virus
GFVYFVETLARSICEKLEQSG

SEQ ID NO: 172150 - protein, 22 aa, Influenza A virus
GFVYFVETLARSICEKLEQSGL

SEQ ID NO: 172151 - protein, 23 aa, Influenza A virus
GFVYFVETLARSICEKLEQSGLP

SEQ ID NO: 172152 - protein, 24 aa, Influenza A virus
GFVYFVETLARSICEKLEQSGLPV

SEQ ID NO: 172153 - protein, 25 aa, Influenza A virus
GFVYFVETLARSICEKLEQSGLPVG

SEQ ID NO: 172154 - protein, 15 aa, Influenza A virus
GGNEKKAKLANVVRK

SEQ ID NO: 172155 - protein, 16 aa, Influenza A virus
GGNEKKAKLANVVRKM

SEQ ID NO: 172156 - protein, 17 aa, Influenza A virus
GGNEKKAKLANVVRKMM

SEQ ID NO: 172157 - protein, 18 aa, Influenza A virus
GGNEKKAKLANVVRKMMT

SEQ ID NO: 172158 - protein, 19 aa, Influenza A virus
GGNEKKAKLANVVRKMMTN

SEQ ID NO: 172159 - protein, 20 aa, Influenza A virus
GGNEKKAKLANVVRKMMTNS

SEQ ID NO: 172160 - protein, 21 aa, Influenza A virus
GGNEKKAKLANVVRKMMTNSQ

SEQ ID NO: 172161 - protein, 22 aa, Influenza A virus
GGNEKKAKLANVVRKMMTNSQD

SEQ ID NO: 172162 - protein, 23 aa, Influenza A virus
GGNEKKAKLANVVRKMMTNSQDT

SEQ ID NO: 172163 - protein, 24 aa, Influenza A virus
GGNEKKAKLANVVRKMMTNSQDTE

SEQ ID NO: 172164 - protein, 25 aa, Influenza A virus
GGNEKKAKLANVVRKMMTNSQDTEL

SEQ ID NO: 172165 - protein, 13 aa, Influenza A virus
GGPNLYNIRNLHI

SEQ ID NO: 172166 - protein, 14 aa, Influenza A virus
GGPNLYNIRNLHIP

SEQ ID NO: 172167 - protein, 15 aa, Influenza A virus
GGPNLYNIRNLHIPE

SEQ ID NO: 172168 - protein, 16 aa, Influenza A virus
GGPNLYNIRNLHIPEV

SEQ ID NO: 172169 - protein, 17 aa, Influenza A virus
GGPNLYNIRNLHIPEVC

SEQ ID NO: 172170 - protein, 18 aa, Influenza A virus
GGPNLYNIRNLHIPEVCL

SEQ ID NO: 172171 - protein, 19 aa, Influenza A virus
GGPNLYNIRNLHIPEVCLK

SEQ ID NO: 172172 - protein, 20 aa, Influenza A virus
GGPNLYNIRNLHIPEVCLKW

SEQ ID NO: 172173 - protein, 21 aa, Influenza A virus
GGPNLYNIRNLHIPEVCLKWE

SEQ ID NO: 172174 - protein, 22 aa, Influenza A virus
GGPNLYNIRNLHIPEVCLKWEL

SEQ ID NO: 172175 - protein, 23 aa, Influenza A virus
GGPNLYNIRNLHIPEVCLKWELM

SEQ ID NO: 172176 - protein, 24 aa, Influenza A virus
GGPNLYNIRNLHIPEVCLKWELMD

SEQ ID NO: 172177 - protein, 25 aa, Influenza A virus
GGPNLYNIRNLHIPEVCLKWELMDE

SEQ ID NO: 172178 - protein, 14 aa, Influenza A virus
GINESADMSIGVTV

SEQ ID NO: 172179 - protein, 15 aa, Influenza A virus
GINESADMSIGVTVI

SEQ ID NO: 172180 - protein, 16 aa, Influenza A virus
GINESADMSIGVTVIK

SEQ ID NO: 172181 - protein, 17 aa, Influenza A virus
GINESADMSIGVTVIKN

SEQ ID NO: 172182 - protein, 18 aa, Influenza A virus
GINESADMSIGVTVIKNN

SEQ ID NO: 172183 - protein, 19 aa, Influenza A virus
GINESADMSIGVTVIKNNM

SEQ ID NO: 172184 - protein, 20 aa, Influenza A virus
GINESADMSIGVTVIKNNMI

SEQ ID NO: 172185 - protein, 21 aa, Influenza A virus
GINESADMSIGVTVIKNNMIN

SEQ ID NO: 172186 - protein, 22 aa, Influenza A virus
GINESADMSIGVTVIKNNMINN

SEQ ID NO: 172187 - protein, 23 aa, Influenza A virus
GINESADMSIGVTVIKNNMINND

SEQ ID NO: 172188 - protein, 24 aa, Influenza A virus
GINESADMSIGVTVIKNNMINNDL

SEQ ID NO: 172189 - protein, 25 aa, Influenza A virus
GINESADMSIGVTVIKNNMINNDLG

SEQ ID NO: 172190 - protein, 13 aa, Influenza A virus
GINMSKKKSYINR

SEQ ID NO: 172191 - protein, 14 aa, Influenza A virus
GINMSKKKSYINRT

SEQ ID NO: 172192 - protein, 15 aa, Influenza A virus
GINMSKKKSYINRTG

SEQ ID NO: 172193 - protein, 16 aa, Influenza A virus
GINMSKKKSYINRTGT

SEQ ID NO: 172194 - protein, 17 aa, Influenza A virus
GINMSKKKSYINRTGTF

SEQ ID NO: 172195 - protein, 18 aa, Influenza A virus
GINMSKKKSYINRTGTFE

SEQ ID NO: 172196 - protein, 19 aa, Influenza A virus
GINMSKKKSYINRTGTFEF

SEQ ID NO: 172197 - protein, 20 aa, Influenza A virus
GINMSKKKSYINRTGTFEFT

SEQ ID NO: 172198 - protein, 21 aa, Influenza A virus
GINMSKKKSYINRTGTFEFTS

SEQ ID NO: 172199 - protein, 22 aa, Influenza A virus
GINMSKKKSYINRTGTFEFTSF

SEQ ID NO: 172200 - protein, 23 aa, Influenza A virus
GINMSKKKSYINRTGTFEFTSFF

SEQ ID NO: 172201 - protein, 24 aa, Influenza A virus
GINMSKKKSYINRTGTFEFTSFFY

SEQ ID NO: 172202 - protein, 25 aa, Influenza A virus
GINMSKKKSYINRTGTFEFTSFFYR

SEQ ID NO: 172203 - protein, 14 aa, Influenza A virus
GIQAGVDRFYRTCK

SEQ ID NO: 172204 - protein, 15 aa, Influenza A virus
GIQAGVDRFYRTCKL

SEQ ID NO: 172205 - protein, 13 aa, Influenza A virus
GISSMVEAMVSRA

SEQ ID NO: 172206 - protein, 14 aa, Influenza A virus
GISSMVEAMVSRAR

SEQ ID NO: 172207 - protein, 15 aa, Influenza A virus
GISSMVEAMVSRARI

SEQ ID NO: 172208 - protein, 16 aa, Influenza A virus
GISSMVEAMVSRARID

SEQ ID NO: 172209 - protein, 17 aa, Influenza A virus
GISSMVEAMVSRARIDA

SEQ ID NO: 172210 - protein, 18 aa, Influenza A virus
GISSMVEAMVSRARIDAR

SEQ ID NO: 172211 - protein, 19 aa, Influenza A virus
GISSMVEAMVSRARIDARI

SEQ ID NO: 172212 - protein, 20 aa, Influenza A virus
GISSMVEAMVSRARIDARID

SEQ ID NO: 172213 - protein, 21 aa, Influenza A virus
GISSMVEAMVSRARIDARIDF

SEQ ID NO: 172214 - protein, 22 aa, Influenza A virus
GISSMVEAMVSRARIDARIDFE

SEQ ID NO: 172215 - protein, 23 aa, Influenza A virus
GISSMVEAMVSRARIDARIDFES

SEQ ID NO: 172216 - protein, 24 aa, Influenza A virus
GISSMVEAMVSRARIDARIDFESG

SEQ ID NO: 172217 - protein, 25 aa, Influenza A virus
GISSMVEAMVSRARIDARIDFESGR

SEQ ID NO: 172218 - protein, 14 aa, Influenza A virus
GKLKRRAIATPGMQ

SEQ ID NO: 172219 - protein, 15 aa, Influenza A virus
GKLKRRAIATPGMQI

SEQ ID NO: 172220 - protein, 16 aa, Influenza A virus
GKLKRRAIATPGMQIR

SEQ ID NO: 172221 - protein, 17 aa, Influenza A virus
GKLKRRAIATPGMQIRG

SEQ ID NO: 172222 - protein, 18 aa, Influenza A virus
GKLKRRAIATPGMQIRGF

SEQ ID NO: 172223 - protein, 19 aa, Influenza A virus
GKLKRRAIATPGMQIRGFV

SEQ ID NO: 172224 - protein, 20 aa, Influenza A virus
GKLKRRAIATPGMQIRGFVY

SEQ ID NO: 172225 - protein, 21 aa, Influenza A virus
GKLKRRAIATPGMQIRGFVYF

SEQ ID NO: 172226 - protein, 22 aa, Influenza A virus
GKLKRRAIATPGMQIRGFVYFV

SEQ ID NO: 172227 - protein, 23 aa, Influenza A virus
GKLKRRAIATPGMQIRGFVYFVE

SEQ ID NO: 172228 - protein, 24 aa, Influenza A virus
GKLKRRAIATPGMQIRGFVYFVET

SEQ ID NO: 172229 - protein, 25 aa, Influenza A virus
GKLKRRAIATPGMQIRGFVYFVETL

SEQ ID NO: 172230 - protein, 14 aa, Influenza A virus
GLLVSDGGPNLYNI

SEQ ID NO: 172231 - protein, 15 aa, Influenza A virus
GLLVSDGGPNLYNIR

SEQ ID NO: 172232 - protein, 16 aa, Influenza A virus
GLLVSDGGPNLYNIRN

SEQ ID NO: 172233 - protein, 17 aa, Influenza A virus
GLLVSDGGPNLYNIRNL

SEQ ID NO: 172234 - protein, 19 aa, Influenza A virus
GLLVSDGGPNLYNIRNLHI

SEQ ID NO: 172235 - protein, 20 aa, Influenza A virus
GLLVSDGGPNLYNIRNLHIP

SEQ ID NO: 172236 - protein, 21 aa, Influenza A virus
GLLVSDGGPNLYNIRNLHIPE

SEQ ID NO: 172237 - protein, 22 aa, Influenza A virus
GLLVSDGGPNLYNIRNLHIPEV

SEQ ID NO: 172238 - protein, 23 aa, Influenza A virus
GLLVSDGGPNLYNIRNLHIPEVC

SEQ ID NO: 172239 - protein, 24 aa, Influenza A virus
GLLVSDGGPNLYNIRNLHIPEVCL

SEQ ID NO: 172240 - protein, 25 aa, Influenza A virus
GLLVSDGGPNLYNIRNLHIPEVCLK

SEQ ID NO: 172241 - protein, 20 aa, Influenza A virus
GLPVGGNEKKAKLANVVRKM

SEQ ID NO: 172242 - protein, 21 aa, Influenza A virus
GLPVGGNEKKAKLANVVRKMM

SEQ ID NO: 172243 - protein, 22 aa, Influenza A virus
GLPVGGNEKKAKLANVVRKMMT

SEQ ID NO: 172244 - protein, 23 aa, Influenza A virus
GLPVGGNEKKAKLANVVRKMMTN

SEQ ID NO: 172245 - protein, 24 aa, Influenza A virus
GLPVGGNEKKAKLANVVRKMMTNS

SEQ ID NO: 172246 - protein, 25 aa, Influenza A virus
GLPVGGNEKKAKLANVVRKMMTNSQ

SEQ ID NO: 172247 - protein, 13 aa, Influenza A virus
GLQSSDDFALIVN

SEQ ID NO: 172248 - protein, 14 aa, Influenza A virus
GLQSSDDFALIVNA

SEQ ID NO: 172249 - protein, 15 aa, Influenza A virus
GLQSSDDFALIVNAP

SEQ ID NO: 172250 - protein, 16 aa, Influenza A virus
GLQSSDDFALIVNAPN

SEQ ID NO: 172251 - protein, 17 aa, Influenza A virus
GLQSSDDFALIVNAPNH

SEQ ID NO: 172252 - protein, 18 aa, Influenza A virus
GLQSSDDFALIVNAPNHE

SEQ ID NO: 172253 - protein, 19 aa, Influenza A virus
GLQSSDDFALIVNAPNHEG

SEQ ID NO: 172254 - protein, 20 aa, Influenza A virus
GLQSSDDFALIVNAPNHEGI

SEQ ID NO: 172255 - protein, 21 aa, Influenza A virus
GLQSSDDFALIVNAPNHEGIQ

SEQ ID NO: 172256 - protein, 22 aa, Influenza A virus
GLQSSDDFALIVNAPNHEGIQA

SEQ ID NO: 172257 - protein, 23 aa, Influenza A virus
GLQSSDDFALIVNAPNHEGIQAG

SEQ ID NO: 172258 - protein, 24 aa, Influenza A virus
GLQSSDDFALIVNAPNHEGIQAGV

SEQ ID NO: 172259 - protein, 13 aa, Influenza A virus
GMFNMLSTVLGVS

SEQ ID NO: 172260 - protein, 14 aa, Influenza A virus
GMFNMLSTVLGVSI

SEQ ID NO: 172261 - protein, 15 aa, Influenza A virus
GMFNMLSTVLGVSIL

SEQ ID NO: 172262 - protein, 16 aa, Influenza A virus
GMFNMLSTVLGVSILN

SEQ ID NO: 172263 - protein, 17 aa, Influenza A virus
GMFNMLSTVLGVSILNL

SEQ ID NO: 172264 - protein, 18 aa, Influenza A virus
GMFNMLSTVLGVSILNLG

SEQ ID NO: 172265 - protein, 19 aa, Influenza A virus
GMFNMLSTVLGVSILNLGQ

SEQ ID NO: 172266 - protein, 20 aa, Influenza A virus
GMFNMLSTVLGVSILNLGQK

SEQ ID NO: 172267 - protein, 13 aa, Influenza A virus
GMMMGMFNMLSTV

SEQ ID NO: 172268 - protein, 14 aa, Influenza A virus
GMMMGMFNMLSTVL

SEQ ID NO: 172269 - protein, 15 aa, Influenza A virus
GMMMGMFNMLSTVLG

SEQ ID NO: 172270 - protein, 16 aa, Influenza A virus
GMMMGMFNMLSTVLGV

SEQ ID NO: 172271 - protein, 17 aa, Influenza A virus
GMMMGMFNMLSTVLGVS

SEQ ID NO: 172272 - protein, 18 aa, Influenza A virus
GMMMGMFNMLSTVLGVSI

SEQ ID NO: 172273 - protein, 19 aa, Influenza A virus
GMMMGMFNMLSTVLGVSIL

SEQ ID NO: 172274 - protein, 20 aa, Influenza A virus
GMMMGMFNMLSTVLGVSILN

SEQ ID NO: 172275 - protein, 21 aa, Influenza A virus
GMMMGMFNMLSTVLGVSILNL

SEQ ID NO: 172276 - protein, 22 aa, Influenza A virus
GMMMGMFNMLSTVLGVSILNLG

SEQ ID NO: 172277 - protein, 23 aa, Influenza A virus
GMMMGMFNMLSTVLGVSILNLGQ

SEQ ID NO: 172278 - protein, 24 aa, Influenza A virus
GMMMGMFNMLSTVLGVSILNLGQK

SEQ ID NO: 172279 - protein, 13 aa, Influenza A virus
GMQIRGFVYFVET

SEQ ID NO: 172280 - protein, 14 aa, Influenza A virus
GMQIRGFVYFVETL

SEQ ID NO: 172281 - protein, 15 aa, Influenza A virus
GMQIRGFVYFVETLA

SEQ ID NO: 172282 - protein, 16 aa, Influenza A virus
GMQIRGFVYFVETLAR

SEQ ID NO: 172283 - protein, 17 aa, Influenza A virus
GMQIRGFVYFVETLARS

SEQ ID NO: 172284 - protein, 18 aa, Influenza A virus
GMQIRGFVYFVETLARSI

SEQ ID NO: 172285 - protein, 19 aa, Influenza A virus
GMQIRGFVYFVETLARSIC

SEQ ID NO: 172286 - protein, 20 aa, Influenza A virus
GMQIRGFVYFVETLARSICE

SEQ ID NO: 172287 - protein, 21 aa, Influenza A virus
GMQIRGFVYFVETLARSICEK

SEQ ID NO: 172288 - protein, 22 aa, Influenza A virus
GMQIRGFVYFVETLARSICEKL

SEQ ID NO: 172289 - protein, 23 aa, Influenza A virus
GMQIRGFVYFVETLARSICEKLE

SEQ ID NO: 172290 - protein, 24 aa, Influenza A virus
GMQIRGFVYFVETLARSICEKLEQ

SEQ ID NO: 172291 - protein, 25 aa, Influenza A virus
GMQIRGFVYFVETLARSICEKLEQS

SEQ ID NO: 172292 - protein, 15 aa, Influenza A virus
GNEKKAKLANVVRKM

SEQ ID NO: 172293 - protein, 16 aa, Influenza A virus
GNEKKAKLANVVRKMM

SEQ ID NO: 172294 - protein, 17 aa, Influenza A virus
GNEKKAKLANVVRKMMT

SEQ ID NO: 172295 - protein, 18 aa, Influenza A virus
GNEKKAKLANVVRKMMTN

SEQ ID NO: 172296 - protein, 19 aa, Influenza A virus
GNEKKAKLANVVRKMMTNS

SEQ ID NO: 172297 - protein, 20 aa, Influenza A virus
GNEKKAKLANVVRKMMTNSQ

SEQ ID NO: 172298 - protein, 21 aa, Influenza A virus
GNEKKAKLANVVRKMMTNSQD

SEQ ID NO: 172299 - protein, 22 aa, Influenza A virus
GNEKKAKLANVVRKMMTNSQDT

SEQ ID NO: 172300 - protein, 23 aa, Influenza A virus
GNEKKAKLANVVRKMMTNSQDTE

SEQ ID NO: 172301 - protein, 24 aa, Influenza A virus
GNEKKAKLANVVRKMMTNSQDTEL

SEQ ID NO: 172302 - protein, 25 aa, Influenza A virus
GNEKKAKLANVVRKMMTNSQDTELS

SEQ ID NO: 172303 - protein, 14 aa, Influenza A virus
GPATAQMALQLFIK

SEQ ID NO: 172304 - protein, 15 aa, Influenza A virus
GPATAQMALQLFIKD

SEQ ID NO: 172305 - protein, 16 aa, Influenza A virus
GPATAQMALQLFIKDY

SEQ ID NO: 172306 - protein, 17 aa, Influenza A virus
GPATAQMALQLFIKDYR

SEQ ID NO: 172307 - protein, 18 aa, Influenza A virus
GPATAQMALQLFIKDYRY

SEQ ID NO: 172308 - protein, 19 aa, Influenza A virus
GPATAQMALQLFIKDYRYT

SEQ ID NO: 172309 - protein, 20 aa, Influenza A virus
GPATAQMALQLFIKDYRYTY

SEQ ID NO: 172310 - protein, 21 aa, Influenza A virus
GPATAQMALQLFIKDYRYTYR

SEQ ID NO: 172311 - protein, 22 aa, Influenza A virus
GPATAQMALQLFIKDYRYTYRC

SEQ ID NO: 172312 - protein, 23 aa, Influenza A virus
GPATAQMALQLFIKDYRYTYRCH

SEQ ID NO: 172313 - protein, 24 aa, Influenza A virus
GPATAQMALQLFIKDYRYTYRCHR

SEQ ID NO: 172314 - protein, 25 aa, Influenza A virus
GPATAQMALQLFIKDYRYTYRCHRG

SEQ ID NO: 172315 - protein, 13 aa, Influenza A virus
GPNLYNIRNLHIP

SEQ ID NO: 172316 - protein, 14 aa, Influenza A virus
GPNLYNIRNLHIPE

SEQ ID NO: 172317 - protein, 15 aa, Influenza A virus
GPNLYNIRNLHIPEV

SEQ ID NO: 172318 - protein, 16 aa, Influenza A virus
GPNLYNIRNLHIPEVC

SEQ ID NO: 172319 - protein, 17 aa, Influenza A virus
GPNLYNIRNLHIPEVCL

SEQ ID NO: 172320 - protein, 18 aa, Influenza A virus
GPNLYNIRNLHIPEVCLK

SEQ ID NO: 172321 - protein, 19 aa, Influenza A virus
GPNLYNIRNLHIPEVCLKW

SEQ ID NO: 172322 - protein, 20 aa, Influenza A virus
GPNLYNIRNLHIPEVCLKWE

SEQ ID NO: 172323 - protein, 21 aa, Influenza A virus
GPNLYNIRNLHIPEVCLKWEL

SEQ ID NO: 172324 - protein, 22 aa, Influenza A virus
GPNLYNIRNLHIPEVCLKWELM

SEQ ID NO: 172325 - protein, 23 aa, Influenza A virus
GPNLYNIRNLHIPEVCLKWELMD

SEQ ID NO: 172326 - protein, 24 aa, Influenza A virus
GPNLYNIRNLHIPEVCLKWELMDE

SEQ ID NO: 172327 - protein, 25 aa, Influenza A virus
GPNLYNIRNLHIPEVCLKWELMDED

SEQ ID NO: 172328 - protein, 15 aa, Influenza A virus
GRLCNPLNPFVSHKE

SEQ ID NO: 172329 - protein, 17 aa, Influenza A virus
GRLCNPLNPFVSHKEIE

SEQ ID NO: 172330 - protein, 19 aa, Influenza A virus
GRLCNPLNPFVSHKEIESV

SEQ ID NO: 172331 - protein, 20 aa, Influenza A virus
GRLCNPLNPFVSHKEIESVN

SEQ ID NO: 172332 - protein, 21 aa, Influenza A virus
GRLCNPLNPFVSHKEIESVNN

SEQ ID NO: 172333 - protein, 22 aa, Influenza A virus
GRLCNPLNPFVSHKEIESVNNA

SEQ ID NO: 172334 - protein, 23 aa, Influenza A virus
GRLCNPLNPFVSHKEIESVNNAV

SEQ ID NO: 172335 - protein, 13 aa, Influenza A virus
GRLIDFLKDVMES

SEQ ID NO: 172336 - protein, 14 aa, Influenza A virus
GRLIDFLKDVMESM

SEQ ID NO: 172337 - protein, 15 aa, Influenza A virus
GRQTYDWTLNRNQPA

SEQ ID NO: 172338 - protein, 16 aa, Influenza A virus
GRQTYDWTLNRNQPAA

SEQ ID NO: 172339 - protein, 17 aa, Influenza A virus
GRQTYDWTLNRNQPAAT

SEQ ID NO: 172340 - protein, 18 aa, Influenza A virus
GRQTYDWTLNRNQPAATA

SEQ ID NO: 172341 - protein, 19 aa, Influenza A virus
GRQTYDWTLNRNQPAATAL

SEQ ID NO: 172342 - protein, 20 aa, Influenza A virus
GRQTYDWTLNRNQPAATALA

SEQ ID NO: 172343 - protein, 21 aa, Influenza A virus
GRQTYDWTLNRNQPAATALAN

SEQ ID NO: 172344 - protein, 22 aa, Influenza A virus
GRQTYDWTLNRNQPAATALANT

SEQ ID NO: 172345 - protein, 23 aa, Influenza A virus
GRQTYDWTLNRNQPAATALANTI

SEQ ID NO: 172346 - protein, 24 aa, Influenza A virus
GRQTYDWTLNRNQPAATALANTIE

SEQ ID NO: 172347 - protein, 25 aa, Influenza A virus
GRQTYDWTLNRNQPAATALANTIEV

SEQ ID NO: 172348 - protein, 14 aa, Influenza A virus
GTASLSPGMMMGMF

SEQ ID NO: 172349 - protein, 15 aa, Influenza A virus
GTASLSPGMMMGMFN

SEQ ID NO: 172350 - protein, 16 aa, Influenza A virus
GTASLSPGMMMGMFNM

SEQ ID NO: 172351 - protein, 17 aa, Influenza A virus
GTASLSPGMMMGMFNML

SEQ ID NO: 172352 - protein, 18 aa, Influenza A virus
GTASLSPGMMMGMFNMLS

SEQ ID NO: 172353 - protein, 19 aa, Influenza A virus
GTASLSPGMMMGMFNMLST

SEQ ID NO: 172354 - protein, 20 aa, Influenza A virus
GTASLSPGMMMGMFNMLSTV

SEQ ID NO: 172355 - protein, 21 aa, Influenza A virus
GTASLSPGMMMGMFNMLSTVL

SEQ ID NO: 172356 - protein, 22 aa, Influenza A virus
GTASLSPGMMMGMFNMLSTVLG

SEQ ID NO: 172357 - protein, 23 aa, Influenza A virus
GTASLSPGMMMGMFNMLSTVLGV

SEQ ID NO: 172358 - protein, 24 aa, Influenza A virus
GTASLSPGMMMGMFNMLSTVLGVS

SEQ ID NO: 172359 - protein, 25 aa, Influenza A virus
GTASLSPGMMMGMFNMLSTVLGVSI

SEQ ID NO: 172360 - protein, 13 aa, Influenza A virus
GTFEFTSFFYRYG

SEQ ID NO: 172361 - protein, 14 aa, Influenza A virus
GTFEFTSFFYRYGF

SEQ ID NO: 172362 - protein, 15 aa, Influenza A virus
GTFEFTSFFYRYGFV

SEQ ID NO: 172363 - protein, 16 aa, Influenza A virus
GTFEFTSFFYRYGFVA

SEQ ID NO: 172364 - protein, 17 aa, Influenza A virus
GTFEFTSFFYRYGFVAN

SEQ ID NO: 172365 - protein, 18 aa, Influenza A virus
GTFEFTSFFYRYGFVANF

SEQ ID NO: 172366 - protein, 19 aa, Influenza A virus
GTFEFTSFFYRYGFVANFS

SEQ ID NO: 172367 - protein, 20 aa, Influenza A virus
GTFEFTSFFYRYGFVANFSM

SEQ ID NO: 172368 - protein, 21 aa, Influenza A virus
GTFEFTSFFYRYGFVANFSME

SEQ ID NO: 172369 - protein, 22 aa, Influenza A virus
GTFEFTSFFYRYGFVANFSMEL

SEQ ID NO: 172370 - protein, 23 aa, Influenza A virus
GTFEFTSFFYRYGFVANFSMELP

SEQ ID NO: 172371 - protein, 24 aa, Influenza A virus
GTFEFTSFFYRYGFVANFSMELPS

SEQ ID NO: 172372 - protein, 25 aa, Influenza A virus
GTFEFTSFFYRYGFVANFSMELPSF

SEQ ID NO: 172373 - protein, 14 aa, Influenza A virus
GTGTGYTMDTVNRT

SEQ ID NO: 172374 - protein, 15 aa, Influenza A virus
GTGTGYTMDTVNRTH

SEQ ID NO: 172375 - protein, 16 aa, Influenza A virus
GTGTGYTMDTVNRTHQ

SEQ ID NO: 172376 - protein, 17 aa, Influenza A virus
GTGTGYTMDTVNRTHQY

SEQ ID NO: 172377 - protein, 18 aa, Influenza A virus
GTGTGYTMDTVNRTHQYS

SEQ ID NO: 172378 - protein, 19 aa, Influenza A virus
GTGTGYTMDTVNRTHQYSE

SEQ ID NO: 172379 - protein, 13 aa, Influenza A virus
GTGYTMDTVNRTH

SEQ ID NO: 172380 - protein, 14 aa, Influenza A virus
GTGYTMDTVNRTHQ

SEQ ID NO: 172381 - protein, 15 aa, Influenza A virus
GTGYTMDTVNRTHQY

SEQ ID NO: 172382 - protein, 16 aa, Influenza A virus
GTGYTMDTVNRTHQYS

SEQ ID NO: 172383 - protein, 17 aa, Influenza A virus
GTGYTMDTVNRTHQYSE

SEQ ID NO: 172384 - protein, 14 aa, Influenza A virus
GVSGINESADMSIG

SEQ ID NO: 172385 - protein, 15 aa, Influenza A virus
GVSGINESADMSIGV

SEQ ID NO: 172386 - protein, 16 aa, Influenza A virus
GVSGINESADMSIGVT

SEQ ID NO: 172387 - protein, 17 aa, Influenza A virus
GVSGINESADMSIGVTV

SEQ ID NO: 172388 - protein, 18 aa, Influenza A virus
GVSGINESADMSIGVTVI

SEQ ID NO: 172389 - protein, 19 aa, Influenza A virus
GVSGINESADMSIGVTVIK

SEQ ID NO: 172390 - protein, 20 aa, Influenza A virus
GVSGINESADMSIGVTVIKN

SEQ ID NO: 172391 - protein, 21 aa, Influenza A virus
GVSGINESADMSIGVTVIKNN

SEQ ID NO: 172392 - protein, 22 aa, Influenza A virus
GVSGINESADMSIGVTVIKNNM

SEQ ID NO: 172393 - protein, 23 aa, Influenza A virus
GVSGINESADMSIGVTVIKNNMI

SEQ ID NO: 172394 - protein, 24 aa, Influenza A virus
GVSGINESADMSIGVTVIKNNMIN

SEQ ID NO: 172395 - protein, 25 aa, Influenza A virus
GVSGINESADMSIGVTVIKNNMINN

SEQ ID NO: 172396 - protein, 13 aa, Influenza A virus
GVTVIKNNMINND

SEQ ID NO: 172397 - protein, 14 aa, Influenza A virus
GVTVIKNNMINNDL

SEQ ID NO: 172398 - protein, 15 aa, Influenza A virus
GVTVIKNNMINNDLG

SEQ ID NO: 172399 - protein, 16 aa, Influenza A virus
GVTVIKNNMINNDLGP

SEQ ID NO: 172400 - protein, 17 aa, Influenza A virus
GVTVIKNNMINNDLGPA

SEQ ID NO: 172401 - protein, 18 aa, Influenza A virus
GVTVIKNNMINNDLGPAT

SEQ ID NO: 172402 - protein, 19 aa, Influenza A virus
GVTVIKNNMINNDLGPATA

SEQ ID NO: 172403 - protein, 20 aa, Influenza A virus
GVTVIKNNMINNDLGPATAQ

SEQ ID NO: 172404 - protein, 21 aa, Influenza A virus
GVTVIKNNMINNDLGPATAQM

SEQ ID NO: 172405 - protein, 22 aa, Influenza A virus
GVTVIKNNMINNDLGPATAQMA

SEQ ID NO: 172406 - protein, 23 aa, Influenza A virus
GVTVIKNNMINNDLGPATAQMAL

SEQ ID NO: 172407 - protein, 24 aa, Influenza A virus
GVTVIKNNMINNDLGPATAQMALQ

SEQ ID NO: 172408 - protein, 25 aa, Influenza A virus
GVTVIKNNMINNDLGPATAQMALQL

SEQ ID NO: 172409 - protein, 15 aa, Influenza A virus
GYAQTDCVLEAMAFL

SEQ ID NO: 172410 - protein, 16 aa, Influenza A virus
GYAQTDCVLEAMAFLE

SEQ ID NO: 172411 - protein, 17 aa, Influenza A virus
GYAQTDCVLEAMAFLEE

SEQ ID NO: 172412 - protein, 18 aa, Influenza A virus
GYAQTDCVLEAMAFLEES

SEQ ID NO: 172413 - protein, 19 aa, Influenza A virus
GYAQTDCVLEAMAFLEESH

SEQ ID NO: 172414 - protein, 20 aa, Influenza A virus
GYAQTDCVLEAMAFLEESHP

SEQ ID NO: 172415 - protein, 21 aa, Influenza A virus
GYAQTDCVLEAMAFLEESHPG

SEQ ID NO: 172416 - protein, 22 aa, Influenza A virus
GYAQTDCVLEAMAFLEESHPGI

SEQ ID NO: 172417 - protein, 23 aa, Influenza A virus
GYAQTDCVLEAMAFLEESHPGIF

SEQ ID NO: 172418 - protein, 24 aa, Influenza A virus
GYAQTDCVLEAMAFLEESHPGIFE

SEQ ID NO: 172419 - protein, 25 aa, Influenza A virus
GYAQTDCVLEAMAFLEESHPGIFEN

SEQ ID NO: 172420 - protein, 13 aa, Influenza A virus
GYTMDTVNRTHQY

SEQ ID NO: 172421 - protein, 14 aa, Influenza A virus
GYTMDTVNRTHQYS

SEQ ID NO: 172422 - protein, 15 aa, Influenza A virus
GYTMDTVNRTHQYSE

SEQ ID NO: 172423 - protein, 14 aa, Influenza A virus
HEGIQAGVDRFYRT

SEQ ID NO: 172424 - protein, 15 aa, Influenza A virus
HEGIQAGVDRFYRTC

SEQ ID NO: 172425 - protein, 16 aa, Influenza A virus
HEGIQAGVDRFYRTCK

SEQ ID NO: 172426 - protein, 17 aa, Influenza A virus
HEGIQAGVDRFYRTCKL

SEQ ID NO: 172427 - protein, 14 aa, Influenza A virus
HGTGTGYTMDTVNR

SEQ ID NO: 172428 - protein, 15 aa, Influenza A virus
HGTGTGYTMDTVNRT

SEQ ID NO: 172429 - protein, 16 aa, Influenza A virus
HGTGTGYTMDTVNRTH

SEQ ID NO: 172430 - protein, 17 aa, Influenza A virus
HGTGTGYTMDTVNRTHQ

SEQ ID NO: 172431 - protein, 18 aa, Influenza A virus
HGTGTGYTMDTVNRTHQY

SEQ ID NO: 172432 - protein, 19 aa, Influenza A virus
HGTGTGYTMDTVNRTHQYS

SEQ ID NO: 172433 - protein, 20 aa, Influenza A virus
HGTGTGYTMDTVNRTHQYSE

SEQ ID NO: 172434 - protein, 15 aa, Influenza A virus
HIPEVCLKWELMDED

SEQ ID NO: 172435 - protein, 16 aa, Influenza A virus
HIPEVCLKWELMDEDY

SEQ ID NO: 172436 - protein, 17 aa, Influenza A virus
HIPEVCLKWELMDEDYQ

SEQ ID NO: 172437 - protein, 18 aa, Influenza A virus
HIPEVCLKWELMDEDYQG

SEQ ID NO: 172438 - protein, 19 aa, Influenza A virus
HIPEVCLKWELMDEDYQGR

SEQ ID NO: 172439 - protein, 20 aa, Influenza A virus
HIPEVCLKWELMDEDYQGRL

SEQ ID NO: 172440 - protein, 21 aa, Influenza A virus
HIPEVCLKWELMDEDYQGRLC

SEQ ID NO: 172441 - protein, 22 aa, Influenza A virus
HIPEVCLKWELMDEDYQGRLCN

SEQ ID NO: 172442 - protein, 23 aa, Influenza A virus
HIPEVCLKWELMDEDYQGRLCNP

SEQ ID NO: 172443 - protein, 24 aa, Influenza A virus
HIPEVCLKWELMDEDYQGRLCNPL

SEQ ID NO: 172444 - protein, 25 aa, Influenza A virus
HIPEVCLKWELMDEDYQGRLCNPLN

SEQ ID NO: 172445 - protein, 13 aa, Influenza A virus
IAPIMFSNKMARL

SEQ ID NO: 172446 - protein, 14 aa, Influenza A virus
IAPIMFSNKMARLG

SEQ ID NO: 172447 - protein, 15 aa, Influenza A virus
IAPIMFSNKMARLGK

SEQ ID NO: 172448 - protein, 16 aa, Influenza A virus
IAPIMFSNKMARLGKG

SEQ ID NO: 172449 - protein, 17 aa, Influenza A virus
IAPIMFSNKMARLGKGY

SEQ ID NO: 172450 - protein, 18 aa, Influenza A virus
IAPIMFSNKMARLGKGYM

SEQ ID NO: 172451 - protein, 19 aa, Influenza A virus
IAPIMFSNKMARLGKGYMF

SEQ ID NO: 172452 - protein, 20 aa, Influenza A virus
IAPIMFSNKMARLGKGYMFE

SEQ ID NO: 172453 - protein, 21 aa, Influenza A virus
IAPIMFSNKMARLGKGYMFES

SEQ ID NO: 172454 - protein, 22 aa, Influenza A virus
IAPIMFSNKMARLGKGYMFESK

SEQ ID NO: 172455 - protein, 15 aa, Influenza A virus
IATPGMQIRGFVYFV

SEQ ID NO: 172456 - protein, 16 aa, Influenza A virus
IATPGMQIRGFVYFVE

SEQ ID NO: 172457 - protein, 17 aa, Influenza A virus
IATPGMQIRGFVYFVET

SEQ ID NO: 172458 - protein, 18 aa, Influenza A virus
IATPGMQIRGFVYFVETL

SEQ ID NO: 172459 - protein, 19 aa, Influenza A virus
IATPGMQIRGFVYFVETLA

SEQ ID NO: 172460 - protein, 20 aa, Influenza A virus
IATPGMQIRGFVYFVETLAR

SEQ ID NO: 172461 - protein, 21 aa, Influenza A virus
IATPGMQIRGFVYFVETLARS

SEQ ID NO: 172462 - protein, 22 aa, Influenza A virus
IATPGMQIRGFVYFVETLARSI

SEQ ID NO: 172463 - protein, 23 aa, Influenza A virus
IATPGMQIRGFVYFVETLARSIC

SEQ ID NO: 172464 - protein, 24 aa, Influenza A virus
IATPGMQIRGFVYFVETLARSICE

SEQ ID NO: 172465 - protein, 25 aa, Influenza A virus
IATPGMQIRGFVYFVETLARSICEK

SEQ ID NO: 172466 - protein, 14 aa, Influenza A virus
ICEKLEQSGLPVGG

SEQ ID NO: 172467 - protein, 15 aa, Influenza A virus
ICEKLEQSGLPVGGN

SEQ ID NO: 172468 - protein, 16 aa, Influenza A virus
ICEKLEQSGLPVGGNE

SEQ ID NO: 172469 - protein, 17 aa, Influenza A virus
ICEKLEQSGLPVGGNEK

SEQ ID NO: 172470 - protein, 18 aa, Influenza A virus
ICEKLEQSGLPVGGNEKK

SEQ ID NO: 172471 - protein, 19 aa, Influenza A virus
ICEKLEQSGLPVGGNEKKA

SEQ ID NO: 172472 - protein, 20 aa, Influenza A virus
ICEKLEQSGLPVGGNEKKAK

SEQ ID NO: 172473 - protein, 21 aa, Influenza A virus
ICEKLEQSGLPVGGNEKKAKL

SEQ ID NO: 172474 - protein, 22 aa, Influenza A virus
ICEKLEQSGLPVGGNEKKAKLA

SEQ ID NO: 172475 - protein, 23 aa, Influenza A virus
ICEKLEQSGLPVGGNEKKAKLAN

SEQ ID NO: 172476 - protein, 24 aa, Influenza A virus
ICEKLEQSGLPVGGNEKKAKLANV

SEQ ID NO: 172477 - protein, 25 aa, Influenza A virus
ICEKLEQSGLPVGGNEKKAKLANVV

SEQ ID NO: 172478 - protein, 13 aa, Influenza A virus
IGVTVIKNNMINN

SEQ ID NO: 172479 - protein, 14 aa, Influenza A virus
IGVTVIKNNMINND

SEQ ID NO: 172480 - protein, 15 aa, Influenza A virus
IGVTVIKNNMINNDL

SEQ ID NO: 172481 - protein, 16 aa, Influenza A virus
IGVTVIKNNMINNDLG

SEQ ID NO: 172482 - protein, 17 aa, Influenza A virus
IGVTVIKNNMINNDLGP

SEQ ID NO: 172483 - protein, 18 aa, Influenza A virus
IGVTVIKNNMINNDLGPA

SEQ ID NO: 172484 - protein, 19 aa, Influenza A virus
IGVTVIKNNMINNDLGPAT

SEQ ID NO: 172485 - protein, 20 aa, Influenza A virus
IGVTVIKNNMINNDLGPATA

SEQ ID NO: 172486 - protein, 21 aa, Influenza A virus
IGVTVIKNNMINNDLGPATAQ

SEQ ID NO: 172487 - protein, 22 aa, Influenza A virus
IGVTVIKNNMINNDLGPATAQM

SEQ ID NO: 172488 - protein, 23 aa, Influenza A virus
IGVTVIKNNMINNDLGPATAQMA

SEQ ID NO: 172489 - protein, 24 aa, Influenza A virus
IGVTVIKNNMINNDLGPATAQMAL

SEQ ID NO: 172490 - protein, 25 aa, Influenza A virus
IGVTVIKNNMINNDLGPATAQMALQ

SEQ ID NO: 172491 - protein, 15 aa, Influenza A virus
IKDYRYTYRCHRGDT

SEQ ID NO: 172492 - protein, 16 aa, Influenza A virus
IKDYRYTYRCHRGDTQ

SEQ ID NO: 172493 - protein, 17 aa, Influenza A virus
IKDYRYTYRCHRGDTQI

SEQ ID NO: 172494 - protein, 20 aa, Influenza A virus
IKDYRYTYRCHRGDTQIQTR

SEQ ID NO: 172495 - protein, 21 aa, Influenza A virus
IKDYRYTYRCHRGDTQIQTRR

SEQ ID NO: 172496 - protein, 22 aa, Influenza A virus
IKDYRYTYRCHRGDTQIQTRRS

SEQ ID NO: 172497 - protein, 23 aa, Influenza A virus
IKDYRYTYRCHRGDTQIQTRRSF

SEQ ID NO: 172498 - protein, 24 aa, Influenza A virus
IKDYRYTYRCHRGDTQIQTRRSFE

SEQ ID NO: 172499 - protein, 15 aa, Influenza A virus
IKNNMINNDLGPATA

SEQ ID NO: 172500 - protein, 16 aa, Influenza A virus
IKNNMINNDLGPATAQ

SEQ ID NO: 172501 - protein, 17 aa, Influenza A virus
IKNNMINNDLGPATAQM

SEQ ID NO: 172502 - protein, 18 aa, Influenza A virus
IKNNMINNDLGPATAQMA

SEQ ID NO: 172503 - protein, 19 aa, Influenza A virus
IKNNMINNDLGPATAQMAL

SEQ ID NO: 172504 - protein, 20 aa, Influenza A virus
IKNNMINNDLGPATAQMALQ

SEQ ID NO: 172505 - protein, 21 aa, Influenza A virus
IKNNMINNDLGPATAQMALQL

SEQ ID NO: 172506 - protein, 22 aa, Influenza A virus
IKNNMINNDLGPATAQMALQLF

SEQ ID NO: 172507 - protein, 23 aa, Influenza A virus
IKNNMINNDLGPATAQMALQLFI

SEQ ID NO: 172508 - protein, 24 aa, Influenza A virus
IKNNMINNDLGPATAQMALQLFIK

SEQ ID NO: 172509 - protein, 25 aa, Influenza A virus
IKNNMINNDLGPATAQMALQLFIKD

SEQ ID NO: 172510 - protein, 13 aa, Influenza A virus
IMFSNKMARLGKG

SEQ ID NO: 172511 - protein, 14 aa, Influenza A virus
IMFSNKMARLGKGY

SEQ ID NO: 172512 - protein, 15 aa, Influenza A virus
IMFSNKMARLGKGYM

SEQ ID NO: 172513 - protein, 16 aa, Influenza A virus
IMFSNKMARLGKGYMF

SEQ ID NO: 172514 - protein, 17 aa, Influenza A virus
IMFSNKMARLGKGYMFE

SEQ ID NO: 172515 - protein, 18 aa, Influenza A virus
IMFSNKMARLGKGYMFES

SEQ ID NO: 172516 - protein, 19 aa, Influenza A virus
IMFSNKMARLGKGYMFESK

SEQ ID NO: 172517 - protein, 14 aa, Influenza A virus
INESADMSIGVTVI

SEQ ID NO: 172518 - protein, 15 aa, Influenza A virus
INESADMSIGVTVIK

SEQ ID NO: 172519 - protein, 16 aa, Influenza A virus
INESADMSIGVTVIKN

SEQ ID NO: 172520 - protein, 17 aa, Influenza A virus
INESADMSIGVTVIKNN

SEQ ID NO: 172521 - protein, 18 aa, Influenza A virus
INESADMSIGVTVIKNNM

SEQ ID NO: 172522 - protein, 19 aa, Influenza A virus
INESADMSIGVTVIKNNMI

SEQ ID NO: 172523 - protein, 20 aa, Influenza A virus
INESADMSIGVTVIKNNMIN

SEQ ID NO: 172524 - protein, 21 aa, Influenza A virus
INESADMSIGVTVIKNNMINN

SEQ ID NO: 172525 - protein, 22 aa, Influenza A virus
INESADMSIGVTVIKNNMINND

SEQ ID NO: 172526 - protein, 23 aa, Influenza A virus
INESADMSIGVTVIKNNMINNDL

SEQ ID NO: 172527 - protein, 24 aa, Influenza A virus
INESADMSIGVTVIKNNMINNDLG

SEQ ID NO: 172528 - protein, 25 aa, Influenza A virus
INESADMSIGVTVIKNNMINNDLGP

SEQ ID NO: 172529 - protein, 14 aa, Influenza A virus
INMSKKKSYINRTG

SEQ ID NO: 172530 - protein, 15 aa, Influenza A virus
INMSKKKSYINRTGT

SEQ ID NO: 172531 - protein, 16 aa, Influenza A virus
INMSKKKSYINRTGTF

SEQ ID NO: 172532 - protein, 17 aa, Influenza A virus
INMSKKKSYINRTGTFE

SEQ ID NO: 172533 - protein, 19 aa, Influenza A virus
INMSKKKSYINRTGTFEFT

SEQ ID NO: 172534 - protein, 20 aa, Influenza A virus
INMSKKKSYINRTGTFEFTS

SEQ ID NO: 172535 - protein, 21 aa, Influenza A virus
INMSKKKSYINRTGTFEFTSF

SEQ ID NO: 172536 - protein, 22 aa, Influenza A virus
INMSKKKSYINRTGTFEFTSFF

SEQ ID NO: 172537 - protein, 23 aa, Influenza A virus
INMSKKKSYINRTGTFEFTSFFY

SEQ ID NO: 172538 - protein, 24 aa, Influenza A virus
INMSKKKSYINRTGTFEFTSFFYR

SEQ ID NO: 172539 - protein, 25 aa, Influenza A virus
INMSKKKSYINRTGTFEFTSFFYRY

SEQ ID NO: 172540 - protein, 13 aa, Influenza A virus
INNDLGPATAQMA

SEQ ID NO: 172541 - protein, 14 aa, Influenza A virus
INNDLGPATAQMAL

SEQ ID NO: 172542 - protein, 15 aa, Influenza A virus
INNDLGPATAQMALQ

SEQ ID NO: 172543 - protein, 16 aa, Influenza A virus
INNDLGPATAQMALQL

SEQ ID NO: 172544 - protein, 17 aa, Influenza A virus
INNDLGPATAQMALQLF

SEQ ID NO: 172545 - protein, 18 aa, Influenza A virus
INNDLGPATAQMALQLFI

SEQ ID NO: 172546 - protein, 19 aa, Influenza A virus
INNDLGPATAQMALQLFIK

SEQ ID NO: 172547 - protein, 20 aa, Influenza A virus
INNDLGPATAQMALQLFIKD

SEQ ID NO: 172548 - protein, 21 aa, Influenza A virus
INNDLGPATAQMALQLFIKDY

SEQ ID NO: 172549 - protein, 22 aa, Influenza A virus
INNDLGPATAQMALQLFIKDYR

SEQ ID NO: 172550 - protein, 23 aa, Influenza A virus
INNDLGPATAQMALQLFIKDYRY

SEQ ID NO: 172551 - protein, 24 aa, Influenza A virus
INNDLGPATAQMALQLFIKDYRYT

SEQ ID NO: 172552 - protein, 25 aa, Influenza A virus
INNDLGPATAQMALQLFIKDYRYTY

SEQ ID NO: 172553 - protein, 14 aa, Influenza A virus
INRTGTFEFTSFFY

SEQ ID NO: 172554 - protein, 15 aa, Influenza A virus
INRTGTFEFTSFFYR

SEQ ID NO: 172555 - protein, 16 aa, Influenza A virus
INRTGTFEFTSFFYRY

SEQ ID NO: 172556 - protein, 17 aa, Influenza A virus
INRTGTFEFTSFFYRYG

SEQ ID NO: 172557 - protein, 18 aa, Influenza A virus
INRTGTFEFTSFFYRYGF

SEQ ID NO: 172558 - protein, 19 aa, Influenza A virus
INRTGTFEFTSFFYRYGFV

SEQ ID NO: 172559 - protein, 20 aa, Influenza A virus
INRTGTFEFTSFFYRYGFVA

SEQ ID NO: 172560 - protein, 21 aa, Influenza A virus
INRTGTFEFTSFFYRYGFVAN

SEQ ID NO: 172561 - protein, 22 aa, Influenza A virus
INRTGTFEFTSFFYRYGFVANF

SEQ ID NO: 172562 - protein, 23 aa, Influenza A virus
INRTGTFEFTSFFYRYGFVANFS

SEQ ID NO: 172563 - protein, 24 aa, Influenza A virus
INRTGTFEFTSFFYRYGFVANFSM

SEQ ID NO: 172564 - protein, 25 aa, Influenza A virus
INRTGTFEFTSFFYRYGFVANFSME

SEQ ID NO: 172565 - protein, 14 aa, Influenza A virus
IPEVCLKWELMDED

SEQ ID NO: 172566 - protein, 15 aa, Influenza A virus
IPEVCLKWELMDEDY

SEQ ID NO: 172567 - protein, 16 aa, Influenza A virus
IPEVCLKWELMDEDYQ

SEQ ID NO: 172568 - protein, 17 aa, Influenza A virus
IPEVCLKWELMDEDYQG

SEQ ID NO: 172569 - protein, 19 aa, Influenza A virus
IPEVCLKWELMDEDYQGRL

SEQ ID NO: 172570 - protein, 20 aa, Influenza A virus
IPEVCLKWELMDEDYQGRLC

SEQ ID NO: 172571 - protein, 21 aa, Influenza A virus
IPEVCLKWELMDEDYQGRLCN

SEQ ID NO: 172572 - protein, 22 aa, Influenza A virus
IPEVCLKWELMDEDYQGRLCNP

SEQ ID NO: 172573 - protein, 23 aa, Influenza A virus
IPEVCLKWELMDEDYQGRLCNPL

SEQ ID NO: 172574 - protein, 24 aa, Influenza A virus
IPEVCLKWELMDEDYQGRLCNPLN

SEQ ID NO: 172575 - protein, 25 aa, Influenza A virus
IPEVCLKWELMDEDYQGRLCNPLNP

SEQ ID NO: 172576 - protein, 13 aa, Influenza A virus
IRALTLNTMTKDA

SEQ ID NO: 172577 - protein, 14 aa, Influenza A virus
IRALTLNTMTKDAE

SEQ ID NO: 172578 - protein, 15 aa, Influenza A virus
IRALTLNTMTKDAER

SEQ ID NO: 172579 - protein, 16 aa, Influenza A virus
IRALTLNTMTKDAERG

SEQ ID NO: 172580 - protein, 17 aa, Influenza A virus
IRALTLNTMTKDAERGK

SEQ ID NO: 172581 - protein, 18 aa, Influenza A virus
IRALTLNTMTKDAERGKL

SEQ ID NO: 172582 - protein, 19 aa, Influenza A virus
IRALTLNTMTKDAERGKLK

SEQ ID NO: 172583 - protein, 20 aa, Influenza A virus
IRALTLNTMTKDAERGKLKR

SEQ ID NO: 172584 - protein, 21 aa, Influenza A virus
IRALTLNTMTKDAERGKLKRR

SEQ ID NO: 172585 - protein, 22 aa, Influenza A virus
IRALTLNTMTKDAERGKLKRRA

SEQ ID NO: 172586 - protein, 23 aa, Influenza A virus
IRALTLNTMTKDAERGKLKRRAI

SEQ ID NO: 172587 - protein, 24 aa, Influenza A virus
IRALTLNTMTKDAERGKLKRRAIA

SEQ ID NO: 172588 - protein, 25 aa, Influenza A virus
IRALTLNTMTKDAERGKLKRRAIAT

SEQ ID NO: 172589 - protein, 13 aa, Influenza A virus
IRGFVYFVETLAR

SEQ ID NO: 172590 - protein, 14 aa, Influenza A virus
IRGFVYFVETLARS

SEQ ID NO: 172591 - protein, 15 aa, Influenza A virus
IRGFVYFVETLARSI

SEQ ID NO: 172592 - protein, 16 aa, Influenza A virus
IRGFVYFVETLARSIC

SEQ ID NO: 172593 - protein, 17 aa, Influenza A virus
IRGFVYFVETLARSICE

SEQ ID NO: 172594 - protein, 18 aa, Influenza A virus
IRGFVYFVETLARSICEK

SEQ ID NO: 172595 - protein, 19 aa, Influenza A virus
IRGFVYFVETLARSICEKL

SEQ ID NO: 172596 - protein, 20 aa, Influenza A virus
IRGFVYFVETLARSICEKLE

SEQ ID NO: 172597 - protein, 21 aa, Influenza A virus
IRGFVYFVETLARSICEKLEQ

SEQ ID NO: 172598 - protein, 22 aa, Influenza A virus
IRGFVYFVETLARSICEKLEQS

SEQ ID NO: 172599 - protein, 23 aa, Influenza A virus
IRGFVYFVETLARSICEKLEQSG

SEQ ID NO: 172600 - protein, 24 aa, Influenza A virus
IRGFVYFVETLARSICEKLEQSGL

SEQ ID NO: 172601 - protein, 25 aa, Influenza A virus
IRGFVYFVETLARSICEKLEQSGLP

SEQ ID NO: 172602 - protein, 13 aa, Influenza A virus
IRNLHIPEVCLKW

SEQ ID NO: 172603 - protein, 14 aa, Influenza A virus
IRNLHIPEVCLKWE

SEQ ID NO: 172604 - protein, 15 aa, Influenza A virus
IRNLHIPEVCLKWEL

SEQ ID NO: 172605 - protein, 16 aa, Influenza A virus
IRNLHIPEVCLKWELM

SEQ ID NO: 172606 - protein, 17 aa, Influenza A virus
IRNLHIPEVCLKWELMD

SEQ ID NO: 172607 - protein, 18 aa, Influenza A virus
IRNLHIPEVCLKWELMDE

SEQ ID NO: 172608 - protein, 19 aa, Influenza A virus
IRNLHIPEVCLKWELMDED

SEQ ID NO: 172609 - protein, 20 aa, Influenza A virus
IRNLHIPEVCLKWELMDEDY

SEQ ID NO: 172610 - protein, 21 aa, Influenza A virus
IRNLHIPEVCLKWELMDEDYQ

SEQ ID NO: 172611 - protein, 22 aa, Influenza A virus
IRNLHIPEVCLKWELMDEDYQG

SEQ ID NO: 172612 - protein, 23 aa, Influenza A virus
IRNLHIPEVCLKWELMDEDYQGR

SEQ ID NO: 172613 - protein, 24 aa, Influenza A virus
IRNLHIPEVCLKWELMDEDYQGRL

SEQ ID NO: 172614 - protein, 25 aa, Influenza A virus
IRNLHIPEVCLKWELMDEDYQGRLC

SEQ ID NO: 172615 - protein, 13 aa, Influenza A virus
ISSMVEAMVSRAR

SEQ ID NO: 172616 - protein, 14 aa, Influenza A virus
ISSMVEAMVSRARI

SEQ ID NO: 172617 - protein, 15 aa, Influenza A virus
ISSMVEAMVSRARID

SEQ ID NO: 172618 - protein, 16 aa, Influenza A virus
ISSMVEAMVSRARIDA

SEQ ID NO: 172619 - protein, 17 aa, Influenza A virus
ISSMVEAMVSRARIDAR

SEQ ID NO: 172620 - protein, 18 aa, Influenza A virus
ISSMVEAMVSRARIDARI

SEQ ID NO: 172621 - protein, 19 aa, Influenza A virus
ISSMVEAMVSRARIDARID

SEQ ID NO: 172622 - protein, 20 aa, Influenza A virus
ISSMVEAMVSRARIDARIDF

SEQ ID NO: 172623 - protein, 21 aa, Influenza A virus
ISSMVEAMVSRARIDARIDFE

SEQ ID NO: 172624 - protein, 22 aa, Influenza A virus
ISSMVEAMVSRARIDARIDFES

SEQ ID NO: 172625 - protein, 23 aa, Influenza A virus
ISSMVEAMVSRARIDARIDFESG

SEQ ID NO: 172626 - protein, 24 aa, Influenza A virus
ISSMVEAMVSRARIDARIDFESGR

SEQ ID NO: 172627 - protein, 25 aa, Influenza A virus
ISSMVEAMVSRARIDARIDFESGRI

SEQ ID NO: 172628 - protein, 15 aa, Influenza A virus
ISTTFPYTGDPPYSH

SEQ ID NO: 172629 - protein, 16 aa, Influenza A virus
ISTTFPYTGDPPYSHG

SEQ ID NO: 172630 - protein, 17 aa, Influenza A virus
ISTTFPYTGDPPYSHGT

SEQ ID NO: 172631 - protein, 20 aa, Influenza A virus
ISTTFPYTGDPPYSHGTGTG

SEQ ID NO: 172632 - protein, 23 aa, Influenza A virus
ISTTFPYTGDPPYSHGTGTGYTM

SEQ ID NO: 172633 - protein, 24 aa, Influenza A virus
ISTTFPYTGDPPYSHGTGTGYTMD

SEQ ID NO: 172634 - protein, 25 aa, Influenza A virus
ISTTFPYTGDPPYSHGTGTGYTMDT

SEQ ID NO: 172635 - protein, 19 aa, Influenza A virus
ITGDNTKWNENQNPRMFLA

SEQ ID NO: 172636 - protein, 20 aa, Influenza A virus
ITGDNTKWNENQNPRMFLAM

SEQ ID NO: 172637 - protein, 21 aa, Influenza A virus
ITGDNTKWNENQNPRMFLAMI

SEQ ID NO: 172638 - protein, 22 aa, Influenza A virus
ITGDNTKWNENQNPRMFLAMIT

SEQ ID NO: 172639 - protein, 23 aa, Influenza A virus
ITGDNTKWNENQNPRMFLAMITY

SEQ ID NO: 172640 - protein, 24 aa, Influenza A virus
ITGDNTKWNENQNPRMFLAMITYI

SEQ ID NO: 172641 - protein, 25 aa, Influenza A virus
ITGDNTKWNENQNPRMFLAMITYIT

SEQ ID NO: 172642 - protein, 13 aa, Influenza A virus
ITTHFQRKRRVRD

SEQ ID NO: 172643 - protein, 14 aa, Influenza A virus
ITTHFQRKRRVRDN

SEQ ID NO: 172644 - protein, 14 aa, Influenza A virus
KAGLLVSDGGPNLY

SEQ ID NO: 172645 - protein, 15 aa, Influenza A virus
KAGLLVSDGGPNLYN

SEQ ID NO: 172646 - protein, 16 aa, Influenza A virus
KAGLLVSDGGPNLYNI

SEQ ID NO: 172647 - protein, 17 aa, Influenza A virus
KAGLLVSDGGPNLYNIR

SEQ ID NO: 172648 - protein, 19 aa, Influenza A virus
KAGLLVSDGGPNLYNIRNL

SEQ ID NO: 172649 - protein, 20 aa, Influenza A virus
KAGLLVSDGGPNLYNIRNLH

SEQ ID NO: 172650 - protein, 21 aa, Influenza A virus
KAGLLVSDGGPNLYNIRNLHI

SEQ ID NO: 172651 - protein, 22 aa, Influenza A virus
KAGLLVSDGGPNLYNIRNLHIP

SEQ ID NO: 172652 - protein, 23 aa, Influenza A virus
KAGLLVSDGGPNLYNIRNLHIPE

SEQ ID NO: 172653 - protein, 24 aa, Influenza A virus
KAGLLVSDGGPNLYNIRNLHIPEV

SEQ ID NO: 172654 - protein, 25 aa, Influenza A virus
KAGLLVSDGGPNLYNIRNLHIPEVC

SEQ ID NO: 172655 - protein, 13 aa, Influenza A virus
KAKLANVVRKMMT

SEQ ID NO: 172656 - protein, 14 aa, Influenza A virus
KAKLANVVRKMMTN

SEQ ID NO: 172657 - protein, 15 aa, Influenza A virus
KAKLANVVRKMMTNS

SEQ ID NO: 172658 - protein, 16 aa, Influenza A virus
KAKLANVVRKMMTNSQ

SEQ ID NO: 172659 - protein, 17 aa, Influenza A virus
KAKLANVVRKMMTNSQD

SEQ ID NO: 172660 - protein, 18 aa, Influenza A virus
KAKLANVVRKMMTNSQDT

SEQ ID NO: 172661 - protein, 19 aa, Influenza A virus
KAKLANVVRKMMTNSQDTE

SEQ ID NO: 172662 - protein, 20 aa, Influenza A virus
KAKLANVVRKMMTNSQDTEL

SEQ ID NO: 172663 - protein, 21 aa, Influenza A virus
KAKLANVVRKMMTNSQDTELS

SEQ ID NO: 172664 - protein, 22 aa, Influenza A virus
KAKLANVVRKMMTNSQDTELSF

SEQ ID NO: 172665 - protein, 23 aa, Influenza A virus
KAKLANVVRKMMTNSQDTELSFT

SEQ ID NO: 172666 - protein, 24 aa, Influenza A virus
KAKLANVVRKMMTNSQDTELSFTI

SEQ ID NO: 172667 - protein, 25 aa, Influenza A virus
KAKLANVVRKMMTNSQDTELSFTIT

SEQ ID NO: 172668 - protein, 15 aa, Influenza A virus
KDAERGKLKRRAIAT

SEQ ID NO: 172669 - protein, 16 aa, Influenza A virus
KDAERGKLKRRAIATP

SEQ ID NO: 172670 - protein, 17 aa, Influenza A virus
KDAERGKLKRRAIATPG

SEQ ID NO: 172671 - protein, 19 aa, Influenza A virus
KDAERGKLKRRAIATPGMQ

SEQ ID NO: 172672 - protein, 20 aa, Influenza A virus
KDAERGKLKRRAIATPGMQI

SEQ ID NO: 172673 - protein, 21 aa, Influenza A virus
KDAERGKLKRRAIATPGMQIR

SEQ ID NO: 172674 - protein, 22 aa, Influenza A virus
KDAERGKLKRRAIATPGMQIRG

SEQ ID NO: 172675 - protein, 23 aa, Influenza A virus
KDAERGKLKRRAIATPGMQIRGF

SEQ ID NO: 172676 - protein, 24 aa, Influenza A virus
KDAERGKLKRRAIATPGMQIRGFV

SEQ ID NO: 172677 - protein, 25 aa, Influenza A virus
KDAERGKLKRRAIATPGMQIRGFVY

SEQ ID NO: 172678 - protein, 15 aa, Influenza A virus
KDYRYTYRCHRGDTQ

SEQ ID NO: 172679 - protein, 20 aa, Influenza A virus
KDYRYTYRCHRGDTQIQTRR

SEQ ID NO: 172680 - protein, 22 aa, Influenza A virus
KDYRYTYRCHRGDTQIQTRRSF

SEQ ID NO: 172681 - protein, 23 aa, Influenza A virus
KDYRYTYRCHRGDTQIQTRRSFE

SEQ ID NO: 172682 - protein, 14 aa, Influenza A virus
KFFPSSSYRRPVGI

SEQ ID NO: 172683 - protein, 15 aa, Influenza A virus
KFFPSSSYRRPVGIS

SEQ ID NO: 172684 - protein, 16 aa, Influenza A virus
KFFPSSSYRRPVGISS

SEQ ID NO: 172685 - protein, 17 aa, Influenza A virus
KFFPSSSYRRPVGISSM

SEQ ID NO: 172686 - protein, 19 aa, Influenza A virus
KFFPSSSYRRPVGISSMVE

SEQ ID NO: 172687 - protein, 20 aa, Influenza A virus
KFFPSSSYRRPVGISSMVEA

SEQ ID NO: 172688 - protein, 21 aa, Influenza A virus
KFFPSSSYRRPVGISSMVEAM

SEQ ID NO: 172689 - protein, 22 aa, Influenza A virus
KFFPSSSYRRPVGISSMVEAMV

SEQ ID NO: 172690 - protein, 23 aa, Influenza A virus
KFFPSSSYRRPVGISSMVEAMVS

SEQ ID NO: 172691 - protein, 24 aa, Influenza A virus
KFFPSSSYRRPVGISSMVEAMVSR

SEQ ID NO: 172692 - protein, 25 aa, Influenza A virus
KFFPSSSYRRPVGISSMVEAMVSRA

SEQ ID NO: 172693 - protein, 13 aa, Influenza A virus
KIEKIRPLLIDGT

SEQ ID NO: 172694 - protein, 13 aa, Influenza A virus
KKAKLANVVRKMM

SEQ ID NO: 172695 - protein, 14 aa, Influenza A virus
KKAKLANVVRKMMT

SEQ ID NO: 172696 - protein, 15 aa, Influenza A virus
KKAKLANVVRKMMTN

SEQ ID NO: 172697 - protein, 16 aa, Influenza A virus
KKAKLANVVRKMMTNS

SEQ ID NO: 172698 - protein, 17 aa, Influenza A virus
KKAKLANVVRKMMTNSQ

SEQ ID NO: 172699 - protein, 18 aa, Influenza A virus
KKAKLANVVRKMMTNSQD

SEQ ID NO: 172700 - protein, 19 aa, Influenza A virus
KKAKLANVVRKMMTNSQDT

SEQ ID NO: 172701 - protein, 20 aa, Influenza A virus
KKAKLANVVRKMMTNSQDTE

SEQ ID NO: 172702 - protein, 21 aa, Influenza A virus
KKAKLANVVRKMMTNSQDTEL

SEQ ID NO: 172703 - protein, 22 aa, Influenza A virus
KKAKLANVVRKMMTNSQDTELS

SEQ ID NO: 172704 - protein, 23 aa, Influenza A virus
KKAKLANVVRKMMTNSQDTELSF

SEQ ID NO: 172705 - protein, 24 aa, Influenza A virus
KKAKLANVVRKMMTNSQDTELSFT

SEQ ID NO: 172706 - protein, 25 aa, Influenza A virus
KKAKLANVVRKMMTNSQDTELSFTI

SEQ ID NO: 172707 - protein, 13 aa, Influenza A virus
KKIEKIRPLLIDG

SEQ ID NO: 172708 - protein, 14 aa, Influenza A virus
KKIEKIRPLLIDGT

SEQ ID NO: 172709 - protein, 14 aa, Influenza A virus
KKKSYINRTGTFEF

SEQ ID NO: 172710 - protein, 15 aa, Influenza A virus
KKKSYINRTGTFEFT

SEQ ID NO: 172711 - protein, 16 aa, Influenza A virus
KKKSYINRTGTFEFTS

SEQ ID NO: 172712 - protein, 17 aa, Influenza A virus
KKKSYINRTGTFEFTSF

SEQ ID NO: 172713 - protein, 18 aa, Influenza A virus
KKKSYINRTGTFEFTSFF

SEQ ID NO: 172714 - protein, 19 aa, Influenza A virus
KKKSYINRTGTFEFTSFFY

SEQ ID NO: 172715 - protein, 20 aa, Influenza A virus
KKKSYINRTGTFEFTSFFYR

SEQ ID NO: 172716 - protein, 21 aa, Influenza A virus
KKKSYINRTGTFEFTSFFYRY

SEQ ID NO: 172717 - protein, 22 aa, Influenza A virus
KKKSYINRTGTFEFTSFFYRYG

SEQ ID NO: 172718 - protein, 23 aa, Influenza A virus
KKKSYINRTGTFEFTSFFYRYGF

SEQ ID NO: 172719 - protein, 24 aa, Influenza A virus
KKKSYINRTGTFEFTSFFYRYGFV

SEQ ID NO: 172720 - protein, 25 aa, Influenza A virus
KKKSYINRTGTFEFTSFFYRYGFVA

SEQ ID NO: 172721 - protein, 14 aa, Influenza A virus
KKSYINRTGTFEFT

SEQ ID NO: 172722 - protein, 15 aa, Influenza A virus
KKSYINRTGTFEFTS

SEQ ID NO: 172723 - protein, 16 aa, Influenza A virus
KKSYINRTGTFEFTSF

SEQ ID NO: 172724 - protein, 17 aa, Influenza A virus
KKSYINRTGTFEFTSFF

SEQ ID NO: 172725 - protein, 18 aa, Influenza A virus
KKSYINRTGTFEFTSFFY

SEQ ID NO: 172726 - protein, 19 aa, Influenza A virus
KKSYINRTGTFEFTSFFYR

SEQ ID NO: 172727 - protein, 20 aa, Influenza A virus
KKSYINRTGTFEFTSFFYRY

SEQ ID NO: 172728 - protein, 21 aa, Influenza A virus
KKSYINRTGTFEFTSFFYRYG

SEQ ID NO: 172729 - protein, 22 aa, Influenza A virus
KKSYINRTGTFEFTSFFYRYGF

SEQ ID NO: 172730 - protein, 23 aa, Influenza A virus
KKSYINRTGTFEFTSFFYRYGFV

SEQ ID NO: 172731 - protein, 24 aa, Influenza A virus
KKSYINRTGTFEFTSFFYRYGFVA

SEQ ID NO: 172732 - protein, 25 aa, Influenza A virus
KKSYINRTGTFEFTSFFYRYGFVAN

SEQ ID NO: 172733 - protein, 13 aa, Influenza A virus
KLANVVRKMMTNS

SEQ ID NO: 172734 - protein, 14 aa, Influenza A virus
KLANVVRKMMTNSQ

SEQ ID NO: 172735 - protein, 15 aa, Influenza A virus
KLANVVRKMMTNSQD

SEQ ID NO: 172736 - protein, 16 aa, Influenza A virus
KLANVVRKMMTNSQDT

SEQ ID NO: 172737 - protein, 17 aa, Influenza A virus
KLANVVRKMMTNSQDTE

SEQ ID NO: 172738 - protein, 18 aa, Influenza A virus
KLANVVRKMMTNSQDTEL

SEQ ID NO: 172739 - protein, 19 aa, Influenza A virus
KLANVVRKMMTNSQDTELS

SEQ ID NO: 172740 - protein, 20 aa, Influenza A virus
KLANVVRKMMTNSQDTELSF

SEQ ID NO: 172741 - protein, 21 aa, Influenza A virus
KLANVVRKMMTNSQDTELSFT

SEQ ID NO: 172742 - protein, 22 aa, Influenza A virus
KLANVVRKMMTNSQDTELSFTI

SEQ ID NO: 172743 - protein, 23 aa, Influenza A virus
KLANVVRKMMTNSQDTELSFTIT

SEQ ID NO: 172744 - protein, 24 aa, Influenza A virus
KLANVVRKMMTNSQDTELSFTITG

SEQ ID NO: 172745 - protein, 25 aa, Influenza A virus
KLANVVRKMMTNSQDTELSFTITGD

SEQ ID NO: 172746 - protein, 13 aa, Influenza A virus
KLEQSGLPVGGNE

SEQ ID NO: 172747 - protein, 14 aa, Influenza A virus
KLEQSGLPVGGNEK

SEQ ID NO: 172748 - protein, 15 aa, Influenza A virus
KLEQSGLPVGGNEKK

SEQ ID NO: 172749 - protein, 16 aa, Influenza A virus
KLEQSGLPVGGNEKKA

SEQ ID NO: 172750 - protein, 17 aa, Influenza A virus
KLEQSGLPVGGNEKKAK

SEQ ID NO: 172751 - protein, 19 aa, Influenza A virus
KLEQSGLPVGGNEKKAKLA

SEQ ID NO: 172752 - protein, 20 aa, Influenza A virus
KLEQSGLPVGGNEKKAKLAN

SEQ ID NO: 172753 - protein, 23 aa, Influenza A virus
KLEQSGLPVGGNEKKAKLANVVR

SEQ ID NO: 172754 - protein, 24 aa, Influenza A virus
KLEQSGLPVGGNEKKAKLANVVRK

SEQ ID NO: 172755 - protein, 25 aa, Influenza A virus
KLEQSGLPVGGNEKKAKLANVVRKM

SEQ ID NO: 172756 - protein, 13 aa, Influenza A virus
KLKRRAIATPGMQ

SEQ ID NO: 172757 - protein, 14 aa, Influenza A virus
KLKRRAIATPGMQI

SEQ ID NO: 172758 - protein, 15 aa, Influenza A virus
KLKRRAIATPGMQIR

SEQ ID NO: 172759 - protein, 16 aa, Influenza A virus
KLKRRAIATPGMQIRG

SEQ ID NO: 172760 - protein, 17 aa, Influenza A virus
KLKRRAIATPGMQIRGF

SEQ ID NO: 172761 - protein, 18 aa, Influenza A virus
KLKRRAIATPGMQIRGFV

SEQ ID NO: 172762 - protein, 19 aa, Influenza A virus
KLKRRAIATPGMQIRGFVY

SEQ ID NO: 172763 - protein, 20 aa, Influenza A virus
KLKRRAIATPGMQIRGFVYF

SEQ ID NO: 172764 - protein, 21 aa, Influenza A virus
KLKRRAIATPGMQIRGFVYFV

SEQ ID NO: 172765 - protein, 22 aa, Influenza A virus
KLKRRAIATPGMQIRGFVYFVE

SEQ ID NO: 172766 - protein, 23 aa, Influenza A virus
KLKRRAIATPGMQIRGFVYFVET

SEQ ID NO: 172767 - protein, 24 aa, Influenza A virus
KLKRRAIATPGMQIRGFVYFVETL

SEQ ID NO: 172768 - protein, 25 aa, Influenza A virus
KLKRRAIATPGMQIRGFVYFVETLA

SEQ ID NO: 172769 - protein, 14 aa, Influenza A virus
KMARLGKGYMFESK

SEQ ID NO: 172770 - protein, 20 aa, Influenza A virus
KMMTNSQDTELSFTITGDNT

SEQ ID NO: 172771 - protein, 21 aa, Influenza A virus
KMMTNSQDTELSFTITGDNTK

SEQ ID NO: 172772 - protein, 22 aa, Influenza A virus
KMMTNSQDTELSFTITGDNTKW

SEQ ID NO: 172773 - protein, 23 aa, Influenza A virus
KMMTNSQDTELSFTITGDNTKWN

SEQ ID NO: 172774 - protein, 24 aa, Influenza A virus
KMMTNSQDTELSFTITGDNTKWNE

SEQ ID NO: 172775 - protein, 25 aa, Influenza A virus
KMMTNSQDTELSFTITGDNTKWNEN

SEQ ID NO: 172776 - protein, 15 aa, Influenza A virus
KNNMINNDLGPATAQ

SEQ ID NO: 172777 - protein, 16 aa, Influenza A virus
KNNMINNDLGPATAQM

SEQ ID NO: 172778 - protein, 17 aa, Influenza A virus
KNNMINNDLGPATAQMA

SEQ ID NO: 172779 - protein, 18 aa, Influenza A virus
KNNMINNDLGPATAQMAL

SEQ ID NO: 172780 - protein, 19 aa, Influenza A virus
KNNMINNDLGPATAQMALQ

SEQ ID NO: 172781 - protein, 20 aa, Influenza A virus
KNNMINNDLGPATAQMALQL

SEQ ID NO: 172782 - protein, 21 aa, Influenza A virus
KNNMINNDLGPATAQMALQLF

SEQ ID NO: 172783 - protein, 22 aa, Influenza A virus
KNNMINNDLGPATAQMALQLFI

SEQ ID NO: 172784 - protein, 23 aa, Influenza A virus
KNNMINNDLGPATAQMALQLFIK

SEQ ID NO: 172785 - protein, 24 aa, Influenza A virus
KNNMINNDLGPATAQMALQLFIKD

SEQ ID NO: 172786 - protein, 25 aa, Influenza A virus
KNNMINNDLGPATAQMALQLFIKDY

SEQ ID NO: 172787 - protein, 15 aa, Influenza A virus
KRNRSILNTSQRGIL

SEQ ID NO: 172788 - protein, 16 aa, Influenza A virus
KRNRSILNTSQRGILE

SEQ ID NO: 172789 - protein, 17 aa, Influenza A virus
KRNRSILNTSQRGILED

SEQ ID NO: 172790 - protein, 19 aa, Influenza A virus
KRNRSILNTSQRGILEDEQ

SEQ ID NO: 172791 - protein, 20 aa, Influenza A virus
KRNRSILNTSQRGILEDEQM

SEQ ID NO: 172792 - protein, 21 aa, Influenza A virus
KRNRSILNTSQRGILEDEQMY

SEQ ID NO: 172793 - protein, 22 aa, Influenza A virus
KRNRSILNTSQRGILEDEQMYQ

SEQ ID NO: 172794 - protein, 13 aa, Influenza A virus
KRRAIATPGMQIR

SEQ ID NO: 172795 - protein, 14 aa, Influenza A virus
KRRAIATPGMQIRG

SEQ ID NO: 172796 - protein, 15 aa, Influenza A virus
KRRAIATPGMQIRGF

SEQ ID NO: 172797 - protein, 16 aa, Influenza A virus
KRRAIATPGMQIRGFV

SEQ ID NO: 172798 - protein, 17 aa, Influenza A virus
KRRAIATPGMQIRGFVY

SEQ ID NO: 172799 - protein, 18 aa, Influenza A virus
KRRAIATPGMQIRGFVYF

SEQ ID NO: 172800 - protein, 19 aa, Influenza A virus
KRRAIATPGMQIRGFVYFV

SEQ ID NO: 172801 - protein, 20 aa, Influenza A virus
KRRAIATPGMQIRGFVYFVE

SEQ ID NO: 172802 - protein, 21 aa, Influenza A virus
KRRAIATPGMQIRGFVYFVET

SEQ ID NO: 172803 - protein, 22 aa, Influenza A virus
KRRAIATPGMQIRGFVYFVETL

SEQ ID NO: 172804 - protein, 23 aa, Influenza A virus
KRRAIATPGMQIRGFVYFVETLA

SEQ ID NO: 172805 - protein, 24 aa, Influenza A virus
KRRAIATPGMQIRGFVYFVETLAR

SEQ ID NO: 172806 - protein, 25 aa, Influenza A virus
KRRAIATPGMQIRGFVYFVETLARS

SEQ ID NO: 172807 - protein, 14 aa, Influenza A virus
KSYINRTGTFEFTS

SEQ ID NO: 172808 - protein, 15 aa, Influenza A virus
KSYINRTGTFEFTSF

SEQ ID NO: 172809 - protein, 16 aa, Influenza A virus
KSYINRTGTFEFTSFF

SEQ ID NO: 172810 - protein, 17 aa, Influenza A virus
KSYINRTGTFEFTSFFY

SEQ ID NO: 172811 - protein, 18 aa, Influenza A virus
KSYINRTGTFEFTSFFYR

SEQ ID NO: 172812 - protein, 19 aa, Influenza A virus
KSYINRTGTFEFTSFFYRY

SEQ ID NO: 172813 - protein, 20 aa, Influenza A virus
KSYINRTGTFEFTSFFYRYG

SEQ ID NO: 172814 - protein, 21 aa, Influenza A virus
KSYINRTGTFEFTSFFYRYGF

SEQ ID NO: 172815 - protein, 22 aa, Influenza A virus
KSYINRTGTFEFTSFFYRYGFV

SEQ ID NO: 172816 - protein, 23 aa, Influenza A virus
KSYINRTGTFEFTSFFYRYGFVA

SEQ ID NO: 172817 - protein, 24 aa, Influenza A virus
KSYINRTGTFEFTSFFYRYGFVAN

SEQ ID NO: 172818 - protein, 25 aa, Influenza A virus
KSYINRTGTFEFTSFFYRYGFVANF

SEQ ID NO: 172819 - protein, 14 aa, Influenza A virus
KTTYWWDGLQSSDD

SEQ ID NO: 172820 - protein, 15 aa, Influenza A virus
KTTYWWDGLQSSDDF

SEQ ID NO: 172821 - protein, 16 aa, Influenza A virus
KTTYWWDGLQSSDDFA

SEQ ID NO: 172822 - protein, 17 aa, Influenza A virus
KTTYWWDGLQSSDDFAL

SEQ ID NO: 172823 - protein, 18 aa, Influenza A virus
KTTYWWDGLQSSDDFALI

SEQ ID NO: 172824 - protein, 19 aa, Influenza A virus
KTTYWWDGLQSSDDFALIV

SEQ ID NO: 172825 - protein, 20 aa, Influenza A virus
KTTYWWDGLQSSDDFALIVN

SEQ ID NO: 172826 - protein, 21 aa, Influenza A virus
KTTYWWDGLQSSDDFALIVNA

SEQ ID NO: 172827 - protein, 22 aa, Influenza A virus
KTTYWWDGLQSSDDFALIVNAP

SEQ ID NO: 172828 - protein, 23 aa, Influenza A virus
KTTYWWDGLQSSDDFALIVNAPN

SEQ ID NO: 172829 - protein, 24 aa, Influenza A virus
KTTYWWDGLQSSDDFALIVNAPNH

SEQ ID NO: 172830 - protein, 15 aa, Influenza A virus
KVPAQNAISTTFPYT

SEQ ID NO: 172831 - protein, 16 aa, Influenza A virus
KVPAQNAISTTFPYTG

SEQ ID NO: 172832 - protein, 17 aa, Influenza A virus
KVPAQNAISTTFPYTGD

SEQ ID NO: 172833 - protein, 19 aa, Influenza A virus
KVPAQNAISTTFPYTGDPP

SEQ ID NO: 172834 - protein, 20 aa, Influenza A virus
KVPAQNAISTTFPYTGDPPY

SEQ ID NO: 172835 - protein, 21 aa, Influenza A virus
KVPAQNAISTTFPYTGDPPYS

SEQ ID NO: 172836 - protein, 22 aa, Influenza A virus
KVPAQNAISTTFPYTGDPPYSH

SEQ ID NO: 172837 - protein, 23 aa, Influenza A virus
KVPAQNAISTTFPYTGDPPYSHG

SEQ ID NO: 172838 - protein, 24 aa, Influenza A virus
KVPAQNAISTTFPYTGDPPYSHGT

SEQ ID NO: 172839 - protein, 25 aa, Influenza A virus
KVPAQNAISTTFPYTGDPPYSHGTG

SEQ ID NO: 172840 - protein, 24 aa, Influenza A virus
KWELMDEDYQGRLCNPLNPFVSHK

SEQ ID NO: 172841 - protein, 25 aa, Influenza A virus
KWELMDEDYQGRLCNPLNPFVSHKE

SEQ ID NO: 172842 - protein, 15 aa, Influenza A virus
KWNENQNPRMFLAMI

SEQ ID NO: 172843 - protein, 16 aa, Influenza A virus
KWNENQNPRMFLAMIT

SEQ ID NO: 172844 - protein, 17 aa, Influenza A virus
KWNENQNPRMFLAMITY

SEQ ID NO: 172845 - protein, 18 aa, Influenza A virus
KWNENQNPRMFLAMITYI

SEQ ID NO: 172846 - protein, 19 aa, Influenza A virus
KWNENQNPRMFLAMITYIT

SEQ ID NO: 172847 - protein, 14 aa, Influenza A virus
LANVVRKMMTNSQD

SEQ ID NO: 172848 - protein, 15 aa, Influenza A virus
LANVVRKMMTNSQDT

SEQ ID NO: 172849 - protein, 16 aa, Influenza A virus
LANVVRKMMTNSQDTE

SEQ ID NO: 172850 - protein, 17 aa, Influenza A virus
LANVVRKMMTNSQDTEL

SEQ ID NO: 172851 - protein, 18 aa, Influenza A virus
LANVVRKMMTNSQDTELS

SEQ ID NO: 172852 - protein, 19 aa, Influenza A virus
LANVVRKMMTNSQDTELSF

SEQ ID NO: 172853 - protein, 20 aa, Influenza A virus
LANVVRKMMTNSQDTELSFT

SEQ ID NO: 172854 - protein, 21 aa, Influenza A virus
LANVVRKMMTNSQDTELSFTI

SEQ ID NO: 172855 - protein, 22 aa, Influenza A virus
LANVVRKMMTNSQDTELSFTIT

SEQ ID NO: 172856 - protein, 23 aa, Influenza A virus
LANVVRKMMTNSQDTELSFTITG

SEQ ID NO: 172857 - protein, 24 aa, Influenza A virus
LANVVRKMMTNSQDTELSFTITGD

SEQ ID NO: 172858 - protein, 25 aa, Influenza A virus
LANVVRKMMTNSQDTELSFTITGDN

SEQ ID NO: 172859 - protein, 19 aa, Influenza A virus
LARSICEKLEQSGLPVGGN

SEQ ID NO: 172860 - protein, 20 aa, Influenza A virus
LARSICEKLEQSGLPVGGNE

SEQ ID NO: 172861 - protein, 21 aa, Influenza A virus
LARSICEKLEQSGLPVGGNEK

SEQ ID NO: 172862 - protein, 22 aa, Influenza A virus
LARSICEKLEQSGLPVGGNEKK

SEQ ID NO: 172863 - protein, 23 aa, Influenza A virus
LARSICEKLEQSGLPVGGNEKKA

SEQ ID NO: 172864 - protein, 24 aa, Influenza A virus
LARSICEKLEQSGLPVGGNEKKAK

SEQ ID NO: 172865 - protein, 25 aa, Influenza A virus
LARSICEKLEQSGLPVGGNEKKAKL

SEQ ID NO: 172866 - protein, 15 aa, Influenza A virus
LCNPLNPFVSHKEIE

SEQ ID NO: 172867 - protein, 19 aa, Influenza A virus
LCNPLNPFVSHKEIESVNN

SEQ ID NO: 172868 - protein, 20 aa, Influenza A virus
LCNPLNPFVSHKEIESVNNA

SEQ ID NO: 172869 - protein, 21 aa, Influenza A virus
LCNPLNPFVSHKEIESVNNAV

SEQ ID NO: 172870 - protein, 14 aa, Influenza A virus
LEAMAFLEESHPGI

SEQ ID NO: 172871 - protein, 15 aa, Influenza A virus
LEAMAFLEESHPGIF

SEQ ID NO: 172872 - protein, 16 aa, Influenza A virus
LEAMAFLEESHPGIFE

SEQ ID NO: 172873 - protein, 17 aa, Influenza A virus
LEAMAFLEESHPGIFEN

SEQ ID NO: 172874 - protein, 18 aa, Influenza A virus
LEAMAFLEESHPGIFENS

SEQ ID NO: 172875 - protein, 19 aa, Influenza A virus
LEAMAFLEESHPGIFENSC

SEQ ID NO: 172876 - protein, 14 aa, Influenza A virus
LEQSGLPVGGNEKK

SEQ ID NO: 172877 - protein, 15 aa, Influenza A virus
LEQSGLPVGGNEKKA

SEQ ID NO: 172878 - protein, 16 aa, Influenza A virus
LEQSGLPVGGNEKKAK

SEQ ID NO: 172879 - protein, 17 aa, Influenza A virus
LEQSGLPVGGNEKKAKL

SEQ ID NO: 172880 - protein, 20 aa, Influenza A virus
LEQSGLPVGGNEKKAKLANV

SEQ ID NO: 172881 - protein, 23 aa, Influenza A virus
LEQSGLPVGGNEKKAKLANVVRK

SEQ ID NO: 172882 - protein, 24 aa, Influenza A virus
LEQSGLPVGGNEKKAKLANVVRKM

SEQ ID NO: 172883 - protein, 25 aa, Influenza A virus
LEQSGLPVGGNEKKAKLANVVRKMM

SEQ ID NO: 172884 - protein, 13 aa, Influenza A virus
LFEKFFPSSSYRR

SEQ ID NO: 172885 - protein, 14 aa, Influenza A virus
LFEKFFPSSSYRRP

SEQ ID NO: 172886 - protein, 15 aa, Influenza A virus
LFEKFFPSSSYRRPV

SEQ ID NO: 172887 - protein, 16 aa, Influenza A virus
LFEKFFPSSSYRRPVG

SEQ ID NO: 172888 - protein, 17 aa, Influenza A virus
LFEKFFPSSSYRRPVGI

SEQ ID NO: 172889 - protein, 18 aa, Influenza A virus
LFEKFFPSSSYRRPVGIS

SEQ ID NO: 172890 - protein, 19 aa, Influenza A virus
LFEKFFPSSSYRRPVGISS

SEQ ID NO: 172891 - protein, 20 aa, Influenza A virus
LFEKFFPSSSYRRPVGISSM

SEQ ID NO: 172892 - protein, 21 aa, Influenza A virus
LFEKFFPSSSYRRPVGISSMV

SEQ ID NO: 172893 - protein, 22 aa, Influenza A virus
LFEKFFPSSSYRRPVGISSMVE

SEQ ID NO: 172894 - protein, 23 aa, Influenza A virus
LFEKFFPSSSYRRPVGISSMVEA

SEQ ID NO: 172895 - protein, 24 aa, Influenza A virus
LFEKFFPSSSYRRPVGISSMVEAM

SEQ ID NO: 172896 - protein, 25 aa, Influenza A virus
LFEKFFPSSSYRRPVGISSMVEAMV

SEQ ID NO: 172897 - protein, 13 aa, Influenza A virus
LFIKDYRYTYRCH

SEQ ID NO: 172898 - protein, 14 aa, Influenza A virus
LFIKDYRYTYRCHR

SEQ ID NO: 172899 - protein, 15 aa, Influenza A virus
LFIKDYRYTYRCHRG

SEQ ID NO: 172900 - protein, 16 aa, Influenza A virus
LFIKDYRYTYRCHRGD

SEQ ID NO: 172901 - protein, 17 aa, Influenza A virus
LFIKDYRYTYRCHRGDT

SEQ ID NO: 172902 - protein, 19 aa, Influenza A virus
LFIKDYRYTYRCHRGDTQI

SEQ ID NO: 172903 - protein, 20 aa, Influenza A virus
LFIKDYRYTYRCHRGDTQIQ

SEQ ID NO: 172904 - protein, 21 aa, Influenza A virus
LFIKDYRYTYRCHRGDTQIQT

SEQ ID NO: 172905 - protein, 22 aa, Influenza A virus
LFIKDYRYTYRCHRGDTQIQTR

SEQ ID NO: 172906 - protein, 23 aa, Influenza A virus
LFIKDYRYTYRCHRGDTQIQTRR

SEQ ID NO: 172907 - protein, 24 aa, Influenza A virus
LFIKDYRYTYRCHRGDTQIQTRRS

SEQ ID NO: 172908 - protein, 25 aa, Influenza A virus
LFIKDYRYTYRCHRGDTQIQTRRSF

SEQ ID NO: 172909 - protein, 13 aa, Influenza A virus
LFLKVPAQNAIST

SEQ ID NO: 172910 - protein, 14 aa, Influenza A virus
LFLKVPAQNAISTT

SEQ ID NO: 172911 - protein, 15 aa, Influenza A virus
LFLKVPAQNAISTTF

SEQ ID NO: 172912 - protein, 16 aa, Influenza A virus
LFLKVPAQNAISTTFP

SEQ ID NO: 172913 - protein, 17 aa, Influenza A virus
LFLKVPAQNAISTTFPY

SEQ ID NO: 172914 - protein, 18 aa, Influenza A virus
LFLKVPAQNAISTTFPYT

SEQ ID NO: 172915 - protein, 19 aa, Influenza A virus
LFLKVPAQNAISTTFPYTG

SEQ ID NO: 172916 - protein, 20 aa, Influenza A virus
LFLKVPAQNAISTTFPYTGD

SEQ ID NO: 172917 - protein, 21 aa, Influenza A virus
LFLKVPAQNAISTTFPYTGDP

SEQ ID NO: 172918 - protein, 22 aa, Influenza A virus
LFLKVPAQNAISTTFPYTGDPP

SEQ ID NO: 172919 - protein, 23 aa, Influenza A virus
LFLKVPAQNAISTTFPYTGDPPY

SEQ ID NO: 172920 - protein, 24 aa, Influenza A virus
LFLKVPAQNAISTTFPYTGDPPYS

SEQ ID NO: 172921 - protein, 25 aa, Influenza A virus
LFLKVPAQNAISTTFPYTGDPPYSH

SEQ ID NO: 172922 - protein, 13 aa, Influenza A virus
LGPATAQMALQLF

SEQ ID NO: 172923 - protein, 14 aa, Influenza A virus
LGPATAQMALQLFI

SEQ ID NO: 172924 - protein, 15 aa, Influenza A virus
LGPATAQMALQLFIK

SEQ ID NO: 172925 - protein, 16 aa, Influenza A virus
LGPATAQMALQLFIKD

SEQ ID NO: 172926 - protein, 17 aa, Influenza A virus
LGPATAQMALQLFIKDY

SEQ ID NO: 172927 - protein, 18 aa, Influenza A virus
LGPATAQMALQLFIKDYR

SEQ ID NO: 172928 - protein, 19 aa, Influenza A virus
LGPATAQMALQLFIKDYRY

SEQ ID NO: 172929 - protein, 20 aa, Influenza A virus
LGPATAQMALQLFIKDYRYT

SEQ ID NO: 172930 - protein, 21 aa, Influenza A virus
LGPATAQMALQLFIKDYRYTY

SEQ ID NO: 172931 - protein, 22 aa, Influenza A virus
LGPATAQMALQLFIKDYRYTYR

SEQ ID NO: 172932 - protein, 23 aa, Influenza A virus
LGPATAQMALQLFIKDYRYTYRC

SEQ ID NO: 172933 - protein, 24 aa, Influenza A virus
LGPATAQMALQLFIKDYRYTYRCH

SEQ ID NO: 172934 - protein, 25 aa, Influenza A virus
LGPATAQMALQLFIKDYRYTYRCHR

SEQ ID NO: 172935 - protein, 15 aa, Influenza A virus
LHIPEVCLKWELMDE

SEQ ID NO: 172936 - protein, 16 aa, Influenza A virus
LHIPEVCLKWELMDED

SEQ ID NO: 172937 - protein, 17 aa, Influenza A virus
LHIPEVCLKWELMDEDY

SEQ ID NO: 172938 - protein, 18 aa, Influenza A virus
LHIPEVCLKWELMDEDYQ

SEQ ID NO: 172939 - protein, 19 aa, Influenza A virus
LHIPEVCLKWELMDEDYQG

SEQ ID NO: 172940 - protein, 20 aa, Influenza A virus
LHIPEVCLKWELMDEDYQGR

SEQ ID NO: 172941 - protein, 21 aa, Influenza A virus
LHIPEVCLKWELMDEDYQGRL

SEQ ID NO: 172942 - protein, 22 aa, Influenza A virus
LHIPEVCLKWELMDEDYQGRLC

SEQ ID NO: 172943 - protein, 23 aa, Influenza A virus
LHIPEVCLKWELMDEDYQGRLCN

SEQ ID NO: 172944 - protein, 24 aa, Influenza A virus
LHIPEVCLKWELMDEDYQGRLCNP

SEQ ID NO: 172945 - protein, 25 aa, Influenza A virus
LHIPEVCLKWELMDEDYQGRLCNPL

SEQ ID NO: 172946 - protein, 13 aa, Influenza A virus
LIRALTLNTMTKD

SEQ ID NO: 172947 - protein, 14 aa, Influenza A virus
LIRALTLNTMTKDA

SEQ ID NO: 172948 - protein, 15 aa, Influenza A virus
LIRALTLNTMTKDAE

SEQ ID NO: 172949 - protein, 16 aa, Influenza A virus
LIRALTLNTMTKDAER

SEQ ID NO: 172950 - protein, 17 aa, Influenza A virus
LIRALTLNTMTKDAERG

SEQ ID NO: 172951 - protein, 18 aa, Influenza A virus
LIRALTLNTMTKDAERGK

SEQ ID NO: 172952 - protein, 19 aa, Influenza A virus
LIRALTLNTMTKDAERGKL

SEQ ID NO: 172953 - protein, 20 aa, Influenza A virus
LIRALTLNTMTKDAERGKLK

SEQ ID NO: 172954 - protein, 21 aa, Influenza A virus
LIRALTLNTMTKDAERGKLKR

SEQ ID NO: 172955 - protein, 22 aa, Influenza A virus
LIRALTLNTMTKDAERGKLKRR

SEQ ID NO: 172956 - protein, 23 aa, Influenza A virus
LIRALTLNTMTKDAERGKLKRRA

SEQ ID NO: 172957 - protein, 24 aa, Influenza A virus
LIRALTLNTMTKDAERGKLKRRAI

SEQ ID NO: 172958 - protein, 25 aa, Influenza A virus
LIRALTLNTMTKDAERGKLKRRAIA

SEQ ID NO: 172959 - protein, 14 aa, Influenza A virus
LIVNAPNHEGIQAG

SEQ ID NO: 172960 - protein, 15 aa, Influenza A virus
LIVNAPNHEGIQAGV

SEQ ID NO: 172961 - protein, 13 aa, Influenza A virus
LKRRAIATPGMQI

SEQ ID NO: 172962 - protein, 14 aa, Influenza A virus
LKRRAIATPGMQIR

SEQ ID NO: 172963 - protein, 15 aa, Influenza A virus
LKRRAIATPGMQIRG

SEQ ID NO: 172964 - protein, 16 aa, Influenza A virus
LKRRAIATPGMQIRGF

SEQ ID NO: 172965 - protein, 17 aa, Influenza A virus
LKRRAIATPGMQIRGFV

SEQ ID NO: 172966 - protein, 18 aa, Influenza A virus
LKRRAIATPGMQIRGFVY

SEQ ID NO: 172967 - protein, 19 aa, Influenza A virus
LKRRAIATPGMQIRGFVYF

SEQ ID NO: 172968 - protein, 20 aa, Influenza A virus
LKRRAIATPGMQIRGFVYFV

SEQ ID NO: 172969 - protein, 21 aa, Influenza A virus
LKRRAIATPGMQIRGFVYFVE

SEQ ID NO: 172970 - protein, 22 aa, Influenza A virus
LKRRAIATPGMQIRGFVYFVET

SEQ ID NO: 172971 - protein, 23 aa, Influenza A virus
LKRRAIATPGMQIRGFVYFVETL

SEQ ID NO: 172972 - protein, 24 aa, Influenza A virus
LKRRAIATPGMQIRGFVYFVETLA

SEQ ID NO: 172973 - protein, 25 aa, Influenza A virus
LKRRAIATPGMQIRGFVYFVETLAR

SEQ ID NO: 172974 - protein, 15 aa, Influenza A virus
LKVPAQNAISTTFPY

SEQ ID NO: 172975 - protein, 16 aa, Influenza A virus
LKVPAQNAISTTFPYT

SEQ ID NO: 172976 - protein, 17 aa, Influenza A virus
LKVPAQNAISTTFPYTG

SEQ ID NO: 172977 - protein, 19 aa, Influenza A virus
LKVPAQNAISTTFPYTGDP

SEQ ID NO: 172978 - protein, 20 aa, Influenza A virus
LKVPAQNAISTTFPYTGDPP

SEQ ID NO: 172979 - protein, 21 aa, Influenza A virus
LKVPAQNAISTTFPYTGDPPY

SEQ ID NO: 172980 - protein, 22 aa, Influenza A virus
LKVPAQNAISTTFPYTGDPPYS

SEQ ID NO: 172981 - protein, 23 aa, Influenza A virus
LKVPAQNAISTTFPYTGDPPYSH

SEQ ID NO: 172982 - protein, 24 aa, Influenza A virus
LKVPAQNAISTTFPYTGDPPYSHG

SEQ ID NO: 172983 - protein, 25 aa, Influenza A virus
LKVPAQNAISTTFPYTGDPPYSHGT

SEQ ID NO: 172984 - protein, 23 aa, Influenza A virus
LKWELMDEDYQGRLCNPLNPFVS

SEQ ID NO: 172985 - protein, 24 aa, Influenza A virus
LKWELMDEDYQGRLCNPLNPFVSH

SEQ ID NO: 172986 - protein, 25 aa, Influenza A virus
LKWELMDEDYQGRLCNPLNPFVSHK

SEQ ID NO: 172987 - protein, 13 aa, Influenza A virus
LLFLKVPAQNAIS

SEQ ID NO: 172988 - protein, 14 aa, Influenza A virus
LLFLKVPAQNAIST

SEQ ID NO: 172989 - protein, 15 aa, Influenza A virus
LLFLKVPAQNAISTT

SEQ ID NO: 172990 - protein, 16 aa, Influenza A virus
LLFLKVPAQNAISTTF

SEQ ID NO: 172991 - protein, 17 aa, Influenza A virus
LLFLKVPAQNAISTTFP

SEQ ID NO: 172992 - protein, 18 aa, Influenza A virus
LLFLKVPAQNAISTTFPY

SEQ ID NO: 172993 - protein, 19 aa, Influenza A virus
LLFLKVPAQNAISTTFPYT

SEQ ID NO: 172994 - protein, 20 aa, Influenza A virus
LLFLKVPAQNAISTTFPYTG

SEQ ID NO: 172995 - protein, 21 aa, Influenza A virus
LLFLKVPAQNAISTTFPYTGD

SEQ ID NO: 172996 - protein, 22 aa, Influenza A virus
LLFLKVPAQNAISTTFPYTGDP

SEQ ID NO: 172997 - protein, 23 aa, Influenza A virus
LLFLKVPAQNAISTTFPYTGDPP

SEQ ID NO: 172998 - protein, 24 aa, Influenza A virus
LLFLKVPAQNAISTTFPYTGDPPY

SEQ ID NO: 172999 - protein, 25 aa, Influenza A virus
LLFLKVPAQNAISTTFPYTGDPPYS

SEQ ID NO: 173000 - protein, 14 aa, Influenza A virus
LLVSDGGPNLYNIR

SEQ ID NO: 173001 - protein, 15 aa, Influenza A virus
LLVSDGGPNLYNIRN

SEQ ID NO: 173002 - protein, 16 aa, Influenza A virus
LLVSDGGPNLYNIRNL

SEQ ID NO: 173003 - protein, 18 aa, Influenza A virus
LLVSDGGPNLYNIRNLHI

SEQ ID NO: 173004 - protein, 19 aa, Influenza A virus
LLVSDGGPNLYNIRNLHIP

SEQ ID NO: 173005 - protein, 20 aa, Influenza A virus
LLVSDGGPNLYNIRNLHIPE

SEQ ID NO: 173006 - protein, 21 aa, Influenza A virus
LLVSDGGPNLYNIRNLHIPEV

SEQ ID NO: 173007 - protein, 22 aa, Influenza A virus
LLVSDGGPNLYNIRNLHIPEVC

SEQ ID NO: 173008 - protein, 23 aa, Influenza A virus
LLVSDGGPNLYNIRNLHIPEVCL

SEQ ID NO: 173009 - protein, 24 aa, Influenza A virus
LLVSDGGPNLYNIRNLHIPEVCLK

SEQ ID NO: 173010 - protein, 25 aa, Influenza A virus
LLVSDGGPNLYNIRNLHIPEVCLKW

SEQ ID NO: 173011 - protein, 20 aa, Influenza A virus
LMDEDYQGRLCNPLNPFVSH

SEQ ID NO: 173012 - protein, 21 aa, Influenza A virus
LMDEDYQGRLCNPLNPFVSHK

SEQ ID NO: 173013 - protein, 22 aa, Influenza A virus
LMDEDYQGRLCNPLNPFVSHKE

SEQ ID NO: 173014 - protein, 23 aa, Influenza A virus
LMDEDYQGRLCNPLNPFVSHKEI

SEQ ID NO: 173015 - protein, 24 aa, Influenza A virus
LMDEDYQGRLCNPLNPFVSHKEIE

SEQ ID NO: 173016 - protein, 25 aa, Influenza A virus
LMDEDYQGRLCNPLNPFVSHKEIES

SEQ ID NO: 173017 - protein, 15 aa, Influenza A virus
LNPFVSHKEIESVNN

SEQ ID NO: 173018 - protein, 16 aa, Influenza A virus
LNPFVSHKEIESVNNA

SEQ ID NO: 173019 - protein, 17 aa, Influenza A virus
LNPFVSHKEIESVNNAV

SEQ ID NO: 173020 - protein, 13 aa, Influenza A virus
LNRNQPAATALAN

SEQ ID NO: 173021 - protein, 14 aa, Influenza A virus
LNRNQPAATALANT

SEQ ID NO: 173022 - protein, 15 aa, Influenza A virus
LNRNQPAATALANTI

SEQ ID NO: 173023 - protein, 16 aa, Influenza A virus
LNRNQPAATALANTIE

SEQ ID NO: 173024 - protein, 17 aa, Influenza A virus
LNRNQPAATALANTIEV

SEQ ID NO: 173025 - protein, 18 aa, Influenza A virus
LNRNQPAATALANTIEVF

SEQ ID NO: 173026 - protein, 19 aa, Influenza A virus
LNRNQPAATALANTIEVFR

SEQ ID NO: 173027 - protein, 20 aa, Influenza A virus
LNRNQPAATALANTIEVFRS

SEQ ID NO: 173028 - protein, 21 aa, Influenza A virus
LNRNQPAATALANTIEVFRSN

SEQ ID NO: 173029 - protein, 20 aa, Influenza A virus
LNTMTKDAERGKLKRRAIAT

SEQ ID NO: 173030 - protein, 21 aa, Influenza A virus
LNTMTKDAERGKLKRRAIATP

SEQ ID NO: 173031 - protein, 22 aa, Influenza A virus
LNTMTKDAERGKLKRRAIATPG

SEQ ID NO: 173032 - protein, 23 aa, Influenza A virus
LNTMTKDAERGKLKRRAIATPGM

SEQ ID NO: 173033 - protein, 24 aa, Influenza A virus
LNTMTKDAERGKLKRRAIATPGMQ

SEQ ID NO: 173034 - protein, 25 aa, Influenza A virus
LNTMTKDAERGKLKRRAIATPGMQI

SEQ ID NO: 173035 - protein, 13 aa, Influenza A virus
LPSFGVSGINESA

SEQ ID NO: 173036 - protein, 14 aa, Influenza A virus
LPSFGVSGINESAD

SEQ ID NO: 173037 - protein, 15 aa, Influenza A virus
LPSFGVSGINESADM

SEQ ID NO: 173038 - protein, 16 aa, Influenza A virus
LPSFGVSGINESADMS

SEQ ID NO: 173039 - protein, 17 aa, Influenza A virus
LPSFGVSGINESADMSI

SEQ ID NO: 173040 - protein, 18 aa, Influenza A virus
LPSFGVSGINESADMSIG

SEQ ID NO: 173041 - protein, 19 aa, Influenza A virus
LPSFGVSGINESADMSIGV

SEQ ID NO: 173042 - protein, 20 aa, Influenza A virus
LPSFGVSGINESADMSIGVT

SEQ ID NO: 173043 - protein, 21 aa, Influenza A virus
LPSFGVSGINESADMSIGVTV

SEQ ID NO: 173044 - protein, 22 aa, Influenza A virus
LPSFGVSGINESADMSIGVTVI

SEQ ID NO: 173045 - protein, 23 aa, Influenza A virus
LPSFGVSGINESADMSIGVTVIK

SEQ ID NO: 173046 - protein, 24 aa, Influenza A virus
LPSFGVSGINESADMSIGVTVIKN

SEQ ID NO: 173047 - protein, 25 aa, Influenza A virus
LPSFGVSGINESADMSIGVTVIKNN

SEQ ID NO: 173048 - protein, 19 aa, Influenza A virus
LPVGGNEKKAKLANVVRKM

SEQ ID NO: 173049 - protein, 20 aa, Influenza A virus
LPVGGNEKKAKLANVVRKMM

SEQ ID NO: 173050 - protein, 21 aa, Influenza A virus
LPVGGNEKKAKLANVVRKMMT

SEQ ID NO: 173051 - protein, 22 aa, Influenza A virus
LPVGGNEKKAKLANVVRKMMTN

SEQ ID NO: 173052 - protein, 23 aa, Influenza A virus
LPVGGNEKKAKLANVVRKMMTNS

SEQ ID NO: 173053 - protein, 24 aa, Influenza A virus
LPVGGNEKKAKLANVVRKMMTNSQ

SEQ ID NO: 173054 - protein, 25 aa, Influenza A virus
LPVGGNEKKAKLANVVRKMMTNSQD

SEQ ID NO: 173055 - protein, 13 aa, Influenza A virus
LQLFIKDYRYTYR

SEQ ID NO: 173056 - protein, 14 aa, Influenza A virus
LQLFIKDYRYTYRC

SEQ ID NO: 173057 - protein, 15 aa, Influenza A virus
LQLFIKDYRYTYRCH

SEQ ID NO: 173058 - protein, 16 aa, Influenza A virus
LQLFIKDYRYTYRCHR

SEQ ID NO: 173059 - protein, 17 aa, Influenza A virus
LQLFIKDYRYTYRCHRG

SEQ ID NO: 173060 - protein, 18 aa, Influenza A virus
LQLFIKDYRYTYRCHRGD

SEQ ID NO: 173061 - protein, 19 aa, Influenza A virus
LQLFIKDYRYTYRCHRGDT

SEQ ID NO: 173062 - protein, 20 aa, Influenza A virus
LQLFIKDYRYTYRCHRGDTQ

SEQ ID NO: 173063 - protein, 21 aa, Influenza A virus
LQLFIKDYRYTYRCHRGDTQI

SEQ ID NO: 173064 - protein, 22 aa, Influenza A virus
LQLFIKDYRYTYRCHRGDTQIQ

SEQ ID NO: 173065 - protein, 23 aa, Influenza A virus
LQLFIKDYRYTYRCHRGDTQIQT

SEQ ID NO: 173066 - protein, 24 aa, Influenza A virus
LQLFIKDYRYTYRCHRGDTQIQTR

SEQ ID NO: 173067 - protein, 25 aa, Influenza A virus
LQLFIKDYRYTYRCHRGDTQIQTRR

SEQ ID NO: 173068 - protein, 14 aa, Influenza A virus
LQSSDDFALIVNAP

SEQ ID NO: 173069 - protein, 15 aa, Influenza A virus
LQSSDDFALIVNAPN

SEQ ID NO: 173070 - protein, 16 aa, Influenza A virus
LQSSDDFALIVNAPNH

SEQ ID NO: 173071 - protein, 17 aa, Influenza A virus
LQSSDDFALIVNAPNHE

SEQ ID NO: 173072 - protein, 18 aa, Influenza A virus
LQSSDDFALIVNAPNHEG

SEQ ID NO: 173073 - protein, 19 aa, Influenza A virus
LQSSDDFALIVNAPNHEGI

SEQ ID NO: 173074 - protein, 20 aa, Influenza A virus
LQSSDDFALIVNAPNHEGIQ

SEQ ID NO: 173075 - protein, 21 aa, Influenza A virus
LQSSDDFALIVNAPNHEGIQA

SEQ ID NO: 173076 - protein, 22 aa, Influenza A virus
LQSSDDFALIVNAPNHEGIQAG

SEQ ID NO: 173077 - protein, 23 aa, Influenza A virus
LQSSDDFALIVNAPNHEGIQAGV

SEQ ID NO: 173078 - protein, 13 aa, Influenza A virus
LSIAPIMFSNKMA

SEQ ID NO: 173079 - protein, 14 aa, Influenza A virus
LSIAPIMFSNKMAR

SEQ ID NO: 173080 - protein, 15 aa, Influenza A virus
LSIAPIMFSNKMARL

SEQ ID NO: 173081 - protein, 16 aa, Influenza A virus
LSIAPIMFSNKMARLG

SEQ ID NO: 173082 - protein, 17 aa, Influenza A virus
LSIAPIMFSNKMARLGK

SEQ ID NO: 173083 - protein, 18 aa, Influenza A virus
LSIAPIMFSNKMARLGKG

SEQ ID NO: 173084 - protein, 19 aa, Influenza A virus
LSIAPIMFSNKMARLGKGY

SEQ ID NO: 173085 - protein, 20 aa, Influenza A virus
LSIAPIMFSNKMARLGKGYM

SEQ ID NO: 173086 - protein, 21 aa, Influenza A virus
LSIAPIMFSNKMARLGKGYMF

SEQ ID NO: 173087 - protein, 22 aa, Influenza A virus
LSIAPIMFSNKMARLGKGYMFE

SEQ ID NO: 173088 - protein, 23 aa, Influenza A virus
LSIAPIMFSNKMARLGKGYMFES

SEQ ID NO: 173089 - protein, 24 aa, Influenza A virus
LSIAPIMFSNKMARLGKGYMFESK

SEQ ID NO: 173090 - protein, 13 aa, Influenza A virus
LSPGMMMGMFNML

SEQ ID NO: 173091 - protein, 14 aa, Influenza A virus
LSPGMMMGMFNMLS

SEQ ID NO: 173092 - protein, 15 aa, Influenza A virus
LSPGMMMGMFNMLST

SEQ ID NO: 173093 - protein, 16 aa, Influenza A virus
LSPGMMMGMFNMLSTV

SEQ ID NO: 173094 - protein, 17 aa, Influenza A virus
LSPGMMMGMFNMLSTVL

SEQ ID NO: 173095 - protein, 18 aa, Influenza A virus
LSPGMMMGMFNMLSTVLG

SEQ ID NO: 173096 - protein, 19 aa, Influenza A virus
LSPGMMMGMFNMLSTVLGV

SEQ ID NO: 173097 - protein, 20 aa, Influenza A virus
LSPGMMMGMFNMLSTVLGVS

SEQ ID NO: 173098 - protein, 21 aa, Influenza A virus
LSPGMMMGMFNMLSTVLGVSI

SEQ ID NO: 173099 - protein, 22 aa, Influenza A virus
LSPGMMMGMFNMLSTVLGVSIL

SEQ ID NO: 173100 - protein, 23 aa, Influenza A virus
LSPGMMMGMFNMLSTVLGVSILN

SEQ ID NO: 173101 - protein, 24 aa, Influenza A virus
LSPGMMMGMFNMLSTVLGVSILNL

SEQ ID NO: 173102 - protein, 25 aa, Influenza A virus
LSPGMMMGMFNMLSTVLGVSILNLG

SEQ ID NO: 173103 - protein, 13 aa, Influenza A virus
LSTVLGVSILNLG

SEQ ID NO: 173104 - protein, 14 aa, Influenza A virus
LSTVLGVSILNLGQ

SEQ ID NO: 173105 - protein, 15 aa, Influenza A virus
LSTVLGVSILNLGQK

SEQ ID NO: 173106 - protein, 21 aa, Influenza A virus
LTLNTMTKDAERGKLKRRAIA

SEQ ID NO: 173107 - protein, 22 aa, Influenza A virus
LTLNTMTKDAERGKLKRRAIAT

SEQ ID NO: 173108 - protein, 23 aa, Influenza A virus
LTLNTMTKDAERGKLKRRAIATP

SEQ ID NO: 173109 - protein, 24 aa, Influenza A virus
LTLNTMTKDAERGKLKRRAIATPG

SEQ ID NO: 173110 - protein, 25 aa, Influenza A virus
LTLNTMTKDAERGKLKRRAIATPGM

SEQ ID NO: 173111 - protein, 19 aa, Influenza A virus
LTQGRQTYDWTLNRNQPAA

SEQ ID NO: 173112 - protein, 20 aa, Influenza A virus
LTQGRQTYDWTLNRNQPAAT

SEQ ID NO: 173113 - protein, 21 aa, Influenza A virus
LTQGRQTYDWTLNRNQPAATA

SEQ ID NO: 173114 - protein, 22 aa, Influenza A virus
LTQGRQTYDWTLNRNQPAATAL

SEQ ID NO: 173115 - protein, 23 aa, Influenza A virus
LTQGRQTYDWTLNRNQPAATALA

SEQ ID NO: 173116 - protein, 24 aa, Influenza A virus
LTQGRQTYDWTLNRNQPAATALAN

SEQ ID NO: 173117 - protein, 25 aa, Influenza A virus
LTQGRQTYDWTLNRNQPAATALANT

SEQ ID NO: 173118 - protein, 15 aa, Influenza A virus
LVSDGGPNLYNIRNL

SEQ ID NO: 173119 - protein, 17 aa, Influenza A virus
LVSDGGPNLYNIRNLHI

SEQ ID NO: 173120 - protein, 18 aa, Influenza A virus
LVSDGGPNLYNIRNLHIP

SEQ ID NO: 173121 - protein, 19 aa, Influenza A virus
LVSDGGPNLYNIRNLHIPE

SEQ ID NO: 173122 - protein, 20 aa, Influenza A virus
LVSDGGPNLYNIRNLHIPEV

SEQ ID NO: 173123 - protein, 21 aa, Influenza A virus
LVSDGGPNLYNIRNLHIPEVC

SEQ ID NO: 173124 - protein, 22 aa, Influenza A virus
LVSDGGPNLYNIRNLHIPEVCL

SEQ ID NO: 173125 - protein, 23 aa, Influenza A virus
LVSDGGPNLYNIRNLHIPEVCLK

SEQ ID NO: 173126 - protein, 24 aa, Influenza A virus
LVSDGGPNLYNIRNLHIPEVCLKW

SEQ ID NO: 173127 - protein, 25 aa, Influenza A virus
LVSDGGPNLYNIRNLHIPEVCLKWE

SEQ ID NO: 173128 - protein, 13 aa, Influenza A virus
LYNIRNLHIPEVC

SEQ ID NO: 173129 - protein, 14 aa, Influenza A virus
LYNIRNLHIPEVCL

SEQ ID NO: 173130 - protein, 15 aa, Influenza A virus
LYNIRNLHIPEVCLK

SEQ ID NO: 173131 - protein, 16 aa, Influenza A virus
LYNIRNLHIPEVCLKW

SEQ ID NO: 173132 - protein, 17 aa, Influenza A virus
LYNIRNLHIPEVCLKWE

SEQ ID NO: 173133 - protein, 18 aa, Influenza A virus
LYNIRNLHIPEVCLKWEL

SEQ ID NO: 173134 - protein, 19 aa, Influenza A virus
LYNIRNLHIPEVCLKWELM

SEQ ID NO: 173135 - protein, 20 aa, Influenza A virus
LYNIRNLHIPEVCLKWELMD

SEQ ID NO: 173136 - protein, 21 aa, Influenza A virus
LYNIRNLHIPEVCLKWELMDE

SEQ ID NO: 173137 - protein, 22 aa, Influenza A virus
LYNIRNLHIPEVCLKWELMDED

SEQ ID NO: 173138 - protein, 23 aa, Influenza A virus
LYNIRNLHIPEVCLKWELMDEDY

SEQ ID NO: 173139 - protein, 24 aa, Influenza A virus
LYNIRNLHIPEVCLKWELMDEDYQ

SEQ ID NO: 173140 - protein, 25 aa, Influenza A virus
LYNIRNLHIPEVCLKWELMDEDYQG

SEQ ID NO: 173141 - protein, 15 aa, Influenza A virus
MAFLEESHPGIFENS

SEQ ID NO: 173142 - protein, 13 aa, Influenza A virus
MALQLFIKDYRYT

SEQ ID NO: 173143 - protein, 14 aa, Influenza A virus
MALQLFIKDYRYTY

SEQ ID NO: 173144 - protein, 15 aa, Influenza A virus
MALQLFIKDYRYTYR

SEQ ID NO: 173145 - protein, 16 aa, Influenza A virus
MALQLFIKDYRYTYRC

SEQ ID NO: 173146 - protein, 17 aa, Influenza A virus
MALQLFIKDYRYTYRCH

SEQ ID NO: 173147 - protein, 18 aa, Influenza A virus
MALQLFIKDYRYTYRCHR

SEQ ID NO: 173148 - protein, 19 aa, Influenza A virus
MALQLFIKDYRYTYRCHRG

SEQ ID NO: 173149 - protein, 20 aa, Influenza A virus
MALQLFIKDYRYTYRCHRGD

SEQ ID NO: 173150 - protein, 21 aa, Influenza A virus
MALQLFIKDYRYTYRCHRGDT

SEQ ID NO: 173151 - protein, 22 aa, Influenza A virus
MALQLFIKDYRYTYRCHRGDTQ

SEQ ID NO: 173152 - protein, 23 aa, Influenza A virus
MALQLFIKDYRYTYRCHRGDTQI

SEQ ID NO: 173153 - protein, 24 aa, Influenza A virus
MALQLFIKDYRYTYRCHRGDTQIQ

SEQ ID NO: 173154 - protein, 25 aa, Influenza A virus
MALQLFIKDYRYTYRCHRGDTQIQT

SEQ ID NO: 173155 - protein, 20 aa, Influenza A virus
MDEDYQGRLCNPLNPFVSHK

SEQ ID NO: 173156 - protein, 21 aa, Influenza A virus
MDEDYQGRLCNPLNPFVSHKE

SEQ ID NO: 173157 - protein, 22 aa, Influenza A virus
MDEDYQGRLCNPLNPFVSHKEI

SEQ ID NO: 173158 - protein, 23 aa, Influenza A virus
MDEDYQGRLCNPLNPFVSHKEIE

SEQ ID NO: 173159 - protein, 24 aa, Influenza A virus
MDEDYQGRLCNPLNPFVSHKEIES

SEQ ID NO: 173160 - protein, 14 aa, Influenza A virus
MDVNPTLLFLKVPA

SEQ ID NO: 173161 - protein, 15 aa, Influenza A virus
MDVNPTLLFLKVPAQ

SEQ ID NO: 173162 - protein, 16 aa, Influenza A virus
MDVNPTLLFLKVPAQN

SEQ ID NO: 173163 - protein, 17 aa, Influenza A virus
MDVNPTLLFLKVPAQNA

SEQ ID NO: 173164 - protein, 18 aa, Influenza A virus
MDVNPTLLFLKVPAQNAI

SEQ ID NO: 173165 - protein, 19 aa, Influenza A virus
MDVNPTLLFLKVPAQNAIS

SEQ ID NO: 173166 - protein, 20 aa, Influenza A virus
MDVNPTLLFLKVPAQNAIST

SEQ ID NO: 173167 - protein, 21 aa, Influenza A virus
MDVNPTLLFLKVPAQNAISTT

SEQ ID NO: 173168 - protein, 22 aa, Influenza A virus
MDVNPTLLFLKVPAQNAISTTF

SEQ ID NO: 173169 - protein, 23 aa, Influenza A virus
MDVNPTLLFLKVPAQNAISTTFP

SEQ ID NO: 173170 - protein, 24 aa, Influenza A virus
MDVNPTLLFLKVPAQNAISTTFPY

SEQ ID NO: 173171 - protein, 25 aa, Influenza A virus
MDVNPTLLFLKVPAQNAISTTFPYT

SEQ ID NO: 173172 - protein, 14 aa, Influenza A virus
MELPSFGVSGINES

SEQ ID NO: 173173 - protein, 15 aa, Influenza A virus
MELPSFGVSGINESA

SEQ ID NO: 173174 - protein, 16 aa, Influenza A virus
MELPSFGVSGINESAD

SEQ ID NO: 173175 - protein, 17 aa, Influenza A virus
MELPSFGVSGINESADM

SEQ ID NO: 173176 - protein, 18 aa, Influenza A virus
MELPSFGVSGINESADMS

SEQ ID NO: 173177 - protein, 19 aa, Influenza A virus
MELPSFGVSGINESADMSI

SEQ ID NO: 173178 - protein, 20 aa, Influenza A virus
MELPSFGVSGINESADMSIG

SEQ ID NO: 173179 - protein, 21 aa, Influenza A virus
MELPSFGVSGINESADMSIGV

SEQ ID NO: 173180 - protein, 22 aa, Influenza A virus
MELPSFGVSGINESADMSIGVT

SEQ ID NO: 173181 - protein, 23 aa, Influenza A virus
MELPSFGVSGINESADMSIGVTV

SEQ ID NO: 173182 - protein, 24 aa, Influenza A virus
MELPSFGVSGINESADMSIGVTVI

SEQ ID NO: 173183 - protein, 25 aa, Influenza A virus
MELPSFGVSGINESADMSIGVTVIK

SEQ ID NO: 173184 - protein, 13 aa, Influenza A virus
MFNMLSTVLGVSI

SEQ ID NO: 173185 - protein, 14 aa, Influenza A virus
MFNMLSTVLGVSIL

SEQ ID NO: 173186 - protein, 15 aa, Influenza A virus
MFNMLSTVLGVSILN

SEQ ID NO: 173187 - protein, 16 aa, Influenza A virus
MFNMLSTVLGVSILNL

SEQ ID NO: 173188 - protein, 17 aa, Influenza A virus
MFNMLSTVLGVSILNLG

SEQ ID NO: 173189 - protein, 18 aa, Influenza A virus
MFNMLSTVLGVSILNLGQ

SEQ ID NO: 173190 - protein, 19 aa, Influenza A virus
MFNMLSTVLGVSILNLGQK

SEQ ID NO: 173191 - protein, 13 aa, Influenza A virus
MFSNKMARLGKGY

SEQ ID NO: 173192 - protein, 14 aa, Influenza A virus
MFSNKMARLGKGYM

SEQ ID NO: 173193 - protein, 15 aa, Influenza A virus
MFSNKMARLGKGYMF

SEQ ID NO: 173194 - protein, 16 aa, Influenza A virus
MFSNKMARLGKGYMFE

SEQ ID NO: 173195 - protein, 17 aa, Influenza A virus
MFSNKMARLGKGYMFES

SEQ ID NO: 173196 - protein, 18 aa, Influenza A virus
MFSNKMARLGKGYMFESK

SEQ ID NO: 173197 - protein, 13 aa, Influenza A virus
MGMFNMLSTVLGV

SEQ ID NO: 173198 - protein, 14 aa, Influenza A virus
MGMFNMLSTVLGVS

SEQ ID NO: 173199 - protein, 15 aa, Influenza A virus
MGMFNMLSTVLGVSI

SEQ ID NO: 173200 - protein, 16 aa, Influenza A virus
MGMFNMLSTVLGVSIL

SEQ ID NO: 173201 - protein, 17 aa, Influenza A virus
MGMFNMLSTVLGVSILN

SEQ ID NO: 173202 - protein, 18 aa, Influenza A virus
MGMFNMLSTVLGVSILNL

SEQ ID NO: 173203 - protein, 19 aa, Influenza A virus
MGMFNMLSTVLGVSILNLG

SEQ ID NO: 173204 - protein, 20 aa, Influenza A virus
MGMFNMLSTVLGVSILNLGQ

SEQ ID NO: 173205 - protein, 21 aa, Influenza A virus
MGMFNMLSTVLGVSILNLGQK

SEQ ID NO: 173206 - protein, 14 aa, Influenza A virus
MINNDLGPATAQMA

SEQ ID NO: 173207 - protein, 15 aa, Influenza A virus
MINNDLGPATAQMAL

SEQ ID NO: 173208 - protein, 16 aa, Influenza A virus
MINNDLGPATAQMALQ

SEQ ID NO: 173209 - protein, 17 aa, Influenza A virus
MINNDLGPATAQMALQL

SEQ ID NO: 173210 - protein, 18 aa, Influenza A virus
MINNDLGPATAQMALQLF

SEQ ID NO: 173211 - protein, 19 aa, Influenza A virus
MINNDLGPATAQMALQLFI

SEQ ID NO: 173212 - protein, 20 aa, Influenza A virus
MINNDLGPATAQMALQLFIK

SEQ ID NO: 173213 - protein, 21 aa, Influenza A virus
MINNDLGPATAQMALQLFIKD

SEQ ID NO: 173214 - protein, 22 aa, Influenza A virus
MINNDLGPATAQMALQLFIKDY

SEQ ID NO: 173215 - protein, 23 aa, Influenza A virus
MINNDLGPATAQMALQLFIKDYR

SEQ ID NO: 173216 - protein, 24 aa, Influenza A virus
MINNDLGPATAQMALQLFIKDYRY

SEQ ID NO: 173217 - protein, 25 aa, Influenza A virus
MINNDLGPATAQMALQLFIKDYRYT

SEQ ID NO: 173218 - protein, 13 aa, Influenza A virus
MKLRTQIPAEMLA

SEQ ID NO: 173219 - protein, 13 aa, Influenza A virus
MLSTVLGVSILNL

SEQ ID NO: 173220 - protein, 14 aa, Influenza A virus
MLSTVLGVSILNLG

SEQ ID NO: 173221 - protein, 15 aa, Influenza A virus
MLSTVLGVSILNLGQ

SEQ ID NO: 173222 - protein, 16 aa, Influenza A virus
MLSTVLGVSILNLGQK

SEQ ID NO: 173223 - protein, 13 aa, Influenza A virus
MMGMFNMLSTVLG

SEQ ID NO: 173224 - protein, 14 aa, Influenza A virus
MMGMFNMLSTVLGV

SEQ ID NO: 173225 - protein, 15 aa, Influenza A virus
MMGMFNMLSTVLGVS

SEQ ID NO: 173226 - protein, 16 aa, Influenza A virus
MMGMFNMLSTVLGVSI

SEQ ID NO: 173227 - protein, 17 aa, Influenza A virus
MMGMFNMLSTVLGVSIL

SEQ ID NO: 173228 - protein, 18 aa, Influenza A virus
MMGMFNMLSTVLGVSILN

SEQ ID NO: 173229 - protein, 19 aa, Influenza A virus
MMGMFNMLSTVLGVSILNL

SEQ ID NO: 173230 - protein, 20 aa, Influenza A virus
MMGMFNMLSTVLGVSILNLG

SEQ ID NO: 173231 - protein, 21 aa, Influenza A virus
MMGMFNMLSTVLGVSILNLGQ

SEQ ID NO: 173232 - protein, 22 aa, Influenza A virus
MMGMFNMLSTVLGVSILNLGQK

SEQ ID NO: 173233 - protein, 13 aa, Influenza A virus
MMMGMFNMLSTVL

SEQ ID NO: 173234 - protein, 14 aa, Influenza A virus
MMMGMFNMLSTVLG

SEQ ID NO: 173235 - protein, 15 aa, Influenza A virus
MMMGMFNMLSTVLGV

SEQ ID NO: 173236 - protein, 16 aa, Influenza A virus
MMMGMFNMLSTVLGVS

SEQ ID NO: 173237 - protein, 17 aa, Influenza A virus
MMMGMFNMLSTVLGVSI

SEQ ID NO: 173238 - protein, 18 aa, Influenza A virus
MMMGMFNMLSTVLGVSIL

SEQ ID NO: 173239 - protein, 19 aa, Influenza A virus
MMMGMFNMLSTVLGVSILN

SEQ ID NO: 173240 - protein, 20 aa, Influenza A virus
MMMGMFNMLSTVLGVSILNL

SEQ ID NO: 173241 - protein, 21 aa, Influenza A virus
MMMGMFNMLSTVLGVSILNLG

SEQ ID NO: 173242 - protein, 22 aa, Influenza A virus
MMMGMFNMLSTVLGVSILNLGQ

SEQ ID NO: 173243 - protein, 23 aa, Influenza A virus
MMMGMFNMLSTVLGVSILNLGQK

SEQ ID NO: 173244 - protein, 20 aa, Influenza A virus
MMTNSQDTELSFTITGDNTK

SEQ ID NO: 173245 - protein, 21 aa, Influenza A virus
MMTNSQDTELSFTITGDNTKW

SEQ ID NO: 173246 - protein, 22 aa, Influenza A virus
MMTNSQDTELSFTITGDNTKWN

SEQ ID NO: 173247 - protein, 23 aa, Influenza A virus
MMTNSQDTELSFTITGDNTKWNE

SEQ ID NO: 173248 - protein, 24 aa, Influenza A virus
MMTNSQDTELSFTITGDNTKWNEN

SEQ ID NO: 173249 - protein, 25 aa, Influenza A virus
MMTNSQDTELSFTITGDNTKWNENQ

SEQ ID NO: 173250 - protein, 13 aa, Influenza A virus
MQIRGFVYFVETL

SEQ ID NO: 173251 - protein, 14 aa, Influenza A virus
MQIRGFVYFVETLA

SEQ ID NO: 173252 - protein, 15 aa, Influenza A virus
MQIRGFVYFVETLAR

SEQ ID NO: 173253 - protein, 16 aa, Influenza A virus
MQIRGFVYFVETLARS

SEQ ID NO: 173254 - protein, 17 aa, Influenza A virus
MQIRGFVYFVETLARSI

SEQ ID NO: 173255 - protein, 18 aa, Influenza A virus
MQIRGFVYFVETLARSIC

SEQ ID NO: 173256 - protein, 19 aa, Influenza A virus
MQIRGFVYFVETLARSICE

SEQ ID NO: 173257 - protein, 20 aa, Influenza A virus
MQIRGFVYFVETLARSICEK

SEQ ID NO: 173258 - protein, 21 aa, Influenza A virus
MQIRGFVYFVETLARSICEKL

SEQ ID NO: 173259 - protein, 22 aa, Influenza A virus
MQIRGFVYFVETLARSICEKLE

SEQ ID NO: 173260 - protein, 23 aa, Influenza A virus
MQIRGFVYFVETLARSICEKLEQ

SEQ ID NO: 173261 - protein, 24 aa, Influenza A virus
MQIRGFVYFVETLARSICEKLEQS

SEQ ID NO: 173262 - protein, 25 aa, Influenza A virus
MQIRGFVYFVETLARSICEKLEQSG

SEQ ID NO: 173263 - protein, 13 aa, Influenza A virus
MSIGVTVIKNNMI

SEQ ID NO: 173264 - protein, 14 aa, Influenza A virus
MSIGVTVIKNNMIN

SEQ ID NO: 173265 - protein, 15 aa, Influenza A virus
MSIGVTVIKNNMINN

SEQ ID NO: 173266 - protein, 16 aa, Influenza A virus
MSIGVTVIKNNMINND

SEQ ID NO: 173267 - protein, 17 aa, Influenza A virus
MSIGVTVIKNNMINNDL

SEQ ID NO: 173268 - protein, 18 aa, Influenza A virus
MSIGVTVIKNNMINNDLG

SEQ ID NO: 173269 - protein, 19 aa, Influenza A virus
MSIGVTVIKNNMINNDLGP

SEQ ID NO: 173270 - protein, 20 aa, Influenza A virus
MSIGVTVIKNNMINNDLGPA

SEQ ID NO: 173271 - protein, 21 aa, Influenza A virus
MSIGVTVIKNNMINNDLGPAT

SEQ ID NO: 173272 - protein, 22 aa, Influenza A virus
MSIGVTVIKNNMINNDLGPATA

SEQ ID NO: 173273 - protein, 23 aa, Influenza A virus
MSIGVTVIKNNMINNDLGPATAQ

SEQ ID NO: 173274 - protein, 24 aa, Influenza A virus
MSIGVTVIKNNMINNDLGPATAQM

SEQ ID NO: 173275 - protein, 25 aa, Influenza A virus
MSIGVTVIKNNMINNDLGPATAQMA

SEQ ID NO: 173276 - protein, 15 aa, Influenza A virus
MSKKKSYINRTGTFE

SEQ ID NO: 173277 - protein, 16 aa, Influenza A virus
MSKKKSYINRTGTFEF

SEQ ID NO: 173278 - protein, 17 aa, Influenza A virus
MSKKKSYINRTGTFEFT

SEQ ID NO: 173279 - protein, 19 aa, Influenza A virus
MSKKKSYINRTGTFEFTSF

SEQ ID NO: 173280 - protein, 20 aa, Influenza A virus
MSKKKSYINRTGTFEFTSFF

SEQ ID NO: 173281 - protein, 21 aa, Influenza A virus
MSKKKSYINRTGTFEFTSFFY

SEQ ID NO: 173282 - protein, 22 aa, Influenza A virus
MSKKKSYINRTGTFEFTSFFYR

SEQ ID NO: 173283 - protein, 23 aa, Influenza A virus
MSKKKSYINRTGTFEFTSFFYRY

SEQ ID NO: 173284 - protein, 24 aa, Influenza A virus
MSKKKSYINRTGTFEFTSFFYRYG

SEQ ID NO: 173285 - protein, 25 aa, Influenza A virus
MSKKKSYINRTGTFEFTSFFYRYGF

SEQ ID NO: 173286 - protein, 15 aa, Influenza A virus
MTKDAERGKLKRRAI

SEQ ID NO: 173287 - protein, 16 aa, Influenza A virus
MTKDAERGKLKRRAIA

SEQ ID NO: 173288 - protein, 17 aa, Influenza A virus
MTKDAERGKLKRRAIAT

SEQ ID NO: 173289 - protein, 19 aa, Influenza A virus
MTKDAERGKLKRRAIATPG

SEQ ID NO: 173290 - protein, 20 aa, Influenza A virus
MTKDAERGKLKRRAIATPGM

SEQ ID NO: 173291 - protein, 21 aa, Influenza A virus
MTKDAERGKLKRRAIATPGMQ

SEQ ID NO: 173292 - protein, 22 aa, Influenza A virus
MTKDAERGKLKRRAIATPGMQI

SEQ ID NO: 173293 - protein, 23 aa, Influenza A virus
MTKDAERGKLKRRAIATPGMQIR

SEQ ID NO: 173294 - protein, 24 aa, Influenza A virus
MTKDAERGKLKRRAIATPGMQIRG

SEQ ID NO: 173295 - protein, 25 aa, Influenza A virus
MTKDAERGKLKRRAIATPGMQIRGF

SEQ ID NO: 173296 - protein, 20 aa, Influenza A virus
MTNSQDTELSFTITGDNTKW

SEQ ID NO: 173297 - protein, 21 aa, Influenza A virus
MTNSQDTELSFTITGDNTKWN

SEQ ID NO: 173298 - protein, 22 aa, Influenza A virus
MTNSQDTELSFTITGDNTKWNE

SEQ ID NO: 173299 - protein, 23 aa, Influenza A virus
MTNSQDTELSFTITGDNTKWNEN

SEQ ID NO: 173300 - protein, 24 aa, Influenza A virus
MTNSQDTELSFTITGDNTKWNENQ

SEQ ID NO: 173301 - protein, 25 aa, Influenza A virus
MTNSQDTELSFTITGDNTKWNENQN

SEQ ID NO: 173302 - protein, 13 aa, Influenza A virus
MVEAMVSRARIDA

SEQ ID NO: 173303 - protein, 14 aa, Influenza A virus
MVEAMVSRARIDAR

SEQ ID NO: 173304 - protein, 15 aa, Influenza A virus
MVEAMVSRARIDARI

SEQ ID NO: 173305 - protein, 16 aa, Influenza A virus
MVEAMVSRARIDARID

SEQ ID NO: 173306 - protein, 17 aa, Influenza A virus
MVEAMVSRARIDARIDF

SEQ ID NO: 173307 - protein, 18 aa, Influenza A virus
MVEAMVSRARIDARIDFE

SEQ ID NO: 173308 - protein, 19 aa, Influenza A virus
MVEAMVSRARIDARIDFES

SEQ ID NO: 173309 - protein, 20 aa, Influenza A virus
MVEAMVSRARIDARIDFESG

SEQ ID NO: 173310 - protein, 21 aa, Influenza A virus
MVEAMVSRARIDARIDFESGR

SEQ ID NO: 173311 - protein, 22 aa, Influenza A virus
MVEAMVSRARIDARIDFESGRI

SEQ ID NO: 173312 - protein, 23 aa, Influenza A virus
MVEAMVSRARIDARIDFESGRIK

SEQ ID NO: 173313 - protein, 24 aa, Influenza A virus
MVEAMVSRARIDARIDFESGRIKK

SEQ ID NO: 173314 - protein, 25 aa, Influenza A virus
MVEAMVSRARIDARIDFESGRIKKE

SEQ ID NO: 173315 - protein, 14 aa, Influenza A virus
MVSRARIDARIDFE

SEQ ID NO: 173316 - protein, 15 aa, Influenza A virus
MVSRARIDARIDFES

SEQ ID NO: 173317 - protein, 16 aa, Influenza A virus
MVSRARIDARIDFESG

SEQ ID NO: 173318 - protein, 17 aa, Influenza A virus
MVSRARIDARIDFESGR

SEQ ID NO: 173319 - protein, 19 aa, Influenza A virus
MVSRARIDARIDFESGRIK

SEQ ID NO: 173320 - protein, 20 aa, Influenza A virus
MVSRARIDARIDFESGRIKK

SEQ ID NO: 173321 - protein, 21 aa, Influenza A virus
MVSRARIDARIDFESGRIKKE

SEQ ID NO: 173322 - protein, 22 aa, Influenza A virus
MVSRARIDARIDFESGRIKKEE

SEQ ID NO: 173323 - protein, 23 aa, Influenza A virus
MVSRARIDARIDFESGRIKKEEF

SEQ ID NO: 173324 - protein, 16 aa, Influenza A virus
NAISTTFPYTGDPPYS

SEQ ID NO: 173325 - protein, 17 aa, Influenza A virus
NAISTTFPYTGDPPYSH

SEQ ID NO: 173326 - protein, 19 aa, Influenza A virus
NAISTTFPYTGDPPYSHGT

SEQ ID NO: 173327 - protein, 20 aa, Influenza A virus
NAISTTFPYTGDPPYSHGTG

SEQ ID NO: 173328 - protein, 22 aa, Influenza A virus
NAISTTFPYTGDPPYSHGTGTG

SEQ ID NO: 173329 - protein, 23 aa, Influenza A virus
NAISTTFPYTGDPPYSHGTGTGY

SEQ ID NO: 173330 - protein, 24 aa, Influenza A virus
NAISTTFPYTGDPPYSHGTGTGYT

SEQ ID NO: 173331 - protein, 25 aa, Influenza A virus
NAISTTFPYTGDPPYSHGTGTGYTM

SEQ ID NO: 173332 - protein, 16 aa, Influenza A virus
NAPNHEGIQAGVDRFY

SEQ ID NO: 173333 - protein, 17 aa, Influenza A virus
NAPNHEGIQAGVDRFYR

SEQ ID NO: 173334 - protein, 18 aa, Influenza A virus
NAPNHEGIQAGVDRFYRT

SEQ ID NO: 173335 - protein, 19 aa, Influenza A virus
NAPNHEGIQAGVDRFYRTC

SEQ ID NO: 173336 - protein, 20 aa, Influenza A virus
NAPNHEGIQAGVDRFYRTCK

SEQ ID NO: 173337 - protein, 21 aa, Influenza A virus
NAPNHEGIQAGVDRFYRTCKL

SEQ ID NO: 173338 - protein, 13 aa, Influenza A virus
NDLGPATAQMALQ

SEQ ID NO: 173339 - protein, 14 aa, Influenza A virus
NDLGPATAQMALQL

SEQ ID NO: 173340 - protein, 15 aa, Influenza A virus
NDLGPATAQMALQLF

SEQ ID NO: 173341 - protein, 16 aa, Influenza A virus
NDLGPATAQMALQLFI

SEQ ID NO: 173342 - protein, 17 aa, Influenza A virus
NDLGPATAQMALQLFIK

SEQ ID NO: 173343 - protein, 18 aa, Influenza A virus
NDLGPATAQMALQLFIKD

SEQ ID NO: 173344 - protein, 19 aa, Influenza A virus
NDLGPATAQMALQLFIKDY

SEQ ID NO: 173345 - protein, 20 aa, Influenza A virus
NDLGPATAQMALQLFIKDYR

SEQ ID NO: 173346 - protein, 21 aa, Influenza A virus
NDLGPATAQMALQLFIKDYRY

SEQ ID NO: 173347 - protein, 22 aa, Influenza A virus
NDLGPATAQMALQLFIKDYRYT

SEQ ID NO: 173348 - protein, 23 aa, Influenza A virus
NDLGPATAQMALQLFIKDYRYTY

SEQ ID NO: 173349 - protein, 24 aa, Influenza A virus
NDLGPATAQMALQLFIKDYRYTYR

SEQ ID NO: 173350 - protein, 25 aa, Influenza A virus
NDLGPATAQMALQLFIKDYRYTYRC

SEQ ID NO: 173351 - protein, 14 aa, Influenza A virus
NEKKAKLANVVRKM

SEQ ID NO: 173352 - protein, 15 aa, Influenza A virus
NEKKAKLANVVRKMM

SEQ ID NO: 173353 - protein, 16 aa, Influenza A virus
NEKKAKLANVVRKMMT

SEQ ID NO: 173354 - protein, 17 aa, Influenza A virus
NEKKAKLANVVRKMMTN

SEQ ID NO: 173355 - protein, 18 aa, Influenza A virus
NEKKAKLANVVRKMMTNS

SEQ ID NO: 173356 - protein, 19 aa, Influenza A virus
NEKKAKLANVVRKMMTNSQ

SEQ ID NO: 173357 - protein, 20 aa, Influenza A virus
NEKKAKLANVVRKMMTNSQD

SEQ ID NO: 173358 - protein, 21 aa, Influenza A virus
NEKKAKLANVVRKMMTNSQDT

SEQ ID NO: 173359 - protein, 22 aa, Influenza A virus
NEKKAKLANVVRKMMTNSQDTE

SEQ ID NO: 173360 - protein, 23 aa, Influenza A virus
NEKKAKLANVVRKMMTNSQDTEL

SEQ ID NO: 173361 - protein, 24 aa, Influenza A virus
NEKKAKLANVVRKMMTNSQDTELS

SEQ ID NO: 173362 - protein, 25 aa, Influenza A virus
NEKKAKLANVVRKMMTNSQDTELSF

SEQ ID NO: 173363 - protein, 14 aa, Influenza A virus
NENQNPRMFLAMIT

SEQ ID NO: 173364 - protein, 15 aa, Influenza A virus
NENQNPRMFLAMITY

SEQ ID NO: 173365 - protein, 16 aa, Influenza A virus
NENQNPRMFLAMITYI

SEQ ID NO: 173366 - protein, 17 aa, Influenza A virus
NENQNPRMFLAMITYIT

SEQ ID NO: 173367 - protein, 19 aa, Influenza A virus
NEPSGYAQTDCVLEAMAFL

SEQ ID NO: 173368 - protein, 20 aa, Influenza A virus
NEPSGYAQTDCVLEAMAFLE

SEQ ID NO: 173369 - protein, 21 aa, Influenza A virus
NEPSGYAQTDCVLEAMAFLEE

SEQ ID NO: 173370 - protein, 22 aa, Influenza A virus
NEPSGYAQTDCVLEAMAFLEES

SEQ ID NO: 173371 - protein, 23 aa, Influenza A virus
NEPSGYAQTDCVLEAMAFLEESH

SEQ ID NO: 173372 - protein, 24 aa, Influenza A virus
NEPSGYAQTDCVLEAMAFLEESHP

SEQ ID NO: 173373 - protein, 25 aa, Influenza A virus
NEPSGYAQTDCVLEAMAFLEESHPG

SEQ ID NO: 173374 - protein, 14 aa, Influenza A virus
NESADMSIGVTVIK

SEQ ID NO: 173375 - protein, 15 aa, Influenza A virus
NESADMSIGVTVIKN

SEQ ID NO: 173376 - protein, 16 aa, Influenza A virus
NESADMSIGVTVIKNN

SEQ ID NO: 173377 - protein, 17 aa, Influenza A virus
NESADMSIGVTVIKNNM

SEQ ID NO: 173378 - protein, 18 aa, Influenza A virus
NESADMSIGVTVIKNNMI

SEQ ID NO: 173379 - protein, 19 aa, Influenza A virus
NESADMSIGVTVIKNNMIN

SEQ ID NO: 173380 - protein, 20 aa, Influenza A virus
NESADMSIGVTVIKNNMINN

SEQ ID NO: 173381 - protein, 21 aa, Influenza A virus
NESADMSIGVTVIKNNMINND

SEQ ID NO: 173382 - protein, 22 aa, Influenza A virus
NESADMSIGVTVIKNNMINNDL

SEQ ID NO: 173383 - protein, 23 aa, Influenza A virus
NESADMSIGVTVIKNNMINNDLG

SEQ ID NO: 173384 - protein, 24 aa, Influenza A virus
NESADMSIGVTVIKNNMINNDLGP

SEQ ID NO: 173385 - protein, 25 aa, Influenza A virus
NESADMSIGVTVIKNNMINNDLGPA

SEQ ID NO: 173386 - protein, 13 aa, Influenza A virus
NFSMELPSFGVSG

SEQ ID NO: 173387 - protein, 14 aa, Influenza A virus
NFSMELPSFGVSGI

SEQ ID NO: 173388 - protein, 15 aa, Influenza A virus
NFSMELPSFGVSGIN

SEQ ID NO: 173389 - protein, 16 aa, Influenza A virus
NFSMELPSFGVSGINE

SEQ ID NO: 173390 - protein, 17 aa, Influenza A virus
NFSMELPSFGVSGINES

SEQ ID NO: 173391 - protein, 18 aa, Influenza A virus
NFSMELPSFGVSGINESA

SEQ ID NO: 173392 - protein, 19 aa, Influenza A virus
NFSMELPSFGVSGINESAD

SEQ ID NO: 173393 - protein, 20 aa, Influenza A virus
NFSMELPSFGVSGINESADM

SEQ ID NO: 173394 - protein, 21 aa, Influenza A virus
NFSMELPSFGVSGINESADMS

SEQ ID NO: 173395 - protein, 22 aa, Influenza A virus
NFSMELPSFGVSGINESADMSI

SEQ ID NO: 173396 - protein, 23 aa, Influenza A virus
NFSMELPSFGVSGINESADMSIG

SEQ ID NO: 173397 - protein, 24 aa, Influenza A virus
NFSMELPSFGVSGINESADMSIGV

SEQ ID NO: 173398 - protein, 25 aa, Influenza A virus
NFSMELPSFGVSGINESADMSIGVT

SEQ ID NO: 173399 - protein, 14 aa, Influenza A virus
NHEGIQAGVDRFYR

SEQ ID NO: 173400 - protein, 15 aa, Influenza A virus
NHEGIQAGVDRFYRT

SEQ ID NO: 173401 - protein, 16 aa, Influenza A virus
NHEGIQAGVDRFYRTC

SEQ ID NO: 173402 - protein, 17 aa, Influenza A virus
NHEGIQAGVDRFYRTCK

SEQ ID NO: 173403 - protein, 18 aa, Influenza A virus
NHEGIQAGVDRFYRTCKL

SEQ ID NO: 173404 - protein, 13 aa, Influenza A virus
NIRNLHIPEVCLK

SEQ ID NO: 173405 - protein, 14 aa, Influenza A virus
NIRNLHIPEVCLKW

SEQ ID NO: 173406 - protein, 15 aa, Influenza A virus
NIRNLHIPEVCLKWE

SEQ ID NO: 173407 - protein, 16 aa, Influenza A virus
NIRNLHIPEVCLKWEL

SEQ ID NO: 173408 - protein, 17 aa, Influenza A virus
NIRNLHIPEVCLKWELM

SEQ ID NO: 173409 - protein, 18 aa, Influenza A virus
NIRNLHIPEVCLKWELMD

SEQ ID NO: 173410 - protein, 19 aa, Influenza A virus
NIRNLHIPEVCLKWELMDE

SEQ ID NO: 173411 - protein, 20 aa, Influenza A virus
NIRNLHIPEVCLKWELMDED

SEQ ID NO: 173412 - protein, 21 aa, Influenza A virus
NIRNLHIPEVCLKWELMDEDY

SEQ ID NO: 173413 - protein, 22 aa, Influenza A virus
NIRNLHIPEVCLKWELMDEDYQ

SEQ ID NO: 173414 - protein, 23 aa, Influenza A virus
NIRNLHIPEVCLKWELMDEDYQG

SEQ ID NO: 173415 - protein, 24 aa, Influenza A virus
NIRNLHIPEVCLKWELMDEDYQGR

SEQ ID NO: 173416 - protein, 25 aa, Influenza A virus
NIRNLHIPEVCLKWELMDEDYQGRL

SEQ ID NO: 173417 - protein, 14 aa, Influenza A virus
NKMARLGKGYMFES

SEQ ID NO: 173418 - protein, 15 aa, Influenza A virus
NKMARLGKGYMFESK

SEQ ID NO: 173419 - protein, 13 aa, Influenza A virus
NLFEKFFPSSSYR

SEQ ID NO: 173420 - protein, 14 aa, Influenza A virus
NLFEKFFPSSSYRR

SEQ ID NO: 173421 - protein, 15 aa, Influenza A virus
NLFEKFFPSSSYRRP

SEQ ID NO: 173422 - protein, 16 aa, Influenza A virus
NLFEKFFPSSSYRRPV

SEQ ID NO: 173423 - protein, 17 aa, Influenza A virus
NLFEKFFPSSSYRRPVG

SEQ ID NO: 173424 - protein, 18 aa, Influenza A virus
NLFEKFFPSSSYRRPVGI

SEQ ID NO: 173425 - protein, 19 aa, Influenza A virus
NLFEKFFPSSSYRRPVGIS

SEQ ID NO: 173426 - protein, 20 aa, Influenza A virus
NLFEKFFPSSSYRRPVGISS

SEQ ID NO: 173427 - protein, 21 aa, Influenza A virus
NLFEKFFPSSSYRRPVGISSM

SEQ ID NO: 173428 - protein, 22 aa, Influenza A virus
NLFEKFFPSSSYRRPVGISSMV

SEQ ID NO: 173429 - protein, 23 aa, Influenza A virus
NLFEKFFPSSSYRRPVGISSMVE

SEQ ID NO: 173430 - protein, 24 aa, Influenza A virus
NLFEKFFPSSSYRRPVGISSMVEA

SEQ ID NO: 173431 - protein, 25 aa, Influenza A virus
NLFEKFFPSSSYRRPVGISSMVEAM

SEQ ID NO: 173432 - protein, 16 aa, Influenza A virus
NLHIPEVCLKWELMDE

SEQ ID NO: 173433 - protein, 17 aa, Influenza A virus
NLHIPEVCLKWELMDED

SEQ ID NO: 173434 - protein, 18 aa, Influenza A virus
NLHIPEVCLKWELMDEDY

SEQ ID NO: 173435 - protein, 19 aa, Influenza A virus
NLHIPEVCLKWELMDEDYQ

SEQ ID NO: 173436 - protein, 20 aa, Influenza A virus
NLHIPEVCLKWELMDEDYQG

SEQ ID NO: 173437 - protein, 21 aa, Influenza A virus
NLHIPEVCLKWELMDEDYQGR

SEQ ID NO: 173438 - protein, 22 aa, Influenza A virus
NLHIPEVCLKWELMDEDYQGRL

SEQ ID NO: 173439 - protein, 23 aa, Influenza A virus
NLHIPEVCLKWELMDEDYQGRLC

SEQ ID NO: 173440 - protein, 24 aa, Influenza A virus
NLHIPEVCLKWELMDEDYQGRLCN

SEQ ID NO: 173441 - protein, 25 aa, Influenza A virus
NLHIPEVCLKWELMDEDYQGRLCNP

SEQ ID NO: 173442 - protein, 13 aa, Influenza A virus
NLYNIRNLHIPEV

SEQ ID NO: 173443 - protein, 14 aa, Influenza A virus
NLYNIRNLHIPEVC

SEQ ID NO: 173444 - protein, 15 aa, Influenza A virus
NLYNIRNLHIPEVCL

SEQ ID NO: 173445 - protein, 16 aa, Influenza A virus
NLYNIRNLHIPEVCLK

SEQ ID NO: 173446 - protein, 17 aa, Influenza A virus
NLYNIRNLHIPEVCLKW

SEQ ID NO: 173447 - protein, 18 aa, Influenza A virus
NLYNIRNLHIPEVCLKWE

SEQ ID NO: 173448 - protein, 19 aa, Influenza A virus
NLYNIRNLHIPEVCLKWEL

SEQ ID NO: 173449 - protein, 20 aa, Influenza A virus
NLYNIRNLHIPEVCLKWELM

SEQ ID NO: 173450 - protein, 21 aa, Influenza A virus
NLYNIRNLHIPEVCLKWELMD

SEQ ID NO: 173451 - protein, 22 aa, Influenza A virus
NLYNIRNLHIPEVCLKWELMDE

SEQ ID NO: 173452 - protein, 23 aa, Influenza A virus
NLYNIRNLHIPEVCLKWELMDED

SEQ ID NO: 173453 - protein, 24 aa, Influenza A virus
NLYNIRNLHIPEVCLKWELMDEDY

SEQ ID NO: 173454 - protein, 25 aa, Influenza A virus
NLYNIRNLHIPEVCLKWELMDEDYQ

SEQ ID NO: 173455 - protein, 15 aa, Influenza A virus
NMINNDLGPATAQMA

SEQ ID NO: 173456 - protein, 16 aa, Influenza A virus
NMINNDLGPATAQMAL

SEQ ID NO: 173457 - protein, 17 aa, Influenza A virus
NMINNDLGPATAQMALQ

SEQ ID NO: 173458 - protein, 18 aa, Influenza A virus
NMINNDLGPATAQMALQL

SEQ ID NO: 173459 - protein, 19 aa, Influenza A virus
NMINNDLGPATAQMALQLF

SEQ ID NO: 173460 - protein, 20 aa, Influenza A virus
NMINNDLGPATAQMALQLFI

SEQ ID NO: 173461 - protein, 21 aa, Influenza A virus
NMINNDLGPATAQMALQLFIK

SEQ ID NO: 173462 - protein, 22 aa, Influenza A virus
NMINNDLGPATAQMALQLFIKD

SEQ ID NO: 173463 - protein, 23 aa, Influenza A virus
NMINNDLGPATAQMALQLFIKDY

SEQ ID NO: 173464 - protein, 24 aa, Influenza A virus
NMINNDLGPATAQMALQLFIKDYR

SEQ ID NO: 173465 - protein, 25 aa, Influenza A virus
NMINNDLGPATAQMALQLFIKDYRY

SEQ ID NO: 173466 - protein, 13 aa, Influenza A virus
NMLSTVLGVSILN

SEQ ID NO: 173467 - protein, 14 aa, Influenza A virus
NMLSTVLGVSILNL

SEQ ID NO: 173468 - protein, 15 aa, Influenza A virus
NMLSTVLGVSILNLG

SEQ ID NO: 173469 - protein, 16 aa, Influenza A virus
NMLSTVLGVSILNLGQ

SEQ ID NO: 173470 - protein, 17 aa, Influenza A virus
NMLSTVLGVSILNLGQK

SEQ ID NO: 173471 - protein, 15 aa, Influenza A virus
NMSKKKSYINRTGTF

SEQ ID NO: 173472 - protein, 17 aa, Influenza A virus
NMSKKKSYINRTGTFEF

SEQ ID NO: 173473 - protein, 19 aa, Influenza A virus
NMSKKKSYINRTGTFEFTS

SEQ ID NO: 173474 - protein, 20 aa, Influenza A virus
NMSKKKSYINRTGTFEFTSF

SEQ ID NO: 173475 - protein, 21 aa, Influenza A virus
NMSKKKSYINRTGTFEFTSFF

SEQ ID NO: 173476 - protein, 22 aa, Influenza A virus
NMSKKKSYINRTGTFEFTSFFY

SEQ ID NO: 173477 - protein, 23 aa, Influenza A virus
NMSKKKSYINRTGTFEFTSFFYR

SEQ ID NO: 173478 - protein, 24 aa, Influenza A virus
NMSKKKSYINRTGTFEFTSFFYRY

SEQ ID NO: 173479 - protein, 25 aa, Influenza A virus
NMSKKKSYINRTGTFEFTSFFYRYG

SEQ ID NO: 173480 - protein, 13 aa, Influenza A virus
NNDLGPATAQMAL

SEQ ID NO: 173481 - protein, 14 aa, Influenza A virus
NNDLGPATAQMALQ

SEQ ID NO: 173482 - protein, 15 aa, Influenza A virus
NNDLGPATAQMALQL

SEQ ID NO: 173483 - protein, 16 aa, Influenza A virus
NNDLGPATAQMALQLF

SEQ ID NO: 173484 - protein, 17 aa, Influenza A virus
NNDLGPATAQMALQLFI

SEQ ID NO: 173485 - protein, 18 aa, Influenza A virus
NNDLGPATAQMALQLFIK

SEQ ID NO: 173486 - protein, 19 aa, Influenza A virus
NNDLGPATAQMALQLFIKD

SEQ ID NO: 173487 - protein, 20 aa, Influenza A virus
NNDLGPATAQMALQLFIKDY

SEQ ID NO: 173488 - protein, 21 aa, Influenza A virus
NNDLGPATAQMALQLFIKDYR

SEQ ID NO: 173489 - protein, 22 aa, Influenza A virus
NNDLGPATAQMALQLFIKDYRY

SEQ ID NO: 173490 - protein, 23 aa, Influenza A virus
NNDLGPATAQMALQLFIKDYRYT

SEQ ID NO: 173491 - protein, 24 aa, Influenza A virus
NNDLGPATAQMALQLFIKDYRYTY

SEQ ID NO: 173492 - protein, 25 aa, Influenza A virus
NNDLGPATAQMALQLFIKDYRYTYR

SEQ ID NO: 173493 - protein, 15 aa, Influenza A virus
NNMINNDLGPATAQM

SEQ ID NO: 173494 - protein, 16 aa, Influenza A virus
NNMINNDLGPATAQMA

SEQ ID NO: 173495 - protein, 17 aa, Influenza A virus
NNMINNDLGPATAQMAL

SEQ ID NO: 173496 - protein, 18 aa, Influenza A virus
NNMINNDLGPATAQMALQ

SEQ ID NO: 173497 - protein, 19 aa, Influenza A virus
NNMINNDLGPATAQMALQL

SEQ ID NO: 173498 - protein, 20 aa, Influenza A virus
NNMINNDLGPATAQMALQLF

SEQ ID NO: 173499 - protein, 21 aa, Influenza A virus
NNMINNDLGPATAQMALQLFI

SEQ ID NO: 173500 - protein, 22 aa, Influenza A virus
NNMINNDLGPATAQMALQLFIK

SEQ ID NO: 173501 - protein, 23 aa, Influenza A virus
NNMINNDLGPATAQMALQLFIKD

SEQ ID NO: 173502 - protein, 24 aa, Influenza A virus
NNMINNDLGPATAQMALQLFIKDY

SEQ ID NO: 173503 - protein, 25 aa, Influenza A virus
NNMINNDLGPATAQMALQLFIKDYR

SEQ ID NO: 173504 - protein, 15 aa, Influenza A virus
NPFVSHKEIESVNNA

SEQ ID NO: 173505 - protein, 15 aa, Influenza A virus
NPLNPFVSHKEIESV

SEQ ID NO: 173506 - protein, 16 aa, Influenza A virus
NPLNPFVSHKEIESVN

SEQ ID NO: 173507 - protein, 17 aa, Influenza A virus
NPLNPFVSHKEIESVNN

SEQ ID NO: 173508 - protein, 19 aa, Influenza A virus
NPLNPFVSHKEIESVNNAV

SEQ ID NO: 173509 - protein, 13 aa, Influenza A virus
NPRMFLAMITYIT

SEQ ID NO: 173510 - protein, 13 aa, Influenza A virus
NPTLLFLKVPAQN

SEQ ID NO: 173511 - protein, 14 aa, Influenza A virus
NPTLLFLKVPAQNA

SEQ ID NO: 173512 - protein, 15 aa, Influenza A virus
NPTLLFLKVPAQNAI

SEQ ID NO: 173513 - protein, 16 aa, Influenza A virus
NPTLLFLKVPAQNAIS

SEQ ID NO: 173514 - protein, 17 aa, Influenza A virus
NPTLLFLKVPAQNAIST

SEQ ID NO: 173515 - protein, 18 aa, Influenza A virus
NPTLLFLKVPAQNAISTT

SEQ ID NO: 173516 - protein, 19 aa, Influenza A virus
NPTLLFLKVPAQNAISTTF

SEQ ID NO: 173517 - protein, 20 aa, Influenza A virus
NPTLLFLKVPAQNAISTTFP

SEQ ID NO: 173518 - protein, 21 aa, Influenza A virus
NPTLLFLKVPAQNAISTTFPY

SEQ ID NO: 173519 - protein, 22 aa, Influenza A virus
NPTLLFLKVPAQNAISTTFPYT

SEQ ID NO: 173520 - protein, 23 aa, Influenza A virus
NPTLLFLKVPAQNAISTTFPYTG

SEQ ID NO: 173521 - protein, 24 aa, Influenza A virus
NPTLLFLKVPAQNAISTTFPYTGD

SEQ ID NO: 173522 - protein, 25 aa, Influenza A virus
NPTLLFLKVPAQNAISTTFPYTGDP

SEQ ID NO: 173523 - protein, 13 aa, Influenza A virus
NQNPRMFLAMITY

SEQ ID NO: 173524 - protein, 14 aa, Influenza A virus
NQNPRMFLAMITYI

SEQ ID NO: 173525 - protein, 15 aa, Influenza A virus
NQNPRMFLAMITYIT

SEQ ID NO: 173526 - protein, 13 aa, Influenza A virus
NQPAATALANTIE

SEQ ID NO: 173527 - protein, 14 aa, Influenza A virus
NQPAATALANTIEV

SEQ ID NO: 173528 - protein, 15 aa, Influenza A virus
NQPAATALANTIEVF

SEQ ID NO: 173529 - protein, 16 aa, Influenza A virus
NQPAATALANTIEVFR

SEQ ID NO: 173530 - protein, 17 aa, Influenza A virus
NQPAATALANTIEVFRS

SEQ ID NO: 173531 - protein, 18 aa, Influenza A virus
NQPAATALANTIEVFRSN

SEQ ID NO: 173532 - protein, 19 aa, Influenza A virus
NQPAATALANTIEVFRSNG

SEQ ID NO: 173533 - protein, 13 aa, Influenza A virus
NRNQPAATALANT

SEQ ID NO: 173534 - protein, 14 aa, Influenza A virus
NRNQPAATALANTI

SEQ ID NO: 173535 - protein, 15 aa, Influenza A virus
NRNQPAATALANTIE

SEQ ID NO: 173536 - protein, 16 aa, Influenza A virus
NRNQPAATALANTIEV

SEQ ID NO: 173537 - protein, 17 aa, Influenza A virus
NRNQPAATALANTIEVF

SEQ ID NO: 173538 - protein, 18 aa, Influenza A virus
NRNQPAATALANTIEVFR

SEQ ID NO: 173539 - protein, 19 aa, Influenza A virus
NRNQPAATALANTIEVFRS

SEQ ID NO: 173540 - protein, 20 aa, Influenza A virus
NRNQPAATALANTIEVFRSN

SEQ ID NO: 173541 - protein, 14 aa, Influenza A virus
NRSILNTSQRGILE

SEQ ID NO: 173542 - protein, 15 aa, Influenza A virus
NRSILNTSQRGILED

SEQ ID NO: 173543 - protein, 16 aa, Influenza A virus
NRSILNTSQRGILEDE

SEQ ID NO: 173544 - protein, 17 aa, Influenza A virus
NRSILNTSQRGILEDEQ

SEQ ID NO: 173545 - protein, 20 aa, Influenza A virus
NRSILNTSQRGILEDEQMYQ

SEQ ID NO: 173546 - protein, 14 aa, Influenza A virus
NRTGTFEFTSFFYR

SEQ ID NO: 173547 - protein, 15 aa, Influenza A virus
NRTGTFEFTSFFYRY

SEQ ID NO: 173548 - protein, 16 aa, Influenza A virus
NRTGTFEFTSFFYRYG

SEQ ID NO: 173549 - protein, 17 aa, Influenza A virus
NRTGTFEFTSFFYRYGF

SEQ ID NO: 173550 - protein, 18 aa, Influenza A virus
NRTGTFEFTSFFYRYGFV

SEQ ID NO: 173551 - protein, 19 aa, Influenza A virus
NRTGTFEFTSFFYRYGFVA

SEQ ID NO: 173552 - protein, 20 aa, Influenza A virus
NRTGTFEFTSFFYRYGFVAN

SEQ ID NO: 173553 - protein, 21 aa, Influenza A virus
NRTGTFEFTSFFYRYGFVANF

SEQ ID NO: 173554 - protein, 22 aa, Influenza A virus
NRTGTFEFTSFFYRYGFVANFS

SEQ ID NO: 173555 - protein, 23 aa, Influenza A virus
NRTGTFEFTSFFYRYGFVANFSM

SEQ ID NO: 173556 - protein, 24 aa, Influenza A virus
NRTGTFEFTSFFYRYGFVANFSME

SEQ ID NO: 173557 - protein, 25 aa, Influenza A virus
NRTGTFEFTSFFYRYGFVANFSMEL

SEQ ID NO: 173558 - protein, 20 aa, Influenza A virus
NSQDTELSFTITGDNTKWNE

SEQ ID NO: 173559 - protein, 14 aa, Influenza A virus
NTETGAPQLNPIDG

SEQ ID NO: 173560 - protein, 15 aa, Influenza A virus
NTETGAPQLNPIDGP

SEQ ID NO: 173561 - protein, 16 aa, Influenza A virus
NTETGAPQLNPIDGPL

SEQ ID NO: 173562 - protein, 17 aa, Influenza A virus
NTETGAPQLNPIDGPLP

SEQ ID NO: 173563 - protein, 20 aa, Influenza A virus
NTETGAPQLNPIDGPLPEDN

SEQ ID NO: 173564 - protein, 14 aa, Influenza A virus
NTKWNENQNPRMFL

SEQ ID NO: 173565 - protein, 15 aa, Influenza A virus
NTKWNENQNPRMFLA

SEQ ID NO: 173566 - protein, 16 aa, Influenza A virus
NTKWNENQNPRMFLAM

SEQ ID NO: 173567 - protein, 17 aa, Influenza A virus
NTKWNENQNPRMFLAMI

SEQ ID NO: 173568 - protein, 18 aa, Influenza A virus
NTKWNENQNPRMFLAMIT

SEQ ID NO: 173569 - protein, 19 aa, Influenza A virus
NTKWNENQNPRMFLAMITY

SEQ ID NO: 173570 - protein, 20 aa, Influenza A virus
NTKWNENQNPRMFLAMITYI

SEQ ID NO: 173571 - protein, 21 aa, Influenza A virus
NTKWNENQNPRMFLAMITYIT

SEQ ID NO: 173572 - protein, 19 aa, Influenza A virus
NTMTKDAERGKLKRRAIAT

SEQ ID NO: 173573 - protein, 20 aa, Influenza A virus
NTMTKDAERGKLKRRAIATP

SEQ ID NO: 173574 - protein, 21 aa, Influenza A virus
NTMTKDAERGKLKRRAIATPG

SEQ ID NO: 173575 - protein, 22 aa, Influenza A virus
NTMTKDAERGKLKRRAIATPGM

SEQ ID NO: 173576 - protein, 23 aa, Influenza A virus
NTMTKDAERGKLKRRAIATPGMQ

SEQ ID NO: 173577 - protein, 24 aa, Influenza A virus
NTMTKDAERGKLKRRAIATPGMQI

SEQ ID NO: 173578 - protein, 25 aa, Influenza A virus
NTMTKDAERGKLKRRAIATPGMQIR

SEQ ID NO: 173579 - protein, 15 aa, Influenza A virus
NTSQRGILEDEQMYQ

SEQ ID NO: 173580 - protein, 13 aa, Influenza A virus
NVVRKMMTNSQDT

SEQ ID NO: 173581 - protein, 14 aa, Influenza A virus
NVVRKMMTNSQDTE

SEQ ID NO: 173582 - protein, 15 aa, Influenza A virus
NVVRKMMTNSQDTEL

SEQ ID NO: 173583 - protein, 16 aa, Influenza A virus
NVVRKMMTNSQDTELS

SEQ ID NO: 173584 - protein, 17 aa, Influenza A virus
NVVRKMMTNSQDTELSF

SEQ ID NO: 173585 - protein, 19 aa, Influenza A virus
NVVRKMMTNSQDTELSFTI

SEQ ID NO: 173586 - protein, 20 aa, Influenza A virus
NVVRKMMTNSQDTELSFTIT

SEQ ID NO: 173587 - protein, 21 aa, Influenza A virus
NVVRKMMTNSQDTELSFTITG

SEQ ID NO: 173588 - protein, 22 aa, Influenza A virus
NVVRKMMTNSQDTELSFTITGD

SEQ ID NO: 173589 - protein, 23 aa, Influenza A virus
NVVRKMMTNSQDTELSFTITGDN

SEQ ID NO: 173590 - protein, 24 aa, Influenza A virus
NVVRKMMTNSQDTELSFTITGDNT

SEQ ID NO: 173591 - protein, 25 aa, Influenza A virus
NVVRKMMTNSQDTELSFTITGDNTK

SEQ ID NO: 173592 - protein, 13 aa, Influenza A virus
PAATALANTIEVF

SEQ ID NO: 173593 - protein, 14 aa, Influenza A virus
PAATALANTIEVFR

SEQ ID NO: 173594 - protein, 15 aa, Influenza A virus
PAATALANTIEVFRS

SEQ ID NO: 173595 - protein, 16 aa, Influenza A virus
PAATALANTIEVFRSN

SEQ ID NO: 173596 - protein, 17 aa, Influenza A virus
PAATALANTIEVFRSNG

SEQ ID NO: 173597 - protein, 15 aa, Influenza A virus
PAQNAISTTFPYTGD

SEQ ID NO: 173598 - protein, 16 aa, Influenza A virus
PAQNAISTTFPYTGDP

SEQ ID NO: 173599 - protein, 17 aa, Influenza A virus
PAQNAISTTFPYTGDPP

SEQ ID NO: 173600 - protein, 19 aa, Influenza A virus
PAQNAISTTFPYTGDPPYS

SEQ ID NO: 173601 - protein, 20 aa, Influenza A virus
PAQNAISTTFPYTGDPPYSH

SEQ ID NO: 173602 - protein, 21 aa, Influenza A virus
PAQNAISTTFPYTGDPPYSHG

SEQ ID NO: 173603 - protein, 22 aa, Influenza A virus
PAQNAISTTFPYTGDPPYSHGT

SEQ ID NO: 173604 - protein, 23 aa, Influenza A virus
PAQNAISTTFPYTGDPPYSHGTG

SEQ ID NO: 173605 - protein, 24 aa, Influenza A virus
PAQNAISTTFPYTGDPPYSHGTGT

SEQ ID NO: 173606 - protein, 25 aa, Influenza A virus
PAQNAISTTFPYTGDPPYSHGTGTG

SEQ ID NO: 173607 - protein, 13 aa, Influenza A virus
PATAQMALQLFIK

SEQ ID NO: 173608 - protein, 14 aa, Influenza A virus
PATAQMALQLFIKD

SEQ ID NO: 173609 - protein, 15 aa, Influenza A virus
PATAQMALQLFIKDY

SEQ ID NO: 173610 - protein, 16 aa, Influenza A virus
PATAQMALQLFIKDYR

SEQ ID NO: 173611 - protein, 17 aa, Influenza A virus
PATAQMALQLFIKDYRY

SEQ ID NO: 173612 - protein, 18 aa, Influenza A virus
PATAQMALQLFIKDYRYT

SEQ ID NO: 173613 - protein, 19 aa, Influenza A virus
PATAQMALQLFIKDYRYTY

SEQ ID NO: 173614 - protein, 20 aa, Influenza A virus
PATAQMALQLFIKDYRYTYR

SEQ ID NO: 173615 - protein, 21 aa, Influenza A virus
PATAQMALQLFIKDYRYTYRC

SEQ ID NO: 173616 - protein, 22 aa, Influenza A virus
PATAQMALQLFIKDYRYTYRCH

SEQ ID NO: 173617 - protein, 23 aa, Influenza A virus
PATAQMALQLFIKDYRYTYRCHR

SEQ ID NO: 173618 - protein, 24 aa, Influenza A virus
PATAQMALQLFIKDYRYTYRCHRG

SEQ ID NO: 173619 - protein, 25 aa, Influenza A virus
PATAQMALQLFIKDYRYTYRCHRGD

SEQ ID NO: 173620 - protein, 14 aa, Influenza A virus
PEVCLKWELMDEDY

SEQ ID NO: 173621 - protein, 15 aa, Influenza A virus
PEVCLKWELMDEDYQ

SEQ ID NO: 173622 - protein, 16 aa, Influenza A virus
PEVCLKWELMDEDYQG

SEQ ID NO: 173623 - protein, 17 aa, Influenza A virus
PEVCLKWELMDEDYQGR

SEQ ID NO: 173624 - protein, 19 aa, Influenza A virus
PEVCLKWELMDEDYQGRLC

SEQ ID NO: 173625 - protein, 20 aa, Influenza A virus
PEVCLKWELMDEDYQGRLCN

SEQ ID NO: 173626 - protein, 21 aa, Influenza A virus
PEVCLKWELMDEDYQGRLCNP

SEQ ID NO: 173627 - protein, 22 aa, Influenza A virus
PEVCLKWELMDEDYQGRLCNPL

SEQ ID NO: 173628 - protein, 23 aa, Influenza A virus
PEVCLKWELMDEDYQGRLCNPLN

SEQ ID NO: 173629 - protein, 24 aa, Influenza A virus
PEVCLKWELMDEDYQGRLCNPLNP

SEQ ID NO: 173630 - protein, 25 aa, Influenza A virus
PEVCLKWELMDEDYQGRLCNPLNPF

SEQ ID NO: 173631 - protein, 15 aa, Influenza A virus
PFVSHKEIESVNNAV

SEQ ID NO: 173632 - protein, 13 aa, Influenza A virus
PGMMMGMFNMLST

SEQ ID NO: 173633 - protein, 14 aa, Influenza A virus
PGMMMGMFNMLSTV

SEQ ID NO: 173634 - protein, 15 aa, Influenza A virus
PGMMMGMFNMLSTVL

SEQ ID NO: 173635 - protein, 16 aa, Influenza A virus
PGMMMGMFNMLSTVLG

SEQ ID NO: 173636 - protein, 17 aa, Influenza A virus
PGMMMGMFNMLSTVLGV

SEQ ID NO: 173637 - protein, 18 aa, Influenza A virus
PGMMMGMFNMLSTVLGVS

SEQ ID NO: 173638 - protein, 19 aa, Influenza A virus
PGMMMGMFNMLSTVLGVSI

SEQ ID NO: 173639 - protein, 20 aa, Influenza A virus
PGMMMGMFNMLSTVLGVSIL

SEQ ID NO: 173640 - protein, 21 aa, Influenza A virus
PGMMMGMFNMLSTVLGVSILN

SEQ ID NO: 173641 - protein, 22 aa, Influenza A virus
PGMMMGMFNMLSTVLGVSILNL

SEQ ID NO: 173642 - protein, 23 aa, Influenza A virus
PGMMMGMFNMLSTVLGVSILNLG

SEQ ID NO: 173643 - protein, 24 aa, Influenza A virus
PGMMMGMFNMLSTVLGVSILNLGQ

SEQ ID NO: 173644 - protein, 25 aa, Influenza A virus
PGMMMGMFNMLSTVLGVSILNLGQK

SEQ ID NO: 173645 - protein, 13 aa, Influenza A virus
PGMQIRGFVYFVE

SEQ ID NO: 173646 - protein, 14 aa, Influenza A virus
PGMQIRGFVYFVET

SEQ ID NO: 173647 - protein, 15 aa, Influenza A virus
PGMQIRGFVYFVETL

SEQ ID NO: 173648 - protein, 16 aa, Influenza A virus
PGMQIRGFVYFVETLA

SEQ ID NO: 173649 - protein, 17 aa, Influenza A virus
PGMQIRGFVYFVETLAR

SEQ ID NO: 173650 - protein, 18 aa, Influenza A virus
PGMQIRGFVYFVETLARS

SEQ ID NO: 173651 - protein, 19 aa, Influenza A virus
PGMQIRGFVYFVETLARSI

SEQ ID NO: 173652 - protein, 20 aa, Influenza A virus
PGMQIRGFVYFVETLARSIC

SEQ ID NO: 173653 - protein, 21 aa, Influenza A virus
PGMQIRGFVYFVETLARSICE

SEQ ID NO: 173654 - protein, 22 aa, Influenza A virus
PGMQIRGFVYFVETLARSICEK

SEQ ID NO: 173655 - protein, 23 aa, Influenza A virus
PGMQIRGFVYFVETLARSICEKL

SEQ ID NO: 173656 - protein, 24 aa, Influenza A virus
PGMQIRGFVYFVETLARSICEKLE

SEQ ID NO: 173657 - protein, 25 aa, Influenza A virus
PGMQIRGFVYFVETLARSICEKLEQ

SEQ ID NO: 173658 - protein, 13 aa, Influenza A virus
PIMFSNKMARLGK

SEQ ID NO: 173659 - protein, 14 aa, Influenza A virus
PIMFSNKMARLGKG

SEQ ID NO: 173660 - protein, 15 aa, Influenza A virus
PIMFSNKMARLGKGY

SEQ ID NO: 173661 - protein, 16 aa, Influenza A virus
PIMFSNKMARLGKGYM

SEQ ID NO: 173662 - protein, 17 aa, Influenza A virus
PIMFSNKMARLGKGYMF

SEQ ID NO: 173663 - protein, 18 aa, Influenza A virus
PIMFSNKMARLGKGYMFE

SEQ ID NO: 173664 - protein, 19 aa, Influenza A virus
PIMFSNKMARLGKGYMFES

SEQ ID NO: 173665 - protein, 20 aa, Influenza A virus
PIMFSNKMARLGKGYMFESK

SEQ ID NO: 173666 - protein, 15 aa, Influenza A virus
PKRNRSILNTSQRGI

SEQ ID NO: 173667 - protein, 16 aa, Influenza A virus
PKRNRSILNTSQRGIL

SEQ ID NO: 173668 - protein, 17 aa, Influenza A virus
PKRNRSILNTSQRGILE

SEQ ID NO: 173669 - protein, 19 aa, Influenza A virus
PKRNRSILNTSQRGILEDE

SEQ ID NO: 173670 - protein, 20 aa, Influenza A virus
PKRNRSILNTSQRGILEDEQ

SEQ ID NO: 173671 - protein, 21 aa, Influenza A virus
PKRNRSILNTSQRGILEDEQM

SEQ ID NO: 173672 - protein, 22 aa, Influenza A virus
PKRNRSILNTSQRGILEDEQMY

SEQ ID NO: 173673 - protein, 23 aa, Influenza A virus
PKRNRSILNTSQRGILEDEQMYQ

SEQ ID NO: 173674 - protein, 15 aa, Influenza A virus
PLNPFVSHKEIESVN

SEQ ID NO: 173675 - protein, 16 aa, Influenza A virus
PLNPFVSHKEIESVNN

SEQ ID NO: 173676 - protein, 17 aa, Influenza A virus
PLNPFVSHKEIESVNNA

SEQ ID NO: 173677 - protein, 14 aa, Influenza A virus
PNHEGIQAGVDRFY

SEQ ID NO: 173678 - protein, 15 aa, Influenza A virus
PNHEGIQAGVDRFYR

SEQ ID NO: 173679 - protein, 16 aa, Influenza A virus
PNHEGIQAGVDRFYRT

SEQ ID NO: 173680 - protein, 17 aa, Influenza A virus
PNHEGIQAGVDRFYRTC

SEQ ID NO: 173681 - protein, 18 aa, Influenza A virus
PNHEGIQAGVDRFYRTCK

SEQ ID NO: 173682 - protein, 19 aa, Influenza A virus
PNHEGIQAGVDRFYRTCKL

SEQ ID NO: 173683 - protein, 13 aa, Influenza A virus
PNLYNIRNLHIPE

SEQ ID NO: 173684 - protein, 14 aa, Influenza A virus
PNLYNIRNLHIPEV

SEQ ID NO: 173685 - protein, 15 aa, Influenza A virus
PNLYNIRNLHIPEVC

SEQ ID NO: 173686 - protein, 16 aa, Influenza A virus
PNLYNIRNLHIPEVCL

SEQ ID NO: 173687 - protein, 17 aa, Influenza A virus
PNLYNIRNLHIPEVCLK

SEQ ID NO: 173688 - protein, 18 aa, Influenza A virus
PNLYNIRNLHIPEVCLKW

SEQ ID NO: 173689 - protein, 19 aa, Influenza A virus
PNLYNIRNLHIPEVCLKWE

SEQ ID NO: 173690 - protein, 20 aa, Influenza A virus
PNLYNIRNLHIPEVCLKWEL

SEQ ID NO: 173691 - protein, 21 aa, Influenza A virus
PNLYNIRNLHIPEVCLKWELM

SEQ ID NO: 173692 - protein, 22 aa, Influenza A virus
PNLYNIRNLHIPEVCLKWELMD

SEQ ID NO: 173693 - protein, 23 aa, Influenza A virus
PNLYNIRNLHIPEVCLKWELMDE

SEQ ID NO: 173694 - protein, 24 aa, Influenza A virus
PNLYNIRNLHIPEVCLKWELMDED

SEQ ID NO: 173695 - protein, 25 aa, Influenza A virus
PNLYNIRNLHIPEVCLKWELMDEDY

SEQ ID NO: 173696 - protein, 15 aa, Influenza A virus
PPYSHGTGTGYTMDT

SEQ ID NO: 173697 - protein, 16 aa, Influenza A virus
PPYSHGTGTGYTMDTV

SEQ ID NO: 173698 - protein, 17 aa, Influenza A virus
PPYSHGTGTGYTMDTVN

SEQ ID NO: 173699 - protein, 19 aa, Influenza A virus
PPYSHGTGTGYTMDTVNRT

SEQ ID NO: 173700 - protein, 20 aa, Influenza A virus
PPYSHGTGTGYTMDTVNRTH

SEQ ID NO: 173701 - protein, 21 aa, Influenza A virus
PPYSHGTGTGYTMDTVNRTHQ

SEQ ID NO: 173702 - protein, 22 aa, Influenza A virus
PPYSHGTGTGYTMDTVNRTHQY

SEQ ID NO: 173703 - protein, 23 aa, Influenza A virus
PPYSHGTGTGYTMDTVNRTHQYS

SEQ ID NO: 173704 - protein, 24 aa, Influenza A virus
PPYSHGTGTGYTMDTVNRTHQYSE

SEQ ID NO: 173705 - protein, 14 aa, Influenza A virus
PSFGVSGINESADM

SEQ ID NO: 173706 - protein, 15 aa, Influenza A virus
PSFGVSGINESADMS

SEQ ID NO: 173707 - protein, 16 aa, Influenza A virus
PSFGVSGINESADMSI

SEQ ID NO: 173708 - protein, 17 aa, Influenza A virus
PSFGVSGINESADMSIG

SEQ ID NO: 173709 - protein, 18 aa, Influenza A virus
PSFGVSGINESADMSIGV

SEQ ID NO: 173710 - protein, 19 aa, Influenza A virus
PSFGVSGINESADMSIGVT

SEQ ID NO: 173711 - protein, 20 aa, Influenza A virus
PSFGVSGINESADMSIGVTV

SEQ ID NO: 173712 - protein, 21 aa, Influenza A virus
PSFGVSGINESADMSIGVTVI

SEQ ID NO: 173713 - protein, 22 aa, Influenza A virus
PSFGVSGINESADMSIGVTVIK

SEQ ID NO: 173714 - protein, 23 aa, Influenza A virus
PSFGVSGINESADMSIGVTVIKN

SEQ ID NO: 173715 - protein, 24 aa, Influenza A virus
PSFGVSGINESADMSIGVTVIKNN

SEQ ID NO: 173716 - protein, 25 aa, Influenza A virus
PSFGVSGINESADMSIGVTVIKNNM

SEQ ID NO: 173717 - protein, 16 aa, Influenza A virus
PSGYAQTDCVLEAMAF

SEQ ID NO: 173718 - protein, 17 aa, Influenza A virus
PSGYAQTDCVLEAMAFL

SEQ ID NO: 173719 - protein, 18 aa, Influenza A virus
PSGYAQTDCVLEAMAFLE

SEQ ID NO: 173720 - protein, 19 aa, Influenza A virus
PSGYAQTDCVLEAMAFLEE

SEQ ID NO: 173721 - protein, 20 aa, Influenza A virus
PSGYAQTDCVLEAMAFLEES

SEQ ID NO: 173722 - protein, 21 aa, Influenza A virus
PSGYAQTDCVLEAMAFLEESH

SEQ ID NO: 173723 - protein, 22 aa, Influenza A virus
PSGYAQTDCVLEAMAFLEESHP

SEQ ID NO: 173724 - protein, 23 aa, Influenza A virus
PSGYAQTDCVLEAMAFLEESHPG

SEQ ID NO: 173725 - protein, 24 aa, Influenza A virus
PSGYAQTDCVLEAMAFLEESHPGI

SEQ ID NO: 173726 - protein, 25 aa, Influenza A virus
PSGYAQTDCVLEAMAFLEESHPGIF

SEQ ID NO: 173727 - protein, 15 aa, Influenza A virus
PSSSYRRPVGISSMV

SEQ ID NO: 173728 - protein, 16 aa, Influenza A virus
PSSSYRRPVGISSMVE

SEQ ID NO: 173729 - protein, 17 aa, Influenza A virus
PSSSYRRPVGISSMVEA

SEQ ID NO: 173730 - protein, 19 aa, Influenza A virus
PSSSYRRPVGISSMVEAMV

SEQ ID NO: 173731 - protein, 20 aa, Influenza A virus
PSSSYRRPVGISSMVEAMVS

SEQ ID NO: 173732 - protein, 21 aa, Influenza A virus
PSSSYRRPVGISSMVEAMVSR

SEQ ID NO: 173733 - protein, 22 aa, Influenza A virus
PSSSYRRPVGISSMVEAMVSRA

SEQ ID NO: 173734 - protein, 23 aa, Influenza A virus
PSSSYRRPVGISSMVEAMVSRAR

SEQ ID NO: 173735 - protein, 24 aa, Influenza A virus
PSSSYRRPVGISSMVEAMVSRARI

SEQ ID NO: 173736 - protein, 25 aa, Influenza A virus
PSSSYRRPVGISSMVEAMVSRARID

SEQ ID NO: 173737 - protein, 13 aa, Influenza A virus
PTLLFLKVPAQNA

SEQ ID NO: 173738 - protein, 14 aa, Influenza A virus
PTLLFLKVPAQNAI

SEQ ID NO: 173739 - protein, 15 aa, Influenza A virus
PTLLFLKVPAQNAIS

SEQ ID NO: 173740 - protein, 16 aa, Influenza A virus
PTLLFLKVPAQNAIST

SEQ ID NO: 173741 - protein, 17 aa, Influenza A virus
PTLLFLKVPAQNAISTT

SEQ ID NO: 173742 - protein, 18 aa, Influenza A virus
PTLLFLKVPAQNAISTTF

SEQ ID NO: 173743 - protein, 19 aa, Influenza A virus
PTLLFLKVPAQNAISTTFP

SEQ ID NO: 173744 - protein, 20 aa, Influenza A virus
PTLLFLKVPAQNAISTTFPY

SEQ ID NO: 173745 - protein, 21 aa, Influenza A virus
PTLLFLKVPAQNAISTTFPYT

SEQ ID NO: 173746 - protein, 22 aa, Influenza A virus
PTLLFLKVPAQNAISTTFPYTG

SEQ ID NO: 173747 - protein, 23 aa, Influenza A virus
PTLLFLKVPAQNAISTTFPYTGD

SEQ ID NO: 173748 - protein, 24 aa, Influenza A virus
PTLLFLKVPAQNAISTTFPYTGDP

SEQ ID NO: 173749 - protein, 25 aa, Influenza A virus
PTLLFLKVPAQNAISTTFPYTGDPP

SEQ ID NO: 173750 - protein, 17 aa, Influenza A virus
PVGGNEKKAKLANVVRK

SEQ ID NO: 173751 - protein, 19 aa, Influenza A virus
PVGGNEKKAKLANVVRKMM

SEQ ID NO: 173752 - protein, 20 aa, Influenza A virus
PVGGNEKKAKLANVVRKMMT

SEQ ID NO: 173753 - protein, 21 aa, Influenza A virus
PVGGNEKKAKLANVVRKMMTN

SEQ ID NO: 173754 - protein, 22 aa, Influenza A virus
PVGGNEKKAKLANVVRKMMTNS

SEQ ID NO: 173755 - protein, 23 aa, Influenza A virus
PVGGNEKKAKLANVVRKMMTNSQ

SEQ ID NO: 173756 - protein, 24 aa, Influenza A virus
PVGGNEKKAKLANVVRKMMTNSQD

SEQ ID NO: 173757 - protein, 25 aa, Influenza A virus
PVGGNEKKAKLANVVRKMMTNSQDT

SEQ ID NO: 173758 - protein, 13 aa, Influenza A virus
PVGISSMVEAMVS

SEQ ID NO: 173759 - protein, 14 aa, Influenza A virus
PVGISSMVEAMVSR

SEQ ID NO: 173760 - protein, 15 aa, Influenza A virus
PVGISSMVEAMVSRA

SEQ ID NO: 173761 - protein, 16 aa, Influenza A virus
PVGISSMVEAMVSRAR

SEQ ID NO: 173762 - protein, 17 aa, Influenza A virus
PVGISSMVEAMVSRARI

SEQ ID NO: 173763 - protein, 18 aa, Influenza A virus
PVGISSMVEAMVSRARID

SEQ ID NO: 173764 - protein, 19 aa, Influenza A virus
PVGISSMVEAMVSRARIDA

SEQ ID NO: 173765 - protein, 20 aa, Influenza A virus
PVGISSMVEAMVSRARIDAR

SEQ ID NO: 173766 - protein, 21 aa, Influenza A virus
PVGISSMVEAMVSRARIDARI

SEQ ID NO: 173767 - protein, 22 aa, Influenza A virus
PVGISSMVEAMVSRARIDARID

SEQ ID NO: 173768 - protein, 23 aa, Influenza A virus
PVGISSMVEAMVSRARIDARIDF

SEQ ID NO: 173769 - protein, 24 aa, Influenza A virus
PVGISSMVEAMVSRARIDARIDFE

SEQ ID NO: 173770 - protein, 25 aa, Influenza A virus
PVGISSMVEAMVSRARIDARIDFES

SEQ ID NO: 173771 - protein, 14 aa, Influenza A virus
PYSHGTGTGYTMDT

SEQ ID NO: 173772 - protein, 15 aa, Influenza A virus
PYSHGTGTGYTMDTV

SEQ ID NO: 173773 - protein, 16 aa, Influenza A virus
PYSHGTGTGYTMDTVN

SEQ ID NO: 173774 - protein, 17 aa, Influenza A virus
PYSHGTGTGYTMDTVNR

SEQ ID NO: 173775 - protein, 19 aa, Influenza A virus
PYSHGTGTGYTMDTVNRTH

SEQ ID NO: 173776 - protein, 20 aa, Influenza A virus
PYSHGTGTGYTMDTVNRTHQ

SEQ ID NO: 173777 - protein, 21 aa, Influenza A virus
PYSHGTGTGYTMDTVNRTHQY

SEQ ID NO: 173778 - protein, 22 aa, Influenza A virus
PYSHGTGTGYTMDTVNRTHQYS

SEQ ID NO: 173779 - protein, 23 aa, Influenza A virus
PYSHGTGTGYTMDTVNRTHQYSE

SEQ ID NO: 173780 - protein, 20 aa, Influenza A virus
PYTGDPPYSHGTGTGYTMDT

SEQ ID NO: 173781 - protein, 21 aa, Influenza A virus
PYTGDPPYSHGTGTGYTMDTV

SEQ ID NO: 173782 - protein, 22 aa, Influenza A virus
PYTGDPPYSHGTGTGYTMDTVN

SEQ ID NO: 173783 - protein, 23 aa, Influenza A virus
PYTGDPPYSHGTGTGYTMDTVNR

SEQ ID NO: 173784 - protein, 24 aa, Influenza A virus
PYTGDPPYSHGTGTGYTMDTVNRT

SEQ ID NO: 173785 - protein, 25 aa, Influenza A virus
PYTGDPPYSHGTGTGYTMDTVNRTH

SEQ ID NO: 173786 - protein, 16 aa, Influenza A virus
QDTELSFTITGDNTKW

SEQ ID NO: 173787 - protein, 20 aa, Influenza A virus
QDTELSFTITGDNTKWNENQ

SEQ ID NO: 173788 - protein, 15 aa, Influenza A virus
QGRLCNPLNPFVSHK

SEQ ID NO: 173789 - protein, 17 aa, Influenza A virus
QGRLCNPLNPFVSHKEI

SEQ ID NO: 173790 - protein, 19 aa, Influenza A virus
QGRLCNPLNPFVSHKEIES

SEQ ID NO: 173791 - protein, 20 aa, Influenza A virus
QGRLCNPLNPFVSHKEIESV

SEQ ID NO: 173792 - protein, 21 aa, Influenza A virus
QGRLCNPLNPFVSHKEIESVN

SEQ ID NO: 173793 - protein, 22 aa, Influenza A virus
QGRLCNPLNPFVSHKEIESVNN

SEQ ID NO: 173794 - protein, 23 aa, Influenza A virus
QGRLCNPLNPFVSHKEIESVNNA

SEQ ID NO: 173795 - protein, 24 aa, Influenza A virus
QGRLCNPLNPFVSHKEIESVNNAV

SEQ ID NO: 173796 - protein, 16 aa, Influenza A virus
QGRQTYDWTLNRNQPA

SEQ ID NO: 173797 - protein, 17 aa, Influenza A virus
QGRQTYDWTLNRNQPAA

SEQ ID NO: 173798 - protein, 18 aa, Influenza A virus
QGRQTYDWTLNRNQPAAT

SEQ ID NO: 173799 - protein, 19 aa, Influenza A virus
QGRQTYDWTLNRNQPAATA

SEQ ID NO: 173800 - protein, 20 aa, Influenza A virus
QGRQTYDWTLNRNQPAATAL

SEQ ID NO: 173801 - protein, 21 aa, Influenza A virus
QGRQTYDWTLNRNQPAATALA

SEQ ID NO: 173802 - protein, 22 aa, Influenza A virus
QGRQTYDWTLNRNQPAATALAN

SEQ ID NO: 173803 - protein, 23 aa, Influenza A virus
QGRQTYDWTLNRNQPAATALANT

SEQ ID NO: 173804 - protein, 24 aa, Influenza A virus
QGRQTYDWTLNRNQPAATALANTI

SEQ ID NO: 173805 - protein, 25 aa, Influenza A virus
QGRQTYDWTLNRNQPAATALANTIE

SEQ ID NO: 173806 - protein, 13 aa, Influenza A virus
QIRGFVYFVETLA

SEQ ID NO: 173807 - protein, 14 aa, Influenza A virus
QIRGFVYFVETLAR

SEQ ID NO: 173808 - protein, 15 aa, Influenza A virus
QIRGFVYFVETLARS

SEQ ID NO: 173809 - protein, 16 aa, Influenza A virus
QIRGFVYFVETLARSI

SEQ ID NO: 173810 - protein, 17 aa, Influenza A virus
QIRGFVYFVETLARSIC

SEQ ID NO: 173811 - protein, 18 aa, Influenza A virus
QIRGFVYFVETLARSICE

SEQ ID NO: 173812 - protein, 19 aa, Influenza A virus
QIRGFVYFVETLARSICEK

SEQ ID NO: 173813 - protein, 20 aa, Influenza A virus
QIRGFVYFVETLARSICEKL

SEQ ID NO: 173814 - protein, 21 aa, Influenza A virus
QIRGFVYFVETLARSICEKLE

SEQ ID NO: 173815 - protein, 22 aa, Influenza A virus
QIRGFVYFVETLARSICEKLEQ

SEQ ID NO: 173816 - protein, 23 aa, Influenza A virus
QIRGFVYFVETLARSICEKLEQS

SEQ ID NO: 173817 - protein, 24 aa, Influenza A virus
QIRGFVYFVETLARSICEKLEQSG

SEQ ID NO: 173818 - protein, 25 aa, Influenza A virus
QIRGFVYFVETLARSICEKLEQSGL

SEQ ID NO: 173819 - protein, 13 aa, Influenza A virus
QLFIKDYRYTYRC

SEQ ID NO: 173820 - protein, 14 aa, Influenza A virus
QLFIKDYRYTYRCH

SEQ ID NO: 173821 - protein, 15 aa, Influenza A virus
QLFIKDYRYTYRCHR

SEQ ID NO: 173822 - protein, 16 aa, Influenza A virus
QLFIKDYRYTYRCHRG

SEQ ID NO: 173823 - protein, 17 aa, Influenza A virus
QLFIKDYRYTYRCHRGD

SEQ ID NO: 173824 - protein, 18 aa, Influenza A virus
QLFIKDYRYTYRCHRGDT

SEQ ID NO: 173825 - protein, 19 aa, Influenza A virus
QLFIKDYRYTYRCHRGDTQ

SEQ ID NO: 173826 - protein, 20 aa, Influenza A virus
QLFIKDYRYTYRCHRGDTQI

SEQ ID NO: 173827 - protein, 21 aa, Influenza A virus
QLFIKDYRYTYRCHRGDTQIQ

SEQ ID NO: 173828 - protein, 22 aa, Influenza A virus
QLFIKDYRYTYRCHRGDTQIQT

SEQ ID NO: 173829 - protein, 23 aa, Influenza A virus
QLFIKDYRYTYRCHRGDTQIQTR

SEQ ID NO: 173830 - protein, 24 aa, Influenza A virus
QLFIKDYRYTYRCHRGDTQIQTRR

SEQ ID NO: 173831 - protein, 25 aa, Influenza A virus
QLFIKDYRYTYRCHRGDTQIQTRRS

SEQ ID NO: 173832 - protein, 13 aa, Influenza A virus
QMALQLFIKDYRY

SEQ ID NO: 173833 - protein, 14 aa, Influenza A virus
QMALQLFIKDYRYT

SEQ ID NO: 173834 - protein, 15 aa, Influenza A virus
QMALQLFIKDYRYTY

SEQ ID NO: 173835 - protein, 16 aa, Influenza A virus
QMALQLFIKDYRYTYR

SEQ ID NO: 173836 - protein, 17 aa, Influenza A virus
QMALQLFIKDYRYTYRC

SEQ ID NO: 173837 - protein, 18 aa, Influenza A virus
QMALQLFIKDYRYTYRCH

SEQ ID NO: 173838 - protein, 19 aa, Influenza A virus
QMALQLFIKDYRYTYRCHR

SEQ ID NO: 173839 - protein, 20 aa, Influenza A virus
QMALQLFIKDYRYTYRCHRG

SEQ ID NO: 173840 - protein, 21 aa, Influenza A virus
QMALQLFIKDYRYTYRCHRGD

SEQ ID NO: 173841 - protein, 22 aa, Influenza A virus
QMALQLFIKDYRYTYRCHRGDT

SEQ ID NO: 173842 - protein, 23 aa, Influenza A virus
QMALQLFIKDYRYTYRCHRGDTQ

SEQ ID NO: 173843 - protein, 24 aa, Influenza A virus
QMALQLFIKDYRYTYRCHRGDTQI

SEQ ID NO: 173844 - protein, 25 aa, Influenza A virus
QMALQLFIKDYRYTYRCHRGDTQIQ

SEQ ID NO: 173845 - protein, 15 aa, Influenza A virus
QNAISTTFPYTGDPP

SEQ ID NO: 173846 - protein, 16 aa, Influenza A virus
QNAISTTFPYTGDPPY

SEQ ID NO: 173847 - protein, 17 aa, Influenza A virus
QNAISTTFPYTGDPPYS

SEQ ID NO: 173848 - protein, 19 aa, Influenza A virus
QNAISTTFPYTGDPPYSHG

SEQ ID NO: 173849 - protein, 20 aa, Influenza A virus
QNAISTTFPYTGDPPYSHGT

SEQ ID NO: 173850 - protein, 21 aa, Influenza A virus
QNAISTTFPYTGDPPYSHGTG

SEQ ID NO: 173851 - protein, 22 aa, Influenza A virus
QNAISTTFPYTGDPPYSHGTGT

SEQ ID NO: 173852 - protein, 23 aa, Influenza A virus
QNAISTTFPYTGDPPYSHGTGTG

SEQ ID NO: 173853 - protein, 24 aa, Influenza A virus
QNAISTTFPYTGDPPYSHGTGTGY

SEQ ID NO: 173854 - protein, 25 aa, Influenza A virus
QNAISTTFPYTGDPPYSHGTGTGYT

SEQ ID NO: 173855 - protein, 13 aa, Influenza A virus
QNPRMFLAMITYI

SEQ ID NO: 173856 - protein, 14 aa, Influenza A virus
QNPRMFLAMITYIT

SEQ ID NO: 173857 - protein, 13 aa, Influenza A virus
QPAATALANTIEV

SEQ ID NO: 173858 - protein, 14 aa, Influenza A virus
QPAATALANTIEVF

SEQ ID NO: 173859 - protein, 15 aa, Influenza A virus
QPAATALANTIEVFR

SEQ ID NO: 173860 - protein, 16 aa, Influenza A virus
QPAATALANTIEVFRS

SEQ ID NO: 173861 - protein, 17 aa, Influenza A virus
QPAATALANTIEVFRSN

SEQ ID NO: 173862 - protein, 18 aa, Influenza A virus
QPAATALANTIEVFRSNG

SEQ ID NO: 173863 - protein, 22 aa, Influenza A virus
QSGLPVGGNEKKAKLANVVRKM

SEQ ID NO: 173864 - protein, 23 aa, Influenza A virus
QSGLPVGGNEKKAKLANVVRKMM

SEQ ID NO: 173865 - protein, 24 aa, Influenza A virus
QSGLPVGGNEKKAKLANVVRKMMT

SEQ ID NO: 173866 - protein, 25 aa, Influenza A virus
QSGLPVGGNEKKAKLANVVRKMMTN

SEQ ID NO: 173867 - protein, 14 aa, Influenza A virus
QSSDDFALIVNAPN

SEQ ID NO: 173868 - protein, 15 aa, Influenza A virus
QSSDDFALIVNAPNH

SEQ ID NO: 173869 - protein, 16 aa, Influenza A virus
QSSDDFALIVNAPNHE

SEQ ID NO: 173870 - protein, 17 aa, Influenza A virus
QSSDDFALIVNAPNHEG

SEQ ID NO: 173871 - protein, 18 aa, Influenza A virus
QSSDDFALIVNAPNHEGI

SEQ ID NO: 173872 - protein, 19 aa, Influenza A virus
QSSDDFALIVNAPNHEGIQ

SEQ ID NO: 173873 - protein, 20 aa, Influenza A virus
QSSDDFALIVNAPNHEGIQA

SEQ ID NO: 173874 - protein, 21 aa, Influenza A virus
QSSDDFALIVNAPNHEGIQAG

SEQ ID NO: 173875 - protein, 22 aa, Influenza A virus
QSSDDFALIVNAPNHEGIQAGV

SEQ ID NO: 173876 - protein, 14 aa, Influenza A virus
QTDCVLEAMAFLEE

SEQ ID NO: 173877 - protein, 15 aa, Influenza A virus
QTDCVLEAMAFLEES

SEQ ID NO: 173878 - protein, 16 aa, Influenza A virus
QTDCVLEAMAFLEESH

SEQ ID NO: 173879 - protein, 17 aa, Influenza A virus
QTDCVLEAMAFLEESHP

SEQ ID NO: 173880 - protein, 18 aa, Influenza A virus
QTDCVLEAMAFLEESHPG

SEQ ID NO: 173881 - protein, 19 aa, Influenza A virus
QTDCVLEAMAFLEESHPGI

SEQ ID NO: 173882 - protein, 20 aa, Influenza A virus
QTDCVLEAMAFLEESHPGIF

SEQ ID NO: 173883 - protein, 21 aa, Influenza A virus
QTDCVLEAMAFLEESHPGIFE

SEQ ID NO: 173884 - protein, 22 aa, Influenza A virus
QTDCVLEAMAFLEESHPGIFEN

SEQ ID NO: 173885 - protein, 23 aa, Influenza A virus
QTDCVLEAMAFLEESHPGIFENS

SEQ ID NO: 173886 - protein, 24 aa, Influenza A virus
QTDCVLEAMAFLEESHPGIFENSC

SEQ ID NO: 173887 - protein, 15 aa, Influenza A virus
QTRSKAGLLVSDGGP

SEQ ID NO: 173888 - protein, 16 aa, Influenza A virus
QTRSKAGLLVSDGGPN

SEQ ID NO: 173889 - protein, 17 aa, Influenza A virus
QTRSKAGLLVSDGGPNL

SEQ ID NO: 173890 - protein, 13 aa, Influenza A virus
QTYDWTLNRNQPA

SEQ ID NO: 173891 - protein, 14 aa, Influenza A virus
QTYDWTLNRNQPAA

SEQ ID NO: 173892 - protein, 15 aa, Influenza A virus
QTYDWTLNRNQPAAT

SEQ ID NO: 173893 - protein, 16 aa, Influenza A virus
QTYDWTLNRNQPAATA

SEQ ID NO: 173894 - protein, 17 aa, Influenza A virus
QTYDWTLNRNQPAATAL

SEQ ID NO: 173895 - protein, 18 aa, Influenza A virus
QTYDWTLNRNQPAATALA

SEQ ID NO: 173896 - protein, 19 aa, Influenza A virus
QTYDWTLNRNQPAATALAN

SEQ ID NO: 173897 - protein, 20 aa, Influenza A virus
QTYDWTLNRNQPAATALANT

SEQ ID NO: 173898 - protein, 21 aa, Influenza A virus
QTYDWTLNRNQPAATALANTI

SEQ ID NO: 173899 - protein, 22 aa, Influenza A virus
QTYDWTLNRNQPAATALANTIE

SEQ ID NO: 173900 - protein, 23 aa, Influenza A virus
QTYDWTLNRNQPAATALANTIEV

SEQ ID NO: 173901 - protein, 24 aa, Influenza A virus
QTYDWTLNRNQPAATALANTIEVF

SEQ ID NO: 173902 - protein, 25 aa, Influenza A virus
QTYDWTLNRNQPAATALANTIEVFR

SEQ ID NO: 173903 - protein, 15 aa, Influenza A virus
RAIATPGMQIRGFVY

SEQ ID NO: 173904 - protein, 17 aa, Influenza A virus
RAIATPGMQIRGFVYFV

SEQ ID NO: 173905 - protein, 18 aa, Influenza A virus
RAIATPGMQIRGFVYFVE

SEQ ID NO: 173906 - protein, 19 aa, Influenza A virus
RAIATPGMQIRGFVYFVET

SEQ ID NO: 173907 - protein, 20 aa, Influenza A virus
RAIATPGMQIRGFVYFVETL

SEQ ID NO: 173908 - protein, 21 aa, Influenza A virus
RAIATPGMQIRGFVYFVETLA

SEQ ID NO: 173909 - protein, 22 aa, Influenza A virus
RAIATPGMQIRGFVYFVETLAR

SEQ ID NO: 173910 - protein, 23 aa, Influenza A virus
RAIATPGMQIRGFVYFVETLARS

SEQ ID NO: 173911 - protein, 24 aa, Influenza A virus
RAIATPGMQIRGFVYFVETLARSI

SEQ ID NO: 173912 - protein, 25 aa, Influenza A virus
RAIATPGMQIRGFVYFVETLARSIC

SEQ ID NO: 173913 - protein, 14 aa, Influenza A virus
RALTLNTMTKDAER

SEQ ID NO: 173914 - protein, 15 aa, Influenza A virus
RALTLNTMTKDAERG

SEQ ID NO: 173915 - protein, 16 aa, Influenza A virus
RALTLNTMTKDAERGK

SEQ ID NO: 173916 - protein, 17 aa, Influenza A virus
RALTLNTMTKDAERGKL

SEQ ID NO: 173917 - protein, 19 aa, Influenza A virus
RALTLNTMTKDAERGKLKR

SEQ ID NO: 173918 - protein, 20 aa, Influenza A virus
RALTLNTMTKDAERGKLKRR

SEQ ID NO: 173919 - protein, 23 aa, Influenza A virus
RALTLNTMTKDAERGKLKRRAIA

SEQ ID NO: 173920 - protein, 24 aa, Influenza A virus
RALTLNTMTKDAERGKLKRRAIAT

SEQ ID NO: 173921 - protein, 25 aa, Influenza A virus
RALTLNTMTKDAERGKLKRRAIATP

SEQ ID NO: 173922 - protein, 15 aa, Influenza A virus
RARIDARIDFESGRI

SEQ ID NO: 173923 - protein, 20 aa, Influenza A virus
RARIDARIDFESGRIKKEEF

SEQ ID NO: 173924 - protein, 15 aa, Influenza A virus
RCHRGDTQIQTRRSF

SEQ ID NO: 173925 - protein, 13 aa, Influenza A virus
RGFVYFVETLARS

SEQ ID NO: 173926 - protein, 14 aa, Influenza A virus
RGFVYFVETLARSI

SEQ ID NO: 173927 - protein, 15 aa, Influenza A virus
RGFVYFVETLARSIC

SEQ ID NO: 173928 - protein, 16 aa, Influenza A virus
RGFVYFVETLARSICE

SEQ ID NO: 173929 - protein, 17 aa, Influenza A virus
RGFVYFVETLARSICEK

SEQ ID NO: 173930 - protein, 18 aa, Influenza A virus
RGFVYFVETLARSICEKL

SEQ ID NO: 173931 - protein, 19 aa, Influenza A virus
RGFVYFVETLARSICEKLE

SEQ ID NO: 173932 - protein, 20 aa, Influenza A virus
RGFVYFVETLARSICEKLEQ

SEQ ID NO: 173933 - protein, 21 aa, Influenza A virus
RGFVYFVETLARSICEKLEQS

SEQ ID NO: 173934 - protein, 22 aa, Influenza A virus
RGFVYFVETLARSICEKLEQSG

SEQ ID NO: 173935 - protein, 23 aa, Influenza A virus
RGFVYFVETLARSICEKLEQSGL

SEQ ID NO: 173936 - protein, 24 aa, Influenza A virus
RGFVYFVETLARSICEKLEQSGLP

SEQ ID NO: 173937 - protein, 25 aa, Influenza A virus
RGFVYFVETLARSICEKLEQSGLPV

SEQ ID NO: 173938 - protein, 14 aa, Influenza A virus
RGKLKRRAIATPGM

SEQ ID NO: 173939 - protein, 15 aa, Influenza A virus
RGKLKRRAIATPGMQ

SEQ ID NO: 173940 - protein, 16 aa, Influenza A virus
RGKLKRRAIATPGMQI

SEQ ID NO: 173941 - protein, 17 aa, Influenza A virus
RGKLKRRAIATPGMQIR

SEQ ID NO: 173942 - protein, 18 aa, Influenza A virus
RGKLKRRAIATPGMQIRG

SEQ ID NO: 173943 - protein, 19 aa, Influenza A virus
RGKLKRRAIATPGMQIRGF

SEQ ID NO: 173944 - protein, 20 aa, Influenza A virus
RGKLKRRAIATPGMQIRGFV

SEQ ID NO: 173945 - protein, 21 aa, Influenza A virus
RGKLKRRAIATPGMQIRGFVY

SEQ ID NO: 173946 - protein, 22 aa, Influenza A virus
RGKLKRRAIATPGMQIRGFVYF

SEQ ID NO: 173947 - protein, 23 aa, Influenza A virus
RGKLKRRAIATPGMQIRGFVYFV

SEQ ID NO: 173948 - protein, 24 aa, Influenza A virus
RGKLKRRAIATPGMQIRGFVYFVE

SEQ ID NO: 173949 - protein, 25 aa, Influenza A virus
RGKLKRRAIATPGMQIRGFVYFVET

SEQ ID NO: 173950 - protein, 15 aa, Influenza A virus
RKMMTNSQDTELSFT

SEQ ID NO: 173951 - protein, 16 aa, Influenza A virus
RKMMTNSQDTELSFTI

SEQ ID NO: 173952 - protein, 20 aa, Influenza A virus
RKMMTNSQDTELSFTITGDN

SEQ ID NO: 173953 - protein, 21 aa, Influenza A virus
RKMMTNSQDTELSFTITGDNT

SEQ ID NO: 173954 - protein, 22 aa, Influenza A virus
RKMMTNSQDTELSFTITGDNTK

SEQ ID NO: 173955 - protein, 23 aa, Influenza A virus
RKMMTNSQDTELSFTITGDNTKW

SEQ ID NO: 173956 - protein, 24 aa, Influenza A virus
RKMMTNSQDTELSFTITGDNTKWN

SEQ ID NO: 173957 - protein, 25 aa, Influenza A virus
RKMMTNSQDTELSFTITGDNTKWNE

SEQ ID NO: 173958 - protein, 15 aa, Influenza A virus
RLCNPLNPFVSHKEI

SEQ ID NO: 173959 - protein, 17 aa, Influenza A virus
RLCNPLNPFVSHKEIES

SEQ ID NO: 173960 - protein, 19 aa, Influenza A virus
RLCNPLNPFVSHKEIESVN

SEQ ID NO: 173961 - protein, 20 aa, Influenza A virus
RLCNPLNPFVSHKEIESVNN

SEQ ID NO: 173962 - protein, 21 aa, Influenza A virus
RLCNPLNPFVSHKEIESVNNA

SEQ ID NO: 173963 - protein, 22 aa, Influenza A virus
RLCNPLNPFVSHKEIESVNNAV

SEQ ID NO: 173964 - protein, 13 aa, Influenza A virus
RLIDFLKDVMESM

SEQ ID NO: 173965 - protein, 15 aa, Influenza A virus
RNLHIPEVCLKWELM

SEQ ID NO: 173966 - protein, 17 aa, Influenza A virus
RNLHIPEVCLKWELMDE

SEQ ID NO: 173967 - protein, 19 aa, Influenza A virus
RNLHIPEVCLKWELMDEDY

SEQ ID NO: 173968 - protein, 20 aa, Influenza A virus
RNLHIPEVCLKWELMDEDYQ

SEQ ID NO: 173969 - protein, 21 aa, Influenza A virus
RNLHIPEVCLKWELMDEDYQG

SEQ ID NO: 173970 - protein, 22 aa, Influenza A virus
RNLHIPEVCLKWELMDEDYQGR

SEQ ID NO: 173971 - protein, 23 aa, Influenza A virus
RNLHIPEVCLKWELMDEDYQGRL

SEQ ID NO: 173972 - protein, 24 aa, Influenza A virus
RNLHIPEVCLKWELMDEDYQGRLC

SEQ ID NO: 173973 - protein, 25 aa, Influenza A virus
RNLHIPEVCLKWELMDEDYQGRLCN

SEQ ID NO: 173974 - protein, 13 aa, Influenza A virus
RNQPAATALANTI

SEQ ID NO: 173975 - protein, 14 aa, Influenza A virus
RNQPAATALANTIE

SEQ ID NO: 173976 - protein, 15 aa, Influenza A virus
RNQPAATALANTIEV

SEQ ID NO: 173977 - protein, 16 aa, Influenza A virus
RNQPAATALANTIEVF

SEQ ID NO: 173978 - protein, 17 aa, Influenza A virus
RNQPAATALANTIEVFR

SEQ ID NO: 173979 - protein, 18 aa, Influenza A virus
RNQPAATALANTIEVFRS

SEQ ID NO: 173980 - protein, 19 aa, Influenza A virus
RNQPAATALANTIEVFRSN

SEQ ID NO: 173981 - protein, 20 aa, Influenza A virus
RNQPAATALANTIEVFRSNG

SEQ ID NO: 173982 - protein, 14 aa, Influenza A virus
RNRSILNTSQRGIL

SEQ ID NO: 173983 - protein, 15 aa, Influenza A virus
RNRSILNTSQRGILE

SEQ ID NO: 173984 - protein, 16 aa, Influenza A virus
RNRSILNTSQRGILED

SEQ ID NO: 173985 - protein, 17 aa, Influenza A virus
RNRSILNTSQRGILEDE

SEQ ID NO: 173986 - protein, 19 aa, Influenza A virus
RNRSILNTSQRGILEDEQM

SEQ ID NO: 173987 - protein, 20 aa, Influenza A virus
RNRSILNTSQRGILEDEQMY

SEQ ID NO: 173988 - protein, 21 aa, Influenza A virus
RNRSILNTSQRGILEDEQMYQ

SEQ ID NO: 173989 - protein, 13 aa, Influenza A virus
RPVGISSMVEAMV

SEQ ID NO: 173990 - protein, 14 aa, Influenza A virus
RPVGISSMVEAMVS

SEQ ID NO: 173991 - protein, 15 aa, Influenza A virus
RPVGISSMVEAMVSR

SEQ ID NO: 173992 - protein, 16 aa, Influenza A virus
RPVGISSMVEAMVSRA

SEQ ID NO: 173993 - protein, 17 aa, Influenza A virus
RPVGISSMVEAMVSRAR

SEQ ID NO: 173994 - protein, 18 aa, Influenza A virus
RPVGISSMVEAMVSRARI

SEQ ID NO: 173995 - protein, 19 aa, Influenza A virus
RPVGISSMVEAMVSRARID

SEQ ID NO: 173996 - protein, 20 aa, Influenza A virus
RPVGISSMVEAMVSRARIDA

SEQ ID NO: 173997 - protein, 21 aa, Influenza A virus
RPVGISSMVEAMVSRARIDAR

SEQ ID NO: 173998 - protein, 22 aa, Influenza A virus
RPVGISSMVEAMVSRARIDARI

SEQ ID NO: 173999 - protein, 23 aa, Influenza A virus
RPVGISSMVEAMVSRARIDARID

SEQ ID NO: 174000 - protein, 24 aa, Influenza A virus
RPVGISSMVEAMVSRARIDARIDF

SEQ ID NO: 174001 - protein, 25 aa, Influenza A virus
RPVGISSMVEAMVSRARIDARIDFE

SEQ ID NO: 174002 - protein, 14 aa, Influenza A virus
RQTYDWTLNRNQPA

SEQ ID NO: 174003 - protein, 15 aa, Influenza A virus
RQTYDWTLNRNQPAA

SEQ ID NO: 174004 - protein, 16 aa, Influenza A virus
RQTYDWTLNRNQPAAT

SEQ ID NO: 174005 - protein, 17 aa, Influenza A virus
RQTYDWTLNRNQPAATA

SEQ ID NO: 174006 - protein, 18 aa, Influenza A virus
RQTYDWTLNRNQPAATAL

SEQ ID NO: 174007 - protein, 19 aa, Influenza A virus
RQTYDWTLNRNQPAATALA

SEQ ID NO: 174008 - protein, 20 aa, Influenza A virus
RQTYDWTLNRNQPAATALAN

SEQ ID NO: 174009 - protein, 21 aa, Influenza A virus
RQTYDWTLNRNQPAATALANT

SEQ ID NO: 174010 - protein, 22 aa, Influenza A virus
RQTYDWTLNRNQPAATALANTI

SEQ ID NO: 174011 - protein, 23 aa, Influenza A virus
RQTYDWTLNRNQPAATALANTIE

SEQ ID NO: 174012 - protein, 24 aa, Influenza A virus
RQTYDWTLNRNQPAATALANTIEV

SEQ ID NO: 174013 - protein, 25 aa, Influenza A virus
RQTYDWTLNRNQPAATALANTIEVF

SEQ ID NO: 174014 - protein, 14 aa, Influenza A virus
RRAIATPGMQIRGF

SEQ ID NO: 174015 - protein, 15 aa, Influenza A virus
RRAIATPGMQIRGFV

SEQ ID NO: 174016 - protein, 16 aa, Influenza A virus
RRAIATPGMQIRGFVY

SEQ ID NO: 174017 - protein, 17 aa, Influenza A virus
RRAIATPGMQIRGFVYF

SEQ ID NO: 174018 - protein, 19 aa, Influenza A virus
RRAIATPGMQIRGFVYFVE

SEQ ID NO: 174019 - protein, 20 aa, Influenza A virus
RRAIATPGMQIRGFVYFVET

SEQ ID NO: 174020 - protein, 21 aa, Influenza A virus
RRAIATPGMQIRGFVYFVETL

SEQ ID NO: 174021 - protein, 22 aa, Influenza A virus
RRAIATPGMQIRGFVYFVETLA

SEQ ID NO: 174022 - protein, 23 aa, Influenza A virus
RRAIATPGMQIRGFVYFVETLAR

SEQ ID NO: 174023 - protein, 24 aa, Influenza A virus
RRAIATPGMQIRGFVYFVETLARS

SEQ ID NO: 174024 - protein, 25 aa, Influenza A virus
RRAIATPGMQIRGFVYFVETLARSI

SEQ ID NO: 174025 - protein, 14 aa, Influenza A virus
RRPVGISSMVEAMV

SEQ ID NO: 174026 - protein, 15 aa, Influenza A virus
RRPVGISSMVEAMVS

SEQ ID NO: 174027 - protein, 16 aa, Influenza A virus
RRPVGISSMVEAMVSR

SEQ ID NO: 174028 - protein, 17 aa, Influenza A virus
RRPVGISSMVEAMVSRA

SEQ ID NO: 174029 - protein, 18 aa, Influenza A virus
RRPVGISSMVEAMVSRAR

SEQ ID NO: 174030 - protein, 19 aa, Influenza A virus
RRPVGISSMVEAMVSRARI

SEQ ID NO: 174031 - protein, 20 aa, Influenza A virus
RRPVGISSMVEAMVSRARID

SEQ ID NO: 174032 - protein, 21 aa, Influenza A virus
RRPVGISSMVEAMVSRARIDA

SEQ ID NO: 174033 - protein, 22 aa, Influenza A virus
RRPVGISSMVEAMVSRARIDAR

SEQ ID NO: 174034 - protein, 23 aa, Influenza A virus
RRPVGISSMVEAMVSRARIDARI

SEQ ID NO: 174035 - protein, 24 aa, Influenza A virus
RRPVGISSMVEAMVSRARIDARID

SEQ ID NO: 174036 - protein, 25 aa, Influenza A virus
RRPVGISSMVEAMVSRARIDARIDF

SEQ ID NO: 174037 - protein, 16 aa, Influenza A virus
RSICEKLEQSGLPVGG

SEQ ID NO: 174038 - protein, 17 aa, Influenza A virus
RSICEKLEQSGLPVGGN

SEQ ID NO: 174039 - protein, 19 aa, Influenza A virus
RSICEKLEQSGLPVGGNEK

SEQ ID NO: 174040 - protein, 20 aa, Influenza A virus
RSICEKLEQSGLPVGGNEKK

SEQ ID NO: 174041 - protein, 21 aa, Influenza A virus
RSICEKLEQSGLPVGGNEKKA

SEQ ID NO: 174042 - protein, 22 aa, Influenza A virus
RSICEKLEQSGLPVGGNEKKAK

SEQ ID NO: 174043 - protein, 23 aa, Influenza A virus
RSICEKLEQSGLPVGGNEKKAKL

SEQ ID NO: 174044 - protein, 24 aa, Influenza A virus
RSICEKLEQSGLPVGGNEKKAKLA

SEQ ID NO: 174045 - protein, 25 aa, Influenza A virus
RSICEKLEQSGLPVGGNEKKAKLAN

SEQ ID NO: 174046 - protein, 15 aa, Influenza A virus
RSILNTSQRGILEDE

SEQ ID NO: 174047 - protein, 17 aa, Influenza A virus
RSILNTSQRGILEDEQM

SEQ ID NO: 174048 - protein, 15 aa, Influenza A virus
RSKAGLLVSDGGPNL

SEQ ID NO: 174049 - protein, 13 aa, Influenza A virus
RTGTFEFTSFFYR

SEQ ID NO: 174050 - protein, 14 aa, Influenza A virus
RTGTFEFTSFFYRY

SEQ ID NO: 174051 - protein, 15 aa, Influenza A virus
RTGTFEFTSFFYRYG

SEQ ID NO: 174052 - protein, 16 aa, Influenza A virus
RTGTFEFTSFFYRYGF

SEQ ID NO: 174053 - protein, 17 aa, Influenza A virus
RTGTFEFTSFFYRYGFV

SEQ ID NO: 174054 - protein, 18 aa, Influenza A virus
RTGTFEFTSFFYRYGFVA

SEQ ID NO: 174055 - protein, 19 aa, Influenza A virus
RTGTFEFTSFFYRYGFVAN

SEQ ID NO: 174056 - protein, 20 aa, Influenza A virus
RTGTFEFTSFFYRYGFVANF

SEQ ID NO: 174057 - protein, 21 aa, Influenza A virus
RTGTFEFTSFFYRYGFVANFS

SEQ ID NO: 174058 - protein, 22 aa, Influenza A virus
RTGTFEFTSFFYRYGFVANFSM

SEQ ID NO: 174059 - protein, 23 aa, Influenza A virus
RTGTFEFTSFFYRYGFVANFSME

SEQ ID NO: 174060 - protein, 24 aa, Influenza A virus
RTGTFEFTSFFYRYGFVANFSMEL

SEQ ID NO: 174061 - protein, 25 aa, Influenza A virus
RTGTFEFTSFFYRYGFVANFSMELP

SEQ ID NO: 174062 - protein, 13 aa, Influenza A virus
RYGFVANFSMELP

SEQ ID NO: 174063 - protein, 14 aa, Influenza A virus
RYGFVANFSMELPS

SEQ ID NO: 174064 - protein, 15 aa, Influenza A virus
RYGFVANFSMELPSF

SEQ ID NO: 174065 - protein, 16 aa, Influenza A virus
RYGFVANFSMELPSFG

SEQ ID NO: 174066 - protein, 17 aa, Influenza A virus
RYGFVANFSMELPSFGV

SEQ ID NO: 174067 - protein, 18 aa, Influenza A virus
RYGFVANFSMELPSFGVS

SEQ ID NO: 174068 - protein, 19 aa, Influenza A virus
RYGFVANFSMELPSFGVSG

SEQ ID NO: 174069 - protein, 20 aa, Influenza A virus
RYGFVANFSMELPSFGVSGI

SEQ ID NO: 174070 - protein, 21 aa, Influenza A virus
RYGFVANFSMELPSFGVSGIN

SEQ ID NO: 174071 - protein, 22 aa, Influenza A virus
RYGFVANFSMELPSFGVSGINE

SEQ ID NO: 174072 - protein, 23 aa, Influenza A virus
RYGFVANFSMELPSFGVSGINES

SEQ ID NO: 174073 - protein, 24 aa, Influenza A virus
RYGFVANFSMELPSFGVSGINESA

SEQ ID NO: 174074 - protein, 25 aa, Influenza A virus
RYGFVANFSMELPSFGVSGINESAD

SEQ ID NO: 174075 - protein, 14 aa, Influenza A virus
SADMSIGVTVIKNN

SEQ ID NO: 174076 - protein, 15 aa, Influenza A virus
SADMSIGVTVIKNNM

SEQ ID NO: 174077 - protein, 16 aa, Influenza A virus
SADMSIGVTVIKNNMI

SEQ ID NO: 174078 - protein, 17 aa, Influenza A virus
SADMSIGVTVIKNNMIN

SEQ ID NO: 174079 - protein, 18 aa, Influenza A virus
SADMSIGVTVIKNNMINN

SEQ ID NO: 174080 - protein, 19 aa, Influenza A virus
SADMSIGVTVIKNNMINND

SEQ ID NO: 174081 - protein, 20 aa, Influenza A virus
SADMSIGVTVIKNNMINNDL

SEQ ID NO: 174082 - protein, 21 aa, Influenza A virus
SADMSIGVTVIKNNMINNDLG

SEQ ID NO: 174083 - protein, 22 aa, Influenza A virus
SADMSIGVTVIKNNMINNDLGP

SEQ ID NO: 174084 - protein, 23 aa, Influenza A virus
SADMSIGVTVIKNNMINNDLGPA

SEQ ID NO: 174085 - protein, 24 aa, Influenza A virus
SADMSIGVTVIKNNMINNDLGPAT

SEQ ID NO: 174086 - protein, 25 aa, Influenza A virus
SADMSIGVTVIKNNMINNDLGPATA

SEQ ID NO: 174087 - protein, 13 aa, Influenza A virus
SDDFALIVNAPNH

SEQ ID NO: 174088 - protein, 14 aa, Influenza A virus
SDDFALIVNAPNHE

SEQ ID NO: 174089 - protein, 15 aa, Influenza A virus
SDDFALIVNAPNHEG

SEQ ID NO: 174090 - protein, 16 aa, Influenza A virus
SDDFALIVNAPNHEGI

SEQ ID NO: 174091 - protein, 17 aa, Influenza A virus
SDDFALIVNAPNHEGIQ

SEQ ID NO: 174092 - protein, 18 aa, Influenza A virus
SDDFALIVNAPNHEGIQA

SEQ ID NO: 174093 - protein, 19 aa, Influenza A virus
SDDFALIVNAPNHEGIQAG

SEQ ID NO: 174094 - protein, 20 aa, Influenza A virus
SDDFALIVNAPNHEGIQAGV

SEQ ID NO: 174095 - protein, 15 aa, Influenza A virus
SDGGPNLYNIRNLHI

SEQ ID NO: 174096 - protein, 16 aa, Influenza A virus
SDGGPNLYNIRNLHIP

SEQ ID NO: 174097 - protein, 17 aa, Influenza A virus
SDGGPNLYNIRNLHIPE

SEQ ID NO: 174098 - protein, 18 aa, Influenza A virus
SDGGPNLYNIRNLHIPEV

SEQ ID NO: 174099 - protein, 19 aa, Influenza A virus
SDGGPNLYNIRNLHIPEVC

SEQ ID NO: 174100 - protein, 20 aa, Influenza A virus
SDGGPNLYNIRNLHIPEVCL

SEQ ID NO: 174101 - protein, 21 aa, Influenza A virus
SDGGPNLYNIRNLHIPEVCLK

SEQ ID NO: 174102 - protein, 22 aa, Influenza A virus
SDGGPNLYNIRNLHIPEVCLKW

SEQ ID NO: 174103 - protein, 23 aa, Influenza A virus
SDGGPNLYNIRNLHIPEVCLKWE

SEQ ID NO: 174104 - protein, 24 aa, Influenza A virus
SDGGPNLYNIRNLHIPEVCLKWEL

SEQ ID NO: 174105 - protein, 25 aa, Influenza A virus
SDGGPNLYNIRNLHIPEVCLKWELM

SEQ ID NO: 174106 - protein, 13 aa, Influenza A virus
SFFYRYGFVANFS

SEQ ID NO: 174107 - protein, 14 aa, Influenza A virus
SFFYRYGFVANFSM

SEQ ID NO: 174108 - protein, 15 aa, Influenza A virus
SFFYRYGFVANFSME

SEQ ID NO: 174109 - protein, 16 aa, Influenza A virus
SFFYRYGFVANFSMEL

SEQ ID NO: 174110 - protein, 17 aa, Influenza A virus
SFFYRYGFVANFSMELP

SEQ ID NO: 174111 - protein, 18 aa, Influenza A virus
SFFYRYGFVANFSMELPS

SEQ ID NO: 174112 - protein, 19 aa, Influenza A virus
SFFYRYGFVANFSMELPSF

SEQ ID NO: 174113 - protein, 20 aa, Influenza A virus
SFFYRYGFVANFSMELPSFG

SEQ ID NO: 174114 - protein, 21 aa, Influenza A virus
SFFYRYGFVANFSMELPSFGV

SEQ ID NO: 174115 - protein, 22 aa, Influenza A virus
SFFYRYGFVANFSMELPSFGVS

SEQ ID NO: 174116 - protein, 23 aa, Influenza A virus
SFFYRYGFVANFSMELPSFGVSG

SEQ ID NO: 174117 - protein, 24 aa, Influenza A virus
SFFYRYGFVANFSMELPSFGVSGI

SEQ ID NO: 174118 - protein, 25 aa, Influenza A virus
SFFYRYGFVANFSMELPSFGVSGIN

SEQ ID NO: 174119 - protein, 14 aa, Influenza A virus
SFGVSGINESADMS

SEQ ID NO: 174120 - protein, 15 aa, Influenza A virus
SFGVSGINESADMSI

SEQ ID NO: 174121 - protein, 16 aa, Influenza A virus
SFGVSGINESADMSIG

SEQ ID NO: 174122 - protein, 17 aa, Influenza A virus
SFGVSGINESADMSIGV

SEQ ID NO: 174123 - protein, 18 aa, Influenza A virus
SFGVSGINESADMSIGVT

SEQ ID NO: 174124 - protein, 19 aa, Influenza A virus
SFGVSGINESADMSIGVTV

SEQ ID NO: 174125 - protein, 20 aa, Influenza A virus
SFGVSGINESADMSIGVTVI

SEQ ID NO: 174126 - protein, 21 aa, Influenza A virus
SFGVSGINESADMSIGVTVIK

SEQ ID NO: 174127 - protein, 22 aa, Influenza A virus
SFGVSGINESADMSIGVTVIKN

SEQ ID NO: 174128 - protein, 23 aa, Influenza A virus
SFGVSGINESADMSIGVTVIKNN

SEQ ID NO: 174129 - protein, 24 aa, Influenza A virus
SFGVSGINESADMSIGVTVIKNNM

SEQ ID NO: 174130 - protein, 25 aa, Influenza A virus
SFGVSGINESADMSIGVTVIKNNMI

SEQ ID NO: 174131 - protein, 20 aa, Influenza A virus
SFTITGDNTKWNENQNPRMF

SEQ ID NO: 174132 - protein, 21 aa, Influenza A virus
SFTITGDNTKWNENQNPRMFL

SEQ ID NO: 174133 - protein, 22 aa, Influenza A virus
SFTITGDNTKWNENQNPRMFLA

SEQ ID NO: 174134 - protein, 23 aa, Influenza A virus
SFTITGDNTKWNENQNPRMFLAM

SEQ ID NO: 174135 - protein, 24 aa, Influenza A virus
SFTITGDNTKWNENQNPRMFLAMI

SEQ ID NO: 174136 - protein, 25 aa, Influenza A virus
SFTITGDNTKWNENQNPRMFLAMIT

SEQ ID NO: 174137 - protein, 13 aa, Influenza A virus
SGINESADMSIGV

SEQ ID NO: 174138 - protein, 14 aa, Influenza A virus
SGINESADMSIGVT

SEQ ID NO: 174139 - protein, 15 aa, Influenza A virus
SGINESADMSIGVTV

SEQ ID NO: 174140 - protein, 16 aa, Influenza A virus
SGINESADMSIGVTVI

SEQ ID NO: 174141 - protein, 17 aa, Influenza A virus
SGINESADMSIGVTVIK

SEQ ID NO: 174142 - protein, 18 aa, Influenza A virus
SGINESADMSIGVTVIKN

SEQ ID NO: 174143 - protein, 19 aa, Influenza A virus
SGINESADMSIGVTVIKNN

SEQ ID NO: 174144 - protein, 20 aa, Influenza A virus
SGINESADMSIGVTVIKNNM

SEQ ID NO: 174145 - protein, 21 aa, Influenza A virus
SGINESADMSIGVTVIKNNMI

SEQ ID NO: 174146 - protein, 22 aa, Influenza A virus
SGINESADMSIGVTVIKNNMIN

SEQ ID NO: 174147 - protein, 23 aa, Influenza A virus
SGINESADMSIGVTVIKNNMINN

SEQ ID NO: 174148 - protein, 24 aa, Influenza A virus
SGINESADMSIGVTVIKNNMINND

SEQ ID NO: 174149 - protein, 25 aa, Influenza A virus
SGINESADMSIGVTVIKNNMINNDL

SEQ ID NO: 174150 - protein, 20 aa, Influenza A virus
SGLPVGGNEKKAKLANVVRK

SEQ ID NO: 174151 - protein, 21 aa, Influenza A virus
SGLPVGGNEKKAKLANVVRKM

SEQ ID NO: 174152 - protein, 22 aa, Influenza A virus
SGLPVGGNEKKAKLANVVRKMM

SEQ ID NO: 174153 - protein, 23 aa, Influenza A virus
SGLPVGGNEKKAKLANVVRKMMT

SEQ ID NO: 174154 - protein, 24 aa, Influenza A virus
SGLPVGGNEKKAKLANVVRKMMTN

SEQ ID NO: 174155 - protein, 25 aa, Influenza A virus
SGLPVGGNEKKAKLANVVRKMMTNS

SEQ ID NO: 174156 - protein, 13 aa, Influenza A virus
SGRLIDFLKDVME

SEQ ID NO: 174157 - protein, 14 aa, Influenza A virus
SGRLIDFLKDVMES

SEQ ID NO: 174158 - protein, 15 aa, Influenza A virus
SGRLIDFLKDVMESM

SEQ ID NO: 174159 - protein, 15 aa, Influenza A virus
SGYAQTDCVLEAMAF

SEQ ID NO: 174160 - protein, 16 aa, Influenza A virus
SGYAQTDCVLEAMAFL

SEQ ID NO: 174161 - protein, 17 aa, Influenza A virus
SGYAQTDCVLEAMAFLE

SEQ ID NO: 174162 - protein, 18 aa, Influenza A virus
SGYAQTDCVLEAMAFLEE

SEQ ID NO: 174163 - protein, 19 aa, Influenza A virus
SGYAQTDCVLEAMAFLEES

SEQ ID NO: 174164 - protein, 20 aa, Influenza A virus
SGYAQTDCVLEAMAFLEESH

SEQ ID NO: 174165 - protein, 21 aa, Influenza A virus
SGYAQTDCVLEAMAFLEESHP

SEQ ID NO: 174166 - protein, 22 aa, Influenza A virus
SGYAQTDCVLEAMAFLEESHPG

SEQ ID NO: 174167 - protein, 23 aa, Influenza A virus
SGYAQTDCVLEAMAFLEESHPGI

SEQ ID NO: 174168 - protein, 24 aa, Influenza A virus
SGYAQTDCVLEAMAFLEESHPGIF

SEQ ID NO: 174169 - protein, 25 aa, Influenza A virus
SGYAQTDCVLEAMAFLEESHPGIFE

SEQ ID NO: 174170 - protein, 14 aa, Influenza A virus
SHGTGTGYTMDTVN

SEQ ID NO: 174171 - protein, 15 aa, Influenza A virus
SHGTGTGYTMDTVNR

SEQ ID NO: 174172 - protein, 16 aa, Influenza A virus
SHGTGTGYTMDTVNRT

SEQ ID NO: 174173 - protein, 17 aa, Influenza A virus
SHGTGTGYTMDTVNRTH

SEQ ID NO: 174174 - protein, 18 aa, Influenza A virus
SHGTGTGYTMDTVNRTHQ

SEQ ID NO: 174175 - protein, 19 aa, Influenza A virus
SHGTGTGYTMDTVNRTHQY

SEQ ID NO: 174176 - protein, 20 aa, Influenza A virus
SHGTGTGYTMDTVNRTHQYS

SEQ ID NO: 174177 - protein, 21 aa, Influenza A virus
SHGTGTGYTMDTVNRTHQYSE

SEQ ID NO: 174178 - protein, 13 aa, Influenza A virus
SIAPIMFSNKMAR

SEQ ID NO: 174179 - protein, 14 aa, Influenza A virus
SIAPIMFSNKMARL

SEQ ID NO: 174180 - protein, 15 aa, Influenza A virus
SIAPIMFSNKMARLG

SEQ ID NO: 174181 - protein, 16 aa, Influenza A virus
SIAPIMFSNKMARLGK

SEQ ID NO: 174182 - protein, 17 aa, Influenza A virus
SIAPIMFSNKMARLGKG

SEQ ID NO: 174183 - protein, 18 aa, Influenza A virus
SIAPIMFSNKMARLGKGY

SEQ ID NO: 174184 - protein, 19 aa, Influenza A virus
SIAPIMFSNKMARLGKGYM

SEQ ID NO: 174185 - protein, 20 aa, Influenza A virus
SIAPIMFSNKMARLGKGYMF

SEQ ID NO: 174186 - protein, 21 aa, Influenza A virus
SIAPIMFSNKMARLGKGYMFE

SEQ ID NO: 174187 - protein, 22 aa, Influenza A virus
SIAPIMFSNKMARLGKGYMFES

SEQ ID NO: 174188 - protein, 23 aa, Influenza A virus
SIAPIMFSNKMARLGKGYMFESK

SEQ ID NO: 174189 - protein, 15 aa, Influenza A virus
SICEKLEQSGLPVGG

SEQ ID NO: 174190 - protein, 16 aa, Influenza A virus
SICEKLEQSGLPVGGN

SEQ ID NO: 174191 - protein, 17 aa, Influenza A virus
SICEKLEQSGLPVGGNE

SEQ ID NO: 174192 - protein, 18 aa, Influenza A virus
SICEKLEQSGLPVGGNEK

SEQ ID NO: 174193 - protein, 19 aa, Influenza A virus
SICEKLEQSGLPVGGNEKK

SEQ ID NO: 174194 - protein, 20 aa, Influenza A virus
SICEKLEQSGLPVGGNEKKA

SEQ ID NO: 174195 - protein, 21 aa, Influenza A virus
SICEKLEQSGLPVGGNEKKAK

SEQ ID NO: 174196 - protein, 22 aa, Influenza A virus
SICEKLEQSGLPVGGNEKKAKL

SEQ ID NO: 174197 - protein, 23 aa, Influenza A virus
SICEKLEQSGLPVGGNEKKAKLA

SEQ ID NO: 174198 - protein, 24 aa, Influenza A virus
SICEKLEQSGLPVGGNEKKAKLAN

SEQ ID NO: 174199 - protein, 25 aa, Influenza A virus
SICEKLEQSGLPVGGNEKKAKLANV

SEQ ID NO: 174200 - protein, 13 aa, Influenza A virus
SIGVTVIKNNMIN

SEQ ID NO: 174201 - protein, 14 aa, Influenza A virus
SIGVTVIKNNMINN

SEQ ID NO: 174202 - protein, 15 aa, Influenza A virus
SIGVTVIKNNMINND

SEQ ID NO: 174203 - protein, 16 aa, Influenza A virus
SIGVTVIKNNMINNDL

SEQ ID NO: 174204 - protein, 17 aa, Influenza A virus
SIGVTVIKNNMINNDLG

SEQ ID NO: 174205 - protein, 18 aa, Influenza A virus
SIGVTVIKNNMINNDLGP

SEQ ID NO: 174206 - protein, 19 aa, Influenza A virus
SIGVTVIKNNMINNDLGPA

SEQ ID NO: 174207 - protein, 20 aa, Influenza A virus
SIGVTVIKNNMINNDLGPAT

SEQ ID NO: 174208 - protein, 21 aa, Influenza A virus
SIGVTVIKNNMINNDLGPATA

SEQ ID NO: 174209 - protein, 22 aa, Influenza A virus
SIGVTVIKNNMINNDLGPATAQ

SEQ ID NO: 174210 - protein, 23 aa, Influenza A virus
SIGVTVIKNNMINNDLGPATAQM

SEQ ID NO: 174211 - protein, 24 aa, Influenza A virus
SIGVTVIKNNMINNDLGPATAQMA

SEQ ID NO: 174212 - protein, 25 aa, Influenza A virus
SIGVTVIKNNMINNDLGPATAQMAL

SEQ ID NO: 174213 - protein, 15 aa, Influenza A virus
SILNTSQRGILEDEQ

SEQ ID NO: 174214 - protein, 15 aa, Influenza A virus
SKAGLLVSDGGPNLY

SEQ ID NO: 174215 - protein, 16 aa, Influenza A virus
SKAGLLVSDGGPNLYN

SEQ ID NO: 174216 - protein, 17 aa, Influenza A virus
SKAGLLVSDGGPNLYNI

SEQ ID NO: 174217 - protein, 19 aa, Influenza A virus
SKAGLLVSDGGPNLYNIRN

SEQ ID NO: 174218 - protein, 20 aa, Influenza A virus
SKAGLLVSDGGPNLYNIRNL

SEQ ID NO: 174219 - protein, 21 aa, Influenza A virus
SKAGLLVSDGGPNLYNIRNLH

SEQ ID NO: 174220 - protein, 22 aa, Influenza A virus
SKAGLLVSDGGPNLYNIRNLHI

SEQ ID NO: 174221 - protein, 23 aa, Influenza A virus
SKAGLLVSDGGPNLYNIRNLHIP

SEQ ID NO: 174222 - protein, 24 aa, Influenza A virus
SKAGLLVSDGGPNLYNIRNLHIPE

SEQ ID NO: 174223 - protein, 25 aa, Influenza A virus
SKAGLLVSDGGPNLYNIRNLHIPEV

SEQ ID NO: 174224 - protein, 15 aa, Influenza A virus
SKKKSYINRTGTFEF

SEQ ID NO: 174225 - protein, 16 aa, Influenza A virus
SKKKSYINRTGTFEFT

SEQ ID NO: 174226 - protein, 17 aa, Influenza A virus
SKKKSYINRTGTFEFTS

SEQ ID NO: 174227 - protein, 19 aa, Influenza A virus
SKKKSYINRTGTFEFTSFF

SEQ ID NO: 174228 - protein, 20 aa, Influenza A virus
SKKKSYINRTGTFEFTSFFY

SEQ ID NO: 174229 - protein, 21 aa, Influenza A virus
SKKKSYINRTGTFEFTSFFYR

SEQ ID NO: 174230 - protein, 22 aa, Influenza A virus
SKKKSYINRTGTFEFTSFFYRY

SEQ ID NO: 174231 - protein, 23 aa, Influenza A virus
SKKKSYINRTGTFEFTSFFYRYG

SEQ ID NO: 174232 - protein, 24 aa, Influenza A virus
SKKKSYINRTGTFEFTSFFYRYGF

SEQ ID NO: 174233 - protein, 25 aa, Influenza A virus
SKKKSYINRTGTFEFTSFFYRYGFV

SEQ ID NO: 174234 - protein, 14 aa, Influenza A virus
SLSPGMMMGMFNML

SEQ ID NO: 174235 - protein, 15 aa, Influenza A virus
SLSPGMMMGMFNMLS

SEQ ID NO: 174236 - protein, 16 aa, Influenza A virus
SLSPGMMMGMFNMLST

SEQ ID NO: 174237 - protein, 17 aa, Influenza A virus
SLSPGMMMGMFNMLSTV

SEQ ID NO: 174238 - protein, 18 aa, Influenza A virus
SLSPGMMMGMFNMLSTVL

SEQ ID NO: 174239 - protein, 19 aa, Influenza A virus
SLSPGMMMGMFNMLSTVLG

SEQ ID NO: 174240 - protein, 20 aa, Influenza A virus
SLSPGMMMGMFNMLSTVLGV

SEQ ID NO: 174241 - protein, 21 aa, Influenza A virus
SLSPGMMMGMFNMLSTVLGVS

SEQ ID NO: 174242 - protein, 22 aa, Influenza A virus
SLSPGMMMGMFNMLSTVLGVSI

SEQ ID NO: 174243 - protein, 23 aa, Influenza A virus
SLSPGMMMGMFNMLSTVLGVSIL

SEQ ID NO: 174244 - protein, 24 aa, Influenza A virus
SLSPGMMMGMFNMLSTVLGVSILN

SEQ ID NO: 174245 - protein, 25 aa, Influenza A virus
SLSPGMMMGMFNMLSTVLGVSILNL

SEQ ID NO: 174246 - protein, 14 aa, Influenza A virus
SMELPSFGVSGINE

SEQ ID NO: 174247 - protein, 15 aa, Influenza A virus
SMELPSFGVSGINES

SEQ ID NO: 174248 - protein, 16 aa, Influenza A virus
SMELPSFGVSGINESA

SEQ ID NO: 174249 - protein, 17 aa, Influenza A virus
SMELPSFGVSGINESAD

SEQ ID NO: 174250 - protein, 18 aa, Influenza A virus
SMELPSFGVSGINESADM

SEQ ID NO: 174251 - protein, 19 aa, Influenza A virus
SMELPSFGVSGINESADMS

SEQ ID NO: 174252 - protein, 20 aa, Influenza A virus
SMELPSFGVSGINESADMSI

SEQ ID NO: 174253 - protein, 21 aa, Influenza A virus
SMELPSFGVSGINESADMSIG

SEQ ID NO: 174254 - protein, 22 aa, Influenza A virus
SMELPSFGVSGINESADMSIGV

SEQ ID NO: 174255 - protein, 23 aa, Influenza A virus
SMELPSFGVSGINESADMSIGVT

SEQ ID NO: 174256 - protein, 24 aa, Influenza A virus
SMELPSFGVSGINESADMSIGVTV

SEQ ID NO: 174257 - protein, 25 aa, Influenza A virus
SMELPSFGVSGINESADMSIGVTVI

SEQ ID NO: 174258 - protein, 13 aa, Influenza A virus
SMVEAMVSRARID

SEQ ID NO: 174259 - protein, 14 aa, Influenza A virus
SMVEAMVSRARIDA

SEQ ID NO: 174260 - protein, 15 aa, Influenza A virus
SMVEAMVSRARIDAR

SEQ ID NO: 174261 - protein, 16 aa, Influenza A virus
SMVEAMVSRARIDARI

SEQ ID NO: 174262 - protein, 17 aa, Influenza A virus
SMVEAMVSRARIDARID

SEQ ID NO: 174263 - protein, 18 aa, Influenza A virus
SMVEAMVSRARIDARIDF

SEQ ID NO: 174264 - protein, 19 aa, Influenza A virus
SMVEAMVSRARIDARIDFE

SEQ ID NO: 174265 - protein, 20 aa, Influenza A virus
SMVEAMVSRARIDARIDFES

SEQ ID NO: 174266 - protein, 21 aa, Influenza A virus
SMVEAMVSRARIDARIDFESG

SEQ ID NO: 174267 - protein, 22 aa, Influenza A virus
SMVEAMVSRARIDARIDFESGR

SEQ ID NO: 174268 - protein, 23 aa, Influenza A virus
SMVEAMVSRARIDARIDFESGRI

SEQ ID NO: 174269 - protein, 24 aa, Influenza A virus
SMVEAMVSRARIDARIDFESGRIK

SEQ ID NO: 174270 - protein, 25 aa, Influenza A virus
SMVEAMVSRARIDARIDFESGRIKK

SEQ ID NO: 174271 - protein, 14 aa, Influenza A virus
SNKMARLGKGYMFE

SEQ ID NO: 174272 - protein, 15 aa, Influenza A virus
SNKMARLGKGYMFES

SEQ ID NO: 174273 - protein, 16 aa, Influenza A virus
SNKMARLGKGYMFESK

SEQ ID NO: 174274 - protein, 13 aa, Influenza A virus
SPGMMMGMFNMLS

SEQ ID NO: 174275 - protein, 14 aa, Influenza A virus
SPGMMMGMFNMLST

SEQ ID NO: 174276 - protein, 15 aa, Influenza A virus
SPGMMMGMFNMLSTV

SEQ ID NO: 174277 - protein, 16 aa, Influenza A virus
SPGMMMGMFNMLSTVL

SEQ ID NO: 174278 - protein, 17 aa, Influenza A virus
SPGMMMGMFNMLSTVLG

SEQ ID NO: 174279 - protein, 18 aa, Influenza A virus
SPGMMMGMFNMLSTVLGV

SEQ ID NO: 174280 - protein, 19 aa, Influenza A virus
SPGMMMGMFNMLSTVLGVS

SEQ ID NO: 174281 - protein, 20 aa, Influenza A virus
SPGMMMGMFNMLSTVLGVSI

SEQ ID NO: 174282 - protein, 21 aa, Influenza A virus
SPGMMMGMFNMLSTVLGVSIL

SEQ ID NO: 174283 - protein, 22 aa, Influenza A virus
SPGMMMGMFNMLSTVLGVSILN

SEQ ID NO: 174284 - protein, 23 aa, Influenza A virus
SPGMMMGMFNMLSTVLGVSILNL

SEQ ID NO: 174285 - protein, 24 aa, Influenza A virus
SPGMMMGMFNMLSTVLGVSILNLG

SEQ ID NO: 174286 - protein, 25 aa, Influenza A virus
SPGMMMGMFNMLSTVLGVSILNLGQ

SEQ ID NO: 174287 - protein, 20 aa, Influenza A virus
SQDTELSFTITGDNTKWNEN

SEQ ID NO: 174288 - protein, 14 aa, Influenza A virus
SRARIDARIDFESG

SEQ ID NO: 174289 - protein, 15 aa, Influenza A virus
SRARIDARIDFESGR

SEQ ID NO: 174290 - protein, 16 aa, Influenza A virus
SRARIDARIDFESGRI

SEQ ID NO: 174291 - protein, 17 aa, Influenza A virus
SRARIDARIDFESGRIK

SEQ ID NO: 174292 - protein, 19 aa, Influenza A virus
SRARIDARIDFESGRIKKE

SEQ ID NO: 174293 - protein, 20 aa, Influenza A virus
SRARIDARIDFESGRIKKEE

SEQ ID NO: 174294 - protein, 21 aa, Influenza A virus
SRARIDARIDFESGRIKKEEF

SEQ ID NO: 174295 - protein, 13 aa, Influenza A virus
SSDDFALIVNAPN

SEQ ID NO: 174296 - protein, 14 aa, Influenza A virus
SSDDFALIVNAPNH

SEQ ID NO: 174297 - protein, 15 aa, Influenza A virus
SSDDFALIVNAPNHE

SEQ ID NO: 174298 - protein, 16 aa, Influenza A virus
SSDDFALIVNAPNHEG

SEQ ID NO: 174299 - protein, 17 aa, Influenza A virus
SSDDFALIVNAPNHEGI

SEQ ID NO: 174300 - protein, 18 aa, Influenza A virus
SSDDFALIVNAPNHEGIQ

SEQ ID NO: 174301 - protein, 19 aa, Influenza A virus
SSDDFALIVNAPNHEGIQA

SEQ ID NO: 174302 - protein, 20 aa, Influenza A virus
SSDDFALIVNAPNHEGIQAG

SEQ ID NO: 174303 - protein, 21 aa, Influenza A virus
SSDDFALIVNAPNHEGIQAGV

SEQ ID NO: 174304 - protein, 13 aa, Influenza A virus
SSMVEAMVSRARI

SEQ ID NO: 174305 - protein, 14 aa, Influenza A virus
SSMVEAMVSRARID

SEQ ID NO: 174306 - protein, 15 aa, Influenza A virus
SSMVEAMVSRARIDA

SEQ ID NO: 174307 - protein, 16 aa, Influenza A virus
SSMVEAMVSRARIDAR

SEQ ID NO: 174308 - protein, 17 aa, Influenza A virus
SSMVEAMVSRARIDARI

SEQ ID NO: 174309 - protein, 18 aa, Influenza A virus
SSMVEAMVSRARIDARID

SEQ ID NO: 174310 - protein, 19 aa, Influenza A virus
SSMVEAMVSRARIDARIDF

SEQ ID NO: 174311 - protein, 20 aa, Influenza A virus
SSMVEAMVSRARIDARIDFE

SEQ ID NO: 174312 - protein, 21 aa, Influenza A virus
SSMVEAMVSRARIDARIDFES

SEQ ID NO: 174313 - protein, 22 aa, Influenza A virus
SSMVEAMVSRARIDARIDFESG

SEQ ID NO: 174314 - protein, 23 aa, Influenza A virus
SSMVEAMVSRARIDARIDFESGR

SEQ ID NO: 174315 - protein, 24 aa, Influenza A virus
SSMVEAMVSRARIDARIDFESGRI

SEQ ID NO: 174316 - protein, 25 aa, Influenza A virus
SSMVEAMVSRARIDARIDFESGRIK

SEQ ID NO: 174317 - protein, 15 aa, Influenza A virus
SSSYRRPVGISSMVE

SEQ ID NO: 174318 - protein, 16 aa, Influenza A virus
SSSYRRPVGISSMVEA

SEQ ID NO: 174319 - protein, 17 aa, Influenza A virus
SSSYRRPVGISSMVEAM

SEQ ID NO: 174320 - protein, 18 aa, Influenza A virus
SSSYRRPVGISSMVEAMV

SEQ ID NO: 174321 - protein, 19 aa, Influenza A virus
SSSYRRPVGISSMVEAMVS

SEQ ID NO: 174322 - protein, 20 aa, Influenza A virus
SSSYRRPVGISSMVEAMVSR

SEQ ID NO: 174323 - protein, 21 aa, Influenza A virus
SSSYRRPVGISSMVEAMVSRA

SEQ ID NO: 174324 - protein, 22 aa, Influenza A virus
SSSYRRPVGISSMVEAMVSRAR

SEQ ID NO: 174325 - protein, 23 aa, Influenza A virus
SSSYRRPVGISSMVEAMVSRARI

SEQ ID NO: 174326 - protein, 24 aa, Influenza A virus
SSSYRRPVGISSMVEAMVSRARID

SEQ ID NO: 174327 - protein, 25 aa, Influenza A virus
SSSYRRPVGISSMVEAMVSRARIDA

SEQ ID NO: 174328 - protein, 15 aa, Influenza A virus
SSYRRPVGISSMVEA

SEQ ID NO: 174329 - protein, 16 aa, Influenza A virus
SSYRRPVGISSMVEAM

SEQ ID NO: 174330 - protein, 17 aa, Influenza A virus
SSYRRPVGISSMVEAMV

SEQ ID NO: 174331 - protein, 18 aa, Influenza A virus
SSYRRPVGISSMVEAMVS

SEQ ID NO: 174332 - protein, 19 aa, Influenza A virus
SSYRRPVGISSMVEAMVSR

SEQ ID NO: 174333 - protein, 20 aa, Influenza A virus
SSYRRPVGISSMVEAMVSRA

SEQ ID NO: 174334 - protein, 21 aa, Influenza A virus
SSYRRPVGISSMVEAMVSRAR

SEQ ID NO: 174335 - protein, 22 aa, Influenza A virus
SSYRRPVGISSMVEAMVSRARI

SEQ ID NO: 174336 - protein, 23 aa, Influenza A virus
SSYRRPVGISSMVEAMVSRARID

SEQ ID NO: 174337 - protein, 24 aa, Influenza A virus
SSYRRPVGISSMVEAMVSRARIDA

SEQ ID NO: 174338 - protein, 25 aa, Influenza A virus
SSYRRPVGISSMVEAMVSRARIDAR

SEQ ID NO: 174339 - protein, 15 aa, Influenza A virus
STTFPYTGDPPYSHG

SEQ ID NO: 174340 - protein, 16 aa, Influenza A virus
STTFPYTGDPPYSHGT

SEQ ID NO: 174341 - protein, 20 aa, Influenza A virus
STTFPYTGDPPYSHGTGTGY

SEQ ID NO: 174342 - protein, 22 aa, Influenza A virus
STTFPYTGDPPYSHGTGTGYTM

SEQ ID NO: 174343 - protein, 23 aa, Influenza A virus
STTFPYTGDPPYSHGTGTGYTMD

SEQ ID NO: 174344 - protein, 24 aa, Influenza A virus
STTFPYTGDPPYSHGTGTGYTMDT

SEQ ID NO: 174345 - protein, 25 aa, Influenza A virus
STTFPYTGDPPYSHGTGTGYTMDTV

SEQ ID NO: 174346 - protein, 13 aa, Influenza A virus
STVLGVSILNLGQ

SEQ ID NO: 174347 - protein, 14 aa, Influenza A virus
STVLGVSILNLGQK

SEQ ID NO: 174348 - protein, 14 aa, Influenza A virus
SYINRTGTFEFTSF

SEQ ID NO: 174349 - protein, 15 aa, Influenza A virus
SYINRTGTFEFTSFF

SEQ ID NO: 174350 - protein, 16 aa, Influenza A virus
SYINRTGTFEFTSFFY

SEQ ID NO: 174351 - protein, 17 aa, Influenza A virus
SYINRTGTFEFTSFFYR

SEQ ID NO: 174352 - protein, 18 aa, Influenza A virus
SYINRTGTFEFTSFFYRY

SEQ ID NO: 174353 - protein, 19 aa, Influenza A virus
SYINRTGTFEFTSFFYRYG

SEQ ID NO: 174354 - protein, 20 aa, Influenza A virus
SYINRTGTFEFTSFFYRYGF

SEQ ID NO: 174355 - protein, 21 aa, Influenza A virus
SYINRTGTFEFTSFFYRYGFV

SEQ ID NO: 174356 - protein, 22 aa, Influenza A virus
SYINRTGTFEFTSFFYRYGFVA

SEQ ID NO: 174357 - protein, 23 aa, Influenza A virus
SYINRTGTFEFTSFFYRYGFVAN

SEQ ID NO: 174358 - protein, 24 aa, Influenza A virus
SYINRTGTFEFTSFFYRYGFVANF

SEQ ID NO: 174359 - protein, 25 aa, Influenza A virus
SYINRTGTFEFTSFFYRYGFVANFS

SEQ ID NO: 174360 - protein, 13 aa, Influenza A virus
SYLIRALTLNTMT

SEQ ID NO: 174361 - protein, 14 aa, Influenza A virus
SYLIRALTLNTMTK

SEQ ID NO: 174362 - protein, 15 aa, Influenza A virus
SYLIRALTLNTMTKD

SEQ ID NO: 174363 - protein, 16 aa, Influenza A virus
SYLIRALTLNTMTKDA

SEQ ID NO: 174364 - protein, 17 aa, Influenza A virus
SYLIRALTLNTMTKDAE

SEQ ID NO: 174365 - protein, 18 aa, Influenza A virus
SYLIRALTLNTMTKDAER

SEQ ID NO: 174366 - protein, 19 aa, Influenza A virus
SYLIRALTLNTMTKDAERG

SEQ ID NO: 174367 - protein, 20 aa, Influenza A virus
SYLIRALTLNTMTKDAERGK

SEQ ID NO: 174368 - protein, 21 aa, Influenza A virus
SYLIRALTLNTMTKDAERGKL

SEQ ID NO: 174369 - protein, 22 aa, Influenza A virus
SYLIRALTLNTMTKDAERGKLK

SEQ ID NO: 174370 - protein, 23 aa, Influenza A virus
SYLIRALTLNTMTKDAERGKLKR

SEQ ID NO: 174371 - protein, 24 aa, Influenza A virus
SYLIRALTLNTMTKDAERGKLKRR

SEQ ID NO: 174372 - protein, 25 aa, Influenza A virus
SYLIRALTLNTMTKDAERGKLKRRA

SEQ ID NO: 174373 - protein, 15 aa, Influenza A virus
SYRRPVGISSMVEAM

SEQ ID NO: 174374 - protein, 16 aa, Influenza A virus
SYRRPVGISSMVEAMV

SEQ ID NO: 174375 - protein, 17 aa, Influenza A virus
SYRRPVGISSMVEAMVS

SEQ ID NO: 174376 - protein, 18 aa, Influenza A virus
SYRRPVGISSMVEAMVSR

SEQ ID NO: 174377 - protein, 19 aa, Influenza A virus
SYRRPVGISSMVEAMVSRA

SEQ ID NO: 174378 - protein, 20 aa, Influenza A virus
SYRRPVGISSMVEAMVSRAR

SEQ ID NO: 174379 - protein, 21 aa, Influenza A virus
SYRRPVGISSMVEAMVSRARI

SEQ ID NO: 174380 - protein, 22 aa, Influenza A virus
SYRRPVGISSMVEAMVSRARID

SEQ ID NO: 174381 - protein, 23 aa, Influenza A virus
SYRRPVGISSMVEAMVSRARIDA

SEQ ID NO: 174382 - protein, 24 aa, Influenza A virus
SYRRPVGISSMVEAMVSRARIDAR

SEQ ID NO: 174383 - protein, 25 aa, Influenza A virus
SYRRPVGISSMVEAMVSRARIDARI

SEQ ID NO: 174384 - protein, 14 aa, Influenza A virus
TALANTIEVFRSNG

SEQ ID NO: 174385 - protein, 13 aa, Influenza A virus
TAQMALQLFIKDY

SEQ ID NO: 174386 - protein, 14 aa, Influenza A virus
TAQMALQLFIKDYR

SEQ ID NO: 174387 - protein, 15 aa, Influenza A virus
TAQMALQLFIKDYRY

SEQ ID NO: 174388 - protein, 16 aa, Influenza A virus
TAQMALQLFIKDYRYT

SEQ ID NO: 174389 - protein, 17 aa, Influenza A virus
TAQMALQLFIKDYRYTY

SEQ ID NO: 174390 - protein, 18 aa, Influenza A virus
TAQMALQLFIKDYRYTYR

SEQ ID NO: 174391 - protein, 19 aa, Influenza A virus
TAQMALQLFIKDYRYTYRC

SEQ ID NO: 174392 - protein, 20 aa, Influenza A virus
TAQMALQLFIKDYRYTYRCH

SEQ ID NO: 174393 - protein, 21 aa, Influenza A virus
TAQMALQLFIKDYRYTYRCHR

SEQ ID NO: 174394 - protein, 22 aa, Influenza A virus
TAQMALQLFIKDYRYTYRCHRG

SEQ ID NO: 174395 - protein, 23 aa, Influenza A virus
TAQMALQLFIKDYRYTYRCHRGD

SEQ ID NO: 174396 - protein, 24 aa, Influenza A virus
TAQMALQLFIKDYRYTYRCHRGDT

SEQ ID NO: 174397 - protein, 25 aa, Influenza A virus
TAQMALQLFIKDYRYTYRCHRGDTQ

SEQ ID NO: 174398 - protein, 14 aa, Influenza A virus
TASLSPGMMMGMFN

SEQ ID NO: 174399 - protein, 15 aa, Influenza A virus
TASLSPGMMMGMFNM

SEQ ID NO: 174400 - protein, 16 aa, Influenza A virus
TASLSPGMMMGMFNML

SEQ ID NO: 174401 - protein, 17 aa, Influenza A virus
TASLSPGMMMGMFNMLS

SEQ ID NO: 174402 - protein, 18 aa, Influenza A virus
TASLSPGMMMGMFNMLST

SEQ ID NO: 174403 - protein, 19 aa, Influenza A virus
TASLSPGMMMGMFNMLSTV

SEQ ID NO: 174404 - protein, 20 aa, Influenza A virus
TASLSPGMMMGMFNMLSTVL

SEQ ID NO: 174405 - protein, 21 aa, Influenza A virus
TASLSPGMMMGMFNMLSTVLG

SEQ ID NO: 174406 - protein, 22 aa, Influenza A virus
TASLSPGMMMGMFNMLSTVLGV

SEQ ID NO: 174407 - protein, 23 aa, Influenza A virus
TASLSPGMMMGMFNMLSTVLGVS

SEQ ID NO: 174408 - protein, 24 aa, Influenza A virus
TASLSPGMMMGMFNMLSTVLGVSI

SEQ ID NO: 174409 - protein, 25 aa, Influenza A virus
TASLSPGMMMGMFNMLSTVLGVSIL

SEQ ID NO: 174410 - protein, 13 aa, Influenza A virus
TDCVLEAMAFLEE

SEQ ID NO: 174411 - protein, 14 aa, Influenza A virus
TDCVLEAMAFLEES

SEQ ID NO: 174412 - protein, 15 aa, Influenza A virus
TDCVLEAMAFLEESH

SEQ ID NO: 174413 - protein, 16 aa, Influenza A virus
TDCVLEAMAFLEESHP

SEQ ID NO: 174414 - protein, 17 aa, Influenza A virus
TDCVLEAMAFLEESHPG

SEQ ID NO: 174415 - protein, 18 aa, Influenza A virus
TDCVLEAMAFLEESHPGI

SEQ ID NO: 174416 - protein, 19 aa, Influenza A virus
TDCVLEAMAFLEESHPGIF

SEQ ID NO: 174417 - protein, 20 aa, Influenza A virus
TDCVLEAMAFLEESHPGIFE

SEQ ID NO: 174418 - protein, 21 aa, Influenza A virus
TDCVLEAMAFLEESHPGIFEN

SEQ ID NO: 174419 - protein, 22 aa, Influenza A virus
TDCVLEAMAFLEESHPGIFENS

SEQ ID NO: 174420 - protein, 23 aa, Influenza A virus
TDCVLEAMAFLEESHPGIFENSC

SEQ ID NO: 174421 - protein, 15 aa, Influenza A virus
TELSFTITGDNTKWN

SEQ ID NO: 174422 - protein, 20 aa, Influenza A virus
TELSFTITGDNTKWNENQNP

SEQ ID NO: 174423 - protein, 15 aa, Influenza A virus
TETGAPQLNPIDGPL

SEQ ID NO: 174424 - protein, 13 aa, Influenza A virus
TFEFTSFFYRYGF

SEQ ID NO: 174425 - protein, 14 aa, Influenza A virus
TFEFTSFFYRYGFV

SEQ ID NO: 174426 - protein, 15 aa, Influenza A virus
TFEFTSFFYRYGFVA

SEQ ID NO: 174427 - protein, 16 aa, Influenza A virus
TFEFTSFFYRYGFVAN

SEQ ID NO: 174428 - protein, 17 aa, Influenza A virus
TFEFTSFFYRYGFVANF

SEQ ID NO: 174429 - protein, 18 aa, Influenza A virus
TFEFTSFFYRYGFVANFS

SEQ ID NO: 174430 - protein, 19 aa, Influenza A virus
TFEFTSFFYRYGFVANFSM

SEQ ID NO: 174431 - protein, 20 aa, Influenza A virus
TFEFTSFFYRYGFVANFSME

SEQ ID NO: 174432 - protein, 21 aa, Influenza A virus
TFEFTSFFYRYGFVANFSMEL

SEQ ID NO: 174433 - protein, 22 aa, Influenza A virus
TFEFTSFFYRYGFVANFSMELP

SEQ ID NO: 174434 - protein, 23 aa, Influenza A virus
TFEFTSFFYRYGFVANFSMELPS

SEQ ID NO: 174435 - protein, 24 aa, Influenza A virus
TFEFTSFFYRYGFVANFSMELPSF

SEQ ID NO: 174436 - protein, 25 aa, Influenza A virus
TFEFTSFFYRYGFVANFSMELPSFG

SEQ ID NO: 174437 - protein, 15 aa, Influenza A virus
TFPYTGDPPYSHGTG

SEQ ID NO: 174438 - protein, 16 aa, Influenza A virus
TFPYTGDPPYSHGTGT

SEQ ID NO: 174439 - protein, 20 aa, Influenza A virus
TFPYTGDPPYSHGTGTGYTM

SEQ ID NO: 174440 - protein, 22 aa, Influenza A virus
TFPYTGDPPYSHGTGTGYTMDT

SEQ ID NO: 174441 - protein, 23 aa, Influenza A virus
TFPYTGDPPYSHGTGTGYTMDTV

SEQ ID NO: 174442 - protein, 24 aa, Influenza A virus
TFPYTGDPPYSHGTGTGYTMDTVN

SEQ ID NO: 174443 - protein, 25 aa, Influenza A virus
TFPYTGDPPYSHGTGTGYTMDTVNR

SEQ ID NO: 174444 - protein, 17 aa, Influenza A virus
TGDNTKWNENQNPRMFL

SEQ ID NO: 174445 - protein, 19 aa, Influenza A virus
TGDNTKWNENQNPRMFLAM

SEQ ID NO: 174446 - protein, 20 aa, Influenza A virus
TGDNTKWNENQNPRMFLAMI

SEQ ID NO: 174447 - protein, 21 aa, Influenza A virus
TGDNTKWNENQNPRMFLAMIT

SEQ ID NO: 174448 - protein, 22 aa, Influenza A virus
TGDNTKWNENQNPRMFLAMITY

SEQ ID NO: 174449 - protein, 23 aa, Influenza A virus
TGDNTKWNENQNPRMFLAMITYI

SEQ ID NO: 174450 - protein, 24 aa, Influenza A virus
TGDNTKWNENQNPRMFLAMITYIT

SEQ ID NO: 174451 - protein, 16 aa, Influenza A virus
TGDPPYSHGTGTGYTM

SEQ ID NO: 174452 - protein, 19 aa, Influenza A virus
TGDPPYSHGTGTGYTMDTV

SEQ ID NO: 174453 - protein, 20 aa, Influenza A virus
TGDPPYSHGTGTGYTMDTVN

SEQ ID NO: 174454 - protein, 21 aa, Influenza A virus
TGDPPYSHGTGTGYTMDTVNR

SEQ ID NO: 174455 - protein, 22 aa, Influenza A virus
TGDPPYSHGTGTGYTMDTVNRT

SEQ ID NO: 174456 - protein, 23 aa, Influenza A virus
TGDPPYSHGTGTGYTMDTVNRTH

SEQ ID NO: 174457 - protein, 24 aa, Influenza A virus
TGDPPYSHGTGTGYTMDTVNRTHQ

SEQ ID NO: 174458 - protein, 25 aa, Influenza A virus
TGDPPYSHGTGTGYTMDTVNRTHQY

SEQ ID NO: 174459 - protein, 13 aa, Influenza A virus
TGTFEFTSFFYRY

SEQ ID NO: 174460 - protein, 14 aa, Influenza A virus
TGTFEFTSFFYRYG

SEQ ID NO: 174461 - protein, 15 aa, Influenza A virus
TGTFEFTSFFYRYGF

SEQ ID NO: 174462 - protein, 16 aa, Influenza A virus
TGTFEFTSFFYRYGFV

SEQ ID NO: 174463 - protein, 17 aa, Influenza A virus
TGTFEFTSFFYRYGFVA

SEQ ID NO: 174464 - protein, 18 aa, Influenza A virus
TGTFEFTSFFYRYGFVAN

SEQ ID NO: 174465 - protein, 19 aa, Influenza A virus
TGTFEFTSFFYRYGFVANF

SEQ ID NO: 174466 - protein, 20 aa, Influenza A virus
TGTFEFTSFFYRYGFVANFS

SEQ ID NO: 174467 - protein, 21 aa, Influenza A virus
TGTFEFTSFFYRYGFVANFSM

SEQ ID NO: 174468 - protein, 22 aa, Influenza A virus
TGTFEFTSFFYRYGFVANFSME

SEQ ID NO: 174469 - protein, 23 aa, Influenza A virus
TGTFEFTSFFYRYGFVANFSMEL

SEQ ID NO: 174470 - protein, 24 aa, Influenza A virus
TGTFEFTSFFYRYGFVANFSMELP

SEQ ID NO: 174471 - protein, 25 aa, Influenza A virus
TGTFEFTSFFYRYGFVANFSMELPS

SEQ ID NO: 174472 - protein, 13 aa, Influenza A virus
TGTGYTMDTVNRT

SEQ ID NO: 174473 - protein, 14 aa, Influenza A virus
TGTGYTMDTVNRTH

SEQ ID NO: 174474 - protein, 15 aa, Influenza A virus
TGTGYTMDTVNRTHQ

SEQ ID NO: 174475 - protein, 16 aa, Influenza A virus
TGTGYTMDTVNRTHQY

SEQ ID NO: 174476 - protein, 17 aa, Influenza A virus
TGTGYTMDTVNRTHQYS

SEQ ID NO: 174477 - protein, 18 aa, Influenza A virus
TGTGYTMDTVNRTHQYSE

SEQ ID NO: 174478 - protein, 13 aa, Influenza A virus
TGYTMDTVNRTHQ

SEQ ID NO: 174479 - protein, 14 aa, Influenza A virus
TGYTMDTVNRTHQY

SEQ ID NO: 174480 - protein, 15 aa, Influenza A virus
TGYTMDTVNRTHQYS

SEQ ID NO: 174481 - protein, 16 aa, Influenza A virus
TGYTMDTVNRTHQYSE

SEQ ID NO: 174482 - protein, 19 aa, Influenza A virus
TITGDNTKWNENQNPRMFL

SEQ ID NO: 174483 - protein, 20 aa, Influenza A virus
TITGDNTKWNENQNPRMFLA

SEQ ID NO: 174484 - protein, 21 aa, Influenza A virus
TITGDNTKWNENQNPRMFLAM

SEQ ID NO: 174485 - protein, 22 aa, Influenza A virus
TITGDNTKWNENQNPRMFLAMI

SEQ ID NO: 174486 - protein, 23 aa, Influenza A virus
TITGDNTKWNENQNPRMFLAMIT

SEQ ID NO: 174487 - protein, 24 aa, Influenza A virus
TITGDNTKWNENQNPRMFLAMITY

SEQ ID NO: 174488 - protein, 25 aa, Influenza A virus
TITGDNTKWNENQNPRMFLAMITYI

SEQ ID NO: 174489 - protein, 15 aa, Influenza A virus
TKDAERGKLKRRAIA

SEQ ID NO: 174490 - protein, 16 aa, Influenza A virus
TKDAERGKLKRRAIAT

SEQ ID NO: 174491 - protein, 17 aa, Influenza A virus
TKDAERGKLKRRAIATP

SEQ ID NO: 174492 - protein, 19 aa, Influenza A virus
TKDAERGKLKRRAIATPGM

SEQ ID NO: 174493 - protein, 20 aa, Influenza A virus
TKDAERGKLKRRAIATPGMQ

SEQ ID NO: 174494 - protein, 21 aa, Influenza A virus
TKDAERGKLKRRAIATPGMQI

SEQ ID NO: 174495 - protein, 22 aa, Influenza A virus
TKDAERGKLKRRAIATPGMQIR

SEQ ID NO: 174496 - protein, 23 aa, Influenza A virus
TKDAERGKLKRRAIATPGMQIRG

SEQ ID NO: 174497 - protein, 24 aa, Influenza A virus
TKDAERGKLKRRAIATPGMQIRGF

SEQ ID NO: 174498 - protein, 25 aa, Influenza A virus
TKDAERGKLKRRAIATPGMQIRGFV

SEQ ID NO: 174499 - protein, 14 aa, Influenza A virus
TKKMVTQRTIGKKK

SEQ ID NO: 174500 - protein, 14 aa, Influenza A virus
TKTTYWWDGLQSSD

SEQ ID NO: 174501 - protein, 15 aa, Influenza A virus
TKTTYWWDGLQSSDD

SEQ ID NO: 174502 - protein, 16 aa, Influenza A virus
TKTTYWWDGLQSSDDF

SEQ ID NO: 174503 - protein, 17 aa, Influenza A virus
TKTTYWWDGLQSSDDFA

SEQ ID NO: 174504 - protein, 18 aa, Influenza A virus
TKTTYWWDGLQSSDDFAL

SEQ ID NO: 174505 - protein, 19 aa, Influenza A virus
TKTTYWWDGLQSSDDFALI

SEQ ID NO: 174506 - protein, 20 aa, Influenza A virus
TKTTYWWDGLQSSDDFALIV

SEQ ID NO: 174507 - protein, 21 aa, Influenza A virus
TKTTYWWDGLQSSDDFALIVN

SEQ ID NO: 174508 - protein, 22 aa, Influenza A virus
TKTTYWWDGLQSSDDFALIVNA

SEQ ID NO: 174509 - protein, 23 aa, Influenza A virus
TKTTYWWDGLQSSDDFALIVNAP

SEQ ID NO: 174510 - protein, 24 aa, Influenza A virus
TKTTYWWDGLQSSDDFALIVNAPN

SEQ ID NO: 174511 - protein, 25 aa, Influenza A virus
TKTTYWWDGLQSSDDFALIVNAPNH

SEQ ID NO: 174512 - protein, 14 aa, Influenza A virus
TKWNENQNPRMFLA

SEQ ID NO: 174513 - protein, 15 aa, Influenza A virus
TKWNENQNPRMFLAM

SEQ ID NO: 174514 - protein, 16 aa, Influenza A virus
TKWNENQNPRMFLAMI

SEQ ID NO: 174515 - protein, 17 aa, Influenza A virus
TKWNENQNPRMFLAMIT

SEQ ID NO: 174516 - protein, 18 aa, Influenza A virus
TKWNENQNPRMFLAMITY

SEQ ID NO: 174517 - protein, 19 aa, Influenza A virus
TKWNENQNPRMFLAMITYI

SEQ ID NO: 174518 - protein, 20 aa, Influenza A virus
TKWNENQNPRMFLAMITYIT

SEQ ID NO: 174519 - protein, 20 aa, Influenza A virus
TLARSICEKLEQSGLPVGGN

SEQ ID NO: 174520 - protein, 21 aa, Influenza A virus
TLARSICEKLEQSGLPVGGNE

SEQ ID NO: 174521 - protein, 22 aa, Influenza A virus
TLARSICEKLEQSGLPVGGNEK

SEQ ID NO: 174522 - protein, 23 aa, Influenza A virus
TLARSICEKLEQSGLPVGGNEKK

SEQ ID NO: 174523 - protein, 24 aa, Influenza A virus
TLARSICEKLEQSGLPVGGNEKKA

SEQ ID NO: 174524 - protein, 25 aa, Influenza A virus
TLARSICEKLEQSGLPVGGNEKKAK

SEQ ID NO: 174525 - protein, 13 aa, Influenza A virus
TLLFLKVPAQNAI

SEQ ID NO: 174526 - protein, 14 aa, Influenza A virus
TLLFLKVPAQNAIS

SEQ ID NO: 174527 - protein, 15 aa, Influenza A virus
TLLFLKVPAQNAIST

SEQ ID NO: 174528 - protein, 16 aa, Influenza A virus
TLLFLKVPAQNAISTT

SEQ ID NO: 174529 - protein, 17 aa, Influenza A virus
TLLFLKVPAQNAISTTF

SEQ ID NO: 174530 - protein, 18 aa, Influenza A virus
TLLFLKVPAQNAISTTFP

SEQ ID NO: 174531 - protein, 19 aa, Influenza A virus
TLLFLKVPAQNAISTTFPY

SEQ ID NO: 174532 - protein, 20 aa, Influenza A virus
TLLFLKVPAQNAISTTFPYT

SEQ ID NO: 174533 - protein, 21 aa, Influenza A virus
TLLFLKVPAQNAISTTFPYTG

SEQ ID NO: 174534 - protein, 22 aa, Influenza A virus
TLLFLKVPAQNAISTTFPYTGD

SEQ ID NO: 174535 - protein, 23 aa, Influenza A virus
TLLFLKVPAQNAISTTFPYTGDP

SEQ ID NO: 174536 - protein, 24 aa, Influenza A virus
TLLFLKVPAQNAISTTFPYTGDPP

SEQ ID NO: 174537 - protein, 25 aa, Influenza A virus
TLLFLKVPAQNAISTTFPYTGDPPY

SEQ ID NO: 174538 - protein, 13 aa, Influenza A virus
TLNRNQPAATALA

SEQ ID NO: 174539 - protein, 14 aa, Influenza A virus
TLNRNQPAATALAN

SEQ ID NO: 174540 - protein, 15 aa, Influenza A virus
TLNRNQPAATALANT

SEQ ID NO: 174541 - protein, 16 aa, Influenza A virus
TLNRNQPAATALANTI

SEQ ID NO: 174542 - protein, 17 aa, Influenza A virus
TLNRNQPAATALANTIE

SEQ ID NO: 174543 - protein, 18 aa, Influenza A virus
TLNRNQPAATALANTIEV

SEQ ID NO: 174544 - protein, 19 aa, Influenza A virus
TLNRNQPAATALANTIEVF

SEQ ID NO: 174545 - protein, 20 aa, Influenza A virus
TLNRNQPAATALANTIEVFR

SEQ ID NO: 174546 - protein, 21 aa, Influenza A virus
TLNRNQPAATALANTIEVFRS

SEQ ID NO: 174547 - protein, 22 aa, Influenza A virus
TLNRNQPAATALANTIEVFRSN

SEQ ID NO: 174548 - protein, 20 aa, Influenza A virus
TLNTMTKDAERGKLKRRAIA

SEQ ID NO: 174549 - protein, 21 aa, Influenza A virus
TLNTMTKDAERGKLKRRAIAT

SEQ ID NO: 174550 - protein, 22 aa, Influenza A virus
TLNTMTKDAERGKLKRRAIATP

SEQ ID NO: 174551 - protein, 23 aa, Influenza A virus
TLNTMTKDAERGKLKRRAIATPG

SEQ ID NO: 174552 - protein, 24 aa, Influenza A virus
TLNTMTKDAERGKLKRRAIATPGM

SEQ ID NO: 174553 - protein, 25 aa, Influenza A virus
TLNTMTKDAERGKLKRRAIATPGMQ

SEQ ID NO: 174554 - protein, 17 aa, Influenza A virus
TMTKDAERGKLKRRAIA

SEQ ID NO: 174555 - protein, 19 aa, Influenza A virus
TMTKDAERGKLKRRAIATP

SEQ ID NO: 174556 - protein, 20 aa, Influenza A virus
TMTKDAERGKLKRRAIATPG

SEQ ID NO: 174557 - protein, 21 aa, Influenza A virus
TMTKDAERGKLKRRAIATPGM

SEQ ID NO: 174558 - protein, 22 aa, Influenza A virus
TMTKDAERGKLKRRAIATPGMQ

SEQ ID NO: 174559 - protein, 23 aa, Influenza A virus
TMTKDAERGKLKRRAIATPGMQI

SEQ ID NO: 174560 - protein, 24 aa, Influenza A virus
TMTKDAERGKLKRRAIATPGMQIR

SEQ ID NO: 174561 - protein, 25 aa, Influenza A virus
TMTKDAERGKLKRRAIATPGMQIRG

SEQ ID NO: 174562 - protein, 20 aa, Influenza A virus
TNSQDTELSFTITGDNTKWN

SEQ ID NO: 174563 - protein, 14 aa, Influenza A virus
TPGMQIRGFVYFVE

SEQ ID NO: 174564 - protein, 15 aa, Influenza A virus
TPGMQIRGFVYFVET

SEQ ID NO: 174565 - protein, 16 aa, Influenza A virus
TPGMQIRGFVYFVETL

SEQ ID NO: 174566 - protein, 17 aa, Influenza A virus
TPGMQIRGFVYFVETLA

SEQ ID NO: 174567 - protein, 18 aa, Influenza A virus
TPGMQIRGFVYFVETLAR

SEQ ID NO: 174568 - protein, 19 aa, Influenza A virus
TPGMQIRGFVYFVETLARS

SEQ ID NO: 174569 - protein, 20 aa, Influenza A virus
TPGMQIRGFVYFVETLARSI

SEQ ID NO: 174570 - protein, 21 aa, Influenza A virus
TPGMQIRGFVYFVETLARSIC

SEQ ID NO: 174571 - protein, 22 aa, Influenza A virus
TPGMQIRGFVYFVETLARSICE

SEQ ID NO: 174572 - protein, 23 aa, Influenza A virus
TPGMQIRGFVYFVETLARSICEK

SEQ ID NO: 174573 - protein, 24 aa, Influenza A virus
TPGMQIRGFVYFVETLARSICEKL

SEQ ID NO: 174574 - protein, 25 aa, Influenza A virus
TPGMQIRGFVYFVETLARSICEKLE

SEQ ID NO: 174575 - protein, 17 aa, Influenza A virus
TQGRQTYDWTLNRNQPA

SEQ ID NO: 174576 - protein, 18 aa, Influenza A virus
TQGRQTYDWTLNRNQPAA

SEQ ID NO: 174577 - protein, 19 aa, Influenza A virus
TQGRQTYDWTLNRNQPAAT

SEQ ID NO: 174578 - protein, 20 aa, Influenza A virus
TQGRQTYDWTLNRNQPAATA

SEQ ID NO: 174579 - protein, 21 aa, Influenza A virus
TQGRQTYDWTLNRNQPAATAL

SEQ ID NO: 174580 - protein, 22 aa, Influenza A virus
TQGRQTYDWTLNRNQPAATALA

SEQ ID NO: 174581 - protein, 23 aa, Influenza A virus
TQGRQTYDWTLNRNQPAATALAN

SEQ ID NO: 174582 - protein, 24 aa, Influenza A virus
TQGRQTYDWTLNRNQPAATALANT

SEQ ID NO: 174583 - protein, 25 aa, Influenza A virus
TQGRQTYDWTLNRNQPAATALANTI

SEQ ID NO: 174584 - protein, 13 aa, Influenza A virus
TRKKIEKIRPLLI

SEQ ID NO: 174585 - protein, 15 aa, Influenza A virus
TRSKAGLLVSDGGPN

SEQ ID NO: 174586 - protein, 16 aa, Influenza A virus
TRSKAGLLVSDGGPNL

SEQ ID NO: 174587 - protein, 13 aa, Influenza A virus
TSFFYRYGFVANF

SEQ ID NO: 174588 - protein, 14 aa, Influenza A virus
TSFFYRYGFVANFS

SEQ ID NO: 174589 - protein, 15 aa, Influenza A virus
TSFFYRYGFVANFSM

SEQ ID NO: 174590 - protein, 16 aa, Influenza A virus
TSFFYRYGFVANFSME

SEQ ID NO: 174591 - protein, 17 aa, Influenza A virus
TSFFYRYGFVANFSMEL

SEQ ID NO: 174592 - protein, 18 aa, Influenza A virus
TSFFYRYGFVANFSMELP

SEQ ID NO: 174593 - protein, 19 aa, Influenza A virus
TSFFYRYGFVANFSMELPS

SEQ ID NO: 174594 - protein, 20 aa, Influenza A virus
TSFFYRYGFVANFSMELPSF

SEQ ID NO: 174595 - protein, 21 aa, Influenza A virus
TSFFYRYGFVANFSMELPSFG

SEQ ID NO: 174596 - protein, 22 aa, Influenza A virus
TSFFYRYGFVANFSMELPSFGV

SEQ ID NO: 174597 - protein, 23 aa, Influenza A virus
TSFFYRYGFVANFSMELPSFGVS

SEQ ID NO: 174598 - protein, 24 aa, Influenza A virus
TSFFYRYGFVANFSMELPSFGVSG

SEQ ID NO: 174599 - protein, 25 aa, Influenza A virus
TSFFYRYGFVANFSMELPSFGVSGI

SEQ ID NO: 174600 - protein, 15 aa, Influenza A virus
TTFPYTGDPPYSHGT

SEQ ID NO: 174601 - protein, 16 aa, Influenza A virus
TTFPYTGDPPYSHGTG

SEQ ID NO: 174602 - protein, 20 aa, Influenza A virus
TTFPYTGDPPYSHGTGTGYT

SEQ ID NO: 174603 - protein, 22 aa, Influenza A virus
TTFPYTGDPPYSHGTGTGYTMD

SEQ ID NO: 174604 - protein, 23 aa, Influenza A virus
TTFPYTGDPPYSHGTGTGYTMDT

SEQ ID NO: 174605 - protein, 24 aa, Influenza A virus
TTFPYTGDPPYSHGTGTGYTMDTV

SEQ ID NO: 174606 - protein, 25 aa, Influenza A virus
TTFPYTGDPPYSHGTGTGYTMDTVN

SEQ ID NO: 174607 - protein, 15 aa, Influenza A virus
TTYWWDGLQSSDDFA

SEQ ID NO: 174608 - protein, 16 aa, Influenza A virus
TTYWWDGLQSSDDFAL

SEQ ID NO: 174609 - protein, 17 aa, Influenza A virus
TTYWWDGLQSSDDFALI

SEQ ID NO: 174610 - protein, 18 aa, Influenza A virus
TTYWWDGLQSSDDFALIV

SEQ ID NO: 174611 - protein, 19 aa, Influenza A virus
TTYWWDGLQSSDDFALIVN

SEQ ID NO: 174612 - protein, 20 aa, Influenza A virus
TTYWWDGLQSSDDFALIVNA

SEQ ID NO: 174613 - protein, 21 aa, Influenza A virus
TTYWWDGLQSSDDFALIVNAP

SEQ ID NO: 174614 - protein, 22 aa, Influenza A virus
TTYWWDGLQSSDDFALIVNAPN

SEQ ID NO: 174615 - protein, 23 aa, Influenza A virus
TTYWWDGLQSSDDFALIVNAPNH

SEQ ID NO: 174616 - protein, 14 aa, Influenza A virus
TVIKNNMINNDLGP

SEQ ID NO: 174617 - protein, 15 aa, Influenza A virus
TVIKNNMINNDLGPA

SEQ ID NO: 174618 - protein, 16 aa, Influenza A virus
TVIKNNMINNDLGPAT

SEQ ID NO: 174619 - protein, 17 aa, Influenza A virus
TVIKNNMINNDLGPATA

SEQ ID NO: 174620 - protein, 19 aa, Influenza A virus
TVIKNNMINNDLGPATAQM

SEQ ID NO: 174621 - protein, 20 aa, Influenza A virus
TVIKNNMINNDLGPATAQMA

SEQ ID NO: 174622 - protein, 21 aa, Influenza A virus
TVIKNNMINNDLGPATAQMAL

SEQ ID NO: 174623 - protein, 22 aa, Influenza A virus
TVIKNNMINNDLGPATAQMALQ

SEQ ID NO: 174624 - protein, 23 aa, Influenza A virus
TVIKNNMINNDLGPATAQMALQL

SEQ ID NO: 174625 - protein, 24 aa, Influenza A virus
TVIKNNMINNDLGPATAQMALQLF

SEQ ID NO: 174626 - protein, 25 aa, Influenza A virus
TVIKNNMINNDLGPATAQMALQLFI

SEQ ID NO: 174627 - protein, 13 aa, Influenza A virus
TVLGVSILNLGQK

SEQ ID NO: 174628 - protein, 13 aa, Influenza A virus
TYDWTLNRNQPAA

SEQ ID NO: 174629 - protein, 14 aa, Influenza A virus
TYDWTLNRNQPAAT

SEQ ID NO: 174630 - protein, 15 aa, Influenza A virus
TYDWTLNRNQPAATA

SEQ ID NO: 174631 - protein, 16 aa, Influenza A virus
TYDWTLNRNQPAATAL

SEQ ID NO: 174632 - protein, 17 aa, Influenza A virus
TYDWTLNRNQPAATALA

SEQ ID NO: 174633 - protein, 18 aa, Influenza A virus
TYDWTLNRNQPAATALAN

SEQ ID NO: 174634 - protein, 19 aa, Influenza A virus
TYDWTLNRNQPAATALANT

SEQ ID NO: 174635 - protein, 20 aa, Influenza A virus
TYDWTLNRNQPAATALANTI

SEQ ID NO: 174636 - protein, 21 aa, Influenza A virus
TYDWTLNRNQPAATALANTIE

SEQ ID NO: 174637 - protein, 22 aa, Influenza A virus
TYDWTLNRNQPAATALANTIEV

SEQ ID NO: 174638 - protein, 23 aa, Influenza A virus
TYDWTLNRNQPAATALANTIEVF

SEQ ID NO: 174639 - protein, 24 aa, Influenza A virus
TYDWTLNRNQPAATALANTIEVFR

SEQ ID NO: 174640 - protein, 25 aa, Influenza A virus
TYDWTLNRNQPAATALANTIEVFRS

SEQ ID NO: 174641 - protein, 15 aa, Influenza A virus
TYWWDGLQSSDDFAL

SEQ ID NO: 174642 - protein, 16 aa, Influenza A virus
TYWWDGLQSSDDFALI

SEQ ID NO: 174643 - protein, 17 aa, Influenza A virus
TYWWDGLQSSDDFALIV

SEQ ID NO: 174644 - protein, 18 aa, Influenza A virus
TYWWDGLQSSDDFALIVN

SEQ ID NO: 174645 - protein, 19 aa, Influenza A virus
TYWWDGLQSSDDFALIVNA

SEQ ID NO: 174646 - protein, 20 aa, Influenza A virus
TYWWDGLQSSDDFALIVNAP

SEQ ID NO: 174647 - protein, 21 aa, Influenza A virus
TYWWDGLQSSDDFALIVNAPN

SEQ ID NO: 174648 - protein, 22 aa, Influenza A virus
TYWWDGLQSSDDFALIVNAPNH

SEQ ID NO: 174649 - protein, 13 aa, Influenza A virus
VANFSMELPSFGV

SEQ ID NO: 174650 - protein, 14 aa, Influenza A virus
VANFSMELPSFGVS

SEQ ID NO: 174651 - protein, 15 aa, Influenza A virus
VANFSMELPSFGVSG

SEQ ID NO: 174652 - protein, 16 aa, Influenza A virus
VANFSMELPSFGVSGI

SEQ ID NO: 174653 - protein, 17 aa, Influenza A virus
VANFSMELPSFGVSGIN

SEQ ID NO: 174654 - protein, 18 aa, Influenza A virus
VANFSMELPSFGVSGINE

SEQ ID NO: 174655 - protein, 19 aa, Influenza A virus
VANFSMELPSFGVSGINES

SEQ ID NO: 174656 - protein, 20 aa, Influenza A virus
VANFSMELPSFGVSGINESA

SEQ ID NO: 174657 - protein, 21 aa, Influenza A virus
VANFSMELPSFGVSGINESAD

SEQ ID NO: 174658 - protein, 22 aa, Influenza A virus
VANFSMELPSFGVSGINESADM

SEQ ID NO: 174659 - protein, 23 aa, Influenza A virus
VANFSMELPSFGVSGINESADMS

SEQ ID NO: 174660 - protein, 24 aa, Influenza A virus
VANFSMELPSFGVSGINESADMSI

SEQ ID NO: 174661 - protein, 25 aa, Influenza A virus
VANFSMELPSFGVSGINESADMSIG

SEQ ID NO: 174662 - protein, 14 aa, Influenza A virus
VCLKWELMDEDYQG

SEQ ID NO: 174663 - protein, 15 aa, Influenza A virus
VCLKWELMDEDYQGR

SEQ ID NO: 174664 - protein, 16 aa, Influenza A virus
VCLKWELMDEDYQGRL

SEQ ID NO: 174665 - protein, 17 aa, Influenza A virus
VCLKWELMDEDYQGRLC

SEQ ID NO: 174666 - protein, 20 aa, Influenza A virus
VCLKWELMDEDYQGRLCNPL

SEQ ID NO: 174667 - protein, 23 aa, Influenza A virus
VCLKWELMDEDYQGRLCNPLNPF

SEQ ID NO: 174668 - protein, 24 aa, Influenza A virus
VCLKWELMDEDYQGRLCNPLNPFV

SEQ ID NO: 174669 - protein, 25 aa, Influenza A virus
VCLKWELMDEDYQGRLCNPLNPFVS

SEQ ID NO: 174670 - protein, 14 aa, Influenza A virus
VEAMVSRARIDARI

SEQ ID NO: 174671 - protein, 15 aa, Influenza A virus
VEAMVSRARIDARID

SEQ ID NO: 174672 - protein, 16 aa, Influenza A virus
VEAMVSRARIDARIDF

SEQ ID NO: 174673 - protein, 17 aa, Influenza A virus
VEAMVSRARIDARIDFE

SEQ ID NO: 174674 - protein, 19 aa, Influenza A virus
VEAMVSRARIDARIDFESG

SEQ ID NO: 174675 - protein, 20 aa, Influenza A virus
VEAMVSRARIDARIDFESGR

SEQ ID NO: 174676 - protein, 21 aa, Influenza A virus
VEAMVSRARIDARIDFESGRI

SEQ ID NO: 174677 - protein, 22 aa, Influenza A virus
VEAMVSRARIDARIDFESGRIK

SEQ ID NO: 174678 - protein, 23 aa, Influenza A virus
VEAMVSRARIDARIDFESGRIKK

SEQ ID NO: 174679 - protein, 24 aa, Influenza A virus
VEAMVSRARIDARIDFESGRIKKE

SEQ ID NO: 174680 - protein, 25 aa, Influenza A virus
VEAMVSRARIDARIDFESGRIKKEE

SEQ ID NO: 174681 - protein, 15 aa, Influenza A virus
VETLARSICEKLEQS

SEQ ID NO: 174682 - protein, 16 aa, Influenza A virus
VETLARSICEKLEQSG

SEQ ID NO: 174683 - protein, 17 aa, Influenza A virus
VETLARSICEKLEQSGL

SEQ ID NO: 174684 - protein, 19 aa, Influenza A virus
VETLARSICEKLEQSGLPV

SEQ ID NO: 174685 - protein, 20 aa, Influenza A virus
VETLARSICEKLEQSGLPVG

SEQ ID NO: 174686 - protein, 22 aa, Influenza A virus
VETLARSICEKLEQSGLPVGGN

SEQ ID NO: 174687 - protein, 23 aa, Influenza A virus
VETLARSICEKLEQSGLPVGGNE

SEQ ID NO: 174688 - protein, 24 aa, Influenza A virus
VETLARSICEKLEQSGLPVGGNEK

SEQ ID NO: 174689 - protein, 25 aa, Influenza A virus
VETLARSICEKLEQSGLPVGGNEKK

SEQ ID NO: 174690 - protein, 16 aa, Influenza A virus
VGGNEKKAKLANVVRK

SEQ ID NO: 174691 - protein, 17 aa, Influenza A virus
VGGNEKKAKLANVVRKM

SEQ ID NO: 174692 - protein, 18 aa, Influenza A virus
VGGNEKKAKLANVVRKMM

SEQ ID NO: 174693 - protein, 19 aa, Influenza A virus
VGGNEKKAKLANVVRKMMT

SEQ ID NO: 174694 - protein, 20 aa, Influenza A virus
VGGNEKKAKLANVVRKMMTN

SEQ ID NO: 174695 - protein, 21 aa, Influenza A virus
VGGNEKKAKLANVVRKMMTNS

SEQ ID NO: 174696 - protein, 22 aa, Influenza A virus
VGGNEKKAKLANVVRKMMTNSQ

SEQ ID NO: 174697 - protein, 23 aa, Influenza A virus
VGGNEKKAKLANVVRKMMTNSQD

SEQ ID NO: 174698 - protein, 24 aa, Influenza A virus
VGGNEKKAKLANVVRKMMTNSQDT

SEQ ID NO: 174699 - protein, 25 aa, Influenza A virus
VGGNEKKAKLANVVRKMMTNSQDTE

SEQ ID NO: 174700 - protein, 13 aa, Influenza A virus
VGISSMVEAMVSR

SEQ ID NO: 174701 - protein, 14 aa, Influenza A virus
VGISSMVEAMVSRA

SEQ ID NO: 174702 - protein, 15 aa, Influenza A virus
VGISSMVEAMVSRAR

SEQ ID NO: 174703 - protein, 16 aa, Influenza A virus
VGISSMVEAMVSRARI

SEQ ID NO: 174704 - protein, 17 aa, Influenza A virus
VGISSMVEAMVSRARID

SEQ ID NO: 174705 - protein, 18 aa, Influenza A virus
VGISSMVEAMVSRARIDA

SEQ ID NO: 174706 - protein, 19 aa, Influenza A virus
VGISSMVEAMVSRARIDAR

SEQ ID NO: 174707 - protein, 20 aa, Influenza A virus
VGISSMVEAMVSRARIDARI

SEQ ID NO: 174708 - protein, 21 aa, Influenza A virus
VGISSMVEAMVSRARIDARID

SEQ ID NO: 174709 - protein, 22 aa, Influenza A virus
VGISSMVEAMVSRARIDARIDF

SEQ ID NO: 174710 - protein, 23 aa, Influenza A virus
VGISSMVEAMVSRARIDARIDFE

SEQ ID NO: 174711 - protein, 24 aa, Influenza A virus
VGISSMVEAMVSRARIDARIDFES

SEQ ID NO: 174712 - protein, 25 aa, Influenza A virus
VGISSMVEAMVSRARIDARIDFESG

SEQ ID NO: 174713 - protein, 14 aa, Influenza A virus
VIKNNMINNDLGPA

SEQ ID NO: 174714 - protein, 15 aa, Influenza A virus
VIKNNMINNDLGPAT

SEQ ID NO: 174715 - protein, 16 aa, Influenza A virus
VIKNNMINNDLGPATA

SEQ ID NO: 174716 - protein, 17 aa, Influenza A virus
VIKNNMINNDLGPATAQ

SEQ ID NO: 174717 - protein, 19 aa, Influenza A virus
VIKNNMINNDLGPATAQMA

SEQ ID NO: 174718 - protein, 20 aa, Influenza A virus
VIKNNMINNDLGPATAQMAL

SEQ ID NO: 174719 - protein, 21 aa, Influenza A virus
VIKNNMINNDLGPATAQMALQ

SEQ ID NO: 174720 - protein, 22 aa, Influenza A virus
VIKNNMINNDLGPATAQMALQL

SEQ ID NO: 174721 - protein, 23 aa, Influenza A virus
VIKNNMINNDLGPATAQMALQLF

SEQ ID NO: 174722 - protein, 24 aa, Influenza A virus
VIKNNMINNDLGPATAQMALQLFI

SEQ ID NO: 174723 - protein, 25 aa, Influenza A virus
VIKNNMINNDLGPATAQMALQLFIK

SEQ ID NO: 174724 - protein, 13 aa, Influenza A virus
VLEAMAFLEESHP

SEQ ID NO: 174725 - protein, 14 aa, Influenza A virus
VLEAMAFLEESHPG

SEQ ID NO: 174726 - protein, 15 aa, Influenza A virus
VLEAMAFLEESHPGI

SEQ ID NO: 174727 - protein, 16 aa, Influenza A virus
VLEAMAFLEESHPGIF

SEQ ID NO: 174728 - protein, 17 aa, Influenza A virus
VLEAMAFLEESHPGIFE

SEQ ID NO: 174729 - protein, 18 aa, Influenza A virus
VLEAMAFLEESHPGIFEN

SEQ ID NO: 174730 - protein, 19 aa, Influenza A virus
VLEAMAFLEESHPGIFENS

SEQ ID NO: 174731 - protein, 20 aa, Influenza A virus
VLEAMAFLEESHPGIFENSC

SEQ ID NO: 174732 - protein, 13 aa, Influenza A virus
VNPTLLFLKVPAQ

SEQ ID NO: 174733 - protein, 14 aa, Influenza A virus
VNPTLLFLKVPAQN

SEQ ID NO: 174734 - protein, 15 aa, Influenza A virus
VNPTLLFLKVPAQNA

SEQ ID NO: 174735 - protein, 16 aa, Influenza A virus
VNPTLLFLKVPAQNAI

SEQ ID NO: 174736 - protein, 17 aa, Influenza A virus
VNPTLLFLKVPAQNAIS

SEQ ID NO: 174737 - protein, 18 aa, Influenza A virus
VNPTLLFLKVPAQNAIST

SEQ ID NO: 174738 - protein, 19 aa, Influenza A virus
VNPTLLFLKVPAQNAISTT

SEQ ID NO: 174739 - protein, 20 aa, Influenza A virus
VNPTLLFLKVPAQNAISTTF

SEQ ID NO: 174740 - protein, 21 aa, Influenza A virus
VNPTLLFLKVPAQNAISTTFP

SEQ ID NO: 174741 - protein, 22 aa, Influenza A virus
VNPTLLFLKVPAQNAISTTFPY

SEQ ID NO: 174742 - protein, 23 aa, Influenza A virus
VNPTLLFLKVPAQNAISTTFPYT

SEQ ID NO: 174743 - protein, 24 aa, Influenza A virus
VNPTLLFLKVPAQNAISTTFPYTG

SEQ ID NO: 174744 - protein, 25 aa, Influenza A virus
VNPTLLFLKVPAQNAISTTFPYTGD

SEQ ID NO: 174745 - protein, 15 aa, Influenza A virus
VPAQNAISTTFPYTG

SEQ ID NO: 174746 - protein, 16 aa, Influenza A virus
VPAQNAISTTFPYTGD

SEQ ID NO: 174747 - protein, 17 aa, Influenza A virus
VPAQNAISTTFPYTGDP

SEQ ID NO: 174748 - protein, 19 aa, Influenza A virus
VPAQNAISTTFPYTGDPPY

SEQ ID NO: 174749 - protein, 20 aa, Influenza A virus
VPAQNAISTTFPYTGDPPYS

SEQ ID NO: 174750 - protein, 21 aa, Influenza A virus
VPAQNAISTTFPYTGDPPYSH

SEQ ID NO: 174751 - protein, 22 aa, Influenza A virus
VPAQNAISTTFPYTGDPPYSHG

SEQ ID NO: 174752 - protein, 23 aa, Influenza A virus
VPAQNAISTTFPYTGDPPYSHGT

SEQ ID NO: 174753 - protein, 24 aa, Influenza A virus
VPAQNAISTTFPYTGDPPYSHGTG

SEQ ID NO: 174754 - protein, 25 aa, Influenza A virus
VPAQNAISTTFPYTGDPPYSHGTGT

SEQ ID NO: 174755 - protein, 15 aa, Influenza A virus
VRKMMTNSQDTELSF

SEQ ID NO: 174756 - protein, 16 aa, Influenza A virus
VRKMMTNSQDTELSFT

SEQ ID NO: 174757 - protein, 19 aa, Influenza A virus
VRKMMTNSQDTELSFTITG

SEQ ID NO: 174758 - protein, 20 aa, Influenza A virus
VRKMMTNSQDTELSFTITGD

SEQ ID NO: 174759 - protein, 21 aa, Influenza A virus
VRKMMTNSQDTELSFTITGDN

SEQ ID NO: 174760 - protein, 22 aa, Influenza A virus
VRKMMTNSQDTELSFTITGDNT

SEQ ID NO: 174761 - protein, 23 aa, Influenza A virus
VRKMMTNSQDTELSFTITGDNTK

SEQ ID NO: 174762 - protein, 24 aa, Influenza A virus
VRKMMTNSQDTELSFTITGDNTKW

SEQ ID NO: 174763 - protein, 25 aa, Influenza A virus
VRKMMTNSQDTELSFTITGDNTKWN

SEQ ID NO: 174764 - protein, 16 aa, Influenza A virus
VSDGGPNLYNIRNLHI

SEQ ID NO: 174765 - protein, 17 aa, Influenza A virus
VSDGGPNLYNIRNLHIP

SEQ ID NO: 174766 - protein, 18 aa, Influenza A virus
VSDGGPNLYNIRNLHIPE

SEQ ID NO: 174767 - protein, 19 aa, Influenza A virus
VSDGGPNLYNIRNLHIPEV

SEQ ID NO: 174768 - protein, 20 aa, Influenza A virus
VSDGGPNLYNIRNLHIPEVC

SEQ ID NO: 174769 - protein, 21 aa, Influenza A virus
VSDGGPNLYNIRNLHIPEVCL

SEQ ID NO: 174770 - protein, 22 aa, Influenza A virus
VSDGGPNLYNIRNLHIPEVCLK

SEQ ID NO: 174771 - protein, 23 aa, Influenza A virus
VSDGGPNLYNIRNLHIPEVCLKW

SEQ ID NO: 174772 - protein, 24 aa, Influenza A virus
VSDGGPNLYNIRNLHIPEVCLKWE

SEQ ID NO: 174773 - protein, 25 aa, Influenza A virus
VSDGGPNLYNIRNLHIPEVCLKWEL

SEQ ID NO: 174774 - protein, 14 aa, Influenza A virus
VSGINESADMSIGV

SEQ ID NO: 174775 - protein, 15 aa, Influenza A virus
VSGINESADMSIGVT

SEQ ID NO: 174776 - protein, 16 aa, Influenza A virus
VSGINESADMSIGVTV

SEQ ID NO: 174777 - protein, 17 aa, Influenza A virus
VSGINESADMSIGVTVI

SEQ ID NO: 174778 - protein, 18 aa, Influenza A virus
VSGINESADMSIGVTVIK

SEQ ID NO: 174779 - protein, 19 aa, Influenza A virus
VSGINESADMSIGVTVIKN

SEQ ID NO: 174780 - protein, 20 aa, Influenza A virus
VSGINESADMSIGVTVIKNN

SEQ ID NO: 174781 - protein, 21 aa, Influenza A virus
VSGINESADMSIGVTVIKNNM

SEQ ID NO: 174782 - protein, 22 aa, Influenza A virus
VSGINESADMSIGVTVIKNNMI

SEQ ID NO: 174783 - protein, 23 aa, Influenza A virus
VSGINESADMSIGVTVIKNNMIN

SEQ ID NO: 174784 - protein, 24 aa, Influenza A virus
VSGINESADMSIGVTVIKNNMINN

SEQ ID NO: 174785 - protein, 25 aa, Influenza A virus
VSGINESADMSIGVTVIKNNMINND

SEQ ID NO: 174786 - protein, 14 aa, Influenza A virus
VSRARIDARIDFES

SEQ ID NO: 174787 - protein, 15 aa, Influenza A virus
VSRARIDARIDFESG

SEQ ID NO: 174788 - protein, 16 aa, Influenza A virus
VSRARIDARIDFESGR

SEQ ID NO: 174789 - protein, 17 aa, Influenza A virus
VSRARIDARIDFESGRI

SEQ ID NO: 174790 - protein, 19 aa, Influenza A virus
VSRARIDARIDFESGRIKK

SEQ ID NO: 174791 - protein, 20 aa, Influenza A virus
VSRARIDARIDFESGRIKKE

SEQ ID NO: 174792 - protein, 21 aa, Influenza A virus
VSRARIDARIDFESGRIKKEE

SEQ ID NO: 174793 - protein, 22 aa, Influenza A virus
VSRARIDARIDFESGRIKKEEF

SEQ ID NO: 174794 - protein, 13 aa, Influenza A virus
VTVIKNNMINNDL

SEQ ID NO: 174795 - protein, 14 aa, Influenza A virus
VTVIKNNMINNDLG

SEQ ID NO: 174796 - protein, 15 aa, Influenza A virus
VTVIKNNMINNDLGP

SEQ ID NO: 174797 - protein, 16 aa, Influenza A virus
VTVIKNNMINNDLGPA

SEQ ID NO: 174798 - protein, 17 aa, Influenza A virus
VTVIKNNMINNDLGPAT

SEQ ID NO: 174799 - protein, 18 aa, Influenza A virus
VTVIKNNMINNDLGPATA

SEQ ID NO: 174800 - protein, 19 aa, Influenza A virus
VTVIKNNMINNDLGPATAQ

SEQ ID NO: 174801 - protein, 20 aa, Influenza A virus
VTVIKNNMINNDLGPATAQM

SEQ ID NO: 174802 - protein, 21 aa, Influenza A virus
VTVIKNNMINNDLGPATAQMA

SEQ ID NO: 174803 - protein, 22 aa, Influenza A virus
VTVIKNNMINNDLGPATAQMAL

SEQ ID NO: 174804 - protein, 23 aa, Influenza A virus
VTVIKNNMINNDLGPATAQMALQ

SEQ ID NO: 174805 - protein, 24 aa, Influenza A virus
VTVIKNNMINNDLGPATAQMALQL

SEQ ID NO: 174806 - protein, 25 aa, Influenza A virus
VTVIKNNMINNDLGPATAQMALQLF

SEQ ID NO: 174807 - protein, 14 aa, Influenza A virus
VVRKMMTNSQDTEL

SEQ ID NO: 174808 - protein, 15 aa, Influenza A virus
VVRKMMTNSQDTELS

SEQ ID NO: 174809 - protein, 16 aa, Influenza A virus
VVRKMMTNSQDTELSF

SEQ ID NO: 174810 - protein, 17 aa, Influenza A virus
VVRKMMTNSQDTELSFT

SEQ ID NO: 174811 - protein, 19 aa, Influenza A virus
VVRKMMTNSQDTELSFTIT

SEQ ID NO: 174812 - protein, 20 aa, Influenza A virus
VVRKMMTNSQDTELSFTITG

SEQ ID NO: 174813 - protein, 21 aa, Influenza A virus
VVRKMMTNSQDTELSFTITGD

SEQ ID NO: 174814 - protein, 22 aa, Influenza A virus
VVRKMMTNSQDTELSFTITGDN

SEQ ID NO: 174815 - protein, 23 aa, Influenza A virus
VVRKMMTNSQDTELSFTITGDNT

SEQ ID NO: 174816 - protein, 24 aa, Influenza A virus
VVRKMMTNSQDTELSFTITGDNTK

SEQ ID NO: 174817 - protein, 25 aa, Influenza A virus
VVRKMMTNSQDTELSFTITGDNTKW

SEQ ID NO: 174818 - protein, 13 aa, Influenza A virus
VYFVETLARSICE

SEQ ID NO: 174819 - protein, 14 aa, Influenza A virus
VYFVETLARSICEK

SEQ ID NO: 174820 - protein, 15 aa, Influenza A virus
VYFVETLARSICEKL

SEQ ID NO: 174821 - protein, 16 aa, Influenza A virus
VYFVETLARSICEKLE

SEQ ID NO: 174822 - protein, 17 aa, Influenza A virus
VYFVETLARSICEKLEQ

SEQ ID NO: 174823 - protein, 18 aa, Influenza A virus
VYFVETLARSICEKLEQS

SEQ ID NO: 174824 - protein, 19 aa, Influenza A virus
VYFVETLARSICEKLEQSG

SEQ ID NO: 174825 - protein, 20 aa, Influenza A virus
VYFVETLARSICEKLEQSGL

SEQ ID NO: 174826 - protein, 21 aa, Influenza A virus
VYFVETLARSICEKLEQSGLP

SEQ ID NO: 174827 - protein, 22 aa, Influenza A virus
VYFVETLARSICEKLEQSGLPV

SEQ ID NO: 174828 - protein, 23 aa, Influenza A virus
VYFVETLARSICEKLEQSGLPVG

SEQ ID NO: 174829 - protein, 24 aa, Influenza A virus
VYFVETLARSICEKLEQSGLPVGG

SEQ ID NO: 174830 - protein, 25 aa, Influenza A virus
VYFVETLARSICEKLEQSGLPVGGN

SEQ ID NO: 174831 - protein, 13 aa, Influenza A virus
WDGLQSSDDFALI

SEQ ID NO: 174832 - protein, 14 aa, Influenza A virus
WDGLQSSDDFALIV

SEQ ID NO: 174833 - protein, 15 aa, Influenza A virus
WDGLQSSDDFALIVN

SEQ ID NO: 174834 - protein, 16 aa, Influenza A virus
WDGLQSSDDFALIVNA

SEQ ID NO: 174835 - protein, 17 aa, Influenza A virus
WDGLQSSDDFALIVNAP

SEQ ID NO: 174836 - protein, 18 aa, Influenza A virus
WDGLQSSDDFALIVNAPN

SEQ ID NO: 174837 - protein, 19 aa, Influenza A virus
WDGLQSSDDFALIVNAPNH

SEQ ID NO: 174838 - protein, 20 aa, Influenza A virus
WDGLQSSDDFALIVNAPNHE

SEQ ID NO: 174839 - protein, 21 aa, Influenza A virus
WDGLQSSDDFALIVNAPNHEG

SEQ ID NO: 174840 - protein, 22 aa, Influenza A virus
WDGLQSSDDFALIVNAPNHEGI

SEQ ID NO: 174841 - protein, 23 aa, Influenza A virus
WDGLQSSDDFALIVNAPNHEGIQ

SEQ ID NO: 174842 - protein, 24 aa, Influenza A virus
WDGLQSSDDFALIVNAPNHEGIQA

SEQ ID NO: 174843 - protein, 25 aa, Influenza A virus
WDGLQSSDDFALIVNAPNHEGIQAG

SEQ ID NO: 174844 - protein, 20 aa, Influenza A virus
WELMDEDYQGRLCNPLNPFV

SEQ ID NO: 174845 - protein, 23 aa, Influenza A virus
WELMDEDYQGRLCNPLNPFVSHK

SEQ ID NO: 174846 - protein, 24 aa, Influenza A virus
WELMDEDYQGRLCNPLNPFVSHKE

SEQ ID NO: 174847 - protein, 25 aa, Influenza A virus
WELMDEDYQGRLCNPLNPFVSHKEI

SEQ ID NO: 174848 - protein, 15 aa, Influenza A virus
WNENQNPRMFLAMIT

SEQ ID NO: 174849 - protein, 16 aa, Influenza A virus
WNENQNPRMFLAMITY

SEQ ID NO: 174850 - protein, 17 aa, Influenza A virus
WNENQNPRMFLAMITYI

SEQ ID NO: 174851 - protein, 18 aa, Influenza A virus
WNENQNPRMFLAMITYIT

SEQ ID NO: 174852 - protein, 13 aa, Influenza A virus
WTLNRNQPAATAL

SEQ ID NO: 174853 - protein, 14 aa, Influenza A virus
WTLNRNQPAATALA

SEQ ID NO: 174854 - protein, 15 aa, Influenza A virus
WTLNRNQPAATALAN

SEQ ID NO: 174855 - protein, 16 aa, Influenza A virus
WTLNRNQPAATALANT

SEQ ID NO: 174856 - protein, 17 aa, Influenza A virus
WTLNRNQPAATALANTI

SEQ ID NO: 174857 - protein, 18 aa, Influenza A virus
WTLNRNQPAATALANTIE

SEQ ID NO: 174858 - protein, 19 aa, Influenza A virus
WTLNRNQPAATALANTIEV

SEQ ID NO: 174859 - protein, 20 aa, Influenza A virus
WTLNRNQPAATALANTIEVF

SEQ ID NO: 174860 - protein, 21 aa, Influenza A virus
WTLNRNQPAATALANTIEVFR

SEQ ID NO: 174861 - protein, 22 aa, Influenza A virus
WTLNRNQPAATALANTIEVFRS

SEQ ID NO: 174862 - protein, 23 aa, Influenza A virus
WTLNRNQPAATALANTIEVFRSN

SEQ ID NO: 174863 - protein, 13 aa, Influenza A virus
WWDGLQSSDDFAL

SEQ ID NO: 174864 - protein, 14 aa, Influenza A virus
WWDGLQSSDDFALI

SEQ ID NO: 174865 - protein, 15 aa, Influenza A virus
WWDGLQSSDDFALIV

SEQ ID NO: 174866 - protein, 16 aa, Influenza A virus
WWDGLQSSDDFALIVN

SEQ ID NO: 174867 - protein, 17 aa, Influenza A virus
WWDGLQSSDDFALIVNA

SEQ ID NO: 174868 - protein, 18 aa, Influenza A virus
WWDGLQSSDDFALIVNAP

SEQ ID NO: 174869 - protein, 19 aa, Influenza A virus
WWDGLQSSDDFALIVNAPN

SEQ ID NO: 174870 - protein, 20 aa, Influenza A virus
WWDGLQSSDDFALIVNAPNH

SEQ ID NO: 174871 - protein, 21 aa, Influenza A virus
WWDGLQSSDDFALIVNAPNHE

SEQ ID NO: 174872 - protein, 22 aa, Influenza A virus
WWDGLQSSDDFALIVNAPNHEG

SEQ ID NO: 174873 - protein, 23 aa, Influenza A virus
WWDGLQSSDDFALIVNAPNHEGI

SEQ ID NO: 174874 - protein, 24 aa, Influenza A virus
WWDGLQSSDDFALIVNAPNHEGIQ

SEQ ID NO: 174875 - protein, 25 aa, Influenza A virus
WWDGLQSSDDFALIVNAPNHEGIQA

SEQ ID NO: 174876 - protein, 14 aa, Influenza A virus
YAQTDCVLEAMAFL

SEQ ID NO: 174877 - protein, 15 aa, Influenza A virus
YAQTDCVLEAMAFLE

SEQ ID NO: 174878 - protein, 16 aa, Influenza A virus
YAQTDCVLEAMAFLEE

SEQ ID NO: 174879 - protein, 17 aa, Influenza A virus
YAQTDCVLEAMAFLEES

SEQ ID NO: 174880 - protein, 18 aa, Influenza A virus
YAQTDCVLEAMAFLEESH

SEQ ID NO: 174881 - protein, 19 aa, Influenza A virus
YAQTDCVLEAMAFLEESHP

SEQ ID NO: 174882 - protein, 20 aa, Influenza A virus
YAQTDCVLEAMAFLEESHPG

SEQ ID NO: 174883 - protein, 21 aa, Influenza A virus
YAQTDCVLEAMAFLEESHPGI

SEQ ID NO: 174884 - protein, 22 aa, Influenza A virus
YAQTDCVLEAMAFLEESHPGIF

SEQ ID NO: 174885 - protein, 23 aa, Influenza A virus
YAQTDCVLEAMAFLEESHPGIFE

SEQ ID NO: 174886 - protein, 24 aa, Influenza A virus
YAQTDCVLEAMAFLEESHPGIFEN

SEQ ID NO: 174887 - protein, 25 aa, Influenza A virus
YAQTDCVLEAMAFLEESHPGIFENS

SEQ ID NO: 174888 - protein, 13 aa, Influenza A virus
YDWTLNRNQPAAT

SEQ ID NO: 174889 - protein, 14 aa, Influenza A virus
YDWTLNRNQPAATA

SEQ ID NO: 174890 - protein, 15 aa, Influenza A virus
YDWTLNRNQPAATAL

SEQ ID NO: 174891 - protein, 16 aa, Influenza A virus
YDWTLNRNQPAATALA

SEQ ID NO: 174892 - protein, 17 aa, Influenza A virus
YDWTLNRNQPAATALAN

SEQ ID NO: 174893 - protein, 18 aa, Influenza A virus
YDWTLNRNQPAATALANT

SEQ ID NO: 174894 - protein, 19 aa, Influenza A virus
YDWTLNRNQPAATALANTI

SEQ ID NO: 174895 - protein, 20 aa, Influenza A virus
YDWTLNRNQPAATALANTIE

SEQ ID NO: 174896 - protein, 21 aa, Influenza A virus
YDWTLNRNQPAATALANTIEV

SEQ ID NO: 174897 - protein, 22 aa, Influenza A virus
YDWTLNRNQPAATALANTIEVF

SEQ ID NO: 174898 - protein, 23 aa, Influenza A virus
YDWTLNRNQPAATALANTIEVFR

SEQ ID NO: 174899 - protein, 24 aa, Influenza A virus
YDWTLNRNQPAATALANTIEVFRS

SEQ ID NO: 174900 - protein, 25 aa, Influenza A virus
YDWTLNRNQPAATALANTIEVFRSN

SEQ ID NO: 174901 - protein, 13 aa, Influenza A virus
YFVETLARSICEK

SEQ ID NO: 174902 - protein, 14 aa, Influenza A virus
YFVETLARSICEKL

SEQ ID NO: 174903 - protein, 15 aa, Influenza A virus
YFVETLARSICEKLE

SEQ ID NO: 174904 - protein, 16 aa, Influenza A virus
YFVETLARSICEKLEQ

SEQ ID NO: 174905 - protein, 17 aa, Influenza A virus
YFVETLARSICEKLEQS

SEQ ID NO: 174906 - protein, 18 aa, Influenza A virus
YFVETLARSICEKLEQSG

SEQ ID NO: 174907 - protein, 19 aa, Influenza A virus
YFVETLARSICEKLEQSGL

SEQ ID NO: 174908 - protein, 20 aa, Influenza A virus
YFVETLARSICEKLEQSGLP

SEQ ID NO: 174909 - protein, 21 aa, Influenza A virus
YFVETLARSICEKLEQSGLPV

SEQ ID NO: 174910 - protein, 22 aa, Influenza A virus
YFVETLARSICEKLEQSGLPVG

SEQ ID NO: 174911 - protein, 23 aa, Influenza A virus
YFVETLARSICEKLEQSGLPVGG

SEQ ID NO: 174912 - protein, 24 aa, Influenza A virus
YFVETLARSICEKLEQSGLPVGGN

SEQ ID NO: 174913 - protein, 25 aa, Influenza A virus
YFVETLARSICEKLEQSGLPVGGNE

SEQ ID NO: 174914 - protein, 13 aa, Influenza A virus
YGFVANFSMELPS

SEQ ID NO: 174915 - protein, 14 aa, Influenza A virus
YGFVANFSMELPSF

SEQ ID NO: 174916 - protein, 15 aa, Influenza A virus
YGFVANFSMELPSFG

SEQ ID NO: 174917 - protein, 16 aa, Influenza A virus
YGFVANFSMELPSFGV

SEQ ID NO: 174918 - protein, 17 aa, Influenza A virus
YGFVANFSMELPSFGVS

SEQ ID NO: 174919 - protein, 18 aa, Influenza A virus
YGFVANFSMELPSFGVSG

SEQ ID NO: 174920 - protein, 19 aa, Influenza A virus
YGFVANFSMELPSFGVSGI

SEQ ID NO: 174921 - protein, 20 aa, Influenza A virus
YGFVANFSMELPSFGVSGIN

SEQ ID NO: 174922 - protein, 21 aa, Influenza A virus
YGFVANFSMELPSFGVSGINE

SEQ ID NO: 174923 - protein, 22 aa, Influenza A virus
YGFVANFSMELPSFGVSGINES

SEQ ID NO: 174924 - protein, 23 aa, Influenza A virus
YGFVANFSMELPSFGVSGINESA

SEQ ID NO: 174925 - protein, 24 aa, Influenza A virus
YGFVANFSMELPSFGVSGINESAD

SEQ ID NO: 174926 - protein, 25 aa, Influenza A virus
YGFVANFSMELPSFGVSGINESADM

SEQ ID NO: 174927 - protein, 14 aa, Influenza A virus
YINRTGTFEFTSFF

SEQ ID NO: 174928 - protein, 15 aa, Influenza A virus
YINRTGTFEFTSFFY

SEQ ID NO: 174929 - protein, 16 aa, Influenza A virus
YINRTGTFEFTSFFYR

SEQ ID NO: 174930 - protein, 17 aa, Influenza A virus
YINRTGTFEFTSFFYRY

SEQ ID NO: 174931 - protein, 18 aa, Influenza A virus
YINRTGTFEFTSFFYRYG

SEQ ID NO: 174932 - protein, 19 aa, Influenza A virus
YINRTGTFEFTSFFYRYGF

SEQ ID NO: 174933 - protein, 20 aa, Influenza A virus
YINRTGTFEFTSFFYRYGFV

SEQ ID NO: 174934 - protein, 21 aa, Influenza A virus
YINRTGTFEFTSFFYRYGFVA

SEQ ID NO: 174935 - protein, 22 aa, Influenza A virus
YINRTGTFEFTSFFYRYGFVAN

SEQ ID NO: 174936 - protein, 23 aa, Influenza A virus
YINRTGTFEFTSFFYRYGFVANF

SEQ ID NO: 174937 - protein, 24 aa, Influenza A virus
YINRTGTFEFTSFFYRYGFVANFS

SEQ ID NO: 174938 - protein, 25 aa, Influenza A virus
YINRTGTFEFTSFFYRYGFVANFSM

SEQ ID NO: 174939 - protein, 13 aa, Influenza A virus
YLIRALTLNTMTK

SEQ ID NO: 174940 - protein, 14 aa, Influenza A virus
YLIRALTLNTMTKD

SEQ ID NO: 174941 - protein, 15 aa, Influenza A virus
YLIRALTLNTMTKDA

SEQ ID NO: 174942 - protein, 16 aa, Influenza A virus
YLIRALTLNTMTKDAE

SEQ ID NO: 174943 - protein, 17 aa, Influenza A virus
YLIRALTLNTMTKDAER

SEQ ID NO: 174944 - protein, 18 aa, Influenza A virus
YLIRALTLNTMTKDAERG

SEQ ID NO: 174945 - protein, 19 aa, Influenza A virus
YLIRALTLNTMTKDAERGK

SEQ ID NO: 174946 - protein, 20 aa, Influenza A virus
YLIRALTLNTMTKDAERGKL

SEQ ID NO: 174947 - protein, 21 aa, Influenza A virus
YLIRALTLNTMTKDAERGKLK

SEQ ID NO: 174948 - protein, 22 aa, Influenza A virus
YLIRALTLNTMTKDAERGKLKR

SEQ ID NO: 174949 - protein, 23 aa, Influenza A virus
YLIRALTLNTMTKDAERGKLKRR

SEQ ID NO: 174950 - protein, 24 aa, Influenza A virus
YLIRALTLNTMTKDAERGKLKRRA

SEQ ID NO: 174951 - protein, 25 aa, Influenza A virus
YLIRALTLNTMTKDAERGKLKRRAI

SEQ ID NO: 174952 - protein, 13 aa, Influenza A virus
YNIRNLHIPEVCL

SEQ ID NO: 174953 - protein, 14 aa, Influenza A virus
YNIRNLHIPEVCLK

SEQ ID NO: 174954 - protein, 15 aa, Influenza A virus
YNIRNLHIPEVCLKW

SEQ ID NO: 174955 - protein, 16 aa, Influenza A virus
YNIRNLHIPEVCLKWE

SEQ ID NO: 174956 - protein, 17 aa, Influenza A virus
YNIRNLHIPEVCLKWEL

SEQ ID NO: 174957 - protein, 18 aa, Influenza A virus
YNIRNLHIPEVCLKWELM

SEQ ID NO: 174958 - protein, 19 aa, Influenza A virus
YNIRNLHIPEVCLKWELMD

SEQ ID NO: 174959 - protein, 20 aa, Influenza A virus
YNIRNLHIPEVCLKWELMDE

SEQ ID NO: 174960 - protein, 21 aa, Influenza A virus
YNIRNLHIPEVCLKWELMDED

SEQ ID NO: 174961 - protein, 22 aa, Influenza A virus
YNIRNLHIPEVCLKWELMDEDY

SEQ ID NO: 174962 - protein, 23 aa, Influenza A virus
YNIRNLHIPEVCLKWELMDEDYQ

SEQ ID NO: 174963 - protein, 24 aa, Influenza A virus
YNIRNLHIPEVCLKWELMDEDYQG

SEQ ID NO: 174964 - protein, 25 aa, Influenza A virus
YNIRNLHIPEVCLKWELMDEDYQGR

SEQ ID NO: 174965 - protein, 15 aa, Influenza A virus
YQGRLCNPLNPFVSH

SEQ ID NO: 174966 - protein, 16 aa, Influenza A virus
YQGRLCNPLNPFVSHK

SEQ ID NO: 174967 - protein, 17 aa, Influenza A virus
YQGRLCNPLNPFVSHKE

SEQ ID NO: 174968 - protein, 19 aa, Influenza A virus
YQGRLCNPLNPFVSHKEIE

SEQ ID NO: 174969 - protein, 20 aa, Influenza A virus
YQGRLCNPLNPFVSHKEIES

SEQ ID NO: 174970 - protein, 21 aa, Influenza A virus
YQGRLCNPLNPFVSHKEIESV

SEQ ID NO: 174971 - protein, 22 aa, Influenza A virus
YQGRLCNPLNPFVSHKEIESVN

SEQ ID NO: 174972 - protein, 23 aa, Influenza A virus
YQGRLCNPLNPFVSHKEIESVNN

SEQ ID NO: 174973 - protein, 24 aa, Influenza A virus
YQGRLCNPLNPFVSHKEIESVNNA

SEQ ID NO: 174974 - protein, 25 aa, Influenza A virus
YQGRLCNPLNPFVSHKEIESVNNAV

SEQ ID NO: 174975 - protein, 14 aa, Influenza A virus
YRRPVGISSMVEAM

SEQ ID NO: 174976 - protein, 15 aa, Influenza A virus
YRRPVGISSMVEAMV

SEQ ID NO: 174977 - protein, 16 aa, Influenza A virus
YRRPVGISSMVEAMVS

SEQ ID NO: 174978 - protein, 17 aa, Influenza A virus
YRRPVGISSMVEAMVSR

SEQ ID NO: 174979 - protein, 18 aa, Influenza A virus
YRRPVGISSMVEAMVSRA

SEQ ID NO: 174980 - protein, 19 aa, Influenza A virus
YRRPVGISSMVEAMVSRAR

SEQ ID NO: 174981 - protein, 20 aa, Influenza A virus
YRRPVGISSMVEAMVSRARI

SEQ ID NO: 174982 - protein, 21 aa, Influenza A virus
YRRPVGISSMVEAMVSRARID

SEQ ID NO: 174983 - protein, 22 aa, Influenza A virus
YRRPVGISSMVEAMVSRARIDA

SEQ ID NO: 174984 - protein, 23 aa, Influenza A virus
YRRPVGISSMVEAMVSRARIDAR

SEQ ID NO: 174985 - protein, 24 aa, Influenza A virus
YRRPVGISSMVEAMVSRARIDARI

SEQ ID NO: 174986 - protein, 25 aa, Influenza A virus
YRRPVGISSMVEAMVSRARIDARID

SEQ ID NO: 174987 - protein, 13 aa, Influenza A virus
YRYGFVANFSMEL

SEQ ID NO: 174988 - protein, 14 aa, Influenza A virus
YRYGFVANFSMELP

SEQ ID NO: 174989 - protein, 15 aa, Influenza A virus
YRYGFVANFSMELPS

SEQ ID NO: 174990 - protein, 16 aa, Influenza A virus
YRYGFVANFSMELPSF

SEQ ID NO: 174991 - protein, 17 aa, Influenza A virus
YRYGFVANFSMELPSFG

SEQ ID NO: 174992 - protein, 18 aa, Influenza A virus
YRYGFVANFSMELPSFGV

SEQ ID NO: 174993 - protein, 19 aa, Influenza A virus
YRYGFVANFSMELPSFGVS

SEQ ID NO: 174994 - protein, 20 aa, Influenza A virus
YRYGFVANFSMELPSFGVSG

SEQ ID NO: 174995 - protein, 21 aa, Influenza A virus
YRYGFVANFSMELPSFGVSGI

SEQ ID NO: 174996 - protein, 22 aa, Influenza A virus
YRYGFVANFSMELPSFGVSGIN

SEQ ID NO: 174997 - protein, 23 aa, Influenza A virus
YRYGFVANFSMELPSFGVSGINE

SEQ ID NO: 174998 - protein, 24 aa, Influenza A virus
YRYGFVANFSMELPSFGVSGINES

SEQ ID NO: 174999 - protein, 25 aa, Influenza A virus
YRYGFVANFSMELPSFGVSGINESA

SEQ ID NO: 175000 - protein, 20 aa, Influenza A virus
YRYTYRCHRGDTQIQTRRSF

SEQ ID NO: 175001 - protein, 14 aa, Influenza A virus
YSHGTGTGYTMDTV

SEQ ID NO: 175002 - protein, 15 aa, Influenza A virus
YSHGTGTGYTMDTVN

SEQ ID NO: 175003 - protein, 16 aa, Influenza A virus
YSHGTGTGYTMDTVNR

SEQ ID NO: 175004 - protein, 17 aa, Influenza A virus
YSHGTGTGYTMDTVNRT

SEQ ID NO: 175005 - protein, 18 aa, Influenza A virus
YSHGTGTGYTMDTVNRTH

SEQ ID NO: 175006 - protein, 19 aa, Influenza A virus
YSHGTGTGYTMDTVNRTHQ

SEQ ID NO: 175007 - protein, 20 aa, Influenza A virus
YSHGTGTGYTMDTVNRTHQY

SEQ ID NO: 175008 - protein, 21 aa, Influenza A virus
YSHGTGTGYTMDTVNRTHQYS

SEQ ID NO: 175009 - protein, 22 aa, Influenza A virus
YSHGTGTGYTMDTVNRTHQYSE

SEQ ID NO: 175010 - protein, 20 aa, Influenza A virus
YTGDPPYSHGTGTGYTMDTV

SEQ ID NO: 175011 - protein, 21 aa, Influenza A virus
YTGDPPYSHGTGTGYTMDTVN

SEQ ID NO: 175012 - protein, 22 aa, Influenza A virus
YTGDPPYSHGTGTGYTMDTVNR

SEQ ID NO: 175013 - protein, 23 aa, Influenza A virus
YTGDPPYSHGTGTGYTMDTVNRT

SEQ ID NO: 175014 - protein, 24 aa, Influenza A virus
YTGDPPYSHGTGTGYTMDTVNRTH

SEQ ID NO: 175015 - protein, 25 aa, Influenza A virus
YTGDPPYSHGTGTGYTMDTVNRTHQ

SEQ ID NO: 175016 - protein, 14 aa, Influenza A virus
YTKTTYWWDGLQSS

SEQ ID NO: 175017 - protein, 15 aa, Influenza A virus
YTKTTYWWDGLQSSD

SEQ ID NO: 175018 - protein, 16 aa, Influenza A virus
YTKTTYWWDGLQSSDD

SEQ ID NO: 175019 - protein, 17 aa, Influenza A virus
YTKTTYWWDGLQSSDDF

SEQ ID NO: 175020 - protein, 18 aa, Influenza A virus
YTKTTYWWDGLQSSDDFA

SEQ ID NO: 175021 - protein, 19 aa, Influenza A virus
YTKTTYWWDGLQSSDDFAL

SEQ ID NO: 175022 - protein, 20 aa, Influenza A virus
YTKTTYWWDGLQSSDDFALI

SEQ ID NO: 175023 - protein, 21 aa, Influenza A virus
YTKTTYWWDGLQSSDDFALIV

SEQ ID NO: 175024 - protein, 22 aa, Influenza A virus
YTKTTYWWDGLQSSDDFALIVN

SEQ ID NO: 175025 - protein, 23 aa, Influenza A virus
YTKTTYWWDGLQSSDDFALIVNA

SEQ ID NO: 175026 - protein, 24 aa, Influenza A virus
YTKTTYWWDGLQSSDDFALIVNAP

SEQ ID NO: 175027 - protein, 25 aa, Influenza A virus
YTKTTYWWDGLQSSDDFALIVNAPN

SEQ ID NO: 175028 - protein, 14 aa, Influenza A virus
YWWDGLQSSDDFAL

SEQ ID NO: 175029 - protein, 15 aa, Influenza A virus
YWWDGLQSSDDFALI

SEQ ID NO: 175030 - protein, 16 aa, Influenza A virus
YWWDGLQSSDDFALIV

SEQ ID NO: 175031 - protein, 17 aa, Influenza A virus
YWWDGLQSSDDFALIVN

SEQ ID NO: 175032 - protein, 18 aa, Influenza A virus
YWWDGLQSSDDFALIVNA

SEQ ID NO: 175033 - protein, 19 aa, Influenza A virus
YWWDGLQSSDDFALIVNAP

SEQ ID NO: 175034 - protein, 20 aa, Influenza A virus
YWWDGLQSSDDFALIVNAPN

SEQ ID NO: 175035 - protein, 21 aa, Influenza A virus
YWWDGLQSSDDFALIVNAPNH

SEQ ID NO: 175036 - protein, 22 aa, Influenza A virus
YWWDGLQSSDDFALIVNAPNHE

SEQ ID NO: 175037 - protein, 23 aa, Influenza A virus
YWWDGLQSSDDFALIVNAPNHEG

SEQ ID NO: 175038 - protein, 24 aa, Influenza A virus
YWWDGLQSSDDFALIVNAPNHEGI

SEQ ID NO: 175039 - protein, 25 aa, Influenza A virus
YWWDGLQSSDDFALIVNAPNHEGIQ

SEQ ID NO: 175040 - protein, 15 aa, Influenza A virus
AEIAQRLEDVFAGKN

SEQ ID NO: 175041 - protein, 16 aa, Influenza A virus
AEIAQRLEDVFAGKNT

SEQ ID NO: 175042 - protein, 19 aa, Influenza A virus
AEIAQRLEDVFAGKNTDLE

SEQ ID NO: 175043 - protein, 20 aa, Influenza A virus
AEIAQRLEDVFAGKNTDLEA

SEQ ID NO: 175044 - protein, 21 aa, Influenza A virus
AEIAQRLEDVFAGKNTDLEAL

SEQ ID NO: 175045 - protein, 22 aa, Influenza A virus
AEIAQRLEDVFAGKNTDLEALM

SEQ ID NO: 175046 - protein, 23 aa, Influenza A virus
AEIAQRLEDVFAGKNTDLEALME

SEQ ID NO: 175047 - protein, 24 aa, Influenza A virus
AEIAQRLEDVFAGKNTDLEALMEW

SEQ ID NO: 175048 - protein, 25 aa, Influenza A virus
AEIAQRLEDVFAGKNTDLEALMEWL

SEQ ID NO: 175049 - protein, 15 aa, Influenza A virus
AFGLVCATCEQIADS

SEQ ID NO: 175050 - protein, 16 aa, Influenza A virus
AFGLVCATCEQIADSQ

SEQ ID NO: 175051 - protein, 20 aa, Influenza A virus
AFGLVCATCEQIADSQHRSH

SEQ ID NO: 175052 - protein, 15 aa, Influenza A virus
AGKNTDLEALMEWLK

SEQ ID NO: 175053 - protein, 16 aa, Influenza A virus
AGKNTDLEALMEWLKT

SEQ ID NO: 175054 - protein, 17 aa, Influenza A virus
AGKNTDLEALMEWLKTR

SEQ ID NO: 175055 - protein, 18 aa, Influenza A virus
AGKNTDLEALMEWLKTRP

SEQ ID NO: 175056 - protein, 19 aa, Influenza A virus
AGKNTDLEALMEWLKTRPI

SEQ ID NO: 175057 - protein, 20 aa, Influenza A virus
AGKNTDLEALMEWLKTRPIL

SEQ ID NO: 175058 - protein, 21 aa, Influenza A virus
AGKNTDLEALMEWLKTRPILS

SEQ ID NO: 175059 - protein, 22 aa, Influenza A virus
AGKNTDLEALMEWLKTRPILSP

SEQ ID NO: 175060 - protein, 23 aa, Influenza A virus
AGKNTDLEALMEWLKTRPILSPL

SEQ ID NO: 175061 - protein, 24 aa, Influenza A virus
AGKNTDLEALMEWLKTRPILSPLT

SEQ ID NO: 175062 - protein, 25 aa, Influenza A virus
AGKNTDLEALMEWLKTRPILSPLTK

SEQ ID NO: 175063 - protein, 13 aa, Influenza A virus
AGSSEQAAEAMEV

SEQ ID NO: 175064 - protein, 14 aa, Influenza A virus
AGSSEQAAEAMEVA

SEQ ID NO: 175065 - protein, 15 aa, Influenza A virus
AGSSEQAAEAMEVAS

SEQ ID NO: 175066 - protein, 14 aa, Influenza A virus
AKAMEQMAGSSEQA

SEQ ID NO: 175067 - protein, 15 aa, Influenza A virus
AKAMEQMAGSSEQAA

SEQ ID NO: 175068 - protein, 16 aa, Influenza A virus
AKAMEQMAGSSEQAAE

SEQ ID NO: 175069 - protein, 17 aa, Influenza A virus
AKAMEQMAGSSEQAAEA

SEQ ID NO: 175070 - protein, 18 aa, Influenza A virus
AKAMEQMAGSSEQAAEAM

SEQ ID NO: 175071 - protein, 19 aa, Influenza A virus
AKAMEQMAGSSEQAAEAME

SEQ ID NO: 175072 - protein, 20 aa, Influenza A virus
AKAMEQMAGSSEQAAEAMEV

SEQ ID NO: 175073 - protein, 21 aa, Influenza A virus
AKAMEQMAGSSEQAAEAMEVA

SEQ ID NO: 175074 - protein, 22 aa, Influenza A virus
AKAMEQMAGSSEQAAEAMEVAS

SEQ ID NO: 175075 - protein, 13 aa, Influenza A virus
ALASCMGLIYNRM

SEQ ID NO: 175076 - protein, 14 aa, Influenza A virus
ALASCMGLIYNRMG

SEQ ID NO: 175077 - protein, 13 aa, Influenza A virus
ALMEWLKTRPILS

SEQ ID NO: 175078 - protein, 14 aa, Influenza A virus
ALMEWLKTRPILSP

SEQ ID NO: 175079 - protein, 15 aa, Influenza A virus
ALMEWLKTRPILSPL

SEQ ID NO: 175080 - protein, 16 aa, Influenza A virus
ALMEWLKTRPILSPLT

SEQ ID NO: 175081 - protein, 17 aa, Influenza A virus
ALMEWLKTRPILSPLTK

SEQ ID NO: 175082 - protein, 18 aa, Influenza A virus
ALMEWLKTRPILSPLTKG

SEQ ID NO: 175083 - protein, 19 aa, Influenza A virus
ALMEWLKTRPILSPLTKGI

SEQ ID NO: 175084 - protein, 20 aa, Influenza A virus
ALMEWLKTRPILSPLTKGIL

SEQ ID NO: 175085 - protein, 21 aa, Influenza A virus
ALMEWLKTRPILSPLTKGILG

SEQ ID NO: 175086 - protein, 22 aa, Influenza A virus
ALMEWLKTRPILSPLTKGILGF

SEQ ID NO: 175087 - protein, 23 aa, Influenza A virus
ALMEWLKTRPILSPLTKGILGFV

SEQ ID NO: 175088 - protein, 24 aa, Influenza A virus
ALMEWLKTRPILSPLTKGILGFVF

SEQ ID NO: 175089 - protein, 25 aa, Influenza A virus
ALMEWLKTRPILSPLTKGILGFVFT

SEQ ID NO: 175090 - protein, 13 aa, Influenza A virus
AMEQMAGSSEQAA

SEQ ID NO: 175091 - protein, 14 aa, Influenza A virus
AMEQMAGSSEQAAE

SEQ ID NO: 175092 - protein, 15 aa, Influenza A virus
AMEQMAGSSEQAAEA

SEQ ID NO: 175093 - protein, 16 aa, Influenza A virus
AMEQMAGSSEQAAEAM

SEQ ID NO: 175094 - protein, 17 aa, Influenza A virus
AMEQMAGSSEQAAEAME

SEQ ID NO: 175095 - protein, 18 aa, Influenza A virus
AMEQMAGSSEQAAEAMEV

SEQ ID NO: 175096 - protein, 19 aa, Influenza A virus
AMEQMAGSSEQAAEAMEVA

SEQ ID NO: 175097 - protein, 20 aa, Influenza A virus
AMEQMAGSSEQAAEAMEVAS

SEQ ID NO: 175098 - protein, 20 aa, Influenza A virus
AQRLEDVFAGKNTDLEALME

SEQ ID NO: 175099 - protein, 21 aa, Influenza A virus
AQRLEDVFAGKNTDLEALMEW

SEQ ID NO: 175100 - protein, 22 aa, Influenza A virus
AQRLEDVFAGKNTDLEALMEWL

SEQ ID NO: 175101 - protein, 23 aa, Influenza A virus
AQRLEDVFAGKNTDLEALMEWLK

SEQ ID NO: 175102 - protein, 24 aa, Influenza A virus
AQRLEDVFAGKNTDLEALMEWLKT

SEQ ID NO: 175103 - protein, 25 aa, Influenza A virus
AQRLEDVFAGKNTDLEALMEWLKTR

SEQ ID NO: 175104 - protein, 15 aa, Influenza A virus
ASTTAKAMEQMAGSS

SEQ ID NO: 175105 - protein, 16 aa, Influenza A virus
ASTTAKAMEQMAGSSE

SEQ ID NO: 175106 - protein, 17 aa, Influenza A virus
ASTTAKAMEQMAGSSEQ

SEQ ID NO: 175107 - protein, 19 aa, Influenza A virus
ASTTAKAMEQMAGSSEQAA

SEQ ID NO: 175108 - protein, 20 aa, Influenza A virus
ASTTAKAMEQMAGSSEQAAE

SEQ ID NO: 175109 - protein, 21 aa, Influenza A virus
ASTTAKAMEQMAGSSEQAAEA

SEQ ID NO: 175110 - protein, 22 aa, Influenza A virus
ASTTAKAMEQMAGSSEQAAEAM

SEQ ID NO: 175111 - protein, 23 aa, Influenza A virus
ASTTAKAMEQMAGSSEQAAEAME

SEQ ID NO: 175112 - protein, 24 aa, Influenza A virus
ASTTAKAMEQMAGSSEQAAEAMEV

SEQ ID NO: 175113 - protein, 25 aa, Influenza A virus
ASTTAKAMEQMAGSSEQAAEAMEVA

SEQ ID NO: 175114 - protein, 13 aa, Influenza A virus
AYQKRMGVQMQRF

SEQ ID NO: 175115 - protein, 14 aa, Influenza A virus
AYQKRMGVQMQRFK

SEQ ID NO: 175116 - protein, 14 aa, Influenza A virus
DLEALMEWLKTRPI

SEQ ID NO: 175117 - protein, 15 aa, Influenza A virus
DLEALMEWLKTRPIL

SEQ ID NO: 175118 - protein, 16 aa, Influenza A virus
DLEALMEWLKTRPILS

SEQ ID NO: 175119 - protein, 17 aa, Influenza A virus
DLEALMEWLKTRPILSP

SEQ ID NO: 175120 - protein, 18 aa, Influenza A virus
DLEALMEWLKTRPILSPL

SEQ ID NO: 175121 - protein, 19 aa, Influenza A virus
DLEALMEWLKTRPILSPLT

SEQ ID NO: 175122 - protein, 20 aa, Influenza A virus
DLEALMEWLKTRPILSPLTK

SEQ ID NO: 175123 - protein, 21 aa, Influenza A virus
DLEALMEWLKTRPILSPLTKG

SEQ ID NO: 175124 - protein, 22 aa, Influenza A virus
DLEALMEWLKTRPILSPLTKGI

SEQ ID NO: 175125 - protein, 23 aa, Influenza A virus
DLEALMEWLKTRPILSPLTKGIL

SEQ ID NO: 175126 - protein, 24 aa, Influenza A virus
DLEALMEWLKTRPILSPLTKGILG

SEQ ID NO: 175127 - protein, 25 aa, Influenza A virus
DLEALMEWLKTRPILSPLTKGILGF

SEQ ID NO: 175128 - protein, 17 aa, Influenza A virus
DVFAGKNTDLEALMEWL

SEQ ID NO: 175129 - protein, 19 aa, Influenza A virus
DVFAGKNTDLEALMEWLKT

SEQ ID NO: 175130 - protein, 20 aa, Influenza A virus
DVFAGKNTDLEALMEWLKTR

SEQ ID NO: 175131 - protein, 21 aa, Influenza A virus
DVFAGKNTDLEALMEWLKTRP

SEQ ID NO: 175132 - protein, 22 aa, Influenza A virus
DVFAGKNTDLEALMEWLKTRPI

SEQ ID NO: 175133 - protein, 23 aa, Influenza A virus
DVFAGKNTDLEALMEWLKTRPIL

SEQ ID NO: 175134 - protein, 24 aa, Influenza A virus
DVFAGKNTDLEALMEWLKTRPILS

SEQ ID NO: 175135 - protein, 25 aa, Influenza A virus
DVFAGKNTDLEALMEWLKTRPILSP

SEQ ID NO: 175136 - protein, 13 aa, Influenza A virus
EALMEWLKTRPIL

SEQ ID NO: 175137 - protein, 14 aa, Influenza A virus
EALMEWLKTRPILS

SEQ ID NO: 175138 - protein, 15 aa, Influenza A virus
EALMEWLKTRPILSP

SEQ ID NO: 175139 - protein, 16 aa, Influenza A virus
EALMEWLKTRPILSPL

SEQ ID NO: 175140 - protein, 17 aa, Influenza A virus
EALMEWLKTRPILSPLT

SEQ ID NO: 175141 - protein, 18 aa, Influenza A virus
EALMEWLKTRPILSPLTK

SEQ ID NO: 175142 - protein, 19 aa, Influenza A virus
EALMEWLKTRPILSPLTKG

SEQ ID NO: 175143 - protein, 20 aa, Influenza A virus
EALMEWLKTRPILSPLTKGI

SEQ ID NO: 175144 - protein, 21 aa, Influenza A virus
EALMEWLKTRPILSPLTKGIL

SEQ ID NO: 175145 - protein, 22 aa, Influenza A virus
EALMEWLKTRPILSPLTKGILG

SEQ ID NO: 175146 - protein, 23 aa, Influenza A virus
EALMEWLKTRPILSPLTKGILGF

SEQ ID NO: 175147 - protein, 24 aa, Influenza A virus
EALMEWLKTRPILSPLTKGILGFV

SEQ ID NO: 175148 - protein, 25 aa, Influenza A virus
EALMEWLKTRPILSPLTKGILGFVF

SEQ ID NO: 175149 - protein, 19 aa, Influenza A virus
EDVFAGKNTDLEALMEWLK

SEQ ID NO: 175150 - protein, 20 aa, Influenza A virus
EDVFAGKNTDLEALMEWLKT

SEQ ID NO: 175151 - protein, 21 aa, Influenza A virus
EDVFAGKNTDLEALMEWLKTR

SEQ ID NO: 175152 - protein, 22 aa, Influenza A virus
EDVFAGKNTDLEALMEWLKTRP

SEQ ID NO: 175153 - protein, 23 aa, Influenza A virus
EDVFAGKNTDLEALMEWLKTRPI

SEQ ID NO: 175154 - protein, 24 aa, Influenza A virus
EDVFAGKNTDLEALMEWLKTRPIL

SEQ ID NO: 175155 - protein, 25 aa, Influenza A virus
EDVFAGKNTDLEALMEWLKTRPILS

SEQ ID NO: 175156 - protein, 20 aa, Influenza A virus
EIAQRLEDVFAGKNTDLEAL

SEQ ID NO: 175157 - protein, 21 aa, Influenza A virus
EIAQRLEDVFAGKNTDLEALM

SEQ ID NO: 175158 - protein, 22 aa, Influenza A virus
EIAQRLEDVFAGKNTDLEALME

SEQ ID NO: 175159 - protein, 23 aa, Influenza A virus
EIAQRLEDVFAGKNTDLEALMEW

SEQ ID NO: 175160 - protein, 24 aa, Influenza A virus
EIAQRLEDVFAGKNTDLEALMEWL

SEQ ID NO: 175161 - protein, 25 aa, Influenza A virus
EIAQRLEDVFAGKNTDLEALMEWLK

SEQ ID NO: 175162 - protein, 13 aa, Influenza A virus
ENLQAYQKRMGVQ

SEQ ID NO: 175163 - protein, 14 aa, Influenza A virus
ENLQAYQKRMGVQM

SEQ ID NO: 175164 - protein, 15 aa, Influenza A virus
ENLQAYQKRMGVQMQ

SEQ ID NO: 175165 - protein, 16 aa, Influenza A virus
ENLQAYQKRMGVQMQR

SEQ ID NO: 175166 - protein, 17 aa, Influenza A virus
ENLQAYQKRMGVQMQRF

SEQ ID NO: 175167 - protein, 18 aa, Influenza A virus
ENLQAYQKRMGVQMQRFK

SEQ ID NO: 175168 - protein, 13 aa, Influenza A virus
ENRMVLASTTAKA

SEQ ID NO: 175169 - protein, 14 aa, Influenza A virus
ENRMVLASTTAKAM

SEQ ID NO: 175170 - protein, 15 aa, Influenza A virus
ENRMVLASTTAKAME

SEQ ID NO: 175171 - protein, 16 aa, Influenza A virus
ENRMVLASTTAKAMEQ

SEQ ID NO: 175172 - protein, 17 aa, Influenza A virus
ENRMVLASTTAKAMEQM

SEQ ID NO: 175173 - protein, 18 aa, Influenza A virus
ENRMVLASTTAKAMEQMA

SEQ ID NO: 175174 - protein, 19 aa, Influenza A virus
ENRMVLASTTAKAMEQMAG

SEQ ID NO: 175175 - protein, 20 aa, Influenza A virus
ENRMVLASTTAKAMEQMAGS

SEQ ID NO: 175176 - protein, 21 aa, Influenza A virus
ENRMVLASTTAKAMEQMAGSS

SEQ ID NO: 175177 - protein, 22 aa, Influenza A virus
ENRMVLASTTAKAMEQMAGSSE

SEQ ID NO: 175178 - protein, 23 aa, Influenza A virus
ENRMVLASTTAKAMEQMAGSSEQ

SEQ ID NO: 175179 - protein, 24 aa, Influenza A virus
ENRMVLASTTAKAMEQMAGSSEQA

SEQ ID NO: 175180 - protein, 25 aa, Influenza A virus
ENRMVLASTTAKAMEQMAGSSEQAA

SEQ ID NO: 175181 - protein, 13 aa, Influenza A virus
EQMAGSSEQAAEA

SEQ ID NO: 175182 - protein, 14 aa, Influenza A virus
EQMAGSSEQAAEAM

SEQ ID NO: 175183 - protein, 15 aa, Influenza A virus
EQMAGSSEQAAEAME

SEQ ID NO: 175184 - protein, 16 aa, Influenza A virus
EQMAGSSEQAAEAMEV

SEQ ID NO: 175185 - protein, 17 aa, Influenza A virus
EQMAGSSEQAAEAMEVA

SEQ ID NO: 175186 - protein, 18 aa, Influenza A virus
EQMAGSSEQAAEAMEVAS

SEQ ID NO: 175187 - protein, 14 aa, Influenza A virus
ERGLQRRRFVQNAL

SEQ ID NO: 175188 - protein, 15 aa, Influenza A virus
ERGLQRRRFVQNALN

SEQ ID NO: 175189 - protein, 16 aa, Influenza A virus
ERGLQRRRFVQNALNG

SEQ ID NO: 175190 - protein, 17 aa, Influenza A virus
ERGLQRRRFVQNALNGN

SEQ ID NO: 175191 - protein, 18 aa, Influenza A virus
ERGLQRRRFVQNALNGNG

SEQ ID NO: 175192 - protein, 19 aa, Influenza A virus
ERGLQRRRFVQNALNGNGD

SEQ ID NO: 175193 - protein, 20 aa, Influenza A virus
ERGLQRRRFVQNALNGNGDP

SEQ ID NO: 175194 - protein, 21 aa, Influenza A virus
ERGLQRRRFVQNALNGNGDPN

SEQ ID NO: 175195 - protein, 22 aa, Influenza A virus
ERGLQRRRFVQNALNGNGDPNN

SEQ ID NO: 175196 - protein, 23 aa, Influenza A virus
ERGLQRRRFVQNALNGNGDPNNM

SEQ ID NO: 175197 - protein, 24 aa, Influenza A virus
ERGLQRRRFVQNALNGNGDPNNMD

SEQ ID NO: 175198 - protein, 14 aa, Influenza A virus
EVAFGLVCATCEQI

SEQ ID NO: 175199 - protein, 15 aa, Influenza A virus
EVAFGLVCATCEQIA

SEQ ID NO: 175200 - protein, 16 aa, Influenza A virus
EVAFGLVCATCEQIAD

SEQ ID NO: 175201 - protein, 17 aa, Influenza A virus
EVAFGLVCATCEQIADS

SEQ ID NO: 175202 - protein, 19 aa, Influenza A virus
EVAFGLVCATCEQIADSQH

SEQ ID NO: 175203 - protein, 13 aa, Influenza A virus
EWLKTRPILSPLT

SEQ ID NO: 175204 - protein, 14 aa, Influenza A virus
EWLKTRPILSPLTK

SEQ ID NO: 175205 - protein, 15 aa, Influenza A virus
EWLKTRPILSPLTKG

SEQ ID NO: 175206 - protein, 16 aa, Influenza A virus
EWLKTRPILSPLTKGI

SEQ ID NO: 175207 - protein, 17 aa, Influenza A virus
EWLKTRPILSPLTKGIL

SEQ ID NO: 175208 - protein, 18 aa, Influenza A virus
EWLKTRPILSPLTKGILG

SEQ ID NO: 175209 - protein, 19 aa, Influenza A virus
EWLKTRPILSPLTKGILGF

SEQ ID NO: 175210 - protein, 20 aa, Influenza A virus
EWLKTRPILSPLTKGILGFV

SEQ ID NO: 175211 - protein, 21 aa, Influenza A virus
EWLKTRPILSPLTKGILGFVF

SEQ ID NO: 175212 - protein, 22 aa, Influenza A virus
EWLKTRPILSPLTKGILGFVFT

SEQ ID NO: 175213 - protein, 23 aa, Influenza A virus
EWLKTRPILSPLTKGILGFVFTL

SEQ ID NO: 175214 - protein, 24 aa, Influenza A virus
EWLKTRPILSPLTKGILGFVFTLT

SEQ ID NO: 175215 - protein, 25 aa, Influenza A virus
EWLKTRPILSPLTKGILGFVFTLTV

SEQ ID NO: 175216 - protein, 15 aa, Influenza A virus
FAGKNTDLEALMEWL

SEQ ID NO: 175217 - protein, 16 aa, Influenza A virus
FAGKNTDLEALMEWLK

SEQ ID NO: 175218 - protein, 17 aa, Influenza A virus
FAGKNTDLEALMEWLKT

SEQ ID NO: 175219 - protein, 18 aa, Influenza A virus
FAGKNTDLEALMEWLKTR

SEQ ID NO: 175220 - protein, 19 aa, Influenza A virus
FAGKNTDLEALMEWLKTRP

SEQ ID NO: 175221 - protein, 20 aa, Influenza A virus
FAGKNTDLEALMEWLKTRPI

SEQ ID NO: 175222 - protein, 21 aa, Influenza A virus
FAGKNTDLEALMEWLKTRPIL

SEQ ID NO: 175223 - protein, 22 aa, Influenza A virus
FAGKNTDLEALMEWLKTRPILS

SEQ ID NO: 175224 - protein, 23 aa, Influenza A virus
FAGKNTDLEALMEWLKTRPILSP

SEQ ID NO: 175225 - protein, 24 aa, Influenza A virus
FAGKNTDLEALMEWLKTRPILSPL

SEQ ID NO: 175226 - protein, 25 aa, Influenza A virus
FAGKNTDLEALMEWLKTRPILSPLT

SEQ ID NO: 175227 - protein, 15 aa, Influenza A virus
FTLTVPSERGLQRRR

SEQ ID NO: 175228 - protein, 17 aa, Influenza A virus
FTLTVPSERGLQRRRFV

SEQ ID NO: 175229 - protein, 19 aa, Influenza A virus
FTLTVPSERGLQRRRFVQN

SEQ ID NO: 175230 - protein, 20 aa, Influenza A virus
FTLTVPSERGLQRRRFVQNA

SEQ ID NO: 175231 - protein, 21 aa, Influenza A virus
FTLTVPSERGLQRRRFVQNAL

SEQ ID NO: 175232 - protein, 22 aa, Influenza A virus
FTLTVPSERGLQRRRFVQNALN

SEQ ID NO: 175233 - protein, 23 aa, Influenza A virus
FTLTVPSERGLQRRRFVQNALNG

SEQ ID NO: 175234 - protein, 24 aa, Influenza A virus
FTLTVPSERGLQRRRFVQNALNGN

SEQ ID NO: 175235 - protein, 25 aa, Influenza A virus
FTLTVPSERGLQRRRFVQNALNGNG

SEQ ID NO: 175236 - protein, 13 aa, Influenza A virus
FVFTLTVPSERGL

SEQ ID NO: 175237 - protein, 14 aa, Influenza A virus
FVFTLTVPSERGLQ

SEQ ID NO: 175238 - protein, 15 aa, Influenza A virus
FVFTLTVPSERGLQR

SEQ ID NO: 175239 - protein, 16 aa, Influenza A virus
FVFTLTVPSERGLQRR

SEQ ID NO: 175240 - protein, 17 aa, Influenza A virus
FVFTLTVPSERGLQRRR

SEQ ID NO: 175241 - protein, 18 aa, Influenza A virus
FVFTLTVPSERGLQRRRF

SEQ ID NO: 175242 - protein, 19 aa, Influenza A virus
FVFTLTVPSERGLQRRRFV

SEQ ID NO: 175243 - protein, 20 aa, Influenza A virus
FVFTLTVPSERGLQRRRFVQ

SEQ ID NO: 175244 - protein, 21 aa, Influenza A virus
FVFTLTVPSERGLQRRRFVQN

SEQ ID NO: 175245 - protein, 22 aa, Influenza A virus
FVFTLTVPSERGLQRRRFVQNA

SEQ ID NO: 175246 - protein, 23 aa, Influenza A virus
FVFTLTVPSERGLQRRRFVQNAL

SEQ ID NO: 175247 - protein, 24 aa, Influenza A virus
FVFTLTVPSERGLQRRRFVQNALN

SEQ ID NO: 175248 - protein, 25 aa, Influenza A virus
FVFTLTVPSERGLQRRRFVQNALNG

SEQ ID NO: 175249 - protein, 14 aa, Influenza A virus
GALASCMGLIYNRM

SEQ ID NO: 175250 - protein, 15 aa, Influenza A virus
GALASCMGLIYNRMG

SEQ ID NO: 175251 - protein, 13 aa, Influenza A virus
GFVFTLTVPSERG

SEQ ID NO: 175252 - protein, 14 aa, Influenza A virus
GFVFTLTVPSERGL

SEQ ID NO: 175253 - protein, 15 aa, Influenza A virus
GFVFTLTVPSERGLQ

SEQ ID NO: 175254 - protein, 16 aa, Influenza A virus
GFVFTLTVPSERGLQR

SEQ ID NO: 175255 - protein, 17 aa, Influenza A virus
GFVFTLTVPSERGLQRR

SEQ ID NO: 175256 - protein, 18 aa, Influenza A virus
GFVFTLTVPSERGLQRRR

SEQ ID NO: 175257 - protein, 19 aa, Influenza A virus
GFVFTLTVPSERGLQRRRF

SEQ ID NO: 175258 - protein, 20 aa, Influenza A virus
GFVFTLTVPSERGLQRRRFV

SEQ ID NO: 175259 - protein, 21 aa, Influenza A virus
GFVFTLTVPSERGLQRRRFVQ

SEQ ID NO: 175260 - protein, 22 aa, Influenza A virus
GFVFTLTVPSERGLQRRRFVQN

SEQ ID NO: 175261 - protein, 23 aa, Influenza A virus
GFVFTLTVPSERGLQRRRFVQNA

SEQ ID NO: 175262 - protein, 24 aa, Influenza A virus
GFVFTLTVPSERGLQRRRFVQNAL

SEQ ID NO: 175263 - protein, 25 aa, Influenza A virus
GFVFTLTVPSERGLQRRRFVQNALN

SEQ ID NO: 175264 - protein, 13 aa, Influenza A virus
GILGFVFTLTVPS

SEQ ID NO: 175265 - protein, 14 aa, Influenza A virus
GILGFVFTLTVPSE

SEQ ID NO: 175266 - protein, 15 aa, Influenza A virus
GILGFVFTLTVPSER

SEQ ID NO: 175267 - protein, 16 aa, Influenza A virus
GILGFVFTLTVPSERG

SEQ ID NO: 175268 - protein, 17 aa, Influenza A virus
GILGFVFTLTVPSERGL

SEQ ID NO: 175269 - protein, 18 aa, Influenza A virus
GILGFVFTLTVPSERGLQ

SEQ ID NO: 175270 - protein, 19 aa, Influenza A virus
GILGFVFTLTVPSERGLQR

SEQ ID NO: 175271 - protein, 20 aa, Influenza A virus
GILGFVFTLTVPSERGLQRR

SEQ ID NO: 175272 - protein, 21 aa, Influenza A virus
GILGFVFTLTVPSERGLQRRR

SEQ ID NO: 175273 - protein, 22 aa, Influenza A virus
GILGFVFTLTVPSERGLQRRRF

SEQ ID NO: 175274 - protein, 23 aa, Influenza A virus
GILGFVFTLTVPSERGLQRRRFV

SEQ ID NO: 175275 - protein, 24 aa, Influenza A virus
GILGFVFTLTVPSERGLQRRRFVQ

SEQ ID NO: 175276 - protein, 25 aa, Influenza A virus
GILGFVFTLTVPSERGLQRRRFVQN

SEQ ID NO: 175277 - protein, 14 aa, Influenza A virus
GKNTDLEALMEWLK

SEQ ID NO: 175278 - protein, 15 aa, Influenza A virus
GKNTDLEALMEWLKT

SEQ ID NO: 175279 - protein, 16 aa, Influenza A virus
GKNTDLEALMEWLKTR

SEQ ID NO: 175280 - protein, 17 aa, Influenza A virus
GKNTDLEALMEWLKTRP

SEQ ID NO: 175281 - protein, 18 aa, Influenza A virus
GKNTDLEALMEWLKTRPI

SEQ ID NO: 175282 - protein, 19 aa, Influenza A virus
GKNTDLEALMEWLKTRPIL

SEQ ID NO: 175283 - protein, 20 aa, Influenza A virus
GKNTDLEALMEWLKTRPILS

SEQ ID NO: 175284 - protein, 21 aa, Influenza A virus
GKNTDLEALMEWLKTRPILSP

SEQ ID NO: 175285 - protein, 22 aa, Influenza A virus
GKNTDLEALMEWLKTRPILSPL

SEQ ID NO: 175286 - protein, 23 aa, Influenza A virus
GKNTDLEALMEWLKTRPILSPLT

SEQ ID NO: 175287 - protein, 24 aa, Influenza A virus
GKNTDLEALMEWLKTRPILSPLTK

SEQ ID NO: 175288 - protein, 25 aa, Influenza A virus
GKNTDLEALMEWLKTRPILSPLTKG

SEQ ID NO: 175289 - protein, 13 aa, Influenza A virus
GLQRRRFVQNALN

SEQ ID NO: 175290 - protein, 14 aa, Influenza A virus
GLQRRRFVQNALNG

SEQ ID NO: 175291 - protein, 15 aa, Influenza A virus
GLQRRRFVQNALNGN

SEQ ID NO: 175292 - protein, 16 aa, Influenza A virus
GLQRRRFVQNALNGNG

SEQ ID NO: 175293 - protein, 17 aa, Influenza A virus
GLQRRRFVQNALNGNGD

SEQ ID NO: 175294 - protein, 18 aa, Influenza A virus
GLQRRRFVQNALNGNGDP

SEQ ID NO: 175295 - protein, 19 aa, Influenza A virus
GLQRRRFVQNALNGNGDPN

SEQ ID NO: 175296 - protein, 20 aa, Influenza A virus
GLQRRRFVQNALNGNGDPNN

SEQ ID NO: 175297 - protein, 21 aa, Influenza A virus
GLQRRRFVQNALNGNGDPNNM

SEQ ID NO: 175298 - protein, 22 aa, Influenza A virus
GLQRRRFVQNALNGNGDPNNMD

SEQ ID NO: 175299 - protein, 13 aa, Influenza A virus
GPLKAEIAQRLED

SEQ ID NO: 175300 - protein, 14 aa, Influenza A virus
GPLKAEIAQRLEDV

SEQ ID NO: 175301 - protein, 15 aa, Influenza A virus
GPLKAEIAQRLEDVF

SEQ ID NO: 175302 - protein, 16 aa, Influenza A virus
GPLKAEIAQRLEDVFA

SEQ ID NO: 175303 - protein, 17 aa, Influenza A virus
GPLKAEIAQRLEDVFAG

SEQ ID NO: 175304 - protein, 18 aa, Influenza A virus
GPLKAEIAQRLEDVFAGK

SEQ ID NO: 175305 - protein, 19 aa, Influenza A virus
GPLKAEIAQRLEDVFAGKN

SEQ ID NO: 175306 - protein, 20 aa, Influenza A virus
GPLKAEIAQRLEDVFAGKNT

SEQ ID NO: 175307 - protein, 21 aa, Influenza A virus
GPLKAEIAQRLEDVFAGKNTD

SEQ ID NO: 175308 - protein, 22 aa, Influenza A virus
GPLKAEIAQRLEDVFAGKNTDL

SEQ ID NO: 175309 - protein, 23 aa, Influenza A virus
GPLKAEIAQRLEDVFAGKNTDLE

SEQ ID NO: 175310 - protein, 24 aa, Influenza A virus
GPLKAEIAQRLEDVFAGKNTDLEA

SEQ ID NO: 175311 - protein, 25 aa, Influenza A virus
GPLKAEIAQRLEDVFAGKNTDLEAL

SEQ ID NO: 175312 - protein, 13 aa, Influenza A virus
GSSEQAAEAMEVA

SEQ ID NO: 175313 - protein, 14 aa, Influenza A virus
GSSEQAAEAMEVAS

SEQ ID NO: 175314 - protein, 14 aa, Influenza A virus
HENRMVLASTTAKA

SEQ ID NO: 175315 - protein, 15 aa, Influenza A virus
HENRMVLASTTAKAM

SEQ ID NO: 175316 - protein, 16 aa, Influenza A virus
HENRMVLASTTAKAME

SEQ ID NO: 175317 - protein, 17 aa, Influenza A virus
HENRMVLASTTAKAMEQ

SEQ ID NO: 175318 - protein, 18 aa, Influenza A virus
HENRMVLASTTAKAMEQM

SEQ ID NO: 175319 - protein, 19 aa, Influenza A virus
HENRMVLASTTAKAMEQMA

SEQ ID NO: 175320 - protein, 20 aa, Influenza A virus
HENRMVLASTTAKAMEQMAG

SEQ ID NO: 175321 - protein, 21 aa, Influenza A virus
HENRMVLASTTAKAMEQMAGS

SEQ ID NO: 175322 - protein, 22 aa, Influenza A virus
HENRMVLASTTAKAMEQMAGSS

SEQ ID NO: 175323 - protein, 23 aa, Influenza A virus
HENRMVLASTTAKAMEQMAGSSE

SEQ ID NO: 175324 - protein, 24 aa, Influenza A virus
HENRMVLASTTAKAMEQMAGSSEQ

SEQ ID NO: 175325 - protein, 25 aa, Influenza A virus
HENRMVLASTTAKAMEQMAGSSEQA

SEQ ID NO: 175326 - protein, 20 aa, Influenza A virus
IAQRLEDVFAGKNTDLEALM

SEQ ID NO: 175327 - protein, 21 aa, Influenza A virus
IAQRLEDVFAGKNTDLEALME

SEQ ID NO: 175328 - protein, 22 aa, Influenza A virus
IAQRLEDVFAGKNTDLEALMEW

SEQ ID NO: 175329 - protein, 23 aa, Influenza A virus
IAQRLEDVFAGKNTDLEALMEWL

SEQ ID NO: 175330 - protein, 24 aa, Influenza A virus
IAQRLEDVFAGKNTDLEALMEWLK

SEQ ID NO: 175331 - protein, 25 aa, Influenza A virus
IAQRLEDVFAGKNTDLEALMEWLKT

SEQ ID NO: 175332 - protein, 13 aa, Influenza A virus
ILGFVFTLTVPSE

SEQ ID NO: 175333 - protein, 14 aa, Influenza A virus
ILGFVFTLTVPSER

SEQ ID NO: 175334 - protein, 15 aa, Influenza A virus
ILGFVFTLTVPSERG

SEQ ID NO: 175335 - protein, 16 aa, Influenza A virus
ILGFVFTLTVPSERGL

SEQ ID NO: 175336 - protein, 17 aa, Influenza A virus
ILGFVFTLTVPSERGLQ

SEQ ID NO: 175337 - protein, 18 aa, Influenza A virus
ILGFVFTLTVPSERGLQR

SEQ ID NO: 175338 - protein, 19 aa, Influenza A virus
ILGFVFTLTVPSERGLQRR

SEQ ID NO: 175339 - protein, 20 aa, Influenza A virus
ILGFVFTLTVPSERGLQRRR

SEQ ID NO: 175340 - protein, 21 aa, Influenza A virus
ILGFVFTLTVPSERGLQRRRF

SEQ ID NO: 175341 - protein, 22 aa, Influenza A virus
ILGFVFTLTVPSERGLQRRRFV

SEQ ID NO: 175342 - protein, 23 aa, Influenza A virus
ILGFVFTLTVPSERGLQRRRFVQ

SEQ ID NO: 175343 - protein, 24 aa, Influenza A virus
ILGFVFTLTVPSERGLQRRRFVQN

SEQ ID NO: 175344 - protein, 25 aa, Influenza A virus
ILGFVFTLTVPSERGLQRRRFVQNA

SEQ ID NO: 175345 - protein, 14 aa, Influenza A virus
ILSPLTKGILGFVF

SEQ ID NO: 175346 - protein, 15 aa, Influenza A virus
ILSPLTKGILGFVFT

SEQ ID NO: 175347 - protein, 16 aa, Influenza A virus
ILSPLTKGILGFVFTL

SEQ ID NO: 175348 - protein, 17 aa, Influenza A virus
ILSPLTKGILGFVFTLT

SEQ ID NO: 175349 - protein, 18 aa, Influenza A virus
ILSPLTKGILGFVFTLTV

SEQ ID NO: 175350 - protein, 19 aa, Influenza A virus
ILSPLTKGILGFVFTLTVP

SEQ ID NO: 175351 - protein, 20 aa, Influenza A virus
ILSPLTKGILGFVFTLTVPS

SEQ ID NO: 175352 - protein, 21 aa, Influenza A virus
ILSPLTKGILGFVFTLTVPSE

SEQ ID NO: 175353 - protein, 22 aa, Influenza A virus
ILSPLTKGILGFVFTLTVPSER

SEQ ID NO: 175354 - protein, 23 aa, Influenza A virus
ILSPLTKGILGFVFTLTVPSERG

SEQ ID NO: 175355 - protein, 24 aa, Influenza A virus
ILSPLTKGILGFVFTLTVPSERGL

SEQ ID NO: 175356 - protein, 25 aa, Influenza A virus
ILSPLTKGILGFVFTLTVPSERGLQ

SEQ ID NO: 175357 - protein, 14 aa, Influenza A virus
IRHENRMVLASTTA

SEQ ID NO: 175358 - protein, 15 aa, Influenza A virus
IRHENRMVLASTTAK

SEQ ID NO: 175359 - protein, 16 aa, Influenza A virus
IRHENRMVLASTTAKA

SEQ ID NO: 175360 - protein, 17 aa, Influenza A virus
IRHENRMVLASTTAKAM

SEQ ID NO: 175361 - protein, 18 aa, Influenza A virus
IRHENRMVLASTTAKAME

SEQ ID NO: 175362 - protein, 19 aa, Influenza A virus
IRHENRMVLASTTAKAMEQ

SEQ ID NO: 175363 - protein, 20 aa, Influenza A virus
IRHENRMVLASTTAKAMEQM

SEQ ID NO: 175364 - protein, 21 aa, Influenza A virus
IRHENRMVLASTTAKAMEQMA

SEQ ID NO: 175365 - protein, 22 aa, Influenza A virus
IRHENRMVLASTTAKAMEQMAG

SEQ ID NO: 175366 - protein, 23 aa, Influenza A virus
IRHENRMVLASTTAKAMEQMAGS

SEQ ID NO: 175367 - protein, 24 aa, Influenza A virus
IRHENRMVLASTTAKAMEQMAGSS

SEQ ID NO: 175368 - protein, 25 aa, Influenza A virus
IRHENRMVLASTTAKAMEQMAGSSE

SEQ ID NO: 175369 - protein, 15 aa, Influenza A virus
KAEIAQRLEDVFAGK

SEQ ID NO: 175370 - protein, 16 aa, Influenza A virus
KAEIAQRLEDVFAGKN

SEQ ID NO: 175371 - protein, 17 aa, Influenza A virus
KAEIAQRLEDVFAGKNT

SEQ ID NO: 175372 - protein, 19 aa, Influenza A virus
KAEIAQRLEDVFAGKNTDL

SEQ ID NO: 175373 - protein, 20 aa, Influenza A virus
KAEIAQRLEDVFAGKNTDLE

SEQ ID NO: 175374 - protein, 21 aa, Influenza A virus
KAEIAQRLEDVFAGKNTDLEA

SEQ ID NO: 175375 - protein, 22 aa, Influenza A virus
KAEIAQRLEDVFAGKNTDLEAL

SEQ ID NO: 175376 - protein, 23 aa, Influenza A virus
KAEIAQRLEDVFAGKNTDLEALM

SEQ ID NO: 175377 - protein, 24 aa, Influenza A virus
KAEIAQRLEDVFAGKNTDLEALME

SEQ ID NO: 175378 - protein, 25 aa, Influenza A virus
KAEIAQRLEDVFAGKNTDLEALMEW

SEQ ID NO: 175379 - protein, 14 aa, Influenza A virus
KAMEQMAGSSEQAA

SEQ ID NO: 175380 - protein, 15 aa, Influenza A virus
KAMEQMAGSSEQAAE

SEQ ID NO: 175381 - protein, 16 aa, Influenza A virus
KAMEQMAGSSEQAAEA

SEQ ID NO: 175382 - protein, 17 aa, Influenza A virus
KAMEQMAGSSEQAAEAM

SEQ ID NO: 175383 - protein, 18 aa, Influenza A virus
KAMEQMAGSSEQAAEAME

SEQ ID NO: 175384 - protein, 19 aa, Influenza A virus
KAMEQMAGSSEQAAEAMEV

SEQ ID NO: 175385 - protein, 20 aa, Influenza A virus
KAMEQMAGSSEQAAEAMEVA

SEQ ID NO: 175386 - protein, 21 aa, Influenza A virus
KAMEQMAGSSEQAAEAMEVAS

SEQ ID NO: 175387 - protein, 13 aa, Influenza A virus
KGILGFVFTLTVP

SEQ ID NO: 175388 - protein, 14 aa, Influenza A virus
KGILGFVFTLTVPS

SEQ ID NO: 175389 - protein, 15 aa, Influenza A virus
KGILGFVFTLTVPSE

SEQ ID NO: 175390 - protein, 16 aa, Influenza A virus
KGILGFVFTLTVPSER

SEQ ID NO: 175391 - protein, 17 aa, Influenza A virus
KGILGFVFTLTVPSERG

SEQ ID NO: 175392 - protein, 18 aa, Influenza A virus
KGILGFVFTLTVPSERGL

SEQ ID NO: 175393 - protein, 19 aa, Influenza A virus
KGILGFVFTLTVPSERGLQ

SEQ ID NO: 175394 - protein, 20 aa, Influenza A virus
KGILGFVFTLTVPSERGLQR

SEQ ID NO: 175395 - protein, 21 aa, Influenza A virus
KGILGFVFTLTVPSERGLQRR

SEQ ID NO: 175396 - protein, 22 aa, Influenza A virus
KGILGFVFTLTVPSERGLQRRR

SEQ ID NO: 175397 - protein, 23 aa, Influenza A virus
KGILGFVFTLTVPSERGLQRRRF

SEQ ID NO: 175398 - protein, 24 aa, Influenza A virus
KGILGFVFTLTVPSERGLQRRRFV

SEQ ID NO: 175399 - protein, 25 aa, Influenza A virus
KGILGFVFTLTVPSERGLQRRRFVQ

SEQ ID NO: 175400 - protein, 14 aa, Influenza A virus
KNTDLEALMEWLKT

SEQ ID NO: 175401 - protein, 15 aa, Influenza A virus
KNTDLEALMEWLKTR

SEQ ID NO: 175402 - protein, 16 aa, Influenza A virus
KNTDLEALMEWLKTRP

SEQ ID NO: 175403 - protein, 17 aa, Influenza A virus
KNTDLEALMEWLKTRPI

SEQ ID NO: 175404 - protein, 18 aa, Influenza A virus
KNTDLEALMEWLKTRPIL

SEQ ID NO: 175405 - protein, 19 aa, Influenza A virus
KNTDLEALMEWLKTRPILS

SEQ ID NO: 175406 - protein, 20 aa, Influenza A virus
KNTDLEALMEWLKTRPILSP

SEQ ID NO: 175407 - protein, 21 aa, Influenza A virus
KNTDLEALMEWLKTRPILSPL

SEQ ID NO: 175408 - protein, 22 aa, Influenza A virus
KNTDLEALMEWLKTRPILSPLT

SEQ ID NO: 175409 - protein, 23 aa, Influenza A virus
KNTDLEALMEWLKTRPILSPLTK

SEQ ID NO: 175410 - protein, 24 aa, Influenza A virus
KNTDLEALMEWLKTRPILSPLTKG

SEQ ID NO: 175411 - protein, 25 aa, Influenza A virus
KNTDLEALMEWLKTRPILSPLTKGI

SEQ ID NO: 175412 - protein, 14 aa, Influenza A virus
KTRPILSPLTKGIL

SEQ ID NO: 175413 - protein, 15 aa, Influenza A virus
KTRPILSPLTKGILG

SEQ ID NO: 175414 - protein, 16 aa, Influenza A virus
KTRPILSPLTKGILGF

SEQ ID NO: 175415 - protein, 17 aa, Influenza A virus
KTRPILSPLTKGILGFV

SEQ ID NO: 175416 - protein, 18 aa, Influenza A virus
KTRPILSPLTKGILGFVF

SEQ ID NO: 175417 - protein, 19 aa, Influenza A virus
KTRPILSPLTKGILGFVFT

SEQ ID NO: 175418 - protein, 20 aa, Influenza A virus
KTRPILSPLTKGILGFVFTL

SEQ ID NO: 175419 - protein, 21 aa, Influenza A virus
KTRPILSPLTKGILGFVFTLT

SEQ ID NO: 175420 - protein, 22 aa, Influenza A virus
KTRPILSPLTKGILGFVFTLTV

SEQ ID NO: 175421 - protein, 23 aa, Influenza A virus
KTRPILSPLTKGILGFVFTLTVP

SEQ ID NO: 175422 - protein, 24 aa, Influenza A virus
KTRPILSPLTKGILGFVFTLTVPS

SEQ ID NO: 175423 - protein, 25 aa, Influenza A virus
KTRPILSPLTKGILGFVFTLTVPSE

SEQ ID NO: 175424 - protein, 13 aa, Influenza A virus
LASCMGLIYNRMG

SEQ ID NO: 175425 - protein, 14 aa, Influenza A virus
LASTTAKAMEQMAG

SEQ ID NO: 175426 - protein, 15 aa, Influenza A virus
LASTTAKAMEQMAGS

SEQ ID NO: 175427 - protein, 16 aa, Influenza A virus
LASTTAKAMEQMAGSS

SEQ ID NO: 175428 - protein, 17 aa, Influenza A virus
LASTTAKAMEQMAGSSE

SEQ ID NO: 175429 - protein, 19 aa, Influenza A virus
LASTTAKAMEQMAGSSEQA

SEQ ID NO: 175430 - protein, 20 aa, Influenza A virus
LASTTAKAMEQMAGSSEQAA

SEQ ID NO: 175431 - protein, 21 aa, Influenza A virus
LASTTAKAMEQMAGSSEQAAE

SEQ ID NO: 175432 - protein, 22 aa, Influenza A virus
LASTTAKAMEQMAGSSEQAAEA

SEQ ID NO: 175433 - protein, 23 aa, Influenza A virus
LASTTAKAMEQMAGSSEQAAEAM

SEQ ID NO: 175434 - protein, 24 aa, Influenza A virus
LASTTAKAMEQMAGSSEQAAEAME

SEQ ID NO: 175435 - protein, 25 aa, Influenza A virus
LASTTAKAMEQMAGSSEQAAEAMEV

SEQ ID NO: 175436 - protein, 14 aa, Influenza A virus
LEALMEWLKTRPIL

SEQ ID NO: 175437 - protein, 15 aa, Influenza A virus
LEALMEWLKTRPILS

SEQ ID NO: 175438 - protein, 16 aa, Influenza A virus
LEALMEWLKTRPILSP

SEQ ID NO: 175439 - protein, 17 aa, Influenza A virus
LEALMEWLKTRPILSPL

SEQ ID NO: 175440 - protein, 18 aa, Influenza A virus
LEALMEWLKTRPILSPLT

SEQ ID NO: 175441 - protein, 19 aa, Influenza A virus
LEALMEWLKTRPILSPLTK

SEQ ID NO: 175442 - protein, 20 aa, Influenza A virus
LEALMEWLKTRPILSPLTKG

SEQ ID NO: 175443 - protein, 21 aa, Influenza A virus
LEALMEWLKTRPILSPLTKGI

SEQ ID NO: 175444 - protein, 22 aa, Influenza A virus
LEALMEWLKTRPILSPLTKGIL

SEQ ID NO: 175445 - protein, 23 aa, Influenza A virus
LEALMEWLKTRPILSPLTKGILG

SEQ ID NO: 175446 - protein, 24 aa, Influenza A virus
LEALMEWLKTRPILSPLTKGILGF

SEQ ID NO: 175447 - protein, 25 aa, Influenza A virus
LEALMEWLKTRPILSPLTKGILGFV

SEQ ID NO: 175448 - protein, 15 aa, Influenza A virus
LEDVFAGKNTDLEAL

SEQ ID NO: 175449 - protein, 19 aa, Influenza A virus
LEDVFAGKNTDLEALMEWL

SEQ ID NO: 175450 - protein, 20 aa, Influenza A virus
LEDVFAGKNTDLEALMEWLK

SEQ ID NO: 175451 - protein, 21 aa, Influenza A virus
LEDVFAGKNTDLEALMEWLKT

SEQ ID NO: 175452 - protein, 22 aa, Influenza A virus
LEDVFAGKNTDLEALMEWLKTR

SEQ ID NO: 175453 - protein, 23 aa, Influenza A virus
LEDVFAGKNTDLEALMEWLKTRP

SEQ ID NO: 175454 - protein, 24 aa, Influenza A virus
LEDVFAGKNTDLEALMEWLKTRPI

SEQ ID NO: 175455 - protein, 25 aa, Influenza A virus
LEDVFAGKNTDLEALMEWLKTRPIL

SEQ ID NO: 175456 - protein, 13 aa, Influenza A virus
LENLQAYQKRMGV

SEQ ID NO: 175457 - protein, 14 aa, Influenza A virus
LENLQAYQKRMGVQ

SEQ ID NO: 175458 - protein, 15 aa, Influenza A virus
LENLQAYQKRMGVQM

SEQ ID NO: 175459 - protein, 16 aa, Influenza A virus
LENLQAYQKRMGVQMQ

SEQ ID NO: 175460 - protein, 17 aa, Influenza A virus
LENLQAYQKRMGVQMQR

SEQ ID NO: 175461 - protein, 18 aa, Influenza A virus
LENLQAYQKRMGVQMQRF

SEQ ID NO: 175462 - protein, 19 aa, Influenza A virus
LENLQAYQKRMGVQMQRFK

SEQ ID NO: 175463 - protein, 13 aa, Influenza A virus
LGFVFTLTVPSER

SEQ ID NO: 175464 - protein, 14 aa, Influenza A virus
LGFVFTLTVPSERG

SEQ ID NO: 175465 - protein, 15 aa, Influenza A virus
LGFVFTLTVPSERGL

SEQ ID NO: 175466 - protein, 16 aa, Influenza A virus
LGFVFTLTVPSERGLQ

SEQ ID NO: 175467 - protein, 17 aa, Influenza A virus
LGFVFTLTVPSERGLQR

SEQ ID NO: 175468 - protein, 18 aa, Influenza A virus
LGFVFTLTVPSERGLQRR

SEQ ID NO: 175469 - protein, 19 aa, Influenza A virus
LGFVFTLTVPSERGLQRRR

SEQ ID NO: 175470 - protein, 20 aa, Influenza A virus
LGFVFTLTVPSERGLQRRRF

SEQ ID NO: 175471 - protein, 21 aa, Influenza A virus
LGFVFTLTVPSERGLQRRRFV

SEQ ID NO: 175472 - protein, 22 aa, Influenza A virus
LGFVFTLTVPSERGLQRRRFVQ

SEQ ID NO: 175473 - protein, 23 aa, Influenza A virus
LGFVFTLTVPSERGLQRRRFVQN

SEQ ID NO: 175474 - protein, 24 aa, Influenza A virus
LGFVFTLTVPSERGLQRRRFVQNA

SEQ ID NO: 175475 - protein, 25 aa, Influenza A virus
LGFVFTLTVPSERGLQRRRFVQNAL

SEQ ID NO: 175476 - protein, 13 aa, Influenza A virus
LIRHENRMVLAST

SEQ ID NO: 175477 - protein, 14 aa, Influenza A virus
LIRHENRMVLASTT

SEQ ID NO: 175478 - protein, 15 aa, Influenza A virus
LIRHENRMVLASTTA

SEQ ID NO: 175479 - protein, 16 aa, Influenza A virus
LIRHENRMVLASTTAK

SEQ ID NO: 175480 - protein, 17 aa, Influenza A virus
LIRHENRMVLASTTAKA

SEQ ID NO: 175481 - protein, 18 aa, Influenza A virus
LIRHENRMVLASTTAKAM

SEQ ID NO: 175482 - protein, 19 aa, Influenza A virus
LIRHENRMVLASTTAKAME

SEQ ID NO: 175483 - protein, 20 aa, Influenza A virus
LIRHENRMVLASTTAKAMEQ

SEQ ID NO: 175484 - protein, 21 aa, Influenza A virus
LIRHENRMVLASTTAKAMEQM

SEQ ID NO: 175485 - protein, 22 aa, Influenza A virus
LIRHENRMVLASTTAKAMEQMA

SEQ ID NO: 175486 - protein, 23 aa, Influenza A virus
LIRHENRMVLASTTAKAMEQMAG

SEQ ID NO: 175487 - protein, 24 aa, Influenza A virus
LIRHENRMVLASTTAKAMEQMAGS

SEQ ID NO: 175488 - protein, 25 aa, Influenza A virus
LIRHENRMVLASTTAKAMEQMAGSS

SEQ ID NO: 175489 - protein, 13 aa, Influenza A virus
LKAEIAQRLEDVF

SEQ ID NO: 175490 - protein, 14 aa, Influenza A virus
LKAEIAQRLEDVFA

SEQ ID NO: 175491 - protein, 15 aa, Influenza A virus
LKAEIAQRLEDVFAG

SEQ ID NO: 175492 - protein, 16 aa, Influenza A virus
LKAEIAQRLEDVFAGK

SEQ ID NO: 175493 - protein, 17 aa, Influenza A virus
LKAEIAQRLEDVFAGKN

SEQ ID NO: 175494 - protein, 18 aa, Influenza A virus
LKAEIAQRLEDVFAGKNT

SEQ ID NO: 175495 - protein, 19 aa, Influenza A virus
LKAEIAQRLEDVFAGKNTD

SEQ ID NO: 175496 - protein, 20 aa, Influenza A virus
LKAEIAQRLEDVFAGKNTDL

SEQ ID NO: 175497 - protein, 21 aa, Influenza A virus
LKAEIAQRLEDVFAGKNTDLE

SEQ ID NO: 175498 - protein, 22 aa, Influenza A virus
LKAEIAQRLEDVFAGKNTDLEA

SEQ ID NO: 175499 - protein, 23 aa, Influenza A virus
LKAEIAQRLEDVFAGKNTDLEAL

SEQ ID NO: 175500 - protein, 24 aa, Influenza A virus
LKAEIAQRLEDVFAGKNTDLEALM

SEQ ID NO: 175501 - protein, 25 aa, Influenza A virus
LKAEIAQRLEDVFAGKNTDLEALME

SEQ ID NO: 175502 - protein, 14 aa, Influenza A virus
LKTRPILSPLTKGI

SEQ ID NO: 175503 - protein, 15 aa, Influenza A virus
LKTRPILSPLTKGIL

SEQ ID NO: 175504 - protein, 16 aa, Influenza A virus
LKTRPILSPLTKGILG

SEQ ID NO: 175505 - protein, 17 aa, Influenza A virus
LKTRPILSPLTKGILGF

SEQ ID NO: 175506 - protein, 18 aa, Influenza A virus
LKTRPILSPLTKGILGFV

SEQ ID NO: 175507 - protein, 19 aa, Influenza A virus
LKTRPILSPLTKGILGFVF

SEQ ID NO: 175508 - protein, 20 aa, Influenza A virus
LKTRPILSPLTKGILGFVFT

SEQ ID NO: 175509 - protein, 21 aa, Influenza A virus
LKTRPILSPLTKGILGFVFTL

SEQ ID NO: 175510 - protein, 22 aa, Influenza A virus
LKTRPILSPLTKGILGFVFTLT

SEQ ID NO: 175511 - protein, 23 aa, Influenza A virus
LKTRPILSPLTKGILGFVFTLTV

SEQ ID NO: 175512 - protein, 24 aa, Influenza A virus
LKTRPILSPLTKGILGFVFTLTVP

SEQ ID NO: 175513 - protein, 25 aa, Influenza A virus
LKTRPILSPLTKGILGFVFTLTVPS

SEQ ID NO: 175514 - protein, 13 aa, Influenza A virus
LLENLQAYQKRMG

SEQ ID NO: 175515 - protein, 14 aa, Influenza A virus
LLENLQAYQKRMGV

SEQ ID NO: 175516 - protein, 15 aa, Influenza A virus
LLENLQAYQKRMGVQ

SEQ ID NO: 175517 - protein, 16 aa, Influenza A virus
LLENLQAYQKRMGVQM

SEQ ID NO: 175518 - protein, 17 aa, Influenza A virus
LLENLQAYQKRMGVQMQ

SEQ ID NO: 175519 - protein, 18 aa, Influenza A virus
LLENLQAYQKRMGVQMQR

SEQ ID NO: 175520 - protein, 19 aa, Influenza A virus
LLENLQAYQKRMGVQMQRF

SEQ ID NO: 175521 - protein, 20 aa, Influenza A virus
LLENLQAYQKRMGVQMQRFK

SEQ ID NO: 175522 - protein, 13 aa, Influenza A virus
LMEWLKTRPILSP

SEQ ID NO: 175523 - protein, 14 aa, Influenza A virus
LMEWLKTRPILSPL

SEQ ID NO: 175524 - protein, 15 aa, Influenza A virus
LMEWLKTRPILSPLT

SEQ ID NO: 175525 - protein, 16 aa, Influenza A virus
LMEWLKTRPILSPLTK

SEQ ID NO: 175526 - protein, 17 aa, Influenza A virus
LMEWLKTRPILSPLTKG

SEQ ID NO: 175527 - protein, 18 aa, Influenza A virus
LMEWLKTRPILSPLTKGI

SEQ ID NO: 175528 - protein, 19 aa, Influenza A virus
LMEWLKTRPILSPLTKGIL

SEQ ID NO: 175529 - protein, 20 aa, Influenza A virus
LMEWLKTRPILSPLTKGILG

SEQ ID NO: 175530 - protein, 21 aa, Influenza A virus
LMEWLKTRPILSPLTKGILGF

SEQ ID NO: 175531 - protein, 22 aa, Influenza A virus
LMEWLKTRPILSPLTKGILGFV

SEQ ID NO: 175532 - protein, 23 aa, Influenza A virus
LMEWLKTRPILSPLTKGILGFVF

SEQ ID NO: 175533 - protein, 24 aa, Influenza A virus
LMEWLKTRPILSPLTKGILGFVFT

SEQ ID NO: 175534 - protein, 25 aa, Influenza A virus
LMEWLKTRPILSPLTKGILGFVFTL

SEQ ID NO: 175535 - protein, 14 aa, Influenza A virus
LQAYQKRMGVQMQR

SEQ ID NO: 175536 - protein, 15 aa, Influenza A virus
LQAYQKRMGVQMQRF

SEQ ID NO: 175537 - protein, 16 aa, Influenza A virus
LQAYQKRMGVQMQRFK

SEQ ID NO: 175538 - protein, 13 aa, Influenza A virus
LQRRRFVQNALNG

SEQ ID NO: 175539 - protein, 14 aa, Influenza A virus
LQRRRFVQNALNGN

SEQ ID NO: 175540 - protein, 15 aa, Influenza A virus
LQRRRFVQNALNGNG

SEQ ID NO: 175541 - protein, 16 aa, Influenza A virus
LQRRRFVQNALNGNGD

SEQ ID NO: 175542 - protein, 17 aa, Influenza A virus
LQRRRFVQNALNGNGDP

SEQ ID NO: 175543 - protein, 18 aa, Influenza A virus
LQRRRFVQNALNGNGDPN

SEQ ID NO: 175544 - protein, 19 aa, Influenza A virus
LQRRRFVQNALNGNGDPNN

SEQ ID NO: 175545 - protein, 20 aa, Influenza A virus
LQRRRFVQNALNGNGDPNNM

SEQ ID NO: 175546 - protein, 21 aa, Influenza A virus
LQRRRFVQNALNGNGDPNNMD

SEQ ID NO: 175547 - protein, 15 aa, Influenza A virus
LSPLTKGILGFVFTL

SEQ ID NO: 175548 - protein, 16 aa, Influenza A virus
LSPLTKGILGFVFTLT

SEQ ID NO: 175549 - protein, 17 aa, Influenza A virus
LSPLTKGILGFVFTLTV

SEQ ID NO: 175550 - protein, 18 aa, Influenza A virus
LSPLTKGILGFVFTLTVP

SEQ ID NO: 175551 - protein, 19 aa, Influenza A virus
LSPLTKGILGFVFTLTVPS

SEQ ID NO: 175552 - protein, 20 aa, Influenza A virus
LSPLTKGILGFVFTLTVPSE

SEQ ID NO: 175553 - protein, 21 aa, Influenza A virus
LSPLTKGILGFVFTLTVPSER

SEQ ID NO: 175554 - protein, 22 aa, Influenza A virus
LSPLTKGILGFVFTLTVPSERG

SEQ ID NO: 175555 - protein, 23 aa, Influenza A virus
LSPLTKGILGFVFTLTVPSERGL

SEQ ID NO: 175556 - protein, 24 aa, Influenza A virus
LSPLTKGILGFVFTLTVPSERGLQ

SEQ ID NO: 175557 - protein, 25 aa, Influenza A virus
LSPLTKGILGFVFTLTVPSERGLQR

SEQ ID NO: 175558 - protein, 13 aa, Influenza A virus
LTKGILGFVFTLT

SEQ ID NO: 175559 - protein, 14 aa, Influenza A virus
LTKGILGFVFTLTV

SEQ ID NO: 175560 - protein, 15 aa, Influenza A virus
LTKGILGFVFTLTVP

SEQ ID NO: 175561 - protein, 16 aa, Influenza A virus
LTKGILGFVFTLTVPS

SEQ ID NO: 175562 - protein, 17 aa, Influenza A virus
LTKGILGFVFTLTVPSE

SEQ ID NO: 175563 - protein, 18 aa, Influenza A virus
LTKGILGFVFTLTVPSER

SEQ ID NO: 175564 - protein, 19 aa, Influenza A virus
LTKGILGFVFTLTVPSERG

SEQ ID NO: 175565 - protein, 20 aa, Influenza A virus
LTKGILGFVFTLTVPSERGL

SEQ ID NO: 175566 - protein, 21 aa, Influenza A virus
LTKGILGFVFTLTVPSERGLQ

SEQ ID NO: 175567 - protein, 22 aa, Influenza A virus
LTKGILGFVFTLTVPSERGLQR

SEQ ID NO: 175568 - protein, 23 aa, Influenza A virus
LTKGILGFVFTLTVPSERGLQRR

SEQ ID NO: 175569 - protein, 24 aa, Influenza A virus
LTKGILGFVFTLTVPSERGLQRRR

SEQ ID NO: 175570 - protein, 25 aa, Influenza A virus
LTKGILGFVFTLTVPSERGLQRRRF

SEQ ID NO: 175571 - protein, 15 aa, Influenza A virus
LTVPSERGLQRRRFV

SEQ ID NO: 175572 - protein, 16 aa, Influenza A virus
LTVPSERGLQRRRFVQ

SEQ ID NO: 175573 - protein, 17 aa, Influenza A virus
LTVPSERGLQRRRFVQN

SEQ ID NO: 175574 - protein, 19 aa, Influenza A virus
LTVPSERGLQRRRFVQNAL

SEQ ID NO: 175575 - protein, 20 aa, Influenza A virus
LTVPSERGLQRRRFVQNALN

SEQ ID NO: 175576 - protein, 21 aa, Influenza A virus
LTVPSERGLQRRRFVQNALNG

SEQ ID NO: 175577 - protein, 22 aa, Influenza A virus
LTVPSERGLQRRRFVQNALNGN

SEQ ID NO: 175578 - protein, 23 aa, Influenza A virus
LTVPSERGLQRRRFVQNALNGNG

SEQ ID NO: 175579 - protein, 24 aa, Influenza A virus
LTVPSERGLQRRRFVQNALNGNGD

SEQ ID NO: 175580 - protein, 25 aa, Influenza A virus
LTVPSERGLQRRRFVQNALNGNGDP

SEQ ID NO: 175581 - protein, 14 aa, Influenza A virus
MAGSSEQAAEAMEV

SEQ ID NO: 175582 - protein, 15 aa, Influenza A virus
MAGSSEQAAEAMEVA

SEQ ID NO: 175583 - protein, 16 aa, Influenza A virus
MAGSSEQAAEAMEVAS

SEQ ID NO: 175584 - protein, 13 aa, Influenza A virus
MEQMAGSSEQAAE

SEQ ID NO: 175585 - protein, 14 aa, Influenza A virus
MEQMAGSSEQAAEA

SEQ ID NO: 175586 - protein, 15 aa, Influenza A virus
MEQMAGSSEQAAEAM

SEQ ID NO: 175587 - protein, 16 aa, Influenza A virus
MEQMAGSSEQAAEAME

SEQ ID NO: 175588 - protein, 17 aa, Influenza A virus
MEQMAGSSEQAAEAMEV

SEQ ID NO: 175589 - protein, 18 aa, Influenza A virus
MEQMAGSSEQAAEAMEVA

SEQ ID NO: 175590 - protein, 19 aa, Influenza A virus
MEQMAGSSEQAAEAMEVAS

SEQ ID NO: 175591 - protein, 13 aa, Influenza A virus
MEWLKTRPILSPL

SEQ ID NO: 175592 - protein, 14 aa, Influenza A virus
MEWLKTRPILSPLT

SEQ ID NO: 175593 - protein, 15 aa, Influenza A virus
MEWLKTRPILSPLTK

SEQ ID NO: 175594 - protein, 16 aa, Influenza A virus
MEWLKTRPILSPLTKG

SEQ ID NO: 175595 - protein, 17 aa, Influenza A virus
MEWLKTRPILSPLTKGI

SEQ ID NO: 175596 - protein, 18 aa, Influenza A virus
MEWLKTRPILSPLTKGIL

SEQ ID NO: 175597 - protein, 19 aa, Influenza A virus
MEWLKTRPILSPLTKGILG

SEQ ID NO: 175598 - protein, 20 aa, Influenza A virus
MEWLKTRPILSPLTKGILGF

SEQ ID NO: 175599 - protein, 21 aa, Influenza A virus
MEWLKTRPILSPLTKGILGFV

SEQ ID NO: 175600 - protein, 22 aa, Influenza A virus
MEWLKTRPILSPLTKGILGFVF

SEQ ID NO: 175601 - protein, 23 aa, Influenza A virus
MEWLKTRPILSPLTKGILGFVFT

SEQ ID NO: 175602 - protein, 24 aa, Influenza A virus
MEWLKTRPILSPLTKGILGFVFTL

SEQ ID NO: 175603 - protein, 25 aa, Influenza A virus
MEWLKTRPILSPLTKGILGFVFTLT

SEQ ID NO: 175604 - protein, 14 aa, Influenza A virus
MSLLTEVETYVLSI

SEQ ID NO: 175605 - protein, 13 aa, Influenza A virus
MVLASTTAKAMEQ

SEQ ID NO: 175606 - protein, 14 aa, Influenza A virus
MVLASTTAKAMEQM

SEQ ID NO: 175607 - protein, 15 aa, Influenza A virus
MVLASTTAKAMEQMA

SEQ ID NO: 175608 - protein, 16 aa, Influenza A virus
MVLASTTAKAMEQMAG

SEQ ID NO: 175609 - protein, 17 aa, Influenza A virus
MVLASTTAKAMEQMAGS

SEQ ID NO: 175610 - protein, 18 aa, Influenza A virus
MVLASTTAKAMEQMAGSS

SEQ ID NO: 175611 - protein, 19 aa, Influenza A virus
MVLASTTAKAMEQMAGSSE

SEQ ID NO: 175612 - protein, 20 aa, Influenza A virus
MVLASTTAKAMEQMAGSSEQ

SEQ ID NO: 175613 - protein, 21 aa, Influenza A virus
MVLASTTAKAMEQMAGSSEQA

SEQ ID NO: 175614 - protein, 22 aa, Influenza A virus
MVLASTTAKAMEQMAGSSEQAA

SEQ ID NO: 175615 - protein, 23 aa, Influenza A virus
MVLASTTAKAMEQMAGSSEQAAE

SEQ ID NO: 175616 - protein, 24 aa, Influenza A virus
MVLASTTAKAMEQMAGSSEQAAEA

SEQ ID NO: 175617 - protein, 25 aa, Influenza A virus
MVLASTTAKAMEQMAGSSEQAAEAM

SEQ ID NO: 175618 - protein, 13 aa, Influenza A virus
NLQAYQKRMGVQM

SEQ ID NO: 175619 - protein, 14 aa, Influenza A virus
NLQAYQKRMGVQMQ

SEQ ID NO: 175620 - protein, 15 aa, Influenza A virus
NLQAYQKRMGVQMQR

SEQ ID NO: 175621 - protein, 16 aa, Influenza A virus
NLQAYQKRMGVQMQRF

SEQ ID NO: 175622 - protein, 17 aa, Influenza A virus
NLQAYQKRMGVQMQRFK

SEQ ID NO: 175623 - protein, 13 aa, Influenza A virus
NPLIRHENRMVLA

SEQ ID NO: 175624 - protein, 14 aa, Influenza A virus
NPLIRHENRMVLAS

SEQ ID NO: 175625 - protein, 15 aa, Influenza A virus
NPLIRHENRMVLAST

SEQ ID NO: 175626 - protein, 16 aa, Influenza A virus
NPLIRHENRMVLASTT

SEQ ID NO: 175627 - protein, 17 aa, Influenza A virus
NPLIRHENRMVLASTTA

SEQ ID NO: 175628 - protein, 18 aa, Influenza A virus
NPLIRHENRMVLASTTAK

SEQ ID NO: 175629 - protein, 19 aa, Influenza A virus
NPLIRHENRMVLASTTAKA

SEQ ID NO: 175630 - protein, 20 aa, Influenza A virus
NPLIRHENRMVLASTTAKAM

SEQ ID NO: 175631 - protein, 21 aa, Influenza A virus
NPLIRHENRMVLASTTAKAME

SEQ ID NO: 175632 - protein, 22 aa, Influenza A virus
NPLIRHENRMVLASTTAKAMEQ

SEQ ID NO: 175633 - protein, 23 aa, Influenza A virus
NPLIRHENRMVLASTTAKAMEQM

SEQ ID NO: 175634 - protein, 24 aa, Influenza A virus
NPLIRHENRMVLASTTAKAMEQMA

SEQ ID NO: 175635 - protein, 25 aa, Influenza A virus
NPLIRHENRMVLASTTAKAMEQMAG

SEQ ID NO: 175636 - protein, 13 aa, Influenza A virus
NRMVLASTTAKAM

SEQ ID NO: 175637 - protein, 14 aa, Influenza A virus
NRMVLASTTAKAME

SEQ ID NO: 175638 - protein, 15 aa, Influenza A virus
NRMVLASTTAKAMEQ

SEQ ID NO: 175639 - protein, 16 aa, Influenza A virus
NRMVLASTTAKAMEQM

SEQ ID NO: 175640 - protein, 17 aa, Influenza A virus
NRMVLASTTAKAMEQMA

SEQ ID NO: 175641 - protein, 18 aa, Influenza A virus
NRMVLASTTAKAMEQMAG

SEQ ID NO: 175642 - protein, 19 aa, Influenza A virus
NRMVLASTTAKAMEQMAGS

SEQ ID NO: 175643 - protein, 20 aa, Influenza A virus
NRMVLASTTAKAMEQMAGSS

SEQ ID NO: 175644 - protein, 21 aa, Influenza A virus
NRMVLASTTAKAMEQMAGSSE

SEQ ID NO: 175645 - protein, 22 aa, Influenza A virus
NRMVLASTTAKAMEQMAGSSEQ

SEQ ID NO: 175646 - protein, 23 aa, Influenza A virus
NRMVLASTTAKAMEQMAGSSEQA

SEQ ID NO: 175647 - protein, 24 aa, Influenza A virus
NRMVLASTTAKAMEQMAGSSEQAA

SEQ ID NO: 175648 - protein, 25 aa, Influenza A virus
NRMVLASTTAKAMEQMAGSSEQAAE

SEQ ID NO: 175649 - protein, 14 aa, Influenza A virus
NTDLEALMEWLKTR

SEQ ID NO: 175650 - protein, 15 aa, Influenza A virus
NTDLEALMEWLKTRP

SEQ ID NO: 175651 - protein, 16 aa, Influenza A virus
NTDLEALMEWLKTRPI

SEQ ID NO: 175652 - protein, 17 aa, Influenza A virus
NTDLEALMEWLKTRPIL

SEQ ID NO: 175653 - protein, 18 aa, Influenza A virus
NTDLEALMEWLKTRPILS

SEQ ID NO: 175654 - protein, 19 aa, Influenza A virus
NTDLEALMEWLKTRPILSP

SEQ ID NO: 175655 - protein, 20 aa, Influenza A virus
NTDLEALMEWLKTRPILSPL

SEQ ID NO: 175656 - protein, 21 aa, Influenza A virus
NTDLEALMEWLKTRPILSPLT

SEQ ID NO: 175657 - protein, 22 aa, Influenza A virus
NTDLEALMEWLKTRPILSPLTK

SEQ ID NO: 175658 - protein, 23 aa, Influenza A virus
NTDLEALMEWLKTRPILSPLTKG

SEQ ID NO: 175659 - protein, 24 aa, Influenza A virus
NTDLEALMEWLKTRPILSPLTKGI

SEQ ID NO: 175660 - protein, 25 aa, Influenza A virus
NTDLEALMEWLKTRPILSPLTKGIL

SEQ ID NO: 175661 - protein, 14 aa, Influenza A virus
PILSPLTKGILGFV

SEQ ID NO: 175662 - protein, 15 aa, Influenza A virus
PILSPLTKGILGFVF

SEQ ID NO: 175663 - protein, 16 aa, Influenza A virus
PILSPLTKGILGFVFT

SEQ ID NO: 175664 - protein, 17 aa, Influenza A virus
PILSPLTKGILGFVFTL

SEQ ID NO: 175665 - protein, 18 aa, Influenza A virus
PILSPLTKGILGFVFTLT

SEQ ID NO: 175666 - protein, 19 aa, Influenza A virus
PILSPLTKGILGFVFTLTV

SEQ ID NO: 175667 - protein, 20 aa, Influenza A virus
PILSPLTKGILGFVFTLTVP

SEQ ID NO: 175668 - protein, 21 aa, Influenza A virus
PILSPLTKGILGFVFTLTVPS

SEQ ID NO: 175669 - protein, 22 aa, Influenza A virus
PILSPLTKGILGFVFTLTVPSE

SEQ ID NO: 175670 - protein, 23 aa, Influenza A virus
PILSPLTKGILGFVFTLTVPSER

SEQ ID NO: 175671 - protein, 24 aa, Influenza A virus
PILSPLTKGILGFVFTLTVPSERG

SEQ ID NO: 175672 - protein, 25 aa, Influenza A virus
PILSPLTKGILGFVFTLTVPSERGL

SEQ ID NO: 175673 - protein, 13 aa, Influenza A virus
PLIRHENRMVLAS

SEQ ID NO: 175674 - protein, 14 aa, Influenza A virus
PLIRHENRMVLAST

SEQ ID NO: 175675 - protein, 15 aa, Influenza A virus
PLIRHENRMVLASTT

SEQ ID NO: 175676 - protein, 16 aa, Influenza A virus
PLIRHENRMVLASTTA

SEQ ID NO: 175677 - protein, 17 aa, Influenza A virus
PLIRHENRMVLASTTAK

SEQ ID NO: 175678 - protein, 18 aa, Influenza A virus
PLIRHENRMVLASTTAKA

SEQ ID NO: 175679 - protein, 19 aa, Influenza A virus
PLIRHENRMVLASTTAKAM

SEQ ID NO: 175680 - protein, 20 aa, Influenza A virus
PLIRHENRMVLASTTAKAME

SEQ ID NO: 175681 - protein, 21 aa, Influenza A virus
PLIRHENRMVLASTTAKAMEQ

SEQ ID NO: 175682 - protein, 22 aa, Influenza A virus
PLIRHENRMVLASTTAKAMEQM

SEQ ID NO: 175683 - protein, 23 aa, Influenza A virus
PLIRHENRMVLASTTAKAMEQMA

SEQ ID NO: 175684 - protein, 24 aa, Influenza A virus
PLIRHENRMVLASTTAKAMEQMAG

SEQ ID NO: 175685 - protein, 25 aa, Influenza A virus
PLIRHENRMVLASTTAKAMEQMAGS

SEQ ID NO: 175686 - protein, 13 aa, Influenza A virus
PLKAEIAQRLEDV

SEQ ID NO: 175687 - protein, 14 aa, Influenza A virus
PLKAEIAQRLEDVF

SEQ ID NO: 175688 - protein, 15 aa, Influenza A virus
PLKAEIAQRLEDVFA

SEQ ID NO: 175689 - protein, 16 aa, Influenza A virus
PLKAEIAQRLEDVFAG

SEQ ID NO: 175690 - protein, 17 aa, Influenza A virus
PLKAEIAQRLEDVFAGK

SEQ ID NO: 175691 - protein, 18 aa, Influenza A virus
PLKAEIAQRLEDVFAGKN

SEQ ID NO: 175692 - protein, 19 aa, Influenza A virus
PLKAEIAQRLEDVFAGKNT

SEQ ID NO: 175693 - protein, 20 aa, Influenza A virus
PLKAEIAQRLEDVFAGKNTD

SEQ ID NO: 175694 - protein, 21 aa, Influenza A virus
PLKAEIAQRLEDVFAGKNTDL

SEQ ID NO: 175695 - protein, 22 aa, Influenza A virus
PLKAEIAQRLEDVFAGKNTDLE

SEQ ID NO: 175696 - protein, 23 aa, Influenza A virus
PLKAEIAQRLEDVFAGKNTDLEA

SEQ ID NO: 175697 - protein, 24 aa, Influenza A virus
PLKAEIAQRLEDVFAGKNTDLEAL

SEQ ID NO: 175698 - protein, 25 aa, Influenza A virus
PLKAEIAQRLEDVFAGKNTDLEALM

SEQ ID NO: 175699 - protein, 14 aa, Influenza A virus
PLTKGILGFVFTLT

SEQ ID NO: 175700 - protein, 15 aa, Influenza A virus
PLTKGILGFVFTLTV

SEQ ID NO: 175701 - protein, 16 aa, Influenza A virus
PLTKGILGFVFTLTVP

SEQ ID NO: 175702 - protein, 17 aa, Influenza A virus
PLTKGILGFVFTLTVPS

SEQ ID NO: 175703 - protein, 18 aa, Influenza A virus
PLTKGILGFVFTLTVPSE

SEQ ID NO: 175704 - protein, 19 aa, Influenza A virus
PLTKGILGFVFTLTVPSER

SEQ ID NO: 175705 - protein, 20 aa, Influenza A virus
PLTKGILGFVFTLTVPSERG

SEQ ID NO: 175706 - protein, 21 aa, Influenza A virus
PLTKGILGFVFTLTVPSERGL

SEQ ID NO: 175707 - protein, 22 aa, Influenza A virus
PLTKGILGFVFTLTVPSERGLQ

SEQ ID NO: 175708 - protein, 23 aa, Influenza A virus
PLTKGILGFVFTLTVPSERGLQR

SEQ ID NO: 175709 - protein, 24 aa, Influenza A virus
PLTKGILGFVFTLTVPSERGLQRR

SEQ ID NO: 175710 - protein, 25 aa, Influenza A virus
PLTKGILGFVFTLTVPSERGLQRRR

SEQ ID NO: 175711 - protein, 14 aa, Influenza A virus
PSERGLQRRRFVQN

SEQ ID NO: 175712 - protein, 15 aa, Influenza A virus
PSERGLQRRRFVQNA

SEQ ID NO: 175713 - protein, 16 aa, Influenza A virus
PSERGLQRRRFVQNAL

SEQ ID NO: 175714 - protein, 17 aa, Influenza A virus
PSERGLQRRRFVQNALN

SEQ ID NO: 175715 - protein, 18 aa, Influenza A virus
PSERGLQRRRFVQNALNG

SEQ ID NO: 175716 - protein, 19 aa, Influenza A virus
PSERGLQRRRFVQNALNGN

SEQ ID NO: 175717 - protein, 20 aa, Influenza A virus
PSERGLQRRRFVQNALNGNG

SEQ ID NO: 175718 - protein, 21 aa, Influenza A virus
PSERGLQRRRFVQNALNGNGD

SEQ ID NO: 175719 - protein, 22 aa, Influenza A virus
PSERGLQRRRFVQNALNGNGDP

SEQ ID NO: 175720 - protein, 23 aa, Influenza A virus
PSERGLQRRRFVQNALNGNGDPN

SEQ ID NO: 175721 - protein, 24 aa, Influenza A virus
PSERGLQRRRFVQNALNGNGDPNN

SEQ ID NO: 175722 - protein, 25 aa, Influenza A virus
PSERGLQRRRFVQNALNGNGDPNNM

SEQ ID NO: 175723 - protein, 13 aa, Influenza A virus
PSGPLKAEIAQRL

SEQ ID NO: 175724 - protein, 14 aa, Influenza A virus
PSGPLKAEIAQRLE

SEQ ID NO: 175725 - protein, 15 aa, Influenza A virus
PSGPLKAEIAQRLED

SEQ ID NO: 175726 - protein, 16 aa, Influenza A virus
PSGPLKAEIAQRLEDV

SEQ ID NO: 175727 - protein, 17 aa, Influenza A virus
PSGPLKAEIAQRLEDVF

SEQ ID NO: 175728 - protein, 18 aa, Influenza A virus
PSGPLKAEIAQRLEDVFA

SEQ ID NO: 175729 - protein, 19 aa, Influenza A virus
PSGPLKAEIAQRLEDVFAG

SEQ ID NO: 175730 - protein, 20 aa, Influenza A virus
PSGPLKAEIAQRLEDVFAGK

SEQ ID NO: 175731 - protein, 21 aa, Influenza A virus
PSGPLKAEIAQRLEDVFAGKN

SEQ ID NO: 175732 - protein, 22 aa, Influenza A virus
PSGPLKAEIAQRLEDVFAGKNT

SEQ ID NO: 175733 - protein, 23 aa, Influenza A virus
PSGPLKAEIAQRLEDVFAGKNTD

SEQ ID NO: 175734 - protein, 24 aa, Influenza A virus
PSGPLKAEIAQRLEDVFAGKNTDL

SEQ ID NO: 175735 - protein, 25 aa, Influenza A virus
PSGPLKAEIAQRLEDVFAGKNTDLE

SEQ ID NO: 175736 - protein, 14 aa, Influenza A virus
QAYQKRMGVQMQRF

SEQ ID NO: 175737 - protein, 15 aa, Influenza A virus
QAYQKRMGVQMQRFK

SEQ ID NO: 175738 - protein, 14 aa, Influenza A virus
QMAGSSEQAAEAME

SEQ ID NO: 175739 - protein, 15 aa, Influenza A virus
QMAGSSEQAAEAMEV

SEQ ID NO: 175740 - protein, 16 aa, Influenza A virus
QMAGSSEQAAEAMEVA

SEQ ID NO: 175741 - protein, 17 aa, Influenza A virus
QMAGSSEQAAEAMEVAS

SEQ ID NO: 175742 - protein, 20 aa, Influenza A virus
QRLEDVFAGKNTDLEALMEW

SEQ ID NO: 175743 - protein, 21 aa, Influenza A virus
QRLEDVFAGKNTDLEALMEWL

SEQ ID NO: 175744 - protein, 22 aa, Influenza A virus
QRLEDVFAGKNTDLEALMEWLK

SEQ ID NO: 175745 - protein, 23 aa, Influenza A virus
QRLEDVFAGKNTDLEALMEWLKT

SEQ ID NO: 175746 - protein, 24 aa, Influenza A virus
QRLEDVFAGKNTDLEALMEWLKTR

SEQ ID NO: 175747 - protein, 25 aa, Influenza A virus
QRLEDVFAGKNTDLEALMEWLKTRP

SEQ ID NO: 175748 - protein, 13 aa, Influenza A virus
QRRRFVQNALNGN

SEQ ID NO: 175749 - protein, 14 aa, Influenza A virus
QRRRFVQNALNGNG

SEQ ID NO: 175750 - protein, 15 aa, Influenza A virus
QRRRFVQNALNGNGD

SEQ ID NO: 175751 - protein, 16 aa, Influenza A virus
QRRRFVQNALNGNGDP

SEQ ID NO: 175752 - protein, 17 aa, Influenza A virus
QRRRFVQNALNGNGDPN

SEQ ID NO: 175753 - protein, 18 aa, Influenza A virus
QRRRFVQNALNGNGDPNN

SEQ ID NO: 175754 - protein, 19 aa, Influenza A virus
QRRRFVQNALNGNGDPNNM

SEQ ID NO: 175755 - protein, 20 aa, Influenza A virus
QRRRFVQNALNGNGDPNNMD

SEQ ID NO: 175756 - protein, 14 aa, Influenza A virus
RGLQRRRFVQNALN

SEQ ID NO: 175757 - protein, 15 aa, Influenza A virus
RGLQRRRFVQNALNG

SEQ ID NO: 175758 - protein, 16 aa, Influenza A virus
RGLQRRRFVQNALNGN

SEQ ID NO: 175759 - protein, 17 aa, Influenza A virus
RGLQRRRFVQNALNGNG

SEQ ID NO: 175760 - protein, 18 aa, Influenza A virus
RGLQRRRFVQNALNGNGD

SEQ ID NO: 175761 - protein, 19 aa, Influenza A virus
RGLQRRRFVQNALNGNGDP

SEQ ID NO: 175762 - protein, 20 aa, Influenza A virus
RGLQRRRFVQNALNGNGDPN

SEQ ID NO: 175763 - protein, 21 aa, Influenza A virus
RGLQRRRFVQNALNGNGDPNN

SEQ ID NO: 175764 - protein, 22 aa, Influenza A virus
RGLQRRRFVQNALNGNGDPNNM

SEQ ID NO: 175765 - protein, 23 aa, Influenza A virus
RGLQRRRFVQNALNGNGDPNNMD

SEQ ID NO: 175766 - protein, 14 aa, Influenza A virus
RHENRMVLASTTAK

SEQ ID NO: 175767 - protein, 15 aa, Influenza A virus
RHENRMVLASTTAKA

SEQ ID NO: 175768 - protein, 16 aa, Influenza A virus
RHENRMVLASTTAKAM

SEQ ID NO: 175769 - protein, 17 aa, Influenza A virus
RHENRMVLASTTAKAME

SEQ ID NO: 175770 - protein, 18 aa, Influenza A virus
RHENRMVLASTTAKAMEQ

SEQ ID NO: 175771 - protein, 19 aa, Influenza A virus
RHENRMVLASTTAKAMEQM

SEQ ID NO: 175772 - protein, 20 aa, Influenza A virus
RHENRMVLASTTAKAMEQMA

SEQ ID NO: 175773 - protein, 21 aa, Influenza A virus
RHENRMVLASTTAKAMEQMAG

SEQ ID NO: 175774 - protein, 22 aa, Influenza A virus
RHENRMVLASTTAKAMEQMAGS

SEQ ID NO: 175775 - protein, 23 aa, Influenza A virus
RHENRMVLASTTAKAMEQMAGSS

SEQ ID NO: 175776 - protein, 24 aa, Influenza A virus
RHENRMVLASTTAKAMEQMAGSSE

SEQ ID NO: 175777 - protein, 25 aa, Influenza A virus
RHENRMVLASTTAKAMEQMAGSSEQ

SEQ ID NO: 175778 - protein, 20 aa, Influenza A virus
RLEDVFAGKNTDLEALMEWL

SEQ ID NO: 175779 - protein, 21 aa, Influenza A virus
RLEDVFAGKNTDLEALMEWLK

SEQ ID NO: 175780 - protein, 22 aa, Influenza A virus
RLEDVFAGKNTDLEALMEWLKT

SEQ ID NO: 175781 - protein, 23 aa, Influenza A virus
RLEDVFAGKNTDLEALMEWLKTR

SEQ ID NO: 175782 - protein, 24 aa, Influenza A virus
RLEDVFAGKNTDLEALMEWLKTRP

SEQ ID NO: 175783 - protein, 25 aa, Influenza A virus
RLEDVFAGKNTDLEALMEWLKTRPI

SEQ ID NO: 175784 - protein, 13 aa, Influenza A virus
RMVLASTTAKAME

SEQ ID NO: 175785 - protein, 14 aa, Influenza A virus
RMVLASTTAKAMEQ

SEQ ID NO: 175786 - protein, 15 aa, Influenza A virus
RMVLASTTAKAMEQM

SEQ ID NO: 175787 - protein, 16 aa, Influenza A virus
RMVLASTTAKAMEQMA

SEQ ID NO: 175788 - protein, 17 aa, Influenza A virus
RMVLASTTAKAMEQMAG

SEQ ID NO: 175789 - protein, 18 aa, Influenza A virus
RMVLASTTAKAMEQMAGS

SEQ ID NO: 175790 - protein, 19 aa, Influenza A virus
RMVLASTTAKAMEQMAGSS

SEQ ID NO: 175791 - protein, 20 aa, Influenza A virus
RMVLASTTAKAMEQMAGSSE

SEQ ID NO: 175792 - protein, 21 aa, Influenza A virus
RMVLASTTAKAMEQMAGSSEQ

SEQ ID NO: 175793 - protein, 22 aa, Influenza A virus
RMVLASTTAKAMEQMAGSSEQA

SEQ ID NO: 175794 - protein, 23 aa, Influenza A virus
RMVLASTTAKAMEQMAGSSEQAA

SEQ ID NO: 175795 - protein, 24 aa, Influenza A virus
RMVLASTTAKAMEQMAGSSEQAAE

SEQ ID NO: 175796 - protein, 25 aa, Influenza A virus
RMVLASTTAKAMEQMAGSSEQAAEA

SEQ ID NO: 175797 - protein, 14 aa, Influenza A virus
RPILSPLTKGILGF

SEQ ID NO: 175798 - protein, 15 aa, Influenza A virus
RPILSPLTKGILGFV

SEQ ID NO: 175799 - protein, 16 aa, Influenza A virus
RPILSPLTKGILGFVF

SEQ ID NO: 175800 - protein, 17 aa, Influenza A virus
RPILSPLTKGILGFVFT

SEQ ID NO: 175801 - protein, 19 aa, Influenza A virus
RPILSPLTKGILGFVFTLT

SEQ ID NO: 175802 - protein, 20 aa, Influenza A virus
RPILSPLTKGILGFVFTLTV

SEQ ID NO: 175803 - protein, 21 aa, Influenza A virus
RPILSPLTKGILGFVFTLTVP

SEQ ID NO: 175804 - protein, 22 aa, Influenza A virus
RPILSPLTKGILGFVFTLTVPS

SEQ ID NO: 175805 - protein, 23 aa, Influenza A virus
RPILSPLTKGILGFVFTLTVPSE

SEQ ID NO: 175806 - protein, 24 aa, Influenza A virus
RPILSPLTKGILGFVFTLTVPSER

SEQ ID NO: 175807 - protein, 25 aa, Influenza A virus
RPILSPLTKGILGFVFTLTVPSERG

SEQ ID NO: 175808 - protein, 14 aa, Influenza A virus
RRFVQNALNGNGDP

SEQ ID NO: 175809 - protein, 15 aa, Influenza A virus
RRFVQNALNGNGDPN

SEQ ID NO: 175810 - protein, 16 aa, Influenza A virus
RRFVQNALNGNGDPNN

SEQ ID NO: 175811 - protein, 17 aa, Influenza A virus
RRFVQNALNGNGDPNNM

SEQ ID NO: 175812 - protein, 13 aa, Influenza A virus
RRRFVQNALNGNG

SEQ ID NO: 175813 - protein, 14 aa, Influenza A virus
RRRFVQNALNGNGD

SEQ ID NO: 175814 - protein, 15 aa, Influenza A virus
RRRFVQNALNGNGDP

SEQ ID NO: 175815 - protein, 16 aa, Influenza A virus
RRRFVQNALNGNGDPN

SEQ ID NO: 175816 - protein, 17 aa, Influenza A virus
RRRFVQNALNGNGDPNN

SEQ ID NO: 175817 - protein, 19 aa, Influenza A virus
RRRFVQNALNGNGDPNNMD

SEQ ID NO: 175818 - protein, 14 aa, Influenza A virus
SERGLQRRRFVQNA

SEQ ID NO: 175819 - protein, 15 aa, Influenza A virus
SERGLQRRRFVQNAL

SEQ ID NO: 175820 - protein, 16 aa, Influenza A virus
SERGLQRRRFVQNALN

SEQ ID NO: 175821 - protein, 17 aa, Influenza A virus
SERGLQRRRFVQNALNG

SEQ ID NO: 175822 - protein, 18 aa, Influenza A virus
SERGLQRRRFVQNALNGN

SEQ ID NO: 175823 - protein, 19 aa, Influenza A virus
SERGLQRRRFVQNALNGNG

SEQ ID NO: 175824 - protein, 20 aa, Influenza A virus
SERGLQRRRFVQNALNGNGD

SEQ ID NO: 175825 - protein, 21 aa, Influenza A virus
SERGLQRRRFVQNALNGNGDP

SEQ ID NO: 175826 - protein, 22 aa, Influenza A virus
SERGLQRRRFVQNALNGNGDPN

SEQ ID NO: 175827 - protein, 23 aa, Influenza A virus
SERGLQRRRFVQNALNGNGDPNN

SEQ ID NO: 175828 - protein, 24 aa, Influenza A virus
SERGLQRRRFVQNALNGNGDPNNM

SEQ ID NO: 175829 - protein, 25 aa, Influenza A virus
SERGLQRRRFVQNALNGNGDPNNMD

SEQ ID NO: 175830 - protein, 13 aa, Influenza A virus
SGPLKAEIAQRLE

SEQ ID NO: 175831 - protein, 14 aa, Influenza A virus
SGPLKAEIAQRLED

SEQ ID NO: 175832 - protein, 15 aa, Influenza A virus
SGPLKAEIAQRLEDV

SEQ ID NO: 175833 - protein, 16 aa, Influenza A virus
SGPLKAEIAQRLEDVF

SEQ ID NO: 175834 - protein, 17 aa, Influenza A virus
SGPLKAEIAQRLEDVFA

SEQ ID NO: 175835 - protein, 18 aa, Influenza A virus
SGPLKAEIAQRLEDVFAG

SEQ ID NO: 175836 - protein, 19 aa, Influenza A virus
SGPLKAEIAQRLEDVFAGK

SEQ ID NO: 175837 - protein, 20 aa, Influenza A virus
SGPLKAEIAQRLEDVFAGKN

SEQ ID NO: 175838 - protein, 21 aa, Influenza A virus
SGPLKAEIAQRLEDVFAGKNT

SEQ ID NO: 175839 - protein, 22 aa, Influenza A virus
SGPLKAEIAQRLEDVFAGKNTD

SEQ ID NO: 175840 - protein, 23 aa, Influenza A virus
SGPLKAEIAQRLEDVFAGKNTDL

SEQ ID NO: 175841 - protein, 24 aa, Influenza A virus
SGPLKAEIAQRLEDVFAGKNTDLE

SEQ ID NO: 175842 - protein, 25 aa, Influenza A virus
SGPLKAEIAQRLEDVFAGKNTDLEA

SEQ ID NO: 175843 - protein, 14 aa, Influenza A virus
SPLTKGILGFVFTL

SEQ ID NO: 175844 - protein, 15 aa, Influenza A virus
SPLTKGILGFVFTLT

SEQ ID NO: 175845 - protein, 16 aa, Influenza A virus
SPLTKGILGFVFTLTV

SEQ ID NO: 175846 - protein, 17 aa, Influenza A virus
SPLTKGILGFVFTLTVP

SEQ ID NO: 175847 - protein, 18 aa, Influenza A virus
SPLTKGILGFVFTLTVPS

SEQ ID NO: 175848 - protein, 19 aa, Influenza A virus
SPLTKGILGFVFTLTVPSE

SEQ ID NO: 175849 - protein, 20 aa, Influenza A virus
SPLTKGILGFVFTLTVPSER

SEQ ID NO: 175850 - protein, 21 aa, Influenza A virus
SPLTKGILGFVFTLTVPSERG

SEQ ID NO: 175851 - protein, 22 aa, Influenza A virus
SPLTKGILGFVFTLTVPSERGL

SEQ ID NO: 175852 - protein, 23 aa, Influenza A virus
SPLTKGILGFVFTLTVPSERGLQ

SEQ ID NO: 175853 - protein, 24 aa, Influenza A virus
SPLTKGILGFVFTLTVPSERGLQR

SEQ ID NO: 175854 - protein, 25 aa, Influenza A virus
SPLTKGILGFVFTLTVPSERGLQRR

SEQ ID NO: 175855 - protein, 13 aa, Influenza A virus
SSEQAAEAMEVAS

SEQ ID NO: 175856 - protein, 15 aa, Influenza A virus
STTAKAMEQMAGSSE

SEQ ID NO: 175857 - protein, 17 aa, Influenza A virus
STTAKAMEQMAGSSEQA

SEQ ID NO: 175858 - protein, 18 aa, Influenza A virus
STTAKAMEQMAGSSEQAA

SEQ ID NO: 175859 - protein, 19 aa, Influenza A virus
STTAKAMEQMAGSSEQAAE

SEQ ID NO: 175860 - protein, 20 aa, Influenza A virus
STTAKAMEQMAGSSEQAAEA

SEQ ID NO: 175861 - protein, 21 aa, Influenza A virus
STTAKAMEQMAGSSEQAAEAM

SEQ ID NO: 175862 - protein, 22 aa, Influenza A virus
STTAKAMEQMAGSSEQAAEAME

SEQ ID NO: 175863 - protein, 23 aa, Influenza A virus
STTAKAMEQMAGSSEQAAEAMEV

SEQ ID NO: 175864 - protein, 24 aa, Influenza A virus
STTAKAMEQMAGSSEQAAEAMEVA

SEQ ID NO: 175865 - protein, 15 aa, Influenza A virus
TAKAMEQMAGSSEQA

SEQ ID NO: 175866 - protein, 16 aa, Influenza A virus
TAKAMEQMAGSSEQAA

SEQ ID NO: 175867 - protein, 17 aa, Influenza A virus
TAKAMEQMAGSSEQAAE

SEQ ID NO: 175868 - protein, 18 aa, Influenza A virus
TAKAMEQMAGSSEQAAEA

SEQ ID NO: 175869 - protein, 19 aa, Influenza A virus
TAKAMEQMAGSSEQAAEAM

SEQ ID NO: 175870 - protein, 20 aa, Influenza A virus
TAKAMEQMAGSSEQAAEAME

SEQ ID NO: 175871 - protein, 21 aa, Influenza A virus
TAKAMEQMAGSSEQAAEAMEV

SEQ ID NO: 175872 - protein, 22 aa, Influenza A virus
TAKAMEQMAGSSEQAAEAMEVA

SEQ ID NO: 175873 - protein, 23 aa, Influenza A virus
TAKAMEQMAGSSEQAAEAMEVAS

SEQ ID NO: 175874 - protein, 14 aa, Influenza A virus
TDLEALMEWLKTRP

SEQ ID NO: 175875 - protein, 15 aa, Influenza A virus
TDLEALMEWLKTRPI

SEQ ID NO: 175876 - protein, 16 aa, Influenza A virus
TDLEALMEWLKTRPIL

SEQ ID NO: 175877 - protein, 17 aa, Influenza A virus
TDLEALMEWLKTRPILS

SEQ ID NO: 175878 - protein, 18 aa, Influenza A virus
TDLEALMEWLKTRPILSP

SEQ ID NO: 175879 - protein, 19 aa, Influenza A virus
TDLEALMEWLKTRPILSPL

SEQ ID NO: 175880 - protein, 20 aa, Influenza A virus
TDLEALMEWLKTRPILSPLT

SEQ ID NO: 175881 - protein, 21 aa, Influenza A virus
TDLEALMEWLKTRPILSPLTK

SEQ ID NO: 175882 - protein, 22 aa, Influenza A virus
TDLEALMEWLKTRPILSPLTKG

SEQ ID NO: 175883 - protein, 23 aa, Influenza A virus
TDLEALMEWLKTRPILSPLTKGI

SEQ ID NO: 175884 - protein, 24 aa, Influenza A virus
TDLEALMEWLKTRPILSPLTKGIL

SEQ ID NO: 175885 - protein, 25 aa, Influenza A virus
TDLEALMEWLKTRPILSPLTKGILG

SEQ ID NO: 175886 - protein, 14 aa, Influenza A virus
TEVAFGLVCATCEQ

SEQ ID NO: 175887 - protein, 15 aa, Influenza A virus
TEVAFGLVCATCEQI

SEQ ID NO: 175888 - protein, 16 aa, Influenza A virus
TEVAFGLVCATCEQIA

SEQ ID NO: 175889 - protein, 17 aa, Influenza A virus
TEVAFGLVCATCEQIAD

SEQ ID NO: 175890 - protein, 18 aa, Influenza A virus
TEVAFGLVCATCEQIADS

SEQ ID NO: 175891 - protein, 19 aa, Influenza A virus
TEVAFGLVCATCEQIADSQ

SEQ ID NO: 175892 - protein, 20 aa, Influenza A virus
TEVAFGLVCATCEQIADSQH

SEQ ID NO: 175893 - protein, 13 aa, Influenza A virus
TKGILGFVFTLTV

SEQ ID NO: 175894 - protein, 14 aa, Influenza A virus
TKGILGFVFTLTVP

SEQ ID NO: 175895 - protein, 15 aa, Influenza A virus
TKGILGFVFTLTVPS

SEQ ID NO: 175896 - protein, 16 aa, Influenza A virus
TKGILGFVFTLTVPSE

SEQ ID NO: 175897 - protein, 17 aa, Influenza A virus
TKGILGFVFTLTVPSER

SEQ ID NO: 175898 - protein, 18 aa, Influenza A virus
TKGILGFVFTLTVPSERG

SEQ ID NO: 175899 - protein, 19 aa, Influenza A virus
TKGILGFVFTLTVPSERGL

SEQ ID NO: 175900 - protein, 20 aa, Influenza A virus
TKGILGFVFTLTVPSERGLQ

SEQ ID NO: 175901 - protein, 21 aa, Influenza A virus
TKGILGFVFTLTVPSERGLQR

SEQ ID NO: 175902 - protein, 22 aa, Influenza A virus
TKGILGFVFTLTVPSERGLQRR

SEQ ID NO: 175903 - protein, 23 aa, Influenza A virus
TKGILGFVFTLTVPSERGLQRRR

SEQ ID NO: 175904 - protein, 24 aa, Influenza A virus
TKGILGFVFTLTVPSERGLQRRRF

SEQ ID NO: 175905 - protein, 25 aa, Influenza A virus
TKGILGFVFTLTVPSERGLQRRRFV

SEQ ID NO: 175906 - protein, 15 aa, Influenza A virus
TLTVPSERGLQRRRF

SEQ ID NO: 175907 - protein, 16 aa, Influenza A virus
TLTVPSERGLQRRRFV

SEQ ID NO: 175908 - protein, 17 aa, Influenza A virus
TLTVPSERGLQRRRFVQ

SEQ ID NO: 175909 - protein, 19 aa, Influenza A virus
TLTVPSERGLQRRRFVQNA

SEQ ID NO: 175910 - protein, 20 aa, Influenza A virus
TLTVPSERGLQRRRFVQNAL

SEQ ID NO: 175911 - protein, 21 aa, Influenza A virus
TLTVPSERGLQRRRFVQNALN

SEQ ID NO: 175912 - protein, 22 aa, Influenza A virus
TLTVPSERGLQRRRFVQNALNG

SEQ ID NO: 175913 - protein, 23 aa, Influenza A virus
TLTVPSERGLQRRRFVQNALNGN

SEQ ID NO: 175914 - protein, 24 aa, Influenza A virus
TLTVPSERGLQRRRFVQNALNGNG

SEQ ID NO: 175915 - protein, 25 aa, Influenza A virus
TLTVPSERGLQRRRFVQNALNGNGD

SEQ ID NO: 175916 - protein, 13 aa, Influenza A virus
TNPLIRHENRMVL

SEQ ID NO: 175917 - protein, 14 aa, Influenza A virus
TNPLIRHENRMVLA

SEQ ID NO: 175918 - protein, 15 aa, Influenza A virus
TNPLIRHENRMVLAS

SEQ ID NO: 175919 - protein, 16 aa, Influenza A virus
TNPLIRHENRMVLAST

SEQ ID NO: 175920 - protein, 17 aa, Influenza A virus
TNPLIRHENRMVLASTT

SEQ ID NO: 175921 - protein, 18 aa, Influenza A virus
TNPLIRHENRMVLASTTA

SEQ ID NO: 175922 - protein, 19 aa, Influenza A virus
TNPLIRHENRMVLASTTAK

SEQ ID NO: 175923 - protein, 20 aa, Influenza A virus
TNPLIRHENRMVLASTTAKA

SEQ ID NO: 175924 - protein, 21 aa, Influenza A virus
TNPLIRHENRMVLASTTAKAM

SEQ ID NO: 175925 - protein, 22 aa, Influenza A virus
TNPLIRHENRMVLASTTAKAME

SEQ ID NO: 175926 - protein, 23 aa, Influenza A virus
TNPLIRHENRMVLASTTAKAMEQ

SEQ ID NO: 175927 - protein, 24 aa, Influenza A virus
TNPLIRHENRMVLASTTAKAMEQM

SEQ ID NO: 175928 - protein, 25 aa, Influenza A virus
TNPLIRHENRMVLASTTAKAMEQMA

SEQ ID NO: 175929 - protein, 14 aa, Influenza A virus
TRPILSPLTKGILG

SEQ ID NO: 175930 - protein, 15 aa, Influenza A virus
TRPILSPLTKGILGF

SEQ ID NO: 175931 - protein, 16 aa, Influenza A virus
TRPILSPLTKGILGFV

SEQ ID NO: 175932 - protein, 17 aa, Influenza A virus
TRPILSPLTKGILGFVF

SEQ ID NO: 175933 - protein, 18 aa, Influenza A virus
TRPILSPLTKGILGFVFT

SEQ ID NO: 175934 - protein, 19 aa, Influenza A virus
TRPILSPLTKGILGFVFTL

SEQ ID NO: 175935 - protein, 20 aa, Influenza A virus
TRPILSPLTKGILGFVFTLT

SEQ ID NO: 175936 - protein, 21 aa, Influenza A virus
TRPILSPLTKGILGFVFTLTV

SEQ ID NO: 175937 - protein, 22 aa, Influenza A virus
TRPILSPLTKGILGFVFTLTVP

SEQ ID NO: 175938 - protein, 23 aa, Influenza A virus
TRPILSPLTKGILGFVFTLTVPS

SEQ ID NO: 175939 - protein, 24 aa, Influenza A virus
TRPILSPLTKGILGFVFTLTVPSE

SEQ ID NO: 175940 - protein, 25 aa, Influenza A virus
TRPILSPLTKGILGFVFTLTVPSER

SEQ ID NO: 175941 - protein, 16 aa, Influenza A virus
TTAKAMEQMAGSSEQA

SEQ ID NO: 175942 - protein, 17 aa, Influenza A virus
TTAKAMEQMAGSSEQAA

SEQ ID NO: 175943 - protein, 18 aa, Influenza A virus
TTAKAMEQMAGSSEQAAE

SEQ ID NO: 175944 - protein, 19 aa, Influenza A virus
TTAKAMEQMAGSSEQAAEA

SEQ ID NO: 175945 - protein, 20 aa, Influenza A virus
TTAKAMEQMAGSSEQAAEAM

SEQ ID NO: 175946 - protein, 21 aa, Influenza A virus
TTAKAMEQMAGSSEQAAEAME

SEQ ID NO: 175947 - protein, 22 aa, Influenza A virus
TTAKAMEQMAGSSEQAAEAMEV

SEQ ID NO: 175948 - protein, 23 aa, Influenza A virus
TTAKAMEQMAGSSEQAAEAMEVA

SEQ ID NO: 175949 - protein, 14 aa, Influenza A virus
TTEVAFGLVCATCE

SEQ ID NO: 175950 - protein, 15 aa, Influenza A virus
TTEVAFGLVCATCEQ

SEQ ID NO: 175951 - protein, 16 aa, Influenza A virus
TTEVAFGLVCATCEQI

SEQ ID NO: 175952 - protein, 17 aa, Influenza A virus
TTEVAFGLVCATCEQIA

SEQ ID NO: 175953 - protein, 18 aa, Influenza A virus
TTEVAFGLVCATCEQIAD

SEQ ID NO: 175954 - protein, 19 aa, Influenza A virus
TTEVAFGLVCATCEQIADS

SEQ ID NO: 175955 - protein, 20 aa, Influenza A virus
TTEVAFGLVCATCEQIADSQ

SEQ ID NO: 175956 - protein, 21 aa, Influenza A virus
TTEVAFGLVCATCEQIADSQH

SEQ ID NO: 175957 - protein, 14 aa, Influenza A virus
TTNPLIRHENRMVL

SEQ ID NO: 175958 - protein, 15 aa, Influenza A virus
TTNPLIRHENRMVLA

SEQ ID NO: 175959 - protein, 16 aa, Influenza A virus
TTNPLIRHENRMVLAS

SEQ ID NO: 175960 - protein, 17 aa, Influenza A virus
TTNPLIRHENRMVLAST

SEQ ID NO: 175961 - protein, 18 aa, Influenza A virus
TTNPLIRHENRMVLASTT

SEQ ID NO: 175962 - protein, 19 aa, Influenza A virus
TTNPLIRHENRMVLASTTA

SEQ ID NO: 175963 - protein, 20 aa, Influenza A virus
TTNPLIRHENRMVLASTTAK

SEQ ID NO: 175964 - protein, 21 aa, Influenza A virus
TTNPLIRHENRMVLASTTAKA

SEQ ID NO: 175965 - protein, 22 aa, Influenza A virus
TTNPLIRHENRMVLASTTAKAM

SEQ ID NO: 175966 - protein, 23 aa, Influenza A virus
TTNPLIRHENRMVLASTTAKAME

SEQ ID NO: 175967 - protein, 24 aa, Influenza A virus
TTNPLIRHENRMVLASTTAKAMEQ

SEQ ID NO: 175968 - protein, 25 aa, Influenza A virus
TTNPLIRHENRMVLASTTAKAMEQM

SEQ ID NO: 175969 - protein, 15 aa, Influenza A virus
TVPSERGLQRRRFVQ

SEQ ID NO: 175970 - protein, 16 aa, Influenza A virus
TVPSERGLQRRRFVQN

SEQ ID NO: 175971 - protein, 17 aa, Influenza A virus
TVPSERGLQRRRFVQNA

SEQ ID NO: 175972 - protein, 19 aa, Influenza A virus
TVPSERGLQRRRFVQNALN

SEQ ID NO: 175973 - protein, 20 aa, Influenza A virus
TVPSERGLQRRRFVQNALNG

SEQ ID NO: 175974 - protein, 21 aa, Influenza A virus
TVPSERGLQRRRFVQNALNGN

SEQ ID NO: 175975 - protein, 22 aa, Influenza A virus
TVPSERGLQRRRFVQNALNGNG

SEQ ID NO: 175976 - protein, 23 aa, Influenza A virus
TVPSERGLQRRRFVQNALNGNGD

SEQ ID NO: 175977 - protein, 24 aa, Influenza A virus
TVPSERGLQRRRFVQNALNGNGDP

SEQ ID NO: 175978 - protein, 25 aa, Influenza A virus
TVPSERGLQRRRFVQNALNGNGDPN

SEQ ID NO: 175979 - protein, 15 aa, Influenza A virus
VAFGLVCATCEQIAD

SEQ ID NO: 175980 - protein, 16 aa, Influenza A virus
VAFGLVCATCEQIADS

SEQ ID NO: 175981 - protein, 17 aa, Influenza A virus
VAFGLVCATCEQIADSQ

SEQ ID NO: 175982 - protein, 16 aa, Influenza A virus
VFAGKNTDLEALMEWL

SEQ ID NO: 175983 - protein, 17 aa, Influenza A virus
VFAGKNTDLEALMEWLK

SEQ ID NO: 175984 - protein, 18 aa, Influenza A virus
VFAGKNTDLEALMEWLKT

SEQ ID NO: 175985 - protein, 19 aa, Influenza A virus
VFAGKNTDLEALMEWLKTR

SEQ ID NO: 175986 - protein, 20 aa, Influenza A virus
VFAGKNTDLEALMEWLKTRP

SEQ ID NO: 175987 - protein, 21 aa, Influenza A virus
VFAGKNTDLEALMEWLKTRPI

SEQ ID NO: 175988 - protein, 22 aa, Influenza A virus
VFAGKNTDLEALMEWLKTRPIL

SEQ ID NO: 175989 - protein, 23 aa, Influenza A virus
VFAGKNTDLEALMEWLKTRPILS

SEQ ID NO: 175990 - protein, 24 aa, Influenza A virus
VFAGKNTDLEALMEWLKTRPILSP

SEQ ID NO: 175991 - protein, 25 aa, Influenza A virus
VFAGKNTDLEALMEWLKTRPILSPL

SEQ ID NO: 175992 - protein, 14 aa, Influenza A virus
VFTLTVPSERGLQR

SEQ ID NO: 175993 - protein, 15 aa, Influenza A virus
VFTLTVPSERGLQRR

SEQ ID NO: 175994 - protein, 16 aa, Influenza A virus
VFTLTVPSERGLQRRR

SEQ ID NO: 175995 - protein, 17 aa, Influenza A virus
VFTLTVPSERGLQRRRF

SEQ ID NO: 175996 - protein, 19 aa, Influenza A virus
VFTLTVPSERGLQRRRFVQ

SEQ ID NO: 175997 - protein, 20 aa, Influenza A virus
VFTLTVPSERGLQRRRFVQN

SEQ ID NO: 175998 - protein, 21 aa, Influenza A virus
VFTLTVPSERGLQRRRFVQNA

SEQ ID NO: 175999 - protein, 22 aa, Influenza A virus
VFTLTVPSERGLQRRRFVQNAL

SEQ ID NO: 176000 - protein, 23 aa, Influenza A virus
VFTLTVPSERGLQRRRFVQNALN

SEQ ID NO: 176001 - protein, 24 aa, Influenza A virus
VFTLTVPSERGLQRRRFVQNALNG

SEQ ID NO: 176002 - protein, 25 aa, Influenza A virus
VFTLTVPSERGLQRRRFVQNALNGN

SEQ ID NO: 176003 - protein, 13 aa, Influenza A virus
VLASTTAKAMEQM

SEQ ID NO: 176004 - protein, 14 aa, Influenza A virus
VLASTTAKAMEQMA

SEQ ID NO: 176005 - protein, 15 aa, Influenza A virus
VLASTTAKAMEQMAG

SEQ ID NO: 176006 - protein, 16 aa, Influenza A virus
VLASTTAKAMEQMAGS

SEQ ID NO: 176007 - protein, 17 aa, Influenza A virus
VLASTTAKAMEQMAGSS

SEQ ID NO: 176008 - protein, 18 aa, Influenza A virus
VLASTTAKAMEQMAGSSE

SEQ ID NO: 176009 - protein, 19 aa, Influenza A virus
VLASTTAKAMEQMAGSSEQ

SEQ ID NO: 176010 - protein, 20 aa, Influenza A virus
VLASTTAKAMEQMAGSSEQA

SEQ ID NO: 176011 - protein, 21 aa, Influenza A virus
VLASTTAKAMEQMAGSSEQAA

SEQ ID NO: 176012 - protein, 22 aa, Influenza A virus
VLASTTAKAMEQMAGSSEQAAE

SEQ ID NO: 176013 - protein, 23 aa, Influenza A virus
VLASTTAKAMEQMAGSSEQAAEA

SEQ ID NO: 176014 - protein, 24 aa, Influenza A virus
VLASTTAKAMEQMAGSSEQAAEAM

SEQ ID NO: 176015 - protein, 25 aa, Influenza A virus
VLASTTAKAMEQMAGSSEQAAEAME

SEQ ID NO: 176016 - protein, 15 aa, Influenza A virus
VPSERGLQRRRFVQN

SEQ ID NO: 176017 - protein, 16 aa, Influenza A virus
VPSERGLQRRRFVQNA

SEQ ID NO: 176018 - protein, 17 aa, Influenza A virus
VPSERGLQRRRFVQNAL

SEQ ID NO: 176019 - protein, 18 aa, Influenza A virus
VPSERGLQRRRFVQNALN

SEQ ID NO: 176020 - protein, 19 aa, Influenza A virus
VPSERGLQRRRFVQNALNG

SEQ ID NO: 176021 - protein, 20 aa, Influenza A virus
VPSERGLQRRRFVQNALNGN

SEQ ID NO: 176022 - protein, 21 aa, Influenza A virus
VPSERGLQRRRFVQNALNGNG

SEQ ID NO: 176023 - protein, 22 aa, Influenza A virus
VPSERGLQRRRFVQNALNGNGD

SEQ ID NO: 176024 - protein, 23 aa, Influenza A virus
VPSERGLQRRRFVQNALNGNGDP

SEQ ID NO: 176025 - protein, 24 aa, Influenza A virus
VPSERGLQRRRFVQNALNGNGDPN

SEQ ID NO: 176026 - protein, 25 aa, Influenza A virus
VPSERGLQRRRFVQNALNGNGDPNN

SEQ ID NO: 176027 - protein, 13 aa, Influenza A virus
VTTEVAFGLVCAT

SEQ ID NO: 176028 - protein, 14 aa, Influenza A virus
VTTEVAFGLVCATC

SEQ ID NO: 176029 - protein, 15 aa, Influenza A virus
VTTEVAFGLVCATCE

SEQ ID NO: 176030 - protein, 16 aa, Influenza A virus
VTTEVAFGLVCATCEQ

SEQ ID NO: 176031 - protein, 17 aa, Influenza A virus
VTTEVAFGLVCATCEQI

SEQ ID NO: 176032 - protein, 18 aa, Influenza A virus
VTTEVAFGLVCATCEQIA

SEQ ID NO: 176033 - protein, 19 aa, Influenza A virus
VTTEVAFGLVCATCEQIAD

SEQ ID NO: 176034 - protein, 20 aa, Influenza A virus
VTTEVAFGLVCATCEQIADS

SEQ ID NO: 176035 - protein, 21 aa, Influenza A virus
VTTEVAFGLVCATCEQIADSQ

SEQ ID NO: 176036 - protein, 22 aa, Influenza A virus
VTTEVAFGLVCATCEQIADSQH

SEQ ID NO: 176037 - protein, 14 aa, Influenza A virus
WLKTRPILSPLTKG

SEQ ID NO: 176038 - protein, 15 aa, Influenza A virus
WLKTRPILSPLTKGI

SEQ ID NO: 176039 - protein, 16 aa, Influenza A virus
WLKTRPILSPLTKGIL

SEQ ID NO: 176040 - protein, 17 aa, Influenza A virus
WLKTRPILSPLTKGILG

SEQ ID NO: 176041 - protein, 19 aa, Influenza A virus
WLKTRPILSPLTKGILGFV

SEQ ID NO: 176042 - protein, 20 aa, Influenza A virus
WLKTRPILSPLTKGILGFVF

SEQ ID NO: 176043 - protein, 21 aa, Influenza A virus
WLKTRPILSPLTKGILGFVFT

SEQ ID NO: 176044 - protein, 22 aa, Influenza A virus
WLKTRPILSPLTKGILGFVFTL

SEQ ID NO: 176045 - protein, 23 aa, Influenza A virus
WLKTRPILSPLTKGILGFVFTLT

SEQ ID NO: 176046 - protein, 24 aa, Influenza A virus
WLKTRPILSPLTKGILGFVFTLTV

SEQ ID NO: 176047 - protein, 25 aa, Influenza A virus
WLKTRPILSPLTKGILGFVFTLTVP

SEQ ID NO: 176048 - protein, 13 aa, Influenza A virus
YQKRMGVQMQRFK

SEQ ID NO: 176049 - protein, 13 aa, Influenza A virus
AAMGLRISSSFSF

SEQ ID NO: 176050 - protein, 14 aa, Influenza A virus
AAMGLRISSSFSFG

SEQ ID NO: 176051 - protein, 15 aa, Influenza A virus
AAMGLRISSSFSFGG

SEQ ID NO: 176052 - protein, 16 aa, Influenza A virus
AAMGLRISSSFSFGGF

SEQ ID NO: 176053 - protein, 17 aa, Influenza A virus
AAMGLRISSSFSFGGFT

SEQ ID NO: 176054 - protein, 18 aa, Influenza A virus
AAMGLRISSSFSFGGFTF

SEQ ID NO: 176055 - protein, 19 aa, Influenza A virus
AAMGLRISSSFSFGGFTFK

SEQ ID NO: 176056 - protein, 20 aa, Influenza A virus
AAMGLRISSSFSFGGFTFKR

SEQ ID NO: 176057 - protein, 21 aa, Influenza A virus
AAMGLRISSSFSFGGFTFKRT

SEQ ID NO: 176058 - protein, 22 aa, Influenza A virus
AAMGLRISSSFSFGGFTFKRTS

SEQ ID NO: 176059 - protein, 23 aa, Influenza A virus
AAMGLRISSSFSFGGFTFKRTSG

SEQ ID NO: 176060 - protein, 24 aa, Influenza A virus
AAMGLRISSSFSFGGFTFKRTSGS

SEQ ID NO: 176061 - protein, 25 aa, Influenza A virus
AAMGLRISSSFSFGGFTFKRTSGSS

SEQ ID NO: 176062 - protein, 15 aa, Influenza A virus
ADLSAKEAQDVIMEV

SEQ ID NO: 176063 - protein, 16 aa, Influenza A virus
ADLSAKEAQDVIMEVV

SEQ ID NO: 176064 - protein, 17 aa, Influenza A virus
ADLSAKEAQDVIMEVVF

SEQ ID NO: 176065 - protein, 18 aa, Influenza A virus
ADLSAKEAQDVIMEVVFP

SEQ ID NO: 176066 - protein, 19 aa, Influenza A virus
ADLSAKEAQDVIMEVVFPN

SEQ ID NO: 176067 - protein, 20 aa, Influenza A virus
ADLSAKEAQDVIMEVVFPNE

SEQ ID NO: 176068 - protein, 21 aa, Influenza A virus
ADLSAKEAQDVIMEVVFPNEV

SEQ ID NO: 176069 - protein, 22 aa, Influenza A virus
ADLSAKEAQDVIMEVVFPNEVG

SEQ ID NO: 176070 - protein, 23 aa, Influenza A virus
ADLSAKEAQDVIMEVVFPNEVGA

SEQ ID NO: 176071 - protein, 24 aa, Influenza A virus
ADLSAKEAQDVIMEVVFPNEVGAR

SEQ ID NO: 176072 - protein, 25 aa, Influenza A virus
ADLSAKEAQDVIMEVVFPNEVGARI

SEQ ID NO: 176073 - protein, 15 aa, Influenza A virus
ADPLASLLEMCHSTQ

SEQ ID NO: 176074 - protein, 16 aa, Influenza A virus
ADPLASLLEMCHSTQI

SEQ ID NO: 176075 - protein, 17 aa, Influenza A virus
ADPLASLLEMCHSTQIG

SEQ ID NO: 176076 - protein, 13 aa, Influenza A virus
AEAIIVAMVFSQE

SEQ ID NO: 176077 - protein, 14 aa, Influenza A virus
AEAIIVAMVFSQED

SEQ ID NO: 176078 - protein, 15 aa, Influenza A virus
AEAIIVAMVFSQEDC

SEQ ID NO: 176079 - protein, 16 aa, Influenza A virus
AEAIIVAMVFSQEDCM

SEQ ID NO: 176080 - protein, 17 aa, Influenza A virus
AEAIIVAMVFSQEDCMI

SEQ ID NO: 176081 - protein, 18 aa, Influenza A virus
AEAIIVAMVFSQEDCMIK

SEQ ID NO: 176082 - protein, 19 aa, Influenza A virus
AEAIIVAMVFSQEDCMIKA

SEQ ID NO: 176083 - protein, 20 aa, Influenza A virus
AEAIIVAMVFSQEDCMIKAV

SEQ ID NO: 176084 - protein, 21 aa, Influenza A virus
AEAIIVAMVFSQEDCMIKAVR

SEQ ID NO: 176085 - protein, 22 aa, Influenza A virus
AEAIIVAMVFSQEDCMIKAVRG

SEQ ID NO: 176086 - protein, 23 aa, Influenza A virus
AEAIIVAMVFSQEDCMIKAVRGD

SEQ ID NO: 176087 - protein, 24 aa, Influenza A virus
AEAIIVAMVFSQEDCMIKAVRGDL

SEQ ID NO: 176088 - protein, 25 aa, Influenza A virus
AEAIIVAMVFSQEDCMIKAVRGDLN

SEQ ID NO: 176089 - protein, 13 aa, Influenza A virus
AGGTSSVYIEVLH

SEQ ID NO: 176090 - protein, 14 aa, Influenza A virus
AGGTSSVYIEVLHL

SEQ ID NO: 176091 - protein, 15 aa, Influenza A virus
AGGTSSVYIEVLHLT

SEQ ID NO: 176092 - protein, 16 aa, Influenza A virus
AGGTSSVYIEVLHLTQ

SEQ ID NO: 176093 - protein, 17 aa, Influenza A virus
AGGTSSVYIEVLHLTQG

SEQ ID NO: 176094 - protein, 18 aa, Influenza A virus
AGGTSSVYIEVLHLTQGT

SEQ ID NO: 176095 - protein, 19 aa, Influenza A virus
AGGTSSVYIEVLHLTQGTC

SEQ ID NO: 176096 - protein, 20 aa, Influenza A virus
AGGTSSVYIEVLHLTQGTCW

SEQ ID NO: 176097 - protein, 21 aa, Influenza A virus
AGGTSSVYIEVLHLTQGTCWE

SEQ ID NO: 176098 - protein, 22 aa, Influenza A virus
AGGTSSVYIEVLHLTQGTCWEQ

SEQ ID NO: 176099 - protein, 23 aa, Influenza A virus
AGGTSSVYIEVLHLTQGTCWEQM

SEQ ID NO: 176100 - protein, 24 aa, Influenza A virus
AGGTSSVYIEVLHLTQGTCWEQMY

SEQ ID NO: 176101 - protein, 25 aa, Influenza A virus
AGGTSSVYIEVLHLTQGTCWEQMYT

SEQ ID NO: 176102 - protein, 13 aa, Influenza A virus
AGSDRVMVSPLAV

SEQ ID NO: 176103 - protein, 14 aa, Influenza A virus
AGSDRVMVSPLAVT

SEQ ID NO: 176104 - protein, 15 aa, Influenza A virus
AGSDRVMVSPLAVTW

SEQ ID NO: 176105 - protein, 16 aa, Influenza A virus
AGSDRVMVSPLAVTWW

SEQ ID NO: 176106 - protein, 17 aa, Influenza A virus
AGSDRVMVSPLAVTWWN

SEQ ID NO: 176107 - protein, 18 aa, Influenza A virus
AGSDRVMVSPLAVTWWNR

SEQ ID NO: 176108 - protein, 19 aa, Influenza A virus
AGSDRVMVSPLAVTWWNRN

SEQ ID NO: 176109 - protein, 20 aa, Influenza A virus
AGSDRVMVSPLAVTWWNRNG

SEQ ID NO: 176110 - protein, 21 aa, Influenza A virus
AGSDRVMVSPLAVTWWNRNGP

SEQ ID NO: 176111 - protein, 13 aa, Influenza A virus
AIIKKYTSGRQEK

SEQ ID NO: 176112 - protein, 14 aa, Influenza A virus
AIIKKYTSGRQEKN

SEQ ID NO: 176113 - protein, 15 aa, Influenza A virus
AIIKKYTSGRQEKNP

SEQ ID NO: 176114 - protein, 13 aa, Influenza A virus
AIIVAMVFSQEDC

SEQ ID NO: 176115 - protein, 14 aa, Influenza A virus
AIIVAMVFSQEDCM

SEQ ID NO: 176116 - protein, 15 aa, Influenza A virus
AIIVAMVFSQEDCMI

SEQ ID NO: 176117 - protein, 16 aa, Influenza A virus
AIIVAMVFSQEDCMIK

SEQ ID NO: 176118 - protein, 17 aa, Influenza A virus
AIIVAMVFSQEDCMIKA

SEQ ID NO: 176119 - protein, 18 aa, Influenza A virus
AIIVAMVFSQEDCMIKAV

SEQ ID NO: 176120 - protein, 19 aa, Influenza A virus
AIIVAMVFSQEDCMIKAVR

SEQ ID NO: 176121 - protein, 20 aa, Influenza A virus
AIIVAMVFSQEDCMIKAVRG

SEQ ID NO: 176122 - protein, 21 aa, Influenza A virus
AIIVAMVFSQEDCMIKAVRGD

SEQ ID NO: 176123 - protein, 22 aa, Influenza A virus
AIIVAMVFSQEDCMIKAVRGDL

SEQ ID NO: 176124 - protein, 23 aa, Influenza A virus
AIIVAMVFSQEDCMIKAVRGDLN

SEQ ID NO: 176125 - protein, 24 aa, Influenza A virus
AIIVAMVFSQEDCMIKAVRGDLNF

SEQ ID NO: 176126 - protein, 25 aa, Influenza A virus
AIIVAMVFSQEDCMIKAVRGDLNFV

SEQ ID NO: 176127 - protein, 13 aa, Influenza A virus
AKEAQDVIMEVVF

SEQ ID NO: 176128 - protein, 14 aa, Influenza A virus
AKEAQDVIMEVVFP

SEQ ID NO: 176129 - protein, 15 aa, Influenza A virus
AKEAQDVIMEVVFPN

SEQ ID NO: 176130 - protein, 16 aa, Influenza A virus
AKEAQDVIMEVVFPNE

SEQ ID NO: 176131 - protein, 17 aa, Influenza A virus
AKEAQDVIMEVVFPNEV

SEQ ID NO: 176132 - protein, 18 aa, Influenza A virus
AKEAQDVIMEVVFPNEVG

SEQ ID NO: 176133 - protein, 19 aa, Influenza A virus
AKEAQDVIMEVVFPNEVGA

SEQ ID NO: 176134 - protein, 20 aa, Influenza A virus
AKEAQDVIMEVVFPNEVGAR

SEQ ID NO: 176135 - protein, 21 aa, Influenza A virus
AKEAQDVIMEVVFPNEVGARI

SEQ ID NO: 176136 - protein, 22 aa, Influenza A virus
AKEAQDVIMEVVFPNEVGARIL

SEQ ID NO: 176137 - protein, 23 aa, Influenza A virus
AKEAQDVIMEVVFPNEVGARILT

SEQ ID NO: 176138 - protein, 24 aa, Influenza A virus
AKEAQDVIMEVVFPNEVGARILTS

SEQ ID NO: 176139 - protein, 25 aa, Influenza A virus
AKEAQDVIMEVVFPNEVGARILTSE

SEQ ID NO: 176140 - protein, 17 aa, Influenza A virus
AKGEKANVLIGQGDVVL

SEQ ID NO: 176141 - protein, 18 aa, Influenza A virus
AKGEKANVLIGQGDVVLV

SEQ ID NO: 176142 - protein, 19 aa, Influenza A virus
AKGEKANVLIGQGDVVLVM

SEQ ID NO: 176143 - protein, 20 aa, Influenza A virus
AKGEKANVLIGQGDVVLVMK

SEQ ID NO: 176144 - protein, 21 aa, Influenza A virus
AKGEKANVLIGQGDVVLVMKR

SEQ ID NO: 176145 - protein, 22 aa, Influenza A virus
AKGEKANVLIGQGDVVLVMKRK

SEQ ID NO: 176146 - protein, 23 aa, Influenza A virus
AKGEKANVLIGQGDVVLVMKRKR

SEQ ID NO: 176147 - protein, 24 aa, Influenza A virus
AKGEKANVLIGQGDVVLVMKRKRD

SEQ ID NO: 176148 - protein, 25 aa, Influenza A virus
AKGEKANVLIGQGDVVLVMKRKRDS

SEQ ID NO: 176149 - protein, 14 aa, Influenza A virus
ALSINELSNLAKGE

SEQ ID NO: 176150 - protein, 15 aa, Influenza A virus
ALSINELSNLAKGEK

SEQ ID NO: 176151 - protein, 16 aa, Influenza A virus
ALSINELSNLAKGEKA

SEQ ID NO: 176152 - protein, 17 aa, Influenza A virus
ALSINELSNLAKGEKAN

SEQ ID NO: 176153 - protein, 18 aa, Influenza A virus
ALSINELSNLAKGEKANV

SEQ ID NO: 176154 - protein, 19 aa, Influenza A virus
ALSINELSNLAKGEKANVL

SEQ ID NO: 176155 - protein, 20 aa, Influenza A virus
ALSINELSNLAKGEKANVLI

SEQ ID NO: 176156 - protein, 21 aa, Influenza A virus
ALSINELSNLAKGEKANVLIG

SEQ ID NO: 176157 - protein, 22 aa, Influenza A virus
ALSINELSNLAKGEKANVLIGQ

SEQ ID NO: 176158 - protein, 23 aa, Influenza A virus
ALSINELSNLAKGEKANVLIGQG

SEQ ID NO: 176159 - protein, 24 aa, Influenza A virus
ALSINELSNLAKGEKANVLIGQGD

SEQ ID NO: 176160 - protein, 25 aa, Influenza A virus
ALSINELSNLAKGEKANVLIGQGDV

SEQ ID NO: 176161 - protein, 13 aa, Influenza A virus
AMGLRISSSFSFG

SEQ ID NO: 176162 - protein, 14 aa, Influenza A virus
AMGLRISSSFSFGG

SEQ ID NO: 176163 - protein, 15 aa, Influenza A virus
AMGLRISSSFSFGGF

SEQ ID NO: 176164 - protein, 16 aa, Influenza A virus
AMGLRISSSFSFGGFT

SEQ ID NO: 176165 - protein, 17 aa, Influenza A virus
AMGLRISSSFSFGGFTF

SEQ ID NO: 176166 - protein, 18 aa, Influenza A virus
AMGLRISSSFSFGGFTFK

SEQ ID NO: 176167 - protein, 19 aa, Influenza A virus
AMGLRISSSFSFGGFTFKR

SEQ ID NO: 176168 - protein, 20 aa, Influenza A virus
AMGLRISSSFSFGGFTFKRT

SEQ ID NO: 176169 - protein, 21 aa, Influenza A virus
AMGLRISSSFSFGGFTFKRTS

SEQ ID NO: 176170 - protein, 22 aa, Influenza A virus
AMGLRISSSFSFGGFTFKRTSG

SEQ ID NO: 176171 - protein, 23 aa, Influenza A virus
AMGLRISSSFSFGGFTFKRTSGS

SEQ ID NO: 176172 - protein, 24 aa, Influenza A virus
AMGLRISSSFSFGGFTFKRTSGSS

SEQ ID NO: 176173 - protein, 14 aa, Influenza A virus
AMVFSQEDCMIKAV

SEQ ID NO: 176174 - protein, 15 aa, Influenza A virus
AMVFSQEDCMIKAVR

SEQ ID NO: 176175 - protein, 16 aa, Influenza A virus
AMVFSQEDCMIKAVRG

SEQ ID NO: 176176 - protein, 17 aa, Influenza A virus
AMVFSQEDCMIKAVRGD

SEQ ID NO: 176177 - protein, 18 aa, Influenza A virus
AMVFSQEDCMIKAVRGDL

SEQ ID NO: 176178 - protein, 19 aa, Influenza A virus
AMVFSQEDCMIKAVRGDLN

SEQ ID NO: 176179 - protein, 20 aa, Influenza A virus
AMVFSQEDCMIKAVRGDLNF

SEQ ID NO: 176180 - protein, 21 aa, Influenza A virus
AMVFSQEDCMIKAVRGDLNFV

SEQ ID NO: 176181 - protein, 22 aa, Influenza A virus
AMVFSQEDCMIKAVRGDLNFVN

SEQ ID NO: 176182 - protein, 23 aa, Influenza A virus
AMVFSQEDCMIKAVRGDLNFVNR

SEQ ID NO: 176183 - protein, 24 aa, Influenza A virus
AMVFSQEDCMIKAVRGDLNFVNRA

SEQ ID NO: 176184 - protein, 25 aa, Influenza A virus
AMVFSQEDCMIKAVRGDLNFVNRAN

SEQ ID NO: 176185 - protein, 14 aa, Influenza A virus
ANQRLNPMHQLLRH

SEQ ID NO: 176186 - protein, 15 aa, Influenza A virus
ANQRLNPMHQLLRHF

SEQ ID NO: 176187 - protein, 16 aa, Influenza A virus
ANQRLNPMHQLLRHFQ

SEQ ID NO: 176188 - protein, 17 aa, Influenza A virus
ANQRLNPMHQLLRHFQK

SEQ ID NO: 176189 - protein, 18 aa, Influenza A virus
ANQRLNPMHQLLRHFQKD

SEQ ID NO: 176190 - protein, 19 aa, Influenza A virus
ANQRLNPMHQLLRHFQKDA

SEQ ID NO: 176191 - protein, 20 aa, Influenza A virus
ANQRLNPMHQLLRHFQKDAK

SEQ ID NO: 176192 - protein, 21 aa, Influenza A virus
ANQRLNPMHQLLRHFQKDAKV

SEQ ID NO: 176193 - protein, 22 aa, Influenza A virus
ANQRLNPMHQLLRHFQKDAKVL

SEQ ID NO: 176194 - protein, 23 aa, Influenza A virus
ANQRLNPMHQLLRHFQKDAKVLF

SEQ ID NO: 176195 - protein, 24 aa, Influenza A virus
ANQRLNPMHQLLRHFQKDAKVLFQ

SEQ ID NO: 176196 - protein, 25 aa, Influenza A virus
ANQRLNPMHQLLRHFQKDAKVLFQN

SEQ ID NO: 176197 - protein, 13 aa, Influenza A virus
ANVLIGQGDVVLV

SEQ ID NO: 176198 - protein, 14 aa, Influenza A virus
ANVLIGQGDVVLVM

SEQ ID NO: 176199 - protein, 15 aa, Influenza A virus
ANVLIGQGDVVLVMK

SEQ ID NO: 176200 - protein, 16 aa, Influenza A virus
ANVLIGQGDVVLVMKR

SEQ ID NO: 176201 - protein, 17 aa, Influenza A virus
ANVLIGQGDVVLVMKRK

SEQ ID NO: 176202 - protein, 18 aa, Influenza A virus
ANVLIGQGDVVLVMKRKR

SEQ ID NO: 176203 - protein, 19 aa, Influenza A virus
ANVLIGQGDVVLVMKRKRD

SEQ ID NO: 176204 - protein, 20 aa, Influenza A virus
ANVLIGQGDVVLVMKRKRDS

SEQ ID NO: 176205 - protein, 21 aa, Influenza A virus
ANVLIGQGDVVLVMKRKRDSS

SEQ ID NO: 176206 - protein, 22 aa, Influenza A virus
ANVLIGQGDVVLVMKRKRDSSI

SEQ ID NO: 176207 - protein, 23 aa, Influenza A virus
ANVLIGQGDVVLVMKRKRDSSIL

SEQ ID NO: 176208 - protein, 24 aa, Influenza A virus
ANVLIGQGDVVLVMKRKRDSSILT

SEQ ID NO: 176209 - protein, 25 aa, Influenza A virus
ANVLIGQGDVVLVMKRKRDSSILTD

SEQ ID NO: 176210 - protein, 13 aa, Influenza A virus
AQDVIMEVVFPNE

SEQ ID NO: 176211 - protein, 14 aa, Influenza A virus
AQDVIMEVVFPNEV

SEQ ID NO: 176212 - protein, 15 aa, Influenza A virus
AQDVIMEVVFPNEVG

SEQ ID NO: 176213 - protein, 16 aa, Influenza A virus
AQDVIMEVVFPNEVGA

SEQ ID NO: 176214 - protein, 17 aa, Influenza A virus
AQDVIMEVVFPNEVGAR

SEQ ID NO: 176215 - protein, 18 aa, Influenza A virus
AQDVIMEVVFPNEVGARI

SEQ ID NO: 176216 - protein, 19 aa, Influenza A virus
AQDVIMEVVFPNEVGARIL

SEQ ID NO: 176217 - protein, 20 aa, Influenza A virus
AQDVIMEVVFPNEVGARILT

SEQ ID NO: 176218 - protein, 21 aa, Influenza A virus
AQDVIMEVVFPNEVGARILTS

SEQ ID NO: 176219 - protein, 22 aa, Influenza A virus
AQDVIMEVVFPNEVGARILTSE

SEQ ID NO: 176220 - protein, 23 aa, Influenza A virus
AQDVIMEVVFPNEVGARILTSES

SEQ ID NO: 176221 - protein, 24 aa, Influenza A virus
AQDVIMEVVFPNEVGARILTSESQ

SEQ ID NO: 176222 - protein, 25 aa, Influenza A virus
AQDVIMEVVFPNEVGARILTSESQL

SEQ ID NO: 176223 - protein, 13 aa, Influenza A virus
ARILTSESQLTIT

SEQ ID NO: 176224 - protein, 14 aa, Influenza A virus
ARILTSESQLTITK

SEQ ID NO: 176225 - protein, 15 aa, Influenza A virus
ARILTSESQLTITKE

SEQ ID NO: 176226 - protein, 16 aa, Influenza A virus
ARILTSESQLTITKEK

SEQ ID NO: 176227 - protein, 17 aa, Influenza A virus
ARILTSESQLTITKEKK

SEQ ID NO: 176228 - protein, 18 aa, Influenza A virus
ARILTSESQLTITKEKKE

SEQ ID NO: 176229 - protein, 19 aa, Influenza A virus
ARILTSESQLTITKEKKEE

SEQ ID NO: 176230 - protein, 20 aa, Influenza A virus
ARILTSESQLTITKEKKEEL

SEQ ID NO: 176231 - protein, 13 aa, Influenza A virus
AVDICKAAMGLRI

SEQ ID NO: 176232 - protein, 14 aa, Influenza A virus
AVDICKAAMGLRIS

SEQ ID NO: 176233 - protein, 15 aa, Influenza A virus
AVDICKAAMGLRISS

SEQ ID NO: 176234 - protein, 16 aa, Influenza A virus
AVDICKAAMGLRISSS

SEQ ID NO: 176235 - protein, 17 aa, Influenza A virus
AVDICKAAMGLRISSSF

SEQ ID NO: 176236 - protein, 18 aa, Influenza A virus
AVDICKAAMGLRISSSFS

SEQ ID NO: 176237 - protein, 19 aa, Influenza A virus
AVDICKAAMGLRISSSFSF

SEQ ID NO: 176238 - protein, 20 aa, Influenza A virus
AVDICKAAMGLRISSSFSFG

SEQ ID NO: 176239 - protein, 21 aa, Influenza A virus
AVDICKAAMGLRISSSFSFGG

SEQ ID NO: 176240 - protein, 22 aa, Influenza A virus
AVDICKAAMGLRISSSFSFGGF

SEQ ID NO: 176241 - protein, 23 aa, Influenza A virus
AVDICKAAMGLRISSSFSFGGFT

SEQ ID NO: 176242 - protein, 24 aa, Influenza A virus
AVDICKAAMGLRISSSFSFGGFTF

SEQ ID NO: 176243 - protein, 25 aa, Influenza A virus
AVDICKAAMGLRISSSFSFGGFTFK

SEQ ID NO: 176244 - protein, 13 aa, Influenza A virus
AVLRGFLILGKED

SEQ ID NO: 176245 - protein, 15 aa, Influenza A virus
AVRGDLNFVNRANQR

SEQ ID NO: 176246 - protein, 16 aa, Influenza A virus
AVRGDLNFVNRANQRL

SEQ ID NO: 176247 - protein, 17 aa, Influenza A virus
AVRGDLNFVNRANQRLN

SEQ ID NO: 176248 - protein, 18 aa, Influenza A virus
AVRGDLNFVNRANQRLNP

SEQ ID NO: 176249 - protein, 19 aa, Influenza A virus
AVRGDLNFVNRANQRLNPM

SEQ ID NO: 176250 - protein, 20 aa, Influenza A virus
AVRGDLNFVNRANQRLNPMH

SEQ ID NO: 176251 - protein, 21 aa, Influenza A virus
AVRGDLNFVNRANQRLNPMHQ

SEQ ID NO: 176252 - protein, 22 aa, Influenza A virus
AVRGDLNFVNRANQRLNPMHQL

SEQ ID NO: 176253 - protein, 23 aa, Influenza A virus
AVRGDLNFVNRANQRLNPMHQLL

SEQ ID NO: 176254 - protein, 24 aa, Influenza A virus
AVRGDLNFVNRANQRLNPMHQLLR

SEQ ID NO: 176255 - protein, 25 aa, Influenza A virus
AVRGDLNFVNRANQRLNPMHQLLRH

SEQ ID NO: 176256 - protein, 14 aa, Influenza A virus
AYMLERELVRKTRF

SEQ ID NO: 176257 - protein, 15 aa, Influenza A virus
AYMLERELVRKTRFL

SEQ ID NO: 176258 - protein, 16 aa, Influenza A virus
AYMLERELVRKTRFLP

SEQ ID NO: 176259 - protein, 17 aa, Influenza A virus
AYMLERELVRKTRFLPV

SEQ ID NO: 176260 - protein, 18 aa, Influenza A virus
AYMLERELVRKTRFLPVA

SEQ ID NO: 176261 - protein, 19 aa, Influenza A virus
AYMLERELVRKTRFLPVAG

SEQ ID NO: 176262 - protein, 20 aa, Influenza A virus
AYMLERELVRKTRFLPVAGG

SEQ ID NO: 176263 - protein, 21 aa, Influenza A virus
AYMLERELVRKTRFLPVAGGT

SEQ ID NO: 176264 - protein, 22 aa, Influenza A virus
AYMLERELVRKTRFLPVAGGTS

SEQ ID NO: 176265 - protein, 23 aa, Influenza A virus
AYMLERELVRKTRFLPVAGGTSS

SEQ ID NO: 176266 - protein, 24 aa, Influenza A virus
AYMLERELVRKTRFLPVAGGTSSV

SEQ ID NO: 176267 - protein, 25 aa, Influenza A virus
AYMLERELVRKTRFLPVAGGTSSVY

SEQ ID NO: 176268 - protein, 14 aa, Influenza A virus
CKAAMGLRISSSFS

SEQ ID NO: 176269 - protein, 15 aa, Influenza A virus
CKAAMGLRISSSFSF

SEQ ID NO: 176270 - protein, 16 aa, Influenza A virus
CKAAMGLRISSSFSFG

SEQ ID NO: 176271 - protein, 17 aa, Influenza A virus
CKAAMGLRISSSFSFGG

SEQ ID NO: 176272 - protein, 18 aa, Influenza A virus
CKAAMGLRISSSFSFGGF

SEQ ID NO: 176273 - protein, 19 aa, Influenza A virus
CKAAMGLRISSSFSFGGFT

SEQ ID NO: 176274 - protein, 20 aa, Influenza A virus
CKAAMGLRISSSFSFGGFTF

SEQ ID NO: 176275 - protein, 21 aa, Influenza A virus
CKAAMGLRISSSFSFGGFTFK

SEQ ID NO: 176276 - protein, 22 aa, Influenza A virus
CKAAMGLRISSSFSFGGFTFKR

SEQ ID NO: 176277 - protein, 23 aa, Influenza A virus
CKAAMGLRISSSFSFGGFTFKRT

SEQ ID NO: 176278 - protein, 24 aa, Influenza A virus
CKAAMGLRISSSFSFGGFTFKRTS

SEQ ID NO: 176279 - protein, 25 aa, Influenza A virus
CKAAMGLRISSSFSFGGFTFKRTSG

SEQ ID NO: 176280 - protein, 14 aa, Influenza A virus
CMIKAVRGDLNFVN

SEQ ID NO: 176281 - protein, 15 aa, Influenza A virus
CMIKAVRGDLNFVNR

SEQ ID NO: 176282 - protein, 16 aa, Influenza A virus
CMIKAVRGDLNFVNRA

SEQ ID NO: 176283 - protein, 17 aa, Influenza A virus
CMIKAVRGDLNFVNRAN

SEQ ID NO: 176284 - protein, 18 aa, Influenza A virus
CMIKAVRGDLNFVNRANQ

SEQ ID NO: 176285 - protein, 19 aa, Influenza A virus
CMIKAVRGDLNFVNRANQR

SEQ ID NO: 176286 - protein, 20 aa, Influenza A virus
CMIKAVRGDLNFVNRANQRL

SEQ ID NO: 176287 - protein, 21 aa, Influenza A virus
CMIKAVRGDLNFVNRANQRLN

SEQ ID NO: 176288 - protein, 22 aa, Influenza A virus
CMIKAVRGDLNFVNRANQRLNP

SEQ ID NO: 176289 - protein, 23 aa, Influenza A virus
CMIKAVRGDLNFVNRANQRLNPM

SEQ ID NO: 176290 - protein, 24 aa, Influenza A virus
CMIKAVRGDLNFVNRANQRLNPMH

SEQ ID NO: 176291 - protein, 25 aa, Influenza A virus
CMIKAVRGDLNFVNRANQRLNPMHQ

SEQ ID NO: 176292 - protein, 14 aa, Influenza A virus
DAGSDRVMVSPLAV

SEQ ID NO: 176293 - protein, 15 aa, Influenza A virus
DAGSDRVMVSPLAVT

SEQ ID NO: 176294 - protein, 16 aa, Influenza A virus
DAGSDRVMVSPLAVTW

SEQ ID NO: 176295 - protein, 17 aa, Influenza A virus
DAGSDRVMVSPLAVTWW

SEQ ID NO: 176296 - protein, 18 aa, Influenza A virus
DAGSDRVMVSPLAVTWWN

SEQ ID NO: 176297 - protein, 19 aa, Influenza A virus
DAGSDRVMVSPLAVTWWNR

SEQ ID NO: 176298 - protein, 20 aa, Influenza A virus
DAGSDRVMVSPLAVTWWNRN

SEQ ID NO: 176299 - protein, 21 aa, Influenza A virus
DAGSDRVMVSPLAVTWWNRNG

SEQ ID NO: 176300 - protein, 22 aa, Influenza A virus
DAGSDRVMVSPLAVTWWNRNGP

SEQ ID NO: 176301 - protein, 14 aa, Influenza A virus
DCMIKAVRGDLNFV

SEQ ID NO: 176302 - protein, 15 aa, Influenza A virus
DCMIKAVRGDLNFVN

SEQ ID NO: 176303 - protein, 16 aa, Influenza A virus
DCMIKAVRGDLNFVNR

SEQ ID NO: 176304 - protein, 17 aa, Influenza A virus
DCMIKAVRGDLNFVNRA

SEQ ID NO: 176305 - protein, 18 aa, Influenza A virus
DCMIKAVRGDLNFVNRAN

SEQ ID NO: 176306 - protein, 19 aa, Influenza A virus
DCMIKAVRGDLNFVNRANQ

SEQ ID NO: 176307 - protein, 20 aa, Influenza A virus
DCMIKAVRGDLNFVNRANQR

SEQ ID NO: 176308 - protein, 21 aa, Influenza A virus
DCMIKAVRGDLNFVNRANQRL

SEQ ID NO: 176309 - protein, 22 aa, Influenza A virus
DCMIKAVRGDLNFVNRANQRLN

SEQ ID NO: 176310 - protein, 23 aa, Influenza A virus
DCMIKAVRGDLNFVNRANQRLNP

SEQ ID NO: 176311 - protein, 24 aa, Influenza A virus
DCMIKAVRGDLNFVNRANQRLNPM

SEQ ID NO: 176312 - protein, 25 aa, Influenza A virus
DCMIKAVRGDLNFVNRANQRLNPMH

SEQ ID NO: 176313 - protein, 14 aa, Influenza A virus
DDVDQSLIIAARNI

SEQ ID NO: 176314 - protein, 15 aa, Influenza A virus
DDVDQSLIIAARNIV

SEQ ID NO: 176315 - protein, 16 aa, Influenza A virus
DDVDQSLIIAARNIVR

SEQ ID NO: 176316 - protein, 17 aa, Influenza A virus
DDVDQSLIIAARNIVRR

SEQ ID NO: 176317 - protein, 18 aa, Influenza A virus
DDVDQSLIIAARNIVRRA

SEQ ID NO: 176318 - protein, 13 aa, Influenza A virus
DEQSIAEAIIVAM

SEQ ID NO: 176319 - protein, 14 aa, Influenza A virus
DEQSIAEAIIVAMV

SEQ ID NO: 176320 - protein, 15 aa, Influenza A virus
DEQSIAEAIIVAMVF

SEQ ID NO: 176321 - protein, 16 aa, Influenza A virus
DEQSIAEAIIVAMVFS

SEQ ID NO: 176322 - protein, 17 aa, Influenza A virus
DEQSIAEAIIVAMVFSQ

SEQ ID NO: 176323 - protein, 18 aa, Influenza A virus
DEQSIAEAIIVAMVFSQE

SEQ ID NO: 176324 - protein, 19 aa, Influenza A virus
DEQSIAEAIIVAMVFSQED

SEQ ID NO: 176325 - protein, 20 aa, Influenza A virus
DEQSIAEAIIVAMVFSQEDC

SEQ ID NO: 176326 - protein, 13 aa, Influenza A virus
DHMAIIKKYTSGR

SEQ ID NO: 176327 - protein, 14 aa, Influenza A virus
DHMAIIKKYTSGRQ

SEQ ID NO: 176328 - protein, 15 aa, Influenza A virus
DHMAIIKKYTSGRQE

SEQ ID NO: 176329 - protein, 16 aa, Influenza A virus
DHMAIIKKYTSGRQEK

SEQ ID NO: 176330 - protein, 17 aa, Influenza A virus
DHMAIIKKYTSGRQEKN

SEQ ID NO: 176331 - protein, 18 aa, Influenza A virus
DHMAIIKKYTSGRQEKNP

SEQ ID NO: 176332 - protein, 13 aa, Influenza A virus
DICKAAMGLRISS

SEQ ID NO: 176333 - protein, 14 aa, Influenza A virus
DICKAAMGLRISSS

SEQ ID NO: 176334 - protein, 15 aa, Influenza A virus
DICKAAMGLRISSSF

SEQ ID NO: 176335 - protein, 16 aa, Influenza A virus
DICKAAMGLRISSSFS

SEQ ID NO: 176336 - protein, 17 aa, Influenza A virus
DICKAAMGLRISSSFSF

SEQ ID NO: 176337 - protein, 18 aa, Influenza A virus
DICKAAMGLRISSSFSFG

SEQ ID NO: 176338 - protein, 19 aa, Influenza A virus
DICKAAMGLRISSSFSFGG

SEQ ID NO: 176339 - protein, 20 aa, Influenza A virus
DICKAAMGLRISSSFSFGGF

SEQ ID NO: 176340 - protein, 21 aa, Influenza A virus
DICKAAMGLRISSSFSFGGFT

SEQ ID NO: 176341 - protein, 22 aa, Influenza A virus
DICKAAMGLRISSSFSFGGFTF

SEQ ID NO: 176342 - protein, 23 aa, Influenza A virus
DICKAAMGLRISSSFSFGGFTFK

SEQ ID NO: 176343 - protein, 24 aa, Influenza A virus
DICKAAMGLRISSSFSFGGFTFKR

SEQ ID NO: 176344 - protein, 25 aa, Influenza A virus
DICKAAMGLRISSSFSFGGFTFKRT

SEQ ID NO: 176345 - protein, 24 aa, Influenza A virus
DILRQNPTEEQAVDICKAAMGLRI

SEQ ID NO: 176346 - protein, 25 aa, Influenza A virus
DILRQNPTEEQAVDICKAAMGLRIS

SEQ ID NO: 176347 - protein, 14 aa, Influenza A virus
DINPGHADLSAKEA

SEQ ID NO: 176348 - protein, 15 aa, Influenza A virus
DINPGHADLSAKEAQ

SEQ ID NO: 176349 - protein, 16 aa, Influenza A virus
DINPGHADLSAKEAQD

SEQ ID NO: 176350 - protein, 17 aa, Influenza A virus
DINPGHADLSAKEAQDV

SEQ ID NO: 176351 - protein, 19 aa, Influenza A virus
DINPGHADLSAKEAQDVIM

SEQ ID NO: 176352 - protein, 20 aa, Influenza A virus
DINPGHADLSAKEAQDVIME

SEQ ID NO: 176353 - protein, 22 aa, Influenza A virus
DINPGHADLSAKEAQDVIMEVV

SEQ ID NO: 176354 - protein, 23 aa, Influenza A virus
DINPGHADLSAKEAQDVIMEVVF

SEQ ID NO: 176355 - protein, 24 aa, Influenza A virus
DINPGHADLSAKEAQDVIMEVVFP

SEQ ID NO: 176356 - protein, 25 aa, Influenza A virus
DINPGHADLSAKEAQDVIMEVVFPN

SEQ ID NO: 176357 - protein, 14 aa, Influenza A virus
DLNFVNRANQRLNP

SEQ ID NO: 176358 - protein, 15 aa, Influenza A virus
DLNFVNRANQRLNPM

SEQ ID NO: 176359 - protein, 16 aa, Influenza A virus
DLNFVNRANQRLNPMH

SEQ ID NO: 176360 - protein, 17 aa, Influenza A virus
DLNFVNRANQRLNPMHQ

SEQ ID NO: 176361 - protein, 19 aa, Influenza A virus
DLNFVNRANQRLNPMHQLL

SEQ ID NO: 176362 - protein, 20 aa, Influenza A virus
DLNFVNRANQRLNPMHQLLR

SEQ ID NO: 176363 - protein, 21 aa, Influenza A virus
DLNFVNRANQRLNPMHQLLRH

SEQ ID NO: 176364 - protein, 22 aa, Influenza A virus
DLNFVNRANQRLNPMHQLLRHF

SEQ ID NO: 176365 - protein, 23 aa, Influenza A virus
DLNFVNRANQRLNPMHQLLRHFQ

SEQ ID NO: 176366 - protein, 24 aa, Influenza A virus
DLNFVNRANQRLNPMHQLLRHFQK

SEQ ID NO: 176367 - protein, 25 aa, Influenza A virus
DLNFVNRANQRLNPMHQLLRHFQKD

SEQ ID NO: 176368 - protein, 15 aa, Influenza A virus
DLSAKEAQDVIMEVV

SEQ ID NO: 176369 - protein, 16 aa, Influenza A virus
DLSAKEAQDVIMEVVF

SEQ ID NO: 176370 - protein, 17 aa, Influenza A virus
DLSAKEAQDVIMEVVFP

SEQ ID NO: 176371 - protein, 18 aa, Influenza A virus
DLSAKEAQDVIMEVVFPN

SEQ ID NO: 176372 - protein, 19 aa, Influenza A virus
DLSAKEAQDVIMEVVFPNE

SEQ ID NO: 176373 - protein, 20 aa, Influenza A virus
DLSAKEAQDVIMEVVFPNEV

SEQ ID NO: 176374 - protein, 21 aa, Influenza A virus
DLSAKEAQDVIMEVVFPNEVG

SEQ ID NO: 176375 - protein, 22 aa, Influenza A virus
DLSAKEAQDVIMEVVFPNEVGA

SEQ ID NO: 176376 - protein, 23 aa, Influenza A virus
DLSAKEAQDVIMEVVFPNEVGAR

SEQ ID NO: 176377 - protein, 24 aa, Influenza A virus
DLSAKEAQDVIMEVVFPNEVGARI

SEQ ID NO: 176378 - protein, 25 aa, Influenza A virus
DLSAKEAQDVIMEVVFPNEVGARIL

SEQ ID NO: 176379 - protein, 15 aa, Influenza A virus
DPLASLLEMCHSTQI

SEQ ID NO: 176380 - protein, 16 aa, Influenza A virus
DPLASLLEMCHSTQIG

SEQ ID NO: 176381 - protein, 17 aa, Influenza A virus
DPLASLLEMCHSTQIGG

SEQ ID NO: 176382 - protein, 15 aa, Influenza A virus
DQRGNVLLSPEEVSE

SEQ ID NO: 176383 - protein, 16 aa, Influenza A virus
DQRGNVLLSPEEVSET

SEQ ID NO: 176384 - protein, 17 aa, Influenza A virus
DQRGNVLLSPEEVSETQ

SEQ ID NO: 176385 - protein, 19 aa, Influenza A virus
DQRGNVLLSPEEVSETQGT

SEQ ID NO: 176386 - protein, 20 aa, Influenza A virus
DQRGNVLLSPEEVSETQGTE

SEQ ID NO: 176387 - protein, 13 aa, Influenza A virus
DQSLIIAARNIVR

SEQ ID NO: 176388 - protein, 14 aa, Influenza A virus
DQSLIIAARNIVRR

SEQ ID NO: 176389 - protein, 15 aa, Influenza A virus
DQSLIIAARNIVRRA

SEQ ID NO: 176390 - protein, 13 aa, Influenza A virus
DRFLRVRDQRGNV

SEQ ID NO: 176391 - protein, 14 aa, Influenza A virus
DRFLRVRDQRGNVL

SEQ ID NO: 176392 - protein, 15 aa, Influenza A virus
DRFLRVRDQRGNVLL

SEQ ID NO: 176393 - protein, 16 aa, Influenza A virus
DRFLRVRDQRGNVLLS

SEQ ID NO: 176394 - protein, 17 aa, Influenza A virus
DRFLRVRDQRGNVLLSP

SEQ ID NO: 176395 - protein, 18 aa, Influenza A virus
DRFLRVRDQRGNVLLSPE

SEQ ID NO: 176396 - protein, 19 aa, Influenza A virus
DRFLRVRDQRGNVLLSPEE

SEQ ID NO: 176397 - protein, 20 aa, Influenza A virus
DRFLRVRDQRGNVLLSPEEV

SEQ ID NO: 176398 - protein, 21 aa, Influenza A virus
DRFLRVRDQRGNVLLSPEEVS

SEQ ID NO: 176399 - protein, 22 aa, Influenza A virus
DRFLRVRDQRGNVLLSPEEVSE

SEQ ID NO: 176400 - protein, 23 aa, Influenza A virus
DRFLRVRDQRGNVLLSPEEVSET

SEQ ID NO: 176401 - protein, 13 aa, Influenza A virus
DRVMVSPLAVTWW

SEQ ID NO: 176402 - protein, 14 aa, Influenza A virus
DRVMVSPLAVTWWN

SEQ ID NO: 176403 - protein, 15 aa, Influenza A virus
DRVMVSPLAVTWWNR

SEQ ID NO: 176404 - protein, 16 aa, Influenza A virus
DRVMVSPLAVTWWNRN

SEQ ID NO: 176405 - protein, 17 aa, Influenza A virus
DRVMVSPLAVTWWNRNG

SEQ ID NO: 176406 - protein, 18 aa, Influenza A virus
DRVMVSPLAVTWWNRNGP

SEQ ID NO: 176407 - protein, 15 aa, Influenza A virus
DSSILTDSQTATKRI

SEQ ID NO: 176408 - protein, 16 aa, Influenza A virus
DSSILTDSQTATKRIR

SEQ ID NO: 176409 - protein, 17 aa, Influenza A virus
DSSILTDSQTATKRIRM

SEQ ID NO: 176410 - protein, 19 aa, Influenza A virus
DSSILTDSQTATKRIRMAI

SEQ ID NO: 176411 - protein, 20 aa, Influenza A virus
DSSILTDSQTATKRIRMAIN

SEQ ID NO: 176412 - protein, 14 aa, Influenza A virus
DVDQSLIIAARNIV

SEQ ID NO: 176413 - protein, 15 aa, Influenza A virus
DVDQSLIIAARNIVR

SEQ ID NO: 176414 - protein, 16 aa, Influenza A virus
DVDQSLIIAARNIVRR

SEQ ID NO: 176415 - protein, 17 aa, Influenza A virus
DVDQSLIIAARNIVRRA

SEQ ID NO: 176416 - protein, 13 aa, Influenza A virus
DVIMEVVFPNEVG

SEQ ID NO: 176417 - protein, 14 aa, Influenza A virus
DVIMEVVFPNEVGA

SEQ ID NO: 176418 - protein, 15 aa, Influenza A virus
DVIMEVVFPNEVGAR

SEQ ID NO: 176419 - protein, 16 aa, Influenza A virus
DVIMEVVFPNEVGARI

SEQ ID NO: 176420 - protein, 17 aa, Influenza A virus
DVIMEVVFPNEVGARIL

SEQ ID NO: 176421 - protein, 18 aa, Influenza A virus
DVIMEVVFPNEVGARILT

SEQ ID NO: 176422 - protein, 19 aa, Influenza A virus
DVIMEVVFPNEVGARILTS

SEQ ID NO: 176423 - protein, 20 aa, Influenza A virus
DVIMEVVFPNEVGARILTSE

SEQ ID NO: 176424 - protein, 21 aa, Influenza A virus
DVIMEVVFPNEVGARILTSES

SEQ ID NO: 176425 - protein, 22 aa, Influenza A virus
DVIMEVVFPNEVGARILTSESQ

SEQ ID NO: 176426 - protein, 23 aa, Influenza A virus
DVIMEVVFPNEVGARILTSESQL

SEQ ID NO: 176427 - protein, 24 aa, Influenza A virus
DVIMEVVFPNEVGARILTSESQLT

SEQ ID NO: 176428 - protein, 25 aa, Influenza A virus
DVIMEVVFPNEVGARILTSESQLTI

SEQ ID NO: 176429 - protein, 13 aa, Influenza A virus
DVVLVMKRKRDSS

SEQ ID NO: 176430 - protein, 14 aa, Influenza A virus
DVVLVMKRKRDSSI

SEQ ID NO: 176431 - protein, 15 aa, Influenza A virus
DVVLVMKRKRDSSIL

SEQ ID NO: 176432 - protein, 16 aa, Influenza A virus
DVVLVMKRKRDSSILT

SEQ ID NO: 176433 - protein, 17 aa, Influenza A virus
DVVLVMKRKRDSSILTD

SEQ ID NO: 176434 - protein, 18 aa, Influenza A virus
DVVLVMKRKRDSSILTDS

SEQ ID NO: 176435 - protein, 19 aa, Influenza A virus
DVVLVMKRKRDSSILTDSQ

SEQ ID NO: 176436 - protein, 20 aa, Influenza A virus
DVVLVMKRKRDSSILTDSQT

SEQ ID NO: 176437 - protein, 21 aa, Influenza A virus
DVVLVMKRKRDSSILTDSQTA

SEQ ID NO: 176438 - protein, 22 aa, Influenza A virus
DVVLVMKRKRDSSILTDSQTAT

SEQ ID NO: 176439 - protein, 23 aa, Influenza A virus
DVVLVMKRKRDSSILTDSQTATK

SEQ ID NO: 176440 - protein, 24 aa, Influenza A virus
DVVLVMKRKRDSSILTDSQTATKR

SEQ ID NO: 176441 - protein, 25 aa, Influenza A virus
DVVLVMKRKRDSSILTDSQTATKRI

SEQ ID NO: 176442 - protein, 13 aa, Influenza A virus
EAIIVAMVFSQED

SEQ ID NO: 176443 - protein, 14 aa, Influenza A virus
EAIIVAMVFSQEDC

SEQ ID NO: 176444 - protein, 15 aa, Influenza A virus
EAIIVAMVFSQEDCM

SEQ ID NO: 176445 - protein, 16 aa, Influenza A virus
EAIIVAMVFSQEDCMI

SEQ ID NO: 176446 - protein, 17 aa, Influenza A virus
EAIIVAMVFSQEDCMIK

SEQ ID NO: 176447 - protein, 18 aa, Influenza A virus
EAIIVAMVFSQEDCMIKA

SEQ ID NO: 176448 - protein, 19 aa, Influenza A virus
EAIIVAMVFSQEDCMIKAV

SEQ ID NO: 176449 - protein, 20 aa, Influenza A virus
EAIIVAMVFSQEDCMIKAVR

SEQ ID NO: 176450 - protein, 21 aa, Influenza A virus
EAIIVAMVFSQEDCMIKAVRG

SEQ ID NO: 176451 - protein, 22 aa, Influenza A virus
EAIIVAMVFSQEDCMIKAVRGD

SEQ ID NO: 176452 - protein, 23 aa, Influenza A virus
EAIIVAMVFSQEDCMIKAVRGDL

SEQ ID NO: 176453 - protein, 24 aa, Influenza A virus
EAIIVAMVFSQEDCMIKAVRGDLN

SEQ ID NO: 176454 - protein, 25 aa, Influenza A virus
EAIIVAMVFSQEDCMIKAVRGDLNF

SEQ ID NO: 176455 - protein, 14 aa, Influenza A virus
EAQDVIMEVVFPNE

SEQ ID NO: 176456 - protein, 15 aa, Influenza A virus
EAQDVIMEVVFPNEV

SEQ ID NO: 176457 - protein, 16 aa, Influenza A virus
EAQDVIMEVVFPNEVG

SEQ ID NO: 176458 - protein, 17 aa, Influenza A virus
EAQDVIMEVVFPNEVGA

SEQ ID NO: 176459 - protein, 18 aa, Influenza A virus
EAQDVIMEVVFPNEVGAR

SEQ ID NO: 176460 - protein, 19 aa, Influenza A virus
EAQDVIMEVVFPNEVGARI

SEQ ID NO: 176461 - protein, 20 aa, Influenza A virus
EAQDVIMEVVFPNEVGARIL

SEQ ID NO: 176462 - protein, 21 aa, Influenza A virus
EAQDVIMEVVFPNEVGARILT

SEQ ID NO: 176463 - protein, 22 aa, Influenza A virus
EAQDVIMEVVFPNEVGARILTS

SEQ ID NO: 176464 - protein, 23 aa, Influenza A virus
EAQDVIMEVVFPNEVGARILTSE

SEQ ID NO: 176465 - protein, 24 aa, Influenza A virus
EAQDVIMEVVFPNEVGARILTSES

SEQ ID NO: 176466 - protein, 25 aa, Influenza A virus
EAQDVIMEVVFPNEVGARILTSESQ

SEQ ID NO: 176467 - protein, 14 aa, Influenza A virus
EDCMIKAVRGDLNF

SEQ ID NO: 176468 - protein, 15 aa, Influenza A virus
EDCMIKAVRGDLNFV

SEQ ID NO: 176469 - protein, 16 aa, Influenza A virus
EDCMIKAVRGDLNFVN

SEQ ID NO: 176470 - protein, 17 aa, Influenza A virus
EDCMIKAVRGDLNFVNR

SEQ ID NO: 176471 - protein, 18 aa, Influenza A virus
EDCMIKAVRGDLNFVNRA

SEQ ID NO: 176472 - protein, 19 aa, Influenza A virus
EDCMIKAVRGDLNFVNRAN

SEQ ID NO: 176473 - protein, 20 aa, Influenza A virus
EDCMIKAVRGDLNFVNRANQ

SEQ ID NO: 176474 - protein, 21 aa, Influenza A virus
EDCMIKAVRGDLNFVNRANQR

SEQ ID NO: 176475 - protein, 22 aa, Influenza A virus
EDCMIKAVRGDLNFVNRANQRL

SEQ ID NO: 176476 - protein, 23 aa, Influenza A virus
EDCMIKAVRGDLNFVNRANQRLN

SEQ ID NO: 176477 - protein, 24 aa, Influenza A virus
EDCMIKAVRGDLNFVNRANQRLNP

SEQ ID NO: 176478 - protein, 25 aa, Influenza A virus
EDCMIKAVRGDLNFVNRANQRLNPM

SEQ ID NO: 176479 - protein, 14 aa, Influenza A virus
EEEVLTGNLQTLKI

SEQ ID NO: 176480 - protein, 15 aa, Influenza A virus
EEQAVDICKAAMGLR

SEQ ID NO: 176481 - protein, 16 aa, Influenza A virus
EEQAVDICKAAMGLRI

SEQ ID NO: 176482 - protein, 17 aa, Influenza A virus
EEQAVDICKAAMGLRIS

SEQ ID NO: 176483 - protein, 18 aa, Influenza A virus
EEQAVDICKAAMGLRISS

SEQ ID NO: 176484 - protein, 19 aa, Influenza A virus
EEQAVDICKAAMGLRISSS

SEQ ID NO: 176485 - protein, 20 aa, Influenza A virus
EEQAVDICKAAMGLRISSSF

SEQ ID NO: 176486 - protein, 21 aa, Influenza A virus
EEQAVDICKAAMGLRISSSFS

SEQ ID NO: 176487 - protein, 22 aa, Influenza A virus
EEQAVDICKAAMGLRISSSFSF

SEQ ID NO: 176488 - protein, 23 aa, Influenza A virus
EEQAVDICKAAMGLRISSSFSFG

SEQ ID NO: 176489 - protein, 24 aa, Influenza A virus
EEQAVDICKAAMGLRISSSFSFGG

SEQ ID NO: 176490 - protein, 25 aa, Influenza A virus
EEQAVDICKAAMGLRISSSFSFGGF

SEQ ID NO: 176491 - protein, 14 aa, Influenza A virus
EILTKTTVDHMAII

SEQ ID NO: 176492 - protein, 15 aa, Influenza A virus
EILTKTTVDHMAIIK

SEQ ID NO: 176493 - protein, 16 aa, Influenza A virus
EILTKTTVDHMAIIKK

SEQ ID NO: 176494 - protein, 17 aa, Influenza A virus
EILTKTTVDHMAIIKKY

SEQ ID NO: 176495 - protein, 19 aa, Influenza A virus
EILTKTTVDHMAIIKKYTS

SEQ ID NO: 176496 - protein, 20 aa, Influenza A virus
EILTKTTVDHMAIIKKYTSG

SEQ ID NO: 176497 - protein, 21 aa, Influenza A virus
EILTKTTVDHMAIIKKYTSGR

SEQ ID NO: 176498 - protein, 22 aa, Influenza A virus
EILTKTTVDHMAIIKKYTSGRQ

SEQ ID NO: 176499 - protein, 23 aa, Influenza A virus
EILTKTTVDHMAIIKKYTSGRQE

SEQ ID NO: 176500 - protein, 24 aa, Influenza A virus
EILTKTTVDHMAIIKKYTSGRQEK

SEQ ID NO: 176501 - protein, 25 aa, Influenza A virus
EILTKTTVDHMAIIKKYTSGRQEKN

SEQ ID NO: 176502 - protein, 15 aa, Influenza A virus
EINGPESVLVNTYQW

SEQ ID NO: 176503 - protein, 16 aa, Influenza A virus
EINGPESVLVNTYQWI

SEQ ID NO: 176504 - protein, 17 aa, Influenza A virus
EINGPESVLVNTYQWII

SEQ ID NO: 176505 - protein, 18 aa, Influenza A virus
EINGPESVLVNTYQWIIR

SEQ ID NO: 176506 - protein, 19 aa, Influenza A virus
EINGPESVLVNTYQWIIRN

SEQ ID NO: 176507 - protein, 20 aa, Influenza A virus
EINGPESVLVNTYQWIIRNW

SEQ ID NO: 176508 - protein, 21 aa, Influenza A virus
EINGPESVLVNTYQWIIRNWE

SEQ ID NO: 176509 - protein, 14 aa, Influenza A virus
EKANVLIGQGDVVL

SEQ ID NO: 176510 - protein, 15 aa, Influenza A virus
EKANVLIGQGDVVLV

SEQ ID NO: 176511 - protein, 16 aa, Influenza A virus
EKANVLIGQGDVVLVM

SEQ ID NO: 176512 - protein, 17 aa, Influenza A virus
EKANVLIGQGDVVLVMK

SEQ ID NO: 176513 - protein, 18 aa, Influenza A virus
EKANVLIGQGDVVLVMKR

SEQ ID NO: 176514 - protein, 19 aa, Influenza A virus
EKANVLIGQGDVVLVMKRK

SEQ ID NO: 176515 - protein, 20 aa, Influenza A virus
EKANVLIGQGDVVLVMKRKR

SEQ ID NO: 176516 - protein, 21 aa, Influenza A virus
EKANVLIGQGDVVLVMKRKRD

SEQ ID NO: 176517 - protein, 22 aa, Influenza A virus
EKANVLIGQGDVVLVMKRKRDS

SEQ ID NO: 176518 - protein, 23 aa, Influenza A virus
EKANVLIGQGDVVLVMKRKRDSS

SEQ ID NO: 176519 - protein, 24 aa, Influenza A virus
EKANVLIGQGDVVLVMKRKRDSSI

SEQ ID NO: 176520 - protein, 25 aa, Influenza A virus
EKANVLIGQGDVVLVMKRKRDSSIL

SEQ ID NO: 176521 - protein, 15 aa, Influenza A virus
ELSNLAKGEKANVLI

SEQ ID NO: 176522 - protein, 16 aa, Influenza A virus
ELSNLAKGEKANVLIG

SEQ ID NO: 176523 - protein, 17 aa, Influenza A virus
ELSNLAKGEKANVLIGQ

SEQ ID NO: 176524 - protein, 20 aa, Influenza A virus
ELSNLAKGEKANVLIGQGDV

SEQ ID NO: 176525 - protein, 22 aa, Influenza A virus
ELSNLAKGEKANVLIGQGDVVL

SEQ ID NO: 176526 - protein, 23 aa, Influenza A virus
ELSNLAKGEKANVLIGQGDVVLV

SEQ ID NO: 176527 - protein, 24 aa, Influenza A virus
ELSNLAKGEKANVLIGQGDVVLVM

SEQ ID NO: 176528 - protein, 25 aa, Influenza A virus
ELSNLAKGEKANVLIGQGDVVLVMK

SEQ ID NO: 176529 - protein, 13 aa, Influenza A virus
ELVRKTRFLPVAG

SEQ ID NO: 176530 - protein, 14 aa, Influenza A virus
ELVRKTRFLPVAGG

SEQ ID NO: 176531 - protein, 15 aa, Influenza A virus
ELVRKTRFLPVAGGT

SEQ ID NO: 176532 - protein, 16 aa, Influenza A virus
ELVRKTRFLPVAGGTS

SEQ ID NO: 176533 - protein, 17 aa, Influenza A virus
ELVRKTRFLPVAGGTSS

SEQ ID NO: 176534 - protein, 18 aa, Influenza A virus
ELVRKTRFLPVAGGTSSV

SEQ ID NO: 176535 - protein, 19 aa, Influenza A virus
ELVRKTRFLPVAGGTSSVY

SEQ ID NO: 176536 - protein, 20 aa, Influenza A virus
ELVRKTRFLPVAGGTSSVYI

SEQ ID NO: 176537 - protein, 21 aa, Influenza A virus
ELVRKTRFLPVAGGTSSVYIE

SEQ ID NO: 176538 - protein, 22 aa, Influenza A virus
ELVRKTRFLPVAGGTSSVYIEV

SEQ ID NO: 176539 - protein, 23 aa, Influenza A virus
ELVRKTRFLPVAGGTSSVYIEVL

SEQ ID NO: 176540 - protein, 24 aa, Influenza A virus
ELVRKTRFLPVAGGTSSVYIEVLH

SEQ ID NO: 176541 - protein, 25 aa, Influenza A virus
ELVRKTRFLPVAGGTSSVYIEVLHL

SEQ ID NO: 176542 - protein, 15 aa, Influenza A virus
EQAVDICKAAMGLRI

SEQ ID NO: 176543 - protein, 16 aa, Influenza A virus
EQAVDICKAAMGLRIS

SEQ ID NO: 176544 - protein, 17 aa, Influenza A virus
EQAVDICKAAMGLRISS

SEQ ID NO: 176545 - protein, 18 aa, Influenza A virus
EQAVDICKAAMGLRISSS

SEQ ID NO: 176546 - protein, 19 aa, Influenza A virus
EQAVDICKAAMGLRISSSF

SEQ ID NO: 176547 - protein, 20 aa, Influenza A virus
EQAVDICKAAMGLRISSSFS

SEQ ID NO: 176548 - protein, 21 aa, Influenza A virus
EQAVDICKAAMGLRISSSFSF

SEQ ID NO: 176549 - protein, 22 aa, Influenza A virus
EQAVDICKAAMGLRISSSFSFG

SEQ ID NO: 176550 - protein, 23 aa, Influenza A virus
EQAVDICKAAMGLRISSSFSFGG

SEQ ID NO: 176551 - protein, 24 aa, Influenza A virus
EQAVDICKAAMGLRISSSFSFGGF

SEQ ID NO: 176552 - protein, 25 aa, Influenza A virus
EQAVDICKAAMGLRISSSFSFGGFT

SEQ ID NO: 176553 - protein, 13 aa, Influenza A virus
EQSIAEAIIVAMV

SEQ ID NO: 176554 - protein, 14 aa, Influenza A virus
EQSIAEAIIVAMVF

SEQ ID NO: 176555 - protein, 15 aa, Influenza A virus
EQSIAEAIIVAMVFS

SEQ ID NO: 176556 - protein, 16 aa, Influenza A virus
EQSIAEAIIVAMVFSQ

SEQ ID NO: 176557 - protein, 17 aa, Influenza A virus
EQSIAEAIIVAMVFSQE

SEQ ID NO: 176558 - protein, 18 aa, Influenza A virus
EQSIAEAIIVAMVFSQED

SEQ ID NO: 176559 - protein, 19 aa, Influenza A virus
EQSIAEAIIVAMVFSQEDC

SEQ ID NO: 176560 - protein, 13 aa, Influenza A virus
ERELVRKTRFLPV

SEQ ID NO: 176561 - protein, 14 aa, Influenza A virus
ERELVRKTRFLPVA

SEQ ID NO: 176562 - protein, 15 aa, Influenza A virus
ERELVRKTRFLPVAG

SEQ ID NO: 176563 - protein, 16 aa, Influenza A virus
ERELVRKTRFLPVAGG

SEQ ID NO: 176564 - protein, 17 aa, Influenza A virus
ERELVRKTRFLPVAGGT

SEQ ID NO: 176565 - protein, 18 aa, Influenza A virus
ERELVRKTRFLPVAGGTS

SEQ ID NO: 176566 - protein, 19 aa, Influenza A virus
ERELVRKTRFLPVAGGTSS

SEQ ID NO: 176567 - protein, 20 aa, Influenza A virus
ERELVRKTRFLPVAGGTSSV

SEQ ID NO: 176568 - protein, 21 aa, Influenza A virus
ERELVRKTRFLPVAGGTSSVY

SEQ ID NO: 176569 - protein, 22 aa, Influenza A virus
ERELVRKTRFLPVAGGTSSVYI

SEQ ID NO: 176570 - protein, 23 aa, Influenza A virus
ERELVRKTRFLPVAGGTSSVYIE

SEQ ID NO: 176571 - protein, 24 aa, Influenza A virus
ERELVRKTRFLPVAGGTSSVYIEV

SEQ ID NO: 176572 - protein, 25 aa, Influenza A virus
ERELVRKTRFLPVAGGTSSVYIEVL

SEQ ID NO: 176573 - protein, 13 aa, Influenza A virus
ERLKHGTFGPVHF

SEQ ID NO: 176574 - protein, 14 aa, Influenza A virus
ERLKHGTFGPVHFR

SEQ ID NO: 176575 - protein, 15 aa, Influenza A virus
ERLKHGTFGPVHFRN

SEQ ID NO: 176576 - protein, 16 aa, Influenza A virus
ERLKHGTFGPVHFRNQ

SEQ ID NO: 176577 - protein, 17 aa, Influenza A virus
ERLKHGTFGPVHFRNQV

SEQ ID NO: 176578 - protein, 18 aa, Influenza A virus
ERLKHGTFGPVHFRNQVK

SEQ ID NO: 176579 - protein, 19 aa, Influenza A virus
ERLKHGTFGPVHFRNQVKI

SEQ ID NO: 176580 - protein, 20 aa, Influenza A virus
ERLKHGTFGPVHFRNQVKIR

SEQ ID NO: 176581 - protein, 21 aa, Influenza A virus
ERLKHGTFGPVHFRNQVKIRR

SEQ ID NO: 176582 - protein, 22 aa, Influenza A virus
ERLKHGTFGPVHFRNQVKIRRR

SEQ ID NO: 176583 - protein, 23 aa, Influenza A virus
ERLKHGTFGPVHFRNQVKIRRRV

SEQ ID NO: 176584 - protein, 24 aa, Influenza A virus
ERLKHGTFGPVHFRNQVKIRRRVD

SEQ ID NO: 176585 - protein, 25 aa, Influenza A virus
ERLKHGTFGPVHFRNQVKIRRRVDI

SEQ ID NO: 176586 - protein, 13 aa, Influenza A virus
ERVVVSIDRFLRV

SEQ ID NO: 176587 - protein, 14 aa, Influenza A virus
ERVVVSIDRFLRVR

SEQ ID NO: 176588 - protein, 15 aa, Influenza A virus
ERVVVSIDRFLRVRD

SEQ ID NO: 176589 - protein, 16 aa, Influenza A virus
ERVVVSIDRFLRVRDQ

SEQ ID NO: 176590 - protein, 17 aa, Influenza A virus
ERVVVSIDRFLRVRDQR

SEQ ID NO: 176591 - protein, 18 aa, Influenza A virus
ERVVVSIDRFLRVRDQRG

SEQ ID NO: 176592 - protein, 19 aa, Influenza A virus
ERVVVSIDRFLRVRDQRGN

SEQ ID NO: 176593 - protein, 13 aa, Influenza A virus
ESAVLRGFLILGK

SEQ ID NO: 176594 - protein, 14 aa, Influenza A virus
ESAVLRGFLILGKE

SEQ ID NO: 176595 - protein, 15 aa, Influenza A virus
ESAVLRGFLILGKED

SEQ ID NO: 176596 - protein, 13 aa, Influenza A virus
ESVLVNTYQWIIR

SEQ ID NO: 176597 - protein, 14 aa, Influenza A virus
ESVLVNTYQWIIRN

SEQ ID NO: 176598 - protein, 15 aa, Influenza A virus
ESVLVNTYQWIIRNW

SEQ ID NO: 176599 - protein, 16 aa, Influenza A virus
ESVLVNTYQWIIRNWE

SEQ ID NO: 176600 - protein, 17 aa, Influenza A virus
ESVLVNTYQWIIRNWET

SEQ ID NO: 176601 - protein, 18 aa, Influenza A virus
ESVLVNTYQWIIRNWETV

SEQ ID NO: 176602 - protein, 19 aa, Influenza A virus
ESVLVNTYQWIIRNWETVK

SEQ ID NO: 176603 - protein, 20 aa, Influenza A virus
ESVLVNTYQWIIRNWETVKI

SEQ ID NO: 176604 - protein, 21 aa, Influenza A virus
ESVLVNTYQWIIRNWETVKIQ

SEQ ID NO: 176605 - protein, 22 aa, Influenza A virus
ESVLVNTYQWIIRNWETVKIQW

SEQ ID NO: 176606 - protein, 23 aa, Influenza A virus
ESVLVNTYQWIIRNWETVKIQWS

SEQ ID NO: 176607 - protein, 14 aa, Influenza A virus
EVGARILTSESQLT

SEQ ID NO: 176608 - protein, 15 aa, Influenza A virus
EVGARILTSESQLTI

SEQ ID NO: 176609 - protein, 16 aa, Influenza A virus
EVGARILTSESQLTIT

SEQ ID NO: 176610 - protein, 17 aa, Influenza A virus
EVGARILTSESQLTITK

SEQ ID NO: 176611 - protein, 18 aa, Influenza A virus
EVGARILTSESQLTITKE

SEQ ID NO: 176612 - protein, 19 aa, Influenza A virus
EVGARILTSESQLTITKEK

SEQ ID NO: 176613 - protein, 20 aa, Influenza A virus
EVGARILTSESQLTITKEKK

SEQ ID NO: 176614 - protein, 21 aa, Influenza A virus
EVGARILTSESQLTITKEKKE

SEQ ID NO: 176615 - protein, 22 aa, Influenza A virus
EVGARILTSESQLTITKEKKEE

SEQ ID NO: 176616 - protein, 23 aa, Influenza A virus
EVGARILTSESQLTITKEKKEEL

SEQ ID NO: 176617 - protein, 15 aa, Influenza A virus
EVLHLTQGTCWEQMY

SEQ ID NO: 176618 - protein, 16 aa, Influenza A virus
EVLHLTQGTCWEQMYT

SEQ ID NO: 176619 - protein, 20 aa, Influenza A virus
EVLHLTQGTCWEQMYTPGGE

SEQ ID NO: 176620 - protein, 15 aa, Influenza A virus
EVVFPNEVGARILTS

SEQ ID NO: 176621 - protein, 16 aa, Influenza A virus
EVVFPNEVGARILTSE

SEQ ID NO: 176622 - protein, 17 aa, Influenza A virus
EVVFPNEVGARILTSES

SEQ ID NO: 176623 - protein, 18 aa, Influenza A virus
EVVFPNEVGARILTSESQ

SEQ ID NO: 176624 - protein, 19 aa, Influenza A virus
EVVFPNEVGARILTSESQL

SEQ ID NO: 176625 - protein, 20 aa, Influenza A virus
EVVFPNEVGARILTSESQLT

SEQ ID NO: 176626 - protein, 21 aa, Influenza A virus
EVVFPNEVGARILTSESQLTI

SEQ ID NO: 176627 - protein, 22 aa, Influenza A virus
EVVFPNEVGARILTSESQLTIT

SEQ ID NO: 176628 - protein, 23 aa, Influenza A virus
EVVFPNEVGARILTSESQLTITK

SEQ ID NO: 176629 - protein, 24 aa, Influenza A virus
EVVFPNEVGARILTSESQLTITKE

SEQ ID NO: 176630 - protein, 25 aa, Influenza A virus
EVVFPNEVGARILTSESQLTITKEK

SEQ ID NO: 176631 - protein, 14 aa, Influenza A virus
FGPVHFRNQVKIRR

SEQ ID NO: 176632 - protein, 15 aa, Influenza A virus
FGPVHFRNQVKIRRR

SEQ ID NO: 176633 - protein, 16 aa, Influenza A virus
FGPVHFRNQVKIRRRV

SEQ ID NO: 176634 - protein, 17 aa, Influenza A virus
FGPVHFRNQVKIRRRVD

SEQ ID NO: 176635 - protein, 18 aa, Influenza A virus
FGPVHFRNQVKIRRRVDI

SEQ ID NO: 176636 - protein, 19 aa, Influenza A virus
FGPVHFRNQVKIRRRVDIN

SEQ ID NO: 176637 - protein, 20 aa, Influenza A virus
FGPVHFRNQVKIRRRVDINP

SEQ ID NO: 176638 - protein, 21 aa, Influenza A virus
FGPVHFRNQVKIRRRVDINPG

SEQ ID NO: 176639 - protein, 22 aa, Influenza A virus
FGPVHFRNQVKIRRRVDINPGH

SEQ ID NO: 176640 - protein, 23 aa, Influenza A virus
FGPVHFRNQVKIRRRVDINPGHA

SEQ ID NO: 176641 - protein, 24 aa, Influenza A virus
FGPVHFRNQVKIRRRVDINPGHAD

SEQ ID NO: 176642 - protein, 25 aa, Influenza A virus
FGPVHFRNQVKIRRRVDINPGHADL

SEQ ID NO: 176643 - protein, 13 aa, Influenza A virus
FLPVAGGTSSVYI

SEQ ID NO: 176644 - protein, 14 aa, Influenza A virus
FLPVAGGTSSVYIE

SEQ ID NO: 176645 - protein, 15 aa, Influenza A virus
FLPVAGGTSSVYIEV

SEQ ID NO: 176646 - protein, 16 aa, Influenza A virus
FLPVAGGTSSVYIEVL

SEQ ID NO: 176647 - protein, 17 aa, Influenza A virus
FLPVAGGTSSVYIEVLH

SEQ ID NO: 176648 - protein, 18 aa, Influenza A virus
FLPVAGGTSSVYIEVLHL

SEQ ID NO: 176649 - protein, 19 aa, Influenza A virus
FLPVAGGTSSVYIEVLHLT

SEQ ID NO: 176650 - protein, 20 aa, Influenza A virus
FLPVAGGTSSVYIEVLHLTQ

SEQ ID NO: 176651 - protein, 21 aa, Influenza A virus
FLPVAGGTSSVYIEVLHLTQG

SEQ ID NO: 176652 - protein, 22 aa, Influenza A virus
FLPVAGGTSSVYIEVLHLTQGT

SEQ ID NO: 176653 - protein, 23 aa, Influenza A virus
FLPVAGGTSSVYIEVLHLTQGTC

SEQ ID NO: 176654 - protein, 24 aa, Influenza A virus
FLPVAGGTSSVYIEVLHLTQGTCW

SEQ ID NO: 176655 - protein, 25 aa, Influenza A virus
FLPVAGGTSSVYIEVLHLTQGTCWE

SEQ ID NO: 176656 - protein, 14 aa, Influenza A virus
FLRVRDQRGNVLLS

SEQ ID NO: 176657 - protein, 15 aa, Influenza A virus
FLRVRDQRGNVLLSP

SEQ ID NO: 176658 - protein, 16 aa, Influenza A virus
FLRVRDQRGNVLLSPE

SEQ ID NO: 176659 - protein, 17 aa, Influenza A virus
FLRVRDQRGNVLLSPEE

SEQ ID NO: 176660 - protein, 18 aa, Influenza A virus
FLRVRDQRGNVLLSPEEV

SEQ ID NO: 176661 - protein, 19 aa, Influenza A virus
FLRVRDQRGNVLLSPEEVS

SEQ ID NO: 176662 - protein, 20 aa, Influenza A virus
FLRVRDQRGNVLLSPEEVSE

SEQ ID NO: 176663 - protein, 21 aa, Influenza A virus
FLRVRDQRGNVLLSPEEVSET

SEQ ID NO: 176664 - protein, 13 aa, Influenza A virus
FPNEVGARILTSE

SEQ ID NO: 176665 - protein, 14 aa, Influenza A virus
FPNEVGARILTSES

SEQ ID NO: 176666 - protein, 15 aa, Influenza A virus
FPNEVGARILTSESQ

SEQ ID NO: 176667 - protein, 16 aa, Influenza A virus
FPNEVGARILTSESQL

SEQ ID NO: 176668 - protein, 17 aa, Influenza A virus
FPNEVGARILTSESQLT

SEQ ID NO: 176669 - protein, 18 aa, Influenza A virus
FPNEVGARILTSESQLTI

SEQ ID NO: 176670 - protein, 19 aa, Influenza A virus
FPNEVGARILTSESQLTIT

SEQ ID NO: 176671 - protein, 20 aa, Influenza A virus
FPNEVGARILTSESQLTITK

SEQ ID NO: 176672 - protein, 21 aa, Influenza A virus
FPNEVGARILTSESQLTITKE

SEQ ID NO: 176673 - protein, 22 aa, Influenza A virus
FPNEVGARILTSESQLTITKEK

SEQ ID NO: 176674 - protein, 23 aa, Influenza A virus
FPNEVGARILTSESQLTITKEKK

SEQ ID NO: 176675 - protein, 24 aa, Influenza A virus
FPNEVGARILTSESQLTITKEKKE

SEQ ID NO: 176676 - protein, 25 aa, Influenza A virus
FPNEVGARILTSESQLTITKEKKEE

SEQ ID NO: 176677 - protein, 15 aa, Influenza A virus
FQKDAKVLFQNWGIE

SEQ ID NO: 176678 - protein, 13 aa, Influenza A virus
FRNQVKIRRRVDI

SEQ ID NO: 176679 - protein, 14 aa, Influenza A virus
FRNQVKIRRRVDIN

SEQ ID NO: 176680 - protein, 15 aa, Influenza A virus
FRNQVKIRRRVDINP

SEQ ID NO: 176681 - protein, 16 aa, Influenza A virus
FRNQVKIRRRVDINPG

SEQ ID NO: 176682 - protein, 17 aa, Influenza A virus
FRNQVKIRRRVDINPGH

SEQ ID NO: 176683 - protein, 18 aa, Influenza A virus
FRNQVKIRRRVDINPGHA

SEQ ID NO: 176684 - protein, 19 aa, Influenza A virus
FRNQVKIRRRVDINPGHAD

SEQ ID NO: 176685 - protein, 20 aa, Influenza A virus
FRNQVKIRRRVDINPGHADL

SEQ ID NO: 176686 - protein, 21 aa, Influenza A virus
FRNQVKIRRRVDINPGHADLS

SEQ ID NO: 176687 - protein, 22 aa, Influenza A virus
FRNQVKIRRRVDINPGHADLSA

SEQ ID NO: 176688 - protein, 23 aa, Influenza A virus
FRNQVKIRRRVDINPGHADLSAK

SEQ ID NO: 176689 - protein, 24 aa, Influenza A virus
FRNQVKIRRRVDINPGHADLSAKE

SEQ ID NO: 176690 - protein, 25 aa, Influenza A virus
FRNQVKIRRRVDINPGHADLSAKEA

SEQ ID NO: 176691 - protein, 13 aa, Influenza A virus
FSFGGFTFKRTSG

SEQ ID NO: 176692 - protein, 14 aa, Influenza A virus
FSFGGFTFKRTSGS

SEQ ID NO: 176693 - protein, 15 aa, Influenza A virus
FSFGGFTFKRTSGSS

SEQ ID NO: 176694 - protein, 15 aa, Influenza A virus
FSQEDCMIKAVRGDL

SEQ ID NO: 176695 - protein, 17 aa, Influenza A virus
FSQEDCMIKAVRGDLNF

SEQ ID NO: 176696 - protein, 19 aa, Influenza A virus
FSQEDCMIKAVRGDLNFVN

SEQ ID NO: 176697 - protein, 20 aa, Influenza A virus
FSQEDCMIKAVRGDLNFVNR

SEQ ID NO: 176698 - protein, 21 aa, Influenza A virus
FSQEDCMIKAVRGDLNFVNRA

SEQ ID NO: 176699 - protein, 22 aa, Influenza A virus
FSQEDCMIKAVRGDLNFVNRAN

SEQ ID NO: 176700 - protein, 23 aa, Influenza A virus
FSQEDCMIKAVRGDLNFVNRANQ

SEQ ID NO: 176701 - protein, 24 aa, Influenza A virus
FSQEDCMIKAVRGDLNFVNRANQR

SEQ ID NO: 176702 - protein, 25 aa, Influenza A virus
FSQEDCMIKAVRGDLNFVNRANQRL

SEQ ID NO: 176703 - protein, 14 aa, Influenza A virus
FSSLTVNVRGSGMR

SEQ ID NO: 176704 - protein, 15 aa, Influenza A virus
FSSLTVNVRGSGMRI

SEQ ID NO: 176705 - protein, 16 aa, Influenza A virus
FSSLTVNVRGSGMRIL

SEQ ID NO: 176706 - protein, 17 aa, Influenza A virus
FSSLTVNVRGSGMRILV

SEQ ID NO: 176707 - protein, 18 aa, Influenza A virus
FSSLTVNVRGSGMRILVR

SEQ ID NO: 176708 - protein, 19 aa, Influenza A virus
FSSLTVNVRGSGMRILVRG

SEQ ID NO: 176709 - protein, 20 aa, Influenza A virus
FSSLTVNVRGSGMRILVRGN

SEQ ID NO: 176710 - protein, 21 aa, Influenza A virus
FSSLTVNVRGSGMRILVRGNS

SEQ ID NO: 176711 - protein, 22 aa, Influenza A virus
FSSLTVNVRGSGMRILVRGNSP

SEQ ID NO: 176712 - protein, 15 aa, Influenza A virus
FVNRANQRLNPMHQL

SEQ ID NO: 176713 - protein, 16 aa, Influenza A virus
FVNRANQRLNPMHQLL

SEQ ID NO: 176714 - protein, 17 aa, Influenza A virus
FVNRANQRLNPMHQLLR

SEQ ID NO: 176715 - protein, 19 aa, Influenza A virus
FVNRANQRLNPMHQLLRHF

SEQ ID NO: 176716 - protein, 20 aa, Influenza A virus
FVNRANQRLNPMHQLLRHFQ

SEQ ID NO: 176717 - protein, 21 aa, Influenza A virus
FVNRANQRLNPMHQLLRHFQK

SEQ ID NO: 176718 - protein, 22 aa, Influenza A virus
FVNRANQRLNPMHQLLRHFQKD

SEQ ID NO: 176719 - protein, 23 aa, Influenza A virus
FVNRANQRLNPMHQLLRHFQKDA

SEQ ID NO: 176720 - protein, 24 aa, Influenza A virus
FVNRANQRLNPMHQLLRHFQKDAK

SEQ ID NO: 176721 - protein, 25 aa, Influenza A virus
FVNRANQRLNPMHQLLRHFQKDAKV

SEQ ID NO: 176722 - protein, 13 aa, Influenza A virus
FVRTLFQQMRDVL

SEQ ID NO: 176723 - protein, 14 aa, Influenza A virus
FVRTLFQQMRDVLG

SEQ ID NO: 176724 - protein, 15 aa, Influenza A virus
FVRTLFQQMRDVLGT

SEQ ID NO: 176725 - protein, 16 aa, Influenza A virus
FVRTLFQQMRDVLGTF

SEQ ID NO: 176726 - protein, 17 aa, Influenza A virus
FVRTLFQQMRDVLGTFD

SEQ ID NO: 176727 - protein, 18 aa, Influenza A virus
FVRTLFQQMRDVLGTFDT

SEQ ID NO: 176728 - protein, 13 aa, Influenza A virus
GARILTSESQLTI

SEQ ID NO: 176729 - protein, 14 aa, Influenza A virus
GARILTSESQLTIT

SEQ ID NO: 176730 - protein, 15 aa, Influenza A virus
GARILTSESQLTITK

SEQ ID NO: 176731 - protein, 16 aa, Influenza A virus
GARILTSESQLTITKE

SEQ ID NO: 176732 - protein, 17 aa, Influenza A virus
GARILTSESQLTITKEK

SEQ ID NO: 176733 - protein, 18 aa, Influenza A virus
GARILTSESQLTITKEKK

SEQ ID NO: 176734 - protein, 19 aa, Influenza A virus
GARILTSESQLTITKEKKE

SEQ ID NO: 176735 - protein, 20 aa, Influenza A virus
GARILTSESQLTITKEKKEE

SEQ ID NO: 176736 - protein, 21 aa, Influenza A virus
GARILTSESQLTITKEKKEEL

SEQ ID NO: 176737 - protein, 14 aa, Influenza A virus
GDLNFVNRANQRLN

SEQ ID NO: 176738 - protein, 15 aa, Influenza A virus
GDLNFVNRANQRLNP

SEQ ID NO: 176739 - protein, 16 aa, Influenza A virus
GDLNFVNRANQRLNPM

SEQ ID NO: 176740 - protein, 17 aa, Influenza A virus
GDLNFVNRANQRLNPMH

SEQ ID NO: 176741 - protein, 19 aa, Influenza A virus
GDLNFVNRANQRLNPMHQL

SEQ ID NO: 176742 - protein, 20 aa, Influenza A virus
GDLNFVNRANQRLNPMHQLL

SEQ ID NO: 176743 - protein, 21 aa, Influenza A virus
GDLNFVNRANQRLNPMHQLLR

SEQ ID NO: 176744 - protein, 22 aa, Influenza A virus
GDLNFVNRANQRLNPMHQLLRH

SEQ ID NO: 176745 - protein, 23 aa, Influenza A virus
GDLNFVNRANQRLNPMHQLLRHF

SEQ ID NO: 176746 - protein, 24 aa, Influenza A virus
GDLNFVNRANQRLNPMHQLLRHFQ

SEQ ID NO: 176747 - protein, 25 aa, Influenza A virus
GDLNFVNRANQRLNPMHQLLRHFQK

SEQ ID NO: 176748 - protein, 13 aa, Influenza A virus
GDVVLVMKRKRDS

SEQ ID NO: 176749 - protein, 14 aa, Influenza A virus
GDVVLVMKRKRDSS

SEQ ID NO: 176750 - protein, 15 aa, Influenza A virus
GDVVLVMKRKRDSSI

SEQ ID NO: 176751 - protein, 16 aa, Influenza A virus
GDVVLVMKRKRDSSIL

SEQ ID NO: 176752 - protein, 17 aa, Influenza A virus
GDVVLVMKRKRDSSILT

SEQ ID NO: 176753 - protein, 18 aa, Influenza A virus
GDVVLVMKRKRDSSILTD

SEQ ID NO: 176754 - protein, 19 aa, Influenza A virus
GDVVLVMKRKRDSSILTDS

SEQ ID NO: 176755 - protein, 20 aa, Influenza A virus
GDVVLVMKRKRDSSILTDSQ

SEQ ID NO: 176756 - protein, 21 aa, Influenza A virus
GDVVLVMKRKRDSSILTDSQT

SEQ ID NO: 176757 - protein, 22 aa, Influenza A virus
GDVVLVMKRKRDSSILTDSQTA

SEQ ID NO: 176758 - protein, 23 aa, Influenza A virus
GDVVLVMKRKRDSSILTDSQTAT

SEQ ID NO: 176759 - protein, 24 aa, Influenza A virus
GDVVLVMKRKRDSSILTDSQTATK

SEQ ID NO: 176760 - protein, 25 aa, Influenza A virus
GDVVLVMKRKRDSSILTDSQTATKR

SEQ ID NO: 176761 - protein, 15 aa, Influenza A virus
GEKANVLIGQGDVVL

SEQ ID NO: 176762 - protein, 16 aa, Influenza A virus
GEKANVLIGQGDVVLV

SEQ ID NO: 176763 - protein, 17 aa, Influenza A virus
GEKANVLIGQGDVVLVM

SEQ ID NO: 176764 - protein, 18 aa, Influenza A virus
GEKANVLIGQGDVVLVMK

SEQ ID NO: 176765 - protein, 19 aa, Influenza A virus
GEKANVLIGQGDVVLVMKR

SEQ ID NO: 176766 - protein, 20 aa, Influenza A virus
GEKANVLIGQGDVVLVMKRK

SEQ ID NO: 176767 - protein, 21 aa, Influenza A virus
GEKANVLIGQGDVVLVMKRKR

SEQ ID NO: 176768 - protein, 22 aa, Influenza A virus
GEKANVLIGQGDVVLVMKRKRD

SEQ ID NO: 176769 - protein, 23 aa, Influenza A virus
GEKANVLIGQGDVVLVMKRKRDS

SEQ ID NO: 176770 - protein, 24 aa, Influenza A virus
GEKANVLIGQGDVVLVMKRKRDSS

SEQ ID NO: 176771 - protein, 25 aa, Influenza A virus
GEKANVLIGQGDVVLVMKRKRDSSI

SEQ ID NO: 176772 - protein, 13 aa, Influenza A virus
GFVRTLFQQMRDV

SEQ ID NO: 176773 - protein, 14 aa, Influenza A virus
GFVRTLFQQMRDVL

SEQ ID NO: 176774 - protein, 15 aa, Influenza A virus
GFVRTLFQQMRDVLG

SEQ ID NO: 176775 - protein, 16 aa, Influenza A virus
GFVRTLFQQMRDVLGT

SEQ ID NO: 176776 - protein, 17 aa, Influenza A virus
GFVRTLFQQMRDVLGTF

SEQ ID NO: 176777 - protein, 18 aa, Influenza A virus
GFVRTLFQQMRDVLGTFD

SEQ ID NO: 176778 - protein, 19 aa, Influenza A virus
GFVRTLFQQMRDVLGTFDT

SEQ ID NO: 176779 - protein, 13 aa, Influenza A virus
GGTSSVYIEVLHL

SEQ ID NO: 176780 - protein, 14 aa, Influenza A virus
GGTSSVYIEVLHLT

SEQ ID NO: 176781 - protein, 15 aa, Influenza A virus
GGTSSVYIEVLHLTQ

SEQ ID NO: 176782 - protein, 16 aa, Influenza A virus
GGTSSVYIEVLHLTQG

SEQ ID NO: 176783 - protein, 17 aa, Influenza A virus
GGTSSVYIEVLHLTQGT

SEQ ID NO: 176784 - protein, 18 aa, Influenza A virus
GGTSSVYIEVLHLTQGTC

SEQ ID NO: 176785 - protein, 19 aa, Influenza A virus
GGTSSVYIEVLHLTQGTCW

SEQ ID NO: 176786 - protein, 20 aa, Influenza A virus
GGTSSVYIEVLHLTQGTCWE

SEQ ID NO: 176787 - protein, 21 aa, Influenza A virus
GGTSSVYIEVLHLTQGTCWEQ

SEQ ID NO: 176788 - protein, 22 aa, Influenza A virus
GGTSSVYIEVLHLTQGTCWEQM

SEQ ID NO: 176789 - protein, 23 aa, Influenza A virus
GGTSSVYIEVLHLTQGTCWEQMY

SEQ ID NO: 176790 - protein, 24 aa, Influenza A virus
GGTSSVYIEVLHLTQGTCWEQMYT

SEQ ID NO: 176791 - protein, 25 aa, Influenza A virus
GGTSSVYIEVLHLTQGTCWEQMYTP

SEQ ID NO: 176792 - protein, 18 aa, Influenza A virus
GHADLSAKEAQDVIMEVV

SEQ ID NO: 176793 - protein, 19 aa, Influenza A virus
GHADLSAKEAQDVIMEVVF

SEQ ID NO: 176794 - protein, 20 aa, Influenza A virus
GHADLSAKEAQDVIMEVVFP

SEQ ID NO: 176795 - protein, 21 aa, Influenza A virus
GHADLSAKEAQDVIMEVVFPN

SEQ ID NO: 176796 - protein, 22 aa, Influenza A virus
GHADLSAKEAQDVIMEVVFPNE

SEQ ID NO: 176797 - protein, 23 aa, Influenza A virus
GHADLSAKEAQDVIMEVVFPNEV

SEQ ID NO: 176798 - protein, 24 aa, Influenza A virus
GHADLSAKEAQDVIMEVVFPNEVG

SEQ ID NO: 176799 - protein, 25 aa, Influenza A virus
GHADLSAKEAQDVIMEVVFPNEVGA

SEQ ID NO: 176800 - protein, 13 aa, Influenza A virus
GLRISSSFSFGGF

SEQ ID NO: 176801 - protein, 14 aa, Influenza A virus
GLRISSSFSFGGFT

SEQ ID NO: 176802 - protein, 15 aa, Influenza A virus
GLRISSSFSFGGFTF

SEQ ID NO: 176803 - protein, 16 aa, Influenza A virus
GLRISSSFSFGGFTFK

SEQ ID NO: 176804 - protein, 17 aa, Influenza A virus
GLRISSSFSFGGFTFKR

SEQ ID NO: 176805 - protein, 18 aa, Influenza A virus
GLRISSSFSFGGFTFKRT

SEQ ID NO: 176806 - protein, 19 aa, Influenza A virus
GLRISSSFSFGGFTFKRTS

SEQ ID NO: 176807 - protein, 20 aa, Influenza A virus
GLRISSSFSFGGFTFKRTSG

SEQ ID NO: 176808 - protein, 21 aa, Influenza A virus
GLRISSSFSFGGFTFKRTSGS

SEQ ID NO: 176809 - protein, 22 aa, Influenza A virus
GLRISSSFSFGGFTFKRTSGSS

SEQ ID NO: 176810 - protein, 13 aa, Influenza A virus
GMRILVRGNSPVF

SEQ ID NO: 176811 - protein, 14 aa, Influenza A virus
GMRILVRGNSPVFN

SEQ ID NO: 176812 - protein, 15 aa, Influenza A virus
GMRILVRGNSPVFNY

SEQ ID NO: 176813 - protein, 16 aa, Influenza A virus
GMRILVRGNSPVFNYN

SEQ ID NO: 176814 - protein, 17 aa, Influenza A virus
GMRILVRGNSPVFNYNK

SEQ ID NO: 176815 - protein, 14 aa, Influenza A virus
GPALSINELSNLAK

SEQ ID NO: 176816 - protein, 15 aa, Influenza A virus
GPALSINELSNLAKG

SEQ ID NO: 176817 - protein, 16 aa, Influenza A virus
GPALSINELSNLAKGE

SEQ ID NO: 176818 - protein, 17 aa, Influenza A virus
GPALSINELSNLAKGEK

SEQ ID NO: 176819 - protein, 18 aa, Influenza A virus
GPALSINELSNLAKGEKA

SEQ ID NO: 176820 - protein, 19 aa, Influenza A virus
GPALSINELSNLAKGEKAN

SEQ ID NO: 176821 - protein, 20 aa, Influenza A virus
GPALSINELSNLAKGEKANV

SEQ ID NO: 176822 - protein, 21 aa, Influenza A virus
GPALSINELSNLAKGEKANVL

SEQ ID NO: 176823 - protein, 22 aa, Influenza A virus
GPALSINELSNLAKGEKANVLI

SEQ ID NO: 176824 - protein, 23 aa, Influenza A virus
GPALSINELSNLAKGEKANVLIG

SEQ ID NO: 176825 - protein, 24 aa, Influenza A virus
GPALSINELSNLAKGEKANVLIGQ

SEQ ID NO: 176826 - protein, 25 aa, Influenza A virus
GPALSINELSNLAKGEKANVLIGQG

SEQ ID NO: 176827 - protein, 13 aa, Influenza A virus
GPESVLVNTYQWI

SEQ ID NO: 176828 - protein, 14 aa, Influenza A virus
GPESVLVNTYQWII

SEQ ID NO: 176829 - protein, 15 aa, Influenza A virus
GPESVLVNTYQWIIR

SEQ ID NO: 176830 - protein, 16 aa, Influenza A virus
GPESVLVNTYQWIIRN

SEQ ID NO: 176831 - protein, 17 aa, Influenza A virus
GPESVLVNTYQWIIRNW

SEQ ID NO: 176832 - protein, 18 aa, Influenza A virus
GPESVLVNTYQWIIRNWE

SEQ ID NO: 176833 - protein, 13 aa, Influenza A virus
GPVHFRNQVKIRR

SEQ ID NO: 176834 - protein, 14 aa, Influenza A virus
GPVHFRNQVKIRRR

SEQ ID NO: 176835 - protein, 15 aa, Influenza A virus
GPVHFRNQVKIRRRV

SEQ ID NO: 176836 - protein, 16 aa, Influenza A virus
GPVHFRNQVKIRRRVD

SEQ ID NO: 176837 - protein, 17 aa, Influenza A virus
GPVHFRNQVKIRRRVDI

SEQ ID NO: 176838 - protein, 18 aa, Influenza A virus
GPVHFRNQVKIRRRVDIN

SEQ ID NO: 176839 - protein, 19 aa, Influenza A virus
GPVHFRNQVKIRRRVDINP

SEQ ID NO: 176840 - protein, 20 aa, Influenza A virus
GPVHFRNQVKIRRRVDINPG

SEQ ID NO: 176841 - protein, 21 aa, Influenza A virus
GPVHFRNQVKIRRRVDINPGH

SEQ ID NO: 176842 - protein, 22 aa, Influenza A virus
GPVHFRNQVKIRRRVDINPGHA

SEQ ID NO: 176843 - protein, 23 aa, Influenza A virus
GPVHFRNQVKIRRRVDINPGHAD

SEQ ID NO: 176844 - protein, 24 aa, Influenza A virus
GPVHFRNQVKIRRRVDINPGHADL

SEQ ID NO: 176845 - protein, 25 aa, Influenza A virus
GPVHFRNQVKIRRRVDINPGHADLS

SEQ ID NO: 176846 - protein, 13 aa, Influenza A virus
GQGDVVLVMKRKR

SEQ ID NO: 176847 - protein, 14 aa, Influenza A virus
GQGDVVLVMKRKRD

SEQ ID NO: 176848 - protein, 15 aa, Influenza A virus
GQGDVVLVMKRKRDS

SEQ ID NO: 176849 - protein, 16 aa, Influenza A virus
GQGDVVLVMKRKRDSS

SEQ ID NO: 176850 - protein, 17 aa, Influenza A virus
GQGDVVLVMKRKRDSSI

SEQ ID NO: 176851 - protein, 18 aa, Influenza A virus
GQGDVVLVMKRKRDSSIL

SEQ ID NO: 176852 - protein, 19 aa, Influenza A virus
GQGDVVLVMKRKRDSSILT

SEQ ID NO: 176853 - protein, 20 aa, Influenza A virus
GQGDVVLVMKRKRDSSILTD

SEQ ID NO: 176854 - protein, 21 aa, Influenza A virus
GQGDVVLVMKRKRDSSILTDS

SEQ ID NO: 176855 - protein, 22 aa, Influenza A virus
GQGDVVLVMKRKRDSSILTDSQ

SEQ ID NO: 176856 - protein, 23 aa, Influenza A virus
GQGDVVLVMKRKRDSSILTDSQT

SEQ ID NO: 176857 - protein, 24 aa, Influenza A virus
GQGDVVLVMKRKRDSSILTDSQTA

SEQ ID NO: 176858 - protein, 25 aa, Influenza A virus
GQGDVVLVMKRKRDSSILTDSQTAT

SEQ ID NO: 176859 - protein, 14 aa, Influenza A virus
GQYSGFVRTLFQQM

SEQ ID NO: 176860 - protein, 15 aa, Influenza A virus
GQYSGFVRTLFQQMR

SEQ ID NO: 176861 - protein, 16 aa, Influenza A virus
GQYSGFVRTLFQQMRD

SEQ ID NO: 176862 - protein, 17 aa, Influenza A virus
GQYSGFVRTLFQQMRDV

SEQ ID NO: 176863 - protein, 18 aa, Influenza A virus
GQYSGFVRTLFQQMRDVL

SEQ ID NO: 176864 - protein, 19 aa, Influenza A virus
GQYSGFVRTLFQQMRDVLG

SEQ ID NO: 176865 - protein, 20 aa, Influenza A virus
GQYSGFVRTLFQQMRDVLGT

SEQ ID NO: 176866 - protein, 21 aa, Influenza A virus
GQYSGFVRTLFQQMRDVLGTF

SEQ ID NO: 176867 - protein, 22 aa, Influenza A virus
GQYSGFVRTLFQQMRDVLGTFD

SEQ ID NO: 176868 - protein, 23 aa, Influenza A virus
GQYSGFVRTLFQQMRDVLGTFDT

SEQ ID NO: 176869 - protein, 14 aa, Influenza A virus
GRDEQSIAEAIIVA

SEQ ID NO: 176870 - protein, 13 aa, Influenza A virus
GSDRVMVSPLAVT

SEQ ID NO: 176871 - protein, 14 aa, Influenza A virus
GSDRVMVSPLAVTW

SEQ ID NO: 176872 - protein, 15 aa, Influenza A virus
GSDRVMVSPLAVTWW

SEQ ID NO: 176873 - protein, 16 aa, Influenza A virus
GSDRVMVSPLAVTWWN

SEQ ID NO: 176874 - protein, 17 aa, Influenza A virus
GSDRVMVSPLAVTWWNR

SEQ ID NO: 176875 - protein, 18 aa, Influenza A virus
GSDRVMVSPLAVTWWNRN

SEQ ID NO: 176876 - protein, 19 aa, Influenza A virus
GSDRVMVSPLAVTWWNRNG

SEQ ID NO: 176877 - protein, 20 aa, Influenza A virus
GSDRVMVSPLAVTWWNRNGP

SEQ ID NO: 176878 - protein, 13 aa, Influenza A virus
GSGMRILVRGNSP

SEQ ID NO: 176879 - protein, 14 aa, Influenza A virus
GSGMRILVRGNSPV

SEQ ID NO: 176880 - protein, 15 aa, Influenza A virus
GSGMRILVRGNSPVF

SEQ ID NO: 176881 - protein, 16 aa, Influenza A virus
GSGMRILVRGNSPVFN

SEQ ID NO: 176882 - protein, 17 aa, Influenza A virus
GSGMRILVRGNSPVFNY

SEQ ID NO: 176883 - protein, 18 aa, Influenza A virus
GSGMRILVRGNSPVFNYN

SEQ ID NO: 176884 - protein, 19 aa, Influenza A virus
GSGMRILVRGNSPVFNYNK

SEQ ID NO: 176885 - protein, 15 aa, Influenza A virus
GTFGPVHFRNQVKIR

SEQ ID NO: 176886 - protein, 16 aa, Influenza A virus
GTFGPVHFRNQVKIRR

SEQ ID NO: 176887 - protein, 17 aa, Influenza A virus
GTFGPVHFRNQVKIRRR

SEQ ID NO: 176888 - protein, 18 aa, Influenza A virus
GTFGPVHFRNQVKIRRRV

SEQ ID NO: 176889 - protein, 19 aa, Influenza A virus
GTFGPVHFRNQVKIRRRVD

SEQ ID NO: 176890 - protein, 20 aa, Influenza A virus
GTFGPVHFRNQVKIRRRVDI

SEQ ID NO: 176891 - protein, 21 aa, Influenza A virus
GTFGPVHFRNQVKIRRRVDIN

SEQ ID NO: 176892 - protein, 22 aa, Influenza A virus
GTFGPVHFRNQVKIRRRVDINP

SEQ ID NO: 176893 - protein, 23 aa, Influenza A virus
GTFGPVHFRNQVKIRRRVDINPG

SEQ ID NO: 176894 - protein, 24 aa, Influenza A virus
GTFGPVHFRNQVKIRRRVDINPGH

SEQ ID NO: 176895 - protein, 25 aa, Influenza A virus
GTFGPVHFRNQVKIRRRVDINPGHA

SEQ ID NO: 176896 - protein, 13 aa, Influenza A virus
GTSSVYIEVLHLT

SEQ ID NO: 176897 - protein, 14 aa, Influenza A virus
GTSSVYIEVLHLTQ

SEQ ID NO: 176898 - protein, 15 aa, Influenza A virus
GTSSVYIEVLHLTQG

SEQ ID NO: 176899 - protein, 16 aa, Influenza A virus
GTSSVYIEVLHLTQGT

SEQ ID NO: 176900 - protein, 17 aa, Influenza A virus
GTSSVYIEVLHLTQGTC

SEQ ID NO: 176901 - protein, 18 aa, Influenza A virus
GTSSVYIEVLHLTQGTCW

SEQ ID NO: 176902 - protein, 19 aa, Influenza A virus
GTSSVYIEVLHLTQGTCWE

SEQ ID NO: 176903 - protein, 20 aa, Influenza A virus
GTSSVYIEVLHLTQGTCWEQ

SEQ ID NO: 176904 - protein, 21 aa, Influenza A virus
GTSSVYIEVLHLTQGTCWEQM

SEQ ID NO: 176905 - protein, 22 aa, Influenza A virus
GTSSVYIEVLHLTQGTCWEQMY

SEQ ID NO: 176906 - protein, 23 aa, Influenza A virus
GTSSVYIEVLHLTQGTCWEQMYT

SEQ ID NO: 176907 - protein, 24 aa, Influenza A virus
GTSSVYIEVLHLTQGTCWEQMYTP

SEQ ID NO: 176908 - protein, 25 aa, Influenza A virus
GTSSVYIEVLHLTQGTCWEQMYTPG

SEQ ID NO: 176909 - protein, 13 aa, Influenza A virus
GVESAVLRGFLIL

SEQ ID NO: 176910 - protein, 14 aa, Influenza A virus
GVESAVLRGFLILG

SEQ ID NO: 176911 - protein, 15 aa, Influenza A virus
GVESAVLRGFLILGK

SEQ ID NO: 176912 - protein, 16 aa, Influenza A virus
GVESAVLRGFLILGKE

SEQ ID NO: 176913 - protein, 17 aa, Influenza A virus
GVESAVLRGFLILGKED

SEQ ID NO: 176914 - protein, 16 aa, Influenza A virus
HADLSAKEAQDVIMEV

SEQ ID NO: 176915 - protein, 17 aa, Influenza A virus
HADLSAKEAQDVIMEVV

SEQ ID NO: 176916 - protein, 18 aa, Influenza A virus
HADLSAKEAQDVIMEVVF

SEQ ID NO: 176917 - protein, 19 aa, Influenza A virus
HADLSAKEAQDVIMEVVFP

SEQ ID NO: 176918 - protein, 20 aa, Influenza A virus
HADLSAKEAQDVIMEVVFPN

SEQ ID NO: 176919 - protein, 21 aa, Influenza A virus
HADLSAKEAQDVIMEVVFPNE

SEQ ID NO: 176920 - protein, 22 aa, Influenza A virus
HADLSAKEAQDVIMEVVFPNEV

SEQ ID NO: 176921 - protein, 23 aa, Influenza A virus
HADLSAKEAQDVIMEVVFPNEVG

SEQ ID NO: 176922 - protein, 24 aa, Influenza A virus
HADLSAKEAQDVIMEVVFPNEVGA

SEQ ID NO: 176923 - protein, 25 aa, Influenza A virus
HADLSAKEAQDVIMEVVFPNEVGAR

SEQ ID NO: 176924 - protein, 13 aa, Influenza A virus
HFQKDAKVLFQNW

SEQ ID NO: 176925 - protein, 14 aa, Influenza A virus
HFQKDAKVLFQNWG

SEQ ID NO: 176926 - protein, 15 aa, Influenza A virus
HFQKDAKVLFQNWGI

SEQ ID NO: 176927 - protein, 16 aa, Influenza A virus
HFQKDAKVLFQNWGIE

SEQ ID NO: 176928 - protein, 13 aa, Influenza A virus
HFRNQVKIRRRVD

SEQ ID NO: 176929 - protein, 14 aa, Influenza A virus
HFRNQVKIRRRVDI

SEQ ID NO: 176930 - protein, 15 aa, Influenza A virus
HFRNQVKIRRRVDIN

SEQ ID NO: 176931 - protein, 16 aa, Influenza A virus
HFRNQVKIRRRVDINP

SEQ ID NO: 176932 - protein, 17 aa, Influenza A virus
HFRNQVKIRRRVDINPG

SEQ ID NO: 176933 - protein, 18 aa, Influenza A virus
HFRNQVKIRRRVDINPGH

SEQ ID NO: 176934 - protein, 19 aa, Influenza A virus
HFRNQVKIRRRVDINPGHA

SEQ ID NO: 176935 - protein, 20 aa, Influenza A virus
HFRNQVKIRRRVDINPGHAD

SEQ ID NO: 176936 - protein, 21 aa, Influenza A virus
HFRNQVKIRRRVDINPGHADL

SEQ ID NO: 176937 - protein, 22 aa, Influenza A virus
HFRNQVKIRRRVDINPGHADLS

SEQ ID NO: 176938 - protein, 23 aa, Influenza A virus
HFRNQVKIRRRVDINPGHADLSA

SEQ ID NO: 176939 - protein, 24 aa, Influenza A virus
HFRNQVKIRRRVDINPGHADLSAK

SEQ ID NO: 176940 - protein, 25 aa, Influenza A virus
HFRNQVKIRRRVDINPGHADLSAKE

SEQ ID NO: 176941 - protein, 15 aa, Influenza A virus
HGTFGPVHFRNQVKI

SEQ ID NO: 176942 - protein, 16 aa, Influenza A virus
HGTFGPVHFRNQVKIR

SEQ ID NO: 176943 - protein, 17 aa, Influenza A virus
HGTFGPVHFRNQVKIRR

SEQ ID NO: 176944 - protein, 18 aa, Influenza A virus
HGTFGPVHFRNQVKIRRR

SEQ ID NO: 176945 - protein, 19 aa, Influenza A virus
HGTFGPVHFRNQVKIRRRV

SEQ ID NO: 176946 - protein, 20 aa, Influenza A virus
HGTFGPVHFRNQVKIRRRVD

SEQ ID NO: 176947 - protein, 21 aa, Influenza A virus
HGTFGPVHFRNQVKIRRRVDI

SEQ ID NO: 176948 - protein, 22 aa, Influenza A virus
HGTFGPVHFRNQVKIRRRVDIN

SEQ ID NO: 176949 - protein, 23 aa, Influenza A virus
HGTFGPVHFRNQVKIRRRVDINP

SEQ ID NO: 176950 - protein, 24 aa, Influenza A virus
HGTFGPVHFRNQVKIRRRVDINPG

SEQ ID NO: 176951 - protein, 25 aa, Influenza A virus
HGTFGPVHFRNQVKIRRRVDINPGH

SEQ ID NO: 176952 - protein, 13 aa, Influenza A virus
HMAIIKKYTSGRQ

SEQ ID NO: 176953 - protein, 14 aa, Influenza A virus
HMAIIKKYTSGRQE

SEQ ID NO: 176954 - protein, 15 aa, Influenza A virus
HMAIIKKYTSGRQEK

SEQ ID NO: 176955 - protein, 16 aa, Influenza A virus
HMAIIKKYTSGRQEKN

SEQ ID NO: 176956 - protein, 17 aa, Influenza A virus
HMAIIKKYTSGRQEKNP

SEQ ID NO: 176957 - protein, 14 aa, Influenza A virus
HQLLRHFQKDAKVL

SEQ ID NO: 176958 - protein, 15 aa, Influenza A virus
HQLLRHFQKDAKVLF

SEQ ID NO: 176959 - protein, 16 aa, Influenza A virus
HQLLRHFQKDAKVLFQ

SEQ ID NO: 176960 - protein, 17 aa, Influenza A virus
HQLLRHFQKDAKVLFQN

SEQ ID NO: 176961 - protein, 18 aa, Influenza A virus
HQLLRHFQKDAKVLFQNW

SEQ ID NO: 176962 - protein, 19 aa, Influenza A virus
HQLLRHFQKDAKVLFQNWG

SEQ ID NO: 176963 - protein, 20 aa, Influenza A virus
HQLLRHFQKDAKVLFQNWGI

SEQ ID NO: 176964 - protein, 21 aa, Influenza A virus
HQLLRHFQKDAKVLFQNWGIE

SEQ ID NO: 176965 - protein, 13 aa, Influenza A virus
IAEAIIVAMVFSQ

SEQ ID NO: 176966 - protein, 14 aa, Influenza A virus
IAEAIIVAMVFSQE

SEQ ID NO: 176967 - protein, 15 aa, Influenza A virus
IAEAIIVAMVFSQED

SEQ ID NO: 176968 - protein, 16 aa, Influenza A virus
IAEAIIVAMVFSQEDC

SEQ ID NO: 176969 - protein, 13 aa, Influenza A virus
ICKAAMGLRISSS

SEQ ID NO: 176970 - protein, 14 aa, Influenza A virus
ICKAAMGLRISSSF

SEQ ID NO: 176971 - protein, 15 aa, Influenza A virus
ICKAAMGLRISSSFS

SEQ ID NO: 176972 - protein, 16 aa, Influenza A virus
ICKAAMGLRISSSFSF

SEQ ID NO: 176973 - protein, 17 aa, Influenza A virus
ICKAAMGLRISSSFSFG

SEQ ID NO: 176974 - protein, 18 aa, Influenza A virus
ICKAAMGLRISSSFSFGG

SEQ ID NO: 176975 - protein, 19 aa, Influenza A virus
ICKAAMGLRISSSFSFGGF

SEQ ID NO: 176976 - protein, 20 aa, Influenza A virus
ICKAAMGLRISSSFSFGGFT

SEQ ID NO: 176977 - protein, 21 aa, Influenza A virus
ICKAAMGLRISSSFSFGGFTF

SEQ ID NO: 176978 - protein, 22 aa, Influenza A virus
ICKAAMGLRISSSFSFGGFTFK

SEQ ID NO: 176979 - protein, 23 aa, Influenza A virus
ICKAAMGLRISSSFSFGGFTFKR

SEQ ID NO: 176980 - protein, 24 aa, Influenza A virus
ICKAAMGLRISSSFSFGGFTFKRT

SEQ ID NO: 176981 - protein, 25 aa, Influenza A virus
ICKAAMGLRISSSFSFGGFTFKRTS

SEQ ID NO: 176982 - protein, 13 aa, Influenza A virus
IDRFLRVRDQRGN

SEQ ID NO: 176983 - protein, 14 aa, Influenza A virus
IDRFLRVRDQRGNV

SEQ ID NO: 176984 - protein, 15 aa, Influenza A virus
IDRFLRVRDQRGNVL

SEQ ID NO: 176985 - protein, 16 aa, Influenza A virus
IDRFLRVRDQRGNVLL

SEQ ID NO: 176986 - protein, 17 aa, Influenza A virus
IDRFLRVRDQRGNVLLS

SEQ ID NO: 176987 - protein, 18 aa, Influenza A virus
IDRFLRVRDQRGNVLLSP

SEQ ID NO: 176988 - protein, 19 aa, Influenza A virus
IDRFLRVRDQRGNVLLSPE

SEQ ID NO: 176989 - protein, 20 aa, Influenza A virus
IDRFLRVRDQRGNVLLSPEE

SEQ ID NO: 176990 - protein, 21 aa, Influenza A virus
IDRFLRVRDQRGNVLLSPEEV

SEQ ID NO: 176991 - protein, 22 aa, Influenza A virus
IDRFLRVRDQRGNVLLSPEEVS

SEQ ID NO: 176992 - protein, 23 aa, Influenza A virus
IDRFLRVRDQRGNVLLSPEEVSE

SEQ ID NO: 176993 - protein, 24 aa, Influenza A virus
IDRFLRVRDQRGNVLLSPEEVSET

SEQ ID NO: 176994 - protein, 15 aa, Influenza A virus
IEVLHLTQGTCWEQM

SEQ ID NO: 176995 - protein, 16 aa, Influenza A virus
IEVLHLTQGTCWEQMY

SEQ ID NO: 176996 - protein, 17 aa, Influenza A virus
IEVLHLTQGTCWEQMYT

SEQ ID NO: 176997 - protein, 20 aa, Influenza A virus
IEVLHLTQGTCWEQMYTPGG

SEQ ID NO: 176998 - protein, 14 aa, Influenza A virus
IGQGDVVLVMKRKR

SEQ ID NO: 176999 - protein, 15 aa, Influenza A virus
IGQGDVVLVMKRKRD

SEQ ID NO: 177000 - protein, 16 aa, Influenza A virus
IGQGDVVLVMKRKRDS

SEQ ID NO: 177001 - protein, 17 aa, Influenza A virus
IGQGDVVLVMKRKRDSS

SEQ ID NO: 177002 - protein, 18 aa, Influenza A virus
IGQGDVVLVMKRKRDSSI

SEQ ID NO: 177003 - protein, 19 aa, Influenza A virus
IGQGDVVLVMKRKRDSSIL

SEQ ID NO: 177004 - protein, 20 aa, Influenza A virus
IGQGDVVLVMKRKRDSSILT

SEQ ID NO: 177005 - protein, 21 aa, Influenza A virus
IGQGDVVLVMKRKRDSSILTD

SEQ ID NO: 177006 - protein, 22 aa, Influenza A virus
IGQGDVVLVMKRKRDSSILTDS

SEQ ID NO: 177007 - protein, 23 aa, Influenza A virus
IGQGDVVLVMKRKRDSSILTDSQ

SEQ ID NO: 177008 - protein, 24 aa, Influenza A virus
IGQGDVVLVMKRKRDSSILTDSQT

SEQ ID NO: 177009 - protein, 25 aa, Influenza A virus
IGQGDVVLVMKRKRDSSILTDSQTA

SEQ ID NO: 177010 - protein, 13 aa, Influenza A virus
IIKKYTSGRQEKN

SEQ ID NO: 177011 - protein, 14 aa, Influenza A virus
IIKKYTSGRQEKNP

SEQ ID NO: 177012 - protein, 13 aa, Influenza A virus
IIRNWETVKIQWS

SEQ ID NO: 177013 - protein, 14 aa, Influenza A virus
IIRNWETVKIQWSQ

SEQ ID NO: 177014 - protein, 13 aa, Influenza A virus
IIVAMVFSQEDCM

SEQ ID NO: 177015 - protein, 14 aa, Influenza A virus
IIVAMVFSQEDCMI

SEQ ID NO: 177016 - protein, 15 aa, Influenza A virus
IIVAMVFSQEDCMIK

SEQ ID NO: 177017 - protein, 16 aa, Influenza A virus
IIVAMVFSQEDCMIKA

SEQ ID NO: 177018 - protein, 17 aa, Influenza A virus
IIVAMVFSQEDCMIKAV

SEQ ID NO: 177019 - protein, 18 aa, Influenza A virus
IIVAMVFSQEDCMIKAVR

SEQ ID NO: 177020 - protein, 19 aa, Influenza A virus
IIVAMVFSQEDCMIKAVRG

SEQ ID NO: 177021 - protein, 20 aa, Influenza A virus
IIVAMVFSQEDCMIKAVRGD

SEQ ID NO: 177022 - protein, 21 aa, Influenza A virus
IIVAMVFSQEDCMIKAVRGDL

SEQ ID NO: 177023 - protein, 22 aa, Influenza A virus
IIVAMVFSQEDCMIKAVRGDLN

SEQ ID NO: 177024 - protein, 23 aa, Influenza A virus
IIVAMVFSQEDCMIKAVRGDLNF

SEQ ID NO: 177025 - protein, 24 aa, Influenza A virus
IIVAMVFSQEDCMIKAVRGDLNFV

SEQ ID NO: 177026 - protein, 25 aa, Influenza A virus
IIVAMVFSQEDCMIKAVRGDLNFVN

SEQ ID NO: 177027 - protein, 14 aa, Influenza A virus
IKAVRGDLNFVNRA

SEQ ID NO: 177028 - protein, 15 aa, Influenza A virus
IKAVRGDLNFVNRAN

SEQ ID NO: 177029 - protein, 16 aa, Influenza A virus
IKAVRGDLNFVNRANQ

SEQ ID NO: 177030 - protein, 17 aa, Influenza A virus
IKAVRGDLNFVNRANQR

SEQ ID NO: 177031 - protein, 18 aa, Influenza A virus
IKAVRGDLNFVNRANQRL

SEQ ID NO: 177032 - protein, 19 aa, Influenza A virus
IKAVRGDLNFVNRANQRLN

SEQ ID NO: 177033 - protein, 20 aa, Influenza A virus
IKAVRGDLNFVNRANQRLNP

SEQ ID NO: 177034 - protein, 21 aa, Influenza A virus
IKAVRGDLNFVNRANQRLNPM

SEQ ID NO: 177035 - protein, 22 aa, Influenza A virus
IKAVRGDLNFVNRANQRLNPMH

SEQ ID NO: 177036 - protein, 23 aa, Influenza A virus
IKAVRGDLNFVNRANQRLNPMHQ

SEQ ID NO: 177037 - protein, 24 aa, Influenza A virus
IKAVRGDLNFVNRANQRLNPMHQL

SEQ ID NO: 177038 - protein, 25 aa, Influenza A virus
IKAVRGDLNFVNRANQRLNPMHQLL

SEQ ID NO: 177039 - protein, 23 aa, Influenza A virus
ILRQNPTEEQAVDICKAAMGLRI

SEQ ID NO: 177040 - protein, 24 aa, Influenza A virus
ILRQNPTEEQAVDICKAAMGLRIS

SEQ ID NO: 177041 - protein, 25 aa, Influenza A virus
ILRQNPTEEQAVDICKAAMGLRISS

SEQ ID NO: 177042 - protein, 15 aa, Influenza A virus
ILTDSQTATKRIRMA

SEQ ID NO: 177043 - protein, 16 aa, Influenza A virus
ILTDSQTATKRIRMAI

SEQ ID NO: 177044 - protein, 17 aa, Influenza A virus
ILTDSQTATKRIRMAIN

SEQ ID NO: 177045 - protein, 14 aa, Influenza A virus
ILTKTTVDHMAIIK

SEQ ID NO: 177046 - protein, 15 aa, Influenza A virus
ILTKTTVDHMAIIKK

SEQ ID NO: 177047 - protein, 16 aa, Influenza A virus
ILTKTTVDHMAIIKKY

SEQ ID NO: 177048 - protein, 17 aa, Influenza A virus
ILTKTTVDHMAIIKKYT

SEQ ID NO: 177049 - protein, 18 aa, Influenza A virus
ILTKTTVDHMAIIKKYTS

SEQ ID NO: 177050 - protein, 19 aa, Influenza A virus
ILTKTTVDHMAIIKKYTSG

SEQ ID NO: 177051 - protein, 20 aa, Influenza A virus
ILTKTTVDHMAIIKKYTSGR

SEQ ID NO: 177052 - protein, 21 aa, Influenza A virus
ILTKTTVDHMAIIKKYTSGRQ

SEQ ID NO: 177053 - protein, 22 aa, Influenza A virus
ILTKTTVDHMAIIKKYTSGRQE

SEQ ID NO: 177054 - protein, 23 aa, Influenza A virus
ILTKTTVDHMAIIKKYTSGRQEK

SEQ ID NO: 177055 - protein, 24 aa, Influenza A virus
ILTKTTVDHMAIIKKYTSGRQEKN

SEQ ID NO: 177056 - protein, 25 aa, Influenza A virus
ILTKTTVDHMAIIKKYTSGRQEKNP

SEQ ID NO: 177057 - protein, 15 aa, Influenza A virus
ILTSESQLTITKEKK

SEQ ID NO: 177058 - protein, 16 aa, Influenza A virus
ILTSESQLTITKEKKE

SEQ ID NO: 177059 - protein, 13 aa, Influenza A virus
ILVRGNSPVFNYN

SEQ ID NO: 177060 - protein, 14 aa, Influenza A virus
ILVRGNSPVFNYNK

SEQ ID NO: 177061 - protein, 13 aa, Influenza A virus
IMEVVFPNEVGAR

SEQ ID NO: 177062 - protein, 14 aa, Influenza A virus
IMEVVFPNEVGARI

SEQ ID NO: 177063 - protein, 15 aa, Influenza A virus
IMEVVFPNEVGARIL

SEQ ID NO: 177064 - protein, 16 aa, Influenza A virus
IMEVVFPNEVGARILT

SEQ ID NO: 177065 - protein, 17 aa, Influenza A virus
IMEVVFPNEVGARILTS

SEQ ID NO: 177066 - protein, 18 aa, Influenza A virus
IMEVVFPNEVGARILTSE

SEQ ID NO: 177067 - protein, 19 aa, Influenza A virus
IMEVVFPNEVGARILTSES

SEQ ID NO: 177068 - protein, 20 aa, Influenza A virus
IMEVVFPNEVGARILTSESQ

SEQ ID NO: 177069 - protein, 21 aa, Influenza A virus
IMEVVFPNEVGARILTSESQL

SEQ ID NO: 177070 - protein, 22 aa, Influenza A virus
IMEVVFPNEVGARILTSESQLT

SEQ ID NO: 177071 - protein, 23 aa, Influenza A virus
IMEVVFPNEVGARILTSESQLTI

SEQ ID NO: 177072 - protein, 24 aa, Influenza A virus
IMEVVFPNEVGARILTSESQLTIT

SEQ ID NO: 177073 - protein, 25 aa, Influenza A virus
IMEVVFPNEVGARILTSESQLTITK

SEQ ID NO: 177074 - protein, 14 aa, Influenza A virus
INELSNLAKGEKAN

SEQ ID NO: 177075 - protein, 15 aa, Influenza A virus
INELSNLAKGEKANV

SEQ ID NO: 177076 - protein, 16 aa, Influenza A virus
INELSNLAKGEKANVL

SEQ ID NO: 177077 - protein, 17 aa, Influenza A virus
INELSNLAKGEKANVLI

SEQ ID NO: 177078 - protein, 19 aa, Influenza A virus
INELSNLAKGEKANVLIGQ

SEQ ID NO: 177079 - protein, 20 aa, Influenza A virus
INELSNLAKGEKANVLIGQG

SEQ ID NO: 177080 - protein, 21 aa, Influenza A virus
INELSNLAKGEKANVLIGQGD

SEQ ID NO: 177081 - protein, 22 aa, Influenza A virus
INELSNLAKGEKANVLIGQGDV

SEQ ID NO: 177082 - protein, 23 aa, Influenza A virus
INELSNLAKGEKANVLIGQGDVV

SEQ ID NO: 177083 - protein, 24 aa, Influenza A virus
INELSNLAKGEKANVLIGQGDVVL

SEQ ID NO: 177084 - protein, 25 aa, Influenza A virus
INELSNLAKGEKANVLIGQGDVVLV

SEQ ID NO: 177085 - protein, 15 aa, Influenza A virus
INGPESVLVNTYQWI

SEQ ID NO: 177086 - protein, 16 aa, Influenza A virus
INGPESVLVNTYQWII

SEQ ID NO: 177087 - protein, 17 aa, Influenza A virus
INGPESVLVNTYQWIIR

SEQ ID NO: 177088 - protein, 18 aa, Influenza A virus
INGPESVLVNTYQWIIRN

SEQ ID NO: 177089 - protein, 19 aa, Influenza A virus
INGPESVLVNTYQWIIRNW

SEQ ID NO: 177090 - protein, 20 aa, Influenza A virus
INGPESVLVNTYQWIIRNWE

SEQ ID NO: 177091 - protein, 15 aa, Influenza A virus
INPGHADLSAKEAQD

SEQ ID NO: 177092 - protein, 16 aa, Influenza A virus
INPGHADLSAKEAQDV

SEQ ID NO: 177093 - protein, 20 aa, Influenza A virus
INPGHADLSAKEAQDVIMEV

SEQ ID NO: 177094 - protein, 21 aa, Influenza A virus
INPGHADLSAKEAQDVIMEVV

SEQ ID NO: 177095 - protein, 22 aa, Influenza A virus
INPGHADLSAKEAQDVIMEVVF

SEQ ID NO: 177096 - protein, 23 aa, Influenza A virus
INPGHADLSAKEAQDVIMEVVFP

SEQ ID NO: 177097 - protein, 24 aa, Influenza A virus
INPGHADLSAKEAQDVIMEVVFPN

SEQ ID NO: 177098 - protein, 25 aa, Influenza A virus
INPGHADLSAKEAQDVIMEVVFPNE

SEQ ID NO: 177099 - protein, 13 aa, Influenza A virus
IRNWETVKIQWSQ

SEQ ID NO: 177100 - protein, 15 aa, Influenza A virus
IRRRVDINPGHADLS

SEQ ID NO: 177101 - protein, 16 aa, Influenza A virus
IRRRVDINPGHADLSA

SEQ ID NO: 177102 - protein, 17 aa, Influenza A virus
IRRRVDINPGHADLSAK

SEQ ID NO: 177103 - protein, 18 aa, Influenza A virus
IRRRVDINPGHADLSAKE

SEQ ID NO: 177104 - protein, 19 aa, Influenza A virus
IRRRVDINPGHADLSAKEA

SEQ ID NO: 177105 - protein, 20 aa, Influenza A virus
IRRRVDINPGHADLSAKEAQ

SEQ ID NO: 177106 - protein, 21 aa, Influenza A virus
IRRRVDINPGHADLSAKEAQD

SEQ ID NO: 177107 - protein, 22 aa, Influenza A virus
IRRRVDINPGHADLSAKEAQDV

SEQ ID NO: 177108 - protein, 23 aa, Influenza A virus
IRRRVDINPGHADLSAKEAQDVI

SEQ ID NO: 177109 - protein, 24 aa, Influenza A virus
IRRRVDINPGHADLSAKEAQDVIM

SEQ ID NO: 177110 - protein, 25 aa, Influenza A virus
IRRRVDINPGHADLSAKEAQDVIME

SEQ ID NO: 177111 - protein, 15 aa, Influenza A virus
ISSSFSFGGFTFKRT

SEQ ID NO: 177112 - protein, 16 aa, Influenza A virus
ISSSFSFGGFTFKRTS

SEQ ID NO: 177113 - protein, 17 aa, Influenza A virus
ISSSFSFGGFTFKRTSG

SEQ ID NO: 177114 - protein, 18 aa, Influenza A virus
ISSSFSFGGFTFKRTSGS

SEQ ID NO: 177115 - protein, 19 aa, Influenza A virus
ISSSFSFGGFTFKRTSGSS

SEQ ID NO: 177116 - protein, 13 aa, Influenza A virus
ITYSSSMMWEING

SEQ ID NO: 177117 - protein, 14 aa, Influenza A virus
ITYSSSMMWEINGP

SEQ ID NO: 177118 - protein, 15 aa, Influenza A virus
ITYSSSMMWEINGPE

SEQ ID NO: 177119 - protein, 16 aa, Influenza A virus
ITYSSSMMWEINGPES

SEQ ID NO: 177120 - protein, 17 aa, Influenza A virus
ITYSSSMMWEINGPESV

SEQ ID NO: 177121 - protein, 18 aa, Influenza A virus
ITYSSSMMWEINGPESVL

SEQ ID NO: 177122 - protein, 19 aa, Influenza A virus
ITYSSSMMWEINGPESVLV

SEQ ID NO: 177123 - protein, 20 aa, Influenza A virus
ITYSSSMMWEINGPESVLVN

SEQ ID NO: 177124 - protein, 21 aa, Influenza A virus
ITYSSSMMWEINGPESVLVNT

SEQ ID NO: 177125 - protein, 22 aa, Influenza A virus
ITYSSSMMWEINGPESVLVNTY

SEQ ID NO: 177126 - protein, 23 aa, Influenza A virus
ITYSSSMMWEINGPESVLVNTYQ

SEQ ID NO: 177127 - protein, 24 aa, Influenza A virus
ITYSSSMMWEINGPESVLVNTYQW

SEQ ID NO: 177128 - protein, 25 aa, Influenza A virus
ITYSSSMMWEINGPESVLVNTYQWI

SEQ ID NO: 177129 - protein, 13 aa, Influenza A virus
IVAMVFSQEDCMI

SEQ ID NO: 177130 - protein, 14 aa, Influenza A virus
IVAMVFSQEDCMIK

SEQ ID NO: 177131 - protein, 15 aa, Influenza A virus
IVAMVFSQEDCMIKA

SEQ ID NO: 177132 - protein, 16 aa, Influenza A virus
IVAMVFSQEDCMIKAV

SEQ ID NO: 177133 - protein, 17 aa, Influenza A virus
IVAMVFSQEDCMIKAVR

SEQ ID NO: 177134 - protein, 18 aa, Influenza A virus
IVAMVFSQEDCMIKAVRG

SEQ ID NO: 177135 - protein, 19 aa, Influenza A virus
IVAMVFSQEDCMIKAVRGD

SEQ ID NO: 177136 - protein, 20 aa, Influenza A virus
IVAMVFSQEDCMIKAVRGDL

SEQ ID NO: 177137 - protein, 21 aa, Influenza A virus
IVAMVFSQEDCMIKAVRGDLN

SEQ ID NO: 177138 - protein, 22 aa, Influenza A virus
IVAMVFSQEDCMIKAVRGDLNF

SEQ ID NO: 177139 - protein, 23 aa, Influenza A virus
IVAMVFSQEDCMIKAVRGDLNFV

SEQ ID NO: 177140 - protein, 24 aa, Influenza A virus
IVAMVFSQEDCMIKAVRGDLNFVN

SEQ ID NO: 177141 - protein, 25 aa, Influenza A virus
IVAMVFSQEDCMIKAVRGDLNFVNR

SEQ ID NO: 177142 - protein, 16 aa, Influenza A virus
IVSGRDEQSIAEAIIV

SEQ ID NO: 177143 - protein, 17 aa, Influenza A virus
IVSGRDEQSIAEAIIVA

SEQ ID NO: 177144 - protein, 14 aa, Influenza A virus
KAAMGLRISSSFSF

SEQ ID NO: 177145 - protein, 15 aa, Influenza A virus
KAAMGLRISSSFSFG

SEQ ID NO: 177146 - protein, 16 aa, Influenza A virus
KAAMGLRISSSFSFGG

SEQ ID NO: 177147 - protein, 17 aa, Influenza A virus
KAAMGLRISSSFSFGGF

SEQ ID NO: 177148 - protein, 18 aa, Influenza A virus
KAAMGLRISSSFSFGGFT

SEQ ID NO: 177149 - protein, 19 aa, Influenza A virus
KAAMGLRISSSFSFGGFTF

SEQ ID NO: 177150 - protein, 20 aa, Influenza A virus
KAAMGLRISSSFSFGGFTFK

SEQ ID NO: 177151 - protein, 21 aa, Influenza A virus
KAAMGLRISSSFSFGGFTFKR

SEQ ID NO: 177152 - protein, 22 aa, Influenza A virus
KAAMGLRISSSFSFGGFTFKRT

SEQ ID NO: 177153 - protein, 23 aa, Influenza A virus
KAAMGLRISSSFSFGGFTFKRTS

SEQ ID NO: 177154 - protein, 24 aa, Influenza A virus
KAAMGLRISSSFSFGGFTFKRTSG

SEQ ID NO: 177155 - protein, 25 aa, Influenza A virus
KAAMGLRISSSFSFGGFTFKRTSGS

SEQ ID NO: 177156 - protein, 13 aa, Influenza A virus
KANVLIGQGDVVL

SEQ ID NO: 177157 - protein, 14 aa, Influenza A virus
KANVLIGQGDVVLV

SEQ ID NO: 177158 - protein, 15 aa, Influenza A virus
KANVLIGQGDVVLVM

SEQ ID NO: 177159 - protein, 16 aa, Influenza A virus
KANVLIGQGDVVLVMK

SEQ ID NO: 177160 - protein, 17 aa, Influenza A virus
KANVLIGQGDVVLVMKR

SEQ ID NO: 177161 - protein, 18 aa, Influenza A virus
KANVLIGQGDVVLVMKRK

SEQ ID NO: 177162 - protein, 19 aa, Influenza A virus
KANVLIGQGDVVLVMKRKR

SEQ ID NO: 177163 - protein, 20 aa, Influenza A virus
KANVLIGQGDVVLVMKRKRD

SEQ ID NO: 177164 - protein, 21 aa, Influenza A virus
KANVLIGQGDVVLVMKRKRDS

SEQ ID NO: 177165 - protein, 22 aa, Influenza A virus
KANVLIGQGDVVLVMKRKRDSS

SEQ ID NO: 177166 - protein, 23 aa, Influenza A virus
KANVLIGQGDVVLVMKRKRDSSI

SEQ ID NO: 177167 - protein, 24 aa, Influenza A virus
KANVLIGQGDVVLVMKRKRDSSIL

SEQ ID NO: 177168 - protein, 25 aa, Influenza A virus
KANVLIGQGDVVLVMKRKRDSSILT

SEQ ID NO: 177169 - protein, 14 aa, Influenza A virus
KAVRGDLNFVNRAN

SEQ ID NO: 177170 - protein, 15 aa, Influenza A virus
KAVRGDLNFVNRANQ

SEQ ID NO: 177171 - protein, 16 aa, Influenza A virus
KAVRGDLNFVNRANQR

SEQ ID NO: 177172 - protein, 17 aa, Influenza A virus
KAVRGDLNFVNRANQRL

SEQ ID NO: 177173 - protein, 18 aa, Influenza A virus
KAVRGDLNFVNRANQRLN

SEQ ID NO: 177174 - protein, 19 aa, Influenza A virus
KAVRGDLNFVNRANQRLNP

SEQ ID NO: 177175 - protein, 20 aa, Influenza A virus
KAVRGDLNFVNRANQRLNPM

SEQ ID NO: 177176 - protein, 21 aa, Influenza A virus
KAVRGDLNFVNRANQRLNPMH

SEQ ID NO: 177177 - protein, 22 aa, Influenza A virus
KAVRGDLNFVNRANQRLNPMHQ

SEQ ID NO: 177178 - protein, 23 aa, Influenza A virus
KAVRGDLNFVNRANQRLNPMHQL

SEQ ID NO: 177179 - protein, 24 aa, Influenza A virus
KAVRGDLNFVNRANQRLNPMHQLL

SEQ ID NO: 177180 - protein, 25 aa, Influenza A virus
KAVRGDLNFVNRANQRLNPMHQLLR

SEQ ID NO: 177181 - protein, 14 aa, Influenza A virus
KEAQDVIMEVVFPN

SEQ ID NO: 177182 - protein, 15 aa, Influenza A virus
KEAQDVIMEVVFPNE

SEQ ID NO: 177183 - protein, 16 aa, Influenza A virus
KEAQDVIMEVVFPNEV

SEQ ID NO: 177184 - protein, 17 aa, Influenza A virus
KEAQDVIMEVVFPNEVG

SEQ ID NO: 177185 - protein, 18 aa, Influenza A virus
KEAQDVIMEVVFPNEVGA

SEQ ID NO: 177186 - protein, 19 aa, Influenza A virus
KEAQDVIMEVVFPNEVGAR

SEQ ID NO: 177187 - protein, 20 aa, Influenza A virus
KEAQDVIMEVVFPNEVGARI

SEQ ID NO: 177188 - protein, 21 aa, Influenza A virus
KEAQDVIMEVVFPNEVGARIL

SEQ ID NO: 177189 - protein, 22 aa, Influenza A virus
KEAQDVIMEVVFPNEVGARILT

SEQ ID NO: 177190 - protein, 23 aa, Influenza A virus
KEAQDVIMEVVFPNEVGARILTS

SEQ ID NO: 177191 - protein, 24 aa, Influenza A virus
KEAQDVIMEVVFPNEVGARILTSE

SEQ ID NO: 177192 - protein, 25 aa, Influenza A virus
KEAQDVIMEVVFPNEVGARILTSES

SEQ ID NO: 177193 - protein, 16 aa, Influenza A virus
KGEKANVLIGQGDVVL

SEQ ID NO: 177194 - protein, 17 aa, Influenza A virus
KGEKANVLIGQGDVVLV

SEQ ID NO: 177195 - protein, 18 aa, Influenza A virus
KGEKANVLIGQGDVVLVM

SEQ ID NO: 177196 - protein, 19 aa, Influenza A virus
KGEKANVLIGQGDVVLVMK

SEQ ID NO: 177197 - protein, 20 aa, Influenza A virus
KGEKANVLIGQGDVVLVMKR

SEQ ID NO: 177198 - protein, 21 aa, Influenza A virus
KGEKANVLIGQGDVVLVMKRK

SEQ ID NO: 177199 - protein, 22 aa, Influenza A virus
KGEKANVLIGQGDVVLVMKRKR

SEQ ID NO: 177200 - protein, 23 aa, Influenza A virus
KGEKANVLIGQGDVVLVMKRKRD

SEQ ID NO: 177201 - protein, 24 aa, Influenza A virus
KGEKANVLIGQGDVVLVMKRKRDS

SEQ ID NO: 177202 - protein, 25 aa, Influenza A virus
KGEKANVLIGQGDVVLVMKRKRDSS

SEQ ID NO: 177203 - protein, 15 aa, Influenza A virus
KHGTFGPVHFRNQVK

SEQ ID NO: 177204 - protein, 16 aa, Influenza A virus
KHGTFGPVHFRNQVKI

SEQ ID NO: 177205 - protein, 17 aa, Influenza A virus
KHGTFGPVHFRNQVKIR

SEQ ID NO: 177206 - protein, 18 aa, Influenza A virus
KHGTFGPVHFRNQVKIRR

SEQ ID NO: 177207 - protein, 19 aa, Influenza A virus
KHGTFGPVHFRNQVKIRRR

SEQ ID NO: 177208 - protein, 20 aa, Influenza A virus
KHGTFGPVHFRNQVKIRRRV

SEQ ID NO: 177209 - protein, 21 aa, Influenza A virus
KHGTFGPVHFRNQVKIRRRVD

SEQ ID NO: 177210 - protein, 22 aa, Influenza A virus
KHGTFGPVHFRNQVKIRRRVDI

SEQ ID NO: 177211 - protein, 23 aa, Influenza A virus
KHGTFGPVHFRNQVKIRRRVDIN

SEQ ID NO: 177212 - protein, 24 aa, Influenza A virus
KHGTFGPVHFRNQVKIRRRVDINP

SEQ ID NO: 177213 - protein, 25 aa, Influenza A virus
KHGTFGPVHFRNQVKIRRRVDINPG

SEQ ID NO: 177214 - protein, 16 aa, Influenza A virus
KIRRRVDINPGHADLS

SEQ ID NO: 177215 - protein, 17 aa, Influenza A virus
KIRRRVDINPGHADLSA

SEQ ID NO: 177216 - protein, 18 aa, Influenza A virus
KIRRRVDINPGHADLSAK

SEQ ID NO: 177217 - protein, 19 aa, Influenza A virus
KIRRRVDINPGHADLSAKE

SEQ ID NO: 177218 - protein, 20 aa, Influenza A virus
KIRRRVDINPGHADLSAKEA

SEQ ID NO: 177219 - protein, 21 aa, Influenza A virus
KIRRRVDINPGHADLSAKEAQ

SEQ ID NO: 177220 - protein, 22 aa, Influenza A virus
KIRRRVDINPGHADLSAKEAQD

SEQ ID NO: 177221 - protein, 23 aa, Influenza A virus
KIRRRVDINPGHADLSAKEAQDV

SEQ ID NO: 177222 - protein, 24 aa, Influenza A virus
KIRRRVDINPGHADLSAKEAQDVI

SEQ ID NO: 177223 - protein, 25 aa, Influenza A virus
KIRRRVDINPGHADLSAKEAQDVIM

SEQ ID NO: 177224 - protein, 13 aa, Influenza A virus
KMEFEPFQSLVPK

SEQ ID NO: 177225 - protein, 14 aa, Influenza A virus
KMEFEPFQSLVPKA

SEQ ID NO: 177226 - protein, 15 aa, Influenza A virus
KRDSSILTDSQTATK

SEQ ID NO: 177227 - protein, 16 aa, Influenza A virus
KRDSSILTDSQTATKR

SEQ ID NO: 177228 - protein, 17 aa, Influenza A virus
KRDSSILTDSQTATKRI

SEQ ID NO: 177229 - protein, 19 aa, Influenza A virus
KRDSSILTDSQTATKRIRM

SEQ ID NO: 177230 - protein, 20 aa, Influenza A virus
KRDSSILTDSQTATKRIRMA

SEQ ID NO: 177231 - protein, 21 aa, Influenza A virus
KRDSSILTDSQTATKRIRMAI

SEQ ID NO: 177232 - protein, 22 aa, Influenza A virus
KRDSSILTDSQTATKRIRMAIN

SEQ ID NO: 177233 - protein, 15 aa, Influenza A virus
KRKRDSSILTDSQTA

SEQ ID NO: 177234 - protein, 16 aa, Influenza A virus
KRKRDSSILTDSQTAT

SEQ ID NO: 177235 - protein, 17 aa, Influenza A virus
KRKRDSSILTDSQTATK

SEQ ID NO: 177236 - protein, 19 aa, Influenza A virus
KRKRDSSILTDSQTATKRI

SEQ ID NO: 177237 - protein, 20 aa, Influenza A virus
KRKRDSSILTDSQTATKRIR

SEQ ID NO: 177238 - protein, 21 aa, Influenza A virus
KRKRDSSILTDSQTATKRIRM

SEQ ID NO: 177239 - protein, 22 aa, Influenza A virus
KRKRDSSILTDSQTATKRIRMA

SEQ ID NO: 177240 - protein, 23 aa, Influenza A virus
KRKRDSSILTDSQTATKRIRMAI

SEQ ID NO: 177241 - protein, 24 aa, Influenza A virus
KRKRDSSILTDSQTATKRIRMAIN

SEQ ID NO: 177242 - protein, 13 aa, Influenza A virus
KTRFLPVAGGTSS

SEQ ID NO: 177243 - protein, 14 aa, Influenza A virus
KTRFLPVAGGTSSV

SEQ ID NO: 177244 - protein, 15 aa, Influenza A virus
KTRFLPVAGGTSSVY

SEQ ID NO: 177245 - protein, 16 aa, Influenza A virus
KTRFLPVAGGTSSVYI

SEQ ID NO: 177246 - protein, 17 aa, Influenza A virus
KTRFLPVAGGTSSVYIE

SEQ ID NO: 177247 - protein, 18 aa, Influenza A virus
KTRFLPVAGGTSSVYIEV

SEQ ID NO: 177248 - protein, 19 aa, Influenza A virus
KTRFLPVAGGTSSVYIEVL

SEQ ID NO: 177249 - protein, 20 aa, Influenza A virus
KTRFLPVAGGTSSVYIEVLH

SEQ ID NO: 177250 - protein, 21 aa, Influenza A virus
KTRFLPVAGGTSSVYIEVLHL

SEQ ID NO: 177251 - protein, 22 aa, Influenza A virus
KTRFLPVAGGTSSVYIEVLHLT

SEQ ID NO: 177252 - protein, 23 aa, Influenza A virus
KTRFLPVAGGTSSVYIEVLHLTQ

SEQ ID NO: 177253 - protein, 24 aa, Influenza A virus
KTRFLPVAGGTSSVYIEVLHLTQG

SEQ ID NO: 177254 - protein, 25 aa, Influenza A virus
KTRFLPVAGGTSSVYIEVLHLTQGT

SEQ ID NO: 177255 - protein, 14 aa, Influenza A virus
KTTVDHMAIIKKYT

SEQ ID NO: 177256 - protein, 15 aa, Influenza A virus
KTTVDHMAIIKKYTS

SEQ ID NO: 177257 - protein, 16 aa, Influenza A virus
KTTVDHMAIIKKYTSG

SEQ ID NO: 177258 - protein, 17 aa, Influenza A virus
KTTVDHMAIIKKYTSGR

SEQ ID NO: 177259 - protein, 18 aa, Influenza A virus
KTTVDHMAIIKKYTSGRQ

SEQ ID NO: 177260 - protein, 19 aa, Influenza A virus
KTTVDHMAIIKKYTSGRQE

SEQ ID NO: 177261 - protein, 20 aa, Influenza A virus
KTTVDHMAIIKKYTSGRQEK

SEQ ID NO: 177262 - protein, 21 aa, Influenza A virus
KTTVDHMAIIKKYTSGRQEKN

SEQ ID NO: 177263 - protein, 22 aa, Influenza A virus
KTTVDHMAIIKKYTSGRQEKNP

SEQ ID NO: 177264 - protein, 14 aa, Influenza A virus
KVERLKHGTFGPVH

SEQ ID NO: 177265 - protein, 15 aa, Influenza A virus
KVERLKHGTFGPVHF

SEQ ID NO: 177266 - protein, 16 aa, Influenza A virus
KVERLKHGTFGPVHFR

SEQ ID NO: 177267 - protein, 17 aa, Influenza A virus
KVERLKHGTFGPVHFRN

SEQ ID NO: 177268 - protein, 18 aa, Influenza A virus
KVERLKHGTFGPVHFRNQ

SEQ ID NO: 177269 - protein, 19 aa, Influenza A virus
KVERLKHGTFGPVHFRNQV

SEQ ID NO: 177270 - protein, 20 aa, Influenza A virus
KVERLKHGTFGPVHFRNQVK

SEQ ID NO: 177271 - protein, 21 aa, Influenza A virus
KVERLKHGTFGPVHFRNQVKI

SEQ ID NO: 177272 - protein, 22 aa, Influenza A virus
KVERLKHGTFGPVHFRNQVKIR

SEQ ID NO: 177273 - protein, 23 aa, Influenza A virus
KVERLKHGTFGPVHFRNQVKIRR

SEQ ID NO: 177274 - protein, 24 aa, Influenza A virus
KVERLKHGTFGPVHFRNQVKIRRR

SEQ ID NO: 177275 - protein, 25 aa, Influenza A virus
KVERLKHGTFGPVHFRNQVKIRRRV

SEQ ID NO: 177276 - protein, 13 aa, Influenza A virus
KWMMAMKYPITAD

SEQ ID NO: 177277 - protein, 14 aa, Influenza A virus
KWMMAMKYPITADK

SEQ ID NO: 177278 - protein, 15 aa, Influenza A virus
KWMMAMKYPITADKR

SEQ ID NO: 177279 - protein, 16 aa, Influenza A virus
KWMMAMKYPITADKRI

SEQ ID NO: 177280 - protein, 18 aa, Influenza A virus
LAKGEKANVLIGQGDVVL

SEQ ID NO: 177281 - protein, 19 aa, Influenza A virus
LAKGEKANVLIGQGDVVLV

SEQ ID NO: 177282 - protein, 20 aa, Influenza A virus
LAKGEKANVLIGQGDVVLVM

SEQ ID NO: 177283 - protein, 21 aa, Influenza A virus
LAKGEKANVLIGQGDVVLVMK

SEQ ID NO: 177284 - protein, 22 aa, Influenza A virus
LAKGEKANVLIGQGDVVLVMKR

SEQ ID NO: 177285 - protein, 23 aa, Influenza A virus
LAKGEKANVLIGQGDVVLVMKRK

SEQ ID NO: 177286 - protein, 24 aa, Influenza A virus
LAKGEKANVLIGQGDVVLVMKRKR

SEQ ID NO: 177287 - protein, 25 aa, Influenza A virus
LAKGEKANVLIGQGDVVLVMKRKRD

SEQ ID NO: 177288 - protein, 14 aa, Influenza A virus
LASLLEMCHSTQIG

SEQ ID NO: 177289 - protein, 15 aa, Influenza A virus
LASLLEMCHSTQIGG

SEQ ID NO: 177290 - protein, 14 aa, Influenza A virus
LERELVRKTRFLPV

SEQ ID NO: 177291 - protein, 15 aa, Influenza A virus
LERELVRKTRFLPVA

SEQ ID NO: 177292 - protein, 16 aa, Influenza A virus
LERELVRKTRFLPVAG

SEQ ID NO: 177293 - protein, 17 aa, Influenza A virus
LERELVRKTRFLPVAGG

SEQ ID NO: 177294 - protein, 18 aa, Influenza A virus
LERELVRKTRFLPVAGGT

SEQ ID NO: 177295 - protein, 19 aa, Influenza A virus
LERELVRKTRFLPVAGGTS

SEQ ID NO: 177296 - protein, 20 aa, Influenza A virus
LERELVRKTRFLPVAGGTSS

SEQ ID NO: 177297 - protein, 21 aa, Influenza A virus
LERELVRKTRFLPVAGGTSSV

SEQ ID NO: 177298 - protein, 22 aa, Influenza A virus
LERELVRKTRFLPVAGGTSSVY

SEQ ID NO: 177299 - protein, 23 aa, Influenza A virus
LERELVRKTRFLPVAGGTSSVYI

SEQ ID NO: 177300 - protein, 24 aa, Influenza A virus
LERELVRKTRFLPVAGGTSSVYIE

SEQ ID NO: 177301 - protein, 25 aa, Influenza A virus
LERELVRKTRFLPVAGGTSSVYIEV

SEQ ID NO: 177302 - protein, 13 aa, Influenza A virus
LFQQMRDVLGTFD

SEQ ID NO: 177303 - protein, 14 aa, Influenza A virus
LFQQMRDVLGTFDT

SEQ ID NO: 177304 - protein, 13 aa, Influenza A virus
LIGQGDVVLVMKR

SEQ ID NO: 177305 - protein, 14 aa, Influenza A virus
LIGQGDVVLVMKRK

SEQ ID NO: 177306 - protein, 15 aa, Influenza A virus
LIGQGDVVLVMKRKR

SEQ ID NO: 177307 - protein, 16 aa, Influenza A virus
LIGQGDVVLVMKRKRD

SEQ ID NO: 177308 - protein, 17 aa, Influenza A virus
LIGQGDVVLVMKRKRDS

SEQ ID NO: 177309 - protein, 18 aa, Influenza A virus
LIGQGDVVLVMKRKRDSS

SEQ ID NO: 177310 - protein, 19 aa, Influenza A virus
LIGQGDVVLVMKRKRDSSI

SEQ ID NO: 177311 - protein, 20 aa, Influenza A virus
LIGQGDVVLVMKRKRDSSIL

SEQ ID NO: 177312 - protein, 21 aa, Influenza A virus
LIGQGDVVLVMKRKRDSSILT

SEQ ID NO: 177313 - protein, 22 aa, Influenza A virus
LIGQGDVVLVMKRKRDSSILTD

SEQ ID NO: 177314 - protein, 23 aa, Influenza A virus
LIGQGDVVLVMKRKRDSSILTDS

SEQ ID NO: 177315 - protein, 24 aa, Influenza A virus
LIGQGDVVLVMKRKRDSSILTDSQ

SEQ ID NO: 177316 - protein, 25 aa, Influenza A virus
LIGQGDVVLVMKRKRDSSILTDSQT

SEQ ID NO: 177317 - protein, 17 aa, Influenza A virus
LIVSGRDEQSIAEAIIV

SEQ ID NO: 177318 - protein, 15 aa, Influenza A virus
LKHGTFGPVHFRNQV

SEQ ID NO: 177319 - protein, 16 aa, Influenza A virus
LKHGTFGPVHFRNQVK

SEQ ID NO: 177320 - protein, 17 aa, Influenza A virus
LKHGTFGPVHFRNQVKI

SEQ ID NO: 177321 - protein, 19 aa, Influenza A virus
LKHGTFGPVHFRNQVKIRR

SEQ ID NO: 177322 - protein, 20 aa, Influenza A virus
LKHGTFGPVHFRNQVKIRRR

SEQ ID NO: 177323 - protein, 21 aa, Influenza A virus
LKHGTFGPVHFRNQVKIRRRV

SEQ ID NO: 177324 - protein, 22 aa, Influenza A virus
LKHGTFGPVHFRNQVKIRRRVD

SEQ ID NO: 177325 - protein, 23 aa, Influenza A virus
LKHGTFGPVHFRNQVKIRRRVDI

SEQ ID NO: 177326 - protein, 24 aa, Influenza A virus
LKHGTFGPVHFRNQVKIRRRVDIN

SEQ ID NO: 177327 - protein, 25 aa, Influenza A virus
LKHGTFGPVHFRNQVKIRRRVDINP

SEQ ID NO: 177328 - protein, 13 aa, Influenza A virus
LLRHFQKDAKVLF

SEQ ID NO: 177329 - protein, 14 aa, Influenza A virus
LLRHFQKDAKVLFQ

SEQ ID NO: 177330 - protein, 15 aa, Influenza A virus
LLRHFQKDAKVLFQN

SEQ ID NO: 177331 - protein, 16 aa, Influenza A virus
LLRHFQKDAKVLFQNW

SEQ ID NO: 177332 - protein, 17 aa, Influenza A virus
LLRHFQKDAKVLFQNWG

SEQ ID NO: 177333 - protein, 18 aa, Influenza A virus
LLRHFQKDAKVLFQNWGI

SEQ ID NO: 177334 - protein, 19 aa, Influenza A virus
LLRHFQKDAKVLFQNWGIE

SEQ ID NO: 177335 - protein, 15 aa, Influenza A virus
LMSQSRTREILTKTT

SEQ ID NO: 177336 - protein, 16 aa, Influenza A virus
LMSQSRTREILTKTTV

SEQ ID NO: 177337 - protein, 20 aa, Influenza A virus
LMSQSRTREILTKTTVDHMA

SEQ ID NO: 177338 - protein, 21 aa, Influenza A virus
LMSQSRTREILTKTTVDHMAI

SEQ ID NO: 177339 - protein, 22 aa, Influenza A virus
LMSQSRTREILTKTTVDHMAII

SEQ ID NO: 177340 - protein, 23 aa, Influenza A virus
LMSQSRTREILTKTTVDHMAIIK

SEQ ID NO: 177341 - protein, 24 aa, Influenza A virus
LMSQSRTREILTKTTVDHMAIIKK

SEQ ID NO: 177342 - protein, 25 aa, Influenza A virus
LMSQSRTREILTKTTVDHMAIIKKY

SEQ ID NO: 177343 - protein, 13 aa, Influenza A virus
LMVAYMLERELVR

SEQ ID NO: 177344 - protein, 14 aa, Influenza A virus
LMVAYMLERELVRK

SEQ ID NO: 177345 - protein, 15 aa, Influenza A virus
LMVAYMLERELVRKT

SEQ ID NO: 177346 - protein, 16 aa, Influenza A virus
LMVAYMLERELVRKTR

SEQ ID NO: 177347 - protein, 17 aa, Influenza A virus
LMVAYMLERELVRKTRF

SEQ ID NO: 177348 - protein, 18 aa, Influenza A virus
LMVAYMLERELVRKTRFL

SEQ ID NO: 177349 - protein, 19 aa, Influenza A virus
LMVAYMLERELVRKTRFLP

SEQ ID NO: 177350 - protein, 20 aa, Influenza A virus
LMVAYMLERELVRKTRFLPV

SEQ ID NO: 177351 - protein, 21 aa, Influenza A virus
LMVAYMLERELVRKTRFLPVA

SEQ ID NO: 177352 - protein, 22 aa, Influenza A virus
LMVAYMLERELVRKTRFLPVAG

SEQ ID NO: 177353 - protein, 23 aa, Influenza A virus
LMVAYMLERELVRKTRFLPVAGG

SEQ ID NO: 177354 - protein, 24 aa, Influenza A virus
LMVAYMLERELVRKTRFLPVAGGT

SEQ ID NO: 177355 - protein, 25 aa, Influenza A virus
LMVAYMLERELVRKTRFLPVAGGTS

SEQ ID NO: 177356 - protein, 14 aa, Influenza A virus
LNFVNRANQRLNPM

SEQ ID NO: 177357 - protein, 15 aa, Influenza A virus
LNFVNRANQRLNPMH

SEQ ID NO: 177358 - protein, 16 aa, Influenza A virus
LNFVNRANQRLNPMHQ

SEQ ID NO: 177359 - protein, 17 aa, Influenza A virus
LNFVNRANQRLNPMHQL

SEQ ID NO: 177360 - protein, 19 aa, Influenza A virus
LNFVNRANQRLNPMHQLLR

SEQ ID NO: 177361 - protein, 20 aa, Influenza A virus
LNFVNRANQRLNPMHQLLRH

SEQ ID NO: 177362 - protein, 21 aa, Influenza A virus
LNFVNRANQRLNPMHQLLRHF

SEQ ID NO: 177363 - protein, 22 aa, Influenza A virus
LNFVNRANQRLNPMHQLLRHFQ

SEQ ID NO: 177364 - protein, 23 aa, Influenza A virus
LNFVNRANQRLNPMHQLLRHFQK

SEQ ID NO: 177365 - protein, 24 aa, Influenza A virus
LNFVNRANQRLNPMHQLLRHFQKD

SEQ ID NO: 177366 - protein, 25 aa, Influenza A virus
LNFVNRANQRLNPMHQLLRHFQKDA

SEQ ID NO: 177367 - protein, 13 aa, Influenza A virus
LNPMHQLLRHFQK

SEQ ID NO: 177368 - protein, 14 aa, Influenza A virus
LNPMHQLLRHFQKD

SEQ ID NO: 177369 - protein, 15 aa, Influenza A virus
LNPMHQLLRHFQKDA

SEQ ID NO: 177370 - protein, 16 aa, Influenza A virus
LNPMHQLLRHFQKDAK

SEQ ID NO: 177371 - protein, 17 aa, Influenza A virus
LNPMHQLLRHFQKDAKV

SEQ ID NO: 177372 - protein, 18 aa, Influenza A virus
LNPMHQLLRHFQKDAKVL

SEQ ID NO: 177373 - protein, 19 aa, Influenza A virus
LNPMHQLLRHFQKDAKVLF

SEQ ID NO: 177374 - protein, 20 aa, Influenza A virus
LNPMHQLLRHFQKDAKVLFQ

SEQ ID NO: 177375 - protein, 21 aa, Influenza A virus
LNPMHQLLRHFQKDAKVLFQN

SEQ ID NO: 177376 - protein, 22 aa, Influenza A virus
LNPMHQLLRHFQKDAKVLFQNW

SEQ ID NO: 177377 - protein, 23 aa, Influenza A virus
LNPMHQLLRHFQKDAKVLFQNWG

SEQ ID NO: 177378 - protein, 24 aa, Influenza A virus
LNPMHQLLRHFQKDAKVLFQNWGI

SEQ ID NO: 177379 - protein, 25 aa, Influenza A virus
LNPMHQLLRHFQKDAKVLFQNWGIE

SEQ ID NO: 177380 - protein, 13 aa, Influenza A virus
LPVAGGTSSVYIE

SEQ ID NO: 177381 - protein, 14 aa, Influenza A virus
LPVAGGTSSVYIEV

SEQ ID NO: 177382 - protein, 15 aa, Influenza A virus
LPVAGGTSSVYIEVL

SEQ ID NO: 177383 - protein, 16 aa, Influenza A virus
LPVAGGTSSVYIEVLH

SEQ ID NO: 177384 - protein, 17 aa, Influenza A virus
LPVAGGTSSVYIEVLHL

SEQ ID NO: 177385 - protein, 18 aa, Influenza A virus
LPVAGGTSSVYIEVLHLT

SEQ ID NO: 177386 - protein, 19 aa, Influenza A virus
LPVAGGTSSVYIEVLHLTQ

SEQ ID NO: 177387 - protein, 20 aa, Influenza A virus
LPVAGGTSSVYIEVLHLTQG

SEQ ID NO: 177388 - protein, 21 aa, Influenza A virus
LPVAGGTSSVYIEVLHLTQGT

SEQ ID NO: 177389 - protein, 22 aa, Influenza A virus
LPVAGGTSSVYIEVLHLTQGTC

SEQ ID NO: 177390 - protein, 23 aa, Influenza A virus
LPVAGGTSSVYIEVLHLTQGTCW

SEQ ID NO: 177391 - protein, 24 aa, Influenza A virus
LPVAGGTSSVYIEVLHLTQGTCWE

SEQ ID NO: 177392 - protein, 25 aa, Influenza A virus
LPVAGGTSSVYIEVLHLTQGTCWEQ

SEQ ID NO: 177393 - protein, 13 aa, Influenza A virus
LRHFQKDAKVLFQ

SEQ ID NO: 177394 - protein, 14 aa, Influenza A virus
LRHFQKDAKVLFQN

SEQ ID NO: 177395 - protein, 15 aa, Influenza A virus
LRHFQKDAKVLFQNW

SEQ ID NO: 177396 - protein, 16 aa, Influenza A virus
LRHFQKDAKVLFQNWG

SEQ ID NO: 177397 - protein, 17 aa, Influenza A virus
LRHFQKDAKVLFQNWGI

SEQ ID NO: 177398 - protein, 18 aa, Influenza A virus
LRHFQKDAKVLFQNWGIE

SEQ ID NO: 177399 - protein, 14 aa, Influenza A virus
LRISSSFSFGGFTF

SEQ ID NO: 177400 - protein, 15 aa, Influenza A virus
LRISSSFSFGGFTFK

SEQ ID NO: 177401 - protein, 16 aa, Influenza A virus
LRISSSFSFGGFTFKR

SEQ ID NO: 177402 - protein, 17 aa, Influenza A virus
LRISSSFSFGGFTFKRT

SEQ ID NO: 177403 - protein, 18 aa, Influenza A virus
LRISSSFSFGGFTFKRTS

SEQ ID NO: 177404 - protein, 19 aa, Influenza A virus
LRISSSFSFGGFTFKRTSG

SEQ ID NO: 177405 - protein, 20 aa, Influenza A virus
LRISSSFSFGGFTFKRTSGS

SEQ ID NO: 177406 - protein, 21 aa, Influenza A virus
LRISSSFSFGGFTFKRTSGSS

SEQ ID NO: 177407 - protein, 13 aa, Influenza A virus
LRMKWMMAMKYPI

SEQ ID NO: 177408 - protein, 14 aa, Influenza A virus
LRMKWMMAMKYPIT

SEQ ID NO: 177409 - protein, 15 aa, Influenza A virus
LRMKWMMAMKYPITA

SEQ ID NO: 177410 - protein, 16 aa, Influenza A virus
LRMKWMMAMKYPITAD

SEQ ID NO: 177411 - protein, 17 aa, Influenza A virus
LRMKWMMAMKYPITADK

SEQ ID NO: 177412 - protein, 18 aa, Influenza A virus
LRMKWMMAMKYPITADKR

SEQ ID NO: 177413 - protein, 19 aa, Influenza A virus
LRMKWMMAMKYPITADKRI

SEQ ID NO: 177414 - protein, 20 aa, Influenza A virus
LRQNPTEEQAVDICKAAMGL

SEQ ID NO: 177415 - protein, 22 aa, Influenza A virus
LRQNPTEEQAVDICKAAMGLRI

SEQ ID NO: 177416 - protein, 23 aa, Influenza A virus
LRQNPTEEQAVDICKAAMGLRIS

SEQ ID NO: 177417 - protein, 24 aa, Influenza A virus
LRQNPTEEQAVDICKAAMGLRISS

SEQ ID NO: 177418 - protein, 25 aa, Influenza A virus
LRQNPTEEQAVDICKAAMGLRISSS

SEQ ID NO: 177419 - protein, 14 aa, Influenza A virus
LRVRDQRGNVLLSP

SEQ ID NO: 177420 - protein, 15 aa, Influenza A virus
LRVRDQRGNVLLSPE

SEQ ID NO: 177421 - protein, 16 aa, Influenza A virus
LRVRDQRGNVLLSPEE

SEQ ID NO: 177422 - protein, 17 aa, Influenza A virus
LRVRDQRGNVLLSPEEV

SEQ ID NO: 177423 - protein, 19 aa, Influenza A virus
LRVRDQRGNVLLSPEEVSE

SEQ ID NO: 177424 - protein, 20 aa, Influenza A virus
LRVRDQRGNVLLSPEEVSET

SEQ ID NO: 177425 - protein, 14 aa, Influenza A virus
LSAKEAQDVIMEVV

SEQ ID NO: 177426 - protein, 15 aa, Influenza A virus
LSAKEAQDVIMEVVF

SEQ ID NO: 177427 - protein, 16 aa, Influenza A virus
LSAKEAQDVIMEVVFP

SEQ ID NO: 177428 - protein, 17 aa, Influenza A virus
LSAKEAQDVIMEVVFPN

SEQ ID NO: 177429 - protein, 18 aa, Influenza A virus
LSAKEAQDVIMEVVFPNE

SEQ ID NO: 177430 - protein, 19 aa, Influenza A virus
LSAKEAQDVIMEVVFPNEV

SEQ ID NO: 177431 - protein, 20 aa, Influenza A virus
LSAKEAQDVIMEVVFPNEVG

SEQ ID NO: 177432 - protein, 21 aa, Influenza A virus
LSAKEAQDVIMEVVFPNEVGA

SEQ ID NO: 177433 - protein, 22 aa, Influenza A virus
LSAKEAQDVIMEVVFPNEVGAR

SEQ ID NO: 177434 - protein, 23 aa, Influenza A virus
LSAKEAQDVIMEVVFPNEVGARI

SEQ ID NO: 177435 - protein, 24 aa, Influenza A virus
LSAKEAQDVIMEVVFPNEVGARIL

SEQ ID NO: 177436 - protein, 25 aa, Influenza A virus
LSAKEAQDVIMEVVFPNEVGARILT

SEQ ID NO: 177437 - protein, 14 aa, Influenza A virus
LSINELSNLAKGEK

SEQ ID NO: 177438 - protein, 15 aa, Influenza A virus
LSINELSNLAKGEKA

SEQ ID NO: 177439 - protein, 16 aa, Influenza A virus
LSINELSNLAKGEKAN

SEQ ID NO: 177440 - protein, 17 aa, Influenza A virus
LSINELSNLAKGEKANV

SEQ ID NO: 177441 - protein, 18 aa, Influenza A virus
LSINELSNLAKGEKANVL

SEQ ID NO: 177442 - protein, 19 aa, Influenza A virus
LSINELSNLAKGEKANVLI

SEQ ID NO: 177443 - protein, 20 aa, Influenza A virus
LSINELSNLAKGEKANVLIG

SEQ ID NO: 177444 - protein, 21 aa, Influenza A virus
LSINELSNLAKGEKANVLIGQ

SEQ ID NO: 177445 - protein, 22 aa, Influenza A virus
LSINELSNLAKGEKANVLIGQG

SEQ ID NO: 177446 - protein, 23 aa, Influenza A virus
LSINELSNLAKGEKANVLIGQGD

SEQ ID NO: 177447 - protein, 24 aa, Influenza A virus
LSINELSNLAKGEKANVLIGQGDV

SEQ ID NO: 177448 - protein, 25 aa, Influenza A virus
LSINELSNLAKGEKANVLIGQGDVV

SEQ ID NO: 177449 - protein, 15 aa, Influenza A virus
LSNLAKGEKANVLIG

SEQ ID NO: 177450 - protein, 16 aa, Influenza A virus
LSNLAKGEKANVLIGQ

SEQ ID NO: 177451 - protein, 20 aa, Influenza A virus
LSNLAKGEKANVLIGQGDVV

SEQ ID NO: 177452 - protein, 21 aa, Influenza A virus
LSNLAKGEKANVLIGQGDVVL

SEQ ID NO: 177453 - protein, 22 aa, Influenza A virus
LSNLAKGEKANVLIGQGDVVLV

SEQ ID NO: 177454 - protein, 23 aa, Influenza A virus
LSNLAKGEKANVLIGQGDVVLVM

SEQ ID NO: 177455 - protein, 24 aa, Influenza A virus
LSNLAKGEKANVLIGQGDVVLVMK

SEQ ID NO: 177456 - protein, 25 aa, Influenza A virus
LSNLAKGEKANVLIGQGDVVLVMKR

SEQ ID NO: 177457 - protein, 15 aa, Influenza A virus
LTDSQTATKRIRMAI

SEQ ID NO: 177458 - protein, 16 aa, Influenza A virus
LTDSQTATKRIRMAIN

SEQ ID NO: 177459 - protein, 13 aa, Influenza A virus
LTITYSSSMMWEI

SEQ ID NO: 177460 - protein, 14 aa, Influenza A virus
LTITYSSSMMWEIN

SEQ ID NO: 177461 - protein, 15 aa, Influenza A virus
LTITYSSSMMWEING

SEQ ID NO: 177462 - protein, 16 aa, Influenza A virus
LTITYSSSMMWEINGP

SEQ ID NO: 177463 - protein, 17 aa, Influenza A virus
LTITYSSSMMWEINGPE

SEQ ID NO: 177464 - protein, 18 aa, Influenza A virus
LTITYSSSMMWEINGPES

SEQ ID NO: 177465 - protein, 19 aa, Influenza A virus
LTITYSSSMMWEINGPESV

SEQ ID NO: 177466 - protein, 20 aa, Influenza A virus
LTITYSSSMMWEINGPESVL

SEQ ID NO: 177467 - protein, 21 aa, Influenza A virus
LTITYSSSMMWEINGPESVLV

SEQ ID NO: 177468 - protein, 22 aa, Influenza A virus
LTITYSSSMMWEINGPESVLVN

SEQ ID NO: 177469 - protein, 23 aa, Influenza A virus
LTITYSSSMMWEINGPESVLVNT

SEQ ID NO: 177470 - protein, 24 aa, Influenza A virus
LTITYSSSMMWEINGPESVLVNTY

SEQ ID NO: 177471 - protein, 25 aa, Influenza A virus
LTITYSSSMMWEINGPESVLVNTYQ

SEQ ID NO: 177472 - protein, 15 aa, Influenza A virus
LTKTTVDHMAIIKKY

SEQ ID NO: 177473 - protein, 16 aa, Influenza A virus
LTKTTVDHMAIIKKYT

SEQ ID NO: 177474 - protein, 17 aa, Influenza A virus
LTKTTVDHMAIIKKYTS

SEQ ID NO: 177475 - protein, 18 aa, Influenza A virus
LTKTTVDHMAIIKKYTSG

SEQ ID NO: 177476 - protein, 19 aa, Influenza A virus
LTKTTVDHMAIIKKYTSGR

SEQ ID NO: 177477 - protein, 20 aa, Influenza A virus
LTKTTVDHMAIIKKYTSGRQ

SEQ ID NO: 177478 - protein, 21 aa, Influenza A virus
LTKTTVDHMAIIKKYTSGRQE

SEQ ID NO: 177479 - protein, 22 aa, Influenza A virus
LTKTTVDHMAIIKKYTSGRQEK

SEQ ID NO: 177480 - protein, 23 aa, Influenza A virus
LTKTTVDHMAIIKKYTSGRQEKN

SEQ ID NO: 177481 - protein, 24 aa, Influenza A virus
LTKTTVDHMAIIKKYTSGRQEKNP

SEQ ID NO: 177482 - protein, 14 aa, Influenza A virus
LTVNVRGSGMRILV

SEQ ID NO: 177483 - protein, 15 aa, Influenza A virus
LTVNVRGSGMRILVR

SEQ ID NO: 177484 - protein, 16 aa, Influenza A virus
LTVNVRGSGMRILVRG

SEQ ID NO: 177485 - protein, 17 aa, Influenza A virus
LTVNVRGSGMRILVRGN

SEQ ID NO: 177486 - protein, 18 aa, Influenza A virus
LTVNVRGSGMRILVRGNS

SEQ ID NO: 177487 - protein, 19 aa, Influenza A virus
LTVNVRGSGMRILVRGNSP

SEQ ID NO: 177488 - protein, 14 aa, Influenza A virus
LVMKRKRDSSILTD

SEQ ID NO: 177489 - protein, 15 aa, Influenza A virus
LVMKRKRDSSILTDS

SEQ ID NO: 177490 - protein, 16 aa, Influenza A virus
LVMKRKRDSSILTDSQ

SEQ ID NO: 177491 - protein, 17 aa, Influenza A virus
LVMKRKRDSSILTDSQT

SEQ ID NO: 177492 - protein, 19 aa, Influenza A virus
LVMKRKRDSSILTDSQTAT

SEQ ID NO: 177493 - protein, 20 aa, Influenza A virus
LVMKRKRDSSILTDSQTATK

SEQ ID NO: 177494 - protein, 21 aa, Influenza A virus
LVMKRKRDSSILTDSQTATKR

SEQ ID NO: 177495 - protein, 22 aa, Influenza A virus
LVMKRKRDSSILTDSQTATKRI

SEQ ID NO: 177496 - protein, 23 aa, Influenza A virus
LVMKRKRDSSILTDSQTATKRIR

SEQ ID NO: 177497 - protein, 24 aa, Influenza A virus
LVMKRKRDSSILTDSQTATKRIRM

SEQ ID NO: 177498 - protein, 25 aa, Influenza A virus
LVMKRKRDSSILTDSQTATKRIRMA

SEQ ID NO: 177499 - protein, 14 aa, Influenza A virus
LVNTYQWIIRNWET

SEQ ID NO: 177500 - protein, 15 aa, Influenza A virus
LVNTYQWIIRNWETV

SEQ ID NO: 177501 - protein, 16 aa, Influenza A virus
LVNTYQWIIRNWETVK

SEQ ID NO: 177502 - protein, 17 aa, Influenza A virus
LVNTYQWIIRNWETVKI

SEQ ID NO: 177503 - protein, 18 aa, Influenza A virus
LVNTYQWIIRNWETVKIQ

SEQ ID NO: 177504 - protein, 19 aa, Influenza A virus
LVNTYQWIIRNWETVKIQW

SEQ ID NO: 177505 - protein, 20 aa, Influenza A virus
LVNTYQWIIRNWETVKIQWS

SEQ ID NO: 177506 - protein, 13 aa, Influenza A virus
LVRKTRFLPVAGG

SEQ ID NO: 177507 - protein, 14 aa, Influenza A virus
LVRKTRFLPVAGGT

SEQ ID NO: 177508 - protein, 15 aa, Influenza A virus
LVRKTRFLPVAGGTS

SEQ ID NO: 177509 - protein, 16 aa, Influenza A virus
LVRKTRFLPVAGGTSS

SEQ ID NO: 177510 - protein, 17 aa, Influenza A virus
LVRKTRFLPVAGGTSSV

SEQ ID NO: 177511 - protein, 18 aa, Influenza A virus
LVRKTRFLPVAGGTSSVY

SEQ ID NO: 177512 - protein, 19 aa, Influenza A virus
LVRKTRFLPVAGGTSSVYI

SEQ ID NO: 177513 - protein, 20 aa, Influenza A virus
LVRKTRFLPVAGGTSSVYIE

SEQ ID NO: 177514 - protein, 21 aa, Influenza A virus
LVRKTRFLPVAGGTSSVYIEV

SEQ ID NO: 177515 - protein, 22 aa, Influenza A virus
LVRKTRFLPVAGGTSSVYIEVL

SEQ ID NO: 177516 - protein, 23 aa, Influenza A virus
LVRKTRFLPVAGGTSSVYIEVLH

SEQ ID NO: 177517 - protein, 24 aa, Influenza A virus
LVRKTRFLPVAGGTSSVYIEVLHL

SEQ ID NO: 177518 - protein, 25 aa, Influenza A virus
LVRKTRFLPVAGGTSSVYIEVLHLT

SEQ ID NO: 177519 - protein, 13 aa, Influenza A virus
LYNKMEFEPFQSL

SEQ ID NO: 177520 - protein, 14 aa, Influenza A virus
LYNKMEFEPFQSLV

SEQ ID NO: 177521 - protein, 15 aa, Influenza A virus
LYNKMEFEPFQSLVP

SEQ ID NO: 177522 - protein, 16 aa, Influenza A virus
LYNKMEFEPFQSLVPK

SEQ ID NO: 177523 - protein, 17 aa, Influenza A virus
LYNKMEFEPFQSLVPKA

SEQ ID NO: 177524 - protein, 13 aa, Influenza A virus
MAIIKKYTSGRQE

SEQ ID NO: 177525 - protein, 14 aa, Influenza A virus
MAIIKKYTSGRQEK

SEQ ID NO: 177526 - protein, 15 aa, Influenza A virus
MAIIKKYTSGRQEKN

SEQ ID NO: 177527 - protein, 16 aa, Influenza A virus
MAIIKKYTSGRQEKNP

SEQ ID NO: 177528 - protein, 13 aa, Influenza A virus
MEFEPFQSLVPKA

SEQ ID NO: 177529 - protein, 14 aa, Influenza A virus
MEVVFPNEVGARIL

SEQ ID NO: 177530 - protein, 15 aa, Influenza A virus
MEVVFPNEVGARILT

SEQ ID NO: 177531 - protein, 16 aa, Influenza A virus
MEVVFPNEVGARILTS

SEQ ID NO: 177532 - protein, 17 aa, Influenza A virus
MEVVFPNEVGARILTSE

SEQ ID NO: 177533 - protein, 18 aa, Influenza A virus
MEVVFPNEVGARILTSES

SEQ ID NO: 177534 - protein, 19 aa, Influenza A virus
MEVVFPNEVGARILTSESQ

SEQ ID NO: 177535 - protein, 20 aa, Influenza A virus
MEVVFPNEVGARILTSESQL

SEQ ID NO: 177536 - protein, 21 aa, Influenza A virus
MEVVFPNEVGARILTSESQLT

SEQ ID NO: 177537 - protein, 22 aa, Influenza A virus
MEVVFPNEVGARILTSESQLTI

SEQ ID NO: 177538 - protein, 23 aa, Influenza A virus
MEVVFPNEVGARILTSESQLTIT

SEQ ID NO: 177539 - protein, 24 aa, Influenza A virus
MEVVFPNEVGARILTSESQLTITK

SEQ ID NO: 177540 - protein, 25 aa, Influenza A virus
MEVVFPNEVGARILTSESQLTITKE

SEQ ID NO: 177541 - protein, 13 aa, Influenza A virus
MGLRISSSFSFGG

SEQ ID NO: 177542 - protein, 14 aa, Influenza A virus
MGLRISSSFSFGGF

SEQ ID NO: 177543 - protein, 15 aa, Influenza A virus
MGLRISSSFSFGGFT

SEQ ID NO: 177544 - protein, 16 aa, Influenza A virus
MGLRISSSFSFGGFTF

SEQ ID NO: 177545 - protein, 17 aa, Influenza A virus
MGLRISSSFSFGGFTFK

SEQ ID NO: 177546 - protein, 18 aa, Influenza A virus
MGLRISSSFSFGGFTFKR

SEQ ID NO: 177547 - protein, 19 aa, Influenza A virus
MGLRISSSFSFGGFTFKRT

SEQ ID NO: 177548 - protein, 20 aa, Influenza A virus
MGLRISSSFSFGGFTFKRTS

SEQ ID NO: 177549 - protein, 21 aa, Influenza A virus
MGLRISSSFSFGGFTFKRTSG

SEQ ID NO: 177550 - protein, 22 aa, Influenza A virus
MGLRISSSFSFGGFTFKRTSGS

SEQ ID NO: 177551 - protein, 23 aa, Influenza A virus
MGLRISSSFSFGGFTFKRTSGSS

SEQ ID NO: 177552 - protein, 14 aa, Influenza A virus
MHQLLRHFQKDAKV

SEQ ID NO: 177553 - protein, 15 aa, Influenza A virus
MHQLLRHFQKDAKVL

SEQ ID NO: 177554 - protein, 16 aa, Influenza A virus
MHQLLRHFQKDAKVLF

SEQ ID NO: 177555 - protein, 17 aa, Influenza A virus
MHQLLRHFQKDAKVLFQ

SEQ ID NO: 177556 - protein, 18 aa, Influenza A virus
MHQLLRHFQKDAKVLFQN

SEQ ID NO: 177557 - protein, 19 aa, Influenza A virus
MHQLLRHFQKDAKVLFQNW

SEQ ID NO: 177558 - protein, 20 aa, Influenza A virus
MHQLLRHFQKDAKVLFQNWG

SEQ ID NO: 177559 - protein, 21 aa, Influenza A virus
MHQLLRHFQKDAKVLFQNWGI

SEQ ID NO: 177560 - protein, 22 aa, Influenza A virus
MHQLLRHFQKDAKVLFQNWGIE

SEQ ID NO: 177561 - protein, 14 aa, Influenza A virus
MIKAVRGDLNFVNR

SEQ ID NO: 177562 - protein, 15 aa, Influenza A virus
MIKAVRGDLNFVNRA

SEQ ID NO: 177563 - protein, 16 aa, Influenza A virus
MIKAVRGDLNFVNRAN

SEQ ID NO: 177564 - protein, 17 aa, Influenza A virus
MIKAVRGDLNFVNRANQ

SEQ ID NO: 177565 - protein, 18 aa, Influenza A virus
MIKAVRGDLNFVNRANQR

SEQ ID NO: 177566 - protein, 19 aa, Influenza A virus
MIKAVRGDLNFVNRANQRL

SEQ ID NO: 177567 - protein, 20 aa, Influenza A virus
MIKAVRGDLNFVNRANQRLN

SEQ ID NO: 177568 - protein, 21 aa, Influenza A virus
MIKAVRGDLNFVNRANQRLNP

SEQ ID NO: 177569 - protein, 22 aa, Influenza A virus
MIKAVRGDLNFVNRANQRLNPM

SEQ ID NO: 177570 - protein, 23 aa, Influenza A virus
MIKAVRGDLNFVNRANQRLNPMH

SEQ ID NO: 177571 - protein, 24 aa, Influenza A virus
MIKAVRGDLNFVNRANQRLNPMHQ

SEQ ID NO: 177572 - protein, 25 aa, Influenza A virus
MIKAVRGDLNFVNRANQRLNPMHQL

SEQ ID NO: 177573 - protein, 14 aa, Influenza A virus
MKRKRDSSILTDSQ

SEQ ID NO: 177574 - protein, 15 aa, Influenza A virus
MKRKRDSSILTDSQT

SEQ ID NO: 177575 - protein, 16 aa, Influenza A virus
MKRKRDSSILTDSQTA

SEQ ID NO: 177576 - protein, 17 aa, Influenza A virus
MKRKRDSSILTDSQTAT

SEQ ID NO: 177577 - protein, 19 aa, Influenza A virus
MKRKRDSSILTDSQTATKR

SEQ ID NO: 177578 - protein, 20 aa, Influenza A virus
MKRKRDSSILTDSQTATKRI

SEQ ID NO: 177579 - protein, 21 aa, Influenza A virus
MKRKRDSSILTDSQTATKRIR

SEQ ID NO: 177580 - protein, 22 aa, Influenza A virus
MKRKRDSSILTDSQTATKRIRM

SEQ ID NO: 177581 - protein, 23 aa, Influenza A virus
MKRKRDSSILTDSQTATKRIRMA

SEQ ID NO: 177582 - protein, 24 aa, Influenza A virus
MKRKRDSSILTDSQTATKRIRMAI

SEQ ID NO: 177583 - protein, 25 aa, Influenza A virus
MKRKRDSSILTDSQTATKRIRMAIN

SEQ ID NO: 177584 - protein, 13 aa, Influenza A virus
MKWMMAMKYPITA

SEQ ID NO: 177585 - protein, 14 aa, Influenza A virus
MKWMMAMKYPITAD

SEQ ID NO: 177586 - protein, 15 aa, Influenza A virus
MKWMMAMKYPITADK

SEQ ID NO: 177587 - protein, 16 aa, Influenza A virus
MKWMMAMKYPITADKR

SEQ ID NO: 177588 - protein, 17 aa, Influenza A virus
MKWMMAMKYPITADKRI

SEQ ID NO: 177589 - protein, 14 aa, Influenza A virus
MLERELVRKTRFLP

SEQ ID NO: 177590 - protein, 15 aa, Influenza A virus
MLERELVRKTRFLPV

SEQ ID NO: 177591 - protein, 16 aa, Influenza A virus
MLERELVRKTRFLPVA

SEQ ID NO: 177592 - protein, 17 aa, Influenza A virus
MLERELVRKTRFLPVAG

SEQ ID NO: 177593 - protein, 18 aa, Influenza A virus
MLERELVRKTRFLPVAGG

SEQ ID NO: 177594 - protein, 19 aa, Influenza A virus
MLERELVRKTRFLPVAGGT

SEQ ID NO: 177595 - protein, 20 aa, Influenza A virus
MLERELVRKTRFLPVAGGTS

SEQ ID NO: 177596 - protein, 21 aa, Influenza A virus
MLERELVRKTRFLPVAGGTSS

SEQ ID NO: 177597 - protein, 22 aa, Influenza A virus
MLERELVRKTRFLPVAGGTSSV

SEQ ID NO: 177598 - protein, 23 aa, Influenza A virus
MLERELVRKTRFLPVAGGTSSVY

SEQ ID NO: 177599 - protein, 24 aa, Influenza A virus
MLERELVRKTRFLPVAGGTSSVYI

SEQ ID NO: 177600 - protein, 25 aa, Influenza A virus
MLERELVRKTRFLPVAGGTSSVYIE

SEQ ID NO: 177601 - protein, 13 aa, Influenza A virus
MLYNKMEFEPFQS

SEQ ID NO: 177602 - protein, 14 aa, Influenza A virus
MLYNKMEFEPFQSL

SEQ ID NO: 177603 - protein, 15 aa, Influenza A virus
MLYNKMEFEPFQSLV

SEQ ID NO: 177604 - protein, 16 aa, Influenza A virus
MLYNKMEFEPFQSLVP

SEQ ID NO: 177605 - protein, 17 aa, Influenza A virus
MLYNKMEFEPFQSLVPK

SEQ ID NO: 177606 - protein, 18 aa, Influenza A virus
MLYNKMEFEPFQSLVPKA

SEQ ID NO: 177607 - protein, 14 aa, Influenza A virus
MMAMKYPITADKRI

SEQ ID NO: 177608 - protein, 13 aa, Influenza A virus
MMWEINGPESVLV

SEQ ID NO: 177609 - protein, 14 aa, Influenza A virus
MMWEINGPESVLVN

SEQ ID NO: 177610 - protein, 15 aa, Influenza A virus
MMWEINGPESVLVNT

SEQ ID NO: 177611 - protein, 16 aa, Influenza A virus
MMWEINGPESVLVNTY

SEQ ID NO: 177612 - protein, 17 aa, Influenza A virus
MMWEINGPESVLVNTYQ

SEQ ID NO: 177613 - protein, 19 aa, Influenza A virus
MMWEINGPESVLVNTYQWI

SEQ ID NO: 177614 - protein, 20 aa, Influenza A virus
MMWEINGPESVLVNTYQWII

SEQ ID NO: 177615 - protein, 21 aa, Influenza A virus
MMWEINGPESVLVNTYQWIIR

SEQ ID NO: 177616 - protein, 22 aa, Influenza A virus
MMWEINGPESVLVNTYQWIIRN

SEQ ID NO: 177617 - protein, 23 aa, Influenza A virus
MMWEINGPESVLVNTYQWIIRNW

SEQ ID NO: 177618 - protein, 24 aa, Influenza A virus
MMWEINGPESVLVNTYQWIIRNWE

SEQ ID NO: 177619 - protein, 13 aa, Influenza A virus
MQFSSLTVNVRGS

SEQ ID NO: 177620 - protein, 14 aa, Influenza A virus
MQFSSLTVNVRGSG

SEQ ID NO: 177621 - protein, 15 aa, Influenza A virus
MQFSSLTVNVRGSGM

SEQ ID NO: 177622 - protein, 16 aa, Influenza A virus
MQFSSLTVNVRGSGMR

SEQ ID NO: 177623 - protein, 17 aa, Influenza A virus
MQFSSLTVNVRGSGMRI

SEQ ID NO: 177624 - protein, 18 aa, Influenza A virus
MQFSSLTVNVRGSGMRIL

SEQ ID NO: 177625 - protein, 19 aa, Influenza A virus
MQFSSLTVNVRGSGMRILV

SEQ ID NO: 177626 - protein, 20 aa, Influenza A virus
MQFSSLTVNVRGSGMRILVR

SEQ ID NO: 177627 - protein, 21 aa, Influenza A virus
MQFSSLTVNVRGSGMRILVRG

SEQ ID NO: 177628 - protein, 22 aa, Influenza A virus
MQFSSLTVNVRGSGMRILVRGN

SEQ ID NO: 177629 - protein, 23 aa, Influenza A virus
MQFSSLTVNVRGSGMRILVRGNS

SEQ ID NO: 177630 - protein, 24 aa, Influenza A virus
MQFSSLTVNVRGSGMRILVRGNSP

SEQ ID NO: 177631 - protein, 13 aa, Influenza A virus
MRILVRGNSPVFN

SEQ ID NO: 177632 - protein, 14 aa, Influenza A virus
MRILVRGNSPVFNY

SEQ ID NO: 177633 - protein, 15 aa, Influenza A virus
MRILVRGNSPVFNYN

SEQ ID NO: 177634 - protein, 16 aa, Influenza A virus
MRILVRGNSPVFNYNK

SEQ ID NO: 177635 - protein, 20 aa, Influenza A virus
MSQSRTREILTKTTVDHMAI

SEQ ID NO: 177636 - protein, 21 aa, Influenza A virus
MSQSRTREILTKTTVDHMAII

SEQ ID NO: 177637 - protein, 22 aa, Influenza A virus
MSQSRTREILTKTTVDHMAIIK

SEQ ID NO: 177638 - protein, 23 aa, Influenza A virus
MSQSRTREILTKTTVDHMAIIKK

SEQ ID NO: 177639 - protein, 24 aa, Influenza A virus
MSQSRTREILTKTTVDHMAIIKKY

SEQ ID NO: 177640 - protein, 25 aa, Influenza A virus
MSQSRTREILTKTTVDHMAIIKKYT

SEQ ID NO: 177641 - protein, 13 aa, Influenza A virus
MVAYMLERELVRK

SEQ ID NO: 177642 - protein, 14 aa, Influenza A virus
MVAYMLERELVRKT

SEQ ID NO: 177643 - protein, 15 aa, Influenza A virus
MVAYMLERELVRKTR

SEQ ID NO: 177644 - protein, 16 aa, Influenza A virus
MVAYMLERELVRKTRF

SEQ ID NO: 177645 - protein, 17 aa, Influenza A virus
MVAYMLERELVRKTRFL

SEQ ID NO: 177646 - protein, 18 aa, Influenza A virus
MVAYMLERELVRKTRFLP

SEQ ID NO: 177647 - protein, 19 aa, Influenza A virus
MVAYMLERELVRKTRFLPV

SEQ ID NO: 177648 - protein, 20 aa, Influenza A virus
MVAYMLERELVRKTRFLPVA

SEQ ID NO: 177649 - protein, 21 aa, Influenza A virus
MVAYMLERELVRKTRFLPVAG

SEQ ID NO: 177650 - protein, 22 aa, Influenza A virus
MVAYMLERELVRKTRFLPVAGG

SEQ ID NO: 177651 - protein, 23 aa, Influenza A virus
MVAYMLERELVRKTRFLPVAGGT

SEQ ID NO: 177652 - protein, 24 aa, Influenza A virus
MVAYMLERELVRKTRFLPVAGGTS

SEQ ID NO: 177653 - protein, 25 aa, Influenza A virus
MVAYMLERELVRKTRFLPVAGGTSS

SEQ ID NO: 177654 - protein, 14 aa, Influenza A virus
MVFSQEDCMIKAVR

SEQ ID NO: 177655 - protein, 15 aa, Influenza A virus
MVFSQEDCMIKAVRG

SEQ ID NO: 177656 - protein, 16 aa, Influenza A virus
MVFSQEDCMIKAVRGD

SEQ ID NO: 177657 - protein, 17 aa, Influenza A virus
MVFSQEDCMIKAVRGDL

SEQ ID NO: 177658 - protein, 19 aa, Influenza A virus
MVFSQEDCMIKAVRGDLNF

SEQ ID NO: 177659 - protein, 20 aa, Influenza A virus
MVFSQEDCMIKAVRGDLNFV

SEQ ID NO: 177660 - protein, 21 aa, Influenza A virus
MVFSQEDCMIKAVRGDLNFVN

SEQ ID NO: 177661 - protein, 22 aa, Influenza A virus
MVFSQEDCMIKAVRGDLNFVNR

SEQ ID NO: 177662 - protein, 23 aa, Influenza A virus
MVFSQEDCMIKAVRGDLNFVNRA

SEQ ID NO: 177663 - protein, 24 aa, Influenza A virus
MVFSQEDCMIKAVRGDLNFVNRAN

SEQ ID NO: 177664 - protein, 25 aa, Influenza A virus
MVFSQEDCMIKAVRGDLNFVNRANQ

SEQ ID NO: 177665 - protein, 13 aa, Influenza A virus
MVSPLAVTWWNRN

SEQ ID NO: 177666 - protein, 14 aa, Influenza A virus
MVSPLAVTWWNRNG

SEQ ID NO: 177667 - protein, 15 aa, Influenza A virus
MVSPLAVTWWNRNGP

SEQ ID NO: 177668 - protein, 14 aa, Influenza A virus
MWEINGPESVLVNT

SEQ ID NO: 177669 - protein, 15 aa, Influenza A virus
MWEINGPESVLVNTY

SEQ ID NO: 177670 - protein, 16 aa, Influenza A virus
MWEINGPESVLVNTYQ

SEQ ID NO: 177671 - protein, 17 aa, Influenza A virus
MWEINGPESVLVNTYQW

SEQ ID NO: 177672 - protein, 18 aa, Influenza A virus
MWEINGPESVLVNTYQWI

SEQ ID NO: 177673 - protein, 19 aa, Influenza A virus
MWEINGPESVLVNTYQWII

SEQ ID NO: 177674 - protein, 20 aa, Influenza A virus
MWEINGPESVLVNTYQWIIR

SEQ ID NO: 177675 - protein, 21 aa, Influenza A virus
MWEINGPESVLVNTYQWIIRN

SEQ ID NO: 177676 - protein, 22 aa, Influenza A virus
MWEINGPESVLVNTYQWIIRNW

SEQ ID NO: 177677 - protein, 23 aa, Influenza A virus
MWEINGPESVLVNTYQWIIRNWE

SEQ ID NO: 177678 - protein, 14 aa, Influenza A virus
NDDVDQSLIIAARN

SEQ ID NO: 177679 - protein, 15 aa, Influenza A virus
NDDVDQSLIIAARNI

SEQ ID NO: 177680 - protein, 16 aa, Influenza A virus
NDDVDQSLIIAARNIV

SEQ ID NO: 177681 - protein, 17 aa, Influenza A virus
NDDVDQSLIIAARNIVR

SEQ ID NO: 177682 - protein, 18 aa, Influenza A virus
NDDVDQSLIIAARNIVRR

SEQ ID NO: 177683 - protein, 19 aa, Influenza A virus
NDDVDQSLIIAARNIVRRA

SEQ ID NO: 177684 - protein, 15 aa, Influenza A virus
NELSNLAKGEKANVL

SEQ ID NO: 177685 - protein, 16 aa, Influenza A virus
NELSNLAKGEKANVLI

SEQ ID NO: 177686 - protein, 17 aa, Influenza A virus
NELSNLAKGEKANVLIG

SEQ ID NO: 177687 - protein, 20 aa, Influenza A virus
NELSNLAKGEKANVLIGQGD

SEQ ID NO: 177688 - protein, 23 aa, Influenza A virus
NELSNLAKGEKANVLIGQGDVVL

SEQ ID NO: 177689 - protein, 24 aa, Influenza A virus
NELSNLAKGEKANVLIGQGDVVLV

SEQ ID NO: 177690 - protein, 25 aa, Influenza A virus
NELSNLAKGEKANVLIGQGDVVLVM

SEQ ID NO: 177691 - protein, 13 aa, Influenza A virus
NEVGARILTSESQ

SEQ ID NO: 177692 - protein, 14 aa, Influenza A virus
NEVGARILTSESQL

SEQ ID NO: 177693 - protein, 15 aa, Influenza A virus
NEVGARILTSESQLT

SEQ ID NO: 177694 - protein, 16 aa, Influenza A virus
NEVGARILTSESQLTI

SEQ ID NO: 177695 - protein, 17 aa, Influenza A virus
NEVGARILTSESQLTIT

SEQ ID NO: 177696 - protein, 18 aa, Influenza A virus
NEVGARILTSESQLTITK

SEQ ID NO: 177697 - protein, 19 aa, Influenza A virus
NEVGARILTSESQLTITKE

SEQ ID NO: 177698 - protein, 20 aa, Influenza A virus
NEVGARILTSESQLTITKEK

SEQ ID NO: 177699 - protein, 21 aa, Influenza A virus
NEVGARILTSESQLTITKEKK

SEQ ID NO: 177700 - protein, 22 aa, Influenza A virus
NEVGARILTSESQLTITKEKKE

SEQ ID NO: 177701 - protein, 23 aa, Influenza A virus
NEVGARILTSESQLTITKEKKEE

SEQ ID NO: 177702 - protein, 24 aa, Influenza A virus
NEVGARILTSESQLTITKEKKEEL

SEQ ID NO: 177703 - protein, 15 aa, Influenza A virus
NFVNRANQRLNPMHQ

SEQ ID NO: 177704 - protein, 17 aa, Influenza A virus
NFVNRANQRLNPMHQLL

SEQ ID NO: 177705 - protein, 19 aa, Influenza A virus
NFVNRANQRLNPMHQLLRH

SEQ ID NO: 177706 - protein, 20 aa, Influenza A virus
NFVNRANQRLNPMHQLLRHF

SEQ ID NO: 177707 - protein, 21 aa, Influenza A virus
NFVNRANQRLNPMHQLLRHFQ

SEQ ID NO: 177708 - protein, 22 aa, Influenza A virus
NFVNRANQRLNPMHQLLRHFQK

SEQ ID NO: 177709 - protein, 23 aa, Influenza A virus
NFVNRANQRLNPMHQLLRHFQKD

SEQ ID NO: 177710 - protein, 24 aa, Influenza A virus
NFVNRANQRLNPMHQLLRHFQKDA

SEQ ID NO: 177711 - protein, 25 aa, Influenza A virus
NFVNRANQRLNPMHQLLRHFQKDAK

SEQ ID NO: 177712 - protein, 14 aa, Influenza A virus
NGPESVLVNTYQWI

SEQ ID NO: 177713 - protein, 15 aa, Influenza A virus
NGPESVLVNTYQWII

SEQ ID NO: 177714 - protein, 16 aa, Influenza A virus
NGPESVLVNTYQWIIR

SEQ ID NO: 177715 - protein, 17 aa, Influenza A virus
NGPESVLVNTYQWIIRN

SEQ ID NO: 177716 - protein, 18 aa, Influenza A virus
NGPESVLVNTYQWIIRNW

SEQ ID NO: 177717 - protein, 19 aa, Influenza A virus
NGPESVLVNTYQWIIRNWE

SEQ ID NO: 177718 - protein, 13 aa, Influenza A virus
NKMEFEPFQSLVP

SEQ ID NO: 177719 - protein, 14 aa, Influenza A virus
NKMEFEPFQSLVPK

SEQ ID NO: 177720 - protein, 15 aa, Influenza A virus
NKMEFEPFQSLVPKA

SEQ ID NO: 177721 - protein, 19 aa, Influenza A virus
NLAKGEKANVLIGQGDVVL

SEQ ID NO: 177722 - protein, 20 aa, Influenza A virus
NLAKGEKANVLIGQGDVVLV

SEQ ID NO: 177723 - protein, 21 aa, Influenza A virus
NLAKGEKANVLIGQGDVVLVM

SEQ ID NO: 177724 - protein, 22 aa, Influenza A virus
NLAKGEKANVLIGQGDVVLVMK

SEQ ID NO: 177725 - protein, 23 aa, Influenza A virus
NLAKGEKANVLIGQGDVVLVMKR

SEQ ID NO: 177726 - protein, 24 aa, Influenza A virus
NLAKGEKANVLIGQGDVVLVMKRK

SEQ ID NO: 177727 - protein, 25 aa, Influenza A virus
NLAKGEKANVLIGQGDVVLVMKRKR

SEQ ID NO: 177728 - protein, 19 aa, Influenza A virus
NPGHADLSAKEAQDVIMEV

SEQ ID NO: 177729 - protein, 20 aa, Influenza A virus
NPGHADLSAKEAQDVIMEVV

SEQ ID NO: 177730 - protein, 21 aa, Influenza A virus
NPGHADLSAKEAQDVIMEVVF

SEQ ID NO: 177731 - protein, 22 aa, Influenza A virus
NPGHADLSAKEAQDVIMEVVFP

SEQ ID NO: 177732 - protein, 23 aa, Influenza A virus
NPGHADLSAKEAQDVIMEVVFPN

SEQ ID NO: 177733 - protein, 24 aa, Influenza A virus
NPGHADLSAKEAQDVIMEVVFPNE

SEQ ID NO: 177734 - protein, 25 aa, Influenza A virus
NPGHADLSAKEAQDVIMEVVFPNEV

SEQ ID NO: 177735 - protein, 13 aa, Influenza A virus
NPMHQLLRHFQKD

SEQ ID NO: 177736 - protein, 14 aa, Influenza A virus
NPMHQLLRHFQKDA

SEQ ID NO: 177737 - protein, 15 aa, Influenza A virus
NPMHQLLRHFQKDAK

SEQ ID NO: 177738 - protein, 16 aa, Influenza A virus
NPMHQLLRHFQKDAKV

SEQ ID NO: 177739 - protein, 17 aa, Influenza A virus
NPMHQLLRHFQKDAKVL

SEQ ID NO: 177740 - protein, 18 aa, Influenza A virus
NPMHQLLRHFQKDAKVLF

SEQ ID NO: 177741 - protein, 19 aa, Influenza A virus
NPMHQLLRHFQKDAKVLFQ

SEQ ID NO: 177742 - protein, 20 aa, Influenza A virus
NPMHQLLRHFQKDAKVLFQN

SEQ ID NO: 177743 - protein, 21 aa, Influenza A virus
NPMHQLLRHFQKDAKVLFQNW

SEQ ID NO: 177744 - protein, 22 aa, Influenza A virus
NPMHQLLRHFQKDAKVLFQNWG

SEQ ID NO: 177745 - protein, 23 aa, Influenza A virus
NPMHQLLRHFQKDAKVLFQNWGI

SEQ ID NO: 177746 - protein, 24 aa, Influenza A virus
NPMHQLLRHFQKDAKVLFQNWGIE

SEQ ID NO: 177747 - protein, 16 aa, Influenza A virus
NPTEEQAVDICKAAMG

SEQ ID NO: 177748 - protein, 17 aa, Influenza A virus
NPTEEQAVDICKAAMGL

SEQ ID NO: 177749 - protein, 19 aa, Influenza A virus
NPTEEQAVDICKAAMGLRI

SEQ ID NO: 177750 - protein, 20 aa, Influenza A virus
NPTEEQAVDICKAAMGLRIS

SEQ ID NO: 177751 - protein, 21 aa, Influenza A virus
NPTEEQAVDICKAAMGLRISS

SEQ ID NO: 177752 - protein, 22 aa, Influenza A virus
NPTEEQAVDICKAAMGLRISSS

SEQ ID NO: 177753 - protein, 23 aa, Influenza A virus
NPTEEQAVDICKAAMGLRISSSF

SEQ ID NO: 177754 - protein, 24 aa, Influenza A virus
NPTEEQAVDICKAAMGLRISSSFS

SEQ ID NO: 177755 - protein, 25 aa, Influenza A virus
NPTEEQAVDICKAAMGLRISSSFSF

SEQ ID NO: 177756 - protein, 14 aa, Influenza A virus
NQRLNPMHQLLRHF

SEQ ID NO: 177757 - protein, 15 aa, Influenza A virus
NQRLNPMHQLLRHFQ

SEQ ID NO: 177758 - protein, 16 aa, Influenza A virus
NQRLNPMHQLLRHFQK

SEQ ID NO: 177759 - protein, 17 aa, Influenza A virus
NQRLNPMHQLLRHFQKD

SEQ ID NO: 177760 - protein, 18 aa, Influenza A virus
NQRLNPMHQLLRHFQKDA

SEQ ID NO: 177761 - protein, 19 aa, Influenza A virus
NQRLNPMHQLLRHFQKDAK

SEQ ID NO: 177762 - protein, 20 aa, Influenza A virus
NQRLNPMHQLLRHFQKDAKV

SEQ ID NO: 177763 - protein, 21 aa, Influenza A virus
NQRLNPMHQLLRHFQKDAKVL

SEQ ID NO: 177764 - protein, 22 aa, Influenza A virus
NQRLNPMHQLLRHFQKDAKVLF

SEQ ID NO: 177765 - protein, 23 aa, Influenza A virus
NQRLNPMHQLLRHFQKDAKVLFQ

SEQ ID NO: 177766 - protein, 24 aa, Influenza A virus
NQRLNPMHQLLRHFQKDAKVLFQN

SEQ ID NO: 177767 - protein, 25 aa, Influenza A virus
NQRLNPMHQLLRHFQKDAKVLFQNW

SEQ ID NO: 177768 - protein, 14 aa, Influenza A virus
NQVKIRRRVDINPG

SEQ ID NO: 177769 - protein, 15 aa, Influenza A virus
NQVKIRRRVDINPGH

SEQ ID NO: 177770 - protein, 16 aa, Influenza A virus
NQVKIRRRVDINPGHA

SEQ ID NO: 177771 - protein, 17 aa, Influenza A virus
NQVKIRRRVDINPGHAD

SEQ ID NO: 177772 - protein, 19 aa, Influenza A virus
NQVKIRRRVDINPGHADLS

SEQ ID NO: 177773 - protein, 20 aa, Influenza A virus
NQVKIRRRVDINPGHADLSA

SEQ ID NO: 177774 - protein, 21 aa, Influenza A virus
NQVKIRRRVDINPGHADLSAK

SEQ ID NO: 177775 - protein, 22 aa, Influenza A virus
NQVKIRRRVDINPGHADLSAKE

SEQ ID NO: 177776 - protein, 23 aa, Influenza A virus
NQVKIRRRVDINPGHADLSAKEA

SEQ ID NO: 177777 - protein, 24 aa, Influenza A virus
NQVKIRRRVDINPGHADLSAKEAQ

SEQ ID NO: 177778 - protein, 25 aa, Influenza A virus
NQVKIRRRVDINPGHADLSAKEAQD

SEQ ID NO: 177779 - protein, 15 aa, Influenza A virus
NRANQRLNPMHQLLR

SEQ ID NO: 177780 - protein, 16 aa, Influenza A virus
NRANQRLNPMHQLLRH

SEQ ID NO: 177781 - protein, 17 aa, Influenza A virus
NRANQRLNPMHQLLRHF

SEQ ID NO: 177782 - protein, 18 aa, Influenza A virus
NRANQRLNPMHQLLRHFQ

SEQ ID NO: 177783 - protein, 19 aa, Influenza A virus
NRANQRLNPMHQLLRHFQK

SEQ ID NO: 177784 - protein, 20 aa, Influenza A virus
NRANQRLNPMHQLLRHFQKD

SEQ ID NO: 177785 - protein, 21 aa, Influenza A virus
NRANQRLNPMHQLLRHFQKDA

SEQ ID NO: 177786 - protein, 22 aa, Influenza A virus
NRANQRLNPMHQLLRHFQKDAK

SEQ ID NO: 177787 - protein, 23 aa, Influenza A virus
NRANQRLNPMHQLLRHFQKDAKV

SEQ ID NO: 177788 - protein, 24 aa, Influenza A virus
NRANQRLNPMHQLLRHFQKDAKVL

SEQ ID NO: 177789 - protein, 25 aa, Influenza A virus
NRANQRLNPMHQLLRHFQKDAKVLF

SEQ ID NO: 177790 - protein, 13 aa, Influenza A virus
NTYQWIIRNWETV

SEQ ID NO: 177791 - protein, 14 aa, Influenza A virus
NTYQWIIRNWETVK

SEQ ID NO: 177792 - protein, 15 aa, Influenza A virus
NTYQWIIRNWETVKI

SEQ ID NO: 177793 - protein, 16 aa, Influenza A virus
NTYQWIIRNWETVKIQ

SEQ ID NO: 177794 - protein, 17 aa, Influenza A virus
NTYQWIIRNWETVKIQW

SEQ ID NO: 177795 - protein, 18 aa, Influenza A virus
NTYQWIIRNWETVKIQWS

SEQ ID NO: 177796 - protein, 19 aa, Influenza A virus
NTYQWIIRNWETVKIQWSQ

SEQ ID NO: 177797 - protein, 13 aa, Influenza A virus
NVLIGQGDVVLVM

SEQ ID NO: 177798 - protein, 14 aa, Influenza A virus
NVLIGQGDVVLVMK

SEQ ID NO: 177799 - protein, 15 aa, Influenza A virus
NVLIGQGDVVLVMKR

SEQ ID NO: 177800 - protein, 16 aa, Influenza A virus
NVLIGQGDVVLVMKRK

SEQ ID NO: 177801 - protein, 17 aa, Influenza A virus
NVLIGQGDVVLVMKRKR

SEQ ID NO: 177802 - protein, 18 aa, Influenza A virus
NVLIGQGDVVLVMKRKRD

SEQ ID NO: 177803 - protein, 19 aa, Influenza A virus
NVLIGQGDVVLVMKRKRDS

SEQ ID NO: 177804 - protein, 20 aa, Influenza A virus
NVLIGQGDVVLVMKRKRDSS

SEQ ID NO: 177805 - protein, 21 aa, Influenza A virus
NVLIGQGDVVLVMKRKRDSSI

SEQ ID NO: 177806 - protein, 22 aa, Influenza A virus
NVLIGQGDVVLVMKRKRDSSIL

SEQ ID NO: 177807 - protein, 23 aa, Influenza A virus
NVLIGQGDVVLVMKRKRDSSILT

SEQ ID NO: 177808 - protein, 24 aa, Influenza A virus
NVLIGQGDVVLVMKRKRDSSILTD

SEQ ID NO: 177809 - protein, 25 aa, Influenza A virus
NVLIGQGDVVLVMKRKRDSSILTDS

SEQ ID NO: 177810 - protein, 13 aa, Influenza A virus
NVRGSGMRILVRG

SEQ ID NO: 177811 - protein, 14 aa, Influenza A virus
NVRGSGMRILVRGN

SEQ ID NO: 177812 - protein, 15 aa, Influenza A virus
NVRGSGMRILVRGNS

SEQ ID NO: 177813 - protein, 16 aa, Influenza A virus
NVRGSGMRILVRGNSP

SEQ ID NO: 177814 - protein, 17 aa, Influenza A virus
NVRGSGMRILVRGNSPV

SEQ ID NO: 177815 - protein, 18 aa, Influenza A virus
NVRGSGMRILVRGNSPVF

SEQ ID NO: 177816 - protein, 19 aa, Influenza A virus
NVRGSGMRILVRGNSPVFN

SEQ ID NO: 177817 - protein, 20 aa, Influenza A virus
NVRGSGMRILVRGNSPVFNY

SEQ ID NO: 177818 - protein, 21 aa, Influenza A virus
NVRGSGMRILVRGNSPVFNYN

SEQ ID NO: 177819 - protein, 22 aa, Influenza A virus
NVRGSGMRILVRGNSPVFNYNK

SEQ ID NO: 177820 - protein, 13 aa, Influenza A virus
PALSINELSNLAK

SEQ ID NO: 177821 - protein, 14 aa, Influenza A virus
PALSINELSNLAKG

SEQ ID NO: 177822 - protein, 15 aa, Influenza A virus
PALSINELSNLAKGE

SEQ ID NO: 177823 - protein, 16 aa, Influenza A virus
PALSINELSNLAKGEK

SEQ ID NO: 177824 - protein, 17 aa, Influenza A virus
PALSINELSNLAKGEKA

SEQ ID NO: 177825 - protein, 18 aa, Influenza A virus
PALSINELSNLAKGEKAN

SEQ ID NO: 177826 - protein, 19 aa, Influenza A virus
PALSINELSNLAKGEKANV

SEQ ID NO: 177827 - protein, 20 aa, Influenza A virus
PALSINELSNLAKGEKANVL

SEQ ID NO: 177828 - protein, 21 aa, Influenza A virus
PALSINELSNLAKGEKANVLI

SEQ ID NO: 177829 - protein, 22 aa, Influenza A virus
PALSINELSNLAKGEKANVLIG

SEQ ID NO: 177830 - protein, 23 aa, Influenza A virus
PALSINELSNLAKGEKANVLIGQ

SEQ ID NO: 177831 - protein, 24 aa, Influenza A virus
PALSINELSNLAKGEKANVLIGQG

SEQ ID NO: 177832 - protein, 25 aa, Influenza A virus
PALSINELSNLAKGEKANVLIGQGD

SEQ ID NO: 177833 - protein, 13 aa, Influenza A virus
PESVLVNTYQWII

SEQ ID NO: 177834 - protein, 14 aa, Influenza A virus
PESVLVNTYQWIIR

SEQ ID NO: 177835 - protein, 15 aa, Influenza A virus
PESVLVNTYQWIIRN

SEQ ID NO: 177836 - protein, 16 aa, Influenza A virus
PESVLVNTYQWIIRNW

SEQ ID NO: 177837 - protein, 17 aa, Influenza A virus
PESVLVNTYQWIIRNWE

SEQ ID NO: 177838 - protein, 19 aa, Influenza A virus
PGHADLSAKEAQDVIMEVV

SEQ ID NO: 177839 - protein, 20 aa, Influenza A virus
PGHADLSAKEAQDVIMEVVF

SEQ ID NO: 177840 - protein, 21 aa, Influenza A virus
PGHADLSAKEAQDVIMEVVFP

SEQ ID NO: 177841 - protein, 22 aa, Influenza A virus
PGHADLSAKEAQDVIMEVVFPN

SEQ ID NO: 177842 - protein, 23 aa, Influenza A virus
PGHADLSAKEAQDVIMEVVFPNE

SEQ ID NO: 177843 - protein, 24 aa, Influenza A virus
PGHADLSAKEAQDVIMEVVFPNEV

SEQ ID NO: 177844 - protein, 25 aa, Influenza A virus
PGHADLSAKEAQDVIMEVVFPNEVG

SEQ ID NO: 177845 - protein, 14 aa, Influenza A virus
PLASLLEMCHSTQI

SEQ ID NO: 177846 - protein, 15 aa, Influenza A virus
PLASLLEMCHSTQIG

SEQ ID NO: 177847 - protein, 16 aa, Influenza A virus
PLASLLEMCHSTQIGG

SEQ ID NO: 177848 - protein, 13 aa, Influenza A virus
PLMVAYMLERELV

SEQ ID NO: 177849 - protein, 14 aa, Influenza A virus
PLMVAYMLERELVR

SEQ ID NO: 177850 - protein, 15 aa, Influenza A virus
PLMVAYMLERELVRK

SEQ ID NO: 177851 - protein, 16 aa, Influenza A virus
PLMVAYMLERELVRKT

SEQ ID NO: 177852 - protein, 17 aa, Influenza A virus
PLMVAYMLERELVRKTR

SEQ ID NO: 177853 - protein, 18 aa, Influenza A virus
PLMVAYMLERELVRKTRF

SEQ ID NO: 177854 - protein, 19 aa, Influenza A virus
PLMVAYMLERELVRKTRFL

SEQ ID NO: 177855 - protein, 20 aa, Influenza A virus
PLMVAYMLERELVRKTRFLP

SEQ ID NO: 177856 - protein, 21 aa, Influenza A virus
PLMVAYMLERELVRKTRFLPV

SEQ ID NO: 177857 - protein, 22 aa, Influenza A virus
PLMVAYMLERELVRKTRFLPVA

SEQ ID NO: 177858 - protein, 23 aa, Influenza A virus
PLMVAYMLERELVRKTRFLPVAG

SEQ ID NO: 177859 - protein, 24 aa, Influenza A virus
PLMVAYMLERELVRKTRFLPVAGG

SEQ ID NO: 177860 - protein, 25 aa, Influenza A virus
PLMVAYMLERELVRKTRFLPVAGGT

SEQ ID NO: 177861 - protein, 13 aa, Influenza A virus
PMHQLLRHFQKDA

SEQ ID NO: 177862 - protein, 14 aa, Influenza A virus
PMHQLLRHFQKDAK

SEQ ID NO: 177863 - protein, 15 aa, Influenza A virus
PMHQLLRHFQKDAKV

SEQ ID NO: 177864 - protein, 16 aa, Influenza A virus
PMHQLLRHFQKDAKVL

SEQ ID NO: 177865 - protein, 17 aa, Influenza A virus
PMHQLLRHFQKDAKVLF

SEQ ID NO: 177866 - protein, 18 aa, Influenza A virus
PMHQLLRHFQKDAKVLFQ

SEQ ID NO: 177867 - protein, 19 aa, Influenza A virus
PMHQLLRHFQKDAKVLFQN

SEQ ID NO: 177868 - protein, 20 aa, Influenza A virus
PMHQLLRHFQKDAKVLFQNW

SEQ ID NO: 177869 - protein, 21 aa, Influenza A virus
PMHQLLRHFQKDAKVLFQNWG

SEQ ID NO: 177870 - protein, 22 aa, Influenza A virus
PMHQLLRHFQKDAKVLFQNWGI

SEQ ID NO: 177871 - protein, 23 aa, Influenza A virus
PMHQLLRHFQKDAKVLFQNWGIE

SEQ ID NO: 177872 - protein, 13 aa, Influenza A virus
PNEVGARILTSES

SEQ ID NO: 177873 - protein, 14 aa, Influenza A virus
PNEVGARILTSESQ

SEQ ID NO: 177874 - protein, 15 aa, Influenza A virus
PNEVGARILTSESQL

SEQ ID NO: 177875 - protein, 16 aa, Influenza A virus
PNEVGARILTSESQLT

SEQ ID NO: 177876 - protein, 17 aa, Influenza A virus
PNEVGARILTSESQLTI

SEQ ID NO: 177877 - protein, 18 aa, Influenza A virus
PNEVGARILTSESQLTIT

SEQ ID NO: 177878 - protein, 19 aa, Influenza A virus
PNEVGARILTSESQLTITK

SEQ ID NO: 177879 - protein, 20 aa, Influenza A virus
PNEVGARILTSESQLTITKE

SEQ ID NO: 177880 - protein, 21 aa, Influenza A virus
PNEVGARILTSESQLTITKEK

SEQ ID NO: 177881 - protein, 22 aa, Influenza A virus
PNEVGARILTSESQLTITKEKK

SEQ ID NO: 177882 - protein, 23 aa, Influenza A virus
PNEVGARILTSESQLTITKEKKE

SEQ ID NO: 177883 - protein, 24 aa, Influenza A virus
PNEVGARILTSESQLTITKEKKEE

SEQ ID NO: 177884 - protein, 25 aa, Influenza A virus
PNEVGARILTSESQLTITKEKKEEL

SEQ ID NO: 177885 - protein, 15 aa, Influenza A virus
PTEEQAVDICKAAMG

SEQ ID NO: 177886 - protein, 16 aa, Influenza A virus
PTEEQAVDICKAAMGL

SEQ ID NO: 177887 - protein, 17 aa, Influenza A virus
PTEEQAVDICKAAMGLR

SEQ ID NO: 177888 - protein, 18 aa, Influenza A virus
PTEEQAVDICKAAMGLRI

SEQ ID NO: 177889 - protein, 19 aa, Influenza A virus
PTEEQAVDICKAAMGLRIS

SEQ ID NO: 177890 - protein, 20 aa, Influenza A virus
PTEEQAVDICKAAMGLRISS

SEQ ID NO: 177891 - protein, 21 aa, Influenza A virus
PTEEQAVDICKAAMGLRISSS

SEQ ID NO: 177892 - protein, 22 aa, Influenza A virus
PTEEQAVDICKAAMGLRISSSF

SEQ ID NO: 177893 - protein, 23 aa, Influenza A virus
PTEEQAVDICKAAMGLRISSSFS

SEQ ID NO: 177894 - protein, 24 aa, Influenza A virus
PTEEQAVDICKAAMGLRISSSFSF

SEQ ID NO: 177895 - protein, 25 aa, Influenza A virus
PTEEQAVDICKAAMGLRISSSFSFG

SEQ ID NO: 177896 - protein, 13 aa, Influenza A virus
PTMLYNKMEFEPF

SEQ ID NO: 177897 - protein, 14 aa, Influenza A virus
PTMLYNKMEFEPFQ

SEQ ID NO: 177898 - protein, 15 aa, Influenza A virus
PTMLYNKMEFEPFQS

SEQ ID NO: 177899 - protein, 16 aa, Influenza A virus
PTMLYNKMEFEPFQSL

SEQ ID NO: 177900 - protein, 17 aa, Influenza A virus
PTMLYNKMEFEPFQSLV

SEQ ID NO: 177901 - protein, 18 aa, Influenza A virus
PTMLYNKMEFEPFQSLVP

SEQ ID NO: 177902 - protein, 19 aa, Influenza A virus
PTMLYNKMEFEPFQSLVPK

SEQ ID NO: 177903 - protein, 20 aa, Influenza A virus
PTMLYNKMEFEPFQSLVPKA

SEQ ID NO: 177904 - protein, 13 aa, Influenza A virus
PVAGGTSSVYIEV

SEQ ID NO: 177905 - protein, 14 aa, Influenza A virus
PVAGGTSSVYIEVL

SEQ ID NO: 177906 - protein, 15 aa, Influenza A virus
PVAGGTSSVYIEVLH

SEQ ID NO: 177907 - protein, 16 aa, Influenza A virus
PVAGGTSSVYIEVLHL

SEQ ID NO: 177908 - protein, 17 aa, Influenza A virus
PVAGGTSSVYIEVLHLT

SEQ ID NO: 177909 - protein, 18 aa, Influenza A virus
PVAGGTSSVYIEVLHLTQ

SEQ ID NO: 177910 - protein, 19 aa, Influenza A virus
PVAGGTSSVYIEVLHLTQG

SEQ ID NO: 177911 - protein, 20 aa, Influenza A virus
PVAGGTSSVYIEVLHLTQGT

SEQ ID NO: 177912 - protein, 21 aa, Influenza A virus
PVAGGTSSVYIEVLHLTQGTC

SEQ ID NO: 177913 - protein, 22 aa, Influenza A virus
PVAGGTSSVYIEVLHLTQGTCW

SEQ ID NO: 177914 - protein, 23 aa, Influenza A virus
PVAGGTSSVYIEVLHLTQGTCWE

SEQ ID NO: 177915 - protein, 24 aa, Influenza A virus
PVAGGTSSVYIEVLHLTQGTCWEQ

SEQ ID NO: 177916 - protein, 25 aa, Influenza A virus
PVAGGTSSVYIEVLHLTQGTCWEQM

SEQ ID NO: 177917 - protein, 13 aa, Influenza A virus
PVHFRNQVKIRRR

SEQ ID NO: 177918 - protein, 14 aa, Influenza A virus
PVHFRNQVKIRRRV

SEQ ID NO: 177919 - protein, 15 aa, Influenza A virus
PVHFRNQVKIRRRVD

SEQ ID NO: 177920 - protein, 16 aa, Influenza A virus
PVHFRNQVKIRRRVDI

SEQ ID NO: 177921 - protein, 17 aa, Influenza A virus
PVHFRNQVKIRRRVDIN

SEQ ID NO: 177922 - protein, 18 aa, Influenza A virus
PVHFRNQVKIRRRVDINP

SEQ ID NO: 177923 - protein, 19 aa, Influenza A virus
PVHFRNQVKIRRRVDINPG

SEQ ID NO: 177924 - protein, 20 aa, Influenza A virus
PVHFRNQVKIRRRVDINPGH

SEQ ID NO: 177925 - protein, 21 aa, Influenza A virus
PVHFRNQVKIRRRVDINPGHA

SEQ ID NO: 177926 - protein, 22 aa, Influenza A virus
PVHFRNQVKIRRRVDINPGHAD

SEQ ID NO: 177927 - protein, 23 aa, Influenza A virus
PVHFRNQVKIRRRVDINPGHADL

SEQ ID NO: 177928 - protein, 24 aa, Influenza A virus
PVHFRNQVKIRRRVDINPGHADLS

SEQ ID NO: 177929 - protein, 25 aa, Influenza A virus
PVHFRNQVKIRRRVDINPGHADLSA

SEQ ID NO: 177930 - protein, 14 aa, Influenza A virus
QAVDICKAAMGLRI

SEQ ID NO: 177931 - protein, 15 aa, Influenza A virus
QAVDICKAAMGLRIS

SEQ ID NO: 177932 - protein, 16 aa, Influenza A virus
QAVDICKAAMGLRISS

SEQ ID NO: 177933 - protein, 17 aa, Influenza A virus
QAVDICKAAMGLRISSS

SEQ ID NO: 177934 - protein, 18 aa, Influenza A virus
QAVDICKAAMGLRISSSF

SEQ ID NO: 177935 - protein, 19 aa, Influenza A virus
QAVDICKAAMGLRISSSFS

SEQ ID NO: 177936 - protein, 20 aa, Influenza A virus
QAVDICKAAMGLRISSSFSF

SEQ ID NO: 177937 - protein, 21 aa, Influenza A virus
QAVDICKAAMGLRISSSFSFG

SEQ ID NO: 177938 - protein, 22 aa, Influenza A virus
QAVDICKAAMGLRISSSFSFGG

SEQ ID NO: 177939 - protein, 23 aa, Influenza A virus
QAVDICKAAMGLRISSSFSFGGF

SEQ ID NO: 177940 - protein, 24 aa, Influenza A virus
QAVDICKAAMGLRISSSFSFGGFT

SEQ ID NO: 177941 - protein, 25 aa, Influenza A virus
QAVDICKAAMGLRISSSFSFGGFTF

SEQ ID NO: 177942 - protein, 13 aa, Influenza A virus
QDVIMEVVFPNEV

SEQ ID NO: 177943 - protein, 14 aa, Influenza A virus
QDVIMEVVFPNEVG

SEQ ID NO: 177944 - protein, 15 aa, Influenza A virus
QDVIMEVVFPNEVGA

SEQ ID NO: 177945 - protein, 16 aa, Influenza A virus
QDVIMEVVFPNEVGAR

SEQ ID NO: 177946 - protein, 17 aa, Influenza A virus
QDVIMEVVFPNEVGARI

SEQ ID NO: 177947 - protein, 18 aa, Influenza A virus
QDVIMEVVFPNEVGARIL

SEQ ID NO: 177948 - protein, 19 aa, Influenza A virus
QDVIMEVVFPNEVGARILT

SEQ ID NO: 177949 - protein, 20 aa, Influenza A virus
QDVIMEVVFPNEVGARILTS

SEQ ID NO: 177950 - protein, 21 aa, Influenza A virus
QDVIMEVVFPNEVGARILTSE

SEQ ID NO: 177951 - protein, 22 aa, Influenza A virus
QDVIMEVVFPNEVGARILTSES

SEQ ID NO: 177952 - protein, 23 aa, Influenza A virus
QDVIMEVVFPNEVGARILTSESQ

SEQ ID NO: 177953 - protein, 24 aa, Influenza A virus
QDVIMEVVFPNEVGARILTSESQL

SEQ ID NO: 177954 - protein, 25 aa, Influenza A virus
QDVIMEVVFPNEVGARILTSESQLT

SEQ ID NO: 177955 - protein, 15 aa, Influenza A virus
QEDCMIKAVRGDLNF

SEQ ID NO: 177956 - protein, 16 aa, Influenza A virus
QEDCMIKAVRGDLNFV

SEQ ID NO: 177957 - protein, 17 aa, Influenza A virus
QEDCMIKAVRGDLNFVN

SEQ ID NO: 177958 - protein, 19 aa, Influenza A virus
QEDCMIKAVRGDLNFVNRA

SEQ ID NO: 177959 - protein, 20 aa, Influenza A virus
QEDCMIKAVRGDLNFVNRAN

SEQ ID NO: 177960 - protein, 21 aa, Influenza A virus
QEDCMIKAVRGDLNFVNRANQ

SEQ ID NO: 177961 - protein, 22 aa, Influenza A virus
QEDCMIKAVRGDLNFVNRANQR

SEQ ID NO: 177962 - protein, 23 aa, Influenza A virus
QEDCMIKAVRGDLNFVNRANQRL

SEQ ID NO: 177963 - protein, 24 aa, Influenza A virus
QEDCMIKAVRGDLNFVNRANQRLN

SEQ ID NO: 177964 - protein, 25 aa, Influenza A virus
QEDCMIKAVRGDLNFVNRANQRLNP

SEQ ID NO: 177965 - protein, 13 aa, Influenza A virus
QFSSLTVNVRGSG

SEQ ID NO: 177966 - protein, 14 aa, Influenza A virus
QFSSLTVNVRGSGM

SEQ ID NO: 177967 - protein, 15 aa, Influenza A virus
QFSSLTVNVRGSGMR

SEQ ID NO: 177968 - protein, 16 aa, Influenza A virus
QFSSLTVNVRGSGMRI

SEQ ID NO: 177969 - protein, 17 aa, Influenza A virus
QFSSLTVNVRGSGMRIL

SEQ ID NO: 177970 - protein, 18 aa, Influenza A virus
QFSSLTVNVRGSGMRILV

SEQ ID NO: 177971 - protein, 19 aa, Influenza A virus
QFSSLTVNVRGSGMRILVR

SEQ ID NO: 177972 - protein, 20 aa, Influenza A virus
QFSSLTVNVRGSGMRILVRG

SEQ ID NO: 177973 - protein, 21 aa, Influenza A virus
QFSSLTVNVRGSGMRILVRGN

SEQ ID NO: 177974 - protein, 22 aa, Influenza A virus
QFSSLTVNVRGSGMRILVRGNS

SEQ ID NO: 177975 - protein, 23 aa, Influenza A virus
QFSSLTVNVRGSGMRILVRGNSP

SEQ ID NO: 177976 - protein, 13 aa, Influenza A virus
QGDVVLVMKRKRD

SEQ ID NO: 177977 - protein, 14 aa, Influenza A virus
QGDVVLVMKRKRDS

SEQ ID NO: 177978 - protein, 15 aa, Influenza A virus
QGDVVLVMKRKRDSS

SEQ ID NO: 177979 - protein, 16 aa, Influenza A virus
QGDVVLVMKRKRDSSI

SEQ ID NO: 177980 - protein, 17 aa, Influenza A virus
QGDVVLVMKRKRDSSIL

SEQ ID NO: 177981 - protein, 18 aa, Influenza A virus
QGDVVLVMKRKRDSSILT

SEQ ID NO: 177982 - protein, 19 aa, Influenza A virus
QGDVVLVMKRKRDSSILTD

SEQ ID NO: 177983 - protein, 20 aa, Influenza A virus
QGDVVLVMKRKRDSSILTDS

SEQ ID NO: 177984 - protein, 21 aa, Influenza A virus
QGDVVLVMKRKRDSSILTDSQ

SEQ ID NO: 177985 - protein, 22 aa, Influenza A virus
QGDVVLVMKRKRDSSILTDSQT

SEQ ID NO: 177986 - protein, 23 aa, Influenza A virus
QGDVVLVMKRKRDSSILTDSQTA

SEQ ID NO: 177987 - protein, 24 aa, Influenza A virus
QGDVVLVMKRKRDSSILTDSQTAT

SEQ ID NO: 177988 - protein, 25 aa, Influenza A virus
QGDVVLVMKRKRDSSILTDSQTATK

SEQ ID NO: 177989 - protein, 13 aa, Influenza A virus
QIIKLLPFAAAPP

SEQ ID NO: 177990 - protein, 14 aa, Influenza A virus
QKDAKVLFQNWGIE

SEQ ID NO: 177991 - protein, 15 aa, Influenza A virus
QLIVSGRDEQSIAEA

SEQ ID NO: 177992 - protein, 16 aa, Influenza A virus
QLIVSGRDEQSIAEAI

SEQ ID NO: 177993 - protein, 19 aa, Influenza A virus
QLIVSGRDEQSIAEAIIVA

SEQ ID NO: 177994 - protein, 13 aa, Influenza A virus
QLLRHFQKDAKVL

SEQ ID NO: 177995 - protein, 14 aa, Influenza A virus
QLLRHFQKDAKVLF

SEQ ID NO: 177996 - protein, 15 aa, Influenza A virus
QLLRHFQKDAKVLFQ

SEQ ID NO: 177997 - protein, 16 aa, Influenza A virus
QLLRHFQKDAKVLFQN

SEQ ID NO: 177998 - protein, 17 aa, Influenza A virus
QLLRHFQKDAKVLFQNW

SEQ ID NO: 177999 - protein, 18 aa, Influenza A virus
QLLRHFQKDAKVLFQNWG

SEQ ID NO: 178000 - protein, 19 aa, Influenza A virus
QLLRHFQKDAKVLFQNWGI

SEQ ID NO: 178001 - protein, 20 aa, Influenza A virus
QLLRHFQKDAKVLFQNWGIE

SEQ ID NO: 178002 - protein, 17 aa, Influenza A virus
QNPTEEQAVDICKAAMG

SEQ ID NO: 178003 - protein, 20 aa, Influenza A virus
QNPTEEQAVDICKAAMGLRI

SEQ ID NO: 178004 - protein, 21 aa, Influenza A virus
QNPTEEQAVDICKAAMGLRIS

SEQ ID NO: 178005 - protein, 22 aa, Influenza A virus
QNPTEEQAVDICKAAMGLRISS

SEQ ID NO: 178006 - protein, 23 aa, Influenza A virus
QNPTEEQAVDICKAAMGLRISSS

SEQ ID NO: 178007 - protein, 24 aa, Influenza A virus
QNPTEEQAVDICKAAMGLRISSSF

SEQ ID NO: 178008 - protein, 25 aa, Influenza A virus
QNPTEEQAVDICKAAMGLRISSSFS

SEQ ID NO: 178009 - protein, 15 aa, Influenza A virus
QRGNVLLSPEEVSET

SEQ ID NO: 178010 - protein, 16 aa, Influenza A virus
QRGNVLLSPEEVSETQ

SEQ ID NO: 178011 - protein, 19 aa, Influenza A virus
QRGNVLLSPEEVSETQGTE

SEQ ID NO: 178012 - protein, 14 aa, Influenza A virus
QRLNPMHQLLRHFQ

SEQ ID NO: 178013 - protein, 15 aa, Influenza A virus
QRLNPMHQLLRHFQK

SEQ ID NO: 178014 - protein, 16 aa, Influenza A virus
QRLNPMHQLLRHFQKD

SEQ ID NO: 178015 - protein, 17 aa, Influenza A virus
QRLNPMHQLLRHFQKDA

SEQ ID NO: 178016 - protein, 18 aa, Influenza A virus
QRLNPMHQLLRHFQKDAK

SEQ ID NO: 178017 - protein, 19 aa, Influenza A virus
QRLNPMHQLLRHFQKDAKV

SEQ ID NO: 178018 - protein, 20 aa, Influenza A virus
QRLNPMHQLLRHFQKDAKVL

SEQ ID NO: 178019 - protein, 21 aa, Influenza A virus
QRLNPMHQLLRHFQKDAKVLF

SEQ ID NO: 178020 - protein, 22 aa, Influenza A virus
QRLNPMHQLLRHFQKDAKVLFQ

SEQ ID NO: 178021 - protein, 23 aa, Influenza A virus
QRLNPMHQLLRHFQKDAKVLFQN

SEQ ID NO: 178022 - protein, 24 aa, Influenza A virus
QRLNPMHQLLRHFQKDAKVLFQNW

SEQ ID NO: 178023 - protein, 25 aa, Influenza A virus
QRLNPMHQLLRHFQKDAKVLFQNWG

SEQ ID NO: 178024 - protein, 13 aa, Influenza A virus
QSIAEAIIVAMVF

SEQ ID NO: 178025 - protein, 14 aa, Influenza A virus
QSIAEAIIVAMVFS

SEQ ID NO: 178026 - protein, 15 aa, Influenza A virus
QSIAEAIIVAMVFSQ

SEQ ID NO: 178027 - protein, 16 aa, Influenza A virus
QSIAEAIIVAMVFSQE

SEQ ID NO: 178028 - protein, 17 aa, Influenza A virus
QSIAEAIIVAMVFSQED

SEQ ID NO: 178029 - protein, 18 aa, Influenza A virus
QSIAEAIIVAMVFSQEDC

SEQ ID NO: 178030 - protein, 13 aa, Influenza A virus
QSLIIAARNIVRR

SEQ ID NO: 178031 - protein, 14 aa, Influenza A virus
QSLIIAARNIVRRA

SEQ ID NO: 178032 - protein, 13 aa, Influenza A virus
QSRMQFSSLTVNV

SEQ ID NO: 178033 - protein, 14 aa, Influenza A virus
QSRMQFSSLTVNVR

SEQ ID NO: 178034 - protein, 15 aa, Influenza A virus
QSRMQFSSLTVNVRG

SEQ ID NO: 178035 - protein, 16 aa, Influenza A virus
QSRMQFSSLTVNVRGS

SEQ ID NO: 178036 - protein, 17 aa, Influenza A virus
QSRMQFSSLTVNVRGSG

SEQ ID NO: 178037 - protein, 18 aa, Influenza A virus
QSRMQFSSLTVNVRGSGM

SEQ ID NO: 178038 - protein, 19 aa, Influenza A virus
QSRMQFSSLTVNVRGSGMR

SEQ ID NO: 178039 - protein, 20 aa, Influenza A virus
QSRMQFSSLTVNVRGSGMRI

SEQ ID NO: 178040 - protein, 21 aa, Influenza A virus
QSRMQFSSLTVNVRGSGMRIL

SEQ ID NO: 178041 - protein, 22 aa, Influenza A virus
QSRMQFSSLTVNVRGSGMRILV

SEQ ID NO: 178042 - protein, 23 aa, Influenza A virus
QSRMQFSSLTVNVRGSGMRILVR

SEQ ID NO: 178043 - protein, 24 aa, Influenza A virus
QSRMQFSSLTVNVRGSGMRILVRG

SEQ ID NO: 178044 - protein, 25 aa, Influenza A virus
QSRMQFSSLTVNVRGSGMRILVRGN

SEQ ID NO: 178045 - protein, 17 aa, Influenza A virus
QSRTREILTKTTVDHMA

SEQ ID NO: 178046 - protein, 19 aa, Influenza A virus
QSRTREILTKTTVDHMAII

SEQ ID NO: 178047 - protein, 20 aa, Influenza A virus
QSRTREILTKTTVDHMAIIK

SEQ ID NO: 178048 - protein, 21 aa, Influenza A virus
QSRTREILTKTTVDHMAIIKK

SEQ ID NO: 178049 - protein, 22 aa, Influenza A virus
QSRTREILTKTTVDHMAIIKKY

SEQ ID NO: 178050 - protein, 23 aa, Influenza A virus
QSRTREILTKTTVDHMAIIKKYT

SEQ ID NO: 178051 - protein, 24 aa, Influenza A virus
QSRTREILTKTTVDHMAIIKKYTS

SEQ ID NO: 178052 - protein, 25 aa, Influenza A virus
QSRTREILTKTTVDHMAIIKKYTSG

SEQ ID NO: 178053 - protein, 15 aa, Influenza A virus
QVKIRRRVDINPGHA

SEQ ID NO: 178054 - protein, 16 aa, Influenza A virus
QVKIRRRVDINPGHAD

SEQ ID NO: 178055 - protein, 17 aa, Influenza A virus
QVKIRRRVDINPGHADL

SEQ ID NO: 178056 - protein, 19 aa, Influenza A virus
QVKIRRRVDINPGHADLSA

SEQ ID NO: 178057 - protein, 20 aa, Influenza A virus
QVKIRRRVDINPGHADLSAK

SEQ ID NO: 178058 - protein, 21 aa, Influenza A virus
QVKIRRRVDINPGHADLSAKE

SEQ ID NO: 178059 - protein, 22 aa, Influenza A virus
QVKIRRRVDINPGHADLSAKEA

SEQ ID NO: 178060 - protein, 23 aa, Influenza A virus
QVKIRRRVDINPGHADLSAKEAQ

SEQ ID NO: 178061 - protein, 24 aa, Influenza A virus
QVKIRRRVDINPGHADLSAKEAQD

SEQ ID NO: 178062 - protein, 25 aa, Influenza A virus
QVKIRRRVDINPGHADLSAKEAQDV

SEQ ID NO: 178063 - protein, 13 aa, Influenza A virus
QWIIRNWETVKIQ

SEQ ID NO: 178064 - protein, 14 aa, Influenza A virus
QWIIRNWETVKIQW

SEQ ID NO: 178065 - protein, 15 aa, Influenza A virus
QWIIRNWETVKIQWS

SEQ ID NO: 178066 - protein, 16 aa, Influenza A virus
QWIIRNWETVKIQWSQ

SEQ ID NO: 178067 - protein, 13 aa, Influenza A virus
QYSGFVRTLFQQM

SEQ ID NO: 178068 - protein, 14 aa, Influenza A virus
QYSGFVRTLFQQMR

SEQ ID NO: 178069 - protein, 15 aa, Influenza A virus
QYSGFVRTLFQQMRD

SEQ ID NO: 178070 - protein, 16 aa, Influenza A virus
QYSGFVRTLFQQMRDV

SEQ ID NO: 178071 - protein, 17 aa, Influenza A virus
QYSGFVRTLFQQMRDVL

SEQ ID NO: 178072 - protein, 18 aa, Influenza A virus
QYSGFVRTLFQQMRDVLG

SEQ ID NO: 178073 - protein, 19 aa, Influenza A virus
QYSGFVRTLFQQMRDVLGT

SEQ ID NO: 178074 - protein, 20 aa, Influenza A virus
QYSGFVRTLFQQMRDVLGTF

SEQ ID NO: 178075 - protein, 21 aa, Influenza A virus
QYSGFVRTLFQQMRDVLGTFD

SEQ ID NO: 178076 - protein, 22 aa, Influenza A virus
QYSGFVRTLFQQMRDVLGTFDT

SEQ ID NO: 178077 - protein, 14 aa, Influenza A virus
RANQRLNPMHQLLR

SEQ ID NO: 178078 - protein, 15 aa, Influenza A virus
RANQRLNPMHQLLRH

SEQ ID NO: 178079 - protein, 16 aa, Influenza A virus
RANQRLNPMHQLLRHF

SEQ ID NO: 178080 - protein, 17 aa, Influenza A virus
RANQRLNPMHQLLRHFQ

SEQ ID NO: 178081 - protein, 18 aa, Influenza A virus
RANQRLNPMHQLLRHFQK

SEQ ID NO: 178082 - protein, 19 aa, Influenza A virus
RANQRLNPMHQLLRHFQKD

SEQ ID NO: 178083 - protein, 20 aa, Influenza A virus
RANQRLNPMHQLLRHFQKDA

SEQ ID NO: 178084 - protein, 21 aa, Influenza A virus
RANQRLNPMHQLLRHFQKDAK

SEQ ID NO: 178085 - protein, 22 aa, Influenza A virus
RANQRLNPMHQLLRHFQKDAKV

SEQ ID NO: 178086 - protein, 23 aa, Influenza A virus
RANQRLNPMHQLLRHFQKDAKVL

SEQ ID NO: 178087 - protein, 24 aa, Influenza A virus
RANQRLNPMHQLLRHFQKDAKVLF

SEQ ID NO: 178088 - protein, 25 aa, Influenza A virus
RANQRLNPMHQLLRHFQKDAKVLFQ

SEQ ID NO: 178089 - protein, 13 aa, Influenza A virus
RATAILRKATRRL

SEQ ID NO: 178090 - protein, 15 aa, Influenza A virus
RDQRGNVLLSPEEVS

SEQ ID NO: 178091 - protein, 16 aa, Influenza A virus
RDQRGNVLLSPEEVSE

SEQ ID NO: 178092 - protein, 17 aa, Influenza A virus
RDQRGNVLLSPEEVSET

SEQ ID NO: 178093 - protein, 19 aa, Influenza A virus
RDQRGNVLLSPEEVSETQG

SEQ ID NO: 178094 - protein, 20 aa, Influenza A virus
RDQRGNVLLSPEEVSETQGT

SEQ ID NO: 178095 - protein, 21 aa, Influenza A virus
RDQRGNVLLSPEEVSETQGTE

SEQ ID NO: 178096 - protein, 15 aa, Influenza A virus
RDSSILTDSQTATKR

SEQ ID NO: 178097 - protein, 16 aa, Influenza A virus
RDSSILTDSQTATKRI

SEQ ID NO: 178098 - protein, 17 aa, Influenza A virus
RDSSILTDSQTATKRIR

SEQ ID NO: 178099 - protein, 19 aa, Influenza A virus
RDSSILTDSQTATKRIRMA

SEQ ID NO: 178100 - protein, 20 aa, Influenza A virus
RDSSILTDSQTATKRIRMAI

SEQ ID NO: 178101 - protein, 21 aa, Influenza A virus
RDSSILTDSQTATKRIRMAIN

SEQ ID NO: 178102 - protein, 15 aa, Influenza A virus
REILTKTTVDHMAII

SEQ ID NO: 178103 - protein, 16 aa, Influenza A virus
REILTKTTVDHMAIIK

SEQ ID NO: 178104 - protein, 17 aa, Influenza A virus
REILTKTTVDHMAIIKK

SEQ ID NO: 178105 - protein, 18 aa, Influenza A virus
REILTKTTVDHMAIIKKY

SEQ ID NO: 178106 - protein, 19 aa, Influenza A virus
REILTKTTVDHMAIIKKYT

SEQ ID NO: 178107 - protein, 20 aa, Influenza A virus
REILTKTTVDHMAIIKKYTS

SEQ ID NO: 178108 - protein, 21 aa, Influenza A virus
REILTKTTVDHMAIIKKYTSG

SEQ ID NO: 178109 - protein, 22 aa, Influenza A virus
REILTKTTVDHMAIIKKYTSGR

SEQ ID NO: 178110 - protein, 23 aa, Influenza A virus
REILTKTTVDHMAIIKKYTSGRQ

SEQ ID NO: 178111 - protein, 24 aa, Influenza A virus
REILTKTTVDHMAIIKKYTSGRQE

SEQ ID NO: 178112 - protein, 25 aa, Influenza A virus
REILTKTTVDHMAIIKKYTSGRQEK

SEQ ID NO: 178113 - protein, 13 aa, Influenza A virus
RELVRKTRFLPVA

SEQ ID NO: 178114 - protein, 14 aa, Influenza A virus
RELVRKTRFLPVAG

SEQ ID NO: 178115 - protein, 15 aa, Influenza A virus
RELVRKTRFLPVAGG

SEQ ID NO: 178116 - protein, 16 aa, Influenza A virus
RELVRKTRFLPVAGGT

SEQ ID NO: 178117 - protein, 17 aa, Influenza A virus
RELVRKTRFLPVAGGTS

SEQ ID NO: 178118 - protein, 18 aa, Influenza A virus
RELVRKTRFLPVAGGTSS

SEQ ID NO: 178119 - protein, 19 aa, Influenza A virus
RELVRKTRFLPVAGGTSSV

SEQ ID NO: 178120 - protein, 20 aa, Influenza A virus
RELVRKTRFLPVAGGTSSVY

SEQ ID NO: 178121 - protein, 21 aa, Influenza A virus
RELVRKTRFLPVAGGTSSVYI

SEQ ID NO: 178122 - protein, 22 aa, Influenza A virus
RELVRKTRFLPVAGGTSSVYIE

SEQ ID NO: 178123 - protein, 23 aa, Influenza A virus
RELVRKTRFLPVAGGTSSVYIEV

SEQ ID NO: 178124 - protein, 24 aa, Influenza A virus
RELVRKTRFLPVAGGTSSVYIEVL

SEQ ID NO: 178125 - protein, 25 aa, Influenza A virus
RELVRKTRFLPVAGGTSSVYIEVLH

SEQ ID NO: 178126 - protein, 13 aa, Influenza A virus
RFLPVAGGTSSVY

SEQ ID NO: 178127 - protein, 14 aa, Influenza A virus
RFLPVAGGTSSVYI

SEQ ID NO: 178128 - protein, 15 aa, Influenza A virus
RFLPVAGGTSSVYIE

SEQ ID NO: 178129 - protein, 16 aa, Influenza A virus
RFLPVAGGTSSVYIEV

SEQ ID NO: 178130 - protein, 17 aa, Influenza A virus
RFLPVAGGTSSVYIEVL

SEQ ID NO: 178131 - protein, 18 aa, Influenza A virus
RFLPVAGGTSSVYIEVLH

SEQ ID NO: 178132 - protein, 19 aa, Influenza A virus
RFLPVAGGTSSVYIEVLHL

SEQ ID NO: 178133 - protein, 20 aa, Influenza A virus
RFLPVAGGTSSVYIEVLHLT

SEQ ID NO: 178134 - protein, 21 aa, Influenza A virus
RFLPVAGGTSSVYIEVLHLTQ

SEQ ID NO: 178135 - protein, 22 aa, Influenza A virus
RFLPVAGGTSSVYIEVLHLTQG

SEQ ID NO: 178136 - protein, 23 aa, Influenza A virus
RFLPVAGGTSSVYIEVLHLTQGT

SEQ ID NO: 178137 - protein, 24 aa, Influenza A virus
RFLPVAGGTSSVYIEVLHLTQGTC

SEQ ID NO: 178138 - protein, 25 aa, Influenza A virus
RFLPVAGGTSSVYIEVLHLTQGTCW

SEQ ID NO: 178139 - protein, 13 aa, Influenza A virus
RFLRVRDQRGNVL

SEQ ID NO: 178140 - protein, 14 aa, Influenza A virus
RFLRVRDQRGNVLL

SEQ ID NO: 178141 - protein, 15 aa, Influenza A virus
RFLRVRDQRGNVLLS

SEQ ID NO: 178142 - protein, 16 aa, Influenza A virus
RFLRVRDQRGNVLLSP

SEQ ID NO: 178143 - protein, 17 aa, Influenza A virus
RFLRVRDQRGNVLLSPE

SEQ ID NO: 178144 - protein, 18 aa, Influenza A virus
RFLRVRDQRGNVLLSPEE

SEQ ID NO: 178145 - protein, 19 aa, Influenza A virus
RFLRVRDQRGNVLLSPEEV

SEQ ID NO: 178146 - protein, 20 aa, Influenza A virus
RFLRVRDQRGNVLLSPEEVS

SEQ ID NO: 178147 - protein, 21 aa, Influenza A virus
RFLRVRDQRGNVLLSPEEVSE

SEQ ID NO: 178148 - protein, 22 aa, Influenza A virus
RFLRVRDQRGNVLLSPEEVSET

SEQ ID NO: 178149 - protein, 14 aa, Influenza A virus
RGDLNFVNRANQRL

SEQ ID NO: 178150 - protein, 15 aa, Influenza A virus
RGDLNFVNRANQRLN

SEQ ID NO: 178151 - protein, 16 aa, Influenza A virus
RGDLNFVNRANQRLNP

SEQ ID NO: 178152 - protein, 17 aa, Influenza A virus
RGDLNFVNRANQRLNPM

SEQ ID NO: 178153 - protein, 18 aa, Influenza A virus
RGDLNFVNRANQRLNPMH

SEQ ID NO: 178154 - protein, 19 aa, Influenza A virus
RGDLNFVNRANQRLNPMHQ

SEQ ID NO: 178155 - protein, 20 aa, Influenza A virus
RGDLNFVNRANQRLNPMHQL

SEQ ID NO: 178156 - protein, 21 aa, Influenza A virus
RGDLNFVNRANQRLNPMHQLL

SEQ ID NO: 178157 - protein, 22 aa, Influenza A virus
RGDLNFVNRANQRLNPMHQLLR

SEQ ID NO: 178158 - protein, 23 aa, Influenza A virus
RGDLNFVNRANQRLNPMHQLLRH

SEQ ID NO: 178159 - protein, 24 aa, Influenza A virus
RGDLNFVNRANQRLNPMHQLLRHF

SEQ ID NO: 178160 - protein, 25 aa, Influenza A virus
RGDLNFVNRANQRLNPMHQLLRHFQ

SEQ ID NO: 178161 - protein, 15 aa, Influenza A virus
RGNVLLSPEEVSETQ

SEQ ID NO: 178162 - protein, 14 aa, Influenza A virus
RGQYSGFVRTLFQQ

SEQ ID NO: 178163 - protein, 15 aa, Influenza A virus
RGQYSGFVRTLFQQM

SEQ ID NO: 178164 - protein, 16 aa, Influenza A virus
RGQYSGFVRTLFQQMR

SEQ ID NO: 178165 - protein, 17 aa, Influenza A virus
RGQYSGFVRTLFQQMRD

SEQ ID NO: 178166 - protein, 18 aa, Influenza A virus
RGQYSGFVRTLFQQMRDV

SEQ ID NO: 178167 - protein, 19 aa, Influenza A virus
RGQYSGFVRTLFQQMRDVL

SEQ ID NO: 178168 - protein, 20 aa, Influenza A virus
RGQYSGFVRTLFQQMRDVLG

SEQ ID NO: 178169 - protein, 21 aa, Influenza A virus
RGQYSGFVRTLFQQMRDVLGT

SEQ ID NO: 178170 - protein, 22 aa, Influenza A virus
RGQYSGFVRTLFQQMRDVLGTF

SEQ ID NO: 178171 - protein, 23 aa, Influenza A virus
RGQYSGFVRTLFQQMRDVLGTFD

SEQ ID NO: 178172 - protein, 24 aa, Influenza A virus
RGQYSGFVRTLFQQMRDVLGTFDT

SEQ ID NO: 178173 - protein, 13 aa, Influenza A virus
RGSGMRILVRGNS

SEQ ID NO: 178174 - protein, 14 aa, Influenza A virus
RGSGMRILVRGNSP

SEQ ID NO: 178175 - protein, 15 aa, Influenza A virus
RGSGMRILVRGNSPV

SEQ ID NO: 178176 - protein, 16 aa, Influenza A virus
RGSGMRILVRGNSPVF

SEQ ID NO: 178177 - protein, 17 aa, Influenza A virus
RGSGMRILVRGNSPVFN

SEQ ID NO: 178178 - protein, 18 aa, Influenza A virus
RGSGMRILVRGNSPVFNY

SEQ ID NO: 178179 - protein, 19 aa, Influenza A virus
RGSGMRILVRGNSPVFNYN

SEQ ID NO: 178180 - protein, 20 aa, Influenza A virus
RGSGMRILVRGNSPVFNYNK

SEQ ID NO: 178181 - protein, 13 aa, Influenza A virus
RHFQKDAKVLFQN

SEQ ID NO: 178182 - protein, 14 aa, Influenza A virus
RHFQKDAKVLFQNW

SEQ ID NO: 178183 - protein, 15 aa, Influenza A virus
RHFQKDAKVLFQNWG

SEQ ID NO: 178184 - protein, 16 aa, Influenza A virus
RHFQKDAKVLFQNWGI

SEQ ID NO: 178185 - protein, 17 aa, Influenza A virus
RHFQKDAKVLFQNWGIE

SEQ ID NO: 178186 - protein, 13 aa, Influenza A virus
RILTSESQLTITK

SEQ ID NO: 178187 - protein, 14 aa, Influenza A virus
RILTSESQLTITKE

SEQ ID NO: 178188 - protein, 15 aa, Influenza A virus
RILTSESQLTITKEK

SEQ ID NO: 178189 - protein, 16 aa, Influenza A virus
RILTSESQLTITKEKK

SEQ ID NO: 178190 - protein, 17 aa, Influenza A virus
RILTSESQLTITKEKKE

SEQ ID NO: 178191 - protein, 19 aa, Influenza A virus
RILTSESQLTITKEKKEEL

SEQ ID NO: 178192 - protein, 13 aa, Influenza A virus
RILVRGNSPVFNY

SEQ ID NO: 178193 - protein, 14 aa, Influenza A virus
RILVRGNSPVFNYN

SEQ ID NO: 178194 - protein, 15 aa, Influenza A virus
RILVRGNSPVFNYNK

SEQ ID NO: 178195 - protein, 14 aa, Influenza A virus
RISSSFSFGGFTFK

SEQ ID NO: 178196 - protein, 15 aa, Influenza A virus
RISSSFSFGGFTFKR

SEQ ID NO: 178197 - protein, 16 aa, Influenza A virus
RISSSFSFGGFTFKRT

SEQ ID NO: 178198 - protein, 17 aa, Influenza A virus
RISSSFSFGGFTFKRTS

SEQ ID NO: 178199 - protein, 18 aa, Influenza A virus
RISSSFSFGGFTFKRTSG

SEQ ID NO: 178200 - protein, 19 aa, Influenza A virus
RISSSFSFGGFTFKRTSGS

SEQ ID NO: 178201 - protein, 20 aa, Influenza A virus
RISSSFSFGGFTFKRTSGSS

SEQ ID NO: 178202 - protein, 17 aa, Influenza A virus
RKRDSSILTDSQTATKR

SEQ ID NO: 178203 - protein, 19 aa, Influenza A virus
RKRDSSILTDSQTATKRIR

SEQ ID NO: 178204 - protein, 20 aa, Influenza A virus
RKRDSSILTDSQTATKRIRM

SEQ ID NO: 178205 - protein, 21 aa, Influenza A virus
RKRDSSILTDSQTATKRIRMA

SEQ ID NO: 178206 - protein, 22 aa, Influenza A virus
RKRDSSILTDSQTATKRIRMAI

SEQ ID NO: 178207 - protein, 23 aa, Influenza A virus
RKRDSSILTDSQTATKRIRMAIN

SEQ ID NO: 178208 - protein, 13 aa, Influenza A virus
RKTRFLPVAGGTS

SEQ ID NO: 178209 - protein, 14 aa, Influenza A virus
RKTRFLPVAGGTSS

SEQ ID NO: 178210 - protein, 15 aa, Influenza A virus
RKTRFLPVAGGTSSV

SEQ ID NO: 178211 - protein, 16 aa, Influenza A virus
RKTRFLPVAGGTSSVY

SEQ ID NO: 178212 - protein, 17 aa, Influenza A virus
RKTRFLPVAGGTSSVYI

SEQ ID NO: 178213 - protein, 18 aa, Influenza A virus
RKTRFLPVAGGTSSVYIE

SEQ ID NO: 178214 - protein, 19 aa, Influenza A virus
RKTRFLPVAGGTSSVYIEV

SEQ ID NO: 178215 - protein, 20 aa, Influenza A virus
RKTRFLPVAGGTSSVYIEVL

SEQ ID NO: 178216 - protein, 21 aa, Influenza A virus
RKTRFLPVAGGTSSVYIEVLH

SEQ ID NO: 178217 - protein, 22 aa, Influenza A virus
RKTRFLPVAGGTSSVYIEVLHL

SEQ ID NO: 178218 - protein, 23 aa, Influenza A virus
RKTRFLPVAGGTSSVYIEVLHLT

SEQ ID NO: 178219 - protein, 24 aa, Influenza A virus
RKTRFLPVAGGTSSVYIEVLHLTQ

SEQ ID NO: 178220 - protein, 25 aa, Influenza A virus
RKTRFLPVAGGTSSVYIEVLHLTQG

SEQ ID NO: 178221 - protein, 14 aa, Influenza A virus
RLKHGTFGPVHFRN

SEQ ID NO: 178222 - protein, 15 aa, Influenza A virus
RLKHGTFGPVHFRNQ

SEQ ID NO: 178223 - protein, 16 aa, Influenza A virus
RLKHGTFGPVHFRNQV

SEQ ID NO: 178224 - protein, 17 aa, Influenza A virus
RLKHGTFGPVHFRNQVK

SEQ ID NO: 178225 - protein, 18 aa, Influenza A virus
RLKHGTFGPVHFRNQVKI

SEQ ID NO: 178226 - protein, 19 aa, Influenza A virus
RLKHGTFGPVHFRNQVKIR

SEQ ID NO: 178227 - protein, 20 aa, Influenza A virus
RLKHGTFGPVHFRNQVKIRR

SEQ ID NO: 178228 - protein, 21 aa, Influenza A virus
RLKHGTFGPVHFRNQVKIRRR

SEQ ID NO: 178229 - protein, 22 aa, Influenza A virus
RLKHGTFGPVHFRNQVKIRRRV

SEQ ID NO: 178230 - protein, 23 aa, Influenza A virus
RLKHGTFGPVHFRNQVKIRRRVD

SEQ ID NO: 178231 - protein, 24 aa, Influenza A virus
RLKHGTFGPVHFRNQVKIRRRVDI

SEQ ID NO: 178232 - protein, 25 aa, Influenza A virus
RLKHGTFGPVHFRNQVKIRRRVDIN

SEQ ID NO: 178233 - protein, 13 aa, Influenza A virus
RLNPMHQLLRHFQ

SEQ ID NO: 178234 - protein, 14 aa, Influenza A virus
RLNPMHQLLRHFQK

SEQ ID NO: 178235 - protein, 15 aa, Influenza A virus
RLNPMHQLLRHFQKD

SEQ ID NO: 178236 - protein, 16 aa, Influenza A virus
RLNPMHQLLRHFQKDA

SEQ ID NO: 178237 - protein, 17 aa, Influenza A virus
RLNPMHQLLRHFQKDAK

SEQ ID NO: 178238 - protein, 18 aa, Influenza A virus
RLNPMHQLLRHFQKDAKV

SEQ ID NO: 178239 - protein, 19 aa, Influenza A virus
RLNPMHQLLRHFQKDAKVL

SEQ ID NO: 178240 - protein, 20 aa, Influenza A virus
RLNPMHQLLRHFQKDAKVLF

SEQ ID NO: 178241 - protein, 21 aa, Influenza A virus
RLNPMHQLLRHFQKDAKVLFQ

SEQ ID NO: 178242 - protein, 22 aa, Influenza A virus
RLNPMHQLLRHFQKDAKVLFQN

SEQ ID NO: 178243 - protein, 23 aa, Influenza A virus
RLNPMHQLLRHFQKDAKVLFQNW

SEQ ID NO: 178244 - protein, 24 aa, Influenza A virus
RLNPMHQLLRHFQKDAKVLFQNWG

SEQ ID NO: 178245 - protein, 25 aa, Influenza A virus
RLNPMHQLLRHFQKDAKVLFQNWGI

SEQ ID NO: 178246 - protein, 13 aa, Influenza A virus
RMKWMMAMKYPIT

SEQ ID NO: 178247 - protein, 14 aa, Influenza A virus
RMKWMMAMKYPITA

SEQ ID NO: 178248 - protein, 15 aa, Influenza A virus
RMKWMMAMKYPITAD

SEQ ID NO: 178249 - protein, 16 aa, Influenza A virus
RMKWMMAMKYPITADK

SEQ ID NO: 178250 - protein, 17 aa, Influenza A virus
RMKWMMAMKYPITADKR

SEQ ID NO: 178251 - protein, 18 aa, Influenza A virus
RMKWMMAMKYPITADKRI

SEQ ID NO: 178252 - protein, 13 aa, Influenza A virus
RMQFSSLTVNVRG

SEQ ID NO: 178253 - protein, 14 aa, Influenza A virus
RMQFSSLTVNVRGS

SEQ ID NO: 178254 - protein, 15 aa, Influenza A virus
RMQFSSLTVNVRGSG

SEQ ID NO: 178255 - protein, 16 aa, Influenza A virus
RMQFSSLTVNVRGSGM

SEQ ID NO: 178256 - protein, 17 aa, Influenza A virus
RMQFSSLTVNVRGSGMR

SEQ ID NO: 178257 - protein, 18 aa, Influenza A virus
RMQFSSLTVNVRGSGMRI

SEQ ID NO: 178258 - protein, 19 aa, Influenza A virus
RMQFSSLTVNVRGSGMRIL

SEQ ID NO: 178259 - protein, 20 aa, Influenza A virus
RMQFSSLTVNVRGSGMRILV

SEQ ID NO: 178260 - protein, 21 aa, Influenza A virus
RMQFSSLTVNVRGSGMRILVR

SEQ ID NO: 178261 - protein, 22 aa, Influenza A virus
RMQFSSLTVNVRGSGMRILVRG

SEQ ID NO: 178262 - protein, 23 aa, Influenza A virus
RMQFSSLTVNVRGSGMRILVRGN

SEQ ID NO: 178263 - protein, 24 aa, Influenza A virus
RMQFSSLTVNVRGSGMRILVRGNS

SEQ ID NO: 178264 - protein, 25 aa, Influenza A virus
RMQFSSLTVNVRGSGMRILVRGNSP

SEQ ID NO: 178265 - protein, 13 aa, Influenza A virus
RNQVKIRRRVDIN

SEQ ID NO: 178266 - protein, 14 aa, Influenza A virus
RNQVKIRRRVDINP

SEQ ID NO: 178267 - protein, 15 aa, Influenza A virus
RNQVKIRRRVDINPG

SEQ ID NO: 178268 - protein, 16 aa, Influenza A virus
RNQVKIRRRVDINPGH

SEQ ID NO: 178269 - protein, 17 aa, Influenza A virus
RNQVKIRRRVDINPGHA

SEQ ID NO: 178270 - protein, 18 aa, Influenza A virus
RNQVKIRRRVDINPGHAD

SEQ ID NO: 178271 - protein, 19 aa, Influenza A virus
RNQVKIRRRVDINPGHADL

SEQ ID NO: 178272 - protein, 20 aa, Influenza A virus
RNQVKIRRRVDINPGHADLS

SEQ ID NO: 178273 - protein, 21 aa, Influenza A virus
RNQVKIRRRVDINPGHADLSA

SEQ ID NO: 178274 - protein, 22 aa, Influenza A virus
RNQVKIRRRVDINPGHADLSAK

SEQ ID NO: 178275 - protein, 23 aa, Influenza A virus
RNQVKIRRRVDINPGHADLSAKE

SEQ ID NO: 178276 - protein, 24 aa, Influenza A virus
RNQVKIRRRVDINPGHADLSAKEA

SEQ ID NO: 178277 - protein, 25 aa, Influenza A virus
RNQVKIRRRVDINPGHADLSAKEAQ

SEQ ID NO: 178278 - protein, 20 aa, Influenza A virus
RQNPTEEQAVDICKAAMGLR

SEQ ID NO: 178279 - protein, 21 aa, Influenza A virus
RQNPTEEQAVDICKAAMGLRI

SEQ ID NO: 178280 - protein, 22 aa, Influenza A virus
RQNPTEEQAVDICKAAMGLRIS

SEQ ID NO: 178281 - protein, 23 aa, Influenza A virus
RQNPTEEQAVDICKAAMGLRISS

SEQ ID NO: 178282 - protein, 24 aa, Influenza A virus
RQNPTEEQAVDICKAAMGLRISSS

SEQ ID NO: 178283 - protein, 25 aa, Influenza A virus
RQNPTEEQAVDICKAAMGLRISSSF

SEQ ID NO: 178284 - protein, 14 aa, Influenza A virus
RRRVDINPGHADLS

SEQ ID NO: 178285 - protein, 15 aa, Influenza A virus
RRRVDINPGHADLSA

SEQ ID NO: 178286 - protein, 16 aa, Influenza A virus
RRRVDINPGHADLSAK

SEQ ID NO: 178287 - protein, 17 aa, Influenza A virus
RRRVDINPGHADLSAKE

SEQ ID NO: 178288 - protein, 18 aa, Influenza A virus
RRRVDINPGHADLSAKEA

SEQ ID NO: 178289 - protein, 19 aa, Influenza A virus
RRRVDINPGHADLSAKEAQ

SEQ ID NO: 178290 - protein, 20 aa, Influenza A virus
RRRVDINPGHADLSAKEAQD

SEQ ID NO: 178291 - protein, 21 aa, Influenza A virus
RRRVDINPGHADLSAKEAQDV

SEQ ID NO: 178292 - protein, 22 aa, Influenza A virus
RRRVDINPGHADLSAKEAQDVI

SEQ ID NO: 178293 - protein, 23 aa, Influenza A virus
RRRVDINPGHADLSAKEAQDVIM

SEQ ID NO: 178294 - protein, 24 aa, Influenza A virus
RRRVDINPGHADLSAKEAQDVIME

SEQ ID NO: 178295 - protein, 25 aa, Influenza A virus
RRRVDINPGHADLSAKEAQDVIMEV

SEQ ID NO: 178296 - protein, 14 aa, Influenza A virus
RRVDINPGHADLSA

SEQ ID NO: 178297 - protein, 15 aa, Influenza A virus
RRVDINPGHADLSAK

SEQ ID NO: 178298 - protein, 16 aa, Influenza A virus
RRVDINPGHADLSAKE

SEQ ID NO: 178299 - protein, 17 aa, Influenza A virus
RRVDINPGHADLSAKEA

SEQ ID NO: 178300 - protein, 18 aa, Influenza A virus
RRVDINPGHADLSAKEAQ

SEQ ID NO: 178301 - protein, 19 aa, Influenza A virus
RRVDINPGHADLSAKEAQD

SEQ ID NO: 178302 - protein, 20 aa, Influenza A virus
RRVDINPGHADLSAKEAQDV

SEQ ID NO: 178303 - protein, 21 aa, Influenza A virus
RRVDINPGHADLSAKEAQDVI

SEQ ID NO: 178304 - protein, 22 aa, Influenza A virus
RRVDINPGHADLSAKEAQDVIM

SEQ ID NO: 178305 - protein, 23 aa, Influenza A virus
RRVDINPGHADLSAKEAQDVIME

SEQ ID NO: 178306 - protein, 24 aa, Influenza A virus
RRVDINPGHADLSAKEAQDVIMEV

SEQ ID NO: 178307 - protein, 25 aa, Influenza A virus
RRVDINPGHADLSAKEAQDVIMEVV

SEQ ID NO: 178308 - protein, 13 aa, Influenza A virus
RTLFQQMRDVLGT

SEQ ID NO: 178309 - protein, 14 aa, Influenza A virus
RTLFQQMRDVLGTF

SEQ ID NO: 178310 - protein, 15 aa, Influenza A virus
RTLFQQMRDVLGTFD

SEQ ID NO: 178311 - protein, 16 aa, Influenza A virus
RTLFQQMRDVLGTFDT

SEQ ID NO: 178312 - protein, 15 aa, Influenza A virus
RTREILTKTTVDHMA

SEQ ID NO: 178313 - protein, 16 aa, Influenza A virus
RTREILTKTTVDHMAI

SEQ ID NO: 178314 - protein, 17 aa, Influenza A virus
RTREILTKTTVDHMAII

SEQ ID NO: 178315 - protein, 19 aa, Influenza A virus
RTREILTKTTVDHMAIIKK

SEQ ID NO: 178316 - protein, 20 aa, Influenza A virus
RTREILTKTTVDHMAIIKKY

SEQ ID NO: 178317 - protein, 21 aa, Influenza A virus
RTREILTKTTVDHMAIIKKYT

SEQ ID NO: 178318 - protein, 22 aa, Influenza A virus
RTREILTKTTVDHMAIIKKYTS

SEQ ID NO: 178319 - protein, 23 aa, Influenza A virus
RTREILTKTTVDHMAIIKKYTSG

SEQ ID NO: 178320 - protein, 24 aa, Influenza A virus
RTREILTKTTVDHMAIIKKYTSGR

SEQ ID NO: 178321 - protein, 25 aa, Influenza A virus
RTREILTKTTVDHMAIIKKYTSGRQ

SEQ ID NO: 178322 - protein, 13 aa, Influenza A virus
RVDINPGHADLSA

SEQ ID NO: 178323 - protein, 14 aa, Influenza A virus
RVDINPGHADLSAK

SEQ ID NO: 178324 - protein, 15 aa, Influenza A virus
RVDINPGHADLSAKE

SEQ ID NO: 178325 - protein, 16 aa, Influenza A virus
RVDINPGHADLSAKEA

SEQ ID NO: 178326 - protein, 17 aa, Influenza A virus
RVDINPGHADLSAKEAQ

SEQ ID NO: 178327 - protein, 18 aa, Influenza A virus
RVDINPGHADLSAKEAQD

SEQ ID NO: 178328 - protein, 19 aa, Influenza A virus
RVDINPGHADLSAKEAQDV

SEQ ID NO: 178329 - protein, 20 aa, Influenza A virus
RVDINPGHADLSAKEAQDVI

SEQ ID NO: 178330 - protein, 21 aa, Influenza A virus
RVDINPGHADLSAKEAQDVIM

SEQ ID NO: 178331 - protein, 22 aa, Influenza A virus
RVDINPGHADLSAKEAQDVIME

SEQ ID NO: 178332 - protein, 23 aa, Influenza A virus
RVDINPGHADLSAKEAQDVIMEV

SEQ ID NO: 178333 - protein, 24 aa, Influenza A virus
RVDINPGHADLSAKEAQDVIMEVV

SEQ ID NO: 178334 - protein, 25 aa, Influenza A virus
RVDINPGHADLSAKEAQDVIMEVVF

SEQ ID NO: 178335 - protein, 13 aa, Influenza A virus
RVMVSPLAVTWWN

SEQ ID NO: 178336 - protein, 14 aa, Influenza A virus
RVMVSPLAVTWWNR

SEQ ID NO: 178337 - protein, 15 aa, Influenza A virus
RVMVSPLAVTWWNRN

SEQ ID NO: 178338 - protein, 16 aa, Influenza A virus
RVMVSPLAVTWWNRNG

SEQ ID NO: 178339 - protein, 17 aa, Influenza A virus
RVMVSPLAVTWWNRNGP

SEQ ID NO: 178340 - protein, 14 aa, Influenza A virus
RVRDQRGNVLLSPE

SEQ ID NO: 178341 - protein, 15 aa, Influenza A virus
RVRDQRGNVLLSPEE

SEQ ID NO: 178342 - protein, 16 aa, Influenza A virus
RVRDQRGNVLLSPEEV

SEQ ID NO: 178343 - protein, 17 aa, Influenza A virus
RVRDQRGNVLLSPEEVS

SEQ ID NO: 178344 - protein, 19 aa, Influenza A virus
RVRDQRGNVLLSPEEVSET

SEQ ID NO: 178345 - protein, 13 aa, Influenza A virus
RVVVSIDRFLRVR

SEQ ID NO: 178346 - protein, 14 aa, Influenza A virus
RVVVSIDRFLRVRD

SEQ ID NO: 178347 - protein, 15 aa, Influenza A virus
RVVVSIDRFLRVRDQ

SEQ ID NO: 178348 - protein, 16 aa, Influenza A virus
RVVVSIDRFLRVRDQR

SEQ ID NO: 178349 - protein, 17 aa, Influenza A virus
RVVVSIDRFLRVRDQRG

SEQ ID NO: 178350 - protein, 18 aa, Influenza A virus
RVVVSIDRFLRVRDQRGN

SEQ ID NO: 178351 - protein, 14 aa, Influenza A virus
RYGPALSINELSNL

SEQ ID NO: 178352 - protein, 15 aa, Influenza A virus
RYGPALSINELSNLA

SEQ ID NO: 178353 - protein, 16 aa, Influenza A virus
RYGPALSINELSNLAK

SEQ ID NO: 178354 - protein, 17 aa, Influenza A virus
RYGPALSINELSNLAKG

SEQ ID NO: 178355 - protein, 18 aa, Influenza A virus
RYGPALSINELSNLAKGE

SEQ ID NO: 178356 - protein, 19 aa, Influenza A virus
RYGPALSINELSNLAKGEK

SEQ ID NO: 178357 - protein, 20 aa, Influenza A virus
RYGPALSINELSNLAKGEKA

SEQ ID NO: 178358 - protein, 21 aa, Influenza A virus
RYGPALSINELSNLAKGEKAN

SEQ ID NO: 178359 - protein, 22 aa, Influenza A virus
RYGPALSINELSNLAKGEKANV

SEQ ID NO: 178360 - protein, 23 aa, Influenza A virus
RYGPALSINELSNLAKGEKANVL

SEQ ID NO: 178361 - protein, 24 aa, Influenza A virus
RYGPALSINELSNLAKGEKANVLI

SEQ ID NO: 178362 - protein, 25 aa, Influenza A virus
RYGPALSINELSNLAKGEKANVLIG

SEQ ID NO: 178363 - protein, 15 aa, Influenza A virus
SADPLASLLEMCHST

SEQ ID NO: 178364 - protein, 16 aa, Influenza A virus
SADPLASLLEMCHSTQ

SEQ ID NO: 178365 - protein, 17 aa, Influenza A virus
SADPLASLLEMCHSTQI

SEQ ID NO: 178366 - protein, 19 aa, Influenza A virus
SADPLASLLEMCHSTQIGG

SEQ ID NO: 178367 - protein, 14 aa, Influenza A virus
SAKEAQDVIMEVVF

SEQ ID NO: 178368 - protein, 15 aa, Influenza A virus
SAKEAQDVIMEVVFP

SEQ ID NO: 178369 - protein, 16 aa, Influenza A virus
SAKEAQDVIMEVVFPN

SEQ ID NO: 178370 - protein, 17 aa, Influenza A virus
SAKEAQDVIMEVVFPNE

SEQ ID NO: 178371 - protein, 18 aa, Influenza A virus
SAKEAQDVIMEVVFPNEV

SEQ ID NO: 178372 - protein, 19 aa, Influenza A virus
SAKEAQDVIMEVVFPNEVG

SEQ ID NO: 178373 - protein, 20 aa, Influenza A virus
SAKEAQDVIMEVVFPNEVGA

SEQ ID NO: 178374 - protein, 21 aa, Influenza A virus
SAKEAQDVIMEVVFPNEVGAR

SEQ ID NO: 178375 - protein, 22 aa, Influenza A virus
SAKEAQDVIMEVVFPNEVGARI

SEQ ID NO: 178376 - protein, 23 aa, Influenza A virus
SAKEAQDVIMEVVFPNEVGARIL

SEQ ID NO: 178377 - protein, 24 aa, Influenza A virus
SAKEAQDVIMEVVFPNEVGARILT

SEQ ID NO: 178378 - protein, 25 aa, Influenza A virus
SAKEAQDVIMEVVFPNEVGARILTS

SEQ ID NO: 178379 - protein, 13 aa, Influenza A virus
SAVLRGFLILGKE

SEQ ID NO: 178380 - protein, 14 aa, Influenza A virus
SAVLRGFLILGKED

SEQ ID NO: 178381 - protein, 13 aa, Influenza A virus
SDRVMVSPLAVTW

SEQ ID NO: 178382 - protein, 14 aa, Influenza A virus
SDRVMVSPLAVTWW

SEQ ID NO: 178383 - protein, 15 aa, Influenza A virus
SDRVMVSPLAVTWWN

SEQ ID NO: 178384 - protein, 16 aa, Influenza A virus
SDRVMVSPLAVTWWNR

SEQ ID NO: 178385 - protein, 17 aa, Influenza A virus
SDRVMVSPLAVTWWNRN

SEQ ID NO: 178386 - protein, 18 aa, Influenza A virus
SDRVMVSPLAVTWWNRNG

SEQ ID NO: 178387 - protein, 19 aa, Influenza A virus
SDRVMVSPLAVTWWNRNGP

SEQ ID NO: 178388 - protein, 13 aa, Influenza A virus
SFGGFTFKRTSGS

SEQ ID NO: 178389 - protein, 14 aa, Influenza A virus
SFGGFTFKRTSGSS

SEQ ID NO: 178390 - protein, 13 aa, Influenza A virus
SFSFGGFTFKRTS

SEQ ID NO: 178391 - protein, 14 aa, Influenza A virus
SFSFGGFTFKRTSG

SEQ ID NO: 178392 - protein, 15 aa, Influenza A virus
SFSFGGFTFKRTSGS

SEQ ID NO: 178393 - protein, 16 aa, Influenza A virus
SFSFGGFTFKRTSGSS

SEQ ID NO: 178394 - protein, 13 aa, Influenza A virus
SGFVRTLFQQMRD

SEQ ID NO: 178395 - protein, 14 aa, Influenza A virus
SGFVRTLFQQMRDV

SEQ ID NO: 178396 - protein, 15 aa, Influenza A virus
SGFVRTLFQQMRDVL

SEQ ID NO: 178397 - protein, 16 aa, Influenza A virus
SGFVRTLFQQMRDVLG

SEQ ID NO: 178398 - protein, 17 aa, Influenza A virus
SGFVRTLFQQMRDVLGT

SEQ ID NO: 178399 - protein, 18 aa, Influenza A virus
SGFVRTLFQQMRDVLGTF

SEQ ID NO: 178400 - protein, 19 aa, Influenza A virus
SGFVRTLFQQMRDVLGTFD

SEQ ID NO: 178401 - protein, 20 aa, Influenza A virus
SGFVRTLFQQMRDVLGTFDT

SEQ ID NO: 178402 - protein, 13 aa, Influenza A virus
SGMRILVRGNSPV

SEQ ID NO: 178403 - protein, 14 aa, Influenza A virus
SGMRILVRGNSPVF

SEQ ID NO: 178404 - protein, 15 aa, Influenza A virus
SGMRILVRGNSPVFN

SEQ ID NO: 178405 - protein, 16 aa, Influenza A virus
SGMRILVRGNSPVFNY

SEQ ID NO: 178406 - protein, 17 aa, Influenza A virus
SGMRILVRGNSPVFNYN

SEQ ID NO: 178407 - protein, 18 aa, Influenza A virus
SGMRILVRGNSPVFNYNK

SEQ ID NO: 178408 - protein, 14 aa, Influenza A virus
SGRDEQSIAEAIIV

SEQ ID NO: 178409 - protein, 15 aa, Influenza A virus
SGRDEQSIAEAIIVA

SEQ ID NO: 178410 - protein, 13 aa, Influenza A virus
SIAEAIIVAMVFS

SEQ ID NO: 178411 - protein, 14 aa, Influenza A virus
SIAEAIIVAMVFSQ

SEQ ID NO: 178412 - protein, 15 aa, Influenza A virus
SIAEAIIVAMVFSQE

SEQ ID NO: 178413 - protein, 16 aa, Influenza A virus
SIAEAIIVAMVFSQED

SEQ ID NO: 178414 - protein, 17 aa, Influenza A virus
SIAEAIIVAMVFSQEDC

SEQ ID NO: 178415 - protein, 14 aa, Influenza A virus
SIDRFLRVRDQRGN

SEQ ID NO: 178416 - protein, 15 aa, Influenza A virus
SIDRFLRVRDQRGNV

SEQ ID NO: 178417 - protein, 16 aa, Influenza A virus
SIDRFLRVRDQRGNVL

SEQ ID NO: 178418 - protein, 17 aa, Influenza A virus
SIDRFLRVRDQRGNVLL

SEQ ID NO: 178419 - protein, 18 aa, Influenza A virus
SIDRFLRVRDQRGNVLLS

SEQ ID NO: 178420 - protein, 19 aa, Influenza A virus
SIDRFLRVRDQRGNVLLSP

SEQ ID NO: 178421 - protein, 20 aa, Influenza A virus
SIDRFLRVRDQRGNVLLSPE

SEQ ID NO: 178422 - protein, 21 aa, Influenza A virus
SIDRFLRVRDQRGNVLLSPEE

SEQ ID NO: 178423 - protein, 22 aa, Influenza A virus
SIDRFLRVRDQRGNVLLSPEEV

SEQ ID NO: 178424 - protein, 23 aa, Influenza A virus
SIDRFLRVRDQRGNVLLSPEEVS

SEQ ID NO: 178425 - protein, 24 aa, Influenza A virus
SIDRFLRVRDQRGNVLLSPEEVSE

SEQ ID NO: 178426 - protein, 25 aa, Influenza A virus
SIDRFLRVRDQRGNVLLSPEEVSET

SEQ ID NO: 178427 - protein, 15 aa, Influenza A virus
SILTDSQTATKRIRM

SEQ ID NO: 178428 - protein, 16 aa, Influenza A virus
SILTDSQTATKRIRMA

SEQ ID NO: 178429 - protein, 17 aa, Influenza A virus
SILTDSQTATKRIRMAI

SEQ ID NO: 178430 - protein, 14 aa, Influenza A virus
SINELSNLAKGEKA

SEQ ID NO: 178431 - protein, 15 aa, Influenza A virus
SINELSNLAKGEKAN

SEQ ID NO: 178432 - protein, 16 aa, Influenza A virus
SINELSNLAKGEKANV

SEQ ID NO: 178433 - protein, 17 aa, Influenza A virus
SINELSNLAKGEKANVL

SEQ ID NO: 178434 - protein, 19 aa, Influenza A virus
SINELSNLAKGEKANVLIG

SEQ ID NO: 178435 - protein, 20 aa, Influenza A virus
SINELSNLAKGEKANVLIGQ

SEQ ID NO: 178436 - protein, 21 aa, Influenza A virus
SINELSNLAKGEKANVLIGQG

SEQ ID NO: 178437 - protein, 22 aa, Influenza A virus
SINELSNLAKGEKANVLIGQGD

SEQ ID NO: 178438 - protein, 23 aa, Influenza A virus
SINELSNLAKGEKANVLIGQGDV

SEQ ID NO: 178439 - protein, 24 aa, Influenza A virus
SINELSNLAKGEKANVLIGQGDVV

SEQ ID NO: 178440 - protein, 25 aa, Influenza A virus
SINELSNLAKGEKANVLIGQGDVVL

SEQ ID NO: 178441 - protein, 13 aa, Influenza A virus
SLIIAARNIVRRA

SEQ ID NO: 178442 - protein, 14 aa, Influenza A virus
SLTVNVRGSGMRIL

SEQ ID NO: 178443 - protein, 15 aa, Influenza A virus
SLTVNVRGSGMRILV

SEQ ID NO: 178444 - protein, 16 aa, Influenza A virus
SLTVNVRGSGMRILVR

SEQ ID NO: 178445 - protein, 17 aa, Influenza A virus
SLTVNVRGSGMRILVRG

SEQ ID NO: 178446 - protein, 18 aa, Influenza A virus
SLTVNVRGSGMRILVRGN

SEQ ID NO: 178447 - protein, 19 aa, Influenza A virus
SLTVNVRGSGMRILVRGNS

SEQ ID NO: 178448 - protein, 20 aa, Influenza A virus
SLTVNVRGSGMRILVRGNSP

SEQ ID NO: 178449 - protein, 14 aa, Influenza A virus
SMMWEINGPESVLV

SEQ ID NO: 178450 - protein, 15 aa, Influenza A virus
SMMWEINGPESVLVN

SEQ ID NO: 178451 - protein, 16 aa, Influenza A virus
SMMWEINGPESVLVNT

SEQ ID NO: 178452 - protein, 17 aa, Influenza A virus
SMMWEINGPESVLVNTY

SEQ ID NO: 178453 - protein, 18 aa, Influenza A virus
SMMWEINGPESVLVNTYQ

SEQ ID NO: 178454 - protein, 19 aa, Influenza A virus
SMMWEINGPESVLVNTYQW

SEQ ID NO: 178455 - protein, 20 aa, Influenza A virus
SMMWEINGPESVLVNTYQWI

SEQ ID NO: 178456 - protein, 21 aa, Influenza A virus
SMMWEINGPESVLVNTYQWII

SEQ ID NO: 178457 - protein, 22 aa, Influenza A virus
SMMWEINGPESVLVNTYQWIIR

SEQ ID NO: 178458 - protein, 23 aa, Influenza A virus
SMMWEINGPESVLVNTYQWIIRN

SEQ ID NO: 178459 - protein, 24 aa, Influenza A virus
SMMWEINGPESVLVNTYQWIIRNW

SEQ ID NO: 178460 - protein, 25 aa, Influenza A virus
SMMWEINGPESVLVNTYQWIIRNWE

SEQ ID NO: 178461 - protein, 15 aa, Influenza A virus
SNLAKGEKANVLIGQ

SEQ ID NO: 178462 - protein, 20 aa, Influenza A virus
SNLAKGEKANVLIGQGDVVL

SEQ ID NO: 178463 - protein, 21 aa, Influenza A virus
SNLAKGEKANVLIGQGDVVLV

SEQ ID NO: 178464 - protein, 22 aa, Influenza A virus
SNLAKGEKANVLIGQGDVVLVM

SEQ ID NO: 178465 - protein, 23 aa, Influenza A virus
SNLAKGEKANVLIGQGDVVLVMK

SEQ ID NO: 178466 - protein, 24 aa, Influenza A virus
SNLAKGEKANVLIGQGDVVLVMKR

SEQ ID NO: 178467 - protein, 25 aa, Influenza A virus
SNLAKGEKANVLIGQGDVVLVMKRK

SEQ ID NO: 178468 - protein, 13 aa, Influenza A virus
SPLAVTWWNRNGP

SEQ ID NO: 178469 - protein, 15 aa, Influenza A virus
SQEDCMIKAVRGDLN

SEQ ID NO: 178470 - protein, 16 aa, Influenza A virus
SQEDCMIKAVRGDLNF

SEQ ID NO: 178471 - protein, 17 aa, Influenza A virus
SQEDCMIKAVRGDLNFV

SEQ ID NO: 178472 - protein, 19 aa, Influenza A virus
SQEDCMIKAVRGDLNFVNR

SEQ ID NO: 178473 - protein, 20 aa, Influenza A virus
SQEDCMIKAVRGDLNFVNRA

SEQ ID NO: 178474 - protein, 21 aa, Influenza A virus
SQEDCMIKAVRGDLNFVNRAN

SEQ ID NO: 178475 - protein, 22 aa, Influenza A virus
SQEDCMIKAVRGDLNFVNRANQ

SEQ ID NO: 178476 - protein, 23 aa, Influenza A virus
SQEDCMIKAVRGDLNFVNRANQR

SEQ ID NO: 178477 - protein, 24 aa, Influenza A virus
SQEDCMIKAVRGDLNFVNRANQRL

SEQ ID NO: 178478 - protein, 25 aa, Influenza A virus
SQEDCMIKAVRGDLNFVNRANQRLN

SEQ ID NO: 178479 - protein, 19 aa, Influenza A virus
SQSRTREILTKTTVDHMAI

SEQ ID NO: 178480 - protein, 20 aa, Influenza A virus
SQSRTREILTKTTVDHMAII

SEQ ID NO: 178481 - protein, 21 aa, Influenza A virus
SQSRTREILTKTTVDHMAIIK

SEQ ID NO: 178482 - protein, 22 aa, Influenza A virus
SQSRTREILTKTTVDHMAIIKK

SEQ ID NO: 178483 - protein, 23 aa, Influenza A virus
SQSRTREILTKTTVDHMAIIKKY

SEQ ID NO: 178484 - protein, 24 aa, Influenza A virus
SQSRTREILTKTTVDHMAIIKKYT

SEQ ID NO: 178485 - protein, 25 aa, Influenza A virus
SQSRTREILTKTTVDHMAIIKKYTS

SEQ ID NO: 178486 - protein, 13 aa, Influenza A virus
SRMQFSSLTVNVR

SEQ ID NO: 178487 - protein, 14 aa, Influenza A virus
SRMQFSSLTVNVRG

SEQ ID NO: 178488 - protein, 15 aa, Influenza A virus
SRMQFSSLTVNVRGS

SEQ ID NO: 178489 - protein, 16 aa, Influenza A virus
SRMQFSSLTVNVRGSG

SEQ ID NO: 178490 - protein, 17 aa, Influenza A virus
SRMQFSSLTVNVRGSGM

SEQ ID NO: 178491 - protein, 18 aa, Influenza A virus
SRMQFSSLTVNVRGSGMR

SEQ ID NO: 178492 - protein, 19 aa, Influenza A virus
SRMQFSSLTVNVRGSGMRI

SEQ ID NO: 178493 - protein, 20 aa, Influenza A virus
SRMQFSSLTVNVRGSGMRIL

SEQ ID NO: 178494 - protein, 21 aa, Influenza A virus
SRMQFSSLTVNVRGSGMRILV

SEQ ID NO: 178495 - protein, 22 aa, Influenza A virus
SRMQFSSLTVNVRGSGMRILVR

SEQ ID NO: 178496 - protein, 23 aa, Influenza A virus
SRMQFSSLTVNVRGSGMRILVRG

SEQ ID NO: 178497 - protein, 24 aa, Influenza A virus
SRMQFSSLTVNVRGSGMRILVRGN

SEQ ID NO: 178498 - protein, 25 aa, Influenza A virus
SRMQFSSLTVNVRGSGMRILVRGNS

SEQ ID NO: 178499 - protein, 15 aa, Influenza A virus
SRTREILTKTTVDHM

SEQ ID NO: 178500 - protein, 17 aa, Influenza A virus
SRTREILTKTTVDHMAI

SEQ ID NO: 178501 - protein, 19 aa, Influenza A virus
SRTREILTKTTVDHMAIIK

SEQ ID NO: 178502 - protein, 20 aa, Influenza A virus
SRTREILTKTTVDHMAIIKK

SEQ ID NO: 178503 - protein, 21 aa, Influenza A virus
SRTREILTKTTVDHMAIIKKY

SEQ ID NO: 178504 - protein, 22 aa, Influenza A virus
SRTREILTKTTVDHMAIIKKYT

SEQ ID NO: 178505 - protein, 23 aa, Influenza A virus
SRTREILTKTTVDHMAIIKKYTS

SEQ ID NO: 178506 - protein, 24 aa, Influenza A virus
SRTREILTKTTVDHMAIIKKYTSG

SEQ ID NO: 178507 - protein, 25 aa, Influenza A virus
SRTREILTKTTVDHMAIIKKYTSGR

SEQ ID NO: 178508 - protein, 13 aa, Influenza A virus
SSFSFGGFTFKRT

SEQ ID NO: 178509 - protein, 14 aa, Influenza A virus
SSFSFGGFTFKRTS

SEQ ID NO: 178510 - protein, 15 aa, Influenza A virus
SSFSFGGFTFKRTSG

SEQ ID NO: 178511 - protein, 16 aa, Influenza A virus
SSFSFGGFTFKRTSGS

SEQ ID NO: 178512 - protein, 17 aa, Influenza A virus
SSFSFGGFTFKRTSGSS

SEQ ID NO: 178513 - protein, 14 aa, Influenza A virus
SSILTDSQTATKRI

SEQ ID NO: 178514 - protein, 15 aa, Influenza A virus
SSILTDSQTATKRIR

SEQ ID NO: 178515 - protein, 16 aa, Influenza A virus
SSILTDSQTATKRIRM

SEQ ID NO: 178516 - protein, 17 aa, Influenza A virus
SSILTDSQTATKRIRMA

SEQ ID NO: 178517 - protein, 19 aa, Influenza A virus
SSILTDSQTATKRIRMAIN

SEQ ID NO: 178518 - protein, 14 aa, Influenza A virus
SSLTVNVRGSGMRI

SEQ ID NO: 178519 - protein, 15 aa, Influenza A virus
SSLTVNVRGSGMRIL

SEQ ID NO: 178520 - protein, 16 aa, Influenza A virus
SSLTVNVRGSGMRILV

SEQ ID NO: 178521 - protein, 17 aa, Influenza A virus
SSLTVNVRGSGMRILVR

SEQ ID NO: 178522 - protein, 18 aa, Influenza A virus
SSLTVNVRGSGMRILVRG

SEQ ID NO: 178523 - protein, 19 aa, Influenza A virus
SSLTVNVRGSGMRILVRGN

SEQ ID NO: 178524 - protein, 20 aa, Influenza A virus
SSLTVNVRGSGMRILVRGNS

SEQ ID NO: 178525 - protein, 21 aa, Influenza A virus
SSLTVNVRGSGMRILVRGNSP

SEQ ID NO: 178526 - protein, 14 aa, Influenza A virus
SSMMWEINGPESVL

SEQ ID NO: 178527 - protein, 15 aa, Influenza A virus
SSMMWEINGPESVLV

SEQ ID NO: 178528 - protein, 16 aa, Influenza A virus
SSMMWEINGPESVLVN

SEQ ID NO: 178529 - protein, 17 aa, Influenza A virus
SSMMWEINGPESVLVNT

SEQ ID NO: 178530 - protein, 18 aa, Influenza A virus
SSMMWEINGPESVLVNTY

SEQ ID NO: 178531 - protein, 19 aa, Influenza A virus
SSMMWEINGPESVLVNTYQ

SEQ ID NO: 178532 - protein, 20 aa, Influenza A virus
SSMMWEINGPESVLVNTYQW

SEQ ID NO: 178533 - protein, 21 aa, Influenza A virus
SSMMWEINGPESVLVNTYQWI

SEQ ID NO: 178534 - protein, 22 aa, Influenza A virus
SSMMWEINGPESVLVNTYQWII

SEQ ID NO: 178535 - protein, 23 aa, Influenza A virus
SSMMWEINGPESVLVNTYQWIIR

SEQ ID NO: 178536 - protein, 24 aa, Influenza A virus
SSMMWEINGPESVLVNTYQWIIRN

SEQ ID NO: 178537 - protein, 25 aa, Influenza A virus
SSMMWEINGPESVLVNTYQWIIRNW

SEQ ID NO: 178538 - protein, 14 aa, Influenza A virus
SSSFSFGGFTFKRT

SEQ ID NO: 178539 - protein, 15 aa, Influenza A virus
SSSFSFGGFTFKRTS

SEQ ID NO: 178540 - protein, 16 aa, Influenza A virus
SSSFSFGGFTFKRTSG

SEQ ID NO: 178541 - protein, 17 aa, Influenza A virus
SSSFSFGGFTFKRTSGS

SEQ ID NO: 178542 - protein, 18 aa, Influenza A virus
SSSFSFGGFTFKRTSGSS

SEQ ID NO: 178543 - protein, 14 aa, Influenza A virus
SSSMMWEINGPESV

SEQ ID NO: 178544 - protein, 15 aa, Influenza A virus
SSSMMWEINGPESVL

SEQ ID NO: 178545 - protein, 16 aa, Influenza A virus
SSSMMWEINGPESVLV

SEQ ID NO: 178546 - protein, 17 aa, Influenza A virus
SSSMMWEINGPESVLVN

SEQ ID NO: 178547 - protein, 18 aa, Influenza A virus
SSSMMWEINGPESVLVNT

SEQ ID NO: 178548 - protein, 19 aa, Influenza A virus
SSSMMWEINGPESVLVNTY

SEQ ID NO: 178549 - protein, 20 aa, Influenza A virus
SSSMMWEINGPESVLVNTYQ

SEQ ID NO: 178550 - protein, 21 aa, Influenza A virus
SSSMMWEINGPESVLVNTYQW

SEQ ID NO: 178551 - protein, 22 aa, Influenza A virus
SSSMMWEINGPESVLVNTYQWI

SEQ ID NO: 178552 - protein, 23 aa, Influenza A virus
SSSMMWEINGPESVLVNTYQWII

SEQ ID NO: 178553 - protein, 24 aa, Influenza A virus
SSSMMWEINGPESVLVNTYQWIIR

SEQ ID NO: 178554 - protein, 25 aa, Influenza A virus
SSSMMWEINGPESVLVNTYQWIIRN

SEQ ID NO: 178555 - protein, 13 aa, Influenza A virus
SSVYIEVLHLTQG

SEQ ID NO: 178556 - protein, 14 aa, Influenza A virus
SSVYIEVLHLTQGT

SEQ ID NO: 178557 - protein, 15 aa, Influenza A virus
SSVYIEVLHLTQGTC

SEQ ID NO: 178558 - protein, 16 aa, Influenza A virus
SSVYIEVLHLTQGTCW

SEQ ID NO: 178559 - protein, 17 aa, Influenza A virus
SSVYIEVLHLTQGTCWE

SEQ ID NO: 178560 - protein, 18 aa, Influenza A virus
SSVYIEVLHLTQGTCWEQ

SEQ ID NO: 178561 - protein, 19 aa, Influenza A virus
SSVYIEVLHLTQGTCWEQM

SEQ ID NO: 178562 - protein, 20 aa, Influenza A virus
SSVYIEVLHLTQGTCWEQMY

SEQ ID NO: 178563 - protein, 21 aa, Influenza A virus
SSVYIEVLHLTQGTCWEQMYT

SEQ ID NO: 178564 - protein, 22 aa, Influenza A virus
SSVYIEVLHLTQGTCWEQMYTP

SEQ ID NO: 178565 - protein, 23 aa, Influenza A virus
SSVYIEVLHLTQGTCWEQMYTPG

SEQ ID NO: 178566 - protein, 24 aa, Influenza A virus
SSVYIEVLHLTQGTCWEQMYTPGG

SEQ ID NO: 178567 - protein, 25 aa, Influenza A virus
SSVYIEVLHLTQGTCWEQMYTPGGE

SEQ ID NO: 178568 - protein, 13 aa, Influenza A virus
SVLVNTYQWIIRN

SEQ ID NO: 178569 - protein, 14 aa, Influenza A virus
SVLVNTYQWIIRNW

SEQ ID NO: 178570 - protein, 15 aa, Influenza A virus
SVLVNTYQWIIRNWE

SEQ ID NO: 178571 - protein, 16 aa, Influenza A virus
SVLVNTYQWIIRNWET

SEQ ID NO: 178572 - protein, 17 aa, Influenza A virus
SVLVNTYQWIIRNWETV

SEQ ID NO: 178573 - protein, 18 aa, Influenza A virus
SVLVNTYQWIIRNWETVK

SEQ ID NO: 178574 - protein, 19 aa, Influenza A virus
SVLVNTYQWIIRNWETVKI

SEQ ID NO: 178575 - protein, 20 aa, Influenza A virus
SVLVNTYQWIIRNWETVKIQ

SEQ ID NO: 178576 - protein, 21 aa, Influenza A virus
SVLVNTYQWIIRNWETVKIQW

SEQ ID NO: 178577 - protein, 22 aa, Influenza A virus
SVLVNTYQWIIRNWETVKIQWS

SEQ ID NO: 178578 - protein, 14 aa, Influenza A virus
SVYIEVLHLTQGTC

SEQ ID NO: 178579 - protein, 15 aa, Influenza A virus
SVYIEVLHLTQGTCW

SEQ ID NO: 178580 - protein, 16 aa, Influenza A virus
SVYIEVLHLTQGTCWE

SEQ ID NO: 178581 - protein, 17 aa, Influenza A virus
SVYIEVLHLTQGTCWEQ

SEQ ID NO: 178582 - protein, 19 aa, Influenza A virus
SVYIEVLHLTQGTCWEQMY

SEQ ID NO: 178583 - protein, 20 aa, Influenza A virus
SVYIEVLHLTQGTCWEQMYT

SEQ ID NO: 178584 - protein, 21 aa, Influenza A virus
SVYIEVLHLTQGTCWEQMYTP

SEQ ID NO: 178585 - protein, 22 aa, Influenza A virus
SVYIEVLHLTQGTCWEQMYTPG

SEQ ID NO: 178586 - protein, 23 aa, Influenza A virus
SVYIEVLHLTQGTCWEQMYTPGG

SEQ ID NO: 178587 - protein, 24 aa, Influenza A virus
SVYIEVLHLTQGTCWEQMYTPGGE

SEQ ID NO: 178588 - protein, 25 aa, Influenza A virus
SVYIEVLHLTQGTCWEQMYTPGGEV

SEQ ID NO: 178589 - protein, 15 aa, Influenza A virus
TDSQTATKRIRMAIN

SEQ ID NO: 178590 - protein, 15 aa, Influenza A virus
TEEQAVDICKAAMGL

SEQ ID NO: 178591 - protein, 16 aa, Influenza A virus
TEEQAVDICKAAMGLR

SEQ ID NO: 178592 - protein, 17 aa, Influenza A virus
TEEQAVDICKAAMGLRI

SEQ ID NO: 178593 - protein, 18 aa, Influenza A virus
TEEQAVDICKAAMGLRIS

SEQ ID NO: 178594 - protein, 19 aa, Influenza A virus
TEEQAVDICKAAMGLRISS

SEQ ID NO: 178595 - protein, 20 aa, Influenza A virus
TEEQAVDICKAAMGLRISSS

SEQ ID NO: 178596 - protein, 21 aa, Influenza A virus
TEEQAVDICKAAMGLRISSSF

SEQ ID NO: 178597 - protein, 22 aa, Influenza A virus
TEEQAVDICKAAMGLRISSSFS

SEQ ID NO: 178598 - protein, 23 aa, Influenza A virus
TEEQAVDICKAAMGLRISSSFSF

SEQ ID NO: 178599 - protein, 24 aa, Influenza A virus
TEEQAVDICKAAMGLRISSSFSFG

SEQ ID NO: 178600 - protein, 25 aa, Influenza A virus
TEEQAVDICKAAMGLRISSSFSFGG

SEQ ID NO: 178601 - protein, 14 aa, Influenza A virus
TFGPVHFRNQVKIR

SEQ ID NO: 178602 - protein, 15 aa, Influenza A virus
TFGPVHFRNQVKIRR

SEQ ID NO: 178603 - protein, 16 aa, Influenza A virus
TFGPVHFRNQVKIRRR

SEQ ID NO: 178604 - protein, 17 aa, Influenza A virus
TFGPVHFRNQVKIRRRV

SEQ ID NO: 178605 - protein, 18 aa, Influenza A virus
TFGPVHFRNQVKIRRRVD

SEQ ID NO: 178606 - protein, 19 aa, Influenza A virus
TFGPVHFRNQVKIRRRVDI

SEQ ID NO: 178607 - protein, 20 aa, Influenza A virus
TFGPVHFRNQVKIRRRVDIN

SEQ ID NO: 178608 - protein, 21 aa, Influenza A virus
TFGPVHFRNQVKIRRRVDINP

SEQ ID NO: 178609 - protein, 22 aa, Influenza A virus
TFGPVHFRNQVKIRRRVDINPG

SEQ ID NO: 178610 - protein, 23 aa, Influenza A virus
TFGPVHFRNQVKIRRRVDINPGH

SEQ ID NO: 178611 - protein, 24 aa, Influenza A virus
TFGPVHFRNQVKIRRRVDINPGHA

SEQ ID NO: 178612 - protein, 25 aa, Influenza A virus
TFGPVHFRNQVKIRRRVDINPGHAD

SEQ ID NO: 178613 - protein, 13 aa, Influenza A virus
TITYSSSMMWEIN

SEQ ID NO: 178614 - protein, 14 aa, Influenza A virus
TITYSSSMMWEING

SEQ ID NO: 178615 - protein, 15 aa, Influenza A virus
TITYSSSMMWEINGP

SEQ ID NO: 178616 - protein, 16 aa, Influenza A virus
TITYSSSMMWEINGPE

SEQ ID NO: 178617 - protein, 17 aa, Influenza A virus
TITYSSSMMWEINGPES

SEQ ID NO: 178618 - protein, 18 aa, Influenza A virus
TITYSSSMMWEINGPESV

SEQ ID NO: 178619 - protein, 19 aa, Influenza A virus
TITYSSSMMWEINGPESVL

SEQ ID NO: 178620 - protein, 20 aa, Influenza A virus
TITYSSSMMWEINGPESVLV

SEQ ID NO: 178621 - protein, 21 aa, Influenza A virus
TITYSSSMMWEINGPESVLVN

SEQ ID NO: 178622 - protein, 22 aa, Influenza A virus
TITYSSSMMWEINGPESVLVNT

SEQ ID NO: 178623 - protein, 23 aa, Influenza A virus
TITYSSSMMWEINGPESVLVNTY

SEQ ID NO: 178624 - protein, 24 aa, Influenza A virus
TITYSSSMMWEINGPESVLVNTYQ

SEQ ID NO: 178625 - protein, 25 aa, Influenza A virus
TITYSSSMMWEINGPESVLVNTYQW

SEQ ID NO: 178626 - protein, 15 aa, Influenza A virus
TKTTVDHMAIIKKYT

SEQ ID NO: 178627 - protein, 16 aa, Influenza A virus
TKTTVDHMAIIKKYTS

SEQ ID NO: 178628 - protein, 17 aa, Influenza A virus
TKTTVDHMAIIKKYTSG

SEQ ID NO: 178629 - protein, 18 aa, Influenza A virus
TKTTVDHMAIIKKYTSGR

SEQ ID NO: 178630 - protein, 19 aa, Influenza A virus
TKTTVDHMAIIKKYTSGRQ

SEQ ID NO: 178631 - protein, 20 aa, Influenza A virus
TKTTVDHMAIIKKYTSGRQE

SEQ ID NO: 178632 - protein, 21 aa, Influenza A virus
TKTTVDHMAIIKKYTSGRQEK

SEQ ID NO: 178633 - protein, 22 aa, Influenza A virus
TKTTVDHMAIIKKYTSGRQEKN

SEQ ID NO: 178634 - protein, 23 aa, Influenza A virus
TKTTVDHMAIIKKYTSGRQEKNP

SEQ ID NO: 178635 - protein, 13 aa, Influenza A virus
TLFQQMRDVLGTF

SEQ ID NO: 178636 - protein, 14 aa, Influenza A virus
TLFQQMRDVLGTFD

SEQ ID NO: 178637 - protein, 15 aa, Influenza A virus
TLFQQMRDVLGTFDT

SEQ ID NO: 178638 - protein, 13 aa, Influenza A virus
TMLYNKMEFEPFQ

SEQ ID NO: 178639 - protein, 14 aa, Influenza A virus
TMLYNKMEFEPFQS

SEQ ID NO: 178640 - protein, 15 aa, Influenza A virus
TMLYNKMEFEPFQSL

SEQ ID NO: 178641 - protein, 16 aa, Influenza A virus
TMLYNKMEFEPFQSLV

SEQ ID NO: 178642 - protein, 17 aa, Influenza A virus
TMLYNKMEFEPFQSLVP

SEQ ID NO: 178643 - protein, 18 aa, Influenza A virus
TMLYNKMEFEPFQSLVPK

SEQ ID NO: 178644 - protein, 19 aa, Influenza A virus
TMLYNKMEFEPFQSLVPKA

SEQ ID NO: 178645 - protein, 15 aa, Influenza A virus
TREILTKTTVDHMAI

SEQ ID NO: 178646 - protein, 16 aa, Influenza A virus
TREILTKTTVDHMAII

SEQ ID NO: 178647 - protein, 17 aa, Influenza A virus
TREILTKTTVDHMAIIK

SEQ ID NO: 178648 - protein, 19 aa, Influenza A virus
TREILTKTTVDHMAIIKKY

SEQ ID NO: 178649 - protein, 20 aa, Influenza A virus
TREILTKTTVDHMAIIKKYT

SEQ ID NO: 178650 - protein, 21 aa, Influenza A virus
TREILTKTTVDHMAIIKKYTS

SEQ ID NO: 178651 - protein, 22 aa, Influenza A virus
TREILTKTTVDHMAIIKKYTSG

SEQ ID NO: 178652 - protein, 23 aa, Influenza A virus
TREILTKTTVDHMAIIKKYTSGR

SEQ ID NO: 178653 - protein, 24 aa, Influenza A virus
TREILTKTTVDHMAIIKKYTSGRQ

SEQ ID NO: 178654 - protein, 25 aa, Influenza A virus
TREILTKTTVDHMAIIKKYTSGRQE

SEQ ID NO: 178655 - protein, 13 aa, Influenza A virus
TRFLPVAGGTSSV

SEQ ID NO: 178656 - protein, 14 aa, Influenza A virus
TRFLPVAGGTSSVY

SEQ ID NO: 178657 - protein, 15 aa, Influenza A virus
TRFLPVAGGTSSVYI

SEQ ID NO: 178658 - protein, 16 aa, Influenza A virus
TRFLPVAGGTSSVYIE

SEQ ID NO: 178659 - protein, 17 aa, Influenza A virus
TRFLPVAGGTSSVYIEV

SEQ ID NO: 178660 - protein, 18 aa, Influenza A virus
TRFLPVAGGTSSVYIEVL

SEQ ID NO: 178661 - protein, 19 aa, Influenza A virus
TRFLPVAGGTSSVYIEVLH

SEQ ID NO: 178662 - protein, 20 aa, Influenza A virus
TRFLPVAGGTSSVYIEVLHL

SEQ ID NO: 178663 - protein, 21 aa, Influenza A virus
TRFLPVAGGTSSVYIEVLHLT

SEQ ID NO: 178664 - protein, 22 aa, Influenza A virus
TRFLPVAGGTSSVYIEVLHLTQ

SEQ ID NO: 178665 - protein, 23 aa, Influenza A virus
TRFLPVAGGTSSVYIEVLHLTQG

SEQ ID NO: 178666 - protein, 24 aa, Influenza A virus
TRFLPVAGGTSSVYIEVLHLTQGT

SEQ ID NO: 178667 - protein, 25 aa, Influenza A virus
TRFLPVAGGTSSVYIEVLHLTQGTC

SEQ ID NO: 178668 - protein, 13 aa, Influenza A virus
TSSVYIEVLHLTQ

SEQ ID NO: 178669 - protein, 14 aa, Influenza A virus
TSSVYIEVLHLTQG

SEQ ID NO: 178670 - protein, 15 aa, Influenza A virus
TSSVYIEVLHLTQGT

SEQ ID NO: 178671 - protein, 16 aa, Influenza A virus
TSSVYIEVLHLTQGTC

SEQ ID NO: 178672 - protein, 17 aa, Influenza A virus
TSSVYIEVLHLTQGTCW

SEQ ID NO: 178673 - protein, 18 aa, Influenza A virus
TSSVYIEVLHLTQGTCWE

SEQ ID NO: 178674 - protein, 19 aa, Influenza A virus
TSSVYIEVLHLTQGTCWEQ

SEQ ID NO: 178675 - protein, 20 aa, Influenza A virus
TSSVYIEVLHLTQGTCWEQM

SEQ ID NO: 178676 - protein, 21 aa, Influenza A virus
TSSVYIEVLHLTQGTCWEQMY

SEQ ID NO: 178677 - protein, 22 aa, Influenza A virus
TSSVYIEVLHLTQGTCWEQMYT

SEQ ID NO: 178678 - protein, 23 aa, Influenza A virus
TSSVYIEVLHLTQGTCWEQMYTP

SEQ ID NO: 178679 - protein, 24 aa, Influenza A virus
TSSVYIEVLHLTQGTCWEQMYTPG

SEQ ID NO: 178680 - protein, 25 aa, Influenza A virus
TSSVYIEVLHLTQGTCWEQMYTPGG

SEQ ID NO: 178681 - protein, 14 aa, Influenza A virus
TTVDHMAIIKKYTS

SEQ ID NO: 178682 - protein, 15 aa, Influenza A virus
TTVDHMAIIKKYTSG

SEQ ID NO: 178683 - protein, 16 aa, Influenza A virus
TTVDHMAIIKKYTSGR

SEQ ID NO: 178684 - protein, 17 aa, Influenza A virus
TTVDHMAIIKKYTSGRQ

SEQ ID NO: 178685 - protein, 18 aa, Influenza A virus
TTVDHMAIIKKYTSGRQE

SEQ ID NO: 178686 - protein, 19 aa, Influenza A virus
TTVDHMAIIKKYTSGRQEK

SEQ ID NO: 178687 - protein, 20 aa, Influenza A virus
TTVDHMAIIKKYTSGRQEKN

SEQ ID NO: 178688 - protein, 21 aa, Influenza A virus
TTVDHMAIIKKYTSGRQEKNP

SEQ ID NO: 178689 - protein, 13 aa, Influenza A virus
TVDHMAIIKKYTS

SEQ ID NO: 178690 - protein, 14 aa, Influenza A virus
TVDHMAIIKKYTSG

SEQ ID NO: 178691 - protein, 15 aa, Influenza A virus
TVDHMAIIKKYTSGR

SEQ ID NO: 178692 - protein, 16 aa, Influenza A virus
TVDHMAIIKKYTSGRQ

SEQ ID NO: 178693 - protein, 17 aa, Influenza A virus
TVDHMAIIKKYTSGRQE

SEQ ID NO: 178694 - protein, 18 aa, Influenza A virus
TVDHMAIIKKYTSGRQEK

SEQ ID NO: 178695 - protein, 19 aa, Influenza A virus
TVDHMAIIKKYTSGRQEKN

SEQ ID NO: 178696 - protein, 20 aa, Influenza A virus
TVDHMAIIKKYTSGRQEKNP

SEQ ID NO: 178697 - protein, 13 aa, Influenza A virus
TVNVRGSGMRILV

SEQ ID NO: 178698 - protein, 14 aa, Influenza A virus
TVNVRGSGMRILVR

SEQ ID NO: 178699 - protein, 15 aa, Influenza A virus
TVNVRGSGMRILVRG

SEQ ID NO: 178700 - protein, 16 aa, Influenza A virus
TVNVRGSGMRILVRGN

SEQ ID NO: 178701 - protein, 17 aa, Influenza A virus
TVNVRGSGMRILVRGNS

SEQ ID NO: 178702 - protein, 18 aa, Influenza A virus
TVNVRGSGMRILVRGNSP

SEQ ID NO: 178703 - protein, 19 aa, Influenza A virus
TVNVRGSGMRILVRGNSPV

SEQ ID NO: 178704 - protein, 20 aa, Influenza A virus
TVNVRGSGMRILVRGNSPVF

SEQ ID NO: 178705 - protein, 21 aa, Influenza A virus
TVNVRGSGMRILVRGNSPVFN

SEQ ID NO: 178706 - protein, 22 aa, Influenza A virus
TVNVRGSGMRILVRGNSPVFNY

SEQ ID NO: 178707 - protein, 23 aa, Influenza A virus
TVNVRGSGMRILVRGNSPVFNYN

SEQ ID NO: 178708 - protein, 24 aa, Influenza A virus
TVNVRGSGMRILVRGNSPVFNYNK

SEQ ID NO: 178709 - protein, 13 aa, Influenza A virus
TYQWIIRNWETVK

SEQ ID NO: 178710 - protein, 14 aa, Influenza A virus
TYQWIIRNWETVKI

SEQ ID NO: 178711 - protein, 15 aa, Influenza A virus
TYQWIIRNWETVKIQ

SEQ ID NO: 178712 - protein, 16 aa, Influenza A virus
TYQWIIRNWETVKIQW

SEQ ID NO: 178713 - protein, 17 aa, Influenza A virus
TYQWIIRNWETVKIQWS

SEQ ID NO: 178714 - protein, 18 aa, Influenza A virus
TYQWIIRNWETVKIQWSQ

SEQ ID NO: 178715 - protein, 14 aa, Influenza A virus
TYSSSMMWEINGPE

SEQ ID NO: 178716 - protein, 15 aa, Influenza A virus
TYSSSMMWEINGPES

SEQ ID NO: 178717 - protein, 16 aa, Influenza A virus
TYSSSMMWEINGPESV

SEQ ID NO: 178718 - protein, 17 aa, Influenza A virus
TYSSSMMWEINGPESVL

SEQ ID NO: 178719 - protein, 18 aa, Influenza A virus
TYSSSMMWEINGPESVLV

SEQ ID NO: 178720 - protein, 19 aa, Influenza A virus
TYSSSMMWEINGPESVLVN

SEQ ID NO: 178721 - protein, 20 aa, Influenza A virus
TYSSSMMWEINGPESVLVNT

SEQ ID NO: 178722 - protein, 21 aa, Influenza A virus
TYSSSMMWEINGPESVLVNTY

SEQ ID NO: 178723 - protein, 22 aa, Influenza A virus
TYSSSMMWEINGPESVLVNTYQ

SEQ ID NO: 178724 - protein, 23 aa, Influenza A virus
TYSSSMMWEINGPESVLVNTYQW

SEQ ID NO: 178725 - protein, 24 aa, Influenza A virus
TYSSSMMWEINGPESVLVNTYQWI

SEQ ID NO: 178726 - protein, 25 aa, Influenza A virus
TYSSSMMWEINGPESVLVNTYQWII

SEQ ID NO: 178727 - protein, 13 aa, Influenza A virus
VAGGTSSVYIEVL

SEQ ID NO: 178728 - protein, 14 aa, Influenza A virus
VAGGTSSVYIEVLH

SEQ ID NO: 178729 - protein, 15 aa, Influenza A virus
VAGGTSSVYIEVLHL

SEQ ID NO: 178730 - protein, 16 aa, Influenza A virus
VAGGTSSVYIEVLHLT

SEQ ID NO: 178731 - protein, 17 aa, Influenza A virus
VAGGTSSVYIEVLHLTQ

SEQ ID NO: 178732 - protein, 18 aa, Influenza A virus
VAGGTSSVYIEVLHLTQG

SEQ ID NO: 178733 - protein, 19 aa, Influenza A virus
VAGGTSSVYIEVLHLTQGT

SEQ ID NO: 178734 - protein, 20 aa, Influenza A virus
VAGGTSSVYIEVLHLTQGTC

SEQ ID NO: 178735 - protein, 21 aa, Influenza A virus
VAGGTSSVYIEVLHLTQGTCW

SEQ ID NO: 178736 - protein, 22 aa, Influenza A virus
VAGGTSSVYIEVLHLTQGTCWE

SEQ ID NO: 178737 - protein, 23 aa, Influenza A virus
VAGGTSSVYIEVLHLTQGTCWEQ

SEQ ID NO: 178738 - protein, 24 aa, Influenza A virus
VAGGTSSVYIEVLHLTQGTCWEQM

SEQ ID NO: 178739 - protein, 25 aa, Influenza A virus
VAGGTSSVYIEVLHLTQGTCWEQMY

SEQ ID NO: 178740 - protein, 13 aa, Influenza A virus
VAMVFSQEDCMIK

SEQ ID NO: 178741 - protein, 14 aa, Influenza A virus
VAMVFSQEDCMIKA

SEQ ID NO: 178742 - protein, 15 aa, Influenza A virus
VAMVFSQEDCMIKAV

SEQ ID NO: 178743 - protein, 16 aa, Influenza A virus
VAMVFSQEDCMIKAVR

SEQ ID NO: 178744 - protein, 17 aa, Influenza A virus
VAMVFSQEDCMIKAVRG

SEQ ID NO: 178745 - protein, 18 aa, Influenza A virus
VAMVFSQEDCMIKAVRGD

SEQ ID NO: 178746 - protein, 19 aa, Influenza A virus
VAMVFSQEDCMIKAVRGDL

SEQ ID NO: 178747 - protein, 20 aa, Influenza A virus
VAMVFSQEDCMIKAVRGDLN

SEQ ID NO: 178748 - protein, 21 aa, Influenza A virus
VAMVFSQEDCMIKAVRGDLNF

SEQ ID NO: 178749 - protein, 22 aa, Influenza A virus
VAMVFSQEDCMIKAVRGDLNFV

SEQ ID NO: 178750 - protein, 23 aa, Influenza A virus
VAMVFSQEDCMIKAVRGDLNFVN

SEQ ID NO: 178751 - protein, 24 aa, Influenza A virus
VAMVFSQEDCMIKAVRGDLNFVNR

SEQ ID NO: 178752 - protein, 25 aa, Influenza A virus
VAMVFSQEDCMIKAVRGDLNFVNRA

SEQ ID NO: 178753 - protein, 13 aa, Influenza A virus
VAYMLERELVRKT

SEQ ID NO: 178754 - protein, 14 aa, Influenza A virus
VAYMLERELVRKTR

SEQ ID NO: 178755 - protein, 15 aa, Influenza A virus
VAYMLERELVRKTRF

SEQ ID NO: 178756 - protein, 16 aa, Influenza A virus
VAYMLERELVRKTRFL

SEQ ID NO: 178757 - protein, 17 aa, Influenza A virus
VAYMLERELVRKTRFLP

SEQ ID NO: 178758 - protein, 18 aa, Influenza A virus
VAYMLERELVRKTRFLPV

SEQ ID NO: 178759 - protein, 19 aa, Influenza A virus
VAYMLERELVRKTRFLPVA

SEQ ID NO: 178760 - protein, 20 aa, Influenza A virus
VAYMLERELVRKTRFLPVAG

SEQ ID NO: 178761 - protein, 21 aa, Influenza A virus
VAYMLERELVRKTRFLPVAGG

SEQ ID NO: 178762 - protein, 22 aa, Influenza A virus
VAYMLERELVRKTRFLPVAGGT

SEQ ID NO: 178763 - protein, 23 aa, Influenza A virus
VAYMLERELVRKTRFLPVAGGTS

SEQ ID NO: 178764 - protein, 24 aa, Influenza A virus
VAYMLERELVRKTRFLPVAGGTSS

SEQ ID NO: 178765 - protein, 25 aa, Influenza A virus
VAYMLERELVRKTRFLPVAGGTSSV

SEQ ID NO: 178766 - protein, 13 aa, Influenza A virus
VDHMAIIKKYTSG

SEQ ID NO: 178767 - protein, 14 aa, Influenza A virus
VDHMAIIKKYTSGR

SEQ ID NO: 178768 - protein, 15 aa, Influenza A virus
VDHMAIIKKYTSGRQ

SEQ ID NO: 178769 - protein, 16 aa, Influenza A virus
VDHMAIIKKYTSGRQE

SEQ ID NO: 178770 - protein, 17 aa, Influenza A virus
VDHMAIIKKYTSGRQEK

SEQ ID NO: 178771 - protein, 18 aa, Influenza A virus
VDHMAIIKKYTSGRQEKN

SEQ ID NO: 178772 - protein, 19 aa, Influenza A virus
VDHMAIIKKYTSGRQEKNP

SEQ ID NO: 178773 - protein, 13 aa, Influenza A virus
VDICKAAMGLRIS

SEQ ID NO: 178774 - protein, 14 aa, Influenza A virus
VDICKAAMGLRISS

SEQ ID NO: 178775 - protein, 15 aa, Influenza A virus
VDICKAAMGLRISSS

SEQ ID NO: 178776 - protein, 16 aa, Influenza A virus
VDICKAAMGLRISSSF

SEQ ID NO: 178777 - protein, 17 aa, Influenza A virus
VDICKAAMGLRISSSFS

SEQ ID NO: 178778 - protein, 18 aa, Influenza A virus
VDICKAAMGLRISSSFSF

SEQ ID NO: 178779 - protein, 19 aa, Influenza A virus
VDICKAAMGLRISSSFSFG

SEQ ID NO: 178780 - protein, 20 aa, Influenza A virus
VDICKAAMGLRISSSFSFGG

SEQ ID NO: 178781 - protein, 21 aa, Influenza A virus
VDICKAAMGLRISSSFSFGGF

SEQ ID NO: 178782 - protein, 22 aa, Influenza A virus
VDICKAAMGLRISSSFSFGGFT

SEQ ID NO: 178783 - protein, 23 aa, Influenza A virus
VDICKAAMGLRISSSFSFGGFTF

SEQ ID NO: 178784 - protein, 24 aa, Influenza A virus
VDICKAAMGLRISSSFSFGGFTFK

SEQ ID NO: 178785 - protein, 25 aa, Influenza A virus
VDICKAAMGLRISSSFSFGGFTFKR

SEQ ID NO: 178786 - protein, 25 aa, Influenza A virus
VDILRQNPTEEQAVDICKAAMGLRI

SEQ ID NO: 178787 - protein, 13 aa, Influenza A virus
VDINPGHADLSAK

SEQ ID NO: 178788 - protein, 14 aa, Influenza A virus
VDINPGHADLSAKE

SEQ ID NO: 178789 - protein, 15 aa, Influenza A virus
VDINPGHADLSAKEA

SEQ ID NO: 178790 - protein, 16 aa, Influenza A virus
VDINPGHADLSAKEAQ

SEQ ID NO: 178791 - protein, 17 aa, Influenza A virus
VDINPGHADLSAKEAQD

SEQ ID NO: 178792 - protein, 19 aa, Influenza A virus
VDINPGHADLSAKEAQDVI

SEQ ID NO: 178793 - protein, 20 aa, Influenza A virus
VDINPGHADLSAKEAQDVIM

SEQ ID NO: 178794 - protein, 21 aa, Influenza A virus
VDINPGHADLSAKEAQDVIME

SEQ ID NO: 178795 - protein, 22 aa, Influenza A virus
VDINPGHADLSAKEAQDVIMEV

SEQ ID NO: 178796 - protein, 23 aa, Influenza A virus
VDINPGHADLSAKEAQDVIMEVV

SEQ ID NO: 178797 - protein, 24 aa, Influenza A virus
VDINPGHADLSAKEAQDVIMEVVF

SEQ ID NO: 178798 - protein, 25 aa, Influenza A virus
VDINPGHADLSAKEAQDVIMEVVFP

SEQ ID NO: 178799 - protein, 13 aa, Influenza A virus
VDQSLIIAARNIV

SEQ ID NO: 178800 - protein, 14 aa, Influenza A virus
VDQSLIIAARNIVR

SEQ ID NO: 178801 - protein, 15 aa, Influenza A virus
VDQSLIIAARNIVRR

SEQ ID NO: 178802 - protein, 16 aa, Influenza A virus
VDQSLIIAARNIVRRA

SEQ ID NO: 178803 - protein, 13 aa, Influenza A virus
VERLKHGTFGPVH

SEQ ID NO: 178804 - protein, 14 aa, Influenza A virus
VERLKHGTFGPVHF

SEQ ID NO: 178805 - protein, 15 aa, Influenza A virus
VERLKHGTFGPVHFR

SEQ ID NO: 178806 - protein, 16 aa, Influenza A virus
VERLKHGTFGPVHFRN

SEQ ID NO: 178807 - protein, 17 aa, Influenza A virus
VERLKHGTFGPVHFRNQ

SEQ ID NO: 178808 - protein, 18 aa, Influenza A virus
VERLKHGTFGPVHFRNQV

SEQ ID NO: 178809 - protein, 19 aa, Influenza A virus
VERLKHGTFGPVHFRNQVK

SEQ ID NO: 178810 - protein, 20 aa, Influenza A virus
VERLKHGTFGPVHFRNQVKI

SEQ ID NO: 178811 - protein, 21 aa, Influenza A virus
VERLKHGTFGPVHFRNQVKIR

SEQ ID NO: 178812 - protein, 22 aa, Influenza A virus
VERLKHGTFGPVHFRNQVKIRR

SEQ ID NO: 178813 - protein, 23 aa, Influenza A virus
VERLKHGTFGPVHFRNQVKIRRR

SEQ ID NO: 178814 - protein, 24 aa, Influenza A virus
VERLKHGTFGPVHFRNQVKIRRRV

SEQ ID NO: 178815 - protein, 25 aa, Influenza A virus
VERLKHGTFGPVHFRNQVKIRRRVD

SEQ ID NO: 178816 - protein, 13 aa, Influenza A virus
VESAVLRGFLILG

SEQ ID NO: 178817 - protein, 14 aa, Influenza A virus
VESAVLRGFLILGK

SEQ ID NO: 178818 - protein, 15 aa, Influenza A virus
VESAVLRGFLILGKE

SEQ ID NO: 178819 - protein, 16 aa, Influenza A virus
VESAVLRGFLILGKED

SEQ ID NO: 178820 - protein, 13 aa, Influenza A virus
VFPNEVGARILTS

SEQ ID NO: 178821 - protein, 14 aa, Influenza A virus
VFPNEVGARILTSE

SEQ ID NO: 178822 - protein, 15 aa, Influenza A virus
VFPNEVGARILTSES

SEQ ID NO: 178823 - protein, 16 aa, Influenza A virus
VFPNEVGARILTSESQ

SEQ ID NO: 178824 - protein, 17 aa, Influenza A virus
VFPNEVGARILTSESQL

SEQ ID NO: 178825 - protein, 18 aa, Influenza A virus
VFPNEVGARILTSESQLT

SEQ ID NO: 178826 - protein, 19 aa, Influenza A virus
VFPNEVGARILTSESQLTI

SEQ ID NO: 178827 - protein, 20 aa, Influenza A virus
VFPNEVGARILTSESQLTIT

SEQ ID NO: 178828 - protein, 21 aa, Influenza A virus
VFPNEVGARILTSESQLTITK

SEQ ID NO: 178829 - protein, 22 aa, Influenza A virus
VFPNEVGARILTSESQLTITKE

SEQ ID NO: 178830 - protein, 23 aa, Influenza A virus
VFPNEVGARILTSESQLTITKEK

SEQ ID NO: 178831 - protein, 24 aa, Influenza A virus
VFPNEVGARILTSESQLTITKEKK

SEQ ID NO: 178832 - protein, 25 aa, Influenza A virus
VFPNEVGARILTSESQLTITKEKKE

SEQ ID NO: 178833 - protein, 17 aa, Influenza A virus
VFSQEDCMIKAVRGDLN

SEQ ID NO: 178834 - protein, 19 aa, Influenza A virus
VFSQEDCMIKAVRGDLNFV

SEQ ID NO: 178835 - protein, 20 aa, Influenza A virus
VFSQEDCMIKAVRGDLNFVN

SEQ ID NO: 178836 - protein, 21 aa, Influenza A virus
VFSQEDCMIKAVRGDLNFVNR

SEQ ID NO: 178837 - protein, 22 aa, Influenza A virus
VFSQEDCMIKAVRGDLNFVNRA

SEQ ID NO: 178838 - protein, 23 aa, Influenza A virus
VFSQEDCMIKAVRGDLNFVNRAN

SEQ ID NO: 178839 - protein, 24 aa, Influenza A virus
VFSQEDCMIKAVRGDLNFVNRANQ

SEQ ID NO: 178840 - protein, 25 aa, Influenza A virus
VFSQEDCMIKAVRGDLNFVNRANQR

SEQ ID NO: 178841 - protein, 14 aa, Influenza A virus
VGARILTSESQLTI

SEQ ID NO: 178842 - protein, 15 aa, Influenza A virus
VGARILTSESQLTIT

SEQ ID NO: 178843 - protein, 16 aa, Influenza A virus
VGARILTSESQLTITK

SEQ ID NO: 178844 - protein, 17 aa, Influenza A virus
VGARILTSESQLTITKE

SEQ ID NO: 178845 - protein, 18 aa, Influenza A virus
VGARILTSESQLTITKEK

SEQ ID NO: 178846 - protein, 19 aa, Influenza A virus
VGARILTSESQLTITKEKK

SEQ ID NO: 178847 - protein, 20 aa, Influenza A virus
VGARILTSESQLTITKEKKE

SEQ ID NO: 178848 - protein, 21 aa, Influenza A virus
VGARILTSESQLTITKEKKEE

SEQ ID NO: 178849 - protein, 22 aa, Influenza A virus
VGARILTSESQLTITKEKKEEL

SEQ ID NO: 178850 - protein, 13 aa, Influenza A virus
VHFRNQVKIRRRV

SEQ ID NO: 178851 - protein, 14 aa, Influenza A virus
VHFRNQVKIRRRVD

SEQ ID NO: 178852 - protein, 15 aa, Influenza A virus
VHFRNQVKIRRRVDI

SEQ ID NO: 178853 - protein, 16 aa, Influenza A virus
VHFRNQVKIRRRVDIN

SEQ ID NO: 178854 - protein, 17 aa, Influenza A virus
VHFRNQVKIRRRVDINP

SEQ ID NO: 178855 - protein, 18 aa, Influenza A virus
VHFRNQVKIRRRVDINPG

SEQ ID NO: 178856 - protein, 19 aa, Influenza A virus
VHFRNQVKIRRRVDINPGH

SEQ ID NO: 178857 - protein, 20 aa, Influenza A virus
VHFRNQVKIRRRVDINPGHA

SEQ ID NO: 178858 - protein, 21 aa, Influenza A virus
VHFRNQVKIRRRVDINPGHAD

SEQ ID NO: 178859 - protein, 22 aa, Influenza A virus
VHFRNQVKIRRRVDINPGHADL

SEQ ID NO: 178860 - protein, 23 aa, Influenza A virus
VHFRNQVKIRRRVDINPGHADLS

SEQ ID NO: 178861 - protein, 24 aa, Influenza A virus
VHFRNQVKIRRRVDINPGHADLSA

SEQ ID NO: 178862 - protein, 25 aa, Influenza A virus
VHFRNQVKIRRRVDINPGHADLSAK

SEQ ID NO: 178863 - protein, 13 aa, Influenza A virus
VIMEVVFPNEVGA

SEQ ID NO: 178864 - protein, 14 aa, Influenza A virus
VIMEVVFPNEVGAR

SEQ ID NO: 178865 - protein, 15 aa, Influenza A virus
VIMEVVFPNEVGARI

SEQ ID NO: 178866 - protein, 16 aa, Influenza A virus
VIMEVVFPNEVGARIL

SEQ ID NO: 178867 - protein, 17 aa, Influenza A virus
VIMEVVFPNEVGARILT

SEQ ID NO: 178868 - protein, 18 aa, Influenza A virus
VIMEVVFPNEVGARILTS

SEQ ID NO: 178869 - protein, 19 aa, Influenza A virus
VIMEVVFPNEVGARILTSE

SEQ ID NO: 178870 - protein, 20 aa, Influenza A virus
VIMEVVFPNEVGARILTSES

SEQ ID NO: 178871 - protein, 21 aa, Influenza A virus
VIMEVVFPNEVGARILTSESQ

SEQ ID NO: 178872 - protein, 22 aa, Influenza A virus
VIMEVVFPNEVGARILTSESQL

SEQ ID NO: 178873 - protein, 23 aa, Influenza A virus
VIMEVVFPNEVGARILTSESQLT

SEQ ID NO: 178874 - protein, 24 aa, Influenza A virus
VIMEVVFPNEVGARILTSESQLTI

SEQ ID NO: 178875 - protein, 25 aa, Influenza A virus
VIMEVVFPNEVGARILTSESQLTIT

SEQ ID NO: 178876 - protein, 15 aa, Influenza A virus
VKIRRRVDINPGHAD

SEQ ID NO: 178877 - protein, 17 aa, Influenza A virus
VKIRRRVDINPGHADLS

SEQ ID NO: 178878 - protein, 19 aa, Influenza A virus
VKIRRRVDINPGHADLSAK

SEQ ID NO: 178879 - protein, 20 aa, Influenza A virus
VKIRRRVDINPGHADLSAKE

SEQ ID NO: 178880 - protein, 21 aa, Influenza A virus
VKIRRRVDINPGHADLSAKEA

SEQ ID NO: 178881 - protein, 22 aa, Influenza A virus
VKIRRRVDINPGHADLSAKEAQ

SEQ ID NO: 178882 - protein, 23 aa, Influenza A virus
VKIRRRVDINPGHADLSAKEAQD

SEQ ID NO: 178883 - protein, 24 aa, Influenza A virus
VKIRRRVDINPGHADLSAKEAQDV

SEQ ID NO: 178884 - protein, 25 aa, Influenza A virus
VKIRRRVDINPGHADLSAKEAQDVI

SEQ ID NO: 178885 - protein, 15 aa, Influenza A virus
VLHLTQGTCWEQMYT

SEQ ID NO: 178886 - protein, 16 aa, Influenza A virus
VLHLTQGTCWEQMYTP

SEQ ID NO: 178887 - protein, 20 aa, Influenza A virus
VLHLTQGTCWEQMYTPGGEV

SEQ ID NO: 178888 - protein, 13 aa, Influenza A virus
VLIGQGDVVLVMK

SEQ ID NO: 178889 - protein, 14 aa, Influenza A virus
VLIGQGDVVLVMKR

SEQ ID NO: 178890 - protein, 15 aa, Influenza A virus
VLIGQGDVVLVMKRK

SEQ ID NO: 178891 - protein, 16 aa, Influenza A virus
VLIGQGDVVLVMKRKR

SEQ ID NO: 178892 - protein, 17 aa, Influenza A virus
VLIGQGDVVLVMKRKRD

SEQ ID NO: 178893 - protein, 18 aa, Influenza A virus
VLIGQGDVVLVMKRKRDS

SEQ ID NO: 178894 - protein, 19 aa, Influenza A virus
VLIGQGDVVLVMKRKRDSS

SEQ ID NO: 178895 - protein, 20 aa, Influenza A virus
VLIGQGDVVLVMKRKRDSSI

SEQ ID NO: 178896 - protein, 21 aa, Influenza A virus
VLIGQGDVVLVMKRKRDSSIL

SEQ ID NO: 178897 - protein, 22 aa, Influenza A virus
VLIGQGDVVLVMKRKRDSSILT

SEQ ID NO: 178898 - protein, 23 aa, Influenza A virus
VLIGQGDVVLVMKRKRDSSILTD

SEQ ID NO: 178899 - protein, 24 aa, Influenza A virus
VLIGQGDVVLVMKRKRDSSILTDS

SEQ ID NO: 178900 - protein, 25 aa, Influenza A virus
VLIGQGDVVLVMKRKRDSSILTDSQ

SEQ ID NO: 178901 - protein, 13 aa, Influenza A virus
VLVMKRKRDSSIL

SEQ ID NO: 178902 - protein, 14 aa, Influenza A virus
VLVMKRKRDSSILT

SEQ ID NO: 178903 - protein, 15 aa, Influenza A virus
VLVMKRKRDSSILTD

SEQ ID NO: 178904 - protein, 16 aa, Influenza A virus
VLVMKRKRDSSILTDS

SEQ ID NO: 178905 - protein, 17 aa, Influenza A virus
VLVMKRKRDSSILTDSQ

SEQ ID NO: 178906 - protein, 18 aa, Influenza A virus
VLVMKRKRDSSILTDSQT

SEQ ID NO: 178907 - protein, 19 aa, Influenza A virus
VLVMKRKRDSSILTDSQTA

SEQ ID NO: 178908 - protein, 20 aa, Influenza A virus
VLVMKRKRDSSILTDSQTAT

SEQ ID NO: 178909 - protein, 21 aa, Influenza A virus
VLVMKRKRDSSILTDSQTATK

SEQ ID NO: 178910 - protein, 22 aa, Influenza A virus
VLVMKRKRDSSILTDSQTATKR

SEQ ID NO: 178911 - protein, 23 aa, Influenza A virus
VLVMKRKRDSSILTDSQTATKRI

SEQ ID NO: 178912 - protein, 24 aa, Influenza A virus
VLVMKRKRDSSILTDSQTATKRIR

SEQ ID NO: 178913 - protein, 25 aa, Influenza A virus
VLVMKRKRDSSILTDSQTATKRIRM

SEQ ID NO: 178914 - protein, 13 aa, Influenza A virus
VLVNTYQWIIRNW

SEQ ID NO: 178915 - protein, 14 aa, Influenza A virus
VLVNTYQWIIRNWE

SEQ ID NO: 178916 - protein, 15 aa, Influenza A virus
VLVNTYQWIIRNWET

SEQ ID NO: 178917 - protein, 16 aa, Influenza A virus
VLVNTYQWIIRNWETV

SEQ ID NO: 178918 - protein, 17 aa, Influenza A virus
VLVNTYQWIIRNWETVK

SEQ ID NO: 178919 - protein, 18 aa, Influenza A virus
VLVNTYQWIIRNWETVKI

SEQ ID NO: 178920 - protein, 19 aa, Influenza A virus
VLVNTYQWIIRNWETVKIQ

SEQ ID NO: 178921 - protein, 20 aa, Influenza A virus
VLVNTYQWIIRNWETVKIQW

SEQ ID NO: 178922 - protein, 21 aa, Influenza A virus
VLVNTYQWIIRNWETVKIQWS

SEQ ID NO: 178923 - protein, 15 aa, Influenza A virus
VMKRKRDSSILTDSQ

SEQ ID NO: 178924 - protein, 16 aa, Influenza A virus
VMKRKRDSSILTDSQT

SEQ ID NO: 178925 - protein, 17 aa, Influenza A virus
VMKRKRDSSILTDSQTA

SEQ ID NO: 178926 - protein, 19 aa, Influenza A virus
VMKRKRDSSILTDSQTATK

SEQ ID NO: 178927 - protein, 20 aa, Influenza A virus
VMKRKRDSSILTDSQTATKR

SEQ ID NO: 178928 - protein, 21 aa, Influenza A virus
VMKRKRDSSILTDSQTATKRI

SEQ ID NO: 178929 - protein, 22 aa, Influenza A virus
VMKRKRDSSILTDSQTATKRIR

SEQ ID NO: 178930 - protein, 23 aa, Influenza A virus
VMKRKRDSSILTDSQTATKRIRM

SEQ ID NO: 178931 - protein, 24 aa, Influenza A virus
VMKRKRDSSILTDSQTATKRIRMA

SEQ ID NO: 178932 - protein, 25 aa, Influenza A virus
VMKRKRDSSILTDSQTATKRIRMAI

SEQ ID NO: 178933 - protein, 14 aa, Influenza A virus
VMVSPLAVTWWNRN

SEQ ID NO: 178934 - protein, 15 aa, Influenza A virus
VMVSPLAVTWWNRNG

SEQ ID NO: 178935 - protein, 16 aa, Influenza A virus
VMVSPLAVTWWNRNGP

SEQ ID NO: 178936 - protein, 15 aa, Influenza A virus
VNRANQRLNPMHQLL

SEQ ID NO: 178937 - protein, 16 aa, Influenza A virus
VNRANQRLNPMHQLLR

SEQ ID NO: 178938 - protein, 17 aa, Influenza A virus
VNRANQRLNPMHQLLRH

SEQ ID NO: 178939 - protein, 19 aa, Influenza A virus
VNRANQRLNPMHQLLRHFQ

SEQ ID NO: 178940 - protein, 20 aa, Influenza A virus
VNRANQRLNPMHQLLRHFQK

SEQ ID NO: 178941 - protein, 21 aa, Influenza A virus
VNRANQRLNPMHQLLRHFQKD

SEQ ID NO: 178942 - protein, 22 aa, Influenza A virus
VNRANQRLNPMHQLLRHFQKDA

SEQ ID NO: 178943 - protein, 23 aa, Influenza A virus
VNRANQRLNPMHQLLRHFQKDAK

SEQ ID NO: 178944 - protein, 24 aa, Influenza A virus
VNRANQRLNPMHQLLRHFQKDAKV

SEQ ID NO: 178945 - protein, 25 aa, Influenza A virus
VNRANQRLNPMHQLLRHFQKDAKVL

SEQ ID NO: 178946 - protein, 13 aa, Influenza A virus
VNTYQWIIRNWET

SEQ ID NO: 178947 - protein, 14 aa, Influenza A virus
VNTYQWIIRNWETV

SEQ ID NO: 178948 - protein, 15 aa, Influenza A virus
VNTYQWIIRNWETVK

SEQ ID NO: 178949 - protein, 16 aa, Influenza A virus
VNTYQWIIRNWETVKI

SEQ ID NO: 178950 - protein, 17 aa, Influenza A virus
VNTYQWIIRNWETVKIQ

SEQ ID NO: 178951 - protein, 18 aa, Influenza A virus
VNTYQWIIRNWETVKIQW

SEQ ID NO: 178952 - protein, 19 aa, Influenza A virus
VNTYQWIIRNWETVKIQWS

SEQ ID NO: 178953 - protein, 13 aa, Influenza A virus
VNVRGSGMRILVR

SEQ ID NO: 178954 - protein, 14 aa, Influenza A virus
VNVRGSGMRILVRG

SEQ ID NO: 178955 - protein, 15 aa, Influenza A virus
VNVRGSGMRILVRGN

SEQ ID NO: 178956 - protein, 16 aa, Influenza A virus
VNVRGSGMRILVRGNS

SEQ ID NO: 178957 - protein, 17 aa, Influenza A virus
VNVRGSGMRILVRGNSP

SEQ ID NO: 178958 - protein, 18 aa, Influenza A virus
VNVRGSGMRILVRGNSPV

SEQ ID NO: 178959 - protein, 19 aa, Influenza A virus
VNVRGSGMRILVRGNSPVF

SEQ ID NO: 178960 - protein, 20 aa, Influenza A virus
VNVRGSGMRILVRGNSPVFN

SEQ ID NO: 178961 - protein, 21 aa, Influenza A virus
VNVRGSGMRILVRGNSPVFNY

SEQ ID NO: 178962 - protein, 22 aa, Influenza A virus
VNVRGSGMRILVRGNSPVFNYN

SEQ ID NO: 178963 - protein, 23 aa, Influenza A virus
VNVRGSGMRILVRGNSPVFNYNK

SEQ ID NO: 178964 - protein, 14 aa, Influenza A virus
VRDQRGNVLLSPEE

SEQ ID NO: 178965 - protein, 15 aa, Influenza A virus
VRDQRGNVLLSPEEV

SEQ ID NO: 178966 - protein, 16 aa, Influenza A virus
VRDQRGNVLLSPEEVS

SEQ ID NO: 178967 - protein, 17 aa, Influenza A virus
VRDQRGNVLLSPEEVSE

SEQ ID NO: 178968 - protein, 14 aa, Influenza A virus
VRGDLNFVNRANQR

SEQ ID NO: 178969 - protein, 15 aa, Influenza A virus
VRGDLNFVNRANQRL

SEQ ID NO: 178970 - protein, 16 aa, Influenza A virus
VRGDLNFVNRANQRLN

SEQ ID NO: 178971 - protein, 17 aa, Influenza A virus
VRGDLNFVNRANQRLNP

SEQ ID NO: 178972 - protein, 18 aa, Influenza A virus
VRGDLNFVNRANQRLNPM

SEQ ID NO: 178973 - protein, 19 aa, Influenza A virus
VRGDLNFVNRANQRLNPMH

SEQ ID NO: 178974 - protein, 20 aa, Influenza A virus
VRGDLNFVNRANQRLNPMHQ

SEQ ID NO: 178975 - protein, 21 aa, Influenza A virus
VRGDLNFVNRANQRLNPMHQL

SEQ ID NO: 178976 - protein, 22 aa, Influenza A virus
VRGDLNFVNRANQRLNPMHQLL

SEQ ID NO: 178977 - protein, 23 aa, Influenza A virus
VRGDLNFVNRANQRLNPMHQLLR

SEQ ID NO: 178978 - protein, 24 aa, Influenza A virus
VRGDLNFVNRANQRLNPMHQLLRH

SEQ ID NO: 178979 - protein, 25 aa, Influenza A virus
VRGDLNFVNRANQRLNPMHQLLRHF

SEQ ID NO: 178980 - protein, 14 aa, Influenza A virus
VRGSGMRILVRGNS

SEQ ID NO: 178981 - protein, 15 aa, Influenza A virus
VRGSGMRILVRGNSP

SEQ ID NO: 178982 - protein, 16 aa, Influenza A virus
VRGSGMRILVRGNSPV

SEQ ID NO: 178983 - protein, 17 aa, Influenza A virus
VRGSGMRILVRGNSPVF

SEQ ID NO: 178984 - protein, 18 aa, Influenza A virus
VRGSGMRILVRGNSPVFN

SEQ ID NO: 178985 - protein, 19 aa, Influenza A virus
VRGSGMRILVRGNSPVFNY

SEQ ID NO: 178986 - protein, 20 aa, Influenza A virus
VRGSGMRILVRGNSPVFNYN

SEQ ID NO: 178987 - protein, 21 aa, Influenza A virus
VRGSGMRILVRGNSPVFNYNK

SEQ ID NO: 178988 - protein, 13 aa, Influenza A virus
VRKTRFLPVAGGT

SEQ ID NO: 178989 - protein, 14 aa, Influenza A virus
VRKTRFLPVAGGTS

SEQ ID NO: 178990 - protein, 15 aa, Influenza A virus
VRKTRFLPVAGGTSS

SEQ ID NO: 178991 - protein, 16 aa, Influenza A virus
VRKTRFLPVAGGTSSV

SEQ ID NO: 178992 - protein, 17 aa, Influenza A virus
VRKTRFLPVAGGTSSVY

SEQ ID NO: 178993 - protein, 18 aa, Influenza A virus
VRKTRFLPVAGGTSSVYI

SEQ ID NO: 178994 - protein, 19 aa, Influenza A virus
VRKTRFLPVAGGTSSVYIE

SEQ ID NO: 178995 - protein, 20 aa, Influenza A virus
VRKTRFLPVAGGTSSVYIEV

SEQ ID NO: 178996 - protein, 21 aa, Influenza A virus
VRKTRFLPVAGGTSSVYIEVL

SEQ ID NO: 178997 - protein, 22 aa, Influenza A virus
VRKTRFLPVAGGTSSVYIEVLH

SEQ ID NO: 178998 - protein, 23 aa, Influenza A virus
VRKTRFLPVAGGTSSVYIEVLHL

SEQ ID NO: 178999 - protein, 24 aa, Influenza A virus
VRKTRFLPVAGGTSSVYIEVLHLT

SEQ ID NO: 179000 - protein, 25 aa, Influenza A virus
VRKTRFLPVAGGTSSVYIEVLHLTQ

SEQ ID NO: 179001 - protein, 13 aa, Influenza A virus
VRTLFQQMRDVLG

SEQ ID NO: 179002 - protein, 14 aa, Influenza A virus
VRTLFQQMRDVLGT

SEQ ID NO: 179003 - protein, 15 aa, Influenza A virus
VRTLFQQMRDVLGTF

SEQ ID NO: 179004 - protein, 16 aa, Influenza A virus
VRTLFQQMRDVLGTFD

SEQ ID NO: 179005 - protein, 17 aa, Influenza A virus
VRTLFQQMRDVLGTFDT

SEQ ID NO: 179006 - protein, 14 aa, Influenza A virus
VSADPLASLLEMCH

SEQ ID NO: 179007 - protein, 15 aa, Influenza A virus
VSADPLASLLEMCHS

SEQ ID NO: 179008 - protein, 16 aa, Influenza A virus
VSADPLASLLEMCHST

SEQ ID NO: 179009 - protein, 17 aa, Influenza A virus
VSADPLASLLEMCHSTQ

SEQ ID NO: 179010 - protein, 19 aa, Influenza A virus
VSADPLASLLEMCHSTQIG

SEQ ID NO: 179011 - protein, 20 aa, Influenza A virus
VSADPLASLLEMCHSTQIGG

SEQ ID NO: 179012 - protein, 15 aa, Influenza A virus
VSGRDEQSIAEAIIV

SEQ ID NO: 179013 - protein, 16 aa, Influenza A virus
VSGRDEQSIAEAIIVA

SEQ ID NO: 179014 - protein, 13 aa, Influenza A virus
VSIDRFLRVRDQR

SEQ ID NO: 179015 - protein, 14 aa, Influenza A virus
VSIDRFLRVRDQRG

SEQ ID NO: 179016 - protein, 15 aa, Influenza A virus
VSIDRFLRVRDQRGN

SEQ ID NO: 179017 - protein, 16 aa, Influenza A virus
VSIDRFLRVRDQRGNV

SEQ ID NO: 179018 - protein, 17 aa, Influenza A virus
VSIDRFLRVRDQRGNVL

SEQ ID NO: 179019 - protein, 18 aa, Influenza A virus
VSIDRFLRVRDQRGNVLL

SEQ ID NO: 179020 - protein, 19 aa, Influenza A virus
VSIDRFLRVRDQRGNVLLS

SEQ ID NO: 179021 - protein, 20 aa, Influenza A virus
VSIDRFLRVRDQRGNVLLSP

SEQ ID NO: 179022 - protein, 21 aa, Influenza A virus
VSIDRFLRVRDQRGNVLLSPE

SEQ ID NO: 179023 - protein, 22 aa, Influenza A virus
VSIDRFLRVRDQRGNVLLSPEE

SEQ ID NO: 179024 - protein, 23 aa, Influenza A virus
VSIDRFLRVRDQRGNVLLSPEEV

SEQ ID NO: 179025 - protein, 24 aa, Influenza A virus
VSIDRFLRVRDQRGNVLLSPEEVS

SEQ ID NO: 179026 - protein, 25 aa, Influenza A virus
VSIDRFLRVRDQRGNVLLSPEEVSE

SEQ ID NO: 179027 - protein, 13 aa, Influenza A virus
VSPLAVTWWNRNG

SEQ ID NO: 179028 - protein, 14 aa, Influenza A virus
VSPLAVTWWNRNGP

SEQ ID NO: 179029 - protein, 14 aa, Influenza A virus
VVFPNEVGARILTS

SEQ ID NO: 179030 - protein, 15 aa, Influenza A virus
VVFPNEVGARILTSE

SEQ ID NO: 179031 - protein, 16 aa, Influenza A virus
VVFPNEVGARILTSES

SEQ ID NO: 179032 - protein, 17 aa, Influenza A virus
VVFPNEVGARILTSESQ

SEQ ID NO: 179033 - protein, 18 aa, Influenza A virus
VVFPNEVGARILTSESQL

SEQ ID NO: 179034 - protein, 19 aa, Influenza A virus
VVFPNEVGARILTSESQLT

SEQ ID NO: 179035 - protein, 20 aa, Influenza A virus
VVFPNEVGARILTSESQLTI

SEQ ID NO: 179036 - protein, 21 aa, Influenza A virus
VVFPNEVGARILTSESQLTIT

SEQ ID NO: 179037 - protein, 22 aa, Influenza A virus
VVFPNEVGARILTSESQLTITK

SEQ ID NO: 179038 - protein, 23 aa, Influenza A virus
VVFPNEVGARILTSESQLTITKE

SEQ ID NO: 179039 - protein, 24 aa, Influenza A virus
VVFPNEVGARILTSESQLTITKEK

SEQ ID NO: 179040 - protein, 25 aa, Influenza A virus
VVFPNEVGARILTSESQLTITKEKK

SEQ ID NO: 179041 - protein, 13 aa, Influenza A virus
VVLVMKRKRDSSI

SEQ ID NO: 179042 - protein, 14 aa, Influenza A virus
VVLVMKRKRDSSIL

SEQ ID NO: 179043 - protein, 15 aa, Influenza A virus
VVLVMKRKRDSSILT

SEQ ID NO: 179044 - protein, 16 aa, Influenza A virus
VVLVMKRKRDSSILTD

SEQ ID NO: 179045 - protein, 17 aa, Influenza A virus
VVLVMKRKRDSSILTDS

SEQ ID NO: 179046 - protein, 18 aa, Influenza A virus
VVLVMKRKRDSSILTDSQ

SEQ ID NO: 179047 - protein, 19 aa, Influenza A virus
VVLVMKRKRDSSILTDSQT

SEQ ID NO: 179048 - protein, 20 aa, Influenza A virus
VVLVMKRKRDSSILTDSQTA

SEQ ID NO: 179049 - protein, 21 aa, Influenza A virus
VVLVMKRKRDSSILTDSQTAT

SEQ ID NO: 179050 - protein, 22 aa, Influenza A virus
VVLVMKRKRDSSILTDSQTATK

SEQ ID NO: 179051 - protein, 23 aa, Influenza A virus
VVLVMKRKRDSSILTDSQTATKR

SEQ ID NO: 179052 - protein, 24 aa, Influenza A virus
VVLVMKRKRDSSILTDSQTATKRI

SEQ ID NO: 179053 - protein, 25 aa, Influenza A virus
VVLVMKRKRDSSILTDSQTATKRIR

SEQ ID NO: 179054 - protein, 13 aa, Influenza A virus
VVSIDRFLRVRDQ

SEQ ID NO: 179055 - protein, 14 aa, Influenza A virus
VVSIDRFLRVRDQR

SEQ ID NO: 179056 - protein, 15 aa, Influenza A virus
VVSIDRFLRVRDQRG

SEQ ID NO: 179057 - protein, 16 aa, Influenza A virus
VVSIDRFLRVRDQRGN

SEQ ID NO: 179058 - protein, 17 aa, Influenza A virus
VVSIDRFLRVRDQRGNV

SEQ ID NO: 179059 - protein, 18 aa, Influenza A virus
VVSIDRFLRVRDQRGNVL

SEQ ID NO: 179060 - protein, 19 aa, Influenza A virus
VVSIDRFLRVRDQRGNVLL

SEQ ID NO: 179061 - protein, 20 aa, Influenza A virus
VVSIDRFLRVRDQRGNVLLS

SEQ ID NO: 179062 - protein, 21 aa, Influenza A virus
VVSIDRFLRVRDQRGNVLLSP

SEQ ID NO: 179063 - protein, 22 aa, Influenza A virus
VVSIDRFLRVRDQRGNVLLSPE

SEQ ID NO: 179064 - protein, 23 aa, Influenza A virus
VVSIDRFLRVRDQRGNVLLSPEE

SEQ ID NO: 179065 - protein, 24 aa, Influenza A virus
VVSIDRFLRVRDQRGNVLLSPEEV

SEQ ID NO: 179066 - protein, 25 aa, Influenza A virus
VVSIDRFLRVRDQRGNVLLSPEEVS

SEQ ID NO: 179067 - protein, 13 aa, Influenza A virus
VVVSIDRFLRVRD

SEQ ID NO: 179068 - protein, 14 aa, Influenza A virus
VVVSIDRFLRVRDQ

SEQ ID NO: 179069 - protein, 15 aa, Influenza A virus
VVVSIDRFLRVRDQR

SEQ ID NO: 179070 - protein, 16 aa, Influenza A virus
VVVSIDRFLRVRDQRG

SEQ ID NO: 179071 - protein, 17 aa, Influenza A virus
VVVSIDRFLRVRDQRGN

SEQ ID NO: 179072 - protein, 18 aa, Influenza A virus
VVVSIDRFLRVRDQRGNV

SEQ ID NO: 179073 - protein, 19 aa, Influenza A virus
VVVSIDRFLRVRDQRGNVL

SEQ ID NO: 179074 - protein, 20 aa, Influenza A virus
VVVSIDRFLRVRDQRGNVLL

SEQ ID NO: 179075 - protein, 21 aa, Influenza A virus
VVVSIDRFLRVRDQRGNVLLS

SEQ ID NO: 179076 - protein, 22 aa, Influenza A virus
VVVSIDRFLRVRDQRGNVLLSP

SEQ ID NO: 179077 - protein, 23 aa, Influenza A virus
VVVSIDRFLRVRDQRGNVLLSPE

SEQ ID NO: 179078 - protein, 24 aa, Influenza A virus
VVVSIDRFLRVRDQRGNVLLSPEE

SEQ ID NO: 179079 - protein, 25 aa, Influenza A virus
VVVSIDRFLRVRDQRGNVLLSPEEV

SEQ ID NO: 179080 - protein, 14 aa, Influenza A virus
VYIEVLHLTQGTCW

SEQ ID NO: 179081 - protein, 15 aa, Influenza A virus
VYIEVLHLTQGTCWE

SEQ ID NO: 179082 - protein, 16 aa, Influenza A virus
VYIEVLHLTQGTCWEQ

SEQ ID NO: 179083 - protein, 17 aa, Influenza A virus
VYIEVLHLTQGTCWEQM

SEQ ID NO: 179084 - protein, 19 aa, Influenza A virus
VYIEVLHLTQGTCWEQMYT

SEQ ID NO: 179085 - protein, 20 aa, Influenza A virus
VYIEVLHLTQGTCWEQMYTP

SEQ ID NO: 179086 - protein, 24 aa, Influenza A virus
VYIEVLHLTQGTCWEQMYTPGGEV

SEQ ID NO: 179087 - protein, 14 aa, Influenza A virus
WEINGPESVLVNTY

SEQ ID NO: 179088 - protein, 15 aa, Influenza A virus
WEINGPESVLVNTYQ

SEQ ID NO: 179089 - protein, 16 aa, Influenza A virus
WEINGPESVLVNTYQW

SEQ ID NO: 179090 - protein, 17 aa, Influenza A virus
WEINGPESVLVNTYQWI

SEQ ID NO: 179091 - protein, 18 aa, Influenza A virus
WEINGPESVLVNTYQWII

SEQ ID NO: 179092 - protein, 19 aa, Influenza A virus
WEINGPESVLVNTYQWIIR

SEQ ID NO: 179093 - protein, 20 aa, Influenza A virus
WEINGPESVLVNTYQWIIRN

SEQ ID NO: 179094 - protein, 21 aa, Influenza A virus
WEINGPESVLVNTYQWIIRNW

SEQ ID NO: 179095 - protein, 22 aa, Influenza A virus
WEINGPESVLVNTYQWIIRNWE

SEQ ID NO: 179096 - protein, 13 aa, Influenza A virus
WIIRNWETVKIQW

SEQ ID NO: 179097 - protein, 14 aa, Influenza A virus
WIIRNWETVKIQWS

SEQ ID NO: 179098 - protein, 15 aa, Influenza A virus
WIIRNWETVKIQWSQ

SEQ ID NO: 179099 - protein, 13 aa, Influenza A virus
WMMAMKYPITADK

SEQ ID NO: 179100 - protein, 14 aa, Influenza A virus
WMMAMKYPITADKR

SEQ ID NO: 179101 - protein, 15 aa, Influenza A virus
WMMAMKYPITADKRI

SEQ ID NO: 179102 - protein, 14 aa, Influenza A virus
YGPALSINELSNLA

SEQ ID NO: 179103 - protein, 15 aa, Influenza A virus
YGPALSINELSNLAK

SEQ ID NO: 179104 - protein, 16 aa, Influenza A virus
YGPALSINELSNLAKG

SEQ ID NO: 179105 - protein, 17 aa, Influenza A virus
YGPALSINELSNLAKGE

SEQ ID NO: 179106 - protein, 18 aa, Influenza A virus
YGPALSINELSNLAKGEK

SEQ ID NO: 179107 - protein, 19 aa, Influenza A virus
YGPALSINELSNLAKGEKA

SEQ ID NO: 179108 - protein, 20 aa, Influenza A virus
YGPALSINELSNLAKGEKAN

SEQ ID NO: 179109 - protein, 21 aa, Influenza A virus
YGPALSINELSNLAKGEKANV

SEQ ID NO: 179110 - protein, 22 aa, Influenza A virus
YGPALSINELSNLAKGEKANVL

SEQ ID NO: 179111 - protein, 23 aa, Influenza A virus
YGPALSINELSNLAKGEKANVLI

SEQ ID NO: 179112 - protein, 24 aa, Influenza A virus
YGPALSINELSNLAKGEKANVLIG

SEQ ID NO: 179113 - protein, 25 aa, Influenza A virus
YGPALSINELSNLAKGEKANVLIGQ

SEQ ID NO: 179114 - protein, 15 aa, Influenza A virus
YIEVLHLTQGTCWEQ

SEQ ID NO: 179115 - protein, 16 aa, Influenza A virus
YIEVLHLTQGTCWEQM

SEQ ID NO: 179116 - protein, 17 aa, Influenza A virus
YIEVLHLTQGTCWEQMY

SEQ ID NO: 179117 - protein, 20 aa, Influenza A virus
YIEVLHLTQGTCWEQMYTPG

SEQ ID NO: 179118 - protein, 14 aa, Influenza A virus
YMLERELVRKTRFL

SEQ ID NO: 179119 - protein, 15 aa, Influenza A virus
YMLERELVRKTRFLP

SEQ ID NO: 179120 - protein, 16 aa, Influenza A virus
YMLERELVRKTRFLPV

SEQ ID NO: 179121 - protein, 17 aa, Influenza A virus
YMLERELVRKTRFLPVA

SEQ ID NO: 179122 - protein, 18 aa, Influenza A virus
YMLERELVRKTRFLPVAG

SEQ ID NO: 179123 - protein, 19 aa, Influenza A virus
YMLERELVRKTRFLPVAGG

SEQ ID NO: 179124 - protein, 20 aa, Influenza A virus
YMLERELVRKTRFLPVAGGT

SEQ ID NO: 179125 - protein, 21 aa, Influenza A virus
YMLERELVRKTRFLPVAGGTS

SEQ ID NO: 179126 - protein, 22 aa, Influenza A virus
YMLERELVRKTRFLPVAGGTSS

SEQ ID NO: 179127 - protein, 23 aa, Influenza A virus
YMLERELVRKTRFLPVAGGTSSV

SEQ ID NO: 179128 - protein, 24 aa, Influenza A virus
YMLERELVRKTRFLPVAGGTSSVY

SEQ ID NO: 179129 - protein, 25 aa, Influenza A virus
YMLERELVRKTRFLPVAGGTSSVYI

SEQ ID NO: 179130 - protein, 13 aa, Influenza A virus
YNKMEFEPFQSLV

SEQ ID NO: 179131 - protein, 14 aa, Influenza A virus
YNKMEFEPFQSLVP

SEQ ID NO: 179132 - protein, 15 aa, Influenza A virus
YNKMEFEPFQSLVPK

SEQ ID NO: 179133 - protein, 16 aa, Influenza A virus
YNKMEFEPFQSLVPKA

SEQ ID NO: 179134 - protein, 13 aa, Influenza A virus
YQWIIRNWETVKI

SEQ ID NO: 179135 - protein, 14 aa, Influenza A virus
YQWIIRNWETVKIQ

SEQ ID NO: 179136 - protein, 15 aa, Influenza A virus
YQWIIRNWETVKIQW

SEQ ID NO: 179137 - protein, 16 aa, Influenza A virus
YQWIIRNWETVKIQWS

SEQ ID NO: 179138 - protein, 17 aa, Influenza A virus
YQWIIRNWETVKIQWSQ

SEQ ID NO: 179139 - protein, 13 aa, Influenza A virus
YSGFVRTLFQQMR

SEQ ID NO: 179140 - protein, 14 aa, Influenza A virus
YSGFVRTLFQQMRD

SEQ ID NO: 179141 - protein, 15 aa, Influenza A virus
YSGFVRTLFQQMRDV

SEQ ID NO: 179142 - protein, 16 aa, Influenza A virus
YSGFVRTLFQQMRDVL

SEQ ID NO: 179143 - protein, 17 aa, Influenza A virus
YSGFVRTLFQQMRDVLG

SEQ ID NO: 179144 - protein, 18 aa, Influenza A virus
YSGFVRTLFQQMRDVLGT

SEQ ID NO: 179145 - protein, 19 aa, Influenza A virus
YSGFVRTLFQQMRDVLGTF

SEQ ID NO: 179146 - protein, 20 aa, Influenza A virus
YSGFVRTLFQQMRDVLGTFD

SEQ ID NO: 179147 - protein, 21 aa, Influenza A virus
YSGFVRTLFQQMRDVLGTFDT

SEQ ID NO: 179148 - protein, 14 aa, Influenza A virus
YSSSMMWEINGPES

SEQ ID NO: 179149 - protein, 15 aa, Influenza A virus
YSSSMMWEINGPESV

SEQ ID NO: 179150 - protein, 16 aa, Influenza A virus
YSSSMMWEINGPESVL

SEQ ID NO: 179151 - protein, 17 aa, Influenza A virus
YSSSMMWEINGPESVLV

SEQ ID NO: 179152 - protein, 18 aa, Influenza A virus
YSSSMMWEINGPESVLVN

SEQ ID NO: 179153 - protein, 19 aa, Influenza A virus
YSSSMMWEINGPESVLVNT

SEQ ID NO: 179154 - protein, 20 aa, Influenza A virus
YSSSMMWEINGPESVLVNTY

SEQ ID NO: 179155 - protein, 21 aa, Influenza A virus
YSSSMMWEINGPESVLVNTYQ

SEQ ID NO: 179156 - protein, 22 aa, Influenza A virus
YSSSMMWEINGPESVLVNTYQW

SEQ ID NO: 179157 - protein, 23 aa, Influenza A virus
YSSSMMWEINGPESVLVNTYQWI

SEQ ID NO: 179158 - protein, 24 aa, Influenza A virus
YSSSMMWEINGPESVLVNTYQWII

SEQ ID NO: 179159 - protein, 25 aa, Influenza A virus
YSSSMMWEINGPESVLVNTYQWIIR

SEQ ID NO: 179160 - protein, 14 aa, Influenza A virus
AAICTHLEVCFMYS

SEQ ID NO: 179161 - protein, 15 aa, Influenza A virus
AAICTHLEVCFMYSD

SEQ ID NO: 179162 - protein, 16 aa, Influenza A virus
AAICTHLEVCFMYSDF

SEQ ID NO: 179163 - protein, 17 aa, Influenza A virus
AAICTHLEVCFMYSDFH

SEQ ID NO: 179164 - protein, 18 aa, Influenza A virus
AAICTHLEVCFMYSDFHF

SEQ ID NO: 179165 - protein, 19 aa, Influenza A virus
AAICTHLEVCFMYSDFHFI

SEQ ID NO: 179166 - protein, 13 aa, Influenza A virus
AAMDDFQLIPMIS

SEQ ID NO: 179167 - protein, 14 aa, Influenza A virus
AAMDDFQLIPMISK

SEQ ID NO: 179168 - protein, 15 aa, Influenza A virus
AAMDDFQLIPMISKC

SEQ ID NO: 179169 - protein, 16 aa, Influenza A virus
AAMDDFQLIPMISKCR

SEQ ID NO: 179170 - protein, 17 aa, Influenza A virus
AAMDDFQLIPMISKCRT

SEQ ID NO: 179171 - protein, 18 aa, Influenza A virus
AAMDDFQLIPMISKCRTK

SEQ ID NO: 179172 - protein, 19 aa, Influenza A virus
AAMDDFQLIPMISKCRTKE

SEQ ID NO: 179173 - protein, 20 aa, Influenza A virus
AAMDDFQLIPMISKCRTKEG

SEQ ID NO: 179174 - protein, 21 aa, Influenza A virus
AAMDDFQLIPMISKCRTKEGR

SEQ ID NO: 179175 - protein, 22 aa, Influenza A virus
AAMDDFQLIPMISKCRTKEGRR

SEQ ID NO: 179176 - protein, 23 aa, Influenza A virus
AAMDDFQLIPMISKCRTKEGRRK

SEQ ID NO: 179177 - protein, 24 aa, Influenza A virus
AAMDDFQLIPMISKCRTKEGRRKT

SEQ ID NO: 179178 - protein, 25 aa, Influenza A virus
AAMDDFQLIPMISKCRTKEGRRKTN

SEQ ID NO: 179179 - protein, 20 aa, Influenza A virus
ADYTLDEESRARIKTRLFTI

SEQ ID NO: 179180 - protein, 21 aa, Influenza A virus
ADYTLDEESRARIKTRLFTIR

SEQ ID NO: 179181 - protein, 22 aa, Influenza A virus
ADYTLDEESRARIKTRLFTIRQ

SEQ ID NO: 179182 - protein, 23 aa, Influenza A virus
ADYTLDEESRARIKTRLFTIRQE

SEQ ID NO: 179183 - protein, 24 aa, Influenza A virus
ADYTLDEESRARIKTRLFTIRQEM

SEQ ID NO: 179184 - protein, 25 aa, Influenza A virus
ADYTLDEESRARIKTRLFTIRQEMA

SEQ ID NO: 179185 - protein, 15 aa, Influenza A virus
AEVSHCRATEYIMKG

SEQ ID NO: 179186 - protein, 16 aa, Influenza A virus
AEVSHCRATEYIMKGV

SEQ ID NO: 179187 - protein, 17 aa, Influenza A virus
AEVSHCRATEYIMKGVY

SEQ ID NO: 179188 - protein, 18 aa, Influenza A virus
AEVSHCRATEYIMKGVYI

SEQ ID NO: 179189 - protein, 19 aa, Influenza A virus
AEVSHCRATEYIMKGVYIN

SEQ ID NO: 179190 - protein, 20 aa, Influenza A virus
AEVSHCRATEYIMKGVYINT

SEQ ID NO: 179191 - protein, 21 aa, Influenza A virus
AEVSHCRATEYIMKGVYINTA

SEQ ID NO: 179192 - protein, 22 aa, Influenza A virus
AEVSHCRATEYIMKGVYINTAL

SEQ ID NO: 179193 - protein, 23 aa, Influenza A virus
AEVSHCRATEYIMKGVYINTALL

SEQ ID NO: 179194 - protein, 24 aa, Influenza A virus
AEVSHCRATEYIMKGVYINTALLN

SEQ ID NO: 179195 - protein, 25 aa, Influenza A virus
AEVSHCRATEYIMKGVYINTALLNA

SEQ ID NO: 179196 - protein, 14 aa, Influenza A virus
AICTHLEVCFMYSD

SEQ ID NO: 179197 - protein, 15 aa, Influenza A virus
AICTHLEVCFMYSDF

SEQ ID NO: 179198 - protein, 16 aa, Influenza A virus
AICTHLEVCFMYSDFH

SEQ ID NO: 179199 - protein, 17 aa, Influenza A virus
AICTHLEVCFMYSDFHF

SEQ ID NO: 179200 - protein, 18 aa, Influenza A virus
AICTHLEVCFMYSDFHFI

SEQ ID NO: 179201 - protein, 14 aa, Influenza A virus
AIEECLINDPWVLL

SEQ ID NO: 179202 - protein, 15 aa, Influenza A virus
AIEECLINDPWVLLN

SEQ ID NO: 179203 - protein, 16 aa, Influenza A virus
AIEECLINDPWVLLNA

SEQ ID NO: 179204 - protein, 17 aa, Influenza A virus
AIEECLINDPWVLLNAS

SEQ ID NO: 179205 - protein, 18 aa, Influenza A virus
AIEECLINDPWVLLNASW

SEQ ID NO: 179206 - protein, 19 aa, Influenza A virus
AIEECLINDPWVLLNASWF

SEQ ID NO: 179207 - protein, 20 aa, Influenza A virus
AIEECLINDPWVLLNASWFN

SEQ ID NO: 179208 - protein, 21 aa, Influenza A virus
AIEECLINDPWVLLNASWFNS

SEQ ID NO: 179209 - protein, 22 aa, Influenza A virus
AIEECLINDPWVLLNASWFNSF

SEQ ID NO: 179210 - protein, 23 aa, Influenza A virus
AIEECLINDPWVLLNASWFNSFL

SEQ ID NO: 179211 - protein, 24 aa, Influenza A virus
AIEECLINDPWVLLNASWFNSFLT

SEQ ID NO: 179212 - protein, 25 aa, Influenza A virus
AIEECLINDPWVLLNASWFNSFLTH

SEQ ID NO: 179213 - protein, 13 aa, Influenza A virus
AKSVFNSLYASPQ

SEQ ID NO: 179214 - protein, 14 aa, Influenza A virus
AKSVFNSLYASPQL

SEQ ID NO: 179215 - protein, 15 aa, Influenza A virus
AKSVFNSLYASPQLE

SEQ ID NO: 179216 - protein, 16 aa, Influenza A virus
AKSVFNSLYASPQLEG

SEQ ID NO: 179217 - protein, 17 aa, Influenza A virus
AKSVFNSLYASPQLEGF

SEQ ID NO: 179218 - protein, 18 aa, Influenza A virus
AKSVFNSLYASPQLEGFS

SEQ ID NO: 179219 - protein, 19 aa, Influenza A virus
AKSVFNSLYASPQLEGFSA

SEQ ID NO: 179220 - protein, 20 aa, Influenza A virus
AKSVFNSLYASPQLEGFSAE

SEQ ID NO: 179221 - protein, 21 aa, Influenza A virus
AKSVFNSLYASPQLEGFSAES

SEQ ID NO: 179222 - protein, 22 aa, Influenza A virus
AKSVFNSLYASPQLEGFSAESR

SEQ ID NO: 179223 - protein, 23 aa, Influenza A virus
AKSVFNSLYASPQLEGFSAESRK

SEQ ID NO: 179224 - protein, 24 aa, Influenza A virus
AKSVFNSLYASPQLEGFSAESRKL

SEQ ID NO: 179225 - protein, 25 aa, Influenza A virus
AKSVFNSLYASPQLEGFSAESRKLL

SEQ ID NO: 179226 - protein, 13 aa, Influenza A virus
ALLKHRFEIIEGR

SEQ ID NO: 179227 - protein, 14 aa, Influenza A virus
ALLKHRFEIIEGRD

SEQ ID NO: 179228 - protein, 15 aa, Influenza A virus
ALLKHRFEIIEGRDR

SEQ ID NO: 179229 - protein, 16 aa, Influenza A virus
ALLKHRFEIIEGRDRT

SEQ ID NO: 179230 - protein, 17 aa, Influenza A virus
ALLKHRFEIIEGRDRTM

SEQ ID NO: 179231 - protein, 18 aa, Influenza A virus
ALLKHRFEIIEGRDRTMA

SEQ ID NO: 179232 - protein, 19 aa, Influenza A virus
ALLKHRFEIIEGRDRTMAW

SEQ ID NO: 179233 - protein, 20 aa, Influenza A virus
ALLKHRFEIIEGRDRTMAWT

SEQ ID NO: 179234 - protein, 21 aa, Influenza A virus
ALLKHRFEIIEGRDRTMAWTV

SEQ ID NO: 179235 - protein, 22 aa, Influenza A virus
ALLKHRFEIIEGRDRTMAWTVV

SEQ ID NO: 179236 - protein, 23 aa, Influenza A virus
ALLKHRFEIIEGRDRTMAWTVVN

SEQ ID NO: 179237 - protein, 24 aa, Influenza A virus
ALLKHRFEIIEGRDRTMAWTVVNS

SEQ ID NO: 179238 - protein, 25 aa, Influenza A virus
ALLKHRFEIIEGRDRTMAWTVVNSI

SEQ ID NO: 179239 - protein, 13 aa, Influenza A virus
ALLNASCAAMDDF

SEQ ID NO: 179240 - protein, 14 aa, Influenza A virus
ALLNASCAAMDDFQ

SEQ ID NO: 179241 - protein, 15 aa, Influenza A virus
ALLNASCAAMDDFQL

SEQ ID NO: 179242 - protein, 16 aa, Influenza A virus
ALLNASCAAMDDFQLI

SEQ ID NO: 179243 - protein, 17 aa, Influenza A virus
ALLNASCAAMDDFQLIP

SEQ ID NO: 179244 - protein, 18 aa, Influenza A virus
ALLNASCAAMDDFQLIPM

SEQ ID NO: 179245 - protein, 19 aa, Influenza A virus
ALLNASCAAMDDFQLIPMI

SEQ ID NO: 179246 - protein, 20 aa, Influenza A virus
ALLNASCAAMDDFQLIPMIS

SEQ ID NO: 179247 - protein, 21 aa, Influenza A virus
ALLNASCAAMDDFQLIPMISK

SEQ ID NO: 179248 - protein, 22 aa, Influenza A virus
ALLNASCAAMDDFQLIPMISKC

SEQ ID NO: 179249 - protein, 23 aa, Influenza A virus
ALLNASCAAMDDFQLIPMISKCR

SEQ ID NO: 179250 - protein, 24 aa, Influenza A virus
ALLNASCAAMDDFQLIPMISKCRT

SEQ ID NO: 179251 - protein, 25 aa, Influenza A virus
ALLNASCAAMDDFQLIPMISKCRTK

SEQ ID NO: 179252 - protein, 13 aa, Influenza A virus
AMDDFQLIPMISK

SEQ ID NO: 179253 - protein, 14 aa, Influenza A virus
AMDDFQLIPMISKC

SEQ ID NO: 179254 - protein, 15 aa, Influenza A virus
AMDDFQLIPMISKCR

SEQ ID NO: 179255 - protein, 16 aa, Influenza A virus
AMDDFQLIPMISKCRT

SEQ ID NO: 179256 - protein, 17 aa, Influenza A virus
AMDDFQLIPMISKCRTK

SEQ ID NO: 179257 - protein, 18 aa, Influenza A virus
AMDDFQLIPMISKCRTKE

SEQ ID NO: 179258 - protein, 19 aa, Influenza A virus
AMDDFQLIPMISKCRTKEG

SEQ ID NO: 179259 - protein, 20 aa, Influenza A virus
AMDDFQLIPMISKCRTKEGR

SEQ ID NO: 179260 - protein, 21 aa, Influenza A virus
AMDDFQLIPMISKCRTKEGRR

SEQ ID NO: 179261 - protein, 22 aa, Influenza A virus
AMDDFQLIPMISKCRTKEGRRK

SEQ ID NO: 179262 - protein, 23 aa, Influenza A virus
AMDDFQLIPMISKCRTKEGRRKT

SEQ ID NO: 179263 - protein, 24 aa, Influenza A virus
AMDDFQLIPMISKCRTKEGRRKTN

SEQ ID NO: 179264 - protein, 25 aa, Influenza A virus
AMDDFQLIPMISKCRTKEGRRKTNL

SEQ ID NO: 179265 - protein, 13 aa, Influenza A virus
ARIKTRLFTIRQE

SEQ ID NO: 179266 - protein, 14 aa, Influenza A virus
ARIKTRLFTIRQEM

SEQ ID NO: 179267 - protein, 15 aa, Influenza A virus
ARIKTRLFTIRQEMA

SEQ ID NO: 179268 - protein, 14 aa, Influenza A virus
ASCAAMDDFQLIPM

SEQ ID NO: 179269 - protein, 15 aa, Influenza A virus
ASCAAMDDFQLIPMI

SEQ ID NO: 179270 - protein, 16 aa, Influenza A virus
ASCAAMDDFQLIPMIS

SEQ ID NO: 179271 - protein, 17 aa, Influenza A virus
ASCAAMDDFQLIPMISK

SEQ ID NO: 179272 - protein, 18 aa, Influenza A virus
ASCAAMDDFQLIPMISKC

SEQ ID NO: 179273 - protein, 19 aa, Influenza A virus
ASCAAMDDFQLIPMISKCR

SEQ ID NO: 179274 - protein, 20 aa, Influenza A virus
ASCAAMDDFQLIPMISKCRT

SEQ ID NO: 179275 - protein, 21 aa, Influenza A virus
ASCAAMDDFQLIPMISKCRTK

SEQ ID NO: 179276 - protein, 22 aa, Influenza A virus
ASCAAMDDFQLIPMISKCRTKE

SEQ ID NO: 179277 - protein, 23 aa, Influenza A virus
ASCAAMDDFQLIPMISKCRTKEG

SEQ ID NO: 179278 - protein, 24 aa, Influenza A virus
ASCAAMDDFQLIPMISKCRTKEGR

SEQ ID NO: 179279 - protein, 25 aa, Influenza A virus
ASCAAMDDFQLIPMISKCRTKEGRR

SEQ ID NO: 179280 - protein, 13 aa, Influenza A virus
ASMRRNYFTAEVS

SEQ ID NO: 179281 - protein, 14 aa, Influenza A virus
ASMRRNYFTAEVSH

SEQ ID NO: 179282 - protein, 15 aa, Influenza A virus
ASMRRNYFTAEVSHC

SEQ ID NO: 179283 - protein, 16 aa, Influenza A virus
ASMRRNYFTAEVSHCR

SEQ ID NO: 179284 - protein, 17 aa, Influenza A virus
ASMRRNYFTAEVSHCRA

SEQ ID NO: 179285 - protein, 18 aa, Influenza A virus
ASMRRNYFTAEVSHCRAT

SEQ ID NO: 179286 - protein, 19 aa, Influenza A virus
ASMRRNYFTAEVSHCRATE

SEQ ID NO: 179287 - protein, 20 aa, Influenza A virus
ASMRRNYFTAEVSHCRATEY

SEQ ID NO: 179288 - protein, 21 aa, Influenza A virus
ASMRRNYFTAEVSHCRATEYI

SEQ ID NO: 179289 - protein, 22 aa, Influenza A virus
ASMRRNYFTAEVSHCRATEYIM

SEQ ID NO: 179290 - protein, 23 aa, Influenza A virus
ASMRRNYFTAEVSHCRATEYIMK

SEQ ID NO: 179291 - protein, 24 aa, Influenza A virus
ASMRRNYFTAEVSHCRATEYIMKG

SEQ ID NO: 179292 - protein, 25 aa, Influenza A virus
ASMRRNYFTAEVSHCRATEYIMKGV

SEQ ID NO: 179293 - protein, 15 aa, Influenza A virus
ASPQLEGFSAESRKL

SEQ ID NO: 179294 - protein, 16 aa, Influenza A virus
ASPQLEGFSAESRKLL

SEQ ID NO: 179295 - protein, 17 aa, Influenza A virus
ASPQLEGFSAESRKLLL

SEQ ID NO: 179296 - protein, 13 aa, Influenza A virus
ATEYIMKGVYINT

SEQ ID NO: 179297 - protein, 14 aa, Influenza A virus
ATEYIMKGVYINTA

SEQ ID NO: 179298 - protein, 15 aa, Influenza A virus
ATEYIMKGVYINTAL

SEQ ID NO: 179299 - protein, 16 aa, Influenza A virus
ATEYIMKGVYINTALL

SEQ ID NO: 179300 - protein, 17 aa, Influenza A virus
ATEYIMKGVYINTALLN

SEQ ID NO: 179301 - protein, 18 aa, Influenza A virus
ATEYIMKGVYINTALLNA

SEQ ID NO: 179302 - protein, 19 aa, Influenza A virus
ATEYIMKGVYINTALLNAS

SEQ ID NO: 179303 - protein, 20 aa, Influenza A virus
ATEYIMKGVYINTALLNASC

SEQ ID NO: 179304 - protein, 21 aa, Influenza A virus
ATEYIMKGVYINTALLNASCA

SEQ ID NO: 179305 - protein, 22 aa, Influenza A virus
ATEYIMKGVYINTALLNASCAA

SEQ ID NO: 179306 - protein, 23 aa, Influenza A virus
ATEYIMKGVYINTALLNASCAAM

SEQ ID NO: 179307 - protein, 24 aa, Influenza A virus
ATEYIMKGVYINTALLNASCAAMD

SEQ ID NO: 179308 - protein, 25 aa, Influenza A virus
ATEYIMKGVYINTALLNASCAAMDD

SEQ ID NO: 179309 - protein, 20 aa, Influenza A virus
ATKADYTLDEESRARIKTRL

SEQ ID NO: 179310 - protein, 21 aa, Influenza A virus
ATKADYTLDEESRARIKTRLF

SEQ ID NO: 179311 - protein, 22 aa, Influenza A virus
ATKADYTLDEESRARIKTRLFT

SEQ ID NO: 179312 - protein, 23 aa, Influenza A virus
ATKADYTLDEESRARIKTRLFTI

SEQ ID NO: 179313 - protein, 24 aa, Influenza A virus
ATKADYTLDEESRARIKTRLFTIR

SEQ ID NO: 179314 - protein, 25 aa, Influenza A virus
ATKADYTLDEESRARIKTRLFTIRQ

SEQ ID NO: 179315 - protein, 13 aa, Influenza A virus
CAAMDDFQLIPMI

SEQ ID NO: 179316 - protein, 14 aa, Influenza A virus
CAAMDDFQLIPMIS

SEQ ID NO: 179317 - protein, 15 aa, Influenza A virus
CAAMDDFQLIPMISK

SEQ ID NO: 179318 - protein, 16 aa, Influenza A virus
CAAMDDFQLIPMISKC

SEQ ID NO: 179319 - protein, 17 aa, Influenza A virus
CAAMDDFQLIPMISKCR

SEQ ID NO: 179320 - protein, 18 aa, Influenza A virus
CAAMDDFQLIPMISKCRT

SEQ ID NO: 179321 - protein, 19 aa, Influenza A virus
CAAMDDFQLIPMISKCRTK

SEQ ID NO: 179322 - protein, 20 aa, Influenza A virus
CAAMDDFQLIPMISKCRTKE

SEQ ID NO: 179323 - protein, 21 aa, Influenza A virus
CAAMDDFQLIPMISKCRTKEG

SEQ ID NO: 179324 - protein, 22 aa, Influenza A virus
CAAMDDFQLIPMISKCRTKEGR

SEQ ID NO: 179325 - protein, 23 aa, Influenza A virus
CAAMDDFQLIPMISKCRTKEGRR

SEQ ID NO: 179326 - protein, 24 aa, Influenza A virus
CAAMDDFQLIPMISKCRTKEGRRK

SEQ ID NO: 179327 - protein, 25 aa, Influenza A virus
CAAMDDFQLIPMISKCRTKEGRRKT

SEQ ID NO: 179328 - protein, 13 aa, Influenza A virus
CFNPMIVELAEKA

SEQ ID NO: 179329 - protein, 14 aa, Influenza A virus
CFNPMIVELAEKAM

SEQ ID NO: 179330 - protein, 15 aa, Influenza A virus
CFNPMIVELAEKAMK

SEQ ID NO: 179331 - protein, 16 aa, Influenza A virus
CFNPMIVELAEKAMKE

SEQ ID NO: 179332 - protein, 17 aa, Influenza A virus
CFNPMIVELAEKAMKEY

SEQ ID NO: 179333 - protein, 18 aa, Influenza A virus
CFNPMIVELAEKAMKEYG

SEQ ID NO: 179334 - protein, 19 aa, Influenza A virus
CFNPMIVELAEKAMKEYGE

SEQ ID NO: 179335 - protein, 14 aa, Influenza A virus
CLINDPWVLLNASW

SEQ ID NO: 179336 - protein, 15 aa, Influenza A virus
CLINDPWVLLNASWF

SEQ ID NO: 179337 - protein, 16 aa, Influenza A virus
CLINDPWVLLNASWFN

SEQ ID NO: 179338 - protein, 17 aa, Influenza A virus
CLINDPWVLLNASWFNS

SEQ ID NO: 179339 - protein, 18 aa, Influenza A virus
CLINDPWVLLNASWFNSF

SEQ ID NO: 179340 - protein, 19 aa, Influenza A virus
CLINDPWVLLNASWFNSFL

SEQ ID NO: 179341 - protein, 20 aa, Influenza A virus
CLINDPWVLLNASWFNSFLT

SEQ ID NO: 179342 - protein, 21 aa, Influenza A virus
CLINDPWVLLNASWFNSFLTH

SEQ ID NO: 179343 - protein, 22 aa, Influenza A virus
CLINDPWVLLNASWFNSFLTHA

SEQ ID NO: 179344 - protein, 23 aa, Influenza A virus
CLINDPWVLLNASWFNSFLTHAL

SEQ ID NO: 179345 - protein, 13 aa, Influenza A virus
CLLQSLQQIESMI

SEQ ID NO: 179346 - protein, 14 aa, Influenza A virus
CLLQSLQQIESMIE

SEQ ID NO: 179347 - protein, 15 aa, Influenza A virus
CLLQSLQQIESMIEA

SEQ ID NO: 179348 - protein, 16 aa, Influenza A virus
CLLQSLQQIESMIEAE

SEQ ID NO: 179349 - protein, 17 aa, Influenza A virus
CLLQSLQQIESMIEAES

SEQ ID NO: 179350 - protein, 18 aa, Influenza A virus
CLLQSLQQIESMIEAESS

SEQ ID NO: 179351 - protein, 19 aa, Influenza A virus
CLLQSLQQIESMIEAESSV

SEQ ID NO: 179352 - protein, 20 aa, Influenza A virus
CLLQSLQQIESMIEAESSVK

SEQ ID NO: 179353 - protein, 21 aa, Influenza A virus
CLLQSLQQIESMIEAESSVKE

SEQ ID NO: 179354 - protein, 22 aa, Influenza A virus
CLLQSLQQIESMIEAESSVKEK

SEQ ID NO: 179355 - protein, 23 aa, Influenza A virus
CLLQSLQQIESMIEAESSVKEKD

SEQ ID NO: 179356 - protein, 24 aa, Influenza A virus
CLLQSLQQIESMIEAESSVKEKDM

SEQ ID NO: 179357 - protein, 25 aa, Influenza A virus
CLLQSLQQIESMIEAESSVKEKDMT

SEQ ID NO: 179358 - protein, 14 aa, Influenza A virus
CRATEYIMKGVYIN

SEQ ID NO: 179359 - protein, 15 aa, Influenza A virus
CRATEYIMKGVYINT

SEQ ID NO: 179360 - protein, 16 aa, Influenza A virus
CRATEYIMKGVYINTA

SEQ ID NO: 179361 - protein, 17 aa, Influenza A virus
CRATEYIMKGVYINTAL

SEQ ID NO: 179362 - protein, 18 aa, Influenza A virus
CRATEYIMKGVYINTALL

SEQ ID NO: 179363 - protein, 19 aa, Influenza A virus
CRATEYIMKGVYINTALLN

SEQ ID NO: 179364 - protein, 20 aa, Influenza A virus
CRATEYIMKGVYINTALLNA

SEQ ID NO: 179365 - protein, 21 aa, Influenza A virus
CRATEYIMKGVYINTALLNAS

SEQ ID NO: 179366 - protein, 22 aa, Influenza A virus
CRATEYIMKGVYINTALLNASC

SEQ ID NO: 179367 - protein, 23 aa, Influenza A virus
CRATEYIMKGVYINTALLNASCA

SEQ ID NO: 179368 - protein, 24 aa, Influenza A virus
CRATEYIMKGVYINTALLNASCAA

SEQ ID NO: 179369 - protein, 25 aa, Influenza A virus
CRATEYIMKGVYINTALLNASCAAM

SEQ ID NO: 179370 - protein, 17 aa, Influenza A virus
CRTKEGRRKTNLYGFII

SEQ ID NO: 179371 - protein, 19 aa, Influenza A virus
CRTKEGRRKTNLYGFIIKG

SEQ ID NO: 179372 - protein, 20 aa, Influenza A virus
CRTKEGRRKTNLYGFIIKGR

SEQ ID NO: 179373 - protein, 21 aa, Influenza A virus
CRTKEGRRKTNLYGFIIKGRS

SEQ ID NO: 179374 - protein, 22 aa, Influenza A virus
CRTKEGRRKTNLYGFIIKGRSH

SEQ ID NO: 179375 - protein, 23 aa, Influenza A virus
CRTKEGRRKTNLYGFIIKGRSHL

SEQ ID NO: 179376 - protein, 24 aa, Influenza A virus
CRTKEGRRKTNLYGFIIKGRSHLR

SEQ ID NO: 179377 - protein, 25 aa, Influenza A virus
CRTKEGRRKTNLYGFIIKGRSHLRN

SEQ ID NO: 179378 - protein, 13 aa, Influenza A virus
CRTLLAKSVFNSL

SEQ ID NO: 179379 - protein, 14 aa, Influenza A virus
CRTLLAKSVFNSLY

SEQ ID NO: 179380 - protein, 15 aa, Influenza A virus
CRTLLAKSVFNSLYA

SEQ ID NO: 179381 - protein, 16 aa, Influenza A virus
CRTLLAKSVFNSLYAS

SEQ ID NO: 179382 - protein, 17 aa, Influenza A virus
CRTLLAKSVFNSLYASP

SEQ ID NO: 179383 - protein, 18 aa, Influenza A virus
CRTLLAKSVFNSLYASPQ

SEQ ID NO: 179384 - protein, 19 aa, Influenza A virus
CRTLLAKSVFNSLYASPQL

SEQ ID NO: 179385 - protein, 20 aa, Influenza A virus
CRTLLAKSVFNSLYASPQLE

SEQ ID NO: 179386 - protein, 21 aa, Influenza A virus
CRTLLAKSVFNSLYASPQLEG

SEQ ID NO: 179387 - protein, 22 aa, Influenza A virus
CRTLLAKSVFNSLYASPQLEGF

SEQ ID NO: 179388 - protein, 23 aa, Influenza A virus
CRTLLAKSVFNSLYASPQLEGFS

SEQ ID NO: 179389 - protein, 24 aa, Influenza A virus
CRTLLAKSVFNSLYASPQLEGFSA

SEQ ID NO: 179390 - protein, 25 aa, Influenza A virus
CRTLLAKSVFNSLYASPQLEGFSAE

SEQ ID NO: 179391 - protein, 14 aa, Influenza A virus
CTHLEVCFMYSDFH

SEQ ID NO: 179392 - protein, 15 aa, Influenza A virus
CTHLEVCFMYSDFHF

SEQ ID NO: 179393 - protein, 16 aa, Influenza A virus
CTHLEVCFMYSDFHFI

SEQ ID NO: 179394 - protein, 14 aa, Influenza A virus
DDFQLIPMISKCRT

SEQ ID NO: 179395 - protein, 15 aa, Influenza A virus
DDFQLIPMISKCRTK

SEQ ID NO: 179396 - protein, 16 aa, Influenza A virus
DDFQLIPMISKCRTKE

SEQ ID NO: 179397 - protein, 17 aa, Influenza A virus
DDFQLIPMISKCRTKEG

SEQ ID NO: 179398 - protein, 18 aa, Influenza A virus
DDFQLIPMISKCRTKEGR

SEQ ID NO: 179399 - protein, 19 aa, Influenza A virus
DDFQLIPMISKCRTKEGRR

SEQ ID NO: 179400 - protein, 20 aa, Influenza A virus
DDFQLIPMISKCRTKEGRRK

SEQ ID NO: 179401 - protein, 21 aa, Influenza A virus
DDFQLIPMISKCRTKEGRRKT

SEQ ID NO: 179402 - protein, 22 aa, Influenza A virus
DDFQLIPMISKCRTKEGRRKTN

SEQ ID NO: 179403 - protein, 23 aa, Influenza A virus
DDFQLIPMISKCRTKEGRRKTNL

SEQ ID NO: 179404 - protein, 24 aa, Influenza A virus
DDFQLIPMISKCRTKEGRRKTNLY

SEQ ID NO: 179405 - protein, 25 aa, Influenza A virus
DDFQLIPMISKCRTKEGRRKTNLYG

SEQ ID NO: 179406 - protein, 15 aa, Influenza A virus
DEESRARIKTRLFTI

SEQ ID NO: 179407 - protein, 16 aa, Influenza A virus
DEESRARIKTRLFTIR

SEQ ID NO: 179408 - protein, 17 aa, Influenza A virus
DEESRARIKTRLFTIRQ

SEQ ID NO: 179409 - protein, 18 aa, Influenza A virus
DEESRARIKTRLFTIRQE

SEQ ID NO: 179410 - protein, 19 aa, Influenza A virus
DEESRARIKTRLFTIRQEM

SEQ ID NO: 179411 - protein, 20 aa, Influenza A virus
DEESRARIKTRLFTIRQEMA

SEQ ID NO: 179412 - protein, 13 aa, Influenza A virus
DFQLIPMISKCRT

SEQ ID NO: 179413 - protein, 14 aa, Influenza A virus
DFQLIPMISKCRTK

SEQ ID NO: 179414 - protein, 15 aa, Influenza A virus
DFQLIPMISKCRTKE

SEQ ID NO: 179415 - protein, 16 aa, Influenza A virus
DFQLIPMISKCRTKEG

SEQ ID NO: 179416 - protein, 17 aa, Influenza A virus
DFQLIPMISKCRTKEGR

SEQ ID NO: 179417 - protein, 18 aa, Influenza A virus
DFQLIPMISKCRTKEGRR

SEQ ID NO: 179418 - protein, 19 aa, Influenza A virus
DFQLIPMISKCRTKEGRRK

SEQ ID NO: 179419 - protein, 20 aa, Influenza A virus
DFQLIPMISKCRTKEGRRKT

SEQ ID NO: 179420 - protein, 21 aa, Influenza A virus
DFQLIPMISKCRTKEGRRKTN

SEQ ID NO: 179421 - protein, 22 aa, Influenza A virus
DFQLIPMISKCRTKEGRRKTNL

SEQ ID NO: 179422 - protein, 23 aa, Influenza A virus
DFQLIPMISKCRTKEGRRKTNLY

SEQ ID NO: 179423 - protein, 24 aa, Influenza A virus
DFQLIPMISKCRTKEGRRKTNLYG

SEQ ID NO: 179424 - protein, 25 aa, Influenza A virus
DFQLIPMISKCRTKEGRRKTNLYGF

SEQ ID NO: 179425 - protein, 13 aa, Influenza A virus
DFVRQCFNPMIVE

SEQ ID NO: 179426 - protein, 14 aa, Influenza A virus
DFVRQCFNPMIVEL

SEQ ID NO: 179427 - protein, 15 aa, Influenza A virus
DFVRQCFNPMIVELA

SEQ ID NO: 179428 - protein, 16 aa, Influenza A virus
DFVRQCFNPMIVELAE

SEQ ID NO: 179429 - protein, 17 aa, Influenza A virus
DFVRQCFNPMIVELAEK

SEQ ID NO: 179430 - protein, 13 aa, Influenza A virus
DLYDYKENRFIEI

SEQ ID NO: 179431 - protein, 14 aa, Influenza A virus
DLYDYKENRFIEIG

SEQ ID NO: 179432 - protein, 15 aa, Influenza A virus
DLYDYKENRFIEIGV

SEQ ID NO: 179433 - protein, 16 aa, Influenza A virus
DLYDYKENRFIEIGVT

SEQ ID NO: 179434 - protein, 17 aa, Influenza A virus
DLYDYKENRFIEIGVTR

SEQ ID NO: 179435 - protein, 18 aa, Influenza A virus
DLYDYKENRFIEIGVTRR

SEQ ID NO: 179436 - protein, 19 aa, Influenza A virus
DLYDYKENRFIEIGVTRRE

SEQ ID NO: 179437 - protein, 20 aa, Influenza A virus
DLYDYKENRFIEIGVTRREV

SEQ ID NO: 179438 - protein, 21 aa, Influenza A virus
DLYDYKENRFIEIGVTRREVH

SEQ ID NO: 179439 - protein, 13 aa, Influenza A virus
DPNALLKHRFEII

SEQ ID NO: 179440 - protein, 14 aa, Influenza A virus
DPNALLKHRFEIIE

SEQ ID NO: 179441 - protein, 15 aa, Influenza A virus
DPNALLKHRFEIIEG

SEQ ID NO: 179442 - protein, 16 aa, Influenza A virus
DPNALLKHRFEIIEGR

SEQ ID NO: 179443 - protein, 17 aa, Influenza A virus
DPNALLKHRFEIIEGRD

SEQ ID NO: 179444 - protein, 18 aa, Influenza A virus
DPNALLKHRFEIIEGRDR

SEQ ID NO: 179445 - protein, 19 aa, Influenza A virus
DPNALLKHRFEIIEGRDRT

SEQ ID NO: 179446 - protein, 20 aa, Influenza A virus
DPNALLKHRFEIIEGRDRTM

SEQ ID NO: 179447 - protein, 21 aa, Influenza A virus
DPNALLKHRFEIIEGRDRTMA

SEQ ID NO: 179448 - protein, 22 aa, Influenza A virus
DPNALLKHRFEIIEGRDRTMAW

SEQ ID NO: 179449 - protein, 23 aa, Influenza A virus
DPNALLKHRFEIIEGRDRTMAWT

SEQ ID NO: 179450 - protein, 24 aa, Influenza A virus
DPNALLKHRFEIIEGRDRTMAWTV

SEQ ID NO: 179451 - protein, 25 aa, Influenza A virus
DPNALLKHRFEIIEGRDRTMAWTVV

SEQ ID NO: 179452 - protein, 15 aa, Influenza A virus
DPRLEPHKWEKYCVL

SEQ ID NO: 179453 - protein, 16 aa, Influenza A virus
DPRLEPHKWEKYCVLE

SEQ ID NO: 179454 - protein, 17 aa, Influenza A virus
DPRLEPHKWEKYCVLEI

SEQ ID NO: 179455 - protein, 18 aa, Influenza A virus
DPRLEPHKWEKYCVLEIG

SEQ ID NO: 179456 - protein, 19 aa, Influenza A virus
DPRLEPHKWEKYCVLEIGD

SEQ ID NO: 179457 - protein, 20 aa, Influenza A virus
DPRLEPHKWEKYCVLEIGDM

SEQ ID NO: 179458 - protein, 13 aa, Influenza A virus
DPWVLLNASWFNS

SEQ ID NO: 179459 - protein, 14 aa, Influenza A virus
DPWVLLNASWFNSF

SEQ ID NO: 179460 - protein, 15 aa, Influenza A virus
DPWVLLNASWFNSFL

SEQ ID NO: 179461 - protein, 16 aa, Influenza A virus
DPWVLLNASWFNSFLT

SEQ ID NO: 179462 - protein, 17 aa, Influenza A virus
DPWVLLNASWFNSFLTH

SEQ ID NO: 179463 - protein, 18 aa, Influenza A virus
DPWVLLNASWFNSFLTHA

SEQ ID NO: 179464 - protein, 19 aa, Influenza A virus
DPWVLLNASWFNSFLTHAL

SEQ ID NO: 179465 - protein, 13 aa, Influenza A virus
DRTMAWTVVNSIC

SEQ ID NO: 179466 - protein, 14 aa, Influenza A virus
DRTMAWTVVNSICN

SEQ ID NO: 179467 - protein, 15 aa, Influenza A virus
DRTMAWTVVNSICNT

SEQ ID NO: 179468 - protein, 16 aa, Influenza A virus
DRTMAWTVVNSICNTT

SEQ ID NO: 179469 - protein, 17 aa, Influenza A virus
DRTMAWTVVNSICNTTG

SEQ ID NO: 179470 - protein, 20 aa, Influenza A virus
DSFRQSERGEETIEERFEIT

SEQ ID NO: 179471 - protein, 23 aa, Influenza A virus
DSFRQSERGEETIEERFEITGTM

SEQ ID NO: 179472 - protein, 24 aa, Influenza A virus
DSFRQSERGEETIEERFEITGTMR

SEQ ID NO: 179473 - protein, 13 aa, Influenza A virus
DTDVVNFVSMEFS

SEQ ID NO: 179474 - protein, 14 aa, Influenza A virus
DTDVVNFVSMEFSL

SEQ ID NO: 179475 - protein, 15 aa, Influenza A virus
DTDVVNFVSMEFSLT

SEQ ID NO: 179476 - protein, 16 aa, Influenza A virus
DTDVVNFVSMEFSLTD

SEQ ID NO: 179477 - protein, 17 aa, Influenza A virus
DTDVVNFVSMEFSLTDP

SEQ ID NO: 179478 - protein, 18 aa, Influenza A virus
DTDVVNFVSMEFSLTDPR

SEQ ID NO: 179479 - protein, 19 aa, Influenza A virus
DTDVVNFVSMEFSLTDPRL

SEQ ID NO: 179480 - protein, 20 aa, Influenza A virus
DTDVVNFVSMEFSLTDPRLE

SEQ ID NO: 179481 - protein, 21 aa, Influenza A virus
DTDVVNFVSMEFSLTDPRLEP

SEQ ID NO: 179482 - protein, 22 aa, Influenza A virus
DTDVVNFVSMEFSLTDPRLEPH

SEQ ID NO: 179483 - protein, 23 aa, Influenza A virus
DTDVVNFVSMEFSLTDPRLEPHK

SEQ ID NO: 179484 - protein, 24 aa, Influenza A virus
DTDVVNFVSMEFSLTDPRLEPHKW

SEQ ID NO: 179485 - protein, 25 aa, Influenza A virus
DTDVVNFVSMEFSLTDPRLEPHKWE

SEQ ID NO: 179486 - protein, 13 aa, Influenza A virus
DVVNFVSMEFSLT

SEQ ID NO: 179487 - protein, 14 aa, Influenza A virus
DVVNFVSMEFSLTD

SEQ ID NO: 179488 - protein, 15 aa, Influenza A virus
DVVNFVSMEFSLTDP

SEQ ID NO: 179489 - protein, 16 aa, Influenza A virus
DVVNFVSMEFSLTDPR

SEQ ID NO: 179490 - protein, 17 aa, Influenza A virus
DVVNFVSMEFSLTDPRL

SEQ ID NO: 179491 - protein, 18 aa, Influenza A virus
DVVNFVSMEFSLTDPRLE

SEQ ID NO: 179492 - protein, 19 aa, Influenza A virus
DVVNFVSMEFSLTDPRLEP

SEQ ID NO: 179493 - protein, 20 aa, Influenza A virus
DVVNFVSMEFSLTDPRLEPH

SEQ ID NO: 179494 - protein, 21 aa, Influenza A virus
DVVNFVSMEFSLTDPRLEPHK

SEQ ID NO: 179495 - protein, 22 aa, Influenza A virus
DVVNFVSMEFSLTDPRLEPHKW

SEQ ID NO: 179496 - protein, 23 aa, Influenza A virus
DVVNFVSMEFSLTDPRLEPHKWE

SEQ ID NO: 179497 - protein, 24 aa, Influenza A virus
DVVNFVSMEFSLTDPRLEPHKWEK

SEQ ID NO: 179498 - protein, 25 aa, Influenza A virus
DVVNFVSMEFSLTDPRLEPHKWEKY

SEQ ID NO: 179499 - protein, 13 aa, Influenza A virus
DYKENRFIEIGVT

SEQ ID NO: 179500 - protein, 14 aa, Influenza A virus
DYKENRFIEIGVTR

SEQ ID NO: 179501 - protein, 15 aa, Influenza A virus
DYKENRFIEIGVTRR

SEQ ID NO: 179502 - protein, 16 aa, Influenza A virus
DYKENRFIEIGVTRRE

SEQ ID NO: 179503 - protein, 17 aa, Influenza A virus
DYKENRFIEIGVTRREV

SEQ ID NO: 179504 - protein, 18 aa, Influenza A virus
DYKENRFIEIGVTRREVH

SEQ ID NO: 179505 - protein, 17 aa, Influenza A virus
DYTLDEESRARIKTRLF

SEQ ID NO: 179506 - protein, 19 aa, Influenza A virus
DYTLDEESRARIKTRLFTI

SEQ ID NO: 179507 - protein, 20 aa, Influenza A virus
DYTLDEESRARIKTRLFTIR

SEQ ID NO: 179508 - protein, 21 aa, Influenza A virus
DYTLDEESRARIKTRLFTIRQ

SEQ ID NO: 179509 - protein, 22 aa, Influenza A virus
DYTLDEESRARIKTRLFTIRQE

SEQ ID NO: 179510 - protein, 23 aa, Influenza A virus
DYTLDEESRARIKTRLFTIRQEM

SEQ ID NO: 179511 - protein, 24 aa, Influenza A virus
DYTLDEESRARIKTRLFTIRQEMA

SEQ ID NO: 179512 - protein, 14 aa, Influenza A virus
EAIEECLINDPWVL

SEQ ID NO: 179513 - protein, 15 aa, Influenza A virus
EAIEECLINDPWVLL

SEQ ID NO: 179514 - protein, 16 aa, Influenza A virus
EAIEECLINDPWVLLN

SEQ ID NO: 179515 - protein, 17 aa, Influenza A virus
EAIEECLINDPWVLLNA

SEQ ID NO: 179516 - protein, 18 aa, Influenza A virus
EAIEECLINDPWVLLNAS

SEQ ID NO: 179517 - protein, 19 aa, Influenza A virus
EAIEECLINDPWVLLNASW

SEQ ID NO: 179518 - protein, 20 aa, Influenza A virus
EAIEECLINDPWVLLNASWF

SEQ ID NO: 179519 - protein, 21 aa, Influenza A virus
EAIEECLINDPWVLLNASWFN

SEQ ID NO: 179520 - protein, 22 aa, Influenza A virus
EAIEECLINDPWVLLNASWFNS

SEQ ID NO: 179521 - protein, 23 aa, Influenza A virus
EAIEECLINDPWVLLNASWFNSF

SEQ ID NO: 179522 - protein, 24 aa, Influenza A virus
EAIEECLINDPWVLLNASWFNSFL

SEQ ID NO: 179523 - protein, 25 aa, Influenza A virus
EAIEECLINDPWVLLNASWFNSFLT

SEQ ID NO: 179524 - protein, 13 aa, Influenza A virus
ECLINDPWVLLNA

SEQ ID NO: 179525 - protein, 14 aa, Influenza A virus
ECLINDPWVLLNAS

SEQ ID NO: 179526 - protein, 15 aa, Influenza A virus
ECLINDPWVLLNASW

SEQ ID NO: 179527 - protein, 16 aa, Influenza A virus
ECLINDPWVLLNASWF

SEQ ID NO: 179528 - protein, 17 aa, Influenza A virus
ECLINDPWVLLNASWFN

SEQ ID NO: 179529 - protein, 18 aa, Influenza A virus
ECLINDPWVLLNASWFNS

SEQ ID NO: 179530 - protein, 19 aa, Influenza A virus
ECLINDPWVLLNASWFNSF

SEQ ID NO: 179531 - protein, 20 aa, Influenza A virus
ECLINDPWVLLNASWFNSFL

SEQ ID NO: 179532 - protein, 21 aa, Influenza A virus
ECLINDPWVLLNASWFNSFLT

SEQ ID NO: 179533 - protein, 22 aa, Influenza A virus
ECLINDPWVLLNASWFNSFLTH

SEQ ID NO: 179534 - protein, 23 aa, Influenza A virus
ECLINDPWVLLNASWFNSFLTHA

SEQ ID NO: 179535 - protein, 24 aa, Influenza A virus
ECLINDPWVLLNASWFNSFLTHAL

SEQ ID NO: 179536 - protein, 13 aa, Influenza A virus
EDFVRQCFNPMIV

SEQ ID NO: 179537 - protein, 14 aa, Influenza A virus
EDFVRQCFNPMIVE

SEQ ID NO: 179538 - protein, 15 aa, Influenza A virus
EDFVRQCFNPMIVEL

SEQ ID NO: 179539 - protein, 16 aa, Influenza A virus
EDFVRQCFNPMIVELA

SEQ ID NO: 179540 - protein, 17 aa, Influenza A virus
EDFVRQCFNPMIVELAE

SEQ ID NO: 179541 - protein, 18 aa, Influenza A virus
EDFVRQCFNPMIVELAEK

SEQ ID NO: 179542 - protein, 13 aa, Influenza A virus
EECLINDPWVLLN

SEQ ID NO: 179543 - protein, 14 aa, Influenza A virus
EECLINDPWVLLNA

SEQ ID NO: 179544 - protein, 15 aa, Influenza A virus
EECLINDPWVLLNAS

SEQ ID NO: 179545 - protein, 16 aa, Influenza A virus
EECLINDPWVLLNASW

SEQ ID NO: 179546 - protein, 17 aa, Influenza A virus
EECLINDPWVLLNASWF

SEQ ID NO: 179547 - protein, 18 aa, Influenza A virus
EECLINDPWVLLNASWFN

SEQ ID NO: 179548 - protein, 19 aa, Influenza A virus
EECLINDPWVLLNASWFNS

SEQ ID NO: 179549 - protein, 20 aa, Influenza A virus
EECLINDPWVLLNASWFNSF

SEQ ID NO: 179550 - protein, 21 aa, Influenza A virus
EECLINDPWVLLNASWFNSFL

SEQ ID NO: 179551 - protein, 22 aa, Influenza A virus
EECLINDPWVLLNASWFNSFLT

SEQ ID NO: 179552 - protein, 23 aa, Influenza A virus
EECLINDPWVLLNASWFNSFLTH

SEQ ID NO: 179553 - protein, 24 aa, Influenza A virus
EECLINDPWVLLNASWFNSFLTHA

SEQ ID NO: 179554 - protein, 25 aa, Influenza A virus
EECLINDPWVLLNASWFNSFLTHAL

SEQ ID NO: 179555 - protein, 14 aa, Influenza A virus
EEGSIGKVCRTLLA

SEQ ID NO: 179556 - protein, 15 aa, Influenza A virus
EEGSIGKVCRTLLAK

SEQ ID NO: 179557 - protein, 16 aa, Influenza A virus
EEGSIGKVCRTLLAKS

SEQ ID NO: 179558 - protein, 17 aa, Influenza A virus
EEGSIGKVCRTLLAKSV

SEQ ID NO: 179559 - protein, 18 aa, Influenza A virus
EEGSIGKVCRTLLAKSVF

SEQ ID NO: 179560 - protein, 19 aa, Influenza A virus
EEGSIGKVCRTLLAKSVFN

SEQ ID NO: 179561 - protein, 20 aa, Influenza A virus
EEGSIGKVCRTLLAKSVFNS

SEQ ID NO: 179562 - protein, 21 aa, Influenza A virus
EEGSIGKVCRTLLAKSVFNSL

SEQ ID NO: 179563 - protein, 22 aa, Influenza A virus
EEGSIGKVCRTLLAKSVFNSLY

SEQ ID NO: 179564 - protein, 23 aa, Influenza A virus
EEGSIGKVCRTLLAKSVFNSLYA

SEQ ID NO: 179565 - protein, 24 aa, Influenza A virus
EEGSIGKVCRTLLAKSVFNSLYAS

SEQ ID NO: 179566 - protein, 25 aa, Influenza A virus
EEGSIGKVCRTLLAKSVFNSLYASP

SEQ ID NO: 179567 - protein, 20 aa, Influenza A virus
EEMATKADYTLDEESRARIK

SEQ ID NO: 179568 - protein, 23 aa, Influenza A virus
EEMATKADYTLDEESRARIKTRL

SEQ ID NO: 179569 - protein, 24 aa, Influenza A virus
EEMATKADYTLDEESRARIKTRLF

SEQ ID NO: 179570 - protein, 25 aa, Influenza A virus
EEMATKADYTLDEESRARIKTRLFT

SEQ ID NO: 179571 - protein, 14 aa, Influenza A virus
EESRARIKTRLFTI

SEQ ID NO: 179572 - protein, 15 aa, Influenza A virus
EESRARIKTRLFTIR

SEQ ID NO: 179573 - protein, 16 aa, Influenza A virus
EESRARIKTRLFTIRQ

SEQ ID NO: 179574 - protein, 17 aa, Influenza A virus
EESRARIKTRLFTIRQE

SEQ ID NO: 179575 - protein, 18 aa, Influenza A virus
EESRARIKTRLFTIRQEM

SEQ ID NO: 179576 - protein, 19 aa, Influenza A virus
EESRARIKTRLFTIRQEMA

SEQ ID NO: 179577 - protein, 15 aa, Influenza A virus
EETIEERFEITGTMR

SEQ ID NO: 179578 - protein, 15 aa, Influenza A virus
EFSLTDPRLEPHKWE

SEQ ID NO: 179579 - protein, 20 aa, Influenza A virus
EFSLTDPRLEPHKWEKYCVL

SEQ ID NO: 179580 - protein, 21 aa, Influenza A virus
EFSLTDPRLEPHKWEKYCVLE

SEQ ID NO: 179581 - protein, 22 aa, Influenza A virus
EFSLTDPRLEPHKWEKYCVLEI

SEQ ID NO: 179582 - protein, 23 aa, Influenza A virus
EFSLTDPRLEPHKWEKYCVLEIG

SEQ ID NO: 179583 - protein, 24 aa, Influenza A virus
EFSLTDPRLEPHKWEKYCVLEIGD

SEQ ID NO: 179584 - protein, 25 aa, Influenza A virus
EFSLTDPRLEPHKWEKYCVLEIGDM

SEQ ID NO: 179585 - protein, 14 aa, Influenza A virus
EGRDRTMAWTVVNS

SEQ ID NO: 179586 - protein, 15 aa, Influenza A virus
EGRDRTMAWTVVNSI

SEQ ID NO: 179587 - protein, 16 aa, Influenza A virus
EGRDRTMAWTVVNSIC

SEQ ID NO: 179588 - protein, 17 aa, Influenza A virus
EGRDRTMAWTVVNSICN

SEQ ID NO: 179589 - protein, 18 aa, Influenza A virus
EGRDRTMAWTVVNSICNT

SEQ ID NO: 179590 - protein, 19 aa, Influenza A virus
EGRDRTMAWTVVNSICNTT

SEQ ID NO: 179591 - protein, 20 aa, Influenza A virus
EGRDRTMAWTVVNSICNTTG

SEQ ID NO: 179592 - protein, 14 aa, Influenza A virus
EGRRKTNLYGFIIK

SEQ ID NO: 179593 - protein, 15 aa, Influenza A virus
EGRRKTNLYGFIIKG

SEQ ID NO: 179594 - protein, 16 aa, Influenza A virus
EGRRKTNLYGFIIKGR

SEQ ID NO: 179595 - protein, 17 aa, Influenza A virus
EGRRKTNLYGFIIKGRS

SEQ ID NO: 179596 - protein, 18 aa, Influenza A virus
EGRRKTNLYGFIIKGRSH

SEQ ID NO: 179597 - protein, 19 aa, Influenza A virus
EGRRKTNLYGFIIKGRSHL

SEQ ID NO: 179598 - protein, 20 aa, Influenza A virus
EGRRKTNLYGFIIKGRSHLR

SEQ ID NO: 179599 - protein, 21 aa, Influenza A virus
EGRRKTNLYGFIIKGRSHLRN

SEQ ID NO: 179600 - protein, 22 aa, Influenza A virus
EGRRKTNLYGFIIKGRSHLRND

SEQ ID NO: 179601 - protein, 23 aa, Influenza A virus
EGRRKTNLYGFIIKGRSHLRNDT

SEQ ID NO: 179602 - protein, 24 aa, Influenza A virus
EGRRKTNLYGFIIKGRSHLRNDTD

SEQ ID NO: 179603 - protein, 25 aa, Influenza A virus
EGRRKTNLYGFIIKGRSHLRNDTDV

SEQ ID NO: 179604 - protein, 14 aa, Influenza A virus
EGSIGKVCRTLLAK

SEQ ID NO: 179605 - protein, 15 aa, Influenza A virus
EGSIGKVCRTLLAKS

SEQ ID NO: 179606 - protein, 16 aa, Influenza A virus
EGSIGKVCRTLLAKSV

SEQ ID NO: 179607 - protein, 17 aa, Influenza A virus
EGSIGKVCRTLLAKSVF

SEQ ID NO: 179608 - protein, 18 aa, Influenza A virus
EGSIGKVCRTLLAKSVFN

SEQ ID NO: 179609 - protein, 19 aa, Influenza A virus
EGSIGKVCRTLLAKSVFNS

SEQ ID NO: 179610 - protein, 20 aa, Influenza A virus
EGSIGKVCRTLLAKSVFNSL

SEQ ID NO: 179611 - protein, 21 aa, Influenza A virus
EGSIGKVCRTLLAKSVFNSLY

SEQ ID NO: 179612 - protein, 22 aa, Influenza A virus
EGSIGKVCRTLLAKSVFNSLYA

SEQ ID NO: 179613 - protein, 23 aa, Influenza A virus
EGSIGKVCRTLLAKSVFNSLYAS

SEQ ID NO: 179614 - protein, 24 aa, Influenza A virus
EGSIGKVCRTLLAKSVFNSLYASP

SEQ ID NO: 179615 - protein, 25 aa, Influenza A virus
EGSIGKVCRTLLAKSVFNSLYASPQ

SEQ ID NO: 179616 - protein, 15 aa, Influenza A virus
EIGVTRREVHIYYLE

SEQ ID NO: 179617 - protein, 16 aa, Influenza A virus
EIGVTRREVHIYYLEK

SEQ ID NO: 179618 - protein, 17 aa, Influenza A virus
EIGVTRREVHIYYLEKA

SEQ ID NO: 179619 - protein, 18 aa, Influenza A virus
EIGVTRREVHIYYLEKAN

SEQ ID NO: 179620 - protein, 19 aa, Influenza A virus
EIGVTRREVHIYYLEKANK

SEQ ID NO: 179621 - protein, 20 aa, Influenza A virus
EIGVTRREVHIYYLEKANKI

SEQ ID NO: 179622 - protein, 21 aa, Influenza A virus
EIGVTRREVHIYYLEKANKIK

SEQ ID NO: 179623 - protein, 22 aa, Influenza A virus
EIGVTRREVHIYYLEKANKIKS

SEQ ID NO: 179624 - protein, 23 aa, Influenza A virus
EIGVTRREVHIYYLEKANKIKSE

SEQ ID NO: 179625 - protein, 15 aa, Influenza A virus
EIIEGRDRTMAWTVV

SEQ ID NO: 179626 - protein, 16 aa, Influenza A virus
EIIEGRDRTMAWTVVN

SEQ ID NO: 179627 - protein, 17 aa, Influenza A virus
EIIEGRDRTMAWTVVNS

SEQ ID NO: 179628 - protein, 18 aa, Influenza A virus
EIIEGRDRTMAWTVVNSI

SEQ ID NO: 179629 - protein, 19 aa, Influenza A virus
EIIEGRDRTMAWTVVNSIC

SEQ ID NO: 179630 - protein, 20 aa, Influenza A virus
EIIEGRDRTMAWTVVNSICN

SEQ ID NO: 179631 - protein, 21 aa, Influenza A virus
EIIEGRDRTMAWTVVNSICNT

SEQ ID NO: 179632 - protein, 22 aa, Influenza A virus
EIIEGRDRTMAWTVVNSICNTT

SEQ ID NO: 179633 - protein, 23 aa, Influenza A virus
EIIEGRDRTMAWTVVNSICNTTG

SEQ ID NO: 179634 - protein, 20 aa, Influenza A virus
EMATKADYTLDEESRARIKT

SEQ ID NO: 179635 - protein, 23 aa, Influenza A virus
EMATKADYTLDEESRARIKTRLF

SEQ ID NO: 179636 - protein, 24 aa, Influenza A virus
EMATKADYTLDEESRARIKTRLFT

SEQ ID NO: 179637 - protein, 25 aa, Influenza A virus
EMATKADYTLDEESRARIKTRLFTI

SEQ ID NO: 179638 - protein, 13 aa, Influenza A virus
EMRRCLLQSLQQI

SEQ ID NO: 179639 - protein, 14 aa, Influenza A virus
EMRRCLLQSLQQIE

SEQ ID NO: 179640 - protein, 15 aa, Influenza A virus
EMRRCLLQSLQQIES

SEQ ID NO: 179641 - protein, 16 aa, Influenza A virus
EMRRCLLQSLQQIESM

SEQ ID NO: 179642 - protein, 17 aa, Influenza A virus
EMRRCLLQSLQQIESMI

SEQ ID NO: 179643 - protein, 18 aa, Influenza A virus
EMRRCLLQSLQQIESMIE

SEQ ID NO: 179644 - protein, 19 aa, Influenza A virus
EMRRCLLQSLQQIESMIEA

SEQ ID NO: 179645 - protein, 20 aa, Influenza A virus
EMRRCLLQSLQQIESMIEAE

SEQ ID NO: 179646 - protein, 21 aa, Influenza A virus
EMRRCLLQSLQQIESMIEAES

SEQ ID NO: 179647 - protein, 22 aa, Influenza A virus
EMRRCLLQSLQQIESMIEAESS

SEQ ID NO: 179648 - protein, 23 aa, Influenza A virus
EMRRCLLQSLQQIESMIEAESSV

SEQ ID NO: 179649 - protein, 24 aa, Influenza A virus
EMRRCLLQSLQQIESMIEAESSVK

SEQ ID NO: 179650 - protein, 25 aa, Influenza A virus
EMRRCLLQSLQQIESMIEAESSVKE

SEQ ID NO: 179651 - protein, 13 aa, Influenza A virus
ENFRAYVDGFEPN

SEQ ID NO: 179652 - protein, 14 aa, Influenza A virus
ENFRAYVDGFEPNG

SEQ ID NO: 179653 - protein, 14 aa, Influenza A virus
ENRFIEIGVTRREV

SEQ ID NO: 179654 - protein, 15 aa, Influenza A virus
ENRFIEIGVTRREVH

SEQ ID NO: 179655 - protein, 13 aa, Influenza A virus
EPHKWEKYCVLEI

SEQ ID NO: 179656 - protein, 14 aa, Influenza A virus
EPHKWEKYCVLEIG

SEQ ID NO: 179657 - protein, 15 aa, Influenza A virus
EPHKWEKYCVLEIGD

SEQ ID NO: 179658 - protein, 16 aa, Influenza A virus
EPHKWEKYCVLEIGDM

SEQ ID NO: 179659 - protein, 17 aa, Influenza A virus
EPHKWEKYCVLEIGDML

SEQ ID NO: 179660 - protein, 15 aa, Influenza A virus
ESMIEAESSVKEKDM

SEQ ID NO: 179661 - protein, 15 aa, Influenza A virus
ESPKGVEEGSIGKVC

SEQ ID NO: 179662 - protein, 16 aa, Influenza A virus
ESPKGVEEGSIGKVCR

SEQ ID NO: 179663 - protein, 17 aa, Influenza A virus
ESPKGVEEGSIGKVCRT

SEQ ID NO: 179664 - protein, 19 aa, Influenza A virus
ESPKGVEEGSIGKVCRTLL

SEQ ID NO: 179665 - protein, 20 aa, Influenza A virus
ESPKGVEEGSIGKVCRTLLA

SEQ ID NO: 179666 - protein, 21 aa, Influenza A virus
ESPKGVEEGSIGKVCRTLLAK

SEQ ID NO: 179667 - protein, 22 aa, Influenza A virus
ESPKGVEEGSIGKVCRTLLAKS

SEQ ID NO: 179668 - protein, 23 aa, Influenza A virus
ESPKGVEEGSIGKVCRTLLAKSV

SEQ ID NO: 179669 - protein, 24 aa, Influenza A virus
ESPKGVEEGSIGKVCRTLLAKSVF

SEQ ID NO: 179670 - protein, 25 aa, Influenza A virus
ESPKGVEEGSIGKVCRTLLAKSVFN

SEQ ID NO: 179671 - protein, 14 aa, Influenza A virus
ESRARIKTRLFTIR

SEQ ID NO: 179672 - protein, 15 aa, Influenza A virus
ESRARIKTRLFTIRQ

SEQ ID NO: 179673 - protein, 16 aa, Influenza A virus
ESRARIKTRLFTIRQE

SEQ ID NO: 179674 - protein, 17 aa, Influenza A virus
ESRARIKTRLFTIRQEM

SEQ ID NO: 179675 - protein, 18 aa, Influenza A virus
ESRARIKTRLFTIRQEMA

SEQ ID NO: 179676 - protein, 13 aa, Influenza A virus
ETNKFAAICTHLE

SEQ ID NO: 179677 - protein, 14 aa, Influenza A virus
ETNKFAAICTHLEV

SEQ ID NO: 179678 - protein, 15 aa, Influenza A virus
ETNKFAAICTHLEVC

SEQ ID NO: 179679 - protein, 16 aa, Influenza A virus
ETNKFAAICTHLEVCF

SEQ ID NO: 179680 - protein, 17 aa, Influenza A virus
ETNKFAAICTHLEVCFM

SEQ ID NO: 179681 - protein, 18 aa, Influenza A virus
ETNKFAAICTHLEVCFMY

SEQ ID NO: 179682 - protein, 19 aa, Influenza A virus
ETNKFAAICTHLEVCFMYS

SEQ ID NO: 179683 - protein, 20 aa, Influenza A virus
ETNKFAAICTHLEVCFMYSD

SEQ ID NO: 179684 - protein, 21 aa, Influenza A virus
ETNKFAAICTHLEVCFMYSDF

SEQ ID NO: 179685 - protein, 22 aa, Influenza A virus
ETNKFAAICTHLEVCFMYSDFH

SEQ ID NO: 179686 - protein, 23 aa, Influenza A virus
ETNKFAAICTHLEVCFMYSDFHF

SEQ ID NO: 179687 - protein, 24 aa, Influenza A virus
ETNKFAAICTHLEVCFMYSDFHFI

SEQ ID NO: 179688 - protein, 13 aa, Influenza A virus
EVHIYYLEKANKI

SEQ ID NO: 179689 - protein, 14 aa, Influenza A virus
EVHIYYLEKANKIK

SEQ ID NO: 179690 - protein, 15 aa, Influenza A virus
EVHIYYLEKANKIKS

SEQ ID NO: 179691 - protein, 16 aa, Influenza A virus
EVHIYYLEKANKIKSE

SEQ ID NO: 179692 - protein, 15 aa, Influenza A virus
EVSHCRATEYIMKGV

SEQ ID NO: 179693 - protein, 16 aa, Influenza A virus
EVSHCRATEYIMKGVY

SEQ ID NO: 179694 - protein, 17 aa, Influenza A virus
EVSHCRATEYIMKGVYI

SEQ ID NO: 179695 - protein, 18 aa, Influenza A virus
EVSHCRATEYIMKGVYIN

SEQ ID NO: 179696 - protein, 19 aa, Influenza A virus
EVSHCRATEYIMKGVYINT

SEQ ID NO: 179697 - protein, 20 aa, Influenza A virus
EVSHCRATEYIMKGVYINTA

SEQ ID NO: 179698 - protein, 21 aa, Influenza A virus
EVSHCRATEYIMKGVYINTAL

SEQ ID NO: 179699 - protein, 22 aa, Influenza A virus
EVSHCRATEYIMKGVYINTALL

SEQ ID NO: 179700 - protein, 23 aa, Influenza A virus
EVSHCRATEYIMKGVYINTALLN

SEQ ID NO: 179701 - protein, 24 aa, Influenza A virus
EVSHCRATEYIMKGVYINTALLNA

SEQ ID NO: 179702 - protein, 25 aa, Influenza A virus
EVSHCRATEYIMKGVYINTALLNAS

SEQ ID NO: 179703 - protein, 13 aa, Influenza A virus
EYIMKGVYINTAL

SEQ ID NO: 179704 - protein, 14 aa, Influenza A virus
EYIMKGVYINTALL

SEQ ID NO: 179705 - protein, 15 aa, Influenza A virus
EYIMKGVYINTALLN

SEQ ID NO: 179706 - protein, 16 aa, Influenza A virus
EYIMKGVYINTALLNA

SEQ ID NO: 179707 - protein, 17 aa, Influenza A virus
EYIMKGVYINTALLNAS

SEQ ID NO: 179708 - protein, 18 aa, Influenza A virus
EYIMKGVYINTALLNASC

SEQ ID NO: 179709 - protein, 19 aa, Influenza A virus
EYIMKGVYINTALLNASCA

SEQ ID NO: 179710 - protein, 20 aa, Influenza A virus
EYIMKGVYINTALLNASCAA

SEQ ID NO: 179711 - protein, 21 aa, Influenza A virus
EYIMKGVYINTALLNASCAAM

SEQ ID NO: 179712 - protein, 22 aa, Influenza A virus
EYIMKGVYINTALLNASCAAMD

SEQ ID NO: 179713 - protein, 23 aa, Influenza A virus
EYIMKGVYINTALLNASCAAMDD

SEQ ID NO: 179714 - protein, 24 aa, Influenza A virus
EYIMKGVYINTALLNASCAAMDDF

SEQ ID NO: 179715 - protein, 25 aa, Influenza A virus
EYIMKGVYINTALLNASCAAMDDFQ

SEQ ID NO: 179716 - protein, 14 aa, Influenza A virus
FAAICTHLEVCFMY

SEQ ID NO: 179717 - protein, 15 aa, Influenza A virus
FAAICTHLEVCFMYS

SEQ ID NO: 179718 - protein, 16 aa, Influenza A virus
FAAICTHLEVCFMYSD

SEQ ID NO: 179719 - protein, 17 aa, Influenza A virus
FAAICTHLEVCFMYSDF

SEQ ID NO: 179720 - protein, 18 aa, Influenza A virus
FAAICTHLEVCFMYSDFH

SEQ ID NO: 179721 - protein, 19 aa, Influenza A virus
FAAICTHLEVCFMYSDFHF

SEQ ID NO: 179722 - protein, 20 aa, Influenza A virus
FAAICTHLEVCFMYSDFHFI

SEQ ID NO: 179723 - protein, 15 aa, Influenza A virus
FEIIEGRDRTMAWTV

SEQ ID NO: 179724 - protein, 16 aa, Influenza A virus
FEIIEGRDRTMAWTVV

SEQ ID NO: 179725 - protein, 17 aa, Influenza A virus
FEIIEGRDRTMAWTVVN

SEQ ID NO: 179726 - protein, 18 aa, Influenza A virus
FEIIEGRDRTMAWTVVNS

SEQ ID NO: 179727 - protein, 19 aa, Influenza A virus
FEIIEGRDRTMAWTVVNSI

SEQ ID NO: 179728 - protein, 20 aa, Influenza A virus
FEIIEGRDRTMAWTVVNSIC

SEQ ID NO: 179729 - protein, 21 aa, Influenza A virus
FEIIEGRDRTMAWTVVNSICN

SEQ ID NO: 179730 - protein, 22 aa, Influenza A virus
FEIIEGRDRTMAWTVVNSICNT

SEQ ID NO: 179731 - protein, 23 aa, Influenza A virus
FEIIEGRDRTMAWTVVNSICNTT

SEQ ID NO: 179732 - protein, 24 aa, Influenza A virus
FEIIEGRDRTMAWTVVNSICNTTG

SEQ ID NO: 179733 - protein, 14 aa, Influenza A virus
FIEIGVTRREVHIY

SEQ ID NO: 179734 - protein, 15 aa, Influenza A virus
FIEIGVTRREVHIYY

SEQ ID NO: 179735 - protein, 16 aa, Influenza A virus
FIEIGVTRREVHIYYL

SEQ ID NO: 179736 - protein, 17 aa, Influenza A virus
FIEIGVTRREVHIYYLE

SEQ ID NO: 179737 - protein, 18 aa, Influenza A virus
FIEIGVTRREVHIYYLEK

SEQ ID NO: 179738 - protein, 19 aa, Influenza A virus
FIEIGVTRREVHIYYLEKA

SEQ ID NO: 179739 - protein, 20 aa, Influenza A virus
FIEIGVTRREVHIYYLEKAN

SEQ ID NO: 179740 - protein, 21 aa, Influenza A virus
FIEIGVTRREVHIYYLEKANK

SEQ ID NO: 179741 - protein, 13 aa, Influenza A virus
FIIKGRSHLRNDT

SEQ ID NO: 179742 - protein, 14 aa, Influenza A virus
FIIKGRSHLRNDTD

SEQ ID NO: 179743 - protein, 15 aa, Influenza A virus
FIIKGRSHLRNDTDV

SEQ ID NO: 179744 - protein, 16 aa, Influenza A virus
FIIKGRSHLRNDTDVV

SEQ ID NO: 179745 - protein, 17 aa, Influenza A virus
FIIKGRSHLRNDTDVVN

SEQ ID NO: 179746 - protein, 19 aa, Influenza A virus
FIIKGRSHLRNDTDVVNFV

SEQ ID NO: 179747 - protein, 20 aa, Influenza A virus
FIIKGRSHLRNDTDVVNFVS

SEQ ID NO: 179748 - protein, 21 aa, Influenza A virus
FIIKGRSHLRNDTDVVNFVSM

SEQ ID NO: 179749 - protein, 22 aa, Influenza A virus
FIIKGRSHLRNDTDVVNFVSME

SEQ ID NO: 179750 - protein, 23 aa, Influenza A virus
FIIKGRSHLRNDTDVVNFVSMEF

SEQ ID NO: 179751 - protein, 24 aa, Influenza A virus
FIIKGRSHLRNDTDVVNFVSMEFS

SEQ ID NO: 179752 - protein, 25 aa, Influenza A virus
FIIKGRSHLRNDTDVVNFVSMEFSL

SEQ ID NO: 179753 - protein, 13 aa, Influenza A virus
FLLMDALKLSIED

SEQ ID NO: 179754 - protein, 14 aa, Influenza A virus
FLLMDALKLSIEDP

SEQ ID NO: 179755 - protein, 15 aa, Influenza A virus
FLLMDALKLSIEDPS

SEQ ID NO: 179756 - protein, 16 aa, Influenza A virus
FLLMDALKLSIEDPSH

SEQ ID NO: 179757 - protein, 17 aa, Influenza A virus
FLLMDALKLSIEDPSHE

SEQ ID NO: 179758 - protein, 18 aa, Influenza A virus
FLLMDALKLSIEDPSHEG

SEQ ID NO: 179759 - protein, 19 aa, Influenza A virus
FLLMDALKLSIEDPSHEGE

SEQ ID NO: 179760 - protein, 20 aa, Influenza A virus
FLLMDALKLSIEDPSHEGEG

SEQ ID NO: 179761 - protein, 21 aa, Influenza A virus
FLLMDALKLSIEDPSHEGEGI

SEQ ID NO: 179762 - protein, 22 aa, Influenza A virus
FLLMDALKLSIEDPSHEGEGIP

SEQ ID NO: 179763 - protein, 23 aa, Influenza A virus
FLLMDALKLSIEDPSHEGEGIPL

SEQ ID NO: 179764 - protein, 24 aa, Influenza A virus
FLLMDALKLSIEDPSHEGEGIPLY

SEQ ID NO: 179765 - protein, 25 aa, Influenza A virus
FLLMDALKLSIEDPSHEGEGIPLYD

SEQ ID NO: 179766 - protein, 13 aa, Influenza A virus
FLYVRTNGTSKIK

SEQ ID NO: 179767 - protein, 14 aa, Influenza A virus
FLYVRTNGTSKIKM

SEQ ID NO: 179768 - protein, 15 aa, Influenza A virus
FLYVRTNGTSKIKMK

SEQ ID NO: 179769 - protein, 16 aa, Influenza A virus
FLYVRTNGTSKIKMKW

SEQ ID NO: 179770 - protein, 17 aa, Influenza A virus
FLYVRTNGTSKIKMKWG

SEQ ID NO: 179771 - protein, 18 aa, Influenza A virus
FLYVRTNGTSKIKMKWGM

SEQ ID NO: 179772 - protein, 19 aa, Influenza A virus
FLYVRTNGTSKIKMKWGME

SEQ ID NO: 179773 - protein, 20 aa, Influenza A virus
FLYVRTNGTSKIKMKWGMEM

SEQ ID NO: 179774 - protein, 21 aa, Influenza A virus
FLYVRTNGTSKIKMKWGMEMR

SEQ ID NO: 179775 - protein, 22 aa, Influenza A virus
FLYVRTNGTSKIKMKWGMEMRR

SEQ ID NO: 179776 - protein, 23 aa, Influenza A virus
FLYVRTNGTSKIKMKWGMEMRRC

SEQ ID NO: 179777 - protein, 24 aa, Influenza A virus
FLYVRTNGTSKIKMKWGMEMRRCL

SEQ ID NO: 179778 - protein, 25 aa, Influenza A virus
FLYVRTNGTSKIKMKWGMEMRRCLL

SEQ ID NO: 179779 - protein, 13 aa, Influenza A virus
FNPMIVELAEKAM

SEQ ID NO: 179780 - protein, 14 aa, Influenza A virus
FNPMIVELAEKAMK

SEQ ID NO: 179781 - protein, 15 aa, Influenza A virus
FNPMIVELAEKAMKE

SEQ ID NO: 179782 - protein, 16 aa, Influenza A virus
FNPMIVELAEKAMKEY

SEQ ID NO: 179783 - protein, 17 aa, Influenza A virus
FNPMIVELAEKAMKEYG

SEQ ID NO: 179784 - protein, 18 aa, Influenza A virus
FNPMIVELAEKAMKEYGE

SEQ ID NO: 179785 - protein, 14 aa, Influenza A virus
FNSLYASPQLEGFS

SEQ ID NO: 179786 - protein, 15 aa, Influenza A virus
FNSLYASPQLEGFSA

SEQ ID NO: 179787 - protein, 16 aa, Influenza A virus
FNSLYASPQLEGFSAE

SEQ ID NO: 179788 - protein, 17 aa, Influenza A virus
FNSLYASPQLEGFSAES

SEQ ID NO: 179789 - protein, 18 aa, Influenza A virus
FNSLYASPQLEGFSAESR

SEQ ID NO: 179790 - protein, 19 aa, Influenza A virus
FNSLYASPQLEGFSAESRK

SEQ ID NO: 179791 - protein, 20 aa, Influenza A virus
FNSLYASPQLEGFSAESRKL

SEQ ID NO: 179792 - protein, 21 aa, Influenza A virus
FNSLYASPQLEGFSAESRKLL

SEQ ID NO: 179793 - protein, 22 aa, Influenza A virus
FNSLYASPQLEGFSAESRKLLL

SEQ ID NO: 179794 - protein, 13 aa, Influenza A virus
FQLIPMISKCRTK

SEQ ID NO: 179795 - protein, 14 aa, Influenza A virus
FQLIPMISKCRTKE

SEQ ID NO: 179796 - protein, 15 aa, Influenza A virus
FQLIPMISKCRTKEG

SEQ ID NO: 179797 - protein, 16 aa, Influenza A virus
FQLIPMISKCRTKEGR

SEQ ID NO: 179798 - protein, 17 aa, Influenza A virus
FQLIPMISKCRTKEGRR

SEQ ID NO: 179799 - protein, 18 aa, Influenza A virus
FQLIPMISKCRTKEGRRK

SEQ ID NO: 179800 - protein, 19 aa, Influenza A virus
FQLIPMISKCRTKEGRRKT

SEQ ID NO: 179801 - protein, 20 aa, Influenza A virus
FQLIPMISKCRTKEGRRKTN

SEQ ID NO: 179802 - protein, 21 aa, Influenza A virus
FQLIPMISKCRTKEGRRKTNL

SEQ ID NO: 179803 - protein, 22 aa, Influenza A virus
FQLIPMISKCRTKEGRRKTNLY

SEQ ID NO: 179804 - protein, 23 aa, Influenza A virus
FQLIPMISKCRTKEGRRKTNLYG

SEQ ID NO: 179805 - protein, 24 aa, Influenza A virus
FQLIPMISKCRTKEGRRKTNLYGF

SEQ ID NO: 179806 - protein, 25 aa, Influenza A virus
FQLIPMISKCRTKEGRRKTNLYGFI

SEQ ID NO: 179807 - protein, 20 aa, Influenza A virus
FRQSERGEETIEERFEITGT

SEQ ID NO: 179808 - protein, 22 aa, Influenza A virus
FRQSERGEETIEERFEITGTMR

SEQ ID NO: 179809 - protein, 20 aa, Influenza A virus
FSFTGEEMATKADYTLDEES

SEQ ID NO: 179810 - protein, 23 aa, Influenza A virus
FSFTGEEMATKADYTLDEESRAR

SEQ ID NO: 179811 - protein, 24 aa, Influenza A virus
FSFTGEEMATKADYTLDEESRARI

SEQ ID NO: 179812 - protein, 25 aa, Influenza A virus
FSFTGEEMATKADYTLDEESRARIK

SEQ ID NO: 179813 - protein, 19 aa, Influenza A virus
FSLTDPRLEPHKWEKYCVL

SEQ ID NO: 179814 - protein, 20 aa, Influenza A virus
FSLTDPRLEPHKWEKYCVLE

SEQ ID NO: 179815 - protein, 21 aa, Influenza A virus
FSLTDPRLEPHKWEKYCVLEI

SEQ ID NO: 179816 - protein, 22 aa, Influenza A virus
FSLTDPRLEPHKWEKYCVLEIG

SEQ ID NO: 179817 - protein, 23 aa, Influenza A virus
FSLTDPRLEPHKWEKYCVLEIGD

SEQ ID NO: 179818 - protein, 24 aa, Influenza A virus
FSLTDPRLEPHKWEKYCVLEIGDM

SEQ ID NO: 179819 - protein, 15 aa, Influenza A virus
FTAEVSHCRATEYIM

SEQ ID NO: 179820 - protein, 16 aa, Influenza A virus
FTAEVSHCRATEYIMK

SEQ ID NO: 179821 - protein, 17 aa, Influenza A virus
FTAEVSHCRATEYIMKG

SEQ ID NO: 179822 - protein, 19 aa, Influenza A virus
FTAEVSHCRATEYIMKGVY

SEQ ID NO: 179823 - protein, 20 aa, Influenza A virus
FTAEVSHCRATEYIMKGVYI

SEQ ID NO: 179824 - protein, 21 aa, Influenza A virus
FTAEVSHCRATEYIMKGVYIN

SEQ ID NO: 179825 - protein, 22 aa, Influenza A virus
FTAEVSHCRATEYIMKGVYINT

SEQ ID NO: 179826 - protein, 23 aa, Influenza A virus
FTAEVSHCRATEYIMKGVYINTA

SEQ ID NO: 179827 - protein, 24 aa, Influenza A virus
FTAEVSHCRATEYIMKGVYINTAL

SEQ ID NO: 179828 - protein, 25 aa, Influenza A virus
FTAEVSHCRATEYIMKGVYINTALL

SEQ ID NO: 179829 - protein, 24 aa, Influenza A virus
FTGEEMATKADYTLDEESRARIKT

SEQ ID NO: 179830 - protein, 25 aa, Influenza A virus
FTGEEMATKADYTLDEESRARIKTR

SEQ ID NO: 179831 - protein, 13 aa, Influenza A virus
FVRQCFNPMIVEL

SEQ ID NO: 179832 - protein, 14 aa, Influenza A virus
FVRQCFNPMIVELA

SEQ ID NO: 179833 - protein, 15 aa, Influenza A virus
FVRQCFNPMIVELAE

SEQ ID NO: 179834 - protein, 16 aa, Influenza A virus
FVRQCFNPMIVELAEK

SEQ ID NO: 179835 - protein, 17 aa, Influenza A virus
FVRQCFNPMIVELAEKA

SEQ ID NO: 179836 - protein, 18 aa, Influenza A virus
FVRQCFNPMIVELAEKAM

SEQ ID NO: 179837 - protein, 19 aa, Influenza A virus
FVRQCFNPMIVELAEKAMK

SEQ ID NO: 179838 - protein, 20 aa, Influenza A virus
FVRQCFNPMIVELAEKAMKE

SEQ ID NO: 179839 - protein, 21 aa, Influenza A virus
FVRQCFNPMIVELAEKAMKEY

SEQ ID NO: 179840 - protein, 22 aa, Influenza A virus
FVRQCFNPMIVELAEKAMKEYG

SEQ ID NO: 179841 - protein, 23 aa, Influenza A virus
FVRQCFNPMIVELAEKAMKEYGE

SEQ ID NO: 179842 - protein, 13 aa, Influenza A virus
FVSMEFSLTDPRL

SEQ ID NO: 179843 - protein, 14 aa, Influenza A virus
FVSMEFSLTDPRLE

SEQ ID NO: 179844 - protein, 15 aa, Influenza A virus
FVSMEFSLTDPRLEP

SEQ ID NO: 179845 - protein, 16 aa, Influenza A virus
FVSMEFSLTDPRLEPH

SEQ ID NO: 179846 - protein, 17 aa, Influenza A virus
FVSMEFSLTDPRLEPHK

SEQ ID NO: 179847 - protein, 18 aa, Influenza A virus
FVSMEFSLTDPRLEPHKW

SEQ ID NO: 179848 - protein, 19 aa, Influenza A virus
FVSMEFSLTDPRLEPHKWE

SEQ ID NO: 179849 - protein, 20 aa, Influenza A virus
FVSMEFSLTDPRLEPHKWEK

SEQ ID NO: 179850 - protein, 21 aa, Influenza A virus
FVSMEFSLTDPRLEPHKWEKY

SEQ ID NO: 179851 - protein, 22 aa, Influenza A virus
FVSMEFSLTDPRLEPHKWEKYC

SEQ ID NO: 179852 - protein, 23 aa, Influenza A virus
FVSMEFSLTDPRLEPHKWEKYCV

SEQ ID NO: 179853 - protein, 24 aa, Influenza A virus
FVSMEFSLTDPRLEPHKWEKYCVL

SEQ ID NO: 179854 - protein, 25 aa, Influenza A virus
FVSMEFSLTDPRLEPHKWEKYCVLE

SEQ ID NO: 179855 - protein, 23 aa, Influenza A virus
GEEMATKADYTLDEESRARIKTR

SEQ ID NO: 179856 - protein, 24 aa, Influenza A virus
GEEMATKADYTLDEESRARIKTRL

SEQ ID NO: 179857 - protein, 25 aa, Influenza A virus
GEEMATKADYTLDEESRARIKTRLF

SEQ ID NO: 179858 - protein, 16 aa, Influenza A virus
GEETIEERFEITGTMR

SEQ ID NO: 179859 - protein, 19 aa, Influenza A virus
GESPKGVEEGSIGKVCRTL

SEQ ID NO: 179860 - protein, 20 aa, Influenza A virus
GESPKGVEEGSIGKVCRTLL

SEQ ID NO: 179861 - protein, 22 aa, Influenza A virus
GESPKGVEEGSIGKVCRTLLAK

SEQ ID NO: 179862 - protein, 23 aa, Influenza A virus
GESPKGVEEGSIGKVCRTLLAKS

SEQ ID NO: 179863 - protein, 24 aa, Influenza A virus
GESPKGVEEGSIGKVCRTLLAKSV

SEQ ID NO: 179864 - protein, 25 aa, Influenza A virus
GESPKGVEEGSIGKVCRTLLAKSVF

SEQ ID NO: 179865 - protein, 13 aa, Influenza A virus
GFIIKGRSHLRND

SEQ ID NO: 179866 - protein, 14 aa, Influenza A virus
GFIIKGRSHLRNDT

SEQ ID NO: 179867 - protein, 15 aa, Influenza A virus
GFIIKGRSHLRNDTD

SEQ ID NO: 179868 - protein, 16 aa, Influenza A virus
GFIIKGRSHLRNDTDV

SEQ ID NO: 179869 - protein, 17 aa, Influenza A virus
GFIIKGRSHLRNDTDVV

SEQ ID NO: 179870 - protein, 18 aa, Influenza A virus
GFIIKGRSHLRNDTDVVN

SEQ ID NO: 179871 - protein, 19 aa, Influenza A virus
GFIIKGRSHLRNDTDVVNF

SEQ ID NO: 179872 - protein, 20 aa, Influenza A virus
GFIIKGRSHLRNDTDVVNFV

SEQ ID NO: 179873 - protein, 21 aa, Influenza A virus
GFIIKGRSHLRNDTDVVNFVS

SEQ ID NO: 179874 - protein, 22 aa, Influenza A virus
GFIIKGRSHLRNDTDVVNFVSM

SEQ ID NO: 179875 - protein, 23 aa, Influenza A virus
GFIIKGRSHLRNDTDVVNFVSME

SEQ ID NO: 179876 - protein, 24 aa, Influenza A virus
GFIIKGRSHLRNDTDVVNFVSMEF

SEQ ID NO: 179877 - protein, 25 aa, Influenza A virus
GFIIKGRSHLRNDTDVVNFVSMEFS

SEQ ID NO: 179878 - protein, 14 aa, Influenza A virus
GGLYEAIEECLIND

SEQ ID NO: 179879 - protein, 15 aa, Influenza A virus
GGLYEAIEECLINDP

SEQ ID NO: 179880 - protein, 16 aa, Influenza A virus
GGLYEAIEECLINDPW

SEQ ID NO: 179881 - protein, 17 aa, Influenza A virus
GGLYEAIEECLINDPWV

SEQ ID NO: 179882 - protein, 19 aa, Influenza A virus
GGLYEAIEECLINDPWVLL

SEQ ID NO: 179883 - protein, 20 aa, Influenza A virus
GGLYEAIEECLINDPWVLLN

SEQ ID NO: 179884 - protein, 21 aa, Influenza A virus
GGLYEAIEECLINDPWVLLNA

SEQ ID NO: 179885 - protein, 22 aa, Influenza A virus
GGLYEAIEECLINDPWVLLNAS

SEQ ID NO: 179886 - protein, 23 aa, Influenza A virus
GGLYEAIEECLINDPWVLLNASW

SEQ ID NO: 179887 - protein, 24 aa, Influenza A virus
GGLYEAIEECLINDPWVLLNASWF

SEQ ID NO: 179888 - protein, 25 aa, Influenza A virus
GGLYEAIEECLINDPWVLLNASWFN

SEQ ID NO: 179889 - protein, 13 aa, Influenza A virus
GKVCRTLLAKSVF

SEQ ID NO: 179890 - protein, 14 aa, Influenza A virus
GKVCRTLLAKSVFN

SEQ ID NO: 179891 - protein, 15 aa, Influenza A virus
GKVCRTLLAKSVFNS

SEQ ID NO: 179892 - protein, 16 aa, Influenza A virus
GKVCRTLLAKSVFNSL

SEQ ID NO: 179893 - protein, 17 aa, Influenza A virus
GKVCRTLLAKSVFNSLY

SEQ ID NO: 179894 - protein, 18 aa, Influenza A virus
GKVCRTLLAKSVFNSLYA

SEQ ID NO: 179895 - protein, 19 aa, Influenza A virus
GKVCRTLLAKSVFNSLYAS

SEQ ID NO: 179896 - protein, 20 aa, Influenza A virus
GKVCRTLLAKSVFNSLYASP

SEQ ID NO: 179897 - protein, 21 aa, Influenza A virus
GKVCRTLLAKSVFNSLYASPQ

SEQ ID NO: 179898 - protein, 22 aa, Influenza A virus
GKVCRTLLAKSVFNSLYASPQL

SEQ ID NO: 179899 - protein, 23 aa, Influenza A virus
GKVCRTLLAKSVFNSLYASPQLE

SEQ ID NO: 179900 - protein, 24 aa, Influenza A virus
GKVCRTLLAKSVFNSLYASPQLEG

SEQ ID NO: 179901 - protein, 25 aa, Influenza A virus
GKVCRTLLAKSVFNSLYASPQLEGF

SEQ ID NO: 179902 - protein, 14 aa, Influenza A virus
GLYEAIEECLINDP

SEQ ID NO: 179903 - protein, 15 aa, Influenza A virus
GLYEAIEECLINDPW

SEQ ID NO: 179904 - protein, 16 aa, Influenza A virus
GLYEAIEECLINDPWV

SEQ ID NO: 179905 - protein, 17 aa, Influenza A virus
GLYEAIEECLINDPWVL

SEQ ID NO: 179906 - protein, 18 aa, Influenza A virus
GLYEAIEECLINDPWVLL

SEQ ID NO: 179907 - protein, 19 aa, Influenza A virus
GLYEAIEECLINDPWVLLN

SEQ ID NO: 179908 - protein, 20 aa, Influenza A virus
GLYEAIEECLINDPWVLLNA

SEQ ID NO: 179909 - protein, 21 aa, Influenza A virus
GLYEAIEECLINDPWVLLNAS

SEQ ID NO: 179910 - protein, 22 aa, Influenza A virus
GLYEAIEECLINDPWVLLNASW

SEQ ID NO: 179911 - protein, 23 aa, Influenza A virus
GLYEAIEECLINDPWVLLNASWF

SEQ ID NO: 179912 - protein, 24 aa, Influenza A virus
GLYEAIEECLINDPWVLLNASWFN

SEQ ID NO: 179913 - protein, 25 aa, Influenza A virus
GLYEAIEECLINDPWVLLNASWFNS

SEQ ID NO: 179914 - protein, 14 aa, Influenza A virus
GMEMRRCLLQSLQQ

SEQ ID NO: 179915 - protein, 15 aa, Influenza A virus
GMEMRRCLLQSLQQI

SEQ ID NO: 179916 - protein, 16 aa, Influenza A virus
GMEMRRCLLQSLQQIE

SEQ ID NO: 179917 - protein, 17 aa, Influenza A virus
GMEMRRCLLQSLQQIES

SEQ ID NO: 179918 - protein, 18 aa, Influenza A virus
GMEMRRCLLQSLQQIESM

SEQ ID NO: 179919 - protein, 19 aa, Influenza A virus
GMEMRRCLLQSLQQIESMI

SEQ ID NO: 179920 - protein, 20 aa, Influenza A virus
GMEMRRCLLQSLQQIESMIE

SEQ ID NO: 179921 - protein, 21 aa, Influenza A virus
GMEMRRCLLQSLQQIESMIEA

SEQ ID NO: 179922 - protein, 22 aa, Influenza A virus
GMEMRRCLLQSLQQIESMIEAE

SEQ ID NO: 179923 - protein, 23 aa, Influenza A virus
GMEMRRCLLQSLQQIESMIEAES

SEQ ID NO: 179924 - protein, 24 aa, Influenza A virus
GMEMRRCLLQSLQQIESMIEAESS

SEQ ID NO: 179925 - protein, 25 aa, Influenza A virus
GMEMRRCLLQSLQQIESMIEAESSV

SEQ ID NO: 179926 - protein, 14 aa, Influenza A virus
GRDRTMAWTVVNSI

SEQ ID NO: 179927 - protein, 15 aa, Influenza A virus
GRDRTMAWTVVNSIC

SEQ ID NO: 179928 - protein, 16 aa, Influenza A virus
GRDRTMAWTVVNSICN

SEQ ID NO: 179929 - protein, 17 aa, Influenza A virus
GRDRTMAWTVVNSICNT

SEQ ID NO: 179930 - protein, 18 aa, Influenza A virus
GRDRTMAWTVVNSICNTT

SEQ ID NO: 179931 - protein, 19 aa, Influenza A virus
GRDRTMAWTVVNSICNTTG

SEQ ID NO: 179932 - protein, 14 aa, Influenza A virus
GRRKTNLYGFIIKG

SEQ ID NO: 179933 - protein, 15 aa, Influenza A virus
GRRKTNLYGFIIKGR

SEQ ID NO: 179934 - protein, 16 aa, Influenza A virus
GRRKTNLYGFIIKGRS

SEQ ID NO: 179935 - protein, 17 aa, Influenza A virus
GRRKTNLYGFIIKGRSH

SEQ ID NO: 179936 - protein, 18 aa, Influenza A virus
GRRKTNLYGFIIKGRSHL

SEQ ID NO: 179937 - protein, 19 aa, Influenza A virus
GRRKTNLYGFIIKGRSHLR

SEQ ID NO: 179938 - protein, 20 aa, Influenza A virus
GRRKTNLYGFIIKGRSHLRN

SEQ ID NO: 179939 - protein, 21 aa, Influenza A virus
GRRKTNLYGFIIKGRSHLRND

SEQ ID NO: 179940 - protein, 22 aa, Influenza A virus
GRRKTNLYGFIIKGRSHLRNDT

SEQ ID NO: 179941 - protein, 23 aa, Influenza A virus
GRRKTNLYGFIIKGRSHLRNDTD

SEQ ID NO: 179942 - protein, 24 aa, Influenza A virus
GRRKTNLYGFIIKGRSHLRNDTDV

SEQ ID NO: 179943 - protein, 25 aa, Influenza A virus
GRRKTNLYGFIIKGRSHLRNDTDVV

SEQ ID NO: 179944 - protein, 15 aa, Influenza A virus
GRSHLRNDTDVVNFV

SEQ ID NO: 179945 - protein, 16 aa, Influenza A virus
GRSHLRNDTDVVNFVS

SEQ ID NO: 179946 - protein, 17 aa, Influenza A virus
GRSHLRNDTDVVNFVSM

SEQ ID NO: 179947 - protein, 19 aa, Influenza A virus
GRSHLRNDTDVVNFVSMEF

SEQ ID NO: 179948 - protein, 20 aa, Influenza A virus
GRSHLRNDTDVVNFVSMEFS

SEQ ID NO: 179949 - protein, 21 aa, Influenza A virus
GRSHLRNDTDVVNFVSMEFSL

SEQ ID NO: 179950 - protein, 22 aa, Influenza A virus
GRSHLRNDTDVVNFVSMEFSLT

SEQ ID NO: 179951 - protein, 23 aa, Influenza A virus
GRSHLRNDTDVVNFVSMEFSLTD

SEQ ID NO: 179952 - protein, 24 aa, Influenza A virus
GRSHLRNDTDVVNFVSMEFSLTDP

SEQ ID NO: 179953 - protein, 25 aa, Influenza A virus
GRSHLRNDTDVVNFVSMEFSLTDPR

SEQ ID NO: 179954 - protein, 14 aa, Influenza A virus
GSIGKVCRTLLAKS

SEQ ID NO: 179955 - protein, 15 aa, Influenza A virus
GSIGKVCRTLLAKSV

SEQ ID NO: 179956 - protein, 16 aa, Influenza A virus
GSIGKVCRTLLAKSVF

SEQ ID NO: 179957 - protein, 17 aa, Influenza A virus
GSIGKVCRTLLAKSVFN

SEQ ID NO: 179958 - protein, 18 aa, Influenza A virus
GSIGKVCRTLLAKSVFNS

SEQ ID NO: 179959 - protein, 19 aa, Influenza A virus
GSIGKVCRTLLAKSVFNSL

SEQ ID NO: 179960 - protein, 20 aa, Influenza A virus
GSIGKVCRTLLAKSVFNSLY

SEQ ID NO: 179961 - protein, 21 aa, Influenza A virus
GSIGKVCRTLLAKSVFNSLYA

SEQ ID NO: 179962 - protein, 22 aa, Influenza A virus
GSIGKVCRTLLAKSVFNSLYAS

SEQ ID NO: 179963 - protein, 23 aa, Influenza A virus
GSIGKVCRTLLAKSVFNSLYASP

SEQ ID NO: 179964 - protein, 24 aa, Influenza A virus
GSIGKVCRTLLAKSVFNSLYASPQ

SEQ ID NO: 179965 - protein, 25 aa, Influenza A virus
GSIGKVCRTLLAKSVFNSLYASPQL

SEQ ID NO: 179966 - protein, 14 aa, Influenza A virus
GTMRRLADQSLPPN

SEQ ID NO: 179967 - protein, 15 aa, Influenza A virus
GTMRRLADQSLPPNF

SEQ ID NO: 179968 - protein, 16 aa, Influenza A virus
GTMRRLADQSLPPNFS

SEQ ID NO: 179969 - protein, 14 aa, Influenza A virus
GTSKIKMKWGMEMR

SEQ ID NO: 179970 - protein, 15 aa, Influenza A virus
GTSKIKMKWGMEMRR

SEQ ID NO: 179971 - protein, 16 aa, Influenza A virus
GTSKIKMKWGMEMRRC

SEQ ID NO: 179972 - protein, 17 aa, Influenza A virus
GTSKIKMKWGMEMRRCL

SEQ ID NO: 179973 - protein, 18 aa, Influenza A virus
GTSKIKMKWGMEMRRCLL

SEQ ID NO: 179974 - protein, 19 aa, Influenza A virus
GTSKIKMKWGMEMRRCLLQ

SEQ ID NO: 179975 - protein, 20 aa, Influenza A virus
GTSKIKMKWGMEMRRCLLQS

SEQ ID NO: 179976 - protein, 21 aa, Influenza A virus
GTSKIKMKWGMEMRRCLLQSL

SEQ ID NO: 179977 - protein, 22 aa, Influenza A virus
GTSKIKMKWGMEMRRCLLQSLQ

SEQ ID NO: 179978 - protein, 23 aa, Influenza A virus
GTSKIKMKWGMEMRRCLLQSLQQ

SEQ ID NO: 179979 - protein, 24 aa, Influenza A virus
GTSKIKMKWGMEMRRCLLQSLQQI

SEQ ID NO: 179980 - protein, 25 aa, Influenza A virus
GTSKIKMKWGMEMRRCLLQSLQQIE

SEQ ID NO: 179981 - protein, 14 aa, Influenza A virus
GVEEGSIGKVCRTL

SEQ ID NO: 179982 - protein, 15 aa, Influenza A virus
GVEEGSIGKVCRTLL

SEQ ID NO: 179983 - protein, 16 aa, Influenza A virus
GVEEGSIGKVCRTLLA

SEQ ID NO: 179984 - protein, 17 aa, Influenza A virus
GVEEGSIGKVCRTLLAK

SEQ ID NO: 179985 - protein, 19 aa, Influenza A virus
GVEEGSIGKVCRTLLAKSV

SEQ ID NO: 179986 - protein, 20 aa, Influenza A virus
GVEEGSIGKVCRTLLAKSVF

SEQ ID NO: 179987 - protein, 21 aa, Influenza A virus
GVEEGSIGKVCRTLLAKSVFN

SEQ ID NO: 179988 - protein, 22 aa, Influenza A virus
GVEEGSIGKVCRTLLAKSVFNS

SEQ ID NO: 179989 - protein, 23 aa, Influenza A virus
GVEEGSIGKVCRTLLAKSVFNSL

SEQ ID NO: 179990 - protein, 24 aa, Influenza A virus
GVEEGSIGKVCRTLLAKSVFNSLY

SEQ ID NO: 179991 - protein, 25 aa, Influenza A virus
GVEEGSIGKVCRTLLAKSVFNSLYA

SEQ ID NO: 179992 - protein, 14 aa, Influenza A virus
GVTRREVHIYYLEK

SEQ ID NO: 179993 - protein, 15 aa, Influenza A virus
GVTRREVHIYYLEKA

SEQ ID NO: 179994 - protein, 16 aa, Influenza A virus
GVTRREVHIYYLEKAN

SEQ ID NO: 179995 - protein, 17 aa, Influenza A virus
GVTRREVHIYYLEKANK

SEQ ID NO: 179996 - protein, 18 aa, Influenza A virus
GVTRREVHIYYLEKANKI

SEQ ID NO: 179997 - protein, 19 aa, Influenza A virus
GVTRREVHIYYLEKANKIK

SEQ ID NO: 179998 - protein, 20 aa, Influenza A virus
GVTRREVHIYYLEKANKIKS

SEQ ID NO: 179999 - protein, 21 aa, Influenza A virus
GVTRREVHIYYLEKANKIKSE

SEQ ID NO: 180000 - protein, 13 aa, Influenza A virus
GVYINTALLNASC

SEQ ID NO: 180001 - protein, 14 aa, Influenza A virus
GVYINTALLNASCA

SEQ ID NO: 180002 - protein, 15 aa, Influenza A virus
GVYINTALLNASCAA

SEQ ID NO: 180003 - protein, 16 aa, Influenza A virus
GVYINTALLNASCAAM

SEQ ID NO: 180004 - protein, 17 aa, Influenza A virus
GVYINTALLNASCAAMD

SEQ ID NO: 180005 - protein, 18 aa, Influenza A virus
GVYINTALLNASCAAMDD

SEQ ID NO: 180006 - protein, 19 aa, Influenza A virus
GVYINTALLNASCAAMDDF

SEQ ID NO: 180007 - protein, 20 aa, Influenza A virus
GVYINTALLNASCAAMDDFQ

SEQ ID NO: 180008 - protein, 21 aa, Influenza A virus
GVYINTALLNASCAAMDDFQL

SEQ ID NO: 180009 - protein, 22 aa, Influenza A virus
GVYINTALLNASCAAMDDFQLI

SEQ ID NO: 180010 - protein, 23 aa, Influenza A virus
GVYINTALLNASCAAMDDFQLIP

SEQ ID NO: 180011 - protein, 24 aa, Influenza A virus
GVYINTALLNASCAAMDDFQLIPM

SEQ ID NO: 180012 - protein, 25 aa, Influenza A virus
GVYINTALLNASCAAMDDFQLIPMI

SEQ ID NO: 180013 - protein, 14 aa, Influenza A virus
HCRATEYIMKGVYI

SEQ ID NO: 180014 - protein, 15 aa, Influenza A virus
HCRATEYIMKGVYIN

SEQ ID NO: 180015 - protein, 16 aa, Influenza A virus
HCRATEYIMKGVYINT

SEQ ID NO: 180016 - protein, 17 aa, Influenza A virus
HCRATEYIMKGVYINTA

SEQ ID NO: 180017 - protein, 18 aa, Influenza A virus
HCRATEYIMKGVYINTAL

SEQ ID NO: 180018 - protein, 19 aa, Influenza A virus
HCRATEYIMKGVYINTALL

SEQ ID NO: 180019 - protein, 20 aa, Influenza A virus
HCRATEYIMKGVYINTALLN

SEQ ID NO: 180020 - protein, 21 aa, Influenza A virus
HCRATEYIMKGVYINTALLNA

SEQ ID NO: 180021 - protein, 22 aa, Influenza A virus
HCRATEYIMKGVYINTALLNAS

SEQ ID NO: 180022 - protein, 23 aa, Influenza A virus
HCRATEYIMKGVYINTALLNASC

SEQ ID NO: 180023 - protein, 24 aa, Influenza A virus
HCRATEYIMKGVYINTALLNASCA

SEQ ID NO: 180024 - protein, 25 aa, Influenza A virus
HCRATEYIMKGVYINTALLNASCAA

SEQ ID NO: 180025 - protein, 13 aa, Influenza A virus
HIFSFTGEEMATK

SEQ ID NO: 180026 - protein, 14 aa, Influenza A virus
HIFSFTGEEMATKA

SEQ ID NO: 180027 - protein, 15 aa, Influenza A virus
HIFSFTGEEMATKAD

SEQ ID NO: 180028 - protein, 16 aa, Influenza A virus
HIFSFTGEEMATKADY

SEQ ID NO: 180029 - protein, 17 aa, Influenza A virus
HIFSFTGEEMATKADYT

SEQ ID NO: 180030 - protein, 18 aa, Influenza A virus
HIFSFTGEEMATKADYTL

SEQ ID NO: 180031 - protein, 19 aa, Influenza A virus
HIFSFTGEEMATKADYTLD

SEQ ID NO: 180032 - protein, 20 aa, Influenza A virus
HIFSFTGEEMATKADYTLDE

SEQ ID NO: 180033 - protein, 21 aa, Influenza A virus
HIFSFTGEEMATKADYTLDEE

SEQ ID NO: 180034 - protein, 22 aa, Influenza A virus
HIFSFTGEEMATKADYTLDEES

SEQ ID NO: 180035 - protein, 23 aa, Influenza A virus
HIFSFTGEEMATKADYTLDEESR

SEQ ID NO: 180036 - protein, 24 aa, Influenza A virus
HIFSFTGEEMATKADYTLDEESRA

SEQ ID NO: 180037 - protein, 25 aa, Influenza A virus
HIFSFTGEEMATKADYTLDEESRAR

SEQ ID NO: 180038 - protein, 13 aa, Influenza A virus
HIHIFSFTGEEMA

SEQ ID NO: 180039 - protein, 14 aa, Influenza A virus
HIHIFSFTGEEMAT

SEQ ID NO: 180040 - protein, 15 aa, Influenza A virus
HIHIFSFTGEEMATK

SEQ ID NO: 180041 - protein, 16 aa, Influenza A virus
HIHIFSFTGEEMATKA

SEQ ID NO: 180042 - protein, 17 aa, Influenza A virus
HIHIFSFTGEEMATKAD

SEQ ID NO: 180043 - protein, 18 aa, Influenza A virus
HIHIFSFTGEEMATKADY

SEQ ID NO: 180044 - protein, 19 aa, Influenza A virus
HIHIFSFTGEEMATKADYT

SEQ ID NO: 180045 - protein, 20 aa, Influenza A virus
HIHIFSFTGEEMATKADYTL

SEQ ID NO: 180046 - protein, 21 aa, Influenza A virus
HIHIFSFTGEEMATKADYTLD

SEQ ID NO: 180047 - protein, 22 aa, Influenza A virus
HIHIFSFTGEEMATKADYTLDE

SEQ ID NO: 180048 - protein, 23 aa, Influenza A virus
HIHIFSFTGEEMATKADYTLDEE

SEQ ID NO: 180049 - protein, 24 aa, Influenza A virus
HIHIFSFTGEEMATKADYTLDEES

SEQ ID NO: 180050 - protein, 25 aa, Influenza A virus
HIHIFSFTGEEMATKADYTLDEESR

SEQ ID NO: 180051 - protein, 13 aa, Influenza A virus
HIYYLEKANKIKS

SEQ ID NO: 180052 - protein, 14 aa, Influenza A virus
HIYYLEKANKIKSE

SEQ ID NO: 180053 - protein, 14 aa, Influenza A virus
HKWEKYCVLEIGDM

SEQ ID NO: 180054 - protein, 15 aa, Influenza A virus
HKWEKYCVLEIGDML

SEQ ID NO: 180055 - protein, 13 aa, Influenza A virus
HLEVCFMYSDFHF

SEQ ID NO: 180056 - protein, 14 aa, Influenza A virus
HLEVCFMYSDFHFI

SEQ ID NO: 180057 - protein, 16 aa, Influenza A virus
HLRNDTDVVNFVSMEF

SEQ ID NO: 180058 - protein, 17 aa, Influenza A virus
HLRNDTDVVNFVSMEFS

SEQ ID NO: 180059 - protein, 18 aa, Influenza A virus
HLRNDTDVVNFVSMEFSL

SEQ ID NO: 180060 - protein, 19 aa, Influenza A virus
HLRNDTDVVNFVSMEFSLT

SEQ ID NO: 180061 - protein, 20 aa, Influenza A virus
HLRNDTDVVNFVSMEFSLTD

SEQ ID NO: 180062 - protein, 21 aa, Influenza A virus
HLRNDTDVVNFVSMEFSLTDP

SEQ ID NO: 180063 - protein, 22 aa, Influenza A virus
HLRNDTDVVNFVSMEFSLTDPR

SEQ ID NO: 180064 - protein, 23 aa, Influenza A virus
HLRNDTDVVNFVSMEFSLTDPRL

SEQ ID NO: 180065 - protein, 24 aa, Influenza A virus
HLRNDTDVVNFVSMEFSLTDPRLE

SEQ ID NO: 180066 - protein, 25 aa, Influenza A virus
HLRNDTDVVNFVSMEFSLTDPRLEP

SEQ ID NO: 180067 - protein, 14 aa, Influenza A virus
HRFEIIEGRDRTMA

SEQ ID NO: 180068 - protein, 15 aa, Influenza A virus
HRFEIIEGRDRTMAW

SEQ ID NO: 180069 - protein, 16 aa, Influenza A virus
HRFEIIEGRDRTMAWT

SEQ ID NO: 180070 - protein, 17 aa, Influenza A virus
HRFEIIEGRDRTMAWTV

SEQ ID NO: 180071 - protein, 19 aa, Influenza A virus
HRFEIIEGRDRTMAWTVVN

SEQ ID NO: 180072 - protein, 20 aa, Influenza A virus
HRFEIIEGRDRTMAWTVVNS

SEQ ID NO: 180073 - protein, 21 aa, Influenza A virus
HRFEIIEGRDRTMAWTVVNSI

SEQ ID NO: 180074 - protein, 22 aa, Influenza A virus
HRFEIIEGRDRTMAWTVVNSIC

SEQ ID NO: 180075 - protein, 23 aa, Influenza A virus
HRFEIIEGRDRTMAWTVVNSICN

SEQ ID NO: 180076 - protein, 24 aa, Influenza A virus
HRFEIIEGRDRTMAWTVVNSICNT

SEQ ID NO: 180077 - protein, 25 aa, Influenza A virus
HRFEIIEGRDRTMAWTVVNSICNTT

SEQ ID NO: 180078 - protein, 14 aa, Influenza A virus
IASMRRNYFTAEVS

SEQ ID NO: 180079 - protein, 15 aa, Influenza A virus
IASMRRNYFTAEVSH

SEQ ID NO: 180080 - protein, 16 aa, Influenza A virus
IASMRRNYFTAEVSHC

SEQ ID NO: 180081 - protein, 17 aa, Influenza A virus
IASMRRNYFTAEVSHCR

SEQ ID NO: 180082 - protein, 18 aa, Influenza A virus
IASMRRNYFTAEVSHCRA

SEQ ID NO: 180083 - protein, 19 aa, Influenza A virus
IASMRRNYFTAEVSHCRAT

SEQ ID NO: 180084 - protein, 20 aa, Influenza A virus
IASMRRNYFTAEVSHCRATE

SEQ ID NO: 180085 - protein, 21 aa, Influenza A virus
IASMRRNYFTAEVSHCRATEY

SEQ ID NO: 180086 - protein, 22 aa, Influenza A virus
IASMRRNYFTAEVSHCRATEYI

SEQ ID NO: 180087 - protein, 23 aa, Influenza A virus
IASMRRNYFTAEVSHCRATEYIM

SEQ ID NO: 180088 - protein, 24 aa, Influenza A virus
IASMRRNYFTAEVSHCRATEYIMK

SEQ ID NO: 180089 - protein, 25 aa, Influenza A virus
IASMRRNYFTAEVSHCRATEYIMKG

SEQ ID NO: 180090 - protein, 14 aa, Influenza A virus
ICTHLEVCFMYSDF

SEQ ID NO: 180091 - protein, 15 aa, Influenza A virus
ICTHLEVCFMYSDFH

SEQ ID NO: 180092 - protein, 16 aa, Influenza A virus
ICTHLEVCFMYSDFHF

SEQ ID NO: 180093 - protein, 17 aa, Influenza A virus
ICTHLEVCFMYSDFHFI

SEQ ID NO: 180094 - protein, 14 aa, Influenza A virus
IEECLINDPWVLLN

SEQ ID NO: 180095 - protein, 15 aa, Influenza A virus
IEECLINDPWVLLNA

SEQ ID NO: 180096 - protein, 16 aa, Influenza A virus
IEECLINDPWVLLNAS

SEQ ID NO: 180097 - protein, 17 aa, Influenza A virus
IEECLINDPWVLLNASW

SEQ ID NO: 180098 - protein, 18 aa, Influenza A virus
IEECLINDPWVLLNASWF

SEQ ID NO: 180099 - protein, 19 aa, Influenza A virus
IEECLINDPWVLLNASWFN

SEQ ID NO: 180100 - protein, 20 aa, Influenza A virus
IEECLINDPWVLLNASWFNS

SEQ ID NO: 180101 - protein, 21 aa, Influenza A virus
IEECLINDPWVLLNASWFNSF

SEQ ID NO: 180102 - protein, 22 aa, Influenza A virus
IEECLINDPWVLLNASWFNSFL

SEQ ID NO: 180103 - protein, 23 aa, Influenza A virus
IEECLINDPWVLLNASWFNSFLT

SEQ ID NO: 180104 - protein, 24 aa, Influenza A virus
IEECLINDPWVLLNASWFNSFLTH

SEQ ID NO: 180105 - protein, 25 aa, Influenza A virus
IEECLINDPWVLLNASWFNSFLTHA

SEQ ID NO: 180106 - protein, 15 aa, Influenza A virus
IEGRDRTMAWTVVNS

SEQ ID NO: 180107 - protein, 16 aa, Influenza A virus
IEGRDRTMAWTVVNSI

SEQ ID NO: 180108 - protein, 17 aa, Influenza A virus
IEGRDRTMAWTVVNSIC

SEQ ID NO: 180109 - protein, 18 aa, Influenza A virus
IEGRDRTMAWTVVNSICN

SEQ ID NO: 180110 - protein, 19 aa, Influenza A virus
IEGRDRTMAWTVVNSICNT

SEQ ID NO: 180111 - protein, 20 aa, Influenza A virus
IEGRDRTMAWTVVNSICNTT

SEQ ID NO: 180112 - protein, 21 aa, Influenza A virus
IEGRDRTMAWTVVNSICNTTG

SEQ ID NO: 180113 - protein, 14 aa, Influenza A virus
IEIGVTRREVHIYY

SEQ ID NO: 180114 - protein, 15 aa, Influenza A virus
IEIGVTRREVHIYYL

SEQ ID NO: 180115 - protein, 16 aa, Influenza A virus
IEIGVTRREVHIYYLE

SEQ ID NO: 180116 - protein, 17 aa, Influenza A virus
IEIGVTRREVHIYYLEK

SEQ ID NO: 180117 - protein, 18 aa, Influenza A virus
IEIGVTRREVHIYYLEKA

SEQ ID NO: 180118 - protein, 19 aa, Influenza A virus
IEIGVTRREVHIYYLEKAN

SEQ ID NO: 180119 - protein, 20 aa, Influenza A virus
IEIGVTRREVHIYYLEKANK

SEQ ID NO: 180120 - protein, 15 aa, Influenza A virus
IESMIEAESSVKEKD

SEQ ID NO: 180121 - protein, 14 aa, Influenza A virus
IETNKFAAICTHLE

SEQ ID NO: 180122 - protein, 15 aa, Influenza A virus
IETNKFAAICTHLEV

SEQ ID NO: 180123 - protein, 16 aa, Influenza A virus
IETNKFAAICTHLEVC

SEQ ID NO: 180124 - protein, 17 aa, Influenza A virus
IETNKFAAICTHLEVCF

SEQ ID NO: 180125 - protein, 18 aa, Influenza A virus
IETNKFAAICTHLEVCFM

SEQ ID NO: 180126 - protein, 19 aa, Influenza A virus
IETNKFAAICTHLEVCFMY

SEQ ID NO: 180127 - protein, 20 aa, Influenza A virus
IETNKFAAICTHLEVCFMYS

SEQ ID NO: 180128 - protein, 21 aa, Influenza A virus
IETNKFAAICTHLEVCFMYSD

SEQ ID NO: 180129 - protein, 22 aa, Influenza A virus
IETNKFAAICTHLEVCFMYSDF

SEQ ID NO: 180130 - protein, 23 aa, Influenza A virus
IETNKFAAICTHLEVCFMYSDFH

SEQ ID NO: 180131 - protein, 24 aa, Influenza A virus
IETNKFAAICTHLEVCFMYSDFHF

SEQ ID NO: 180132 - protein, 25 aa, Influenza A virus
IETNKFAAICTHLEVCFMYSDFHFI

SEQ ID NO: 180133 - protein, 13 aa, Influenza A virus
IFSFTGEEMATKA

SEQ ID NO: 180134 - protein, 14 aa, Influenza A virus
IFSFTGEEMATKAD

SEQ ID NO: 180135 - protein, 15 aa, Influenza A virus
IFSFTGEEMATKADY

SEQ ID NO: 180136 - protein, 16 aa, Influenza A virus
IFSFTGEEMATKADYT

SEQ ID NO: 180137 - protein, 17 aa, Influenza A virus
IFSFTGEEMATKADYTL

SEQ ID NO: 180138 - protein, 18 aa, Influenza A virus
IFSFTGEEMATKADYTLD

SEQ ID NO: 180139 - protein, 19 aa, Influenza A virus
IFSFTGEEMATKADYTLDE

SEQ ID NO: 180140 - protein, 20 aa, Influenza A virus
IFSFTGEEMATKADYTLDEE

SEQ ID NO: 180141 - protein, 21 aa, Influenza A virus
IFSFTGEEMATKADYTLDEES

SEQ ID NO: 180142 - protein, 22 aa, Influenza A virus
IFSFTGEEMATKADYTLDEESR

SEQ ID NO: 180143 - protein, 23 aa, Influenza A virus
IFSFTGEEMATKADYTLDEESRA

SEQ ID NO: 180144 - protein, 24 aa, Influenza A virus
IFSFTGEEMATKADYTLDEESRAR

SEQ ID NO: 180145 - protein, 25 aa, Influenza A virus
IFSFTGEEMATKADYTLDEESRARI

SEQ ID NO: 180146 - protein, 20 aa, Influenza A virus
IGESPKGVEEGSIGKVCRTL

SEQ ID NO: 180147 - protein, 22 aa, Influenza A virus
IGESPKGVEEGSIGKVCRTLLA

SEQ ID NO: 180148 - protein, 23 aa, Influenza A virus
IGESPKGVEEGSIGKVCRTLLAK

SEQ ID NO: 180149 - protein, 24 aa, Influenza A virus
IGESPKGVEEGSIGKVCRTLLAKS

SEQ ID NO: 180150 - protein, 25 aa, Influenza A virus
IGESPKGVEEGSIGKVCRTLLAKSV

SEQ ID NO: 180151 - protein, 13 aa, Influenza A virus
IGKVCRTLLAKSV

SEQ ID NO: 180152 - protein, 14 aa, Influenza A virus
IGKVCRTLLAKSVF

SEQ ID NO: 180153 - protein, 15 aa, Influenza A virus
IGKVCRTLLAKSVFN

SEQ ID NO: 180154 - protein, 16 aa, Influenza A virus
IGKVCRTLLAKSVFNS

SEQ ID NO: 180155 - protein, 17 aa, Influenza A virus
IGKVCRTLLAKSVFNSL

SEQ ID NO: 180156 - protein, 18 aa, Influenza A virus
IGKVCRTLLAKSVFNSLY

SEQ ID NO: 180157 - protein, 19 aa, Influenza A virus
IGKVCRTLLAKSVFNSLYA

SEQ ID NO: 180158 - protein, 20 aa, Influenza A virus
IGKVCRTLLAKSVFNSLYAS

SEQ ID NO: 180159 - protein, 21 aa, Influenza A virus
IGKVCRTLLAKSVFNSLYASP

SEQ ID NO: 180160 - protein, 22 aa, Influenza A virus
IGKVCRTLLAKSVFNSLYASPQ

SEQ ID NO: 180161 - protein, 23 aa, Influenza A virus
IGKVCRTLLAKSVFNSLYASPQL

SEQ ID NO: 180162 - protein, 24 aa, Influenza A virus
IGKVCRTLLAKSVFNSLYASPQLE

SEQ ID NO: 180163 - protein, 25 aa, Influenza A virus
IGKVCRTLLAKSVFNSLYASPQLEG

SEQ ID NO: 180164 - protein, 14 aa, Influenza A virus
IGVTRREVHIYYLE

SEQ ID NO: 180165 - protein, 15 aa, Influenza A virus
IGVTRREVHIYYLEK

SEQ ID NO: 180166 - protein, 16 aa, Influenza A virus
IGVTRREVHIYYLEKA

SEQ ID NO: 180167 - protein, 17 aa, Influenza A virus
IGVTRREVHIYYLEKAN

SEQ ID NO: 180168 - protein, 18 aa, Influenza A virus
IGVTRREVHIYYLEKANK

SEQ ID NO: 180169 - protein, 19 aa, Influenza A virus
IGVTRREVHIYYLEKANKI

SEQ ID NO: 180170 - protein, 20 aa, Influenza A virus
IGVTRREVHIYYLEKANKIK

SEQ ID NO: 180171 - protein, 21 aa, Influenza A virus
IGVTRREVHIYYLEKANKIKS

SEQ ID NO: 180172 - protein, 22 aa, Influenza A virus
IGVTRREVHIYYLEKANKIKSE

SEQ ID NO: 180173 - protein, 13 aa, Influenza A virus
IHIFSFTGEEMAT

SEQ ID NO: 180174 - protein, 14 aa, Influenza A virus
IHIFSFTGEEMATK

SEQ ID NO: 180175 - protein, 15 aa, Influenza A virus
IHIFSFTGEEMATKA

SEQ ID NO: 180176 - protein, 16 aa, Influenza A virus
IHIFSFTGEEMATKAD

SEQ ID NO: 180177 - protein, 17 aa, Influenza A virus
IHIFSFTGEEMATKADY

SEQ ID NO: 180178 - protein, 18 aa, Influenza A virus
IHIFSFTGEEMATKADYT

SEQ ID NO: 180179 - protein, 19 aa, Influenza A virus
IHIFSFTGEEMATKADYTL

SEQ ID NO: 180180 - protein, 20 aa, Influenza A virus
IHIFSFTGEEMATKADYTLD

SEQ ID NO: 180181 - protein, 21 aa, Influenza A virus
IHIFSFTGEEMATKADYTLDE

SEQ ID NO: 180182 - protein, 22 aa, Influenza A virus
IHIFSFTGEEMATKADYTLDEE

SEQ ID NO: 180183 - protein, 23 aa, Influenza A virus
IHIFSFTGEEMATKADYTLDEES

SEQ ID NO: 180184 - protein, 24 aa, Influenza A virus
IHIFSFTGEEMATKADYTLDEESR

SEQ ID NO: 180185 - protein, 25 aa, Influenza A virus
IHIFSFTGEEMATKADYTLDEESRA

SEQ ID NO: 180186 - protein, 15 aa, Influenza A virus
IIEGRDRTMAWTVVN

SEQ ID NO: 180187 - protein, 16 aa, Influenza A virus
IIEGRDRTMAWTVVNS

SEQ ID NO: 180188 - protein, 17 aa, Influenza A virus
IIEGRDRTMAWTVVNSI

SEQ ID NO: 180189 - protein, 18 aa, Influenza A virus
IIEGRDRTMAWTVVNSIC

SEQ ID NO: 180190 - protein, 19 aa, Influenza A virus
IIEGRDRTMAWTVVNSICN

SEQ ID NO: 180191 - protein, 20 aa, Influenza A virus
IIEGRDRTMAWTVVNSICNT

SEQ ID NO: 180192 - protein, 21 aa, Influenza A virus
IIEGRDRTMAWTVVNSICNTT

SEQ ID NO: 180193 - protein, 22 aa, Influenza A virus
IIEGRDRTMAWTVVNSICNTTG

SEQ ID NO: 180194 - protein, 15 aa, Influenza A virus
IIKGRSHLRNDTDVV

SEQ ID NO: 180195 - protein, 17 aa, Influenza A virus
IIKGRSHLRNDTDVVNF

SEQ ID NO: 180196 - protein, 20 aa, Influenza A virus
IIKGRSHLRNDTDVVNFVSM

SEQ ID NO: 180197 - protein, 21 aa, Influenza A virus
IIKGRSHLRNDTDVVNFVSME

SEQ ID NO: 180198 - protein, 22 aa, Influenza A virus
IIKGRSHLRNDTDVVNFVSMEF

SEQ ID NO: 180199 - protein, 23 aa, Influenza A virus
IIKGRSHLRNDTDVVNFVSMEFS

SEQ ID NO: 180200 - protein, 24 aa, Influenza A virus
IIKGRSHLRNDTDVVNFVSMEFSL

SEQ ID NO: 180201 - protein, 25 aa, Influenza A virus
IIKGRSHLRNDTDVVNFVSMEFSLT

SEQ ID NO: 180202 - protein, 19 aa, Influenza A virus
IKGRSHLRNDTDVVNFVSM

SEQ ID NO: 180203 - protein, 20 aa, Influenza A virus
IKGRSHLRNDTDVVNFVSME

SEQ ID NO: 180204 - protein, 21 aa, Influenza A virus
IKGRSHLRNDTDVVNFVSMEF

SEQ ID NO: 180205 - protein, 22 aa, Influenza A virus
IKGRSHLRNDTDVVNFVSMEFS

SEQ ID NO: 180206 - protein, 23 aa, Influenza A virus
IKGRSHLRNDTDVVNFVSMEFSL

SEQ ID NO: 180207 - protein, 24 aa, Influenza A virus
IKGRSHLRNDTDVVNFVSMEFSLT

SEQ ID NO: 180208 - protein, 25 aa, Influenza A virus
IKGRSHLRNDTDVVNFVSMEFSLTD

SEQ ID NO: 180209 - protein, 14 aa, Influenza A virus
IKMKWGMEMRRCLL

SEQ ID NO: 180210 - protein, 15 aa, Influenza A virus
IKMKWGMEMRRCLLQ

SEQ ID NO: 180211 - protein, 16 aa, Influenza A virus
IKMKWGMEMRRCLLQS

SEQ ID NO: 180212 - protein, 17 aa, Influenza A virus
IKMKWGMEMRRCLLQSL

SEQ ID NO: 180213 - protein, 18 aa, Influenza A virus
IKMKWGMEMRRCLLQSLQ

SEQ ID NO: 180214 - protein, 19 aa, Influenza A virus
IKMKWGMEMRRCLLQSLQQ

SEQ ID NO: 180215 - protein, 20 aa, Influenza A virus
IKMKWGMEMRRCLLQSLQQI

SEQ ID NO: 180216 - protein, 21 aa, Influenza A virus
IKMKWGMEMRRCLLQSLQQIE

SEQ ID NO: 180217 - protein, 22 aa, Influenza A virus
IKMKWGMEMRRCLLQSLQQIES

SEQ ID NO: 180218 - protein, 23 aa, Influenza A virus
IKMKWGMEMRRCLLQSLQQIESM

SEQ ID NO: 180219 - protein, 24 aa, Influenza A virus
IKMKWGMEMRRCLLQSLQQIESMI

SEQ ID NO: 180220 - protein, 25 aa, Influenza A virus
IKMKWGMEMRRCLLQSLQQIESMIE

SEQ ID NO: 180221 - protein, 13 aa, Influenza A virus
IKTRLFTIRQEMA

SEQ ID NO: 180222 - protein, 13 aa, Influenza A virus
IMKGVYINTALLN

SEQ ID NO: 180223 - protein, 14 aa, Influenza A virus
IMKGVYINTALLNA

SEQ ID NO: 180224 - protein, 15 aa, Influenza A virus
IMKGVYINTALLNAS

SEQ ID NO: 180225 - protein, 16 aa, Influenza A virus
IMKGVYINTALLNASC

SEQ ID NO: 180226 - protein, 17 aa, Influenza A virus
IMKGVYINTALLNASCA

SEQ ID NO: 180227 - protein, 18 aa, Influenza A virus
IMKGVYINTALLNASCAA

SEQ ID NO: 180228 - protein, 19 aa, Influenza A virus
IMKGVYINTALLNASCAAM

SEQ ID NO: 180229 - protein, 20 aa, Influenza A virus
IMKGVYINTALLNASCAAMD

SEQ ID NO: 180230 - protein, 21 aa, Influenza A virus
IMKGVYINTALLNASCAAMDD

SEQ ID NO: 180231 - protein, 22 aa, Influenza A virus
IMKGVYINTALLNASCAAMDDF

SEQ ID NO: 180232 - protein, 23 aa, Influenza A virus
IMKGVYINTALLNASCAAMDDFQ

SEQ ID NO: 180233 - protein, 24 aa, Influenza A virus
IMKGVYINTALLNASCAAMDDFQL

SEQ ID NO: 180234 - protein, 25 aa, Influenza A virus
IMKGVYINTALLNASCAAMDDFQLI

SEQ ID NO: 180235 - protein, 13 aa, Influenza A virus
INDPWVLLNASWF

SEQ ID NO: 180236 - protein, 14 aa, Influenza A virus
INDPWVLLNASWFN

SEQ ID NO: 180237 - protein, 15 aa, Influenza A virus
INDPWVLLNASWFNS

SEQ ID NO: 180238 - protein, 16 aa, Influenza A virus
INDPWVLLNASWFNSF

SEQ ID NO: 180239 - protein, 17 aa, Influenza A virus
INDPWVLLNASWFNSFL

SEQ ID NO: 180240 - protein, 18 aa, Influenza A virus
INDPWVLLNASWFNSFLT

SEQ ID NO: 180241 - protein, 19 aa, Influenza A virus
INDPWVLLNASWFNSFLTH

SEQ ID NO: 180242 - protein, 20 aa, Influenza A virus
INDPWVLLNASWFNSFLTHA

SEQ ID NO: 180243 - protein, 21 aa, Influenza A virus
INDPWVLLNASWFNSFLTHAL

SEQ ID NO: 180244 - protein, 13 aa, Influenza A virus
INTALLNASCAAM

SEQ ID NO: 180245 - protein, 14 aa, Influenza A virus
INTALLNASCAAMD

SEQ ID NO: 180246 - protein, 15 aa, Influenza A virus
INTALLNASCAAMDD

SEQ ID NO: 180247 - protein, 16 aa, Influenza A virus
INTALLNASCAAMDDF

SEQ ID NO: 180248 - protein, 17 aa, Influenza A virus
INTALLNASCAAMDDFQ

SEQ ID NO: 180249 - protein, 18 aa, Influenza A virus
INTALLNASCAAMDDFQL

SEQ ID NO: 180250 - protein, 19 aa, Influenza A virus
INTALLNASCAAMDDFQLI

SEQ ID NO: 180251 - protein, 20 aa, Influenza A virus
INTALLNASCAAMDDFQLIP

SEQ ID NO: 180252 - protein, 21 aa, Influenza A virus
INTALLNASCAAMDDFQLIPM

SEQ ID NO: 180253 - protein, 22 aa, Influenza A virus
INTALLNASCAAMDDFQLIPMI

SEQ ID NO: 180254 - protein, 23 aa, Influenza A virus
INTALLNASCAAMDDFQLIPMIS

SEQ ID NO: 180255 - protein, 24 aa, Influenza A virus
INTALLNASCAAMDDFQLIPMISK

SEQ ID NO: 180256 - protein, 25 aa, Influenza A virus
INTALLNASCAAMDDFQLIPMISKC

SEQ ID NO: 180257 - protein, 15 aa, Influenza A virus
IPMISKCRTKEGRRK

SEQ ID NO: 180258 - protein, 16 aa, Influenza A virus
IPMISKCRTKEGRRKT

SEQ ID NO: 180259 - protein, 17 aa, Influenza A virus
IPMISKCRTKEGRRKTN

SEQ ID NO: 180260 - protein, 19 aa, Influenza A virus
IPMISKCRTKEGRRKTNLY

SEQ ID NO: 180261 - protein, 20 aa, Influenza A virus
IPMISKCRTKEGRRKTNLYG

SEQ ID NO: 180262 - protein, 21 aa, Influenza A virus
IPMISKCRTKEGRRKTNLYGF

SEQ ID NO: 180263 - protein, 22 aa, Influenza A virus
IPMISKCRTKEGRRKTNLYGFI

SEQ ID NO: 180264 - protein, 23 aa, Influenza A virus
IPMISKCRTKEGRRKTNLYGFII

SEQ ID NO: 180265 - protein, 24 aa, Influenza A virus
IPMISKCRTKEGRRKTNLYGFIIK

SEQ ID NO: 180266 - protein, 25 aa, Influenza A virus
IPMISKCRTKEGRRKTNLYGFIIKG

SEQ ID NO: 180267 - protein, 15 aa, Influenza A virus
ISKCRTKEGRRKTNL

SEQ ID NO: 180268 - protein, 20 aa, Influenza A virus
ISKCRTKEGRRKTNLYGFII

SEQ ID NO: 180269 - protein, 21 aa, Influenza A virus
ISKCRTKEGRRKTNLYGFIIK

SEQ ID NO: 180270 - protein, 22 aa, Influenza A virus
ISKCRTKEGRRKTNLYGFIIKG

SEQ ID NO: 180271 - protein, 23 aa, Influenza A virus
ISKCRTKEGRRKTNLYGFIIKGR

SEQ ID NO: 180272 - protein, 24 aa, Influenza A virus
ISKCRTKEGRRKTNLYGFIIKGRS

SEQ ID NO: 180273 - protein, 25 aa, Influenza A virus
ISKCRTKEGRRKTNLYGFIIKGRSH

SEQ ID NO: 180274 - protein, 15 aa, Influenza A virus
IVELAEKAMKEYGED

SEQ ID NO: 180275 - protein, 13 aa, Influenza A virus
IYYLEKANKIKSE

SEQ ID NO: 180276 - protein, 15 aa, Influenza A virus
KADYTLDEESRARIK

SEQ ID NO: 180277 - protein, 16 aa, Influenza A virus
KADYTLDEESRARIKT

SEQ ID NO: 180278 - protein, 20 aa, Influenza A virus
KADYTLDEESRARIKTRLFT

SEQ ID NO: 180279 - protein, 21 aa, Influenza A virus
KADYTLDEESRARIKTRLFTI

SEQ ID NO: 180280 - protein, 22 aa, Influenza A virus
KADYTLDEESRARIKTRLFTIR

SEQ ID NO: 180281 - protein, 23 aa, Influenza A virus
KADYTLDEESRARIKTRLFTIRQ

SEQ ID NO: 180282 - protein, 24 aa, Influenza A virus
KADYTLDEESRARIKTRLFTIRQE

SEQ ID NO: 180283 - protein, 25 aa, Influenza A virus
KADYTLDEESRARIKTRLFTIRQEM

SEQ ID NO: 180284 - protein, 19 aa, Influenza A virus
KCRTKEGRRKTNLYGFIIK

SEQ ID NO: 180285 - protein, 20 aa, Influenza A virus
KCRTKEGRRKTNLYGFIIKG

SEQ ID NO: 180286 - protein, 21 aa, Influenza A virus
KCRTKEGRRKTNLYGFIIKGR

SEQ ID NO: 180287 - protein, 22 aa, Influenza A virus
KCRTKEGRRKTNLYGFIIKGRS

SEQ ID NO: 180288 - protein, 23 aa, Influenza A virus
KCRTKEGRRKTNLYGFIIKGRSH

SEQ ID NO: 180289 - protein, 24 aa, Influenza A virus
KCRTKEGRRKTNLYGFIIKGRSHL

SEQ ID NO: 180290 - protein, 25 aa, Influenza A virus
KCRTKEGRRKTNLYGFIIKGRSHLR

SEQ ID NO: 180291 - protein, 14 aa, Influenza A virus
KEGRRKTNLYGFII

SEQ ID NO: 180292 - protein, 15 aa, Influenza A virus
KEGRRKTNLYGFIIK

SEQ ID NO: 180293 - protein, 16 aa, Influenza A virus
KEGRRKTNLYGFIIKG

SEQ ID NO: 180294 - protein, 17 aa, Influenza A virus
KEGRRKTNLYGFIIKGR

SEQ ID NO: 180295 - protein, 18 aa, Influenza A virus
KEGRRKTNLYGFIIKGRS

SEQ ID NO: 180296 - protein, 19 aa, Influenza A virus
KEGRRKTNLYGFIIKGRSH

SEQ ID NO: 180297 - protein, 20 aa, Influenza A virus
KEGRRKTNLYGFIIKGRSHL

SEQ ID NO: 180298 - protein, 21 aa, Influenza A virus
KEGRRKTNLYGFIIKGRSHLR

SEQ ID NO: 180299 - protein, 22 aa, Influenza A virus
KEGRRKTNLYGFIIKGRSHLRN

SEQ ID NO: 180300 - protein, 23 aa, Influenza A virus
KEGRRKTNLYGFIIKGRSHLRND

SEQ ID NO: 180301 - protein, 24 aa, Influenza A virus
KEGRRKTNLYGFIIKGRSHLRNDT

SEQ ID NO: 180302 - protein, 25 aa, Influenza A virus
KEGRRKTNLYGFIIKGRSHLRNDTD

SEQ ID NO: 180303 - protein, 15 aa, Influenza A virus
KEKDMTKEFFENKSE

SEQ ID NO: 180304 - protein, 14 aa, Influenza A virus
KENRFIEIGVTRRE

SEQ ID NO: 180305 - protein, 15 aa, Influenza A virus
KENRFIEIGVTRREV

SEQ ID NO: 180306 - protein, 16 aa, Influenza A virus
KENRFIEIGVTRREVH

SEQ ID NO: 180307 - protein, 13 aa, Influenza A virus
KFAAICTHLEVCF

SEQ ID NO: 180308 - protein, 14 aa, Influenza A virus
KFAAICTHLEVCFM

SEQ ID NO: 180309 - protein, 15 aa, Influenza A virus
KFAAICTHLEVCFMY

SEQ ID NO: 180310 - protein, 16 aa, Influenza A virus
KFAAICTHLEVCFMYS

SEQ ID NO: 180311 - protein, 17 aa, Influenza A virus
KFAAICTHLEVCFMYSD

SEQ ID NO: 180312 - protein, 18 aa, Influenza A virus
KFAAICTHLEVCFMYSDF

SEQ ID NO: 180313 - protein, 19 aa, Influenza A virus
KFAAICTHLEVCFMYSDFH

SEQ ID NO: 180314 - protein, 20 aa, Influenza A virus
KFAAICTHLEVCFMYSDFHF

SEQ ID NO: 180315 - protein, 21 aa, Influenza A virus
KFAAICTHLEVCFMYSDFHFI

SEQ ID NO: 180316 - protein, 13 aa, Influenza A virus
KFLLMDALKLSIE

SEQ ID NO: 180317 - protein, 14 aa, Influenza A virus
KFLLMDALKLSIED

SEQ ID NO: 180318 - protein, 15 aa, Influenza A virus
KFLLMDALKLSIEDP

SEQ ID NO: 180319 - protein, 16 aa, Influenza A virus
KFLLMDALKLSIEDPS

SEQ ID NO: 180320 - protein, 17 aa, Influenza A virus
KFLLMDALKLSIEDPSH

SEQ ID NO: 180321 - protein, 18 aa, Influenza A virus
KFLLMDALKLSIEDPSHE

SEQ ID NO: 180322 - protein, 19 aa, Influenza A virus
KFLLMDALKLSIEDPSHEG

SEQ ID NO: 180323 - protein, 20 aa, Influenza A virus
KFLLMDALKLSIEDPSHEGE

SEQ ID NO: 180324 - protein, 21 aa, Influenza A virus
KFLLMDALKLSIEDPSHEGEG

SEQ ID NO: 180325 - protein, 22 aa, Influenza A virus
KFLLMDALKLSIEDPSHEGEGI

SEQ ID NO: 180326 - protein, 23 aa, Influenza A virus
KFLLMDALKLSIEDPSHEGEGIP

SEQ ID NO: 180327 - protein, 24 aa, Influenza A virus
KFLLMDALKLSIEDPSHEGEGIPL

SEQ ID NO: 180328 - protein, 25 aa, Influenza A virus
KFLLMDALKLSIEDPSHEGEGIPLY

SEQ ID NO: 180329 - protein, 16 aa, Influenza A virus
KGRSHLRNDTDVVNFV

SEQ ID NO: 180330 - protein, 17 aa, Influenza A virus
KGRSHLRNDTDVVNFVS

SEQ ID NO: 180331 - protein, 19 aa, Influenza A virus
KGRSHLRNDTDVVNFVSME

SEQ ID NO: 180332 - protein, 20 aa, Influenza A virus
KGRSHLRNDTDVVNFVSMEF

SEQ ID NO: 180333 - protein, 21 aa, Influenza A virus
KGRSHLRNDTDVVNFVSMEFS

SEQ ID NO: 180334 - protein, 22 aa, Influenza A virus
KGRSHLRNDTDVVNFVSMEFSL

SEQ ID NO: 180335 - protein, 23 aa, Influenza A virus
KGRSHLRNDTDVVNFVSMEFSLT

SEQ ID NO: 180336 - protein, 24 aa, Influenza A virus
KGRSHLRNDTDVVNFVSMEFSLTD

SEQ ID NO: 180337 - protein, 25 aa, Influenza A virus
KGRSHLRNDTDVVNFVSMEFSLTDP

SEQ ID NO: 180338 - protein, 14 aa, Influenza A virus
KGVEEGSIGKVCRT

SEQ ID NO: 180339 - protein, 15 aa, Influenza A virus
KGVEEGSIGKVCRTL

SEQ ID NO: 180340 - protein, 16 aa, Influenza A virus
KGVEEGSIGKVCRTLL

SEQ ID NO: 180341 - protein, 17 aa, Influenza A virus
KGVEEGSIGKVCRTLLA

SEQ ID NO: 180342 - protein, 19 aa, Influenza A virus
KGVEEGSIGKVCRTLLAKS

SEQ ID NO: 180343 - protein, 20 aa, Influenza A virus
KGVEEGSIGKVCRTLLAKSV

SEQ ID NO: 180344 - protein, 21 aa, Influenza A virus
KGVEEGSIGKVCRTLLAKSVF

SEQ ID NO: 180345 - protein, 22 aa, Influenza A virus
KGVEEGSIGKVCRTLLAKSVFN

SEQ ID NO: 180346 - protein, 23 aa, Influenza A virus
KGVEEGSIGKVCRTLLAKSVFNS

SEQ ID NO: 180347 - protein, 24 aa, Influenza A virus
KGVEEGSIGKVCRTLLAKSVFNSL

SEQ ID NO: 180348 - protein, 25 aa, Influenza A virus
KGVEEGSIGKVCRTLLAKSVFNSLY

SEQ ID NO: 180349 - protein, 13 aa, Influenza A virus
KGVYINTALLNAS

SEQ ID NO: 180350 - protein, 14 aa, Influenza A virus
KGVYINTALLNASC

SEQ ID NO: 180351 - protein, 15 aa, Influenza A virus
KGVYINTALLNASCA

SEQ ID NO: 180352 - protein, 16 aa, Influenza A virus
KGVYINTALLNASCAA

SEQ ID NO: 180353 - protein, 17 aa, Influenza A virus
KGVYINTALLNASCAAM

SEQ ID NO: 180354 - protein, 18 aa, Influenza A virus
KGVYINTALLNASCAAMD

SEQ ID NO: 180355 - protein, 19 aa, Influenza A virus
KGVYINTALLNASCAAMDD

SEQ ID NO: 180356 - protein, 20 aa, Influenza A virus
KGVYINTALLNASCAAMDDF

SEQ ID NO: 180357 - protein, 21 aa, Influenza A virus
KGVYINTALLNASCAAMDDFQ

SEQ ID NO: 180358 - protein, 22 aa, Influenza A virus
KGVYINTALLNASCAAMDDFQL

SEQ ID NO: 180359 - protein, 23 aa, Influenza A virus
KGVYINTALLNASCAAMDDFQLI

SEQ ID NO: 180360 - protein, 24 aa, Influenza A virus
KGVYINTALLNASCAAMDDFQLIP

SEQ ID NO: 180361 - protein, 25 aa, Influenza A virus
KGVYINTALLNASCAAMDDFQLIPM

SEQ ID NO: 180362 - protein, 14 aa, Influenza A virus
KHRFEIIEGRDRTM

SEQ ID NO: 180363 - protein, 15 aa, Influenza A virus
KHRFEIIEGRDRTMA

SEQ ID NO: 180364 - protein, 16 aa, Influenza A virus
KHRFEIIEGRDRTMAW

SEQ ID NO: 180365 - protein, 17 aa, Influenza A virus
KHRFEIIEGRDRTMAWT

SEQ ID NO: 180366 - protein, 19 aa, Influenza A virus
KHRFEIIEGRDRTMAWTVV

SEQ ID NO: 180367 - protein, 20 aa, Influenza A virus
KHRFEIIEGRDRTMAWTVVN

SEQ ID NO: 180368 - protein, 21 aa, Influenza A virus
KHRFEIIEGRDRTMAWTVVNS

SEQ ID NO: 180369 - protein, 22 aa, Influenza A virus
KHRFEIIEGRDRTMAWTVVNSI

SEQ ID NO: 180370 - protein, 23 aa, Influenza A virus
KHRFEIIEGRDRTMAWTVVNSIC

SEQ ID NO: 180371 - protein, 24 aa, Influenza A virus
KHRFEIIEGRDRTMAWTVVNSICN

SEQ ID NO: 180372 - protein, 25 aa, Influenza A virus
KHRFEIIEGRDRTMAWTVVNSICNT

SEQ ID NO: 180373 - protein, 13 aa, Influenza A virus
KIETNKFAAICTH

SEQ ID NO: 180374 - protein, 14 aa, Influenza A virus
KIETNKFAAICTHL

SEQ ID NO: 180375 - protein, 15 aa, Influenza A virus
KIETNKFAAICTHLE

SEQ ID NO: 180376 - protein, 16 aa, Influenza A virus
KIETNKFAAICTHLEV

SEQ ID NO: 180377 - protein, 17 aa, Influenza A virus
KIETNKFAAICTHLEVC

SEQ ID NO: 180378 - protein, 18 aa, Influenza A virus
KIETNKFAAICTHLEVCF

SEQ ID NO: 180379 - protein, 19 aa, Influenza A virus
KIETNKFAAICTHLEVCFM

SEQ ID NO: 180380 - protein, 20 aa, Influenza A virus
KIETNKFAAICTHLEVCFMY

SEQ ID NO: 180381 - protein, 21 aa, Influenza A virus
KIETNKFAAICTHLEVCFMYS

SEQ ID NO: 180382 - protein, 22 aa, Influenza A virus
KIETNKFAAICTHLEVCFMYSD

SEQ ID NO: 180383 - protein, 23 aa, Influenza A virus
KIETNKFAAICTHLEVCFMYSDF

SEQ ID NO: 180384 - protein, 24 aa, Influenza A virus
KIETNKFAAICTHLEVCFMYSDFH

SEQ ID NO: 180385 - protein, 25 aa, Influenza A virus
KIETNKFAAICTHLEVCFMYSDFHF

SEQ ID NO: 180386 - protein, 14 aa, Influenza A virus
KIKMKWGMEMRRCL

SEQ ID NO: 180387 - protein, 15 aa, Influenza A virus
KIKMKWGMEMRRCLL

SEQ ID NO: 180388 - protein, 16 aa, Influenza A virus
KIKMKWGMEMRRCLLQ

SEQ ID NO: 180389 - protein, 17 aa, Influenza A virus
KIKMKWGMEMRRCLLQS

SEQ ID NO: 180390 - protein, 18 aa, Influenza A virus
KIKMKWGMEMRRCLLQSL

SEQ ID NO: 180391 - protein, 19 aa, Influenza A virus
KIKMKWGMEMRRCLLQSLQ

SEQ ID NO: 180392 - protein, 20 aa, Influenza A virus
KIKMKWGMEMRRCLLQSLQQ

SEQ ID NO: 180393 - protein, 21 aa, Influenza A virus
KIKMKWGMEMRRCLLQSLQQI

SEQ ID NO: 180394 - protein, 22 aa, Influenza A virus
KIKMKWGMEMRRCLLQSLQQIE

SEQ ID NO: 180395 - protein, 23 aa, Influenza A virus
KIKMKWGMEMRRCLLQSLQQIES

SEQ ID NO: 180396 - protein, 24 aa, Influenza A virus
KIKMKWGMEMRRCLLQSLQQIESM

SEQ ID NO: 180397 - protein, 25 aa, Influenza A virus
KIKMKWGMEMRRCLLQSLQQIESMI

SEQ ID NO: 180398 - protein, 14 aa, Influenza A virus
KKTSQLKWALGENM

SEQ ID NO: 180399 - protein, 15 aa, Influenza A virus
KKTSQLKWALGENMA

SEQ ID NO: 180400 - protein, 16 aa, Influenza A virus
KKTSQLKWALGENMAP

SEQ ID NO: 180401 - protein, 17 aa, Influenza A virus
KKTSQLKWALGENMAPE

SEQ ID NO: 180402 - protein, 18 aa, Influenza A virus
KKTSQLKWALGENMAPEK

SEQ ID NO: 180403 - protein, 19 aa, Influenza A virus
KKTSQLKWALGENMAPEKV

SEQ ID NO: 180404 - protein, 20 aa, Influenza A virus
KKTSQLKWALGENMAPEKVD

SEQ ID NO: 180405 - protein, 21 aa, Influenza A virus
KKTSQLKWALGENMAPEKVDF

SEQ ID NO: 180406 - protein, 14 aa, Influenza A virus
KMKWGMEMRRCLLQ

SEQ ID NO: 180407 - protein, 15 aa, Influenza A virus
KMKWGMEMRRCLLQS

SEQ ID NO: 180408 - protein, 16 aa, Influenza A virus
KMKWGMEMRRCLLQSL

SEQ ID NO: 180409 - protein, 17 aa, Influenza A virus
KMKWGMEMRRCLLQSLQ

SEQ ID NO: 180410 - protein, 18 aa, Influenza A virus
KMKWGMEMRRCLLQSLQQ

SEQ ID NO: 180411 - protein, 19 aa, Influenza A virus
KMKWGMEMRRCLLQSLQQI

SEQ ID NO: 180412 - protein, 20 aa, Influenza A virus
KMKWGMEMRRCLLQSLQQIE

SEQ ID NO: 180413 - protein, 21 aa, Influenza A virus
KMKWGMEMRRCLLQSLQQIES

SEQ ID NO: 180414 - protein, 22 aa, Influenza A virus
KMKWGMEMRRCLLQSLQQIESM

SEQ ID NO: 180415 - protein, 23 aa, Influenza A virus
KMKWGMEMRRCLLQSLQQIESMI

SEQ ID NO: 180416 - protein, 24 aa, Influenza A virus
KMKWGMEMRRCLLQSLQQIESMIE

SEQ ID NO: 180417 - protein, 25 aa, Influenza A virus
KMKWGMEMRRCLLQSLQQIESMIEA

SEQ ID NO: 180418 - protein, 15 aa, Influenza A virus
KNMKKTSQLKWALGE

SEQ ID NO: 180419 - protein, 16 aa, Influenza A virus
KNMKKTSQLKWALGEN

SEQ ID NO: 180420 - protein, 17 aa, Influenza A virus
KNMKKTSQLKWALGENM

SEQ ID NO: 180421 - protein, 18 aa, Influenza A virus
KNMKKTSQLKWALGENMA

SEQ ID NO: 180422 - protein, 19 aa, Influenza A virus
KNMKKTSQLKWALGENMAP

SEQ ID NO: 180423 - protein, 20 aa, Influenza A virus
KNMKKTSQLKWALGENMAPE

SEQ ID NO: 180424 - protein, 21 aa, Influenza A virus
KNMKKTSQLKWALGENMAPEK

SEQ ID NO: 180425 - protein, 22 aa, Influenza A virus
KNMKKTSQLKWALGENMAPEKV

SEQ ID NO: 180426 - protein, 23 aa, Influenza A virus
KNMKKTSQLKWALGENMAPEKVD

SEQ ID NO: 180427 - protein, 24 aa, Influenza A virus
KNMKKTSQLKWALGENMAPEKVDF

SEQ ID NO: 180428 - protein, 13 aa, Influenza A virus
KSVFNSLYASPQL

SEQ ID NO: 180429 - protein, 14 aa, Influenza A virus
KSVFNSLYASPQLE

SEQ ID NO: 180430 - protein, 15 aa, Influenza A virus
KSVFNSLYASPQLEG

SEQ ID NO: 180431 - protein, 16 aa, Influenza A virus
KSVFNSLYASPQLEGF

SEQ ID NO: 180432 - protein, 17 aa, Influenza A virus
KSVFNSLYASPQLEGFS

SEQ ID NO: 180433 - protein, 18 aa, Influenza A virus
KSVFNSLYASPQLEGFSA

SEQ ID NO: 180434 - protein, 19 aa, Influenza A virus
KSVFNSLYASPQLEGFSAE

SEQ ID NO: 180435 - protein, 20 aa, Influenza A virus
KSVFNSLYASPQLEGFSAES

SEQ ID NO: 180436 - protein, 21 aa, Influenza A virus
KSVFNSLYASPQLEGFSAESR

SEQ ID NO: 180437 - protein, 22 aa, Influenza A virus
KSVFNSLYASPQLEGFSAESRK

SEQ ID NO: 180438 - protein, 23 aa, Influenza A virus
KSVFNSLYASPQLEGFSAESRKL

SEQ ID NO: 180439 - protein, 24 aa, Influenza A virus
KSVFNSLYASPQLEGFSAESRKLL

SEQ ID NO: 180440 - protein, 25 aa, Influenza A virus
KSVFNSLYASPQLEGFSAESRKLLL

SEQ ID NO: 180441 - protein, 13 aa, Influenza A virus
KTNLYGFIIKGRS

SEQ ID NO: 180442 - protein, 14 aa, Influenza A virus
KTNLYGFIIKGRSH

SEQ ID NO: 180443 - protein, 15 aa, Influenza A virus
KTNLYGFIIKGRSHL

SEQ ID NO: 180444 - protein, 16 aa, Influenza A virus
KTNLYGFIIKGRSHLR

SEQ ID NO: 180445 - protein, 17 aa, Influenza A virus
KTNLYGFIIKGRSHLRN

SEQ ID NO: 180446 - protein, 18 aa, Influenza A virus
KTNLYGFIIKGRSHLRND

SEQ ID NO: 180447 - protein, 19 aa, Influenza A virus
KTNLYGFIIKGRSHLRNDT

SEQ ID NO: 180448 - protein, 20 aa, Influenza A virus
KTNLYGFIIKGRSHLRNDTD

SEQ ID NO: 180449 - protein, 21 aa, Influenza A virus
KTNLYGFIIKGRSHLRNDTDV

SEQ ID NO: 180450 - protein, 22 aa, Influenza A virus
KTNLYGFIIKGRSHLRNDTDVV

SEQ ID NO: 180451 - protein, 23 aa, Influenza A virus
KTNLYGFIIKGRSHLRNDTDVVN

SEQ ID NO: 180452 - protein, 24 aa, Influenza A virus
KTNLYGFIIKGRSHLRNDTDVVNF

SEQ ID NO: 180453 - protein, 25 aa, Influenza A virus
KTNLYGFIIKGRSHLRNDTDVVNFV

SEQ ID NO: 180454 - protein, 14 aa, Influenza A virus
KTSQLKWALGENMA

SEQ ID NO: 180455 - protein, 15 aa, Influenza A virus
KTSQLKWALGENMAP

SEQ ID NO: 180456 - protein, 16 aa, Influenza A virus
KTSQLKWALGENMAPE

SEQ ID NO: 180457 - protein, 17 aa, Influenza A virus
KTSQLKWALGENMAPEK

SEQ ID NO: 180458 - protein, 18 aa, Influenza A virus
KTSQLKWALGENMAPEKV

SEQ ID NO: 180459 - protein, 19 aa, Influenza A virus
KTSQLKWALGENMAPEKVD

SEQ ID NO: 180460 - protein, 20 aa, Influenza A virus
KTSQLKWALGENMAPEKVDF

SEQ ID NO: 180461 - protein, 13 aa, Influenza A virus
KVCRTLLAKSVFN

SEQ ID NO: 180462 - protein, 14 aa, Influenza A virus
KVCRTLLAKSVFNS

SEQ ID NO: 180463 - protein, 15 aa, Influenza A virus
KVCRTLLAKSVFNSL

SEQ ID NO: 180464 - protein, 16 aa, Influenza A virus
KVCRTLLAKSVFNSLY

SEQ ID NO: 180465 - protein, 17 aa, Influenza A virus
KVCRTLLAKSVFNSLYA

SEQ ID NO: 180466 - protein, 18 aa, Influenza A virus
KVCRTLLAKSVFNSLYAS

SEQ ID NO: 180467 - protein, 19 aa, Influenza A virus
KVCRTLLAKSVFNSLYASP

SEQ ID NO: 180468 - protein, 20 aa, Influenza A virus
KVCRTLLAKSVFNSLYASPQ

SEQ ID NO: 180469 - protein, 21 aa, Influenza A virus
KVCRTLLAKSVFNSLYASPQL

SEQ ID NO: 180470 - protein, 22 aa, Influenza A virus
KVCRTLLAKSVFNSLYASPQLE

SEQ ID NO: 180471 - protein, 23 aa, Influenza A virus
KVCRTLLAKSVFNSLYASPQLEG

SEQ ID NO: 180472 - protein, 24 aa, Influenza A virus
KVCRTLLAKSVFNSLYASPQLEGF

SEQ ID NO: 180473 - protein, 25 aa, Influenza A virus
KVCRTLLAKSVFNSLYASPQLEGFS

SEQ ID NO: 180474 - protein, 14 aa, Influenza A virus
KWEKYCVLEIGDML

SEQ ID NO: 180475 - protein, 14 aa, Influenza A virus
KWGMEMRRCLLQSL

SEQ ID NO: 180476 - protein, 15 aa, Influenza A virus
KWGMEMRRCLLQSLQ

SEQ ID NO: 180477 - protein, 16 aa, Influenza A virus
KWGMEMRRCLLQSLQQ

SEQ ID NO: 180478 - protein, 17 aa, Influenza A virus
KWGMEMRRCLLQSLQQI

SEQ ID NO: 180479 - protein, 18 aa, Influenza A virus
KWGMEMRRCLLQSLQQIE

SEQ ID NO: 180480 - protein, 19 aa, Influenza A virus
KWGMEMRRCLLQSLQQIES

SEQ ID NO: 180481 - protein, 20 aa, Influenza A virus
KWGMEMRRCLLQSLQQIESM

SEQ ID NO: 180482 - protein, 21 aa, Influenza A virus
KWGMEMRRCLLQSLQQIESMI

SEQ ID NO: 180483 - protein, 22 aa, Influenza A virus
KWGMEMRRCLLQSLQQIESMIE

SEQ ID NO: 180484 - protein, 23 aa, Influenza A virus
KWGMEMRRCLLQSLQQIESMIEA

SEQ ID NO: 180485 - protein, 24 aa, Influenza A virus
KWGMEMRRCLLQSLQQIESMIEAE

SEQ ID NO: 180486 - protein, 25 aa, Influenza A virus
KWGMEMRRCLLQSLQQIESMIEAES

SEQ ID NO: 180487 - protein, 13 aa, Influenza A virus
LAKSVFNSLYASP

SEQ ID NO: 180488 - protein, 14 aa, Influenza A virus
LAKSVFNSLYASPQ

SEQ ID NO: 180489 - protein, 15 aa, Influenza A virus
LAKSVFNSLYASPQL

SEQ ID NO: 180490 - protein, 16 aa, Influenza A virus
LAKSVFNSLYASPQLE

SEQ ID NO: 180491 - protein, 17 aa, Influenza A virus
LAKSVFNSLYASPQLEG

SEQ ID NO: 180492 - protein, 18 aa, Influenza A virus
LAKSVFNSLYASPQLEGF

SEQ ID NO: 180493 - protein, 19 aa, Influenza A virus
LAKSVFNSLYASPQLEGFS

SEQ ID NO: 180494 - protein, 20 aa, Influenza A virus
LAKSVFNSLYASPQLEGFSA

SEQ ID NO: 180495 - protein, 21 aa, Influenza A virus
LAKSVFNSLYASPQLEGFSAE

SEQ ID NO: 180496 - protein, 22 aa, Influenza A virus
LAKSVFNSLYASPQLEGFSAES

SEQ ID NO: 180497 - protein, 23 aa, Influenza A virus
LAKSVFNSLYASPQLEGFSAESR

SEQ ID NO: 180498 - protein, 24 aa, Influenza A virus
LAKSVFNSLYASPQLEGFSAESRK

SEQ ID NO: 180499 - protein, 25 aa, Influenza A virus
LAKSVFNSLYASPQLEGFSAESRKL

SEQ ID NO: 180500 - protein, 15 aa, Influenza A virus
LDEESRARIKTRLFT

SEQ ID NO: 180501 - protein, 16 aa, Influenza A virus
LDEESRARIKTRLFTI

SEQ ID NO: 180502 - protein, 17 aa, Influenza A virus
LDEESRARIKTRLFTIR

SEQ ID NO: 180503 - protein, 18 aa, Influenza A virus
LDEESRARIKTRLFTIRQ

SEQ ID NO: 180504 - protein, 19 aa, Influenza A virus
LDEESRARIKTRLFTIRQE

SEQ ID NO: 180505 - protein, 20 aa, Influenza A virus
LDEESRARIKTRLFTIRQEM

SEQ ID NO: 180506 - protein, 21 aa, Influenza A virus
LDEESRARIKTRLFTIRQEMA

SEQ ID NO: 180507 - protein, 13 aa, Influenza A virus
LENFRAYVDGFEP

SEQ ID NO: 180508 - protein, 14 aa, Influenza A virus
LENFRAYVDGFEPN

SEQ ID NO: 180509 - protein, 15 aa, Influenza A virus
LENFRAYVDGFEPNG

SEQ ID NO: 180510 - protein, 14 aa, Influenza A virus
LEPHKWEKYCVLEI

SEQ ID NO: 180511 - protein, 15 aa, Influenza A virus
LEPHKWEKYCVLEIG

SEQ ID NO: 180512 - protein, 16 aa, Influenza A virus
LEPHKWEKYCVLEIGD

SEQ ID NO: 180513 - protein, 17 aa, Influenza A virus
LEPHKWEKYCVLEIGDM

SEQ ID NO: 180514 - protein, 13 aa, Influenza A virus
LEVCFMYSDFHFI

SEQ ID NO: 180515 - protein, 14 aa, Influenza A virus
LGGLYEAIEECLIN

SEQ ID NO: 180516 - protein, 15 aa, Influenza A virus
LGGLYEAIEECLIND

SEQ ID NO: 180517 - protein, 16 aa, Influenza A virus
LGGLYEAIEECLINDP

SEQ ID NO: 180518 - protein, 17 aa, Influenza A virus
LGGLYEAIEECLINDPW

SEQ ID NO: 180519 - protein, 19 aa, Influenza A virus
LGGLYEAIEECLINDPWVL

SEQ ID NO: 180520 - protein, 20 aa, Influenza A virus
LGGLYEAIEECLINDPWVLL

SEQ ID NO: 180521 - protein, 21 aa, Influenza A virus
LGGLYEAIEECLINDPWVLLN

SEQ ID NO: 180522 - protein, 22 aa, Influenza A virus
LGGLYEAIEECLINDPWVLLNA

SEQ ID NO: 180523 - protein, 23 aa, Influenza A virus
LGGLYEAIEECLINDPWVLLNAS

SEQ ID NO: 180524 - protein, 24 aa, Influenza A virus
LGGLYEAIEECLINDPWVLLNASW

SEQ ID NO: 180525 - protein, 25 aa, Influenza A virus
LGGLYEAIEECLINDPWVLLNASWF

SEQ ID NO: 180526 - protein, 14 aa, Influenza A virus
LINDPWVLLNASWF

SEQ ID NO: 180527 - protein, 15 aa, Influenza A virus
LINDPWVLLNASWFN

SEQ ID NO: 180528 - protein, 16 aa, Influenza A virus
LINDPWVLLNASWFNS

SEQ ID NO: 180529 - protein, 17 aa, Influenza A virus
LINDPWVLLNASWFNSF

SEQ ID NO: 180530 - protein, 18 aa, Influenza A virus
LINDPWVLLNASWFNSFL

SEQ ID NO: 180531 - protein, 19 aa, Influenza A virus
LINDPWVLLNASWFNSFLT

SEQ ID NO: 180532 - protein, 20 aa, Influenza A virus
LINDPWVLLNASWFNSFLTH

SEQ ID NO: 180533 - protein, 21 aa, Influenza A virus
LINDPWVLLNASWFNSFLTHA

SEQ ID NO: 180534 - protein, 22 aa, Influenza A virus
LINDPWVLLNASWFNSFLTHAL

SEQ ID NO: 180535 - protein, 14 aa, Influenza A virus
LIPMISKCRTKEGR

SEQ ID NO: 180536 - protein, 15 aa, Influenza A virus
LIPMISKCRTKEGRR

SEQ ID NO: 180537 - protein, 16 aa, Influenza A virus
LIPMISKCRTKEGRRK

SEQ ID NO: 180538 - protein, 17 aa, Influenza A virus
LIPMISKCRTKEGRRKT

SEQ ID NO: 180539 - protein, 19 aa, Influenza A virus
LIPMISKCRTKEGRRKTNL

SEQ ID NO: 180540 - protein, 20 aa, Influenza A virus
LIPMISKCRTKEGRRKTNLY

SEQ ID NO: 180541 - protein, 21 aa, Influenza A virus
LIPMISKCRTKEGRRKTNLYG

SEQ ID NO: 180542 - protein, 22 aa, Influenza A virus
LIPMISKCRTKEGRRKTNLYGF

SEQ ID NO: 180543 - protein, 23 aa, Influenza A virus
LIPMISKCRTKEGRRKTNLYGFI

SEQ ID NO: 180544 - protein, 24 aa, Influenza A virus
LIPMISKCRTKEGRRKTNLYGFII

SEQ ID NO: 180545 - protein, 25 aa, Influenza A virus
LIPMISKCRTKEGRRKTNLYGFIIK

SEQ ID NO: 180546 - protein, 14 aa, Influenza A virus
LKHRFEIIEGRDRT

SEQ ID NO: 180547 - protein, 15 aa, Influenza A virus
LKHRFEIIEGRDRTM

SEQ ID NO: 180548 - protein, 16 aa, Influenza A virus
LKHRFEIIEGRDRTMA

SEQ ID NO: 180549 - protein, 17 aa, Influenza A virus
LKHRFEIIEGRDRTMAW

SEQ ID NO: 180550 - protein, 19 aa, Influenza A virus
LKHRFEIIEGRDRTMAWTV

SEQ ID NO: 180551 - protein, 20 aa, Influenza A virus
LKHRFEIIEGRDRTMAWTVV

SEQ ID NO: 180552 - protein, 21 aa, Influenza A virus
LKHRFEIIEGRDRTMAWTVVN

SEQ ID NO: 180553 - protein, 22 aa, Influenza A virus
LKHRFEIIEGRDRTMAWTVVNS

SEQ ID NO: 180554 - protein, 23 aa, Influenza A virus
LKHRFEIIEGRDRTMAWTVVNSI

SEQ ID NO: 180555 - protein, 24 aa, Influenza A virus
LKHRFEIIEGRDRTMAWTVVNSIC

SEQ ID NO: 180556 - protein, 25 aa, Influenza A virus
LKHRFEIIEGRDRTMAWTVVNSICN

SEQ ID NO: 180557 - protein, 14 aa, Influenza A virus
LKWALGENMAPEKV

SEQ ID NO: 180558 - protein, 15 aa, Influenza A virus
LKWALGENMAPEKVD

SEQ ID NO: 180559 - protein, 16 aa, Influenza A virus
LKWALGENMAPEKVDF

SEQ ID NO: 180560 - protein, 13 aa, Influenza A virus
LLAKSVFNSLYAS

SEQ ID NO: 180561 - protein, 14 aa, Influenza A virus
LLAKSVFNSLYASP

SEQ ID NO: 180562 - protein, 15 aa, Influenza A virus
LLAKSVFNSLYASPQ

SEQ ID NO: 180563 - protein, 16 aa, Influenza A virus
LLAKSVFNSLYASPQL

SEQ ID NO: 180564 - protein, 17 aa, Influenza A virus
LLAKSVFNSLYASPQLE

SEQ ID NO: 180565 - protein, 18 aa, Influenza A virus
LLAKSVFNSLYASPQLEG

SEQ ID NO: 180566 - protein, 19 aa, Influenza A virus
LLAKSVFNSLYASPQLEGF

SEQ ID NO: 180567 - protein, 20 aa, Influenza A virus
LLAKSVFNSLYASPQLEGFS

SEQ ID NO: 180568 - protein, 21 aa, Influenza A virus
LLAKSVFNSLYASPQLEGFSA

SEQ ID NO: 180569 - protein, 22 aa, Influenza A virus
LLAKSVFNSLYASPQLEGFSAE

SEQ ID NO: 180570 - protein, 23 aa, Influenza A virus
LLAKSVFNSLYASPQLEGFSAES

SEQ ID NO: 180571 - protein, 24 aa, Influenza A virus
LLAKSVFNSLYASPQLEGFSAESR

SEQ ID NO: 180572 - protein, 25 aa, Influenza A virus
LLAKSVFNSLYASPQLEGFSAESRK

SEQ ID NO: 180573 - protein, 13 aa, Influenza A virus
LLKHRFEIIEGRD

SEQ ID NO: 180574 - protein, 14 aa, Influenza A virus
LLKHRFEIIEGRDR

SEQ ID NO: 180575 - protein, 15 aa, Influenza A virus
LLKHRFEIIEGRDRT

SEQ ID NO: 180576 - protein, 16 aa, Influenza A virus
LLKHRFEIIEGRDRTM

SEQ ID NO: 180577 - protein, 17 aa, Influenza A virus
LLKHRFEIIEGRDRTMA

SEQ ID NO: 180578 - protein, 18 aa, Influenza A virus
LLKHRFEIIEGRDRTMAW

SEQ ID NO: 180579 - protein, 19 aa, Influenza A virus
LLKHRFEIIEGRDRTMAWT

SEQ ID NO: 180580 - protein, 20 aa, Influenza A virus
LLKHRFEIIEGRDRTMAWTV

SEQ ID NO: 180581 - protein, 21 aa, Influenza A virus
LLKHRFEIIEGRDRTMAWTVV

SEQ ID NO: 180582 - protein, 22 aa, Influenza A virus
LLKHRFEIIEGRDRTMAWTVVN

SEQ ID NO: 180583 - protein, 23 aa, Influenza A virus
LLKHRFEIIEGRDRTMAWTVVNS

SEQ ID NO: 180584 - protein, 24 aa, Influenza A virus
LLKHRFEIIEGRDRTMAWTVVNSI

SEQ ID NO: 180585 - protein, 25 aa, Influenza A virus
LLKHRFEIIEGRDRTMAWTVVNSIC

SEQ ID NO: 180586 - protein, 14 aa, Influenza A virus
LLMDALKLSIEDPS

SEQ ID NO: 180587 - protein, 15 aa, Influenza A virus
LLMDALKLSIEDPSH

SEQ ID NO: 180588 - protein, 16 aa, Influenza A virus
LLMDALKLSIEDPSHE

SEQ ID NO: 180589 - protein, 17 aa, Influenza A virus
LLMDALKLSIEDPSHEG

SEQ ID NO: 180590 - protein, 19 aa, Influenza A virus
LLMDALKLSIEDPSHEGEG

SEQ ID NO: 180591 - protein, 20 aa, Influenza A virus
LLMDALKLSIEDPSHEGEGI

SEQ ID NO: 180592 - protein, 21 aa, Influenza A virus
LLMDALKLSIEDPSHEGEGIP

SEQ ID NO: 180593 - protein, 22 aa, Influenza A virus
LLMDALKLSIEDPSHEGEGIPL

SEQ ID NO: 180594 - protein, 23 aa, Influenza A virus
LLMDALKLSIEDPSHEGEGIPLY

SEQ ID NO: 180595 - protein, 24 aa, Influenza A virus
LLMDALKLSIEDPSHEGEGIPLYD

SEQ ID NO: 180596 - protein, 25 aa, Influenza A virus
LLMDALKLSIEDPSHEGEGIPLYDA

SEQ ID NO: 180597 - protein, 13 aa, Influenza A virus
LLNASCAAMDDFQ

SEQ ID NO: 180598 - protein, 14 aa, Influenza A virus
LLNASCAAMDDFQL

SEQ ID NO: 180599 - protein, 15 aa, Influenza A virus
LLNASCAAMDDFQLI

SEQ ID NO: 180600 - protein, 16 aa, Influenza A virus
LLNASCAAMDDFQLIP

SEQ ID NO: 180601 - protein, 17 aa, Influenza A virus
LLNASCAAMDDFQLIPM

SEQ ID NO: 180602 - protein, 18 aa, Influenza A virus
LLNASCAAMDDFQLIPMI

SEQ ID NO: 180603 - protein, 19 aa, Influenza A virus
LLNASCAAMDDFQLIPMIS

SEQ ID NO: 180604 - protein, 20 aa, Influenza A virus
LLNASCAAMDDFQLIPMISK

SEQ ID NO: 180605 - protein, 21 aa, Influenza A virus
LLNASCAAMDDFQLIPMISKC

SEQ ID NO: 180606 - protein, 22 aa, Influenza A virus
LLNASCAAMDDFQLIPMISKCR

SEQ ID NO: 180607 - protein, 23 aa, Influenza A virus
LLNASCAAMDDFQLIPMISKCRT

SEQ ID NO: 180608 - protein, 24 aa, Influenza A virus
LLNASCAAMDDFQLIPMISKCRTK

SEQ ID NO: 180609 - protein, 25 aa, Influenza A virus
LLNASCAAMDDFQLIPMISKCRTKE

SEQ ID NO: 180610 - protein, 13 aa, Influenza A virus
LLNASWFNSFLTH

SEQ ID NO: 180611 - protein, 14 aa, Influenza A virus
LLNASWFNSFLTHA

SEQ ID NO: 180612 - protein, 15 aa, Influenza A virus
LLNASWFNSFLTHAL

SEQ ID NO: 180613 - protein, 14 aa, Influenza A virus
LLQSLQQIESMIEA

SEQ ID NO: 180614 - protein, 15 aa, Influenza A virus
LLQSLQQIESMIEAE

SEQ ID NO: 180615 - protein, 16 aa, Influenza A virus
LLQSLQQIESMIEAES

SEQ ID NO: 180616 - protein, 17 aa, Influenza A virus
LLQSLQQIESMIEAESS

SEQ ID NO: 180617 - protein, 18 aa, Influenza A virus
LLQSLQQIESMIEAESSV

SEQ ID NO: 180618 - protein, 19 aa, Influenza A virus
LLQSLQQIESMIEAESSVK

SEQ ID NO: 180619 - protein, 20 aa, Influenza A virus
LLQSLQQIESMIEAESSVKE

SEQ ID NO: 180620 - protein, 21 aa, Influenza A virus
LLQSLQQIESMIEAESSVKEK

SEQ ID NO: 180621 - protein, 22 aa, Influenza A virus
LLQSLQQIESMIEAESSVKEKD

SEQ ID NO: 180622 - protein, 23 aa, Influenza A virus
LLQSLQQIESMIEAESSVKEKDM

SEQ ID NO: 180623 - protein, 24 aa, Influenza A virus
LLQSLQQIESMIEAESSVKEKDMT

SEQ ID NO: 180624 - protein, 25 aa, Influenza A virus
LLQSLQQIESMIEAESSVKEKDMTK

SEQ ID NO: 180625 - protein, 15 aa, Influenza A virus
LMDALKLSIEDPSHE

SEQ ID NO: 180626 - protein, 20 aa, Influenza A virus
LMDALKLSIEDPSHEGEGIP

SEQ ID NO: 180627 - protein, 13 aa, Influenza A virus
LNASCAAMDDFQL

SEQ ID NO: 180628 - protein, 14 aa, Influenza A virus
LNASCAAMDDFQLI

SEQ ID NO: 180629 - protein, 15 aa, Influenza A virus
LNASCAAMDDFQLIP

SEQ ID NO: 180630 - protein, 16 aa, Influenza A virus
LNASCAAMDDFQLIPM

SEQ ID NO: 180631 - protein, 17 aa, Influenza A virus
LNASCAAMDDFQLIPMI

SEQ ID NO: 180632 - protein, 18 aa, Influenza A virus
LNASCAAMDDFQLIPMIS

SEQ ID NO: 180633 - protein, 19 aa, Influenza A virus
LNASCAAMDDFQLIPMISK

SEQ ID NO: 180634 - protein, 20 aa, Influenza A virus
LNASCAAMDDFQLIPMISKC

SEQ ID NO: 180635 - protein, 21 aa, Influenza A virus
LNASCAAMDDFQLIPMISKCR

SEQ ID NO: 180636 - protein, 22 aa, Influenza A virus
LNASCAAMDDFQLIPMISKCRT

SEQ ID NO: 180637 - protein, 23 aa, Influenza A virus
LNASCAAMDDFQLIPMISKCRTK

SEQ ID NO: 180638 - protein, 24 aa, Influenza A virus
LNASCAAMDDFQLIPMISKCRTKE

SEQ ID NO: 180639 - protein, 25 aa, Influenza A virus
LNASCAAMDDFQLIPMISKCRTKEG

SEQ ID NO: 180640 - protein, 13 aa, Influenza A virus
LNASWFNSFLTHA

SEQ ID NO: 180641 - protein, 14 aa, Influenza A virus
LNASWFNSFLTHAL

SEQ ID NO: 180642 - protein, 14 aa, Influenza A virus
LQQIESMIEAESSV

SEQ ID NO: 180643 - protein, 15 aa, Influenza A virus
LQQIESMIEAESSVK

SEQ ID NO: 180644 - protein, 16 aa, Influenza A virus
LQQIESMIEAESSVKE

SEQ ID NO: 180645 - protein, 17 aa, Influenza A virus
LQQIESMIEAESSVKEK

SEQ ID NO: 180646 - protein, 18 aa, Influenza A virus
LQQIESMIEAESSVKEKD

SEQ ID NO: 180647 - protein, 19 aa, Influenza A virus
LQQIESMIEAESSVKEKDM

SEQ ID NO: 180648 - protein, 20 aa, Influenza A virus
LQQIESMIEAESSVKEKDMT

SEQ ID NO: 180649 - protein, 21 aa, Influenza A virus
LQQIESMIEAESSVKEKDMTK

SEQ ID NO: 180650 - protein, 22 aa, Influenza A virus
LQQIESMIEAESSVKEKDMTKE

SEQ ID NO: 180651 - protein, 23 aa, Influenza A virus
LQQIESMIEAESSVKEKDMTKEF

SEQ ID NO: 180652 - protein, 24 aa, Influenza A virus
LQQIESMIEAESSVKEKDMTKEFF

SEQ ID NO: 180653 - protein, 25 aa, Influenza A virus
LQQIESMIEAESSVKEKDMTKEFFE

SEQ ID NO: 180654 - protein, 14 aa, Influenza A virus
LQSLQQIESMIEAE

SEQ ID NO: 180655 - protein, 15 aa, Influenza A virus
LQSLQQIESMIEAES

SEQ ID NO: 180656 - protein, 16 aa, Influenza A virus
LQSLQQIESMIEAESS

SEQ ID NO: 180657 - protein, 17 aa, Influenza A virus
LQSLQQIESMIEAESSV

SEQ ID NO: 180658 - protein, 18 aa, Influenza A virus
LQSLQQIESMIEAESSVK

SEQ ID NO: 180659 - protein, 19 aa, Influenza A virus
LQSLQQIESMIEAESSVKE

SEQ ID NO: 180660 - protein, 20 aa, Influenza A virus
LQSLQQIESMIEAESSVKEK

SEQ ID NO: 180661 - protein, 21 aa, Influenza A virus
LQSLQQIESMIEAESSVKEKD

SEQ ID NO: 180662 - protein, 22 aa, Influenza A virus
LQSLQQIESMIEAESSVKEKDM

SEQ ID NO: 180663 - protein, 23 aa, Influenza A virus
LQSLQQIESMIEAESSVKEKDMT

SEQ ID NO: 180664 - protein, 24 aa, Influenza A virus
LQSLQQIESMIEAESSVKEKDMTK

SEQ ID NO: 180665 - protein, 25 aa, Influenza A virus
LQSLQQIESMIEAESSVKEKDMTKE

SEQ ID NO: 180666 - protein, 15 aa, Influenza A virus
LRNDTDVVNFVSMEF

SEQ ID NO: 180667 - protein, 16 aa, Influenza A virus
LRNDTDVVNFVSMEFS

SEQ ID NO: 180668 - protein, 17 aa, Influenza A virus
LRNDTDVVNFVSMEFSL

SEQ ID NO: 180669 - protein, 18 aa, Influenza A virus
LRNDTDVVNFVSMEFSLT

SEQ ID NO: 180670 - protein, 19 aa, Influenza A virus
LRNDTDVVNFVSMEFSLTD

SEQ ID NO: 180671 - protein, 20 aa, Influenza A virus
LRNDTDVVNFVSMEFSLTDP

SEQ ID NO: 180672 - protein, 21 aa, Influenza A virus
LRNDTDVVNFVSMEFSLTDPR

SEQ ID NO: 180673 - protein, 22 aa, Influenza A virus
LRNDTDVVNFVSMEFSLTDPRL

SEQ ID NO: 180674 - protein, 23 aa, Influenza A virus
LRNDTDVVNFVSMEFSLTDPRLE

SEQ ID NO: 180675 - protein, 24 aa, Influenza A virus
LRNDTDVVNFVSMEFSLTDPRLEP

SEQ ID NO: 180676 - protein, 25 aa, Influenza A virus
LRNDTDVVNFVSMEFSLTDPRLEPH

SEQ ID NO: 180677 - protein, 17 aa, Influenza A virus
LTDPRLEPHKWEKYCVL

SEQ ID NO: 180678 - protein, 19 aa, Influenza A virus
LTDPRLEPHKWEKYCVLEI

SEQ ID NO: 180679 - protein, 20 aa, Influenza A virus
LTDPRLEPHKWEKYCVLEIG

SEQ ID NO: 180680 - protein, 21 aa, Influenza A virus
LTDPRLEPHKWEKYCVLEIGD

SEQ ID NO: 180681 - protein, 22 aa, Influenza A virus
LTDPRLEPHKWEKYCVLEIGDM

SEQ ID NO: 180682 - protein, 25 aa, Influenza A virus
LWDSFRQSERGEETIEERFEITGTM

SEQ ID NO: 180683 - protein, 15 aa, Influenza A virus
LYASPQLEGFSAESR

SEQ ID NO: 180684 - protein, 16 aa, Influenza A virus
LYASPQLEGFSAESRK

SEQ ID NO: 180685 - protein, 17 aa, Influenza A virus
LYASPQLEGFSAESRKL

SEQ ID NO: 180686 - protein, 19 aa, Influenza A virus
LYASPQLEGFSAESRKLLL

SEQ ID NO: 180687 - protein, 13 aa, Influenza A virus
LYDYKENRFIEIG

SEQ ID NO: 180688 - protein, 14 aa, Influenza A virus
LYDYKENRFIEIGV

SEQ ID NO: 180689 - protein, 15 aa, Influenza A virus
LYDYKENRFIEIGVT

SEQ ID NO: 180690 - protein, 16 aa, Influenza A virus
LYDYKENRFIEIGVTR

SEQ ID NO: 180691 - protein, 17 aa, Influenza A virus
LYDYKENRFIEIGVTRR

SEQ ID NO: 180692 - protein, 18 aa, Influenza A virus
LYDYKENRFIEIGVTRRE

SEQ ID NO: 180693 - protein, 19 aa, Influenza A virus
LYDYKENRFIEIGVTRREV

SEQ ID NO: 180694 - protein, 20 aa, Influenza A virus
LYDYKENRFIEIGVTRREVH

SEQ ID NO: 180695 - protein, 14 aa, Influenza A virus
LYEAIEECLINDPW

SEQ ID NO: 180696 - protein, 15 aa, Influenza A virus
LYEAIEECLINDPWV

SEQ ID NO: 180697 - protein, 16 aa, Influenza A virus
LYEAIEECLINDPWVL

SEQ ID NO: 180698 - protein, 17 aa, Influenza A virus
LYEAIEECLINDPWVLL

SEQ ID NO: 180699 - protein, 18 aa, Influenza A virus
LYEAIEECLINDPWVLLN

SEQ ID NO: 180700 - protein, 19 aa, Influenza A virus
LYEAIEECLINDPWVLLNA

SEQ ID NO: 180701 - protein, 20 aa, Influenza A virus
LYEAIEECLINDPWVLLNAS

SEQ ID NO: 180702 - protein, 21 aa, Influenza A virus
LYEAIEECLINDPWVLLNASW

SEQ ID NO: 180703 - protein, 22 aa, Influenza A virus
LYEAIEECLINDPWVLLNASWF

SEQ ID NO: 180704 - protein, 23 aa, Influenza A virus
LYEAIEECLINDPWVLLNASWFN

SEQ ID NO: 180705 - protein, 24 aa, Influenza A virus
LYEAIEECLINDPWVLLNASWFNS

SEQ ID NO: 180706 - protein, 25 aa, Influenza A virus
LYEAIEECLINDPWVLLNASWFNSF

SEQ ID NO: 180707 - protein, 13 aa, Influenza A virus
LYGFIIKGRSHLR

SEQ ID NO: 180708 - protein, 14 aa, Influenza A virus
LYGFIIKGRSHLRN

SEQ ID NO: 180709 - protein, 15 aa, Influenza A virus
LYGFIIKGRSHLRND

SEQ ID NO: 180710 - protein, 16 aa, Influenza A virus
LYGFIIKGRSHLRNDT

SEQ ID NO: 180711 - protein, 17 aa, Influenza A virus
LYGFIIKGRSHLRNDTD

SEQ ID NO: 180712 - protein, 18 aa, Influenza A virus
LYGFIIKGRSHLRNDTDV

SEQ ID NO: 180713 - protein, 19 aa, Influenza A virus
LYGFIIKGRSHLRNDTDVV

SEQ ID NO: 180714 - protein, 20 aa, Influenza A virus
LYGFIIKGRSHLRNDTDVVN

SEQ ID NO: 180715 - protein, 21 aa, Influenza A virus
LYGFIIKGRSHLRNDTDVVNF

SEQ ID NO: 180716 - protein, 22 aa, Influenza A virus
LYGFIIKGRSHLRNDTDVVNFV

SEQ ID NO: 180717 - protein, 23 aa, Influenza A virus
LYGFIIKGRSHLRNDTDVVNFVS

SEQ ID NO: 180718 - protein, 24 aa, Influenza A virus
LYGFIIKGRSHLRNDTDVVNFVSM

SEQ ID NO: 180719 - protein, 25 aa, Influenza A virus
LYGFIIKGRSHLRNDTDVVNFVSME

SEQ ID NO: 180720 - protein, 13 aa, Influenza A virus
LYVRTNGTSKIKM

SEQ ID NO: 180721 - protein, 14 aa, Influenza A virus
LYVRTNGTSKIKMK

SEQ ID NO: 180722 - protein, 15 aa, Influenza A virus
LYVRTNGTSKIKMKW

SEQ ID NO: 180723 - protein, 16 aa, Influenza A virus
LYVRTNGTSKIKMKWG

SEQ ID NO: 180724 - protein, 17 aa, Influenza A virus
LYVRTNGTSKIKMKWGM

SEQ ID NO: 180725 - protein, 18 aa, Influenza A virus
LYVRTNGTSKIKMKWGME

SEQ ID NO: 180726 - protein, 19 aa, Influenza A virus
LYVRTNGTSKIKMKWGMEM

SEQ ID NO: 180727 - protein, 20 aa, Influenza A virus
LYVRTNGTSKIKMKWGMEMR

SEQ ID NO: 180728 - protein, 21 aa, Influenza A virus
LYVRTNGTSKIKMKWGMEMRR

SEQ ID NO: 180729 - protein, 22 aa, Influenza A virus
LYVRTNGTSKIKMKWGMEMRRC

SEQ ID NO: 180730 - protein, 23 aa, Influenza A virus
LYVRTNGTSKIKMKWGMEMRRCL

SEQ ID NO: 180731 - protein, 24 aa, Influenza A virus
LYVRTNGTSKIKMKWGMEMRRCLL

SEQ ID NO: 180732 - protein, 25 aa, Influenza A virus
LYVRTNGTSKIKMKWGMEMRRCLLQ

SEQ ID NO: 180733 - protein, 20 aa, Influenza A virus
MATKADYTLDEESRARIKTR

SEQ ID NO: 180734 - protein, 22 aa, Influenza A virus
MATKADYTLDEESRARIKTRLF

SEQ ID NO: 180735 - protein, 23 aa, Influenza A virus
MATKADYTLDEESRARIKTRLFT

SEQ ID NO: 180736 - protein, 24 aa, Influenza A virus
MATKADYTLDEESRARIKTRLFTI

SEQ ID NO: 180737 - protein, 25 aa, Influenza A virus
MATKADYTLDEESRARIKTRLFTIR

SEQ ID NO: 180738 - protein, 14 aa, Influenza A virus
MAWTVVNSICNTTG

SEQ ID NO: 180739 - protein, 13 aa, Influenza A virus
MDDFQLIPMISKC

SEQ ID NO: 180740 - protein, 14 aa, Influenza A virus
MDDFQLIPMISKCR

SEQ ID NO: 180741 - protein, 15 aa, Influenza A virus
MDDFQLIPMISKCRT

SEQ ID NO: 180742 - protein, 16 aa, Influenza A virus
MDDFQLIPMISKCRTK

SEQ ID NO: 180743 - protein, 17 aa, Influenza A virus
MDDFQLIPMISKCRTKE

SEQ ID NO: 180744 - protein, 18 aa, Influenza A virus
MDDFQLIPMISKCRTKEG

SEQ ID NO: 180745 - protein, 19 aa, Influenza A virus
MDDFQLIPMISKCRTKEGR

SEQ ID NO: 180746 - protein, 20 aa, Influenza A virus
MDDFQLIPMISKCRTKEGRR

SEQ ID NO: 180747 - protein, 21 aa, Influenza A virus
MDDFQLIPMISKCRTKEGRRK

SEQ ID NO: 180748 - protein, 22 aa, Influenza A virus
MDDFQLIPMISKCRTKEGRRKT

SEQ ID NO: 180749 - protein, 23 aa, Influenza A virus
MDDFQLIPMISKCRTKEGRRKTN

SEQ ID NO: 180750 - protein, 24 aa, Influenza A virus
MDDFQLIPMISKCRTKEGRRKTNL

SEQ ID NO: 180751 - protein, 25 aa, Influenza A virus
MDDFQLIPMISKCRTKEGRRKTNLY

SEQ ID NO: 180752 - protein, 13 aa, Influenza A virus
MEDFVRQCFNPMI

SEQ ID NO: 180753 - protein, 14 aa, Influenza A virus
MEDFVRQCFNPMIV

SEQ ID NO: 180754 - protein, 15 aa, Influenza A virus
MEDFVRQCFNPMIVE

SEQ ID NO: 180755 - protein, 16 aa, Influenza A virus
MEDFVRQCFNPMIVEL

SEQ ID NO: 180756 - protein, 17 aa, Influenza A virus
MEDFVRQCFNPMIVELA

SEQ ID NO: 180757 - protein, 18 aa, Influenza A virus
MEDFVRQCFNPMIVELAE

SEQ ID NO: 180758 - protein, 19 aa, Influenza A virus
MEDFVRQCFNPMIVELAEK

SEQ ID NO: 180759 - protein, 15 aa, Influenza A virus
MEFSLTDPRLEPHKW

SEQ ID NO: 180760 - protein, 20 aa, Influenza A virus
MEFSLTDPRLEPHKWEKYCV

SEQ ID NO: 180761 - protein, 21 aa, Influenza A virus
MEFSLTDPRLEPHKWEKYCVL

SEQ ID NO: 180762 - protein, 22 aa, Influenza A virus
MEFSLTDPRLEPHKWEKYCVLE

SEQ ID NO: 180763 - protein, 23 aa, Influenza A virus
MEFSLTDPRLEPHKWEKYCVLEI

SEQ ID NO: 180764 - protein, 24 aa, Influenza A virus
MEFSLTDPRLEPHKWEKYCVLEIG

SEQ ID NO: 180765 - protein, 25 aa, Influenza A virus
MEFSLTDPRLEPHKWEKYCVLEIGD

SEQ ID NO: 180766 - protein, 14 aa, Influenza A virus
MEMRRCLLQSLQQI

SEQ ID NO: 180767 - protein, 15 aa, Influenza A virus
MEMRRCLLQSLQQIE

SEQ ID NO: 180768 - protein, 16 aa, Influenza A virus
MEMRRCLLQSLQQIES

SEQ ID NO: 180769 - protein, 17 aa, Influenza A virus
MEMRRCLLQSLQQIESM

SEQ ID NO: 180770 - protein, 18 aa, Influenza A virus
MEMRRCLLQSLQQIESMI

SEQ ID NO: 180771 - protein, 19 aa, Influenza A virus
MEMRRCLLQSLQQIESMIE

SEQ ID NO: 180772 - protein, 20 aa, Influenza A virus
MEMRRCLLQSLQQIESMIEA

SEQ ID NO: 180773 - protein, 21 aa, Influenza A virus
MEMRRCLLQSLQQIESMIEAE

SEQ ID NO: 180774 - protein, 22 aa, Influenza A virus
MEMRRCLLQSLQQIESMIEAES

SEQ ID NO: 180775 - protein, 23 aa, Influenza A virus
MEMRRCLLQSLQQIESMIEAESS

SEQ ID NO: 180776 - protein, 24 aa, Influenza A virus
MEMRRCLLQSLQQIESMIEAESSV

SEQ ID NO: 180777 - protein, 25 aa, Influenza A virus
MEMRRCLLQSLQQIESMIEAESSVK

SEQ ID NO: 180778 - protein, 13 aa, Influenza A virus
MFLYVRTNGTSKI

SEQ ID NO: 180779 - protein, 14 aa, Influenza A virus
MFLYVRTNGTSKIK

SEQ ID NO: 180780 - protein, 15 aa, Influenza A virus
MFLYVRTNGTSKIKM

SEQ ID NO: 180781 - protein, 16 aa, Influenza A virus
MFLYVRTNGTSKIKMK

SEQ ID NO: 180782 - protein, 17 aa, Influenza A virus
MFLYVRTNGTSKIKMKW

SEQ ID NO: 180783 - protein, 18 aa, Influenza A virus
MFLYVRTNGTSKIKMKWG

SEQ ID NO: 180784 - protein, 19 aa, Influenza A virus
MFLYVRTNGTSKIKMKWGM

SEQ ID NO: 180785 - protein, 20 aa, Influenza A virus
MFLYVRTNGTSKIKMKWGME

SEQ ID NO: 180786 - protein, 21 aa, Influenza A virus
MFLYVRTNGTSKIKMKWGMEM

SEQ ID NO: 180787 - protein, 22 aa, Influenza A virus
MFLYVRTNGTSKIKMKWGMEMR

SEQ ID NO: 180788 - protein, 23 aa, Influenza A virus
MFLYVRTNGTSKIKMKWGMEMRR

SEQ ID NO: 180789 - protein, 24 aa, Influenza A virus
MFLYVRTNGTSKIKMKWGMEMRRC

SEQ ID NO: 180790 - protein, 25 aa, Influenza A virus
MFLYVRTNGTSKIKMKWGMEMRRCL

SEQ ID NO: 180791 - protein, 15 aa, Influenza A virus
MISKCRTKEGRRKTN

SEQ ID NO: 180792 - protein, 21 aa, Influenza A virus
MISKCRTKEGRRKTNLYGFII

SEQ ID NO: 180793 - protein, 22 aa, Influenza A virus
MISKCRTKEGRRKTNLYGFIIK

SEQ ID NO: 180794 - protein, 23 aa, Influenza A virus
MISKCRTKEGRRKTNLYGFIIKG

SEQ ID NO: 180795 - protein, 24 aa, Influenza A virus
MISKCRTKEGRRKTNLYGFIIKGR

SEQ ID NO: 180796 - protein, 25 aa, Influenza A virus
MISKCRTKEGRRKTNLYGFIIKGRS

SEQ ID NO: 180797 - protein, 14 aa, Influenza A virus
MIVELAEKAMKEYG

SEQ ID NO: 180798 - protein, 15 aa, Influenza A virus
MIVELAEKAMKEYGE

SEQ ID NO: 180799 - protein, 13 aa, Influenza A virus
MKGVYINTALLNA

SEQ ID NO: 180800 - protein, 14 aa, Influenza A virus
MKGVYINTALLNAS

SEQ ID NO: 180801 - protein, 15 aa, Influenza A virus
MKGVYINTALLNASC

SEQ ID NO: 180802 - protein, 16 aa, Influenza A virus
MKGVYINTALLNASCA

SEQ ID NO: 180803 - protein, 17 aa, Influenza A virus
MKGVYINTALLNASCAA

SEQ ID NO: 180804 - protein, 18 aa, Influenza A virus
MKGVYINTALLNASCAAM

SEQ ID NO: 180805 - protein, 19 aa, Influenza A virus
MKGVYINTALLNASCAAMD

SEQ ID NO: 180806 - protein, 20 aa, Influenza A virus
MKGVYINTALLNASCAAMDD

SEQ ID NO: 180807 - protein, 21 aa, Influenza A virus
MKGVYINTALLNASCAAMDDF

SEQ ID NO: 180808 - protein, 22 aa, Influenza A virus
MKGVYINTALLNASCAAMDDFQ

SEQ ID NO: 180809 - protein, 23 aa, Influenza A virus
MKGVYINTALLNASCAAMDDFQL

SEQ ID NO: 180810 - protein, 24 aa, Influenza A virus
MKGVYINTALLNASCAAMDDFQLI

SEQ ID NO: 180811 - protein, 25 aa, Influenza A virus
MKGVYINTALLNASCAAMDDFQLIP

SEQ ID NO: 180812 - protein, 15 aa, Influenza A virus
MKKTSQLKWALGENM

SEQ ID NO: 180813 - protein, 16 aa, Influenza A virus
MKKTSQLKWALGENMA

SEQ ID NO: 180814 - protein, 17 aa, Influenza A virus
MKKTSQLKWALGENMAP

SEQ ID NO: 180815 - protein, 18 aa, Influenza A virus
MKKTSQLKWALGENMAPE

SEQ ID NO: 180816 - protein, 19 aa, Influenza A virus
MKKTSQLKWALGENMAPEK

SEQ ID NO: 180817 - protein, 20 aa, Influenza A virus
MKKTSQLKWALGENMAPEKV

SEQ ID NO: 180818 - protein, 21 aa, Influenza A virus
MKKTSQLKWALGENMAPEKVD

SEQ ID NO: 180819 - protein, 22 aa, Influenza A virus
MKKTSQLKWALGENMAPEKVDF

SEQ ID NO: 180820 - protein, 14 aa, Influenza A virus
MKWGMEMRRCLLQS

SEQ ID NO: 180821 - protein, 15 aa, Influenza A virus
MKWGMEMRRCLLQSL

SEQ ID NO: 180822 - protein, 16 aa, Influenza A virus
MKWGMEMRRCLLQSLQ

SEQ ID NO: 180823 - protein, 17 aa, Influenza A virus
MKWGMEMRRCLLQSLQQ

SEQ ID NO: 180824 - protein, 18 aa, Influenza A virus
MKWGMEMRRCLLQSLQQI

SEQ ID NO: 180825 - protein, 19 aa, Influenza A virus
MKWGMEMRRCLLQSLQQIE

SEQ ID NO: 180826 - protein, 20 aa, Influenza A virus
MKWGMEMRRCLLQSLQQIES

SEQ ID NO: 180827 - protein, 21 aa, Influenza A virus
MKWGMEMRRCLLQSLQQIESM

SEQ ID NO: 180828 - protein, 22 aa, Influenza A virus
MKWGMEMRRCLLQSLQQIESMI

SEQ ID NO: 180829 - protein, 23 aa, Influenza A virus
MKWGMEMRRCLLQSLQQIESMIE

SEQ ID NO: 180830 - protein, 24 aa, Influenza A virus
MKWGMEMRRCLLQSLQQIESMIEA

SEQ ID NO: 180831 - protein, 25 aa, Influenza A virus
MKWGMEMRRCLLQSLQQIESMIEAE

SEQ ID NO: 180832 - protein, 13 aa, Influenza A virus
MRRCLLQSLQQIE

SEQ ID NO: 180833 - protein, 14 aa, Influenza A virus
MRRCLLQSLQQIES

SEQ ID NO: 180834 - protein, 15 aa, Influenza A virus
MRRCLLQSLQQIESM

SEQ ID NO: 180835 - protein, 16 aa, Influenza A virus
MRRCLLQSLQQIESMI

SEQ ID NO: 180836 - protein, 17 aa, Influenza A virus
MRRCLLQSLQQIESMIE

SEQ ID NO: 180837 - protein, 18 aa, Influenza A virus
MRRCLLQSLQQIESMIEA

SEQ ID NO: 180838 - protein, 19 aa, Influenza A virus
MRRCLLQSLQQIESMIEAE

SEQ ID NO: 180839 - protein, 20 aa, Influenza A virus
MRRCLLQSLQQIESMIEAES

SEQ ID NO: 180840 - protein, 21 aa, Influenza A virus
MRRCLLQSLQQIESMIEAESS

SEQ ID NO: 180841 - protein, 22 aa, Influenza A virus
MRRCLLQSLQQIESMIEAESSV

SEQ ID NO: 180842 - protein, 23 aa, Influenza A virus
MRRCLLQSLQQIESMIEAESSVK

SEQ ID NO: 180843 - protein, 24 aa, Influenza A virus
MRRCLLQSLQQIESMIEAESSVKE

SEQ ID NO: 180844 - protein, 25 aa, Influenza A virus
MRRCLLQSLQQIESMIEAESSVKEK

SEQ ID NO: 180845 - protein, 14 aa, Influenza A virus
MRRNYFTAEVSHCR

SEQ ID NO: 180846 - protein, 15 aa, Influenza A virus
MRRNYFTAEVSHCRA

SEQ ID NO: 180847 - protein, 16 aa, Influenza A virus
MRRNYFTAEVSHCRAT

SEQ ID NO: 180848 - protein, 17 aa, Influenza A virus
MRRNYFTAEVSHCRATE

SEQ ID NO: 180849 - protein, 18 aa, Influenza A virus
MRRNYFTAEVSHCRATEY

SEQ ID NO: 180850 - protein, 19 aa, Influenza A virus
MRRNYFTAEVSHCRATEYI

SEQ ID NO: 180851 - protein, 20 aa, Influenza A virus
MRRNYFTAEVSHCRATEYIM

SEQ ID NO: 180852 - protein, 21 aa, Influenza A virus
MRRNYFTAEVSHCRATEYIMK

SEQ ID NO: 180853 - protein, 22 aa, Influenza A virus
MRRNYFTAEVSHCRATEYIMKG

SEQ ID NO: 180854 - protein, 23 aa, Influenza A virus
MRRNYFTAEVSHCRATEYIMKGV

SEQ ID NO: 180855 - protein, 24 aa, Influenza A virus
MRRNYFTAEVSHCRATEYIMKGVY

SEQ ID NO: 180856 - protein, 25 aa, Influenza A virus
MRRNYFTAEVSHCRATEYIMKGVYI

SEQ ID NO: 180857 - protein, 13 aa, Influenza A virus
NALLKHRFEIIEG

SEQ ID NO: 180858 - protein, 14 aa, Influenza A virus
NALLKHRFEIIEGR

SEQ ID NO: 180859 - protein, 15 aa, Influenza A virus
NALLKHRFEIIEGRD

SEQ ID NO: 180860 - protein, 16 aa, Influenza A virus
NALLKHRFEIIEGRDR

SEQ ID NO: 180861 - protein, 17 aa, Influenza A virus
NALLKHRFEIIEGRDRT

SEQ ID NO: 180862 - protein, 18 aa, Influenza A virus
NALLKHRFEIIEGRDRTM

SEQ ID NO: 180863 - protein, 19 aa, Influenza A virus
NALLKHRFEIIEGRDRTMA

SEQ ID NO: 180864 - protein, 20 aa, Influenza A virus
NALLKHRFEIIEGRDRTMAW

SEQ ID NO: 180865 - protein, 21 aa, Influenza A virus
NALLKHRFEIIEGRDRTMAWT

SEQ ID NO: 180866 - protein, 22 aa, Influenza A virus
NALLKHRFEIIEGRDRTMAWTV

SEQ ID NO: 180867 - protein, 23 aa, Influenza A virus
NALLKHRFEIIEGRDRTMAWTVV

SEQ ID NO: 180868 - protein, 24 aa, Influenza A virus
NALLKHRFEIIEGRDRTMAWTVVN

SEQ ID NO: 180869 - protein, 25 aa, Influenza A virus
NALLKHRFEIIEGRDRTMAWTVVNS

SEQ ID NO: 180870 - protein, 14 aa, Influenza A virus
NASCAAMDDFQLIP

SEQ ID NO: 180871 - protein, 15 aa, Influenza A virus
NASCAAMDDFQLIPM

SEQ ID NO: 180872 - protein, 16 aa, Influenza A virus
NASCAAMDDFQLIPMI

SEQ ID NO: 180873 - protein, 17 aa, Influenza A virus
NASCAAMDDFQLIPMIS

SEQ ID NO: 180874 - protein, 18 aa, Influenza A virus
NASCAAMDDFQLIPMISK

SEQ ID NO: 180875 - protein, 19 aa, Influenza A virus
NASCAAMDDFQLIPMISKC

SEQ ID NO: 180876 - protein, 20 aa, Influenza A virus
NASCAAMDDFQLIPMISKCR

SEQ ID NO: 180877 - protein, 21 aa, Influenza A virus
NASCAAMDDFQLIPMISKCRT

SEQ ID NO: 180878 - protein, 22 aa, Influenza A virus
NASCAAMDDFQLIPMISKCRTK

SEQ ID NO: 180879 - protein, 23 aa, Influenza A virus
NASCAAMDDFQLIPMISKCRTKE

SEQ ID NO: 180880 - protein, 24 aa, Influenza A virus
NASCAAMDDFQLIPMISKCRTKEG

SEQ ID NO: 180881 - protein, 25 aa, Influenza A virus
NASCAAMDDFQLIPMISKCRTKEGR

SEQ ID NO: 180882 - protein, 13 aa, Influenza A virus
NASWFNSFLTHAL

SEQ ID NO: 180883 - protein, 13 aa, Influenza A virus
NDPWVLLNASWFN

SEQ ID NO: 180884 - protein, 14 aa, Influenza A virus
NDPWVLLNASWFNS

SEQ ID NO: 180885 - protein, 15 aa, Influenza A virus
NDPWVLLNASWFNSF

SEQ ID NO: 180886 - protein, 16 aa, Influenza A virus
NDPWVLLNASWFNSFL

SEQ ID NO: 180887 - protein, 17 aa, Influenza A virus
NDPWVLLNASWFNSFLT

SEQ ID NO: 180888 - protein, 18 aa, Influenza A virus
NDPWVLLNASWFNSFLTH

SEQ ID NO: 180889 - protein, 19 aa, Influenza A virus
NDPWVLLNASWFNSFLTHA

SEQ ID NO: 180890 - protein, 20 aa, Influenza A virus
NDPWVLLNASWFNSFLTHAL

SEQ ID NO: 180891 - protein, 14 aa, Influenza A virus
NDTDVVNFVSMEFS

SEQ ID NO: 180892 - protein, 15 aa, Influenza A virus
NDTDVVNFVSMEFSL

SEQ ID NO: 180893 - protein, 16 aa, Influenza A virus
NDTDVVNFVSMEFSLT

SEQ ID NO: 180894 - protein, 17 aa, Influenza A virus
NDTDVVNFVSMEFSLTD

SEQ ID NO: 180895 - protein, 18 aa, Influenza A virus
NDTDVVNFVSMEFSLTDP

SEQ ID NO: 180896 - protein, 19 aa, Influenza A virus
NDTDVVNFVSMEFSLTDPR

SEQ ID NO: 180897 - protein, 20 aa, Influenza A virus
NDTDVVNFVSMEFSLTDPRL

SEQ ID NO: 180898 - protein, 21 aa, Influenza A virus
NDTDVVNFVSMEFSLTDPRLE

SEQ ID NO: 180899 - protein, 22 aa, Influenza A virus
NDTDVVNFVSMEFSLTDPRLEP

SEQ ID NO: 180900 - protein, 23 aa, Influenza A virus
NDTDVVNFVSMEFSLTDPRLEPH

SEQ ID NO: 180901 - protein, 24 aa, Influenza A virus
NDTDVVNFVSMEFSLTDPRLEPHK

SEQ ID NO: 180902 - protein, 25 aa, Influenza A virus
NDTDVVNFVSMEFSLTDPRLEPHKW

SEQ ID NO: 180903 - protein, 13 aa, Influenza A virus
NFRAYVDGFEPNG

SEQ ID NO: 180904 - protein, 13 aa, Influenza A virus
NFVSMEFSLTDPR

SEQ ID NO: 180905 - protein, 14 aa, Influenza A virus
NFVSMEFSLTDPRL

SEQ ID NO: 180906 - protein, 15 aa, Influenza A virus
NFVSMEFSLTDPRLE

SEQ ID NO: 180907 - protein, 16 aa, Influenza A virus
NFVSMEFSLTDPRLEP

SEQ ID NO: 180908 - protein, 17 aa, Influenza A virus
NFVSMEFSLTDPRLEPH

SEQ ID NO: 180909 - protein, 18 aa, Influenza A virus
NFVSMEFSLTDPRLEPHK

SEQ ID NO: 180910 - protein, 19 aa, Influenza A virus
NFVSMEFSLTDPRLEPHKW

SEQ ID NO: 180911 - protein, 20 aa, Influenza A virus
NFVSMEFSLTDPRLEPHKWE

SEQ ID NO: 180912 - protein, 21 aa, Influenza A virus
NFVSMEFSLTDPRLEPHKWEK

SEQ ID NO: 180913 - protein, 22 aa, Influenza A virus
NFVSMEFSLTDPRLEPHKWEKY

SEQ ID NO: 180914 - protein, 23 aa, Influenza A virus
NFVSMEFSLTDPRLEPHKWEKYC

SEQ ID NO: 180915 - protein, 24 aa, Influenza A virus
NFVSMEFSLTDPRLEPHKWEKYCV

SEQ ID NO: 180916 - protein, 25 aa, Influenza A virus
NFVSMEFSLTDPRLEPHKWEKYCVL

SEQ ID NO: 180917 - protein, 15 aa, Influenza A virus
NGTSKIKMKWGMEMR

SEQ ID NO: 180918 - protein, 16 aa, Influenza A virus
NGTSKIKMKWGMEMRR

SEQ ID NO: 180919 - protein, 17 aa, Influenza A virus
NGTSKIKMKWGMEMRRC

SEQ ID NO: 180920 - protein, 18 aa, Influenza A virus
NGTSKIKMKWGMEMRRCL

SEQ ID NO: 180921 - protein, 19 aa, Influenza A virus
NGTSKIKMKWGMEMRRCLL

SEQ ID NO: 180922 - protein, 20 aa, Influenza A virus
NGTSKIKMKWGMEMRRCLLQ

SEQ ID NO: 180923 - protein, 21 aa, Influenza A virus
NGTSKIKMKWGMEMRRCLLQS

SEQ ID NO: 180924 - protein, 22 aa, Influenza A virus
NGTSKIKMKWGMEMRRCLLQSL

SEQ ID NO: 180925 - protein, 23 aa, Influenza A virus
NGTSKIKMKWGMEMRRCLLQSLQ

SEQ ID NO: 180926 - protein, 24 aa, Influenza A virus
NGTSKIKMKWGMEMRRCLLQSLQQ

SEQ ID NO: 180927 - protein, 25 aa, Influenza A virus
NGTSKIKMKWGMEMRRCLLQSLQQI

SEQ ID NO: 180928 - protein, 13 aa, Influenza A virus
NKFAAICTHLEVC

SEQ ID NO: 180929 - protein, 14 aa, Influenza A virus
NKFAAICTHLEVCF

SEQ ID NO: 180930 - protein, 15 aa, Influenza A virus
NKFAAICTHLEVCFM

SEQ ID NO: 180931 - protein, 16 aa, Influenza A virus
NKFAAICTHLEVCFMY

SEQ ID NO: 180932 - protein, 17 aa, Influenza A virus
NKFAAICTHLEVCFMYS

SEQ ID NO: 180933 - protein, 18 aa, Influenza A virus
NKFAAICTHLEVCFMYSD

SEQ ID NO: 180934 - protein, 19 aa, Influenza A virus
NKFAAICTHLEVCFMYSDF

SEQ ID NO: 180935 - protein, 20 aa, Influenza A virus
NKFAAICTHLEVCFMYSDFH

SEQ ID NO: 180936 - protein, 21 aa, Influenza A virus
NKFAAICTHLEVCFMYSDFHF

SEQ ID NO: 180937 - protein, 22 aa, Influenza A virus
NKFAAICTHLEVCFMYSDFHFI

SEQ ID NO: 180938 - protein, 13 aa, Influenza A virus
NLYGFIIKGRSHL

SEQ ID NO: 180939 - protein, 14 aa, Influenza A virus
NLYGFIIKGRSHLR

SEQ ID NO: 180940 - protein, 15 aa, Influenza A virus
NLYGFIIKGRSHLRN

SEQ ID NO: 180941 - protein, 16 aa, Influenza A virus
NLYGFIIKGRSHLRND

SEQ ID NO: 180942 - protein, 17 aa, Influenza A virus
NLYGFIIKGRSHLRNDT

SEQ ID NO: 180943 - protein, 18 aa, Influenza A virus
NLYGFIIKGRSHLRNDTD

SEQ ID NO: 180944 - protein, 19 aa, Influenza A virus
NLYGFIIKGRSHLRNDTDV

SEQ ID NO: 180945 - protein, 20 aa, Influenza A virus
NLYGFIIKGRSHLRNDTDVV

SEQ ID NO: 180946 - protein, 21 aa, Influenza A virus
NLYGFIIKGRSHLRNDTDVVN

SEQ ID NO: 180947 - protein, 22 aa, Influenza A virus
NLYGFIIKGRSHLRNDTDVVNF

SEQ ID NO: 180948 - protein, 23 aa, Influenza A virus
NLYGFIIKGRSHLRNDTDVVNFV

SEQ ID NO: 180949 - protein, 24 aa, Influenza A virus
NLYGFIIKGRSHLRNDTDVVNFVS

SEQ ID NO: 180950 - protein, 25 aa, Influenza A virus
NLYGFIIKGRSHLRNDTDVVNFVSM

SEQ ID NO: 180951 - protein, 15 aa, Influenza A virus
NMKKTSQLKWALGEN

SEQ ID NO: 180952 - protein, 16 aa, Influenza A virus
NMKKTSQLKWALGENM

SEQ ID NO: 180953 - protein, 17 aa, Influenza A virus
NMKKTSQLKWALGENMA

SEQ ID NO: 180954 - protein, 18 aa, Influenza A virus
NMKKTSQLKWALGENMAP

SEQ ID NO: 180955 - protein, 19 aa, Influenza A virus
NMKKTSQLKWALGENMAPE

SEQ ID NO: 180956 - protein, 20 aa, Influenza A virus
NMKKTSQLKWALGENMAPEK

SEQ ID NO: 180957 - protein, 21 aa, Influenza A virus
NMKKTSQLKWALGENMAPEKV

SEQ ID NO: 180958 - protein, 22 aa, Influenza A virus
NMKKTSQLKWALGENMAPEKVD

SEQ ID NO: 180959 - protein, 23 aa, Influenza A virus
NMKKTSQLKWALGENMAPEKVDF

SEQ ID NO: 180960 - protein, 13 aa, Influenza A virus
NPMIVELAEKAMK

SEQ ID NO: 180961 - protein, 14 aa, Influenza A virus
NPMIVELAEKAMKE

SEQ ID NO: 180962 - protein, 15 aa, Influenza A virus
NPMIVELAEKAMKEY

SEQ ID NO: 180963 - protein, 16 aa, Influenza A virus
NPMIVELAEKAMKEYG

SEQ ID NO: 180964 - protein, 17 aa, Influenza A virus
NPMIVELAEKAMKEYGE

SEQ ID NO: 180965 - protein, 14 aa, Influenza A virus
NRFIEIGVTRREVH

SEQ ID NO: 180966 - protein, 14 aa, Influenza A virus
NSLYASPQLEGFSA

SEQ ID NO: 180967 - protein, 15 aa, Influenza A virus
NSLYASPQLEGFSAE

SEQ ID NO: 180968 - protein, 16 aa, Influenza A virus
NSLYASPQLEGFSAES

SEQ ID NO: 180969 - protein, 17 aa, Influenza A virus
NSLYASPQLEGFSAESR

SEQ ID NO: 180970 - protein, 19 aa, Influenza A virus
NSLYASPQLEGFSAESRKL

SEQ ID NO: 180971 - protein, 20 aa, Influenza A virus
NSLYASPQLEGFSAESRKLL

SEQ ID NO: 180972 - protein, 21 aa, Influenza A virus
NSLYASPQLEGFSAESRKLLL

SEQ ID NO: 180973 - protein, 13 aa, Influenza A virus
NTALLNASCAAMD

SEQ ID NO: 180974 - protein, 14 aa, Influenza A virus
NTALLNASCAAMDD

SEQ ID NO: 180975 - protein, 15 aa, Influenza A virus
NTALLNASCAAMDDF

SEQ ID NO: 180976 - protein, 16 aa, Influenza A virus
NTALLNASCAAMDDFQ

SEQ ID NO: 180977 - protein, 17 aa, Influenza A virus
NTALLNASCAAMDDFQL

SEQ ID NO: 180978 - protein, 18 aa, Influenza A virus
NTALLNASCAAMDDFQLI

SEQ ID NO: 180979 - protein, 19 aa, Influenza A virus
NTALLNASCAAMDDFQLIP

SEQ ID NO: 180980 - protein, 20 aa, Influenza A virus
NTALLNASCAAMDDFQLIPM

SEQ ID NO: 180981 - protein, 21 aa, Influenza A virus
NTALLNASCAAMDDFQLIPMI

SEQ ID NO: 180982 - protein, 22 aa, Influenza A virus
NTALLNASCAAMDDFQLIPMIS

SEQ ID NO: 180983 - protein, 23 aa, Influenza A virus
NTALLNASCAAMDDFQLIPMISK

SEQ ID NO: 180984 - protein, 24 aa, Influenza A virus
NTALLNASCAAMDDFQLIPMISKC

SEQ ID NO: 180985 - protein, 25 aa, Influenza A virus
NTALLNASCAAMDDFQLIPMISKCR

SEQ ID NO: 180986 - protein, 14 aa, Influenza A virus
NYFTAEVSHCRATE

SEQ ID NO: 180987 - protein, 15 aa, Influenza A virus
NYFTAEVSHCRATEY

SEQ ID NO: 180988 - protein, 16 aa, Influenza A virus
NYFTAEVSHCRATEYI

SEQ ID NO: 180989 - protein, 17 aa, Influenza A virus
NYFTAEVSHCRATEYIM

SEQ ID NO: 180990 - protein, 19 aa, Influenza A virus
NYFTAEVSHCRATEYIMKG

SEQ ID NO: 180991 - protein, 20 aa, Influenza A virus
NYFTAEVSHCRATEYIMKGV

SEQ ID NO: 180992 - protein, 21 aa, Influenza A virus
NYFTAEVSHCRATEYIMKGVY

SEQ ID NO: 180993 - protein, 22 aa, Influenza A virus
NYFTAEVSHCRATEYIMKGVYI

SEQ ID NO: 180994 - protein, 23 aa, Influenza A virus
NYFTAEVSHCRATEYIMKGVYIN

SEQ ID NO: 180995 - protein, 24 aa, Influenza A virus
NYFTAEVSHCRATEYIMKGVYINT

SEQ ID NO: 180996 - protein, 25 aa, Influenza A virus
NYFTAEVSHCRATEYIMKGVYINTA

SEQ ID NO: 180997 - protein, 14 aa, Influenza A virus
PDLYDYKENRFIEI

SEQ ID NO: 180998 - protein, 15 aa, Influenza A virus
PDLYDYKENRFIEIG

SEQ ID NO: 180999 - protein, 16 aa, Influenza A virus
PDLYDYKENRFIEIGV

SEQ ID NO: 181000 - protein, 17 aa, Influenza A virus
PDLYDYKENRFIEIGVT

SEQ ID NO: 181001 - protein, 18 aa, Influenza A virus
PDLYDYKENRFIEIGVTR

SEQ ID NO: 181002 - protein, 19 aa, Influenza A virus
PDLYDYKENRFIEIGVTRR

SEQ ID NO: 181003 - protein, 20 aa, Influenza A virus
PDLYDYKENRFIEIGVTRRE

SEQ ID NO: 181004 - protein, 21 aa, Influenza A virus
PDLYDYKENRFIEIGVTRREV

SEQ ID NO: 181005 - protein, 22 aa, Influenza A virus
PDLYDYKENRFIEIGVTRREVH

SEQ ID NO: 181006 - protein, 13 aa, Influenza A virus
PHKWEKYCVLEIG

SEQ ID NO: 181007 - protein, 14 aa, Influenza A virus
PHKWEKYCVLEIGD

SEQ ID NO: 181008 - protein, 15 aa, Influenza A virus
PHKWEKYCVLEIGDM

SEQ ID NO: 181009 - protein, 16 aa, Influenza A virus
PHKWEKYCVLEIGDML

SEQ ID NO: 181010 - protein, 20 aa, Influenza A virus
PIGESPKGVEEGSIGKVCRT

SEQ ID NO: 181011 - protein, 23 aa, Influenza A virus
PIGESPKGVEEGSIGKVCRTLLA

SEQ ID NO: 181012 - protein, 24 aa, Influenza A virus
PIGESPKGVEEGSIGKVCRTLLAK

SEQ ID NO: 181013 - protein, 25 aa, Influenza A virus
PIGESPKGVEEGSIGKVCRTLLAKS

SEQ ID NO: 181014 - protein, 14 aa, Influenza A virus
PKGVEEGSIGKVCR

SEQ ID NO: 181015 - protein, 15 aa, Influenza A virus
PKGVEEGSIGKVCRT

SEQ ID NO: 181016 - protein, 16 aa, Influenza A virus
PKGVEEGSIGKVCRTL

SEQ ID NO: 181017 - protein, 17 aa, Influenza A virus
PKGVEEGSIGKVCRTLL

SEQ ID NO: 181018 - protein, 19 aa, Influenza A virus
PKGVEEGSIGKVCRTLLAK

SEQ ID NO: 181019 - protein, 20 aa, Influenza A virus
PKGVEEGSIGKVCRTLLAKS

SEQ ID NO: 181020 - protein, 21 aa, Influenza A virus
PKGVEEGSIGKVCRTLLAKSV

SEQ ID NO: 181021 - protein, 22 aa, Influenza A virus
PKGVEEGSIGKVCRTLLAKSVF

SEQ ID NO: 181022 - protein, 23 aa, Influenza A virus
PKGVEEGSIGKVCRTLLAKSVFN

SEQ ID NO: 181023 - protein, 24 aa, Influenza A virus
PKGVEEGSIGKVCRTLLAKSVFNS

SEQ ID NO: 181024 - protein, 25 aa, Influenza A virus
PKGVEEGSIGKVCRTLLAKSVFNSL

SEQ ID NO: 181025 - protein, 13 aa, Influenza A virus
PMFLYVRTNGTSK

SEQ ID NO: 181026 - protein, 14 aa, Influenza A virus
PMFLYVRTNGTSKI

SEQ ID NO: 181027 - protein, 15 aa, Influenza A virus
PMFLYVRTNGTSKIK

SEQ ID NO: 181028 - protein, 16 aa, Influenza A virus
PMFLYVRTNGTSKIKM

SEQ ID NO: 181029 - protein, 17 aa, Influenza A virus
PMFLYVRTNGTSKIKMK

SEQ ID NO: 181030 - protein, 18 aa, Influenza A virus
PMFLYVRTNGTSKIKMKW

SEQ ID NO: 181031 - protein, 19 aa, Influenza A virus
PMFLYVRTNGTSKIKMKWG

SEQ ID NO: 181032 - protein, 20 aa, Influenza A virus
PMFLYVRTNGTSKIKMKWGM

SEQ ID NO: 181033 - protein, 21 aa, Influenza A virus
PMFLYVRTNGTSKIKMKWGME

SEQ ID NO: 181034 - protein, 22 aa, Influenza A virus
PMFLYVRTNGTSKIKMKWGMEM

SEQ ID NO: 181035 - protein, 23 aa, Influenza A virus
PMFLYVRTNGTSKIKMKWGMEMR

SEQ ID NO: 181036 - protein, 24 aa, Influenza A virus
PMFLYVRTNGTSKIKMKWGMEMRR

SEQ ID NO: 181037 - protein, 25 aa, Influenza A virus
PMFLYVRTNGTSKIKMKWGMEMRRC

SEQ ID NO: 181038 - protein, 15 aa, Influenza A virus
PMISKCRTKEGRRKT

SEQ ID NO: 181039 - protein, 17 aa, Influenza A virus
PMISKCRTKEGRRKTNL

SEQ ID NO: 181040 - protein, 22 aa, Influenza A virus
PMISKCRTKEGRRKTNLYGFII

SEQ ID NO: 181041 - protein, 23 aa, Influenza A virus
PMISKCRTKEGRRKTNLYGFIIK

SEQ ID NO: 181042 - protein, 24 aa, Influenza A virus
PMISKCRTKEGRRKTNLYGFIIKG

SEQ ID NO: 181043 - protein, 25 aa, Influenza A virus
PMISKCRTKEGRRKTNLYGFIIKGR

SEQ ID NO: 181044 - protein, 13 aa, Influenza A virus
PMIVELAEKAMKE

SEQ ID NO: 181045 - protein, 14 aa, Influenza A virus
PMIVELAEKAMKEY

SEQ ID NO: 181046 - protein, 15 aa, Influenza A virus
PMIVELAEKAMKEYG

SEQ ID NO: 181047 - protein, 16 aa, Influenza A virus
PMIVELAEKAMKEYGE

SEQ ID NO: 181048 - protein, 13 aa, Influenza A virus
PNALLKHRFEIIE

SEQ ID NO: 181049 - protein, 14 aa, Influenza A virus
PNALLKHRFEIIEG

SEQ ID NO: 181050 - protein, 15 aa, Influenza A virus
PNALLKHRFEIIEGR

SEQ ID NO: 181051 - protein, 16 aa, Influenza A virus
PNALLKHRFEIIEGRD

SEQ ID NO: 181052 - protein, 17 aa, Influenza A virus
PNALLKHRFEIIEGRDR

SEQ ID NO: 181053 - protein, 18 aa, Influenza A virus
PNALLKHRFEIIEGRDRT

SEQ ID NO: 181054 - protein, 19 aa, Influenza A virus
PNALLKHRFEIIEGRDRTM

SEQ ID NO: 181055 - protein, 20 aa, Influenza A virus
PNALLKHRFEIIEGRDRTMA

SEQ ID NO: 181056 - protein, 21 aa, Influenza A virus
PNALLKHRFEIIEGRDRTMAW

SEQ ID NO: 181057 - protein, 22 aa, Influenza A virus
PNALLKHRFEIIEGRDRTMAWT

SEQ ID NO: 181058 - protein, 23 aa, Influenza A virus
PNALLKHRFEIIEGRDRTMAWTV

SEQ ID NO: 181059 - protein, 24 aa, Influenza A virus
PNALLKHRFEIIEGRDRTMAWTVV

SEQ ID NO: 181060 - protein, 25 aa, Influenza A virus
PNALLKHRFEIIEGRDRTMAWTVVN

SEQ ID NO: 181061 - protein, 14 aa, Influenza A virus
PQLEGFSAESRKLL

SEQ ID NO: 181062 - protein, 15 aa, Influenza A virus
PQLEGFSAESRKLLL

SEQ ID NO: 181063 - protein, 14 aa, Influenza A virus
PRLEPHKWEKYCVL

SEQ ID NO: 181064 - protein, 15 aa, Influenza A virus
PRLEPHKWEKYCVLE

SEQ ID NO: 181065 - protein, 16 aa, Influenza A virus
PRLEPHKWEKYCVLEI

SEQ ID NO: 181066 - protein, 17 aa, Influenza A virus
PRLEPHKWEKYCVLEIG

SEQ ID NO: 181067 - protein, 18 aa, Influenza A virus
PRLEPHKWEKYCVLEIGD

SEQ ID NO: 181068 - protein, 19 aa, Influenza A virus
PRLEPHKWEKYCVLEIGDM

SEQ ID NO: 181069 - protein, 13 aa, Influenza A virus
PWVLLNASWFNSF

SEQ ID NO: 181070 - protein, 14 aa, Influenza A virus
PWVLLNASWFNSFL

SEQ ID NO: 181071 - protein, 15 aa, Influenza A virus
PWVLLNASWFNSFLT

SEQ ID NO: 181072 - protein, 16 aa, Influenza A virus
PWVLLNASWFNSFLTH

SEQ ID NO: 181073 - protein, 17 aa, Influenza A virus
PWVLLNASWFNSFLTHA

SEQ ID NO: 181074 - protein, 18 aa, Influenza A virus
PWVLLNASWFNSFLTHAL

SEQ ID NO: 181075 - protein, 13 aa, Influenza A virus
QCFNPMIVELAEK

SEQ ID NO: 181076 - protein, 14 aa, Influenza A virus
QCFNPMIVELAEKA

SEQ ID NO: 181077 - protein, 15 aa, Influenza A virus
QCFNPMIVELAEKAM

SEQ ID NO: 181078 - protein, 16 aa, Influenza A virus
QCFNPMIVELAEKAMK

SEQ ID NO: 181079 - protein, 17 aa, Influenza A virus
QCFNPMIVELAEKAMKE

SEQ ID NO: 181080 - protein, 18 aa, Influenza A virus
QCFNPMIVELAEKAMKEY

SEQ ID NO: 181081 - protein, 19 aa, Influenza A virus
QCFNPMIVELAEKAMKEYG

SEQ ID NO: 181082 - protein, 20 aa, Influenza A virus
QCFNPMIVELAEKAMKEYGE

SEQ ID NO: 181083 - protein, 15 aa, Influenza A virus
QIESMIEAESSVKEK

SEQ ID NO: 181084 - protein, 16 aa, Influenza A virus
QIESMIEAESSVKEKD

SEQ ID NO: 181085 - protein, 20 aa, Influenza A virus
QIESMIEAESSVKEKDMTKE

SEQ ID NO: 181086 - protein, 14 aa, Influenza A virus
QLEGFSAESRKLLL

SEQ ID NO: 181087 - protein, 13 aa, Influenza A virus
QLIPMISKCRTKE

SEQ ID NO: 181088 - protein, 14 aa, Influenza A virus
QLIPMISKCRTKEG

SEQ ID NO: 181089 - protein, 15 aa, Influenza A virus
QLIPMISKCRTKEGR

SEQ ID NO: 181090 - protein, 16 aa, Influenza A virus
QLIPMISKCRTKEGRR

SEQ ID NO: 181091 - protein, 17 aa, Influenza A virus
QLIPMISKCRTKEGRRK

SEQ ID NO: 181092 - protein, 18 aa, Influenza A virus
QLIPMISKCRTKEGRRKT

SEQ ID NO: 181093 - protein, 19 aa, Influenza A virus
QLIPMISKCRTKEGRRKTN

SEQ ID NO: 181094 - protein, 20 aa, Influenza A virus
QLIPMISKCRTKEGRRKTNL

SEQ ID NO: 181095 - protein, 21 aa, Influenza A virus
QLIPMISKCRTKEGRRKTNLY

SEQ ID NO: 181096 - protein, 22 aa, Influenza A virus
QLIPMISKCRTKEGRRKTNLYG

SEQ ID NO: 181097 - protein, 23 aa, Influenza A virus
QLIPMISKCRTKEGRRKTNLYGF

SEQ ID NO: 181098 - protein, 24 aa, Influenza A virus
QLIPMISKCRTKEGRRKTNLYGFI

SEQ ID NO: 181099 - protein, 25 aa, Influenza A virus
QLIPMISKCRTKEGRRKTNLYGFII

SEQ ID NO: 181100 - protein, 14 aa, Influenza A virus
QLKWALGENMAPEK

SEQ ID NO: 181101 - protein, 15 aa, Influenza A virus
QLKWALGENMAPEKV

SEQ ID NO: 181102 - protein, 16 aa, Influenza A virus
QLKWALGENMAPEKVD

SEQ ID NO: 181103 - protein, 17 aa, Influenza A virus
QLKWALGENMAPEKVDF

SEQ ID NO: 181104 - protein, 14 aa, Influenza A virus
QQIESMIEAESSVK

SEQ ID NO: 181105 - protein, 15 aa, Influenza A virus
QQIESMIEAESSVKE

SEQ ID NO: 181106 - protein, 16 aa, Influenza A virus
QQIESMIEAESSVKEK

SEQ ID NO: 181107 - protein, 17 aa, Influenza A virus
QQIESMIEAESSVKEKD

SEQ ID NO: 181108 - protein, 19 aa, Influenza A virus
QQIESMIEAESSVKEKDMT

SEQ ID NO: 181109 - protein, 20 aa, Influenza A virus
QQIESMIEAESSVKEKDMTK

SEQ ID NO: 181110 - protein, 21 aa, Influenza A virus
QQIESMIEAESSVKEKDMTKE

SEQ ID NO: 181111 - protein, 22 aa, Influenza A virus
QQIESMIEAESSVKEKDMTKEF

SEQ ID NO: 181112 - protein, 23 aa, Influenza A virus
QQIESMIEAESSVKEKDMTKEFF

SEQ ID NO: 181113 - protein, 24 aa, Influenza A virus
QQIESMIEAESSVKEKDMTKEFFE

SEQ ID NO: 181114 - protein, 25 aa, Influenza A virus
QQIESMIEAESSVKEKDMTKEFFEN

SEQ ID NO: 181115 - protein, 13 aa, Influenza A virus
QRSKFLLMDALKL

SEQ ID NO: 181116 - protein, 14 aa, Influenza A virus
QRSKFLLMDALKLS

SEQ ID NO: 181117 - protein, 15 aa, Influenza A virus
QRSKFLLMDALKLSI

SEQ ID NO: 181118 - protein, 16 aa, Influenza A virus
QRSKFLLMDALKLSIE

SEQ ID NO: 181119 - protein, 17 aa, Influenza A virus
QRSKFLLMDALKLSIED

SEQ ID NO: 181120 - protein, 18 aa, Influenza A virus
QRSKFLLMDALKLSIEDP

SEQ ID NO: 181121 - protein, 19 aa, Influenza A virus
QRSKFLLMDALKLSIEDPS

SEQ ID NO: 181122 - protein, 20 aa, Influenza A virus
QRSKFLLMDALKLSIEDPSH

SEQ ID NO: 181123 - protein, 21 aa, Influenza A virus
QRSKFLLMDALKLSIEDPSHE

SEQ ID NO: 181124 - protein, 22 aa, Influenza A virus
QRSKFLLMDALKLSIEDPSHEG

SEQ ID NO: 181125 - protein, 23 aa, Influenza A virus
QRSKFLLMDALKLSIEDPSHEGE

SEQ ID NO: 181126 - protein, 24 aa, Influenza A virus
QRSKFLLMDALKLSIEDPSHEGEG

SEQ ID NO: 181127 - protein, 25 aa, Influenza A virus
QRSKFLLMDALKLSIEDPSHEGEGI

SEQ ID NO: 181128 - protein, 20 aa, Influenza A virus
QSERGEETIEERFEITGTMR

SEQ ID NO: 181129 - protein, 14 aa, Influenza A virus
QSLQQIESMIEAES

SEQ ID NO: 181130 - protein, 15 aa, Influenza A virus
QSLQQIESMIEAESS

SEQ ID NO: 181131 - protein, 16 aa, Influenza A virus
QSLQQIESMIEAESSV

SEQ ID NO: 181132 - protein, 17 aa, Influenza A virus
QSLQQIESMIEAESSVK

SEQ ID NO: 181133 - protein, 18 aa, Influenza A virus
QSLQQIESMIEAESSVKE

SEQ ID NO: 181134 - protein, 19 aa, Influenza A virus
QSLQQIESMIEAESSVKEK

SEQ ID NO: 181135 - protein, 20 aa, Influenza A virus
QSLQQIESMIEAESSVKEKD

SEQ ID NO: 181136 - protein, 21 aa, Influenza A virus
QSLQQIESMIEAESSVKEKDM

SEQ ID NO: 181137 - protein, 22 aa, Influenza A virus
QSLQQIESMIEAESSVKEKDMT

SEQ ID NO: 181138 - protein, 23 aa, Influenza A virus
QSLQQIESMIEAESSVKEKDMTK

SEQ ID NO: 181139 - protein, 24 aa, Influenza A virus
QSLQQIESMIEAESSVKEKDMTKE

SEQ ID NO: 181140 - protein, 25 aa, Influenza A virus
QSLQQIESMIEAESSVKEKDMTKEF

SEQ ID NO: 181141 - protein, 13 aa, Influenza A virus
RARIKTRLFTIRQ

SEQ ID NO: 181142 - protein, 14 aa, Influenza A virus
RARIKTRLFTIRQE

SEQ ID NO: 181143 - protein, 15 aa, Influenza A virus
RARIKTRLFTIRQEM

SEQ ID NO: 181144 - protein, 16 aa, Influenza A virus
RARIKTRLFTIRQEMA

SEQ ID NO: 181145 - protein, 13 aa, Influenza A virus
RATEYIMKGVYIN

SEQ ID NO: 181146 - protein, 14 aa, Influenza A virus
RATEYIMKGVYINT

SEQ ID NO: 181147 - protein, 15 aa, Influenza A virus
RATEYIMKGVYINTA

SEQ ID NO: 181148 - protein, 16 aa, Influenza A virus
RATEYIMKGVYINTAL

SEQ ID NO: 181149 - protein, 17 aa, Influenza A virus
RATEYIMKGVYINTALL

SEQ ID NO: 181150 - protein, 18 aa, Influenza A virus
RATEYIMKGVYINTALLN

SEQ ID NO: 181151 - protein, 19 aa, Influenza A virus
RATEYIMKGVYINTALLNA

SEQ ID NO: 181152 - protein, 20 aa, Influenza A virus
RATEYIMKGVYINTALLNAS

SEQ ID NO: 181153 - protein, 21 aa, Influenza A virus
RATEYIMKGVYINTALLNASC

SEQ ID NO: 181154 - protein, 22 aa, Influenza A virus
RATEYIMKGVYINTALLNASCA

SEQ ID NO: 181155 - protein, 23 aa, Influenza A virus
RATEYIMKGVYINTALLNASCAA

SEQ ID NO: 181156 - protein, 24 aa, Influenza A virus
RATEYIMKGVYINTALLNASCAAM

SEQ ID NO: 181157 - protein, 25 aa, Influenza A virus
RATEYIMKGVYINTALLNASCAAMD

SEQ ID NO: 181158 - protein, 13 aa, Influenza A virus
RCLLQSLQQIESM

SEQ ID NO: 181159 - protein, 14 aa, Influenza A virus
RCLLQSLQQIESMI

SEQ ID NO: 181160 - protein, 15 aa, Influenza A virus
RCLLQSLQQIESMIE

SEQ ID NO: 181161 - protein, 16 aa, Influenza A virus
RCLLQSLQQIESMIEA

SEQ ID NO: 181162 - protein, 17 aa, Influenza A virus
RCLLQSLQQIESMIEAE

SEQ ID NO: 181163 - protein, 18 aa, Influenza A virus
RCLLQSLQQIESMIEAES

SEQ ID NO: 181164 - protein, 19 aa, Influenza A virus
RCLLQSLQQIESMIEAESS

SEQ ID NO: 181165 - protein, 20 aa, Influenza A virus
RCLLQSLQQIESMIEAESSV

SEQ ID NO: 181166 - protein, 21 aa, Influenza A virus
RCLLQSLQQIESMIEAESSVK

SEQ ID NO: 181167 - protein, 22 aa, Influenza A virus
RCLLQSLQQIESMIEAESSVKE

SEQ ID NO: 181168 - protein, 23 aa, Influenza A virus
RCLLQSLQQIESMIEAESSVKEK

SEQ ID NO: 181169 - protein, 24 aa, Influenza A virus
RCLLQSLQQIESMIEAESSVKEKD

SEQ ID NO: 181170 - protein, 25 aa, Influenza A virus
RCLLQSLQQIESMIEAESSVKEKDM

SEQ ID NO: 181171 - protein, 13 aa, Influenza A virus
RDRTMAWTVVNSI

SEQ ID NO: 181172 - protein, 14 aa, Influenza A virus
RDRTMAWTVVNSIC

SEQ ID NO: 181173 - protein, 15 aa, Influenza A virus
RDRTMAWTVVNSICN

SEQ ID NO: 181174 - protein, 16 aa, Influenza A virus
RDRTMAWTVVNSICNT

SEQ ID NO: 181175 - protein, 17 aa, Influenza A virus
RDRTMAWTVVNSICNTT

SEQ ID NO: 181176 - protein, 18 aa, Influenza A virus
RDRTMAWTVVNSICNTTG

SEQ ID NO: 181177 - protein, 13 aa, Influenza A virus
REVHIYYLEKANK

SEQ ID NO: 181178 - protein, 14 aa, Influenza A virus
REVHIYYLEKANKI

SEQ ID NO: 181179 - protein, 15 aa, Influenza A virus
REVHIYYLEKANKIK

SEQ ID NO: 181180 - protein, 16 aa, Influenza A virus
REVHIYYLEKANKIKS

SEQ ID NO: 181181 - protein, 17 aa, Influenza A virus
REVHIYYLEKANKIKSE

SEQ ID NO: 181182 - protein, 15 aa, Influenza A virus
RFEIIEGRDRTMAWT

SEQ ID NO: 181183 - protein, 16 aa, Influenza A virus
RFEIIEGRDRTMAWTV

SEQ ID NO: 181184 - protein, 17 aa, Influenza A virus
RFEIIEGRDRTMAWTVV

SEQ ID NO: 181185 - protein, 19 aa, Influenza A virus
RFEIIEGRDRTMAWTVVNS

SEQ ID NO: 181186 - protein, 20 aa, Influenza A virus
RFEIIEGRDRTMAWTVVNSI

SEQ ID NO: 181187 - protein, 21 aa, Influenza A virus
RFEIIEGRDRTMAWTVVNSIC

SEQ ID NO: 181188 - protein, 22 aa, Influenza A virus
RFEIIEGRDRTMAWTVVNSICN

SEQ ID NO: 181189 - protein, 23 aa, Influenza A virus
RFEIIEGRDRTMAWTVVNSICNT

SEQ ID NO: 181190 - protein, 24 aa, Influenza A virus
RFEIIEGRDRTMAWTVVNSICNTT

SEQ ID NO: 181191 - protein, 25 aa, Influenza A virus
RFEIIEGRDRTMAWTVVNSICNTTG

SEQ ID NO: 181192 - protein, 14 aa, Influenza A virus
RFIEIGVTRREVHI

SEQ ID NO: 181193 - protein, 15 aa, Influenza A virus
RFIEIGVTRREVHIY

SEQ ID NO: 181194 - protein, 16 aa, Influenza A virus
RFIEIGVTRREVHIYY

SEQ ID NO: 181195 - protein, 17 aa, Influenza A virus
RFIEIGVTRREVHIYYL

SEQ ID NO: 181196 - protein, 18 aa, Influenza A virus
RFIEIGVTRREVHIYYLE

SEQ ID NO: 181197 - protein, 19 aa, Influenza A virus
RFIEIGVTRREVHIYYLEK

SEQ ID NO: 181198 - protein, 20 aa, Influenza A virus
RFIEIGVTRREVHIYYLEKA

SEQ ID NO: 181199 - protein, 21 aa, Influenza A virus
RFIEIGVTRREVHIYYLEKAN

SEQ ID NO: 181200 - protein, 22 aa, Influenza A virus
RFIEIGVTRREVHIYYLEKANK

SEQ ID NO: 181201 - protein, 16 aa, Influenza A virus
RGEETIEERFEITGTM

SEQ ID NO: 181202 - protein, 17 aa, Influenza A virus
RGEETIEERFEITGTMR

SEQ ID NO: 181203 - protein, 25 aa, Influenza A virus
RGLWDSFRQSERGEETIEERFEITG

SEQ ID NO: 181204 - protein, 13 aa, Influenza A virus
RIKTRLFTIRQEM

SEQ ID NO: 181205 - protein, 14 aa, Influenza A virus
RIKTRLFTIRQEMA

SEQ ID NO: 181206 - protein, 13 aa, Influenza A virus
RKTNLYGFIIKGR

SEQ ID NO: 181207 - protein, 14 aa, Influenza A virus
RKTNLYGFIIKGRS

SEQ ID NO: 181208 - protein, 15 aa, Influenza A virus
RKTNLYGFIIKGRSH

SEQ ID NO: 181209 - protein, 16 aa, Influenza A virus
RKTNLYGFIIKGRSHL

SEQ ID NO: 181210 - protein, 17 aa, Influenza A virus
RKTNLYGFIIKGRSHLR

SEQ ID NO: 181211 - protein, 18 aa, Influenza A virus
RKTNLYGFIIKGRSHLRN

SEQ ID NO: 181212 - protein, 19 aa, Influenza A virus
RKTNLYGFIIKGRSHLRND

SEQ ID NO: 181213 - protein, 20 aa, Influenza A virus
RKTNLYGFIIKGRSHLRNDT

SEQ ID NO: 181214 - protein, 21 aa, Influenza A virus
RKTNLYGFIIKGRSHLRNDTD

SEQ ID NO: 181215 - protein, 22 aa, Influenza A virus
RKTNLYGFIIKGRSHLRNDTDV

SEQ ID NO: 181216 - protein, 23 aa, Influenza A virus
RKTNLYGFIIKGRSHLRNDTDVV

SEQ ID NO: 181217 - protein, 24 aa, Influenza A virus
RKTNLYGFIIKGRSHLRNDTDVVN

SEQ ID NO: 181218 - protein, 25 aa, Influenza A virus
RKTNLYGFIIKGRSHLRNDTDVVNF

SEQ ID NO: 181219 - protein, 15 aa, Influenza A virus
RLEPHKWEKYCVLEI

SEQ ID NO: 181220 - protein, 16 aa, Influenza A virus
RLEPHKWEKYCVLEIG

SEQ ID NO: 181221 - protein, 17 aa, Influenza A virus
RLEPHKWEKYCVLEIGD

SEQ ID NO: 181222 - protein, 18 aa, Influenza A virus
RLEPHKWEKYCVLEIGDM

SEQ ID NO: 181223 - protein, 14 aa, Influenza A virus
RNDTDVVNFVSMEF

SEQ ID NO: 181224 - protein, 15 aa, Influenza A virus
RNDTDVVNFVSMEFS

SEQ ID NO: 181225 - protein, 16 aa, Influenza A virus
RNDTDVVNFVSMEFSL

SEQ ID NO: 181226 - protein, 17 aa, Influenza A virus
RNDTDVVNFVSMEFSLT

SEQ ID NO: 181227 - protein, 18 aa, Influenza A virus
RNDTDVVNFVSMEFSLTD

SEQ ID NO: 181228 - protein, 19 aa, Influenza A virus
RNDTDVVNFVSMEFSLTDP

SEQ ID NO: 181229 - protein, 20 aa, Influenza A virus
RNDTDVVNFVSMEFSLTDPR

SEQ ID NO: 181230 - protein, 21 aa, Influenza A virus
RNDTDVVNFVSMEFSLTDPRL

SEQ ID NO: 181231 - protein, 22 aa, Influenza A virus
RNDTDVVNFVSMEFSLTDPRLE

SEQ ID NO: 181232 - protein, 23 aa, Influenza A virus
RNDTDVVNFVSMEFSLTDPRLEP

SEQ ID NO: 181233 - protein, 24 aa, Influenza A virus
RNDTDVVNFVSMEFSLTDPRLEPH

SEQ ID NO: 181234 - protein, 25 aa, Influenza A virus
RNDTDVVNFVSMEFSLTDPRLEPHK

SEQ ID NO: 181235 - protein, 13 aa, Influenza A virus
RNYFTAEVSHCRA

SEQ ID NO: 181236 - protein, 14 aa, Influenza A virus
RNYFTAEVSHCRAT

SEQ ID NO: 181237 - protein, 15 aa, Influenza A virus
RNYFTAEVSHCRATE

SEQ ID NO: 181238 - protein, 16 aa, Influenza A virus
RNYFTAEVSHCRATEY

SEQ ID NO: 181239 - protein, 17 aa, Influenza A virus
RNYFTAEVSHCRATEYI

SEQ ID NO: 181240 - protein, 18 aa, Influenza A virus
RNYFTAEVSHCRATEYIM

SEQ ID NO: 181241 - protein, 19 aa, Influenza A virus
RNYFTAEVSHCRATEYIMK

SEQ ID NO: 181242 - protein, 20 aa, Influenza A virus
RNYFTAEVSHCRATEYIMKG

SEQ ID NO: 181243 - protein, 21 aa, Influenza A virus
RNYFTAEVSHCRATEYIMKGV

SEQ ID NO: 181244 - protein, 22 aa, Influenza A virus
RNYFTAEVSHCRATEYIMKGVY

SEQ ID NO: 181245 - protein, 23 aa, Influenza A virus
RNYFTAEVSHCRATEYIMKGVYI

SEQ ID NO: 181246 - protein, 24 aa, Influenza A virus
RNYFTAEVSHCRATEYIMKGVYIN

SEQ ID NO: 181247 - protein, 25 aa, Influenza A virus
RNYFTAEVSHCRATEYIMKGVYINT

SEQ ID NO: 181248 - protein, 13 aa, Influenza A virus
RPMFLYVRTNGTS

SEQ ID NO: 181249 - protein, 14 aa, Influenza A virus
RPMFLYVRTNGTSK

SEQ ID NO: 181250 - protein, 15 aa, Influenza A virus
RPMFLYVRTNGTSKI

SEQ ID NO: 181251 - protein, 16 aa, Influenza A virus
RPMFLYVRTNGTSKIK

SEQ ID NO: 181252 - protein, 17 aa, Influenza A virus
RPMFLYVRTNGTSKIKM

SEQ ID NO: 181253 - protein, 18 aa, Influenza A virus
RPMFLYVRTNGTSKIKMK

SEQ ID NO: 181254 - protein, 19 aa, Influenza A virus
RPMFLYVRTNGTSKIKMKW

SEQ ID NO: 181255 - protein, 20 aa, Influenza A virus
RPMFLYVRTNGTSKIKMKWG

SEQ ID NO: 181256 - protein, 21 aa, Influenza A virus
RPMFLYVRTNGTSKIKMKWGM

SEQ ID NO: 181257 - protein, 22 aa, Influenza A virus
RPMFLYVRTNGTSKIKMKWGME

SEQ ID NO: 181258 - protein, 23 aa, Influenza A virus
RPMFLYVRTNGTSKIKMKWGMEM

SEQ ID NO: 181259 - protein, 24 aa, Influenza A virus
RPMFLYVRTNGTSKIKMKWGMEMR

SEQ ID NO: 181260 - protein, 25 aa, Influenza A virus
RPMFLYVRTNGTSKIKMKWGMEMRR

SEQ ID NO: 181261 - protein, 13 aa, Influenza A virus
RQCFNPMIVELAE

SEQ ID NO: 181262 - protein, 14 aa, Influenza A virus
RQCFNPMIVELAEK

SEQ ID NO: 181263 - protein, 15 aa, Influenza A virus
RQCFNPMIVELAEKA

SEQ ID NO: 181264 - protein, 16 aa, Influenza A virus
RQCFNPMIVELAEKAM

SEQ ID NO: 181265 - protein, 17 aa, Influenza A virus
RQCFNPMIVELAEKAMK

SEQ ID NO: 181266 - protein, 18 aa, Influenza A virus
RQCFNPMIVELAEKAMKE

SEQ ID NO: 181267 - protein, 19 aa, Influenza A virus
RQCFNPMIVELAEKAMKEY

SEQ ID NO: 181268 - protein, 20 aa, Influenza A virus
RQCFNPMIVELAEKAMKEYG

SEQ ID NO: 181269 - protein, 21 aa, Influenza A virus
RQCFNPMIVELAEKAMKEYGE

SEQ ID NO: 181270 - protein, 20 aa, Influenza A virus
RQSERGEETIEERFEITGTM

SEQ ID NO: 181271 - protein, 13 aa, Influenza A virus
RRCLLQSLQQIES

SEQ ID NO: 181272 - protein, 14 aa, Influenza A virus
RRCLLQSLQQIESM

SEQ ID NO: 181273 - protein, 15 aa, Influenza A virus
RRCLLQSLQQIESMI

SEQ ID NO: 181274 - protein, 16 aa, Influenza A virus
RRCLLQSLQQIESMIE

SEQ ID NO: 181275 - protein, 17 aa, Influenza A virus
RRCLLQSLQQIESMIEA

SEQ ID NO: 181276 - protein, 18 aa, Influenza A virus
RRCLLQSLQQIESMIEAE

SEQ ID NO: 181277 - protein, 19 aa, Influenza A virus
RRCLLQSLQQIESMIEAES

SEQ ID NO: 181278 - protein, 20 aa, Influenza A virus
RRCLLQSLQQIESMIEAESS

SEQ ID NO: 181279 - protein, 21 aa, Influenza A virus
RRCLLQSLQQIESMIEAESSV

SEQ ID NO: 181280 - protein, 22 aa, Influenza A virus
RRCLLQSLQQIESMIEAESSVK

SEQ ID NO: 181281 - protein, 23 aa, Influenza A virus
RRCLLQSLQQIESMIEAESSVKE

SEQ ID NO: 181282 - protein, 24 aa, Influenza A virus
RRCLLQSLQQIESMIEAESSVKEK

SEQ ID NO: 181283 - protein, 25 aa, Influenza A virus
RRCLLQSLQQIESMIEAESSVKEKD

SEQ ID NO: 181284 - protein, 13 aa, Influenza A virus
RREVHIYYLEKAN

SEQ ID NO: 181285 - protein, 14 aa, Influenza A virus
RREVHIYYLEKANK

SEQ ID NO: 181286 - protein, 15 aa, Influenza A virus
RREVHIYYLEKANKI

SEQ ID NO: 181287 - protein, 16 aa, Influenza A virus
RREVHIYYLEKANKIK

SEQ ID NO: 181288 - protein, 17 aa, Influenza A virus
RREVHIYYLEKANKIKS

SEQ ID NO: 181289 - protein, 18 aa, Influenza A virus
RREVHIYYLEKANKIKSE

SEQ ID NO: 181290 - protein, 14 aa, Influenza A virus
RRKTNLYGFIIKGR

SEQ ID NO: 181291 - protein, 15 aa, Influenza A virus
RRKTNLYGFIIKGRS

SEQ ID NO: 181292 - protein, 16 aa, Influenza A virus
RRKTNLYGFIIKGRSH

SEQ ID NO: 181293 - protein, 17 aa, Influenza A virus
RRKTNLYGFIIKGRSHL

SEQ ID NO: 181294 - protein, 18 aa, Influenza A virus
RRKTNLYGFIIKGRSHLR

SEQ ID NO: 181295 - protein, 19 aa, Influenza A virus
RRKTNLYGFIIKGRSHLRN

SEQ ID NO: 181296 - protein, 20 aa, Influenza A virus
RRKTNLYGFIIKGRSHLRND

SEQ ID NO: 181297 - protein, 21 aa, Influenza A virus
RRKTNLYGFIIKGRSHLRNDT

SEQ ID NO: 181298 - protein, 22 aa, Influenza A virus
RRKTNLYGFIIKGRSHLRNDTD

SEQ ID NO: 181299 - protein, 23 aa, Influenza A virus
RRKTNLYGFIIKGRSHLRNDTDV

SEQ ID NO: 181300 - protein, 24 aa, Influenza A virus
RRKTNLYGFIIKGRSHLRNDTDVV

SEQ ID NO: 181301 - protein, 25 aa, Influenza A virus
RRKTNLYGFIIKGRSHLRNDTDVVN

SEQ ID NO: 181302 - protein, 13 aa, Influenza A virus
RRNYFTAEVSHCR

SEQ ID NO: 181303 - protein, 14 aa, Influenza A virus
RRNYFTAEVSHCRA

SEQ ID NO: 181304 - protein, 15 aa, Influenza A virus
RRNYFTAEVSHCRAT

SEQ ID NO: 181305 - protein, 16 aa, Influenza A virus
RRNYFTAEVSHCRATE

SEQ ID NO: 181306 - protein, 17 aa, Influenza A virus
RRNYFTAEVSHCRATEY

SEQ ID NO: 181307 - protein, 18 aa, Influenza A virus
RRNYFTAEVSHCRATEYI

SEQ ID NO: 181308 - protein, 19 aa, Influenza A virus
RRNYFTAEVSHCRATEYIM

SEQ ID NO: 181309 - protein, 20 aa, Influenza A virus
RRNYFTAEVSHCRATEYIMK

SEQ ID NO: 181310 - protein, 21 aa, Influenza A virus
RRNYFTAEVSHCRATEYIMKG

SEQ ID NO: 181311 - protein, 22 aa, Influenza A virus
RRNYFTAEVSHCRATEYIMKGV

SEQ ID NO: 181312 - protein, 23 aa, Influenza A virus
RRNYFTAEVSHCRATEYIMKGVY

SEQ ID NO: 181313 - protein, 24 aa, Influenza A virus
RRNYFTAEVSHCRATEYIMKGVYI

SEQ ID NO: 181314 - protein, 25 aa, Influenza A virus
RRNYFTAEVSHCRATEYIMKGVYIN

SEQ ID NO: 181315 - protein, 14 aa, Influenza A virus
RSHLRNDTDVVNFV

SEQ ID NO: 181316 - protein, 15 aa, Influenza A virus
RSHLRNDTDVVNFVS

SEQ ID NO: 181317 - protein, 16 aa, Influenza A virus
RSHLRNDTDVVNFVSM

SEQ ID NO: 181318 - protein, 18 aa, Influenza A virus
RSHLRNDTDVVNFVSMEF

SEQ ID NO: 181319 - protein, 19 aa, Influenza A virus
RSHLRNDTDVVNFVSMEFS

SEQ ID NO: 181320 - protein, 20 aa, Influenza A virus
RSHLRNDTDVVNFVSMEFSL

SEQ ID NO: 181321 - protein, 21 aa, Influenza A virus
RSHLRNDTDVVNFVSMEFSLT

SEQ ID NO: 181322 - protein, 22 aa, Influenza A virus
RSHLRNDTDVVNFVSMEFSLTD

SEQ ID NO: 181323 - protein, 23 aa, Influenza A virus
RSHLRNDTDVVNFVSMEFSLTDP

SEQ ID NO: 181324 - protein, 24 aa, Influenza A virus
RSHLRNDTDVVNFVSMEFSLTDPR

SEQ ID NO: 181325 - protein, 25 aa, Influenza A virus
RSHLRNDTDVVNFVSMEFSLTDPRL

SEQ ID NO: 181326 - protein, 13 aa, Influenza A virus
RSKFLLMDALKLS

SEQ ID NO: 181327 - protein, 14 aa, Influenza A virus
RSKFLLMDALKLSI

SEQ ID NO: 181328 - protein, 15 aa, Influenza A virus
RSKFLLMDALKLSIE

SEQ ID NO: 181329 - protein, 16 aa, Influenza A virus
RSKFLLMDALKLSIED

SEQ ID NO: 181330 - protein, 17 aa, Influenza A virus
RSKFLLMDALKLSIEDP

SEQ ID NO: 181331 - protein, 18 aa, Influenza A virus
RSKFLLMDALKLSIEDPS

SEQ ID NO: 181332 - protein, 19 aa, Influenza A virus
RSKFLLMDALKLSIEDPSH

SEQ ID NO: 181333 - protein, 20 aa, Influenza A virus
RSKFLLMDALKLSIEDPSHE

SEQ ID NO: 181334 - protein, 21 aa, Influenza A virus
RSKFLLMDALKLSIEDPSHEG

SEQ ID NO: 181335 - protein, 22 aa, Influenza A virus
RSKFLLMDALKLSIEDPSHEGE

SEQ ID NO: 181336 - protein, 23 aa, Influenza A virus
RSKFLLMDALKLSIEDPSHEGEG

SEQ ID NO: 181337 - protein, 24 aa, Influenza A virus
RSKFLLMDALKLSIEDPSHEGEGI

SEQ ID NO: 181338 - protein, 25 aa, Influenza A virus
RSKFLLMDALKLSIEDPSHEGEGIP

SEQ ID NO: 181339 - protein, 16 aa, Influenza A virus
RTKEGRRKTNLYGFII

SEQ ID NO: 181340 - protein, 17 aa, Influenza A virus
RTKEGRRKTNLYGFIIK

SEQ ID NO: 181341 - protein, 19 aa, Influenza A virus
RTKEGRRKTNLYGFIIKGR

SEQ ID NO: 181342 - protein, 20 aa, Influenza A virus
RTKEGRRKTNLYGFIIKGRS

SEQ ID NO: 181343 - protein, 21 aa, Influenza A virus
RTKEGRRKTNLYGFIIKGRSH

SEQ ID NO: 181344 - protein, 22 aa, Influenza A virus
RTKEGRRKTNLYGFIIKGRSHL

SEQ ID NO: 181345 - protein, 23 aa, Influenza A virus
RTKEGRRKTNLYGFIIKGRSHLR

SEQ ID NO: 181346 - protein, 24 aa, Influenza A virus
RTKEGRRKTNLYGFIIKGRSHLRN

SEQ ID NO: 181347 - protein, 25 aa, Influenza A virus
RTKEGRRKTNLYGFIIKGRSHLRND

SEQ ID NO: 181348 - protein, 13 aa, Influenza A virus
RTLLAKSVFNSLY

SEQ ID NO: 181349 - protein, 14 aa, Influenza A virus
RTLLAKSVFNSLYA

SEQ ID NO: 181350 - protein, 15 aa, Influenza A virus
RTLLAKSVFNSLYAS

SEQ ID NO: 181351 - protein, 16 aa, Influenza A virus
RTLLAKSVFNSLYASP

SEQ ID NO: 181352 - protein, 17 aa, Influenza A virus
RTLLAKSVFNSLYASPQ

SEQ ID NO: 181353 - protein, 18 aa, Influenza A virus
RTLLAKSVFNSLYASPQL

SEQ ID NO: 181354 - protein, 19 aa, Influenza A virus
RTLLAKSVFNSLYASPQLE

SEQ ID NO: 181355 - protein, 20 aa, Influenza A virus
RTLLAKSVFNSLYASPQLEG

SEQ ID NO: 181356 - protein, 21 aa, Influenza A virus
RTLLAKSVFNSLYASPQLEGF

SEQ ID NO: 181357 - protein, 22 aa, Influenza A virus
RTLLAKSVFNSLYASPQLEGFS

SEQ ID NO: 181358 - protein, 23 aa, Influenza A virus
RTLLAKSVFNSLYASPQLEGFSA

SEQ ID NO: 181359 - protein, 24 aa, Influenza A virus
RTLLAKSVFNSLYASPQLEGFSAE

SEQ ID NO: 181360 - protein, 25 aa, Influenza A virus
RTLLAKSVFNSLYASPQLEGFSAES

SEQ ID NO: 181361 - protein, 13 aa, Influenza A virus
RTMAWTVVNSICN

SEQ ID NO: 181362 - protein, 14 aa, Influenza A virus
RTMAWTVVNSICNT

SEQ ID NO: 181363 - protein, 15 aa, Influenza A virus
RTMAWTVVNSICNTT

SEQ ID NO: 181364 - protein, 16 aa, Influenza A virus
RTMAWTVVNSICNTTG

SEQ ID NO: 181365 - protein, 15 aa, Influenza A virus
RTNGTSKIKMKWGME

SEQ ID NO: 181366 - protein, 16 aa, Influenza A virus
RTNGTSKIKMKWGMEM

SEQ ID NO: 181367 - protein, 17 aa, Influenza A virus
RTNGTSKIKMKWGMEMR

SEQ ID NO: 181368 - protein, 18 aa, Influenza A virus
RTNGTSKIKMKWGMEMRR

SEQ ID NO: 181369 - protein, 19 aa, Influenza A virus
RTNGTSKIKMKWGMEMRRC

SEQ ID NO: 181370 - protein, 20 aa, Influenza A virus
RTNGTSKIKMKWGMEMRRCL

SEQ ID NO: 181371 - protein, 21 aa, Influenza A virus
RTNGTSKIKMKWGMEMRRCLL

SEQ ID NO: 181372 - protein, 22 aa, Influenza A virus
RTNGTSKIKMKWGMEMRRCLLQ

SEQ ID NO: 181373 - protein, 23 aa, Influenza A virus
RTNGTSKIKMKWGMEMRRCLLQS

SEQ ID NO: 181374 - protein, 24 aa, Influenza A virus
RTNGTSKIKMKWGMEMRRCLLQSL

SEQ ID NO: 181375 - protein, 25 aa, Influenza A virus
RTNGTSKIKMKWGMEMRRCLLQSLQ

SEQ ID NO: 181376 - protein, 13 aa, Influenza A virus
SCAAMDDFQLIPM

SEQ ID NO: 181377 - protein, 14 aa, Influenza A virus
SCAAMDDFQLIPMI

SEQ ID NO: 181378 - protein, 15 aa, Influenza A virus
SCAAMDDFQLIPMIS

SEQ ID NO: 181379 - protein, 16 aa, Influenza A virus
SCAAMDDFQLIPMISK

SEQ ID NO: 181380 - protein, 17 aa, Influenza A virus
SCAAMDDFQLIPMISKC

SEQ ID NO: 181381 - protein, 18 aa, Influenza A virus
SCAAMDDFQLIPMISKCR

SEQ ID NO: 181382 - protein, 19 aa, Influenza A virus
SCAAMDDFQLIPMISKCRT

SEQ ID NO: 181383 - protein, 20 aa, Influenza A virus
SCAAMDDFQLIPMISKCRTK

SEQ ID NO: 181384 - protein, 21 aa, Influenza A virus
SCAAMDDFQLIPMISKCRTKE

SEQ ID NO: 181385 - protein, 22 aa, Influenza A virus
SCAAMDDFQLIPMISKCRTKEG

SEQ ID NO: 181386 - protein, 23 aa, Influenza A virus
SCAAMDDFQLIPMISKCRTKEGR

SEQ ID NO: 181387 - protein, 24 aa, Influenza A virus
SCAAMDDFQLIPMISKCRTKEGRR

SEQ ID NO: 181388 - protein, 25 aa, Influenza A virus
SCAAMDDFQLIPMISKCRTKEGRRK

SEQ ID NO: 181389 - protein, 19 aa, Influenza A virus
SERGEETIEERFEITGTMR

SEQ ID NO: 181390 - protein, 20 aa, Influenza A virus
SFRQSERGEETIEERFEITG

SEQ ID NO: 181391 - protein, 23 aa, Influenza A virus
SFRQSERGEETIEERFEITGTMR

SEQ ID NO: 181392 - protein, 25 aa, Influenza A virus
SFTGEEMATKADYTLDEESRARIKT

SEQ ID NO: 181393 - protein, 14 aa, Influenza A virus
SHCRATEYIMKGVY

SEQ ID NO: 181394 - protein, 15 aa, Influenza A virus
SHCRATEYIMKGVYI

SEQ ID NO: 181395 - protein, 16 aa, Influenza A virus
SHCRATEYIMKGVYIN

SEQ ID NO: 181396 - protein, 17 aa, Influenza A virus
SHCRATEYIMKGVYINT

SEQ ID NO: 181397 - protein, 18 aa, Influenza A virus
SHCRATEYIMKGVYINTA

SEQ ID NO: 181398 - protein, 19 aa, Influenza A virus
SHCRATEYIMKGVYINTAL

SEQ ID NO: 181399 - protein, 20 aa, Influenza A virus
SHCRATEYIMKGVYINTALL

SEQ ID NO: 181400 - protein, 21 aa, Influenza A virus
SHCRATEYIMKGVYINTALLN

SEQ ID NO: 181401 - protein, 22 aa, Influenza A virus
SHCRATEYIMKGVYINTALLNA

SEQ ID NO: 181402 - protein, 23 aa, Influenza A virus
SHCRATEYIMKGVYINTALLNAS

SEQ ID NO: 181403 - protein, 24 aa, Influenza A virus
SHCRATEYIMKGVYINTALLNASC

SEQ ID NO: 181404 - protein, 25 aa, Influenza A virus
SHCRATEYIMKGVYINTALLNASCA

SEQ ID NO: 181405 - protein, 15 aa, Influenza A virus
SHLRNDTDVVNFVSM

SEQ ID NO: 181406 - protein, 16 aa, Influenza A virus
SHLRNDTDVVNFVSME

SEQ ID NO: 181407 - protein, 17 aa, Influenza A virus
SHLRNDTDVVNFVSMEF

SEQ ID NO: 181408 - protein, 18 aa, Influenza A virus
SHLRNDTDVVNFVSMEFS

SEQ ID NO: 181409 - protein, 19 aa, Influenza A virus
SHLRNDTDVVNFVSMEFSL

SEQ ID NO: 181410 - protein, 20 aa, Influenza A virus
SHLRNDTDVVNFVSMEFSLT

SEQ ID NO: 181411 - protein, 21 aa, Influenza A virus
SHLRNDTDVVNFVSMEFSLTD

SEQ ID NO: 181412 - protein, 22 aa, Influenza A virus
SHLRNDTDVVNFVSMEFSLTDP

SEQ ID NO: 181413 - protein, 23 aa, Influenza A virus
SHLRNDTDVVNFVSMEFSLTDPR

SEQ ID NO: 181414 - protein, 24 aa, Influenza A virus
SHLRNDTDVVNFVSMEFSLTDPRL

SEQ ID NO: 181415 - protein, 25 aa, Influenza A virus
SHLRNDTDVVNFVSMEFSLTDPRLE

SEQ ID NO: 181416 - protein, 14 aa, Influenza A virus
SIGKVCRTLLAKSV

SEQ ID NO: 181417 - protein, 15 aa, Influenza A virus
SIGKVCRTLLAKSVF

SEQ ID NO: 181418 - protein, 16 aa, Influenza A virus
SIGKVCRTLLAKSVFN

SEQ ID NO: 181419 - protein, 17 aa, Influenza A virus
SIGKVCRTLLAKSVFNS

SEQ ID NO: 181420 - protein, 18 aa, Influenza A virus
SIGKVCRTLLAKSVFNSL

SEQ ID NO: 181421 - protein, 19 aa, Influenza A virus
SIGKVCRTLLAKSVFNSLY

SEQ ID NO: 181422 - protein, 20 aa, Influenza A virus
SIGKVCRTLLAKSVFNSLYA

SEQ ID NO: 181423 - protein, 21 aa, Influenza A virus
SIGKVCRTLLAKSVFNSLYAS

SEQ ID NO: 181424 - protein, 22 aa, Influenza A virus
SIGKVCRTLLAKSVFNSLYASP

SEQ ID NO: 181425 - protein, 23 aa, Influenza A virus
SIGKVCRTLLAKSVFNSLYASPQ

SEQ ID NO: 181426 - protein, 24 aa, Influenza A virus
SIGKVCRTLLAKSVFNSLYASPQL

SEQ ID NO: 181427 - protein, 25 aa, Influenza A virus
SIGKVCRTLLAKSVFNSLYASPQLE

SEQ ID NO: 181428 - protein, 19 aa, Influenza A virus
SKCRTKEGRRKTNLYGFII

SEQ ID NO: 181429 - protein, 20 aa, Influenza A virus
SKCRTKEGRRKTNLYGFIIK

SEQ ID NO: 181430 - protein, 21 aa, Influenza A virus
SKCRTKEGRRKTNLYGFIIKG

SEQ ID NO: 181431 - protein, 22 aa, Influenza A virus
SKCRTKEGRRKTNLYGFIIKGR

SEQ ID NO: 181432 - protein, 23 aa, Influenza A virus
SKCRTKEGRRKTNLYGFIIKGRS

SEQ ID NO: 181433 - protein, 24 aa, Influenza A virus
SKCRTKEGRRKTNLYGFIIKGRSH

SEQ ID NO: 181434 - protein, 25 aa, Influenza A virus
SKCRTKEGRRKTNLYGFIIKGRSHL

SEQ ID NO: 181435 - protein, 13 aa, Influenza A virus
SKFLLMDALKLSI

SEQ ID NO: 181436 - protein, 14 aa, Influenza A virus
SKFLLMDALKLSIE

SEQ ID NO: 181437 - protein, 15 aa, Influenza A virus
SKFLLMDALKLSIED

SEQ ID NO: 181438 - protein, 16 aa, Influenza A virus
SKFLLMDALKLSIEDP

SEQ ID NO: 181439 - protein, 17 aa, Influenza A virus
SKFLLMDALKLSIEDPS

SEQ ID NO: 181440 - protein, 18 aa, Influenza A virus
SKFLLMDALKLSIEDPSH

SEQ ID NO: 181441 - protein, 19 aa, Influenza A virus
SKFLLMDALKLSIEDPSHE

SEQ ID NO: 181442 - protein, 20 aa, Influenza A virus
SKFLLMDALKLSIEDPSHEG

SEQ ID NO: 181443 - protein, 21 aa, Influenza A virus
SKFLLMDALKLSIEDPSHEGE

SEQ ID NO: 181444 - protein, 22 aa, Influenza A virus
SKFLLMDALKLSIEDPSHEGEG

SEQ ID NO: 181445 - protein, 23 aa, Influenza A virus
SKFLLMDALKLSIEDPSHEGEGI

SEQ ID NO: 181446 - protein, 24 aa, Influenza A virus
SKFLLMDALKLSIEDPSHEGEGIP

SEQ ID NO: 181447 - protein, 25 aa, Influenza A virus
SKFLLMDALKLSIEDPSHEGEGIPL

SEQ ID NO: 181448 - protein, 14 aa, Influenza A virus
SKIKMKWGMEMRRC

SEQ ID NO: 181449 - protein, 15 aa, Influenza A virus
SKIKMKWGMEMRRCL

SEQ ID NO: 181450 - protein, 16 aa, Influenza A virus
SKIKMKWGMEMRRCLL

SEQ ID NO: 181451 - protein, 17 aa, Influenza A virus
SKIKMKWGMEMRRCLLQ

SEQ ID NO: 181452 - protein, 18 aa, Influenza A virus
SKIKMKWGMEMRRCLLQS

SEQ ID NO: 181453 - protein, 19 aa, Influenza A virus
SKIKMKWGMEMRRCLLQSL

SEQ ID NO: 181454 - protein, 20 aa, Influenza A virus
SKIKMKWGMEMRRCLLQSLQ

SEQ ID NO: 181455 - protein, 21 aa, Influenza A virus
SKIKMKWGMEMRRCLLQSLQQ

SEQ ID NO: 181456 - protein, 22 aa, Influenza A virus
SKIKMKWGMEMRRCLLQSLQQI

SEQ ID NO: 181457 - protein, 23 aa, Influenza A virus
SKIKMKWGMEMRRCLLQSLQQIE

SEQ ID NO: 181458 - protein, 24 aa, Influenza A virus
SKIKMKWGMEMRRCLLQSLQQIES

SEQ ID NO: 181459 - protein, 25 aa, Influenza A virus
SKIKMKWGMEMRRCLLQSLQQIESM

SEQ ID NO: 181460 - protein, 14 aa, Influenza A virus
SLQQIESMIEAESS

SEQ ID NO: 181461 - protein, 15 aa, Influenza A virus
SLQQIESMIEAESSV

SEQ ID NO: 181462 - protein, 16 aa, Influenza A virus
SLQQIESMIEAESSVK

SEQ ID NO: 181463 - protein, 17 aa, Influenza A virus
SLQQIESMIEAESSVKE

SEQ ID NO: 181464 - protein, 18 aa, Influenza A virus
SLQQIESMIEAESSVKEK

SEQ ID NO: 181465 - protein, 19 aa, Influenza A virus
SLQQIESMIEAESSVKEKD

SEQ ID NO: 181466 - protein, 20 aa, Influenza A virus
SLQQIESMIEAESSVKEKDM

SEQ ID NO: 181467 - protein, 21 aa, Influenza A virus
SLQQIESMIEAESSVKEKDMT

SEQ ID NO: 181468 - protein, 22 aa, Influenza A virus
SLQQIESMIEAESSVKEKDMTK

SEQ ID NO: 181469 - protein, 23 aa, Influenza A virus
SLQQIESMIEAESSVKEKDMTKE

SEQ ID NO: 181470 - protein, 24 aa, Influenza A virus
SLQQIESMIEAESSVKEKDMTKEF

SEQ ID NO: 181471 - protein, 25 aa, Influenza A virus
SLQQIESMIEAESSVKEKDMTKEFF

SEQ ID NO: 181472 - protein, 19 aa, Influenza A virus
SLTDPRLEPHKWEKYCVLE

SEQ ID NO: 181473 - protein, 20 aa, Influenza A virus
SLTDPRLEPHKWEKYCVLEI

SEQ ID NO: 181474 - protein, 21 aa, Influenza A virus
SLTDPRLEPHKWEKYCVLEIG

SEQ ID NO: 181475 - protein, 22 aa, Influenza A virus
SLTDPRLEPHKWEKYCVLEIGD

SEQ ID NO: 181476 - protein, 23 aa, Influenza A virus
SLTDPRLEPHKWEKYCVLEIGDM

SEQ ID NO: 181477 - protein, 15 aa, Influenza A virus
SLYASPQLEGFSAES

SEQ ID NO: 181478 - protein, 16 aa, Influenza A virus
SLYASPQLEGFSAESR

SEQ ID NO: 181479 - protein, 17 aa, Influenza A virus
SLYASPQLEGFSAESRK

SEQ ID NO: 181480 - protein, 19 aa, Influenza A virus
SLYASPQLEGFSAESRKLL

SEQ ID NO: 181481 - protein, 20 aa, Influenza A virus
SLYASPQLEGFSAESRKLLL

SEQ ID NO: 181482 - protein, 15 aa, Influenza A virus
SMEFSLTDPRLEPHK

SEQ ID NO: 181483 - protein, 16 aa, Influenza A virus
SMEFSLTDPRLEPHKW

SEQ ID NO: 181484 - protein, 17 aa, Influenza A virus
SMEFSLTDPRLEPHKWE

SEQ ID NO: 181485 - protein, 19 aa, Influenza A virus
SMEFSLTDPRLEPHKWEKY

SEQ ID NO: 181486 - protein, 20 aa, Influenza A virus
SMEFSLTDPRLEPHKWEKYC

SEQ ID NO: 181487 - protein, 21 aa, Influenza A virus
SMEFSLTDPRLEPHKWEKYCV

SEQ ID NO: 181488 - protein, 22 aa, Influenza A virus
SMEFSLTDPRLEPHKWEKYCVL

SEQ ID NO: 181489 - protein, 23 aa, Influenza A virus
SMEFSLTDPRLEPHKWEKYCVLE

SEQ ID NO: 181490 - protein, 24 aa, Influenza A virus
SMEFSLTDPRLEPHKWEKYCVLEI

SEQ ID NO: 181491 - protein, 25 aa, Influenza A virus
SMEFSLTDPRLEPHKWEKYCVLEIG

SEQ ID NO: 181492 - protein, 13 aa, Influenza A virus
SMRRNYFTAEVSH

SEQ ID NO: 181493 - protein, 14 aa, Influenza A virus
SMRRNYFTAEVSHC

SEQ ID NO: 181494 - protein, 15 aa, Influenza A virus
SMRRNYFTAEVSHCR

SEQ ID NO: 181495 - protein, 16 aa, Influenza A virus
SMRRNYFTAEVSHCRA

SEQ ID NO: 181496 - protein, 17 aa, Influenza A virus
SMRRNYFTAEVSHCRAT

SEQ ID NO: 181497 - protein, 18 aa, Influenza A virus
SMRRNYFTAEVSHCRATE

SEQ ID NO: 181498 - protein, 19 aa, Influenza A virus
SMRRNYFTAEVSHCRATEY

SEQ ID NO: 181499 - protein, 20 aa, Influenza A virus
SMRRNYFTAEVSHCRATEYI

SEQ ID NO: 181500 - protein, 21 aa, Influenza A virus
SMRRNYFTAEVSHCRATEYIM

SEQ ID NO: 181501 - protein, 22 aa, Influenza A virus
SMRRNYFTAEVSHCRATEYIMK

SEQ ID NO: 181502 - protein, 23 aa, Influenza A virus
SMRRNYFTAEVSHCRATEYIMKG

SEQ ID NO: 181503 - protein, 24 aa, Influenza A virus
SMRRNYFTAEVSHCRATEYIMKGV

SEQ ID NO: 181504 - protein, 25 aa, Influenza A virus
SMRRNYFTAEVSHCRATEYIMKGVY

SEQ ID NO: 181505 - protein, 15 aa, Influenza A virus
SPKGVEEGSIGKVCR

SEQ ID NO: 181506 - protein, 16 aa, Influenza A virus
SPKGVEEGSIGKVCRT

SEQ ID NO: 181507 - protein, 17 aa, Influenza A virus
SPKGVEEGSIGKVCRTL

SEQ ID NO: 181508 - protein, 19 aa, Influenza A virus
SPKGVEEGSIGKVCRTLLA

SEQ ID NO: 181509 - protein, 20 aa, Influenza A virus
SPKGVEEGSIGKVCRTLLAK

SEQ ID NO: 181510 - protein, 21 aa, Influenza A virus
SPKGVEEGSIGKVCRTLLAKS

SEQ ID NO: 181511 - protein, 22 aa, Influenza A virus
SPKGVEEGSIGKVCRTLLAKSV

SEQ ID NO: 181512 - protein, 23 aa, Influenza A virus
SPKGVEEGSIGKVCRTLLAKSVF

SEQ ID NO: 181513 - protein, 24 aa, Influenza A virus
SPKGVEEGSIGKVCRTLLAKSVFN

SEQ ID NO: 181514 - protein, 25 aa, Influenza A virus
SPKGVEEGSIGKVCRTLLAKSVFNS

SEQ ID NO: 181515 - protein, 15 aa, Influenza A virus
SPQLEGFSAESRKLL

SEQ ID NO: 181516 - protein, 16 aa, Influenza A virus
SPQLEGFSAESRKLLL

SEQ ID NO: 181517 - protein, 14 aa, Influenza A virus
SQLKWALGENMAPE

SEQ ID NO: 181518 - protein, 15 aa, Influenza A virus
SQLKWALGENMAPEK

SEQ ID NO: 181519 - protein, 16 aa, Influenza A virus
SQLKWALGENMAPEKV

SEQ ID NO: 181520 - protein, 17 aa, Influenza A virus
SQLKWALGENMAPEKVD

SEQ ID NO: 181521 - protein, 18 aa, Influenza A virus
SQLKWALGENMAPEKVDF

SEQ ID NO: 181522 - protein, 13 aa, Influenza A virus
SRARIKTRLFTIR

SEQ ID NO: 181523 - protein, 14 aa, Influenza A virus
SRARIKTRLFTIRQ

SEQ ID NO: 181524 - protein, 15 aa, Influenza A virus
SRARIKTRLFTIRQE

SEQ ID NO: 181525 - protein, 16 aa, Influenza A virus
SRARIKTRLFTIRQEM

SEQ ID NO: 181526 - protein, 17 aa, Influenza A virus
SRARIKTRLFTIRQEMA

SEQ ID NO: 181527 - protein, 13 aa, Influenza A virus
SRPMFLYVRTNGT

SEQ ID NO: 181528 - protein, 14 aa, Influenza A virus
SRPMFLYVRTNGTS

SEQ ID NO: 181529 - protein, 15 aa, Influenza A virus
SRPMFLYVRTNGTSK

SEQ ID NO: 181530 - protein, 16 aa, Influenza A virus
SRPMFLYVRTNGTSKI

SEQ ID NO: 181531 - protein, 17 aa, Influenza A virus
SRPMFLYVRTNGTSKIK

SEQ ID NO: 181532 - protein, 18 aa, Influenza A virus
SRPMFLYVRTNGTSKIKM

SEQ ID NO: 181533 - protein, 19 aa, Influenza A virus
SRPMFLYVRTNGTSKIKMK

SEQ ID NO: 181534 - protein, 20 aa, Influenza A virus
SRPMFLYVRTNGTSKIKMKW

SEQ ID NO: 181535 - protein, 21 aa, Influenza A virus
SRPMFLYVRTNGTSKIKMKWG

SEQ ID NO: 181536 - protein, 22 aa, Influenza A virus
SRPMFLYVRTNGTSKIKMKWGM

SEQ ID NO: 181537 - protein, 23 aa, Influenza A virus
SRPMFLYVRTNGTSKIKMKWGME

SEQ ID NO: 181538 - protein, 24 aa, Influenza A virus
SRPMFLYVRTNGTSKIKMKWGMEM

SEQ ID NO: 181539 - protein, 25 aa, Influenza A virus
SRPMFLYVRTNGTSKIKMKWGMEMR

SEQ ID NO: 181540 - protein, 13 aa, Influenza A virus
SVFNSLYASPQLE

SEQ ID NO: 181541 - protein, 14 aa, Influenza A virus
SVFNSLYASPQLEG

SEQ ID NO: 181542 - protein, 15 aa, Influenza A virus
SVFNSLYASPQLEGF

SEQ ID NO: 181543 - protein, 16 aa, Influenza A virus
SVFNSLYASPQLEGFS

SEQ ID NO: 181544 - protein, 17 aa, Influenza A virus
SVFNSLYASPQLEGFSA

SEQ ID NO: 181545 - protein, 18 aa, Influenza A virus
SVFNSLYASPQLEGFSAE

SEQ ID NO: 181546 - protein, 19 aa, Influenza A virus
SVFNSLYASPQLEGFSAES

SEQ ID NO: 181547 - protein, 20 aa, Influenza A virus
SVFNSLYASPQLEGFSAESR

SEQ ID NO: 181548 - protein, 21 aa, Influenza A virus
SVFNSLYASPQLEGFSAESRK

SEQ ID NO: 181549 - protein, 22 aa, Influenza A virus
SVFNSLYASPQLEGFSAESRKL

SEQ ID NO: 181550 - protein, 23 aa, Influenza A virus
SVFNSLYASPQLEGFSAESRKLL

SEQ ID NO: 181551 - protein, 24 aa, Influenza A virus
SVFNSLYASPQLEGFSAESRKLLL

SEQ ID NO: 181552 - protein, 15 aa, Influenza A virus
SVKEKDMTKEFFENK

SEQ ID NO: 181553 - protein, 16 aa, Influenza A virus
SVKEKDMTKEFFENKS

SEQ ID NO: 181554 - protein, 15 aa, Influenza A virus
TAEVSHCRATEYIMK

SEQ ID NO: 181555 - protein, 16 aa, Influenza A virus
TAEVSHCRATEYIMKG

SEQ ID NO: 181556 - protein, 17 aa, Influenza A virus
TAEVSHCRATEYIMKGV

SEQ ID NO: 181557 - protein, 19 aa, Influenza A virus
TAEVSHCRATEYIMKGVYI

SEQ ID NO: 181558 - protein, 20 aa, Influenza A virus
TAEVSHCRATEYIMKGVYIN

SEQ ID NO: 181559 - protein, 21 aa, Influenza A virus
TAEVSHCRATEYIMKGVYINT

SEQ ID NO: 181560 - protein, 22 aa, Influenza A virus
TAEVSHCRATEYIMKGVYINTA

SEQ ID NO: 181561 - protein, 23 aa, Influenza A virus
TAEVSHCRATEYIMKGVYINTAL

SEQ ID NO: 181562 - protein, 24 aa, Influenza A virus
TAEVSHCRATEYIMKGVYINTALL

SEQ ID NO: 181563 - protein, 25 aa, Influenza A virus
TAEVSHCRATEYIMKGVYINTALLN

SEQ ID NO: 181564 - protein, 13 aa, Influenza A virus
TALLNASCAAMDD

SEQ ID NO: 181565 - protein, 14 aa, Influenza A virus
TALLNASCAAMDDF

SEQ ID NO: 181566 - protein, 15 aa, Influenza A virus
TALLNASCAAMDDFQ

SEQ ID NO: 181567 - protein, 16 aa, Influenza A virus
TALLNASCAAMDDFQL

SEQ ID NO: 181568 - protein, 17 aa, Influenza A virus
TALLNASCAAMDDFQLI

SEQ ID NO: 181569 - protein, 18 aa, Influenza A virus
TALLNASCAAMDDFQLIP

SEQ ID NO: 181570 - protein, 19 aa, Influenza A virus
TALLNASCAAMDDFQLIPM

SEQ ID NO: 181571 - protein, 20 aa, Influenza A virus
TALLNASCAAMDDFQLIPMI

SEQ ID NO: 181572 - protein, 21 aa, Influenza A virus
TALLNASCAAMDDFQLIPMIS

SEQ ID NO: 181573 - protein, 22 aa, Influenza A virus
TALLNASCAAMDDFQLIPMISK

SEQ ID NO: 181574 - protein, 23 aa, Influenza A virus
TALLNASCAAMDDFQLIPMISKC

SEQ ID NO: 181575 - protein, 24 aa, Influenza A virus
TALLNASCAAMDDFQLIPMISKCR

SEQ ID NO: 181576 - protein, 25 aa, Influenza A virus
TALLNASCAAMDDFQLIPMISKCRT

SEQ ID NO: 181577 - protein, 16 aa, Influenza A virus
TDPRLEPHKWEKYCVL

SEQ ID NO: 181578 - protein, 17 aa, Influenza A virus
TDPRLEPHKWEKYCVLE

SEQ ID NO: 181579 - protein, 18 aa, Influenza A virus
TDPRLEPHKWEKYCVLEI

SEQ ID NO: 181580 - protein, 19 aa, Influenza A virus
TDPRLEPHKWEKYCVLEIG

SEQ ID NO: 181581 - protein, 20 aa, Influenza A virus
TDPRLEPHKWEKYCVLEIGD

SEQ ID NO: 181582 - protein, 21 aa, Influenza A virus
TDPRLEPHKWEKYCVLEIGDM

SEQ ID NO: 181583 - protein, 13 aa, Influenza A virus
TDVVNFVSMEFSL

SEQ ID NO: 181584 - protein, 14 aa, Influenza A virus
TDVVNFVSMEFSLT

SEQ ID NO: 181585 - protein, 15 aa, Influenza A virus
TDVVNFVSMEFSLTD

SEQ ID NO: 181586 - protein, 16 aa, Influenza A virus
TDVVNFVSMEFSLTDP

SEQ ID NO: 181587 - protein, 17 aa, Influenza A virus
TDVVNFVSMEFSLTDPR

SEQ ID NO: 181588 - protein, 18 aa, Influenza A virus
TDVVNFVSMEFSLTDPRL

SEQ ID NO: 181589 - protein, 19 aa, Influenza A virus
TDVVNFVSMEFSLTDPRLE

SEQ ID NO: 181590 - protein, 20 aa, Influenza A virus
TDVVNFVSMEFSLTDPRLEP

SEQ ID NO: 181591 - protein, 21 aa, Influenza A virus
TDVVNFVSMEFSLTDPRLEPH

SEQ ID NO: 181592 - protein, 22 aa, Influenza A virus
TDVVNFVSMEFSLTDPRLEPHK

SEQ ID NO: 181593 - protein, 23 aa, Influenza A virus
TDVVNFVSMEFSLTDPRLEPHKW

SEQ ID NO: 181594 - protein, 24 aa, Influenza A virus
TDVVNFVSMEFSLTDPRLEPHKWE

SEQ ID NO: 181595 - protein, 25 aa, Influenza A virus
TDVVNFVSMEFSLTDPRLEPHKWEK

SEQ ID NO: 181596 - protein, 13 aa, Influenza A virus
TEYIMKGVYINTA

SEQ ID NO: 181597 - protein, 14 aa, Influenza A virus
TEYIMKGVYINTAL

SEQ ID NO: 181598 - protein, 15 aa, Influenza A virus
TEYIMKGVYINTALL

SEQ ID NO: 181599 - protein, 16 aa, Influenza A virus
TEYIMKGVYINTALLN

SEQ ID NO: 181600 - protein, 17 aa, Influenza A virus
TEYIMKGVYINTALLNA

SEQ ID NO: 181601 - protein, 18 aa, Influenza A virus
TEYIMKGVYINTALLNAS

SEQ ID NO: 181602 - protein, 19 aa, Influenza A virus
TEYIMKGVYINTALLNASC

SEQ ID NO: 181603 - protein, 20 aa, Influenza A virus
TEYIMKGVYINTALLNASCA

SEQ ID NO: 181604 - protein, 21 aa, Influenza A virus
TEYIMKGVYINTALLNASCAA

SEQ ID NO: 181605 - protein, 22 aa, Influenza A virus
TEYIMKGVYINTALLNASCAAM

SEQ ID NO: 181606 - protein, 23 aa, Influenza A virus
TEYIMKGVYINTALLNASCAAMD

SEQ ID NO: 181607 - protein, 24 aa, Influenza A virus
TEYIMKGVYINTALLNASCAAMDD

SEQ ID NO: 181608 - protein, 25 aa, Influenza A virus
TEYIMKGVYINTALLNASCAAMDDF

SEQ ID NO: 181609 - protein, 24 aa, Influenza A virus
TGEEMATKADYTLDEESRARIKTR

SEQ ID NO: 181610 - protein, 25 aa, Influenza A virus
TGEEMATKADYTLDEESRARIKTRL

SEQ ID NO: 181611 - protein, 13 aa, Influenza A virus
THIHIFSFTGEEM

SEQ ID NO: 181612 - protein, 14 aa, Influenza A virus
THIHIFSFTGEEMA

SEQ ID NO: 181613 - protein, 15 aa, Influenza A virus
THIHIFSFTGEEMAT

SEQ ID NO: 181614 - protein, 16 aa, Influenza A virus
THIHIFSFTGEEMATK

SEQ ID NO: 181615 - protein, 17 aa, Influenza A virus
THIHIFSFTGEEMATKA

SEQ ID NO: 181616 - protein, 18 aa, Influenza A virus
THIHIFSFTGEEMATKAD

SEQ ID NO: 181617 - protein, 19 aa, Influenza A virus
THIHIFSFTGEEMATKADY

SEQ ID NO: 181618 - protein, 20 aa, Influenza A virus
THIHIFSFTGEEMATKADYT

SEQ ID NO: 181619 - protein, 21 aa, Influenza A virus
THIHIFSFTGEEMATKADYTL

SEQ ID NO: 181620 - protein, 22 aa, Influenza A virus
THIHIFSFTGEEMATKADYTLD

SEQ ID NO: 181621 - protein, 23 aa, Influenza A virus
THIHIFSFTGEEMATKADYTLDE

SEQ ID NO: 181622 - protein, 24 aa, Influenza A virus
THIHIFSFTGEEMATKADYTLDEE

SEQ ID NO: 181623 - protein, 25 aa, Influenza A virus
THIHIFSFTGEEMATKADYTLDEES

SEQ ID NO: 181624 - protein, 14 aa, Influenza A virus
THLEVCFMYSDFHF

SEQ ID NO: 181625 - protein, 15 aa, Influenza A virus
THLEVCFMYSDFHFI

SEQ ID NO: 181626 - protein, 15 aa, Influenza A virus
TKADYTLDEESRARI

SEQ ID NO: 181627 - protein, 16 aa, Influenza A virus
TKADYTLDEESRARIK

SEQ ID NO: 181628 - protein, 20 aa, Influenza A virus
TKADYTLDEESRARIKTRLF

SEQ ID NO: 181629 - protein, 21 aa, Influenza A virus
TKADYTLDEESRARIKTRLFT

SEQ ID NO: 181630 - protein, 22 aa, Influenza A virus
TKADYTLDEESRARIKTRLFTI

SEQ ID NO: 181631 - protein, 23 aa, Influenza A virus
TKADYTLDEESRARIKTRLFTIR

SEQ ID NO: 181632 - protein, 24 aa, Influenza A virus
TKADYTLDEESRARIKTRLFTIRQ

SEQ ID NO: 181633 - protein, 25 aa, Influenza A virus
TKADYTLDEESRARIKTRLFTIRQE

SEQ ID NO: 181634 - protein, 15 aa, Influenza A virus
TKEGRRKTNLYGFII

SEQ ID NO: 181635 - protein, 16 aa, Influenza A virus
TKEGRRKTNLYGFIIK

SEQ ID NO: 181636 - protein, 17 aa, Influenza A virus
TKEGRRKTNLYGFIIKG

SEQ ID NO: 181637 - protein, 18 aa, Influenza A virus
TKEGRRKTNLYGFIIKGR

SEQ ID NO: 181638 - protein, 19 aa, Influenza A virus
TKEGRRKTNLYGFIIKGRS

SEQ ID NO: 181639 - protein, 20 aa, Influenza A virus
TKEGRRKTNLYGFIIKGRSH

SEQ ID NO: 181640 - protein, 21 aa, Influenza A virus
TKEGRRKTNLYGFIIKGRSHL

SEQ ID NO: 181641 - protein, 22 aa, Influenza A virus
TKEGRRKTNLYGFIIKGRSHLR

SEQ ID NO: 181642 - protein, 23 aa, Influenza A virus
TKEGRRKTNLYGFIIKGRSHLRN

SEQ ID NO: 181643 - protein, 24 aa, Influenza A virus
TKEGRRKTNLYGFIIKGRSHLRND

SEQ ID NO: 181644 - protein, 25 aa, Influenza A virus
TKEGRRKTNLYGFIIKGRSHLRNDT

SEQ ID NO: 181645 - protein, 14 aa, Influenza A virus
TKNMKKTSQLKWAL

SEQ ID NO: 181646 - protein, 15 aa, Influenza A virus
TKNMKKTSQLKWALG

SEQ ID NO: 181647 - protein, 16 aa, Influenza A virus
TKNMKKTSQLKWALGE

SEQ ID NO: 181648 - protein, 17 aa, Influenza A virus
TKNMKKTSQLKWALGEN

SEQ ID NO: 181649 - protein, 19 aa, Influenza A virus
TKNMKKTSQLKWALGENMA

SEQ ID NO: 181650 - protein, 20 aa, Influenza A virus
TKNMKKTSQLKWALGENMAP

SEQ ID NO: 181651 - protein, 21 aa, Influenza A virus
TKNMKKTSQLKWALGENMAPE

SEQ ID NO: 181652 - protein, 22 aa, Influenza A virus
TKNMKKTSQLKWALGENMAPEK

SEQ ID NO: 181653 - protein, 23 aa, Influenza A virus
TKNMKKTSQLKWALGENMAPEKV

SEQ ID NO: 181654 - protein, 24 aa, Influenza A virus
TKNMKKTSQLKWALGENMAPEKVD

SEQ ID NO: 181655 - protein, 25 aa, Influenza A virus
TKNMKKTSQLKWALGENMAPEKVDF

SEQ ID NO: 181656 - protein, 15 aa, Influenza A virus
TLDEESRARIKTRLF

SEQ ID NO: 181657 - protein, 16 aa, Influenza A virus
TLDEESRARIKTRLFT

SEQ ID NO: 181658 - protein, 17 aa, Influenza A virus
TLDEESRARIKTRLFTI

SEQ ID NO: 181659 - protein, 18 aa, Influenza A virus
TLDEESRARIKTRLFTIR

SEQ ID NO: 181660 - protein, 19 aa, Influenza A virus
TLDEESRARIKTRLFTIRQ

SEQ ID NO: 181661 - protein, 20 aa, Influenza A virus
TLDEESRARIKTRLFTIRQE

SEQ ID NO: 181662 - protein, 21 aa, Influenza A virus
TLDEESRARIKTRLFTIRQEM

SEQ ID NO: 181663 - protein, 22 aa, Influenza A virus
TLDEESRARIKTRLFTIRQEMA

SEQ ID NO: 181664 - protein, 13 aa, Influenza A virus
TLLAKSVFNSLYA

SEQ ID NO: 181665 - protein, 14 aa, Influenza A virus
TLLAKSVFNSLYAS

SEQ ID NO: 181666 - protein, 15 aa, Influenza A virus
TLLAKSVFNSLYASP

SEQ ID NO: 181667 - protein, 16 aa, Influenza A virus
TLLAKSVFNSLYASPQ

SEQ ID NO: 181668 - protein, 17 aa, Influenza A virus
TLLAKSVFNSLYASPQL

SEQ ID NO: 181669 - protein, 18 aa, Influenza A virus
TLLAKSVFNSLYASPQLE

SEQ ID NO: 181670 - protein, 19 aa, Influenza A virus
TLLAKSVFNSLYASPQLEG

SEQ ID NO: 181671 - protein, 20 aa, Influenza A virus
TLLAKSVFNSLYASPQLEGF

SEQ ID NO: 181672 - protein, 21 aa, Influenza A virus
TLLAKSVFNSLYASPQLEGFS

SEQ ID NO: 181673 - protein, 22 aa, Influenza A virus
TLLAKSVFNSLYASPQLEGFSA

SEQ ID NO: 181674 - protein, 23 aa, Influenza A virus
TLLAKSVFNSLYASPQLEGFSAE

SEQ ID NO: 181675 - protein, 24 aa, Influenza A virus
TLLAKSVFNSLYASPQLEGFSAES

SEQ ID NO: 181676 - protein, 25 aa, Influenza A virus
TLLAKSVFNSLYASPQLEGFSAESR

SEQ ID NO: 181677 - protein, 13 aa, Influenza A virus
TMAWTVVNSICNT

SEQ ID NO: 181678 - protein, 14 aa, Influenza A virus
TMAWTVVNSICNTT

SEQ ID NO: 181679 - protein, 15 aa, Influenza A virus
TMAWTVVNSICNTTG

SEQ ID NO: 181680 - protein, 14 aa, Influenza A virus
TMRRLADQSLPPNF

SEQ ID NO: 181681 - protein, 15 aa, Influenza A virus
TMRRLADQSLPPNFS

SEQ ID NO: 181682 - protein, 15 aa, Influenza A virus
TNGTSKIKMKWGMEM

SEQ ID NO: 181683 - protein, 16 aa, Influenza A virus
TNGTSKIKMKWGMEMR

SEQ ID NO: 181684 - protein, 17 aa, Influenza A virus
TNGTSKIKMKWGMEMRR

SEQ ID NO: 181685 - protein, 18 aa, Influenza A virus
TNGTSKIKMKWGMEMRRC

SEQ ID NO: 181686 - protein, 19 aa, Influenza A virus
TNGTSKIKMKWGMEMRRCL

SEQ ID NO: 181687 - protein, 20 aa, Influenza A virus
TNGTSKIKMKWGMEMRRCLL

SEQ ID NO: 181688 - protein, 21 aa, Influenza A virus
TNGTSKIKMKWGMEMRRCLLQ

SEQ ID NO: 181689 - protein, 22 aa, Influenza A virus
TNGTSKIKMKWGMEMRRCLLQS

SEQ ID NO: 181690 - protein, 23 aa, Influenza A virus
TNGTSKIKMKWGMEMRRCLLQSL

SEQ ID NO: 181691 - protein, 24 aa, Influenza A virus
TNGTSKIKMKWGMEMRRCLLQSLQ

SEQ ID NO: 181692 - protein, 25 aa, Influenza A virus
TNGTSKIKMKWGMEMRRCLLQSLQQ

SEQ ID NO: 181693 - protein, 13 aa, Influenza A virus
TNKFAAICTHLEV

SEQ ID NO: 181694 - protein, 14 aa, Influenza A virus
TNKFAAICTHLEVC

SEQ ID NO: 181695 - protein, 15 aa, Influenza A virus
TNKFAAICTHLEVCF

SEQ ID NO: 181696 - protein, 16 aa, Influenza A virus
TNKFAAICTHLEVCFM

SEQ ID NO: 181697 - protein, 17 aa, Influenza A virus
TNKFAAICTHLEVCFMY

SEQ ID NO: 181698 - protein, 18 aa, Influenza A virus
TNKFAAICTHLEVCFMYS

SEQ ID NO: 181699 - protein, 19 aa, Influenza A virus
TNKFAAICTHLEVCFMYSD

SEQ ID NO: 181700 - protein, 20 aa, Influenza A virus
TNKFAAICTHLEVCFMYSDF

SEQ ID NO: 181701 - protein, 21 aa, Influenza A virus
TNKFAAICTHLEVCFMYSDFH

SEQ ID NO: 181702 - protein, 22 aa, Influenza A virus
TNKFAAICTHLEVCFMYSDFHF

SEQ ID NO: 181703 - protein, 23 aa, Influenza A virus
TNKFAAICTHLEVCFMYSDFHFI

SEQ ID NO: 181704 - protein, 13 aa, Influenza A virus
TNLYGFIIKGRSH

SEQ ID NO: 181705 - protein, 14 aa, Influenza A virus
TNLYGFIIKGRSHL

SEQ ID NO: 181706 - protein, 15 aa, Influenza A virus
TNLYGFIIKGRSHLR

SEQ ID NO: 181707 - protein, 16 aa, Influenza A virus
TNLYGFIIKGRSHLRN

SEQ ID NO: 181708 - protein, 17 aa, Influenza A virus
TNLYGFIIKGRSHLRND

SEQ ID NO: 181709 - protein, 18 aa, Influenza A virus
TNLYGFIIKGRSHLRNDT

SEQ ID NO: 181710 - protein, 19 aa, Influenza A virus
TNLYGFIIKGRSHLRNDTD

SEQ ID NO: 181711 - protein, 20 aa, Influenza A virus
TNLYGFIIKGRSHLRNDTDV

SEQ ID NO: 181712 - protein, 21 aa, Influenza A virus
TNLYGFIIKGRSHLRNDTDVV

SEQ ID NO: 181713 - protein, 22 aa, Influenza A virus
TNLYGFIIKGRSHLRNDTDVVN

SEQ ID NO: 181714 - protein, 23 aa, Influenza A virus
TNLYGFIIKGRSHLRNDTDVVNF

SEQ ID NO: 181715 - protein, 24 aa, Influenza A virus
TNLYGFIIKGRSHLRNDTDVVNFV

SEQ ID NO: 181716 - protein, 25 aa, Influenza A virus
TNLYGFIIKGRSHLRNDTDVVNFVS

SEQ ID NO: 181717 - protein, 13 aa, Influenza A virus
TRREVHIYYLEKA

SEQ ID NO: 181718 - protein, 14 aa, Influenza A virus
TRREVHIYYLEKAN

SEQ ID NO: 181719 - protein, 15 aa, Influenza A virus
TRREVHIYYLEKANK

SEQ ID NO: 181720 - protein, 16 aa, Influenza A virus
TRREVHIYYLEKANKI

SEQ ID NO: 181721 - protein, 17 aa, Influenza A virus
TRREVHIYYLEKANKIK

SEQ ID NO: 181722 - protein, 18 aa, Influenza A virus
TRREVHIYYLEKANKIKS

SEQ ID NO: 181723 - protein, 19 aa, Influenza A virus
TRREVHIYYLEKANKIKSE

SEQ ID NO: 181724 - protein, 14 aa, Influenza A virus
TSKIKMKWGMEMRR

SEQ ID NO: 181725 - protein, 15 aa, Influenza A virus
TSKIKMKWGMEMRRC

SEQ ID NO: 181726 - protein, 16 aa, Influenza A virus
TSKIKMKWGMEMRRCL

SEQ ID NO: 181727 - protein, 17 aa, Influenza A virus
TSKIKMKWGMEMRRCLL

SEQ ID NO: 181728 - protein, 18 aa, Influenza A virus
TSKIKMKWGMEMRRCLLQ

SEQ ID NO: 181729 - protein, 19 aa, Influenza A virus
TSKIKMKWGMEMRRCLLQS

SEQ ID NO: 181730 - protein, 20 aa, Influenza A virus
TSKIKMKWGMEMRRCLLQSL

SEQ ID NO: 181731 - protein, 21 aa, Influenza A virus
TSKIKMKWGMEMRRCLLQSLQ

SEQ ID NO: 181732 - protein, 22 aa, Influenza A virus
TSKIKMKWGMEMRRCLLQSLQQ

SEQ ID NO: 181733 - protein, 23 aa, Influenza A virus
TSKIKMKWGMEMRRCLLQSLQQI

SEQ ID NO: 181734 - protein, 24 aa, Influenza A virus
TSKIKMKWGMEMRRCLLQSLQQIE

SEQ ID NO: 181735 - protein, 25 aa, Influenza A virus
TSKIKMKWGMEMRRCLLQSLQQIES

SEQ ID NO: 181736 - protein, 14 aa, Influenza A virus
TSQLKWALGENMAP

SEQ ID NO: 181737 - protein, 15 aa, Influenza A virus
TSQLKWALGENMAPE

SEQ ID NO: 181738 - protein, 16 aa, Influenza A virus
TSQLKWALGENMAPEK

SEQ ID NO: 181739 - protein, 17 aa, Influenza A virus
TSQLKWALGENMAPEKV

SEQ ID NO: 181740 - protein, 18 aa, Influenza A virus
TSQLKWALGENMAPEKVD

SEQ ID NO: 181741 - protein, 19 aa, Influenza A virus
TSQLKWALGENMAPEKVDF

SEQ ID NO: 181742 - protein, 25 aa, Influenza A virus
TWPIGESPKGVEEGSIGKVCRTLLA

SEQ ID NO: 181743 - protein, 13 aa, Influenza A virus
VCRTLLAKSVFNS

SEQ ID NO: 181744 - protein, 14 aa, Influenza A virus
VCRTLLAKSVFNSL

SEQ ID NO: 181745 - protein, 15 aa, Influenza A virus
VCRTLLAKSVFNSLY

SEQ ID NO: 181746 - protein, 16 aa, Influenza A virus
VCRTLLAKSVFNSLYA

SEQ ID NO: 181747 - protein, 17 aa, Influenza A virus
VCRTLLAKSVFNSLYAS

SEQ ID NO: 181748 - protein, 18 aa, Influenza A virus
VCRTLLAKSVFNSLYASP

SEQ ID NO: 181749 - protein, 19 aa, Influenza A virus
VCRTLLAKSVFNSLYASPQ

SEQ ID NO: 181750 - protein, 20 aa, Influenza A virus
VCRTLLAKSVFNSLYASPQL

SEQ ID NO: 181751 - protein, 21 aa, Influenza A virus
VCRTLLAKSVFNSLYASPQLE

SEQ ID NO: 181752 - protein, 22 aa, Influenza A virus
VCRTLLAKSVFNSLYASPQLEG

SEQ ID NO: 181753 - protein, 23 aa, Influenza A virus
VCRTLLAKSVFNSLYASPQLEGF

SEQ ID NO: 181754 - protein, 24 aa, Influenza A virus
VCRTLLAKSVFNSLYASPQLEGFS

SEQ ID NO: 181755 - protein, 25 aa, Influenza A virus
VCRTLLAKSVFNSLYASPQLEGFSA

SEQ ID NO: 181756 - protein, 14 aa, Influenza A virus
VEEGSIGKVCRTLL

SEQ ID NO: 181757 - protein, 15 aa, Influenza A virus
VEEGSIGKVCRTLLA

SEQ ID NO: 181758 - protein, 16 aa, Influenza A virus
VEEGSIGKVCRTLLAK

SEQ ID NO: 181759 - protein, 17 aa, Influenza A virus
VEEGSIGKVCRTLLAKS

SEQ ID NO: 181760 - protein, 18 aa, Influenza A virus
VEEGSIGKVCRTLLAKSV

SEQ ID NO: 181761 - protein, 19 aa, Influenza A virus
VEEGSIGKVCRTLLAKSVF

SEQ ID NO: 181762 - protein, 20 aa, Influenza A virus
VEEGSIGKVCRTLLAKSVFN

SEQ ID NO: 181763 - protein, 21 aa, Influenza A virus
VEEGSIGKVCRTLLAKSVFNS

SEQ ID NO: 181764 - protein, 22 aa, Influenza A virus
VEEGSIGKVCRTLLAKSVFNSL

SEQ ID NO: 181765 - protein, 23 aa, Influenza A virus
VEEGSIGKVCRTLLAKSVFNSLY

SEQ ID NO: 181766 - protein, 24 aa, Influenza A virus
VEEGSIGKVCRTLLAKSVFNSLYA

SEQ ID NO: 181767 - protein, 25 aa, Influenza A virus
VEEGSIGKVCRTLLAKSVFNSLYAS

SEQ ID NO: 181768 - protein, 13 aa, Influenza A virus
VFNSLYASPQLEG

SEQ ID NO: 181769 - protein, 14 aa, Influenza A virus
VFNSLYASPQLEGF

SEQ ID NO: 181770 - protein, 15 aa, Influenza A virus
VFNSLYASPQLEGFS

SEQ ID NO: 181771 - protein, 16 aa, Influenza A virus
VFNSLYASPQLEGFSA

SEQ ID NO: 181772 - protein, 17 aa, Influenza A virus
VFNSLYASPQLEGFSAE

SEQ ID NO: 181773 - protein, 18 aa, Influenza A virus
VFNSLYASPQLEGFSAES

SEQ ID NO: 181774 - protein, 19 aa, Influenza A virus
VFNSLYASPQLEGFSAESR

SEQ ID NO: 181775 - protein, 20 aa, Influenza A virus
VFNSLYASPQLEGFSAESRK

SEQ ID NO: 181776 - protein, 21 aa, Influenza A virus
VFNSLYASPQLEGFSAESRKL

SEQ ID NO: 181777 - protein, 22 aa, Influenza A virus
VFNSLYASPQLEGFSAESRKLL

SEQ ID NO: 181778 - protein, 23 aa, Influenza A virus
VFNSLYASPQLEGFSAESRKLLL

SEQ ID NO: 181779 - protein, 13 aa, Influenza A virus
VHIYYLEKANKIK

SEQ ID NO: 181780 - protein, 14 aa, Influenza A virus
VHIYYLEKANKIKS

SEQ ID NO: 181781 - protein, 15 aa, Influenza A virus
VHIYYLEKANKIKSE

SEQ ID NO: 181782 - protein, 15 aa, Influenza A virus
VKEKDMTKEFFENKS

SEQ ID NO: 181783 - protein, 16 aa, Influenza A virus
VKEKDMTKEFFENKSE

SEQ ID NO: 181784 - protein, 13 aa, Influenza A virus
VLLNASWFNSFLT

SEQ ID NO: 181785 - protein, 14 aa, Influenza A virus
VLLNASWFNSFLTH

SEQ ID NO: 181786 - protein, 15 aa, Influenza A virus
VLLNASWFNSFLTHA

SEQ ID NO: 181787 - protein, 16 aa, Influenza A virus
VLLNASWFNSFLTHAL

SEQ ID NO: 181788 - protein, 13 aa, Influenza A virus
VNFVSMEFSLTDP

SEQ ID NO: 181789 - protein, 14 aa, Influenza A virus
VNFVSMEFSLTDPR

SEQ ID NO: 181790 - protein, 15 aa, Influenza A virus
VNFVSMEFSLTDPRL

SEQ ID NO: 181791 - protein, 16 aa, Influenza A virus
VNFVSMEFSLTDPRLE

SEQ ID NO: 181792 - protein, 17 aa, Influenza A virus
VNFVSMEFSLTDPRLEP

SEQ ID NO: 181793 - protein, 18 aa, Influenza A virus
VNFVSMEFSLTDPRLEPH

SEQ ID NO: 181794 - protein, 19 aa, Influenza A virus
VNFVSMEFSLTDPRLEPHK

SEQ ID NO: 181795 - protein, 20 aa, Influenza A virus
VNFVSMEFSLTDPRLEPHKW

SEQ ID NO: 181796 - protein, 21 aa, Influenza A virus
VNFVSMEFSLTDPRLEPHKWE

SEQ ID NO: 181797 - protein, 22 aa, Influenza A virus
VNFVSMEFSLTDPRLEPHKWEK

SEQ ID NO: 181798 - protein, 23 aa, Influenza A virus
VNFVSMEFSLTDPRLEPHKWEKY

SEQ ID NO: 181799 - protein, 24 aa, Influenza A virus
VNFVSMEFSLTDPRLEPHKWEKYC

SEQ ID NO: 181800 - protein, 25 aa, Influenza A virus
VNFVSMEFSLTDPRLEPHKWEKYCV

SEQ ID NO: 181801 - protein, 13 aa, Influenza A virus
VRQCFNPMIVELA

SEQ ID NO: 181802 - protein, 14 aa, Influenza A virus
VRQCFNPMIVELAE

SEQ ID NO: 181803 - protein, 15 aa, Influenza A virus
VRQCFNPMIVELAEK

SEQ ID NO: 181804 - protein, 16 aa, Influenza A virus
VRQCFNPMIVELAEKA

SEQ ID NO: 181805 - protein, 17 aa, Influenza A virus
VRQCFNPMIVELAEKAM

SEQ ID NO: 181806 - protein, 18 aa, Influenza A virus
VRQCFNPMIVELAEKAMK

SEQ ID NO: 181807 - protein, 19 aa, Influenza A virus
VRQCFNPMIVELAEKAMKE

SEQ ID NO: 181808 - protein, 20 aa, Influenza A virus
VRQCFNPMIVELAEKAMKEY

SEQ ID NO: 181809 - protein, 21 aa, Influenza A virus
VRQCFNPMIVELAEKAMKEYG

SEQ ID NO: 181810 - protein, 22 aa, Influenza A virus
VRQCFNPMIVELAEKAMKEYGE

SEQ ID NO: 181811 - protein, 14 aa, Influenza A virus
VRTNGTSKIKMKWG

SEQ ID NO: 181812 - protein, 15 aa, Influenza A virus
VRTNGTSKIKMKWGM

SEQ ID NO: 181813 - protein, 16 aa, Influenza A virus
VRTNGTSKIKMKWGME

SEQ ID NO: 181814 - protein, 17 aa, Influenza A virus
VRTNGTSKIKMKWGMEM

SEQ ID NO: 181815 - protein, 19 aa, Influenza A virus
VRTNGTSKIKMKWGMEMRR

SEQ ID NO: 181816 - protein, 20 aa, Influenza A virus
VRTNGTSKIKMKWGMEMRRC

SEQ ID NO: 181817 - protein, 21 aa, Influenza A virus
VRTNGTSKIKMKWGMEMRRCL

SEQ ID NO: 181818 - protein, 22 aa, Influenza A virus
VRTNGTSKIKMKWGMEMRRCLL

SEQ ID NO: 181819 - protein, 23 aa, Influenza A virus
VRTNGTSKIKMKWGMEMRRCLLQ

SEQ ID NO: 181820 - protein, 24 aa, Influenza A virus
VRTNGTSKIKMKWGMEMRRCLLQS

SEQ ID NO: 181821 - protein, 25 aa, Influenza A virus
VRTNGTSKIKMKWGMEMRRCLLQSL

SEQ ID NO: 181822 - protein, 14 aa, Influenza A virus
VSHCRATEYIMKGV

SEQ ID NO: 181823 - protein, 15 aa, Influenza A virus
VSHCRATEYIMKGVY

SEQ ID NO: 181824 - protein, 16 aa, Influenza A virus
VSHCRATEYIMKGVYI

SEQ ID NO: 181825 - protein, 17 aa, Influenza A virus
VSHCRATEYIMKGVYIN

SEQ ID NO: 181826 - protein, 18 aa, Influenza A virus
VSHCRATEYIMKGVYINT

SEQ ID NO: 181827 - protein, 19 aa, Influenza A virus
VSHCRATEYIMKGVYINTA

SEQ ID NO: 181828 - protein, 20 aa, Influenza A virus
VSHCRATEYIMKGVYINTAL

SEQ ID NO: 181829 - protein, 21 aa, Influenza A virus
VSHCRATEYIMKGVYINTALL

SEQ ID NO: 181830 - protein, 22 aa, Influenza A virus
VSHCRATEYIMKGVYINTALLN

SEQ ID NO: 181831 - protein, 23 aa, Influenza A virus
VSHCRATEYIMKGVYINTALLNA

SEQ ID NO: 181832 - protein, 24 aa, Influenza A virus
VSHCRATEYIMKGVYINTALLNAS

SEQ ID NO: 181833 - protein, 25 aa, Influenza A virus
VSHCRATEYIMKGVYINTALLNASC

SEQ ID NO: 181834 - protein, 15 aa, Influenza A virus
VSMEFSLTDPRLEPH

SEQ ID NO: 181835 - protein, 16 aa, Influenza A virus
VSMEFSLTDPRLEPHK

SEQ ID NO: 181836 - protein, 17 aa, Influenza A virus
VSMEFSLTDPRLEPHKW

SEQ ID NO: 181837 - protein, 19 aa, Influenza A virus
VSMEFSLTDPRLEPHKWEK

SEQ ID NO: 181838 - protein, 20 aa, Influenza A virus
VSMEFSLTDPRLEPHKWEKY

SEQ ID NO: 181839 - protein, 21 aa, Influenza A virus
VSMEFSLTDPRLEPHKWEKYC

SEQ ID NO: 181840 - protein, 22 aa, Influenza A virus
VSMEFSLTDPRLEPHKWEKYCV

SEQ ID NO: 181841 - protein, 23 aa, Influenza A virus
VSMEFSLTDPRLEPHKWEKYCVL

SEQ ID NO: 181842 - protein, 24 aa, Influenza A virus
VSMEFSLTDPRLEPHKWEKYCVLE

SEQ ID NO: 181843 - protein, 25 aa, Influenza A virus
VSMEFSLTDPRLEPHKWEKYCVLEI

SEQ ID NO: 181844 - protein, 13 aa, Influenza A virus
VTRREVHIYYLEK

SEQ ID NO: 181845 - protein, 14 aa, Influenza A virus
VTRREVHIYYLEKA

SEQ ID NO: 181846 - protein, 15 aa, Influenza A virus
VTRREVHIYYLEKAN

SEQ ID NO: 181847 - protein, 16 aa, Influenza A virus
VTRREVHIYYLEKANK

SEQ ID NO: 181848 - protein, 17 aa, Influenza A virus
VTRREVHIYYLEKANKI

SEQ ID NO: 181849 - protein, 18 aa, Influenza A virus
VTRREVHIYYLEKANKIK

SEQ ID NO: 181850 - protein, 19 aa, Influenza A virus
VTRREVHIYYLEKANKIKS

SEQ ID NO: 181851 - protein, 20 aa, Influenza A virus
VTRREVHIYYLEKANKIKSE

SEQ ID NO: 181852 - protein, 13 aa, Influenza A virus
VVNFVSMEFSLTD

SEQ ID NO: 181853 - protein, 14 aa, Influenza A virus
VVNFVSMEFSLTDP

SEQ ID NO: 181854 - protein, 15 aa, Influenza A virus
VVNFVSMEFSLTDPR

SEQ ID NO: 181855 - protein, 16 aa, Influenza A virus
VVNFVSMEFSLTDPRL

SEQ ID NO: 181856 - protein, 17 aa, Influenza A virus
VVNFVSMEFSLTDPRLE

SEQ ID NO: 181857 - protein, 18 aa, Influenza A virus
VVNFVSMEFSLTDPRLEP

SEQ ID NO: 181858 - protein, 19 aa, Influenza A virus
VVNFVSMEFSLTDPRLEPH

SEQ ID NO: 181859 - protein, 20 aa, Influenza A virus
VVNFVSMEFSLTDPRLEPHK

SEQ ID NO: 181860 - protein, 21 aa, Influenza A virus
VVNFVSMEFSLTDPRLEPHKW

SEQ ID NO: 181861 - protein, 22 aa, Influenza A virus
VVNFVSMEFSLTDPRLEPHKWE

SEQ ID NO: 181862 - protein, 23 aa, Influenza A virus
VVNFVSMEFSLTDPRLEPHKWEK

SEQ ID NO: 181863 - protein, 24 aa, Influenza A virus
VVNFVSMEFSLTDPRLEPHKWEKY

SEQ ID NO: 181864 - protein, 25 aa, Influenza A virus
VVNFVSMEFSLTDPRLEPHKWEKYC

SEQ ID NO: 181865 - protein, 13 aa, Influenza A virus
VYINTALLNASCA

SEQ ID NO: 181866 - protein, 14 aa, Influenza A virus
VYINTALLNASCAA

SEQ ID NO: 181867 - protein, 15 aa, Influenza A virus
VYINTALLNASCAAM

SEQ ID NO: 181868 - protein, 16 aa, Influenza A virus
VYINTALLNASCAAMD

SEQ ID NO: 181869 - protein, 17 aa, Influenza A virus
VYINTALLNASCAAMDD

SEQ ID NO: 181870 - protein, 18 aa, Influenza A virus
VYINTALLNASCAAMDDF

SEQ ID NO: 181871 - protein, 19 aa, Influenza A virus
VYINTALLNASCAAMDDFQ

SEQ ID NO: 181872 - protein, 20 aa, Influenza A virus
VYINTALLNASCAAMDDFQL

SEQ ID NO: 181873 - protein, 21 aa, Influenza A virus
VYINTALLNASCAAMDDFQLI

SEQ ID NO: 181874 - protein, 22 aa, Influenza A virus
VYINTALLNASCAAMDDFQLIP

SEQ ID NO: 181875 - protein, 23 aa, Influenza A virus
VYINTALLNASCAAMDDFQLIPM

SEQ ID NO: 181876 - protein, 24 aa, Influenza A virus
VYINTALLNASCAAMDDFQLIPMI

SEQ ID NO: 181877 - protein, 25 aa, Influenza A virus
VYINTALLNASCAAMDDFQLIPMIS

SEQ ID NO: 181878 - protein, 24 aa, Influenza A virus
WDSFRQSERGEETIEERFEITGTM

SEQ ID NO: 181879 - protein, 25 aa, Influenza A virus
WDSFRQSERGEETIEERFEITGTMR

SEQ ID NO: 181880 - protein, 14 aa, Influenza A virus
WGMEMRRCLLQSLQ

SEQ ID NO: 181881 - protein, 15 aa, Influenza A virus
WGMEMRRCLLQSLQQ

SEQ ID NO: 181882 - protein, 16 aa, Influenza A virus
WGMEMRRCLLQSLQQI

SEQ ID NO: 181883 - protein, 17 aa, Influenza A virus
WGMEMRRCLLQSLQQIE

SEQ ID NO: 181884 - protein, 18 aa, Influenza A virus
WGMEMRRCLLQSLQQIES

SEQ ID NO: 181885 - protein, 19 aa, Influenza A virus
WGMEMRRCLLQSLQQIESM

SEQ ID NO: 181886 - protein, 20 aa, Influenza A virus
WGMEMRRCLLQSLQQIESMI

SEQ ID NO: 181887 - protein, 21 aa, Influenza A virus
WGMEMRRCLLQSLQQIESMIE

SEQ ID NO: 181888 - protein, 22 aa, Influenza A virus
WGMEMRRCLLQSLQQIESMIEA

SEQ ID NO: 181889 - protein, 23 aa, Influenza A virus
WGMEMRRCLLQSLQQIESMIEAE

SEQ ID NO: 181890 - protein, 24 aa, Influenza A virus
WGMEMRRCLLQSLQQIESMIEAES

SEQ ID NO: 181891 - protein, 25 aa, Influenza A virus
WGMEMRRCLLQSLQQIESMIEAESS

SEQ ID NO: 181892 - protein, 14 aa, Influenza A virus
WIELDEIGEDVAPI

SEQ ID NO: 181893 - protein, 15 aa, Influenza A virus
WIELDEIGEDVAPIE

SEQ ID NO: 181894 - protein, 24 aa, Influenza A virus
WPIGESPKGVEEGSIGKVCRTLLA

SEQ ID NO: 181895 - protein, 25 aa, Influenza A virus
WPIGESPKGVEEGSIGKVCRTLLAK

SEQ ID NO: 181896 - protein, 13 aa, Influenza A virus
WVLLNASWFNSFL

SEQ ID NO: 181897 - protein, 14 aa, Influenza A virus
WVLLNASWFNSFLT

SEQ ID NO: 181898 - protein, 15 aa, Influenza A virus
WVLLNASWFNSFLTH

SEQ ID NO: 181899 - protein, 16 aa, Influenza A virus
WVLLNASWFNSFLTHA

SEQ ID NO: 181900 - protein, 17 aa, Influenza A virus
WVLLNASWFNSFLTHAL

SEQ ID NO: 181901 - protein, 16 aa, Influenza A virus
YASPQLEGFSAESRKL

SEQ ID NO: 181902 - protein, 17 aa, Influenza A virus
YASPQLEGFSAESRKLL

SEQ ID NO: 181903 - protein, 13 aa, Influenza A virus
YDYKENRFIEIGV

SEQ ID NO: 181904 - protein, 14 aa, Influenza A virus
YDYKENRFIEIGVT

SEQ ID NO: 181905 - protein, 15 aa, Influenza A virus
YDYKENRFIEIGVTR

SEQ ID NO: 181906 - protein, 16 aa, Influenza A virus
YDYKENRFIEIGVTRR

SEQ ID NO: 181907 - protein, 17 aa, Influenza A virus
YDYKENRFIEIGVTRRE

SEQ ID NO: 181908 - protein, 18 aa, Influenza A virus
YDYKENRFIEIGVTRREV

SEQ ID NO: 181909 - protein, 19 aa, Influenza A virus
YDYKENRFIEIGVTRREVH

SEQ ID NO: 181910 - protein, 15 aa, Influenza A virus
YEAIEECLINDPWVL

SEQ ID NO: 181911 - protein, 16 aa, Influenza A virus
YEAIEECLINDPWVLL

SEQ ID NO: 181912 - protein, 17 aa, Influenza A virus
YEAIEECLINDPWVLLN

SEQ ID NO: 181913 - protein, 18 aa, Influenza A virus
YEAIEECLINDPWVLLNA

SEQ ID NO: 181914 - protein, 19 aa, Influenza A virus
YEAIEECLINDPWVLLNAS

SEQ ID NO: 181915 - protein, 20 aa, Influenza A virus
YEAIEECLINDPWVLLNASW

SEQ ID NO: 181916 - protein, 21 aa, Influenza A virus
YEAIEECLINDPWVLLNASWF

SEQ ID NO: 181917 - protein, 22 aa, Influenza A virus
YEAIEECLINDPWVLLNASWFN

SEQ ID NO: 181918 - protein, 23 aa, Influenza A virus
YEAIEECLINDPWVLLNASWFNS

SEQ ID NO: 181919 - protein, 24 aa, Influenza A virus
YEAIEECLINDPWVLLNASWFNSF

SEQ ID NO: 181920 - protein, 25 aa, Influenza A virus
YEAIEECLINDPWVLLNASWFNSFL

SEQ ID NO: 181921 - protein, 14 aa, Influenza A virus
YFTAEVSHCRATEY

SEQ ID NO: 181922 - protein, 15 aa, Influenza A virus
YFTAEVSHCRATEYI

SEQ ID NO: 181923 - protein, 16 aa, Influenza A virus
YFTAEVSHCRATEYIM

SEQ ID NO: 181924 - protein, 17 aa, Influenza A virus
YFTAEVSHCRATEYIMK

SEQ ID NO: 181925 - protein, 19 aa, Influenza A virus
YFTAEVSHCRATEYIMKGV

SEQ ID NO: 181926 - protein, 20 aa, Influenza A virus
YFTAEVSHCRATEYIMKGVY

SEQ ID NO: 181927 - protein, 21 aa, Influenza A virus
YFTAEVSHCRATEYIMKGVYI

SEQ ID NO: 181928 - protein, 22 aa, Influenza A virus
YFTAEVSHCRATEYIMKGVYIN

SEQ ID NO: 181929 - protein, 23 aa, Influenza A virus
YFTAEVSHCRATEYIMKGVYINT

SEQ ID NO: 181930 - protein, 24 aa, Influenza A virus
YFTAEVSHCRATEYIMKGVYINTA

SEQ ID NO: 181931 - protein, 25 aa, Influenza A virus
YFTAEVSHCRATEYIMKGVYINTAL

SEQ ID NO: 181932 - protein, 13 aa, Influenza A virus
YGFIIKGRSHLRN

SEQ ID NO: 181933 - protein, 14 aa, Influenza A virus
YGFIIKGRSHLRND

SEQ ID NO: 181934 - protein, 15 aa, Influenza A virus
YGFIIKGRSHLRNDT

SEQ ID NO: 181935 - protein, 16 aa, Influenza A virus
YGFIIKGRSHLRNDTD

SEQ ID NO: 181936 - protein, 17 aa, Influenza A virus
YGFIIKGRSHLRNDTDV

SEQ ID NO: 181937 - protein, 18 aa, Influenza A virus
YGFIIKGRSHLRNDTDVV

SEQ ID NO: 181938 - protein, 19 aa, Influenza A virus
YGFIIKGRSHLRNDTDVVN

SEQ ID NO: 181939 - protein, 20 aa, Influenza A virus
YGFIIKGRSHLRNDTDVVNF

SEQ ID NO: 181940 - protein, 21 aa, Influenza A virus
YGFIIKGRSHLRNDTDVVNFV

SEQ ID NO: 181941 - protein, 22 aa, Influenza A virus
YGFIIKGRSHLRNDTDVVNFVS

SEQ ID NO: 181942 - protein, 23 aa, Influenza A virus
YGFIIKGRSHLRNDTDVVNFVSM

SEQ ID NO: 181943 - protein, 24 aa, Influenza A virus
YGFIIKGRSHLRNDTDVVNFVSME

SEQ ID NO: 181944 - protein, 25 aa, Influenza A virus
YGFIIKGRSHLRNDTDVVNFVSMEF

SEQ ID NO: 181945 - protein, 13 aa, Influenza A virus
YIMKGVYINTALL

SEQ ID NO: 181946 - protein, 14 aa, Influenza A virus
YIMKGVYINTALLN

SEQ ID NO: 181947 - protein, 15 aa, Influenza A virus
YIMKGVYINTALLNA

SEQ ID NO: 181948 - protein, 16 aa, Influenza A virus
YIMKGVYINTALLNAS

SEQ ID NO: 181949 - protein, 17 aa, Influenza A virus
YIMKGVYINTALLNASC

SEQ ID NO: 181950 - protein, 18 aa, Influenza A virus
YIMKGVYINTALLNASCA

SEQ ID NO: 181951 - protein, 19 aa, Influenza A virus
YIMKGVYINTALLNASCAA

SEQ ID NO: 181952 - protein, 20 aa, Influenza A virus
YIMKGVYINTALLNASCAAM

SEQ ID NO: 181953 - protein, 21 aa, Influenza A virus
YIMKGVYINTALLNASCAAMD

SEQ ID NO: 181954 - protein, 22 aa, Influenza A virus
YIMKGVYINTALLNASCAAMDD

SEQ ID NO: 181955 - protein, 23 aa, Influenza A virus
YIMKGVYINTALLNASCAAMDDF

SEQ ID NO: 181956 - protein, 24 aa, Influenza A virus
YIMKGVYINTALLNASCAAMDDFQ

SEQ ID NO: 181957 - protein, 25 aa, Influenza A virus
YIMKGVYINTALLNASCAAMDDFQL

SEQ ID NO: 181958 - protein, 13 aa, Influenza A virus
YINTALLNASCAA

SEQ ID NO: 181959 - protein, 14 aa, Influenza A virus
YINTALLNASCAAM

SEQ ID NO: 181960 - protein, 15 aa, Influenza A virus
YINTALLNASCAAMD

SEQ ID NO: 181961 - protein, 16 aa, Influenza A virus
YINTALLNASCAAMDD

SEQ ID NO: 181962 - protein, 17 aa, Influenza A virus
YINTALLNASCAAMDDF

SEQ ID NO: 181963 - protein, 18 aa, Influenza A virus
YINTALLNASCAAMDDFQ

SEQ ID NO: 181964 - protein, 19 aa, Influenza A virus
YINTALLNASCAAMDDFQL

SEQ ID NO: 181965 - protein, 20 aa, Influenza A virus
YINTALLNASCAAMDDFQLI

SEQ ID NO: 181966 - protein, 21 aa, Influenza A virus
YINTALLNASCAAMDDFQLIP

SEQ ID NO: 181967 - protein, 22 aa, Influenza A virus
YINTALLNASCAAMDDFQLIPM

SEQ ID NO: 181968 - protein, 23 aa, Influenza A virus
YINTALLNASCAAMDDFQLIPMI

SEQ ID NO: 181969 - protein, 24 aa, Influenza A virus
YINTALLNASCAAMDDFQLIPMIS

SEQ ID NO: 181970 - protein, 25 aa, Influenza A virus
YINTALLNASCAAMDDFQLIPMISK

SEQ ID NO: 181971 - protein, 14 aa, Influenza A virus
YKENRFIEIGVTRR

SEQ ID NO: 181972 - protein, 15 aa, Influenza A virus
YKENRFIEIGVTRRE

SEQ ID NO: 181973 - protein, 16 aa, Influenza A virus
YKENRFIEIGVTRREV

SEQ ID NO: 181974 - protein, 17 aa, Influenza A virus
YKENRFIEIGVTRREVH

SEQ ID NO: 181975 - protein, 15 aa, Influenza A virus
YTLDEESRARIKTRL

SEQ ID NO: 181976 - protein, 17 aa, Influenza A virus
YTLDEESRARIKTRLFT

SEQ ID NO: 181977 - protein, 18 aa, Influenza A virus
YTLDEESRARIKTRLFTI

SEQ ID NO: 181978 - protein, 19 aa, Influenza A virus
YTLDEESRARIKTRLFTIR

SEQ ID NO: 181979 - protein, 20 aa, Influenza A virus
YTLDEESRARIKTRLFTIRQ

SEQ ID NO: 181980 - protein, 21 aa, Influenza A virus
YTLDEESRARIKTRLFTIRQE

SEQ ID NO: 181981 - protein, 22 aa, Influenza A virus
YTLDEESRARIKTRLFTIRQEM

SEQ ID NO: 181982 - protein, 23 aa, Influenza A virus
YTLDEESRARIKTRLFTIRQEMA

SEQ ID NO: 181983 - protein, 13 aa, Influenza A virus
YVRTNGTSKIKMK

SEQ ID NO: 181984 - protein, 14 aa, Influenza A virus
YVRTNGTSKIKMKW

SEQ ID NO: 181985 - protein, 15 aa, Influenza A virus
YVRTNGTSKIKMKWG

SEQ ID NO: 181986 - protein, 16 aa, Influenza A virus
YVRTNGTSKIKMKWGM

SEQ ID NO: 181987 - protein, 17 aa, Influenza A virus
YVRTNGTSKIKMKWGME

SEQ ID NO: 181988 - protein, 18 aa, Influenza A virus
YVRTNGTSKIKMKWGMEM

SEQ ID NO: 181989 - protein, 19 aa, Influenza A virus
YVRTNGTSKIKMKWGMEMR

SEQ ID NO: 181990 - protein, 20 aa, Influenza A virus
YVRTNGTSKIKMKWGMEMRR

SEQ ID NO: 181991 - protein, 21 aa, Influenza A virus
YVRTNGTSKIKMKWGMEMRRC

SEQ ID NO: 181992 - protein, 22 aa, Influenza A virus
YVRTNGTSKIKMKWGMEMRRCL

SEQ ID NO: 181993 - protein, 23 aa, Influenza A virus
YVRTNGTSKIKMKWGMEMRRCLL

SEQ ID NO: 181994 - protein, 24 aa, Influenza A virus
YVRTNGTSKIKMKWGMEMRRCLLQ

SEQ ID NO: 181995 - protein, 25 aa, Influenza A virus
YVRTNGTSKIKMKWGMEMRRCLLQS

SEQ ID NO: 181996 - protein, 17 aa, Artificial Sequence
  Description of Artificial Sequence: Synthetic peptide
  Seed: GMMMGMFNMLSTVLGVS
GMMMGMANMLSAVLAVS

SEQ ID NO: 181997 - protein, 17 aa, Artificial Sequence
  Description of Artificial Sequence: Synthetic peptide
  Seed: GMMMGMFNMLSTVLGVS
GMMMGMANMLSAVLIVS

SEQ ID NO: 181998 - protein, 17 aa, Artificial Sequence
  Description of Artificial Sequence: Synthetic peptide
  Seed: GMMMGMFNMLSTVLGVS
GMMMGMANMLSAVLLVS

SEQ ID NO: 181999 - protein, 17 aa, Artificial Sequence
  Description of Artificial Sequence: Synthetic peptide
  Seed: GMMMGMFNMLSTVLGVS
GMMMGMANMLSAVLMVS

SEQ ID NO: 182000 - protein, 17 aa, Artificial Sequence
  Description of Artificial Sequence: Synthetic peptide
  Seed: GMMMGMFNMLSTVLGVS
GMMMGMANMLSAVLVVS

SEQ ID NO: 182001 - protein, 17 aa, Artificial Sequence
  Description of Artificial Sequence: Synthetic peptide
  Seed: GMMMGMFNMLSTVLGVS
GMMMGMANMLSGVLAVS

SEQ ID NO: 182002 - protein, 17 aa, Artificial Sequence
  Description of Artificial Sequence: Synthetic peptide
  Seed: GMMMGMFNMLSTVLGVS
GMMMGMANMLSGVLTVS

SEQ ID NO: 182003 - protein, 17 aa, Artificial Sequence
  Description of Artificial Sequence: Synthetic peptide
  Seed: GMMMGMFNMLSTVLGVS
GMMMGMANMLSGVLVVS

SEQ ID NO: 182004 - protein, 17 aa, Artificial Sequence
  Description of Artificial Sequence: Synthetic peptide
  Seed: GMMMGMFNMLSTVLGVS
GMMMGMANMLSPVLIVS

SEQ ID NO: 182005 - protein, 17 aa, Artificial Sequence
  Description of Artificial Sequence: Synthetic peptide
  Seed: GMMMGMFNMLSTVLGVS
GMMMGMANMLSPVLLVS

SEQ ID NO: 182006 - protein, 17 aa, Artificial Sequence
  Description of Artificial Sequence: Synthetic peptide
  Seed: GMMMGMFNMLSTVLGVS
GMMMGMANMLSPVLVVS

SEQ ID NO: 182007 - protein, 17 aa, Artificial Sequence
  Description of Artificial Sequence: Synthetic peptide
  Seed: GMMMGMFNMLSTVLGVS
GMMMGMANMLSSVLVVS

SEQ ID NO: 182008 - protein, 17 aa, Artificial Sequence
  Description of Artificial Sequence: Synthetic peptide
  Seed: GMMMGMFNMLSTVLGVS
GMMMGMANMMSAVLAVS

SEQ ID NO: 182009 - protein, 17 aa, Artificial Sequence
  Description of Artificial Sequence: Synthetic peptide
  Seed: GMMMGMFNMLSTVLGVS
GMMMGMANMMSAVLIVS

SEQ ID NO: 182010 - protein, 17 aa, Artificial Sequence
  Description of Artificial Sequence: Synthetic peptide
  Seed: GMMMGMFNMLSTVLGVS
GMMMGMANMMSAVLLVS

SEQ ID NO: 182011 - protein, 17 aa, Artificial Sequence
  Description of Artificial Sequence: Synthetic peptide
  Seed: GMMMGMFNMLSTVLGVS
GMMMGMANMMSAVLNVS

SEQ ID NO: 182012 - protein, 17 aa, Artificial Sequence
  Description of Artificial Sequence: Synthetic peptide
  Seed: GMMMGMFNMLSTVLGVS
GMMMGMANMMSAVLSVS

SEQ ID NO: 182013 - protein, 17 aa, Artificial Sequence
  Description of Artificial Sequence: Synthetic peptide
  Seed: GMMMGMFNMLSTVLGVS
GMMMGMANMMSAVLVVS

SEQ ID NO: 182014 - protein, 17 aa, Artificial Sequence
  Description of Artificial Sequence: Synthetic peptide
  Seed: GMMMGMFNMLSTVLGVS
GMMMGMANMMSGVLAVS

SEQ ID NO: 182015 - protein, 17 aa, Artificial Sequence
  Description of Artificial Sequence: Synthetic peptide
  Seed: GMMMGMFNMLSTVLGVS
GMMMGMCNMLSAVLAVS

SEQ ID NO: 182016 - protein, 17 aa, Artificial Sequence
  Description of Artificial Sequence: Synthetic peptide
  Seed: GMMMGMFNMLSTVLGVS
GMMMGMCNMLSAVLVVS

SEQ ID NO: 182017 - protein, 17 aa, Artificial Sequence
  Description of Artificial Sequence: Synthetic peptide
  Seed: GMMMGMFNMLSTVLGVS
GMMMGMCNMLSPVLVVS

SEQ ID NO: 182018 - protein, 17 aa, Artificial Sequence
  Description of Artificial Sequence: Synthetic peptide
  Seed: GMMMGMFNMLSTVLGVS
GMMMGMCNMMSAVLAVS

SEQ ID NO: 182019 - protein, 17 aa, Artificial Sequence
  Description of Artificial Sequence: Synthetic peptide
  Seed: GMMMGMFNMLSTVLGVS
GMMMGMCNMMSAVLIVS

SEQ ID NO: 182020 - protein, 17 aa, Artificial Sequence
  Description of Artificial Sequence: Synthetic peptide
  Seed: GMMMGMFNMLSTVLGVS
GMMMGMCNMMSAVLTVS

SEQ ID NO: 182021 - protein, 17 aa, Artificial Sequence
  Description of Artificial Sequence: Synthetic peptide
  Seed: GMMMGMFNMLSTVLGVS
GMMMGMCNMMSAVLVVS

SEQ ID NO: 182022 - protein, 17 aa, Artificial Sequence
  Description of Artificial Sequence: Synthetic peptide
  Seed: GMMMGMFNMLSTVLGVS
GMMMGMCNMMSPVLVVS

SEQ ID NO: 182023 - protein, 17 aa, Artificial Sequence
  Description of Artificial Sequence: Synthetic peptide
  Seed: GMMMGMFNMLSTVLGVS
GMMMGMFNMASAVLAVS

SEQ ID NO: 182024 - protein, 17 aa, Artificial Sequence
  Description of Artificial Sequence: Synthetic peptide
  Seed: GMMMGMFNMLSTVLGVS
GMMMGMFNMASAVLCVS

SEQ ID NO: 182025 - protein, 17 aa, Artificial Sequence
  Description of Artificial Sequence: Synthetic peptide
  Seed: GMMMGMFNMLSTVLGVS
GMMMGMFNMASAVLDVS

SEQ ID NO: 182026 - protein, 17 aa, Artificial Sequence
  Description of Artificial Sequence: Synthetic peptide
  Seed: GMMMGMFNMLSTVLGVS
GMMMGMFNMASAVLEVS

SEQ ID NO: 182027 - protein, 17 aa, Artificial Sequence
  Description of Artificial Sequence: Synthetic peptide
  Seed: GMMMGMFNMLSTVLGVS
GMMMGMFNMASAVLFVS

SEQ ID NO: 182028 - protein, 17 aa, Artificial Sequence
  Description of Artificial Sequence: Synthetic peptide
  Seed: GMMMGMFNMLSTVLGVS
GMMMGMFNMASAVLGVS

SEQ ID NO: 182029 - protein, 17 aa, Artificial Sequence
  Description of Artificial Sequence: Synthetic peptide
  Seed: GMMMGMFNMLSTVLGVS
GMMMGMFNMASAVLHVS

SEQ ID NO: 182030 - protein, 17 aa, Artificial Sequence
  Description of Artificial Sequence: Synthetic peptide
  Seed: GMMMGMFNMLSTVLGVS
GMMMGMFNMASAVLIVS

SEQ ID NO: 182031 - protein, 17 aa, Artificial Sequence
  Description of Artificial Sequence: Synthetic peptide
  Seed: GMMMGMFNMLSTVLGVS
GMMMGMFNMASAVLKVS

SEQ ID NO: 182032 - protein, 17 aa, Artificial Sequence
  Description of Artificial Sequence: Synthetic peptide
  Seed: GMMMGMFNMLSTVLGVS
GMMMGMFNMASAVLLVS

SEQ ID NO: 182033 - protein, 17 aa, Artificial Sequence
  Description of Artificial Sequence: Synthetic peptide
  Seed: GMMMGMFNMLSTVLGVS
GMMMGMFNMASAVLMVS

SEQ ID NO: 182034 - protein, 17 aa, Artificial Sequence
  Description of Artificial Sequence: Synthetic peptide
  Seed: GMMMGMFNMLSTVLGVS
GMMMGMFNMASAVLNVS

SEQ ID NO: 182035 - protein, 17 aa, Artificial Sequence
  Description of Artificial Sequence: Synthetic peptide
  Seed: GMMMGMFNMLSTVLGVS
GMMMGMFNMASAVLPVS

SEQ ID NO: 182036 - protein, 17 aa, Artificial Sequence
  Description of Artificial Sequence: Synthetic peptide
  Seed: GMMMGMFNMLSTVLGVS
GMMMGMFNMASAVLQVS

SEQ ID NO: 182037 - protein, 17 aa, Artificial Sequence
  Description of Artificial Sequence: Synthetic peptide
  Seed: GMMMGMFNMLSTVLGVS
GMMMGMFNMASAVLRVS

SEQ ID NO: 182038 - protein, 17 aa, Artificial Sequence
  Description of Artificial Sequence: Synthetic peptide
  Seed: GMMMGMFNMLSTVLGVS
GMMMGMFNMASAVLSVS

SEQ ID NO: 182039 - protein, 17 aa, Artificial Sequence
  Description of Artificial Sequence: Synthetic peptide
  Seed: GMMMGMFNMLSTVLGVS
GMMMGMFNMASAVLTVS

SEQ ID NO: 182040 - protein, 17 aa, Artificial Sequence
  Description of Artificial Sequence: Synthetic peptide
  Seed: GMMMGMFNMLSTVLGVS
GMMMGMFNMASAVLVVS

SEQ ID NO: 182041 - protein, 17 aa, Artificial Sequence
  Description of Artificial Sequence: Synthetic peptide
  Seed: GMMMGMFNMLSTVLGVS
GMMMGMFNMASAVLYVS

SEQ ID NO: 182042 - protein, 17 aa, Artificial Sequence
  Description of Artificial Sequence: Synthetic peptide
  Seed: GMMMGMFNMLSTVLGVS
GMMMGMFNMASEVLNVS

SEQ ID NO: 182043 - protein, 17 aa, Artificial Sequence
  Description of Artificial Sequence: Synthetic peptide
  Seed: GMMMGMFNMLSTVLGVS
GMMMGMFNMASGVLAVS

SEQ ID NO: 182044 - protein, 17 aa, Artificial Sequence
  Description of Artificial Sequence: Synthetic peptide
  Seed: GMMMGMFNMLSTVLGVS
GMMMGMFNMASGVLFVS

SEQ ID NO: 182045 - protein, 17 aa, Artificial Sequence
  Description of Artificial Sequence: Synthetic peptide
  Seed: GMMMGMFNMLSTVLGVS
GMMMGMFNMASGVLGVS

SEQ ID NO: 182046 - protein, 17 aa, Artificial Sequence
  Description of Artificial Sequence: Synthetic peptide
  Seed: GMMMGMFNMLSTVLGVS
GMMMGMFNMASGVLHVS

SEQ ID NO: 182047 - protein, 17 aa, Artificial Sequence
  Description of Artificial Sequence: Synthetic peptide
  Seed: GMMMGMFNMLSTVLGVS
GMMMGMFNMASGVLIVS

SEQ ID NO: 182048 - protein, 17 aa, Artificial Sequence
  Description of Artificial Sequence: Synthetic peptide
  Seed: GMMMGMFNMLSTVLGVS
GMMMGMFNMASGVLKVS

SEQ ID NO: 182049 - protein, 17 aa, Artificial Sequence
  Description of Artificial Sequence: Synthetic peptide
  Seed: GMMMGMFNMLSTVLGVS
GMMMGMFNMASGVLLVS

SEQ ID NO: 182050 - protein, 17 aa, Artificial Sequence
  Description of Artificial Sequence: Synthetic peptide
  Seed: GMMMGMFNMLSTVLGVS
GMMMGMFNMASGVLMVS

SEQ ID NO: 182051 - protein, 17 aa, Artificial Sequence
  Description of Artificial Sequence: Synthetic peptide
  Seed: GMMMGMFNMLSTVLGVS
GMMMGMFNMASGVLNVS

SEQ ID NO: 182052 - protein, 17 aa, Artificial Sequence
  Description of Artificial Sequence: Synthetic peptide
  Seed: GMMMGMFNMLSTVLGVS
GMMMGMFNMASGVLPVS

SEQ ID NO: 182053 - protein, 17 aa, Artificial Sequence
  Description of Artificial Sequence: Synthetic peptide
  Seed: GMMMGMFNMLSTVLGVS
GMMMGMFNMASGVLQVS

SEQ ID NO: 182054 - protein, 17 aa, Artificial Sequence
  Description of Artificial Sequence: Synthetic peptide
  Seed: GMMMGMFNMLSTVLGVS
GMMMGMFNMASGVLRVS

SEQ ID NO: 182055 - protein, 17 aa, Artificial Sequence
  Description of Artificial Sequence: Synthetic peptide
  Seed: GMMMGMFNMLSTVLGVS
GMMMGMFNMASGVLSVS

SEQ ID NO: 182056 - protein, 17 aa, Artificial Sequence
  Description of Artificial Sequence: Synthetic peptide
  Seed: GMMMGMFNMLSTVLGVS
GMMMGMFNMASGVLTVS

SEQ ID NO: 182057 - protein, 17 aa, Artificial Sequence
  Description of Artificial Sequence: Synthetic peptide
  Seed: GMMMGMFNMLSTVLGVS
GMMMGMFNMASGVLVVS

SEQ ID NO: 182058 - protein, 17 aa, Artificial Sequence
  Description of Artificial Sequence: Synthetic peptide
  Seed: GMMMGMFNMLSTVLGVS
GMMMGMFNMASGVLYVS

SEQ ID NO: 182059 - protein, 17 aa, Artificial Sequence
  Description of Artificial Sequence: Synthetic peptide
  Seed: GMMMGMFNMLSTVLGVS
GMMMGMFNMASHVLNVS

SEQ ID NO: 182060 - protein, 17 aa, Artificial Sequence
  Description of Artificial Sequence: Synthetic peptide
  Seed: GMMMGMFNMLSTVLGVS
GMMMGMFNMASIVLHVS

SEQ ID NO: 182061 - protein, 17 aa, Artificial Sequence
  Description of Artificial Sequence: Synthetic peptide
  Seed: GMMMGMFNMLSTVLGVS
GMMMGMFNMASIVLNVS

SEQ ID NO: 182062 - protein, 17 aa, Artificial Sequence
  Description of Artificial Sequence: Synthetic peptide
  Seed: GMMMGMFNMLSTVLGVS
GMMMGMFNMASIVLSVS

SEQ ID NO: 182063 - protein, 17 aa, Artificial Sequence
  Description of Artificial Sequence: Synthetic peptide
  Seed: GMMMGMFNMLSTVLGVS
GMMMGMFNMASKVLAVS

SEQ ID NO: 182064 - protein, 17 aa, Artificial Sequence
  Description of Artificial Sequence: Synthetic peptide
  Seed: GMMMGMFNMLSTVLGVS
GMMMGMFNMASKVLGVS

SEQ ID NO: 182065 - protein, 17 aa, Artificial Sequence
  Description of Artificial Sequence: Synthetic peptide
  Seed: GMMMGMFNMLSTVLGVS
GMMMGMFNMASKVLHVS

SEQ ID NO: 182066 - protein, 17 aa, Artificial Sequence
  Description of Artificial Sequence: Synthetic peptide
  Seed: GMMMGMFNMLSTVLGVS
GMMMGMFNMASKVLKVS

SEQ ID NO: 182067 - protein, 17 aa, Artificial Sequence
  Description of Artificial Sequence: Synthetic peptide
  Seed: GMMMGMFNMLSTVLGVS
GMMMGMFNMASKVLNVS

SEQ ID NO: 182068 - protein, 17 aa, Artificial Sequence
  Description of Artificial Sequence: Synthetic peptide
  Seed: GMMMGMFNMLSTVLGVS
GMMMGMFNMASKVLQVS

SEQ ID NO: 182069 - protein, 17 aa, Artificial Sequence
  Description of Artificial Sequence: Synthetic peptide
  Seed: GMMMGMFNMLSTVLGVS
GMMMGMFNMASKVLSVS

SEQ ID NO: 182070 - protein, 17 aa, Artificial Sequence
  Description of Artificial Sequence: Synthetic peptide
  Seed: GMMMGMFNMLSTVLGVS
GMMMGMFNMASKVLTVS

SEQ ID NO: 182071 - protein, 17 aa, Artificial Sequence
  Description of Artificial Sequence: Synthetic peptide
  Seed: GMMMGMFNMLSTVLGVS
GMMMGMFNMASMVLNVS

SEQ ID NO: 182072 - protein, 17 aa, Artificial Sequence
  Description of Artificial Sequence: Synthetic peptide
  Seed: GMMMGMFNMLSTVLGVS
GMMMGMFNMASNVLAVS

SEQ ID NO: 182073 - protein, 17 aa, Artificial Sequence
  Description of Artificial Sequence: Synthetic peptide
  Seed: GMMMGMFNMLSTVLGVS
GMMMGMFNMASNVLDVS

SEQ ID NO: 182074 - protein, 17 aa, Artificial Sequence
  Description of Artificial Sequence: Synthetic peptide
  Seed: GMMMGMFNMLSTVLGVS
GMMMGMFNMASNVLEVS

SEQ ID NO: 182075 - protein, 17 aa, Artificial Sequence
  Description of Artificial Sequence: Synthetic peptide
  Seed: GMMMGMFNMLSTVLGVS
GMMMGMFNMASNVLGVS

SEQ ID NO: 182076 - protein, 17 aa, Artificial Sequence
  Description of Artificial Sequence: Synthetic peptide
  Seed: GMMMGMFNMLSTVLGVS
GMMMGMFNMASNVLHVS

SEQ ID NO: 182077 - protein, 17 aa, Artificial Sequence
  Description of Artificial Sequence: Synthetic peptide
  Seed: GMMMGMFNMLSTVLGVS
GMMMGMFNMASNVLIVS

SEQ ID NO: 182078 - protein, 17 aa, Artificial Sequence
  Description of Artificial Sequence: Synthetic peptide
  Seed: GMMMGMFNMLSTVLGVS
GMMMGMFNMASNVLLVS

SEQ ID NO: 182079 - protein, 17 aa, Artificial Sequence
  Description of Artificial Sequence: Synthetic peptide
  Seed: GMMMGMFNMLSTVLGVS
GMMMGMFNMASNVLMVS

SEQ ID NO: 182080 - protein, 17 aa, Artificial Sequence
  Description of Artificial Sequence: Synthetic peptide
  Seed: GMMMGMFNMLSTVLGVS
GMMMGMFNMASNVLNVS

SEQ ID NO: 182081 - protein, 17 aa, Artificial Sequence
  Description of Artificial Sequence: Synthetic peptide
  Seed: GMMMGMFNMLSTVLGVS
GMMMGMFNMASNVLQVS

SEQ ID NO: 182082 - protein, 17 aa, Artificial Sequence
  Description of Artificial Sequence: Synthetic peptide
  Seed: GMMMGMFNMLSTVLGVS
GMMMGMFNMASNVLSVS

SEQ ID NO: 182083 - protein, 17 aa, Artificial Sequence
  Description of Artificial Sequence: Synthetic peptide
  Seed: GMMMGMFNMLSTVLGVS
GMMMGMFNMASNVLTVS

SEQ ID NO: 182084 - protein, 17 aa, Artificial Sequence
  Description of Artificial Sequence: Synthetic peptide
  Seed: GMMMGMFNMLSTVLGVS
GMMMGMFNMASNVLVVS

SEQ ID NO: 182085 - protein, 17 aa, Artificial Sequence
  Description of Artificial Sequence: Synthetic peptide
  Seed: GMMMGMFNMLSTVLGVS
GMMMGMFNMASPVLCVS

SEQ ID NO: 182086 - protein, 17 aa, Artificial Sequence
  Description of Artificial Sequence: Synthetic peptide
  Seed: GMMMGMFNMLSTVLGVS
GMMMGMFNMASPVLDVS

SEQ ID NO: 182087 - protein, 17 aa, Artificial Sequence
  Description of Artificial Sequence: Synthetic peptide
  Seed: GMMMGMFNMLSTVLGVS
GMMMGMFNMASPVLEVS

SEQ ID NO: 182088 - protein, 17 aa, Artificial Sequence
  Description of Artificial Sequence: Synthetic peptide
  Seed: GMMMGMFNMLSTVLGVS
GMMMGMFNMASPVLFVS

SEQ ID NO: 182089 - protein, 17 aa, Artificial Sequence
  Description of Artificial Sequence: Synthetic peptide
  Seed: GMMMGMFNMLSTVLGVS
GMMMGMFNMASPVLGVS

SEQ ID NO: 182090 - protein, 17 aa, Artificial Sequence
  Description of Artificial Sequence: Synthetic peptide
  Seed: GMMMGMFNMLSTVLGVS
GMMMGMFNMASPVLHVS

SEQ ID NO: 182091 - protein, 17 aa, Artificial Sequence
  Description of Artificial Sequence: Synthetic peptide
  Seed: GMMMGMFNMLSTVLGVS
GMMMGMFNMASPVLIVS

SEQ ID NO: 182092 - protein, 17 aa, Artificial Sequence
  Description of Artificial Sequence: Synthetic peptide
  Seed: GMMMGMFNMLSTVLGVS
GMMMGMFNMASPVLKVS

SEQ ID NO: 182093 - protein, 17 aa, Artificial Sequence
  Description of Artificial Sequence: Synthetic peptide
  Seed: GMMMGMFNMLSTVLGVS
GMMMGMFNMASPVLLVS

SEQ ID NO: 182094 - protein, 17 aa, Artificial Sequence
  Description of Artificial Sequence: Synthetic peptide
  Seed: GMMMGMFNMLSTVLGVS
GMMMGMFNMASPVLMVS

SEQ ID NO: 182095 - protein, 17 aa, Artificial Sequence
  Description of Artificial Sequence: Synthetic peptide
  Seed: GMMMGMFNMLSTVLGVS
GMMMGMFNMASPVLNVS

SEQ ID NO: 182096 - protein, 17 aa, Artificial Sequence
  Description of Artificial Sequence: Synthetic peptide
  Seed: GMMMGMFNMLSTVLGVS
GMMMGMFNMASPVLPVS

SEQ ID NO: 182097 - protein, 17 aa, Artificial Sequence
  Description of Artificial Sequence: Synthetic peptide
  Seed: GMMMGMFNMLSTVLGVS
GMMMGMFNMASPVLQVS

SEQ ID NO: 182098 - protein, 17 aa, Artificial Sequence
  Description of Artificial Sequence: Synthetic peptide
  Seed: GMMMGMFNMLSTVLGVS
GMMMGMFNMASPVLRVS

SEQ ID NO: 182099 - protein, 17 aa, Artificial Sequence
  Description of Artificial Sequence: Synthetic peptide
  Seed: GMMMGMFNMLSTVLGVS
GMMMGMFNMASPVLSVS

SEQ ID NO: 182100 - protein, 17 aa, Artificial Sequence
  Description of Artificial Sequence: Synthetic peptide
  Seed: GMMMGMFNMLSTVLGVS
GMMMGMFNMASPVLTVS

SEQ ID NO: 182101 - protein, 17 aa, Artificial Sequence
  Description of Artificial Sequence: Synthetic peptide
  Seed: GMMMGMFNMLSTVLGVS
GMMMGMFNMASPVLVVS

SEQ ID NO: 182102 - protein, 17 aa, Artificial Sequence
  Description of Artificial Sequence: Synthetic peptide
  Seed: GMMMGMFNMLSTVLGVS
GMMMGMFNMASPVLYVS

SEQ ID NO: 182103 - protein, 17 aa, Artificial Sequence
  Description of Artificial Sequence: Synthetic peptide
  Seed: GMMMGMFNMLSTVLGVS
GMMMGMFNMASQVLNVS

SEQ ID NO: 182104 - protein, 17 aa, Artificial Sequence
  Description of Artificial Sequence: Synthetic peptide
  Seed: GMMMGMFNMLSTVLGVS
GMMMGMFNMASQVLSVS

SEQ ID NO: 182105 - protein, 17 aa, Artificial Sequence
  Description of Artificial Sequence: Synthetic peptide
  Seed: GMMMGMFNMLSTVLGVS
GMMMGMFNMASRVLAVS

SEQ ID NO: 182106 - protein, 17 aa, Artificial Sequence
  Description of Artificial Sequence: Synthetic peptide
  Seed: GMMMGMFNMLSTVLGVS
GMMMGMFNMASRVLGVS

SEQ ID NO: 182107 - protein, 17 aa, Artificial Sequence
  Description of Artificial Sequence: Synthetic peptide
  Seed: GMMMGMFNMLSTVLGVS
GMMMGMFNMASRVLHVS

SEQ ID NO: 182108 - protein, 17 aa, Artificial Sequence
  Description of Artificial Sequence: Synthetic peptide
  Seed: GMMMGMFNMLSTVLGVS
GMMMGMFNMASRVLKVS

SEQ ID NO: 182109 - protein, 17 aa, Artificial Sequence
  Description of Artificial Sequence: Synthetic peptide
  Seed: GMMMGMFNMLSTVLGVS
GMMMGMFNMASRVLNVS

SEQ ID NO: 182110 - protein, 17 aa, Artificial Sequence
  Description of Artificial Sequence: Synthetic peptide
  Seed: GMMMGMFNMLSTVLGVS
GMMMGMFNMASRVLSVS

SEQ ID NO: 182111 - protein, 17 aa, Artificial Sequence
  Description of Artificial Sequence: Synthetic peptide
  Seed: GMMMGMFNMLSTVLGVS
GMMMGMFNMASSVLAVS

SEQ ID NO: 182112 - protein, 17 aa, Artificial Sequence
  Description of Artificial Sequence: Synthetic peptide
  Seed: GMMMGMFNMLSTVLGVS
GMMMGMFNMASSVLDVS

SEQ ID NO: 182113 - protein, 17 aa, Artificial Sequence
  Description of Artificial Sequence: Synthetic peptide
  Seed: GMMMGMFNMLSTVLGVS
GMMMGMFNMASSVLGVS

SEQ ID NO: 182114 - protein, 17 aa, Artificial Sequence
  Description of Artificial Sequence: Synthetic peptide
  Seed: GMMMGMFNMLSTVLGVS
GMMMGMFNMASSVLIVS

SEQ ID NO: 182115 - protein, 17 aa, Artificial Sequence
  Description of Artificial Sequence: Synthetic peptide
  Seed: GMMMGMFNMLSTVLGVS
GMMMGMFNMASSVLKVS

SEQ ID NO: 182116 - protein, 17 aa, Artificial Sequence
  Description of Artificial Sequence: Synthetic peptide
  Seed: GMMMGMFNMLSTVLGVS
GMMMGMFNMASSVLLVS

SEQ ID NO: 182117 - protein, 17 aa, Artificial Sequence
  Description of Artificial Sequence: Synthetic peptide
  Seed: GMMMGMFNMLSTVLGVS
GMMMGMFNMASSVLMVS

SEQ ID NO: 182118 - protein, 17 aa, Artificial Sequence
  Description of Artificial Sequence: Synthetic peptide
  Seed: GMMMGMFNMLSTVLGVS
GMMMGMFNMASSVLNVS

SEQ ID NO: 182119 - protein, 17 aa, Artificial Sequence
  Description of Artificial Sequence: Synthetic peptide
  Seed: GMMMGMFNMLSTVLGVS
GMMMGMFNMASSVLPVS

SEQ ID NO: 182120 - protein, 17 aa, Artificial Sequence
  Description of Artificial Sequence: Synthetic peptide
  Seed: GMMMGMFNMLSTVLGVS
GMMMGMFNMASSVLQVS

SEQ ID NO: 182121 - protein, 17 aa, Artificial Sequence
  Description of Artificial Sequence: Synthetic peptide
  Seed: GMMMGMFNMLSTVLGVS
GMMMGMFNMASSVLRVS

SEQ ID NO: 182122 - protein, 17 aa, Artificial Sequence
  Description of Artificial Sequence: Synthetic peptide
  Seed: GMMMGMFNMLSTVLGVS
GMMMGMFNMASSVLSVS

SEQ ID NO: 182123 - protein, 17 aa, Artificial Sequence
  Description of Artificial Sequence: Synthetic peptide
  Seed: GMMMGMFNMLSTVLGVS
GMMMGMFNMASSVLTVS

SEQ ID NO: 182124 - protein, 17 aa, Artificial Sequence
  Description of Artificial Sequence: Synthetic peptide
  Seed: GMMMGMFNMLSTVLGVS
GMMMGMFNMASSVLVVS

SEQ ID NO: 182125 - protein, 17 aa, Artificial Sequence
  Description of Artificial Sequence: Synthetic peptide
  Seed: GMMMGMFNMLSTVLGVS
GMMMGMFNMASSVLYVS

SEQ ID NO: 182126 - protein, 17 aa, Artificial Sequence
  Description of Artificial Sequence: Synthetic peptide
  Seed: GMMMGMFNMLSTVLGVS
GMMMGMFNMASTVLAVS

SEQ ID NO: 182127 - protein, 17 aa, Artificial Sequence
  Description of Artificial Sequence: Synthetic peptide
  Seed: GMMMGMFNMLSTVLGVS
GMMMGMFNMASTVLDVS

SEQ ID NO: 182128 - protein, 17 aa, Artificial Sequence
  Description of Artificial Sequence: Synthetic peptide
  Seed: GMMMGMFNMLSTVLGVS
GMMMGMFNMASTVLGVS

SEQ ID NO: 182129 - protein, 17 aa, Artificial Sequence
  Description of Artificial Sequence: Synthetic peptide
  Seed: GMMMGMFNMLSTVLGVS
GMMMGMFNMASTVLHVS

SEQ ID NO: 182130 - protein, 17 aa, Artificial Sequence
  Description of Artificial Sequence: Synthetic peptide
  Seed: GMMMGMFNMLSTVLGVS
GMMMGMFNMASTVLIVS

SEQ ID NO: 182131 - protein, 17 aa, Artificial Sequence
  Description of Artificial Sequence: Synthetic peptide
  Seed: GMMMGMFNMLSTVLGVS
GMMMGMFNMASTVLKVS

SEQ ID NO: 182132 - protein, 17 aa, Artificial Sequence
  Description of Artificial Sequence: Synthetic peptide
  Seed: GMMMGMFNMLSTVLGVS
GMMMGMFNMASTVLLVS

SEQ ID NO: 182133 - protein, 17 aa, Artificial Sequence
  Description of Artificial Sequence: Synthetic peptide
  Seed: GMMMGMFNMLSTVLGVS
GMMMGMFNMASTVLMVS

SEQ ID NO: 182134 - protein, 17 aa, Artificial Sequence
  Description of Artificial Sequence: Synthetic peptide
  Seed: GMMMGMFNMLSTVLGVS
GMMMGMFNMASTVLNVS

SEQ ID NO: 182135 - protein, 17 aa, Artificial Sequence
  Description of Artificial Sequence: Synthetic peptide
  Seed: GMMMGMFNMLSTVLGVS
GMMMGMFNMASTVLPVS

SEQ ID NO: 182136 - protein, 17 aa, Artificial Sequence
  Description of Artificial Sequence: Synthetic peptide
  Seed: GMMMGMFNMLSTVLGVS
GMMMGMFNMASTVLQVS

SEQ ID NO: 182137 - protein, 17 aa, Artificial Sequence
  Description of Artificial Sequence: Synthetic peptide
  Seed: GMMMGMFNMLSTVLGVS
GMMMGMFNMASTVLSVS

SEQ ID NO: 182138 - protein, 17 aa, Artificial Sequence
  Description of Artificial Sequence: Synthetic peptide
  Seed: GMMMGMFNMLSTVLGVS
GMMMGMFNMASTVLTVS

SEQ ID NO: 182139 - protein, 17 aa, Artificial Sequence
  Description of Artificial Sequence: Synthetic peptide
  Seed: GMMMGMFNMLSTVLGVS
GMMMGMFNMASTVLVVS

SEQ ID NO: 182140 - protein, 17 aa, Artificial Sequence
  Description of Artificial Sequence: Synthetic peptide
  Seed: GMMMGMFNMLSTVLGVS
GMMMGMFNMASVVLAVS

SEQ ID NO: 182141 - protein, 17 aa, Artificial Sequence
  Description of Artificial Sequence: Synthetic peptide
  Seed: GMMMGMFNMLSTVLGVS
GMMMGMFNMASVVLHVS

SEQ ID NO: 182142 - protein, 17 aa, Artificial Sequence
  Description of Artificial Sequence: Synthetic peptide
  Seed: GMMMGMFNMLSTVLGVS
GMMMGMFNMASVVLNVS

SEQ ID NO: 182143 - protein, 17 aa, Artificial Sequence
  Description of Artificial Sequence: Synthetic peptide
  Seed: GMMMGMFNMLSTVLGVS
GMMMGMFNMASVVLSVS

SEQ ID NO: 182144 - protein, 17 aa, Artificial Sequence
  Description of Artificial Sequence: Synthetic peptide
  Seed: GMMMGMFNMLSTVLGVS
GMMMGMFNMCSAVLAVS

SEQ ID NO: 182145 - protein, 17 aa, Artificial Sequence
  Description of Artificial Sequence: Synthetic peptide
  Seed: GMMMGMFNMLSTVLGVS
GMMMGMFNMCSAVLNVS

SEQ ID NO: 182146 - protein, 17 aa, Artificial Sequence
  Description of Artificial Sequence: Synthetic peptide
  Seed: GMMMGMFNMLSTVLGVS
GMMMGMFNMCSAVLSVS

SEQ ID NO: 182147 - protein, 17 aa, Artificial Sequence
  Description of Artificial Sequence: Synthetic peptide
  Seed: GMMMGMFNMLSTVLGVS
GMMMGMFNMCSAVLTVS

SEQ ID NO: 182148 - protein, 17 aa, Artificial Sequence
  Description of Artificial Sequence: Synthetic peptide
  Seed: GMMMGMFNMLSTVLGVS
GMMMGMFNMCSAVLVVS

SEQ ID NO: 182149 - protein, 17 aa, Artificial Sequence
  Description of Artificial Sequence: Synthetic peptide
  Seed: GMMMGMFNMLSTVLGVS
GMMMGMFNMCSGVLAVS

SEQ ID NO: 182150 - protein, 17 aa, Artificial Sequence
  Description of Artificial Sequence: Synthetic peptide
  Seed: GMMMGMFNMLSTVLGVS
GMMMGMFNMCSGVLVVS

SEQ ID NO: 182151 - protein, 17 aa, Artificial Sequence
  Description of Artificial Sequence: Synthetic peptide
  Seed: GMMMGMFNMLSTVLGVS
GMMMGMFNMCSPVLAVS

SEQ ID NO: 182152 - protein, 17 aa, Artificial Sequence
  Description of Artificial Sequence: Synthetic peptide
  Seed: GMMMGMFNMLSTVLGVS
GMMMGMFNMCSPVLIVS

SEQ ID NO: 182153 - protein, 17 aa, Artificial Sequence
  Description of Artificial Sequence: Synthetic peptide
  Seed: GMMMGMFNMLSTVLGVS
GMMMGMFNMCSPVLLVS

SEQ ID NO: 182154 - protein, 17 aa, Artificial Sequence
  Description of Artificial Sequence: Synthetic peptide
  Seed: GMMMGMFNMLSTVLGVS
GMMMGMFNMCSPVLNVS

SEQ ID NO: 182155 - protein, 17 aa, Artificial Sequence
  Description of Artificial Sequence: Synthetic peptide
  Seed: GMMMGMFNMLSTVLGVS
GMMMGMFNMCSPVLSVS

SEQ ID NO: 182156 - protein, 17 aa, Artificial Sequence
  Description of Artificial Sequence: Synthetic peptide
  Seed: GMMMGMFNMLSTVLGVS
GMMMGMFNMCSPVLTVS

SEQ ID NO: 182157 - protein, 17 aa, Artificial Sequence
  Description of Artificial Sequence: Synthetic peptide
  Seed: GMMMGMFNMLSTVLGVS
GMMMGMFNMCSPVLVVS

SEQ ID NO: 182158 - protein, 17 aa, Artificial Sequence
  Description of Artificial Sequence: Synthetic peptide
  Seed: GMMMGMFNMLSTVLGVS
GMMMGMFNMDSDVLAVS

SEQ ID NO: 182159 - protein, 17 aa, Artificial Sequence
  Description of Artificial Sequence: Synthetic peptide
  Seed: GMMMGMFNMLSTVLGVS
GMMMGMFNMDSDVLSVS

SEQ ID NO: 182160 - protein, 17 aa, Artificial Sequence
  Description of Artificial Sequence: Synthetic peptide
  Seed: GMMMGMFNMLSTVLGVS
GMMMGMFNMDSNVLAVS

SEQ ID NO: 182161 - protein, 17 aa, Artificial Sequence
  Description of Artificial Sequence: Synthetic peptide
  Seed: GMMMGMFNMLSTVLGVS
GMMMGMFNMDSNVLGVS

SEQ ID NO: 182162 - protein, 17 aa, Artificial Sequence
  Description of Artificial Sequence: Synthetic peptide
  Seed: GMMMGMFNMLSTVLGVS
GMMMGMFNMDSNVLHVS

SEQ ID NO: 182163 - protein, 17 aa, Artificial Sequence
  Description of Artificial Sequence: Synthetic peptide
  Seed: GMMMGMFNMLSTVLGVS
GMMMGMFNMDSNVLNVS

SEQ ID NO: 182164 - protein, 17 aa, Artificial Sequence
  Description of Artificial Sequence: Synthetic peptide
  Seed: GMMMGMFNMLSTVLGVS
GMMMGMFNMDSNVLQVS

SEQ ID NO: 182165 - protein, 17 aa, Artificial Sequence
  Description of Artificial Sequence: Synthetic peptide
  Seed: GMMMGMFNMLSTVLGVS
GMMMGMFNMDSNVLSVS

SEQ ID NO: 182166 - protein, 17 aa, Artificial Sequence
  Description of Artificial Sequence: Synthetic peptide
  Seed: GMMMGMFNMLSTVLGVS
GMMMGMFNMDSNVLTVS

SEQ ID NO: 182167 - protein, 17 aa, Artificial Sequence
  Description of Artificial Sequence: Synthetic peptide
  Seed: GMMMGMFNMLSTVLGVS
GMMMGMFNMDSSVLAVS

SEQ ID NO: 182168 - protein, 17 aa, Artificial Sequence
  Description of Artificial Sequence: Synthetic peptide
  Seed: GMMMGMFNMLSTVLGVS
GMMMGMFNMDSSVLSVS

SEQ ID NO: 182169 - protein, 17 aa, Artificial Sequence
  Description of Artificial Sequence: Synthetic peptide
  Seed: GMMMGMFNMLSTVLGVS
GMMMGMFNMDSTVLAVS

SEQ ID NO: 182170 - protein, 17 aa, Artificial Sequence
  Description of Artificial Sequence: Synthetic peptide
  Seed: GMMMGMFNMLSTVLGVS
GMMMGMFNMDSTVLGVS

SEQ ID NO: 182171 - protein, 17 aa, Artificial Sequence
  Description of Artificial Sequence: Synthetic peptide
  Seed: GMMMGMFNMLSTVLGVS
GMMMGMFNMDSTVLHVS

SEQ ID NO: 182172 - protein, 17 aa, Artificial Sequence
  Description of Artificial Sequence: Synthetic peptide
  Seed: GMMMGMFNMLSTVLGVS
GMMMGMFNMDSTVLQVS

SEQ ID NO: 182173 - protein, 17 aa, Artificial Sequence
  Description of Artificial Sequence: Synthetic peptide
  Seed: GMMMGMFNMLSTVLGVS
GMMMGMFNMDSTVLSVS

SEQ ID NO: 182174 - protein, 17 aa, Artificial Sequence
  Description of Artificial Sequence: Synthetic peptide
  Seed: GMMMGMFNMLSTVLGVS
GMMMGMFNMESAVLAVS

SEQ ID NO: 182175 - protein, 17 aa, Artificial Sequence
  Description of Artificial Sequence: Synthetic peptide
  Seed: GMMMGMFNMLSTVLGVS
GMMMGMFNMESAVLGVS

SEQ ID NO: 182176 - protein, 17 aa, Artificial Sequence
  Description of Artificial Sequence: Synthetic peptide
  Seed: GMMMGMFNMLSTVLGVS
GMMMGMFNMESAVLHVS

SEQ ID NO: 182177 - protein, 17 aa, Artificial Sequence
  Description of Artificial Sequence: Synthetic peptide
  Seed: GMMMGMFNMLSTVLGVS
GMMMGMFNMESAVLIVS

SEQ ID NO: 182178 - protein, 17 aa, Artificial Sequence
  Description of Artificial Sequence: Synthetic peptide
  Seed: GMMMGMFNMLSTVLGVS
GMMMGMFNMESAVLKVS

SEQ ID NO: 182179 - protein, 17 aa, Artificial Sequence
  Description of Artificial Sequence: Synthetic peptide
  Seed: GMMMGMFNMLSTVLGVS
GMMMGMFNMESAVLLVS

SEQ ID NO: 182180 - protein, 17 aa, Artificial Sequence
  Description of Artificial Sequence: Synthetic peptide
  Seed: GMMMGMFNMLSTVLGVS
GMMMGMFNMESAVLMVS

SEQ ID NO: 182181 - protein, 17 aa, Artificial Sequence
  Description of Artificial Sequence: Synthetic peptide
  Seed: GMMMGMFNMLSTVLGVS
GMMMGMFNMESAVLNVS

SEQ ID NO: 182182 - protein, 17 aa, Artificial Sequence
  Description of Artificial Sequence: Synthetic peptide
  Seed: GMMMGMFNMLSTVLGVS
GMMMGMFNMESAVLRVS

SEQ ID NO: 182183 - protein, 17 aa, Artificial Sequence
  Description of Artificial Sequence: Synthetic peptide
  Seed: GMMMGMFNMLSTVLGVS
GMMMGMFNMESAVLSVS

SEQ ID NO: 182184 - protein, 17 aa, Artificial Sequence
  Description of Artificial Sequence: Synthetic peptide
  Seed: GMMMGMFNMLSTVLGVS
GMMMGMFNMESAVLTVS

SEQ ID NO: 182185 - protein, 17 aa, Artificial Sequence
  Description of Artificial Sequence: Synthetic peptide
  Seed: GMMMGMFNMLSTVLGVS
GMMMGMFNMESAVLVVS

SEQ ID NO: 182186 - protein, 17 aa, Artificial Sequence
  Description of Artificial Sequence: Synthetic peptide
  Seed: GMMMGMFNMLSTVLGVS
GMMMGMFNMESFVLDVS

SEQ ID NO: 182187 - protein, 17 aa, Artificial Sequence
  Description of Artificial Sequence: Synthetic peptide
  Seed: GMMMGMFNMLSTVLGVS
GMMMGMFNMESFVLEVS

SEQ ID NO: 182188 - protein, 17 aa, Artificial Sequence
  Description of Artificial Sequence: Synthetic peptide
  Seed: GMMMGMFNMLSTVLGVS
GMMMGMFNMESGVLAVS

SEQ ID NO: 182189 - protein, 17 aa, Artificial Sequence
  Description of Artificial Sequence: Synthetic peptide
  Seed: GMMMGMFNMLSTVLGVS
GMMMGMFNMESGVLGVS

SEQ ID NO: 182190 - protein, 17 aa, Artificial Sequence
  Description of Artificial Sequence: Synthetic peptide
  Seed: GMMMGMFNMLSTVLGVS
GMMMGMFNMESGVLIVS

SEQ ID NO: 182191 - protein, 17 aa, Artificial Sequence
  Description of Artificial Sequence: Synthetic peptide
  Seed: GMMMGMFNMLSTVLGVS
GMMMGMFNMESGVLLVS

SEQ ID NO: 182192 - protein, 17 aa, Artificial Sequence
  Description of Artificial Sequence: Synthetic peptide
  Seed: GMMMGMFNMLSTVLGVS
GMMMGMFNMESGVLMVS

SEQ ID NO: 182193 - protein, 17 aa, Artificial Sequence
  Description of Artificial Sequence: Synthetic peptide
  Seed: GMMMGMFNMLSTVLGVS
GMMMGMFNMESGVLNVS

SEQ ID NO: 182194 - protein, 17 aa, Artificial Sequence
  Description of Artificial Sequence: Synthetic peptide
  Seed: GMMMGMFNMLSTVLGVS
GMMMGMFNMESGVLSVS

SEQ ID NO: 182195 - protein, 17 aa, Artificial Sequence
  Description of Artificial Sequence: Synthetic peptide
  Seed: GMMMGMFNMLSTVLGVS
GMMMGMFNMESGVLTVS

SEQ ID NO: 182196 - protein, 17 aa, Artificial Sequence
  Description of Artificial Sequence: Synthetic peptide
  Seed: GMMMGMFNMLSTVLGVS
GMMMGMFNMESGVLVVS

SEQ ID NO: 182197 - protein, 17 aa, Artificial Sequence
  Description of Artificial Sequence: Synthetic peptide
  Seed: GMMMGMFNMLSTVLGVS
GMMMGMFNMESNVLAVS

SEQ ID NO: 182198 - protein, 17 aa, Artificial Sequence
  Description of Artificial Sequence: Synthetic peptide
  Seed: GMMMGMFNMLSTVLGVS
GMMMGMFNMESNVLGVS

SEQ ID NO: 182199 - protein, 17 aa, Artificial Sequence
  Description of Artificial Sequence: Synthetic peptide
  Seed: GMMMGMFNMLSTVLGVS
GMMMGMFNMESNVLIVS

SEQ ID NO: 182200 - protein, 17 aa, Artificial Sequence
  Description of Artificial Sequence: Synthetic peptide
  Seed: GMMMGMFNMLSTVLGVS
GMMMGMFNMESNVLLVS

SEQ ID NO: 182201 - protein, 17 aa, Artificial Sequence
  Description of Artificial Sequence: Synthetic peptide
  Seed: GMMMGMFNMLSTVLGVS
GMMMGMFNMESNVLSVS

SEQ ID NO: 182202 - protein, 17 aa, Artificial Sequence
  Description of Artificial Sequence: Synthetic peptide
  Seed: GMMMGMFNMLSTVLGVS
GMMMGMFNMESNVLTVS

SEQ ID NO: 182203 - protein, 17 aa, Artificial Sequence
  Description of Artificial Sequence: Synthetic peptide
  Seed: GMMMGMFNMLSTVLGVS
GMMMGMFNMESNVLVVS

SEQ ID NO: 182204 - protein, 17 aa, Artificial Sequence
  Description of Artificial Sequence: Synthetic peptide
  Seed: GMMMGMFNMLSTVLGVS
GMMMGMFNMESPVLAVS

SEQ ID NO: 182205 - protein, 17 aa, Artificial Sequence
  Description of Artificial Sequence: Synthetic peptide
  Seed: GMMMGMFNMLSTVLGVS
GMMMGMFNMESPVLGVS

SEQ ID NO: 182206 - protein, 17 aa, Artificial Sequence
  Description of Artificial Sequence: Synthetic peptide
  Seed: GMMMGMFNMLSTVLGVS
GMMMGMFNMESPVLHVS

SEQ ID NO: 182207 - protein, 17 aa, Artificial Sequence
  Description of Artificial Sequence: Synthetic peptide
  Seed: GMMMGMFNMLSTVLGVS
GMMMGMFNMESPVLIVS

SEQ ID NO: 182208 - protein, 17 aa, Artificial Sequence
  Description of Artificial Sequence: Synthetic peptide
  Seed: GMMMGMFNMLSTVLGVS
GMMMGMFNMESPVLLVS

SEQ ID NO: 182209 - protein, 17 aa, Artificial Sequence
  Description of Artificial Sequence: Synthetic peptide
  Seed: GMMMGMFNMLSTVLGVS
GMMMGMFNMESPVLMVS

SEQ ID NO: 182210 - protein, 17 aa, Artificial Sequence
  Description of Artificial Sequence: Synthetic peptide
  Seed: GMMMGMFNMLSTVLGVS
GMMMGMFNMESPVLNVS

SEQ ID NO: 182211 - protein, 17 aa, Artificial Sequence
  Description of Artificial Sequence: Synthetic peptide
  Seed: GMMMGMFNMLSTVLGVS
GMMMGMFNMESPVLQVS

SEQ ID NO: 182212 - protein, 17 aa, Artificial Sequence
  Description of Artificial Sequence: Synthetic peptide
  Seed: GMMMGMFNMLSTVLGVS
GMMMGMFNMESPVLSVS

SEQ ID NO: 182213 - protein, 17 aa, Artificial Sequence
  Description of Artificial Sequence: Synthetic peptide
  Seed: GMMMGMFNMLSTVLGVS
GMMMGMFNMESPVLTVS

SEQ ID NO: 182214 - protein, 17 aa, Artificial Sequence
  Description of Artificial Sequence: Synthetic peptide
  Seed: GMMMGMFNMLSTVLGVS
GMMMGMFNMESPVLVVS

SEQ ID NO: 182215 - protein, 17 aa, Artificial Sequence
  Description of Artificial Sequence: Synthetic peptide
  Seed: GMMMGMFNMLSTVLGVS
GMMMGMFNMESSVLAVS

SEQ ID NO: 182216 - protein, 17 aa, Artificial Sequence
  Description of Artificial Sequence: Synthetic peptide
  Seed: GMMMGMFNMLSTVLGVS
GMMMGMFNMESSVLGVS

SEQ ID NO: 182217 - protein, 17 aa, Artificial Sequence
  Description of Artificial Sequence: Synthetic peptide
  Seed: GMMMGMFNMLSTVLGVS
GMMMGMFNMESSVLIVS

SEQ ID NO: 182218 - protein, 17 aa, Artificial Sequence
  Description of Artificial Sequence: Synthetic peptide
  Seed: GMMMGMFNMLSTVLGVS
GMMMGMFNMESSVLLVS

SEQ ID NO: 182219 - protein, 17 aa, Artificial Sequence
  Description of Artificial Sequence: Synthetic peptide
  Seed: GMMMGMFNMLSTVLGVS
GMMMGMFNMESSVLNVS

SEQ ID NO: 182220 - protein, 17 aa, Artificial Sequence
  Description of Artificial Sequence: Synthetic peptide
  Seed: GMMMGMFNMLSTVLGVS
GMMMGMFNMESSVLSVS

SEQ ID NO: 182221 - protein, 17 aa, Artificial Sequence
  Description of Artificial Sequence: Synthetic peptide
  Seed: GMMMGMFNMLSTVLGVS
GMMMGMFNMESSVLTVS

SEQ ID NO: 182222 - protein, 17 aa, Artificial Sequence
  Description of Artificial Sequence: Synthetic peptide
  Seed: GMMMGMFNMLSTVLGVS
GMMMGMFNMESSVLVVS

SEQ ID NO: 182223 - protein, 17 aa, Artificial Sequence
  Description of Artificial Sequence: Synthetic peptide
  Seed: GMMMGMFNMLSTVLGVS
GMMMGMFNMESTVLAVS

SEQ ID NO: 182224 - protein, 17 aa, Artificial Sequence
  Description of Artificial Sequence: Synthetic peptide
  Seed: GMMMGMFNMLSTVLGVS
GMMMGMFNMESTVLNVS

SEQ ID NO: 182225 - protein, 17 aa, Artificial Sequence
  Description of Artificial Sequence: Synthetic peptide
  Seed: GMMMGMFNMLSTVLGVS
GMMMGMFNMESTVLSVS

SEQ ID NO: 182226 - protein, 17 aa, Artificial Sequence
  Description of Artificial Sequence: Synthetic peptide
  Seed: GMMMGMFNMLSTVLGVS
GMMMGMFNMESVVLNVS

SEQ ID NO: 182227 - protein, 17 aa, Artificial Sequence
  Description of Artificial Sequence: Synthetic peptide
  Seed: GMMMGMFNMLSTVLGVS
GMMMGMFNMFSAVLHVS

SEQ ID NO: 182228 - protein, 17 aa, Artificial Sequence
  Description of Artificial Sequence: Synthetic peptide
  Seed: GMMMGMFNMLSTVLGVS
GMMMGMFNMFSAVLNVS

SEQ ID NO: 182229 - protein, 17 aa, Artificial Sequence
  Description of Artificial Sequence: Synthetic peptide
  Seed: GMMMGMFNMLSTVLGVS
GMMMGMFNMFSNVLDVS

SEQ ID NO: 182230 - protein, 17 aa, Artificial Sequence
  Description of Artificial Sequence: Synthetic peptide
  Seed: GMMMGMFNMLSTVLGVS
GMMMGMFNMFSPVLAVS

SEQ ID NO: 182231 - protein, 17 aa, Artificial Sequence
  Description of Artificial Sequence: Synthetic peptide
  Seed: GMMMGMFNMLSTVLGVS
GMMMGMFNMFSPVLHVS

SEQ ID NO: 182232 - protein, 17 aa, Artificial Sequence
  Description of Artificial Sequence: Synthetic peptide
  Seed: GMMMGMFNMLSTVLGVS
GMMMGMFNMFSPVLIVS

SEQ ID NO: 182233 - protein, 17 aa, Artificial Sequence
  Description of Artificial Sequence: Synthetic peptide
  Seed: GMMMGMFNMLSTVLGVS
GMMMGMFNMFSPVLLVS

SEQ ID NO: 182234 - protein, 17 aa, Artificial Sequence
  Description of Artificial Sequence: Synthetic peptide
  Seed: GMMMGMFNMLSTVLGVS
GMMMGMFNMFSPVLNVS

SEQ ID NO: 182235 - protein, 17 aa, Artificial Sequence
  Description of Artificial Sequence: Synthetic peptide
  Seed: GMMMGMFNMLSTVLGVS
GMMMGMFNMFSPVLSVS

SEQ ID NO: 182236 - protein, 17 aa, Artificial Sequence
  Description of Artificial Sequence: Synthetic peptide
  Seed: GMMMGMFNMLSTVLGVS
GMMMGMFNMFSPVLVVS

SEQ ID NO: 182237 - protein, 17 aa, Artificial Sequence
  Description of Artificial Sequence: Synthetic peptide
  Seed: GMMMGMFNMLSTVLGVS
GMMMGMFNMGSAVLAVS

SEQ ID NO: 182238 - protein, 17 aa, Artificial Sequence
  Description of Artificial Sequence: Synthetic peptide
  Seed: GMMMGMFNMLSTVLGVS
GMMMGMFNMGSAVLFVS

SEQ ID NO: 182239 - protein, 17 aa, Artificial Sequence
  Description of Artificial Sequence: Synthetic peptide
  Seed: GMMMGMFNMLSTVLGVS
GMMMGMFNMGSAVLGVS

SEQ ID NO: 182240 - protein, 17 aa, Artificial Sequence
  Description of Artificial Sequence: Synthetic peptide
  Seed: GMMMGMFNMLSTVLGVS
GMMMGMFNMGSAVLHVS

SEQ ID NO: 182241 - protein, 17 aa, Artificial Sequence
  Description of Artificial Sequence: Synthetic peptide
  Seed: GMMMGMFNMLSTVLGVS
GMMMGMFNMGSAVLIVS

SEQ ID NO: 182242 - protein, 17 aa, Artificial Sequence
  Description of Artificial Sequence: Synthetic peptide
  Seed: GMMMGMFNMLSTVLGVS
GMMMGMFNMGSAVLKVS

SEQ ID NO: 182243 - protein, 17 aa, Artificial Sequence
  Description of Artificial Sequence: Synthetic peptide
  Seed: GMMMGMFNMLSTVLGVS
GMMMGMFNMGSAVLLVS

SEQ ID NO: 182244 - protein, 17 aa, Artificial Sequence
  Description of Artificial Sequence: Synthetic peptide
  Seed: GMMMGMFNMLSTVLGVS
GMMMGMFNMGSAVLMVS

SEQ ID NO: 182245 - protein, 17 aa, Artificial Sequence
  Description of Artificial Sequence: Synthetic peptide
  Seed: GMMMGMFNMLSTVLGVS
GMMMGMFNMGSAVLNVS

SEQ ID NO: 182246 - protein, 17 aa, Artificial Sequence
  Description of Artificial Sequence: Synthetic peptide
  Seed: GMMMGMFNMLSTVLGVS
GMMMGMFNMGSAVLQVS

SEQ ID NO: 182247 - protein, 17 aa, Artificial Sequence
  Description of Artificial Sequence: Synthetic peptide
  Seed: GMMMGMFNMLSTVLGVS
GMMMGMFNMGSAVLRVS

SEQ ID NO: 182248 - protein, 17 aa, Artificial Sequence
  Description of Artificial Sequence: Synthetic peptide
  Seed: GMMMGMFNMLSTVLGVS
GMMMGMFNMGSAVLSVS

SEQ ID NO: 182249 - protein, 17 aa, Artificial Sequence
  Description of Artificial Sequence: Synthetic peptide
  Seed: GMMMGMFNMLSTVLGVS
GMMMGMFNMGSAVLTVS

SEQ ID NO: 182250 - protein, 17 aa, Artificial Sequence
  Description of Artificial Sequence: Synthetic peptide
  Seed: GMMMGMFNMLSTVLGVS
GMMMGMFNMGSAVLVVS

SEQ ID NO: 182251 - protein, 17 aa, Artificial Sequence
  Description of Artificial Sequence: Synthetic peptide
  Seed: GMMMGMFNMLSTVLGVS
GMMMGMFNMGSAVLYVS

SEQ ID NO: 182252 - protein, 17 aa, Artificial Sequence
  Description of Artificial Sequence: Synthetic peptide
  Seed: GMMMGMFNMLSTVLGVS
GMMMGMFNMGSGVLAVS

SEQ ID NO: 182253 - protein, 17 aa, Artificial Sequence
  Description of Artificial Sequence: Synthetic peptide
  Seed: GMMMGMFNMLSTVLGVS
GMMMGMFNMGSGVLIVS

SEQ ID NO: 182254 - protein, 17 aa, Artificial Sequence
  Description of Artificial Sequence: Synthetic peptide
  Seed: GMMMGMFNMLSTVLGVS
GMMMGMFNMGSGVLLVS

SEQ ID NO: 182255 - protein, 17 aa, Artificial Sequence
  Description of Artificial Sequence: Synthetic peptide
  Seed: GMMMGMFNMLSTVLGVS
GMMMGMFNMGSGVLMVS

SEQ ID NO: 182256 - protein, 17 aa, Artificial Sequence
  Description of Artificial Sequence: Synthetic peptide
  Seed: GMMMGMFNMLSTVLGVS
GMMMGMFNMGSGVLSVS

SEQ ID NO: 182257 - protein, 17 aa, Artificial Sequence
  Description of Artificial Sequence: Synthetic peptide
  Seed: GMMMGMFNMLSTVLGVS
GMMMGMFNMGSGVLTVS

SEQ ID NO: 182258 - protein, 17 aa, Artificial Sequence
  Description of Artificial Sequence: Synthetic peptide
  Seed: GMMMGMFNMLSTVLGVS
GMMMGMFNMGSGVLVVS

SEQ ID NO: 182259 - protein, 17 aa, Artificial Sequence
  Description of Artificial Sequence: Synthetic peptide
  Seed: GMMMGMFNMLSTVLGVS
GMMMGMFNMGSNVLAVS

SEQ ID NO: 182260 - protein, 17 aa, Artificial Sequence
  Description of Artificial Sequence: Synthetic peptide
  Seed: GMMMGMFNMLSTVLGVS
GMMMGMFNMGSNVLIVS

SEQ ID NO: 182261 - protein, 17 aa, Artificial Sequence
  Description of Artificial Sequence: Synthetic peptide
  Seed: GMMMGMFNMLSTVLGVS
GMMMGMFNMGSNVLLVS

SEQ ID NO: 182262 - protein, 17 aa, Artificial Sequence
  Description of Artificial Sequence: Synthetic peptide
  Seed: GMMMGMFNMLSTVLGVS
GMMMGMFNMGSNVLMVS

SEQ ID NO: 182263 - protein, 17 aa, Artificial Sequence
  Description of Artificial Sequence: Synthetic peptide
  Seed: GMMMGMFNMLSTVLGVS
GMMMGMFNMGSNVLSVS

SEQ ID NO: 182264 - protein, 17 aa, Artificial Sequence
  Description of Artificial Sequence: Synthetic peptide
  Seed: GMMMGMFNMLSTVLGVS
GMMMGMFNMGSNVLTVS

SEQ ID NO: 182265 - protein, 17 aa, Artificial Sequence
  Description of Artificial Sequence: Synthetic peptide
  Seed: GMMMGMFNMLSTVLGVS
GMMMGMFNMGSNVLVVS

SEQ ID NO: 182266 - protein, 17 aa, Artificial Sequence
  Description of Artificial Sequence: Synthetic peptide
  Seed: GMMMGMFNMLSTVLGVS
GMMMGMFNMGSPVLAVS

SEQ ID NO: 182267 - protein, 17 aa, Artificial Sequence
  Description of Artificial Sequence: Synthetic peptide
  Seed: GMMMGMFNMLSTVLGVS
GMMMGMFNMGSPVLIVS

SEQ ID NO: 182268 - protein, 17 aa, Artificial Sequence
  Description of Artificial Sequence: Synthetic peptide
  Seed: GMMMGMFNMLSTVLGVS
GMMMGMFNMGSPVLLVS

SEQ ID NO: 182269 - protein, 17 aa, Artificial Sequence
  Description of Artificial Sequence: Synthetic peptide
  Seed: GMMMGMFNMLSTVLGVS
GMMMGMFNMGSPVLMVS

SEQ ID NO: 182270 - protein, 17 aa, Artificial Sequence
  Description of Artificial Sequence: Synthetic peptide
  Seed: GMMMGMFNMLSTVLGVS
GMMMGMFNMGSPVLNVS

SEQ ID NO: 182271 - protein, 17 aa, Artificial Sequence
  Description of Artificial Sequence: Synthetic peptide
  Seed: GMMMGMFNMLSTVLGVS
GMMMGMFNMGSPVLSVS

SEQ ID NO: 182272 - protein, 17 aa, Artificial Sequence
  Description of Artificial Sequence: Synthetic peptide
  Seed: GMMMGMFNMLSTVLGVS
GMMMGMFNMGSPVLTVS

SEQ ID NO: 182273 - protein, 17 aa, Artificial Sequence
  Description of Artificial Sequence: Synthetic peptide
  Seed: GMMMGMFNMLSTVLGVS
GMMMGMFNMGSPVLVVS

SEQ ID NO: 182274 - protein, 17 aa, Artificial Sequence
  Description of Artificial Sequence: Synthetic peptide
  Seed: GMMMGMFNMLSTVLGVS
GMMMGMFNMGSSVLAVS

SEQ ID NO: 182275 - protein, 17 aa, Artificial Sequence
  Description of Artificial Sequence: Synthetic peptide
  Seed: GMMMGMFNMLSTVLGVS
GMMMGMFNMGSSVLGVS

SEQ ID NO: 182276 - protein, 17 aa, Artificial Sequence
  Description of Artificial Sequence: Synthetic peptide
  Seed: GMMMGMFNMLSTVLGVS
GMMMGMFNMGSSVLIVS

SEQ ID NO: 182277 - protein, 17 aa, Artificial Sequence
  Description of Artificial Sequence: Synthetic peptide
  Seed: GMMMGMFNMLSTVLGVS
GMMMGMFNMGSSVLLVS

SEQ ID NO: 182278 - protein, 17 aa, Artificial Sequence
  Description of Artificial Sequence: Synthetic peptide
  Seed: GMMMGMFNMLSTVLGVS
GMMMGMFNMGSSVLMVS

SEQ ID NO: 182279 - protein, 17 aa, Artificial Sequence
  Description of Artificial Sequence: Synthetic peptide
  Seed: GMMMGMFNMLSTVLGVS
GMMMGMFNMGSSVLNVS

SEQ ID NO: 182280 - protein, 17 aa, Artificial Sequence
  Description of Artificial Sequence: Synthetic peptide
  Seed: GMMMGMFNMLSTVLGVS
GMMMGMFNMGSSVLSVS

SEQ ID NO: 182281 - protein, 17 aa, Artificial Sequence
  Description of Artificial Sequence: Synthetic peptide
  Seed: GMMMGMFNMLSTVLGVS
GMMMGMFNMGSSVLTVS

SEQ ID NO: 182282 - protein, 17 aa, Artificial Sequence
  Description of Artificial Sequence: Synthetic peptide
  Seed: GMMMGMFNMLSTVLGVS
GMMMGMFNMGSSVLVVS

SEQ ID NO: 182283 - protein, 17 aa, Artificial Sequence
  Description of Artificial Sequence: Synthetic peptide
  Seed: GMMMGMFNMLSTVLGVS
GMMMGMFNMGSTVLAVS

SEQ ID NO: 182284 - protein, 17 aa, Artificial Sequence
  Description of Artificial Sequence: Synthetic peptide
  Seed: GMMMGMFNMLSTVLGVS
GMMMGMFNMGSTVLIVS

SEQ ID NO: 182285 - protein, 17 aa, Artificial Sequence
  Description of Artificial Sequence: Synthetic peptide
  Seed: GMMMGMFNMLSTVLGVS
GMMMGMFNMGSTVLLVS

SEQ ID NO: 182286 - protein, 17 aa, Artificial Sequence
  Description of Artificial Sequence: Synthetic peptide
  Seed: GMMMGMFNMLSTVLGVS
GMMMGMFNMGSTVLNVS

SEQ ID NO: 182287 - protein, 17 aa, Artificial Sequence
  Description of Artificial Sequence: Synthetic peptide
  Seed: GMMMGMFNMLSTVLGVS
GMMMGMFNMGSTVLVVS

SEQ ID NO: 182288 - protein, 17 aa, Artificial Sequence
  Description of Artificial Sequence: Synthetic peptide
  Seed: GMMMGMFNMLSTVLGVS
GMMMGMFNMGSVVLNVS

SEQ ID NO: 182289 - protein, 17 aa, Artificial Sequence
  Description of Artificial Sequence: Synthetic peptide
  Seed: GMMMGMFNMLSTVLGVS
GMMMGMFNMHSAVLAVS

SEQ ID NO: 182290 - protein, 17 aa, Artificial Sequence
  Description of Artificial Sequence: Synthetic peptide
  Seed: GMMMGMFNMLSTVLGVS
GMMMGMFNMHSAVLGVS

SEQ ID NO: 182291 - protein, 17 aa, Artificial Sequence
  Description of Artificial Sequence: Synthetic peptide
  Seed: GMMMGMFNMLSTVLGVS
GMMMGMFNMHSAVLHVS

SEQ ID NO: 182292 - protein, 17 aa, Artificial Sequence
  Description of Artificial Sequence: Synthetic peptide
  Seed: GMMMGMFNMLSTVLGVS
GMMMGMFNMHSAVLIVS

SEQ ID NO: 182293 - protein, 17 aa, Artificial Sequence
  Description of Artificial Sequence: Synthetic peptide
  Seed: GMMMGMFNMLSTVLGVS
GMMMGMFNMHSAVLLVS

SEQ ID NO: 182294 - protein, 17 aa, Artificial Sequence
  Description of Artificial Sequence: Synthetic peptide
  Seed: GMMMGMFNMLSTVLGVS
GMMMGMFNMHSAVLMVS

SEQ ID NO: 182295 - protein, 17 aa, Artificial Sequence
  Description of Artificial Sequence: Synthetic peptide
  Seed: GMMMGMFNMLSTVLGVS
GMMMGMFNMHSAVLNVS

SEQ ID NO: 182296 - protein, 17 aa, Artificial Sequence
  Description of Artificial Sequence: Synthetic peptide
  Seed: GMMMGMFNMLSTVLGVS
GMMMGMFNMHSAVLSVS

SEQ ID NO: 182297 - protein, 17 aa, Artificial Sequence
  Description of Artificial Sequence: Synthetic peptide
  Seed: GMMMGMFNMLSTVLGVS
GMMMGMFNMHSAVLTVS

SEQ ID NO: 182298 - protein, 17 aa, Artificial Sequence
  Description of Artificial Sequence: Synthetic peptide
  Seed: GMMMGMFNMLSTVLGVS
GMMMGMFNMHSAVLVVS

SEQ ID NO: 182299 - protein, 17 aa, Artificial Sequence
  Description of Artificial Sequence: Synthetic peptide
  Seed: GMMMGMFNMLSTVLGVS
GMMMGMFNMHSFVLIVS

SEQ ID NO: 182300 - protein, 17 aa, Artificial Sequence
  Description of Artificial Sequence: Synthetic peptide
  Seed: GMMMGMFNMLSTVLGVS
GMMMGMFNMHSFVLLVS

SEQ ID NO: 182301 - protein, 17 aa, Artificial Sequence
  Description of Artificial Sequence: Synthetic peptide
  Seed: GMMMGMFNMLSTVLGVS
GMMMGMFNMHSFVLVVS

SEQ ID NO: 182302 - protein, 17 aa, Artificial Sequence
  Description of Artificial Sequence: Synthetic peptide
  Seed: GMMMGMFNMLSTVLGVS
GMMMGMFNMHSGVLAVS

SEQ ID NO: 182303 - protein, 17 aa, Artificial Sequence
  Description of Artificial Sequence: Synthetic peptide
  Seed: GMMMGMFNMLSTVLGVS
GMMMGMFNMHSGVLIVS

SEQ ID NO: 182304 - protein, 17 aa, Artificial Sequence
  Description of Artificial Sequence: Synthetic peptide
  Seed: GMMMGMFNMLSTVLGVS
GMMMGMFNMHSGVLLVS

SEQ ID NO: 182305 - protein, 17 aa, Artificial Sequence
  Description of Artificial Sequence: Synthetic peptide
  Seed: GMMMGMFNMLSTVLGVS
GMMMGMFNMHSGVLMVS

SEQ ID NO: 182306 - protein, 17 aa, Artificial Sequence
  Description of Artificial Sequence: Synthetic peptide
  Seed: GMMMGMFNMLSTVLGVS
GMMMGMFNMHSGVLSVS

SEQ ID NO: 182307 - protein, 17 aa, Artificial Sequence
  Description of Artificial Sequence: Synthetic peptide
  Seed: GMMMGMFNMLSTVLGVS
GMMMGMFNMHSGVLTVS

SEQ ID NO: 182308 - protein, 17 aa, Artificial Sequence
  Description of Artificial Sequence: Synthetic peptide
  Seed: GMMMGMFNMLSTVLGVS
GMMMGMFNMHSGVLVVS

SEQ ID NO: 182309 - protein, 17 aa, Artificial Sequence
  Description of Artificial Sequence: Synthetic peptide
  Seed: GMMMGMFNMLSTVLGVS
GMMMGMFNMHSPVLAVS

SEQ ID NO: 182310 - protein, 17 aa, Artificial Sequence
  Description of Artificial Sequence: Synthetic peptide
  Seed: GMMMGMFNMLSTVLGVS
GMMMGMFNMHSPVLIVS

SEQ ID NO: 182311 - protein, 17 aa, Artificial Sequence
  Description of Artificial Sequence: Synthetic peptide
  Seed: GMMMGMFNMLSTVLGVS
GMMMGMFNMHSPVLLVS

SEQ ID NO: 182312 - protein, 17 aa, Artificial Sequence
  Description of Artificial Sequence: Synthetic peptide
  Seed: GMMMGMFNMLSTVLGVS
GMMMGMFNMHSPVLMVS

SEQ ID NO: 182313 - protein, 17 aa, Artificial Sequence
  Description of Artificial Sequence: Synthetic peptide
  Seed: GMMMGMFNMLSTVLGVS
GMMMGMFNMHSPVLNVS

SEQ ID NO: 182314 - protein, 17 aa, Artificial Sequence
  Description of Artificial Sequence: Synthetic peptide
  Seed: GMMMGMFNMLSTVLGVS
GMMMGMFNMHSPVLSVS

SEQ ID NO: 182315 - protein, 17 aa, Artificial Sequence
  Description of Artificial Sequence: Synthetic peptide
  Seed: GMMMGMFNMLSTVLGVS
GMMMGMFNMHSPVLVVS

SEQ ID NO: 182316 - protein, 17 aa, Artificial Sequence
  Description of Artificial Sequence: Synthetic peptide
  Seed: GMMMGMFNMLSTVLGVS
GMMMGMFNMHSSVLAVS

SEQ ID NO: 182317 - protein, 17 aa, Artificial Sequence
  Description of Artificial Sequence: Synthetic peptide
  Seed: GMMMGMFNMLSTVLGVS
GMMMGMFNMHSSVLIVS

SEQ ID NO: 182318 - protein, 17 aa, Artificial Sequence
  Description of Artificial Sequence: Synthetic peptide
  Seed: GMMMGMFNMLSTVLGVS
GMMMGMFNMHSSVLLVS

SEQ ID NO: 182319 - protein, 17 aa, Artificial Sequence
  Description of Artificial Sequence: Synthetic peptide
  Seed: GMMMGMFNMLSTVLGVS
GMMMGMFNMHSSVLMVS

SEQ ID NO: 182320 - protein, 17 aa, Artificial Sequence
  Description of Artificial Sequence: Synthetic peptide
  Seed: GMMMGMFNMLSTVLGVS
GMMMGMFNMHSSVLSVS

SEQ ID NO: 182321 - protein, 17 aa, Artificial Sequence
  Description of Artificial Sequence: Synthetic peptide
  Seed: GMMMGMFNMLSTVLGVS
GMMMGMFNMHSSVLTVS

SEQ ID NO: 182322 - protein, 17 aa, Artificial Sequence
  Description of Artificial Sequence: Synthetic peptide
  Seed: GMMMGMFNMLSTVLGVS
GMMMGMFNMHSSVLVVS

SEQ ID NO: 182323 - protein, 17 aa, Artificial Sequence
  Description of Artificial Sequence: Synthetic peptide
  Seed: GMMMGMFNMLSTVLGVS
GMMMGMFNMHSTVLAVS

SEQ ID NO: 182324 - protein, 17 aa, Artificial Sequence
  Description of Artificial Sequence: Synthetic peptide
  Seed: GMMMGMFNMLSTVLGVS
GMMMGMFNMISAVLAVS

SEQ ID NO: 182325 - protein, 17 aa, Artificial Sequence
  Description of Artificial Sequence: Synthetic peptide
  Seed: GMMMGMFNMLSTVLGVS
GMMMGMFNMISAVLDVS

SEQ ID NO: 182326 - protein, 17 aa, Artificial Sequence
  Description of Artificial Sequence: Synthetic peptide
  Seed: GMMMGMFNMLSTVLGVS
GMMMGMFNMISAVLEVS

SEQ ID NO: 182327 - protein, 17 aa, Artificial Sequence
  Description of Artificial Sequence: Synthetic peptide
  Seed: GMMMGMFNMLSTVLGVS
GMMMGMFNMISAVLGVS

SEQ ID NO: 182328 - protein, 17 aa, Artificial Sequence
  Description of Artificial Sequence: Synthetic peptide
  Seed: GMMMGMFNMLSTVLGVS
GMMMGMFNMISAVLHVS

SEQ ID NO: 182329 - protein, 17 aa, Artificial Sequence
  Description of Artificial Sequence: Synthetic peptide
  Seed: GMMMGMFNMLSTVLGVS
GMMMGMFNMISAVLIVS

SEQ ID NO: 182330 - protein, 17 aa, Artificial Sequence
  Description of Artificial Sequence: Synthetic peptide
  Seed: GMMMGMFNMLSTVLGVS
GMMMGMFNMISAVLKVS

SEQ ID NO: 182331 - protein, 17 aa, Artificial Sequence
  Description of Artificial Sequence: Synthetic peptide
  Seed: GMMMGMFNMLSTVLGVS
GMMMGMFNMISAVLLVS

SEQ ID NO: 182332 - protein, 17 aa, Artificial Sequence
  Description of Artificial Sequence: Synthetic peptide
  Seed: GMMMGMFNMLSTVLGVS
GMMMGMFNMISAVLMVS

SEQ ID NO: 182333 - protein, 17 aa, Artificial Sequence
  Description of Artificial Sequence: Synthetic peptide
  Seed: GMMMGMFNMLSTVLGVS
GMMMGMFNMISAVLNVS

SEQ ID NO: 182334 - protein, 17 aa, Artificial Sequence
  Description of Artificial Sequence: Synthetic peptide
  Seed: GMMMGMFNMLSTVLGVS
GMMMGMFNMISAVLPVS

SEQ ID NO: 182335 - protein, 17 aa, Artificial Sequence
  Description of Artificial Sequence: Synthetic peptide
  Seed: GMMMGMFNMLSTVLGVS
GMMMGMFNMISAVLRVS

SEQ ID NO: 182336 - protein, 17 aa, Artificial Sequence
  Description of Artificial Sequence: Synthetic peptide
  Seed: GMMMGMFNMLSTVLGVS
GMMMGMFNMISAVLSVS

SEQ ID NO: 182337 - protein, 17 aa, Artificial Sequence
  Description of Artificial Sequence: Synthetic peptide
  Seed: GMMMGMFNMLSTVLGVS
GMMMGMFNMISAVLTVS

SEQ ID NO: 182338 - protein, 17 aa, Artificial Sequence
  Description of Artificial Sequence: Synthetic peptide
  Seed: GMMMGMFNMLSTVLGVS
GMMMGMFNMISAVLVVS

SEQ ID NO: 182339 - protein, 17 aa, Artificial Sequence
  Description of Artificial Sequence: Synthetic peptide
  Seed: GMMMGMFNMLSTVLGVS
GMMMGMFNMISDVLAVS

SEQ ID NO: 182340 - protein, 17 aa, Artificial Sequence
  Description of Artificial Sequence: Synthetic peptide
  Seed: GMMMGMFNMLSTVLGVS
GMMMGMFNMISDVLDVS

SEQ ID NO: 182341 - protein, 17 aa, Artificial Sequence
  Description of Artificial Sequence: Synthetic peptide
  Seed: GMMMGMFNMLSTVLGVS
GMMMGMFNMISDVLSVS

SEQ ID NO: 182342 - protein, 17 aa, Artificial Sequence
  Description of Artificial Sequence: Synthetic peptide
  Seed: GMMMGMFNMLSTVLGVS
GMMMGMFNMISGVLAVS

SEQ ID NO: 182343 - protein, 17 aa, Artificial Sequence
  Description of Artificial Sequence: Synthetic peptide
  Seed: GMMMGMFNMLSTVLGVS
GMMMGMFNMISGVLGVS

SEQ ID NO: 182344 - protein, 17 aa, Artificial Sequence
  Description of Artificial Sequence: Synthetic peptide
  Seed: GMMMGMFNMLSTVLGVS
GMMMGMFNMISGVLHVS

SEQ ID NO: 182345 - protein, 17 aa, Artificial Sequence
  Description of Artificial Sequence: Synthetic peptide
  Seed: GMMMGMFNMLSTVLGVS
GMMMGMFNMISGVLIVS

SEQ ID NO: 182346 - protein, 17 aa, Artificial Sequence
  Description of Artificial Sequence: Synthetic peptide
  Seed: GMMMGMFNMLSTVLGVS
GMMMGMFNMISGVLKVS

SEQ ID NO: 182347 - protein, 17 aa, Artificial Sequence
  Description of Artificial Sequence: Synthetic peptide
  Seed: GMMMGMFNMLSTVLGVS
GMMMGMFNMISGVLLVS

SEQ ID NO: 182348 - protein, 17 aa, Artificial Sequence
  Description of Artificial Sequence: Synthetic peptide
  Seed: GMMMGMFNMLSTVLGVS
GMMMGMFNMISGVLMVS

SEQ ID NO: 182349 - protein, 17 aa, Artificial Sequence
  Description of Artificial Sequence: Synthetic peptide
  Seed: GMMMGMFNMLSTVLGVS
GMMMGMFNMISGVLNVS

SEQ ID NO: 182350 - protein, 17 aa, Artificial Sequence
  Description of Artificial Sequence: Synthetic peptide
  Seed: GMMMGMFNMLSTVLGVS
GMMMGMFNMISGVLRVS

SEQ ID NO: 182351 - protein, 17 aa, Artificial Sequence
  Description of Artificial Sequence: Synthetic peptide
  Seed: GMMMGMFNMLSTVLGVS
GMMMGMFNMISGVLSVS

SEQ ID NO: 182352 - protein, 17 aa, Artificial Sequence
  Description of Artificial Sequence: Synthetic peptide
  Seed: GMMMGMFNMLSTVLGVS
GMMMGMFNMISGVLTVS

SEQ ID NO: 182353 - protein, 17 aa, Artificial Sequence
  Description of Artificial Sequence: Synthetic peptide
  Seed: GMMMGMFNMLSTVLGVS
GMMMGMFNMISGVLVVS

SEQ ID NO: 182354 - protein, 17 aa, Artificial Sequence
  Description of Artificial Sequence: Synthetic peptide
  Seed: GMMMGMFNMLSTVLGVS
GMMMGMFNMISKVLAVS

SEQ ID NO: 182355 - protein, 17 aa, Artificial Sequence
  Description of Artificial Sequence: Synthetic peptide
  Seed: GMMMGMFNMLSTVLGVS
GMMMGMFNMISKVLGVS

SEQ ID NO: 182356 - protein, 17 aa, Artificial Sequence
  Description of Artificial Sequence: Synthetic peptide
  Seed: GMMMGMFNMLSTVLGVS
GMMMGMFNMISKVLHVS

SEQ ID NO: 182357 - protein, 17 aa, Artificial Sequence
  Description of Artificial Sequence: Synthetic peptide
  Seed: GMMMGMFNMLSTVLGVS
GMMMGMFNMISKVLKVS

SEQ ID NO: 182358 - protein, 17 aa, Artificial Sequence
  Description of Artificial Sequence: Synthetic peptide
  Seed: GMMMGMFNMLSTVLGVS
GMMMGMFNMISKVLNVS

SEQ ID NO: 182359 - protein, 17 aa, Artificial Sequence
  Description of Artificial Sequence: Synthetic peptide
  Seed: GMMMGMFNMLSTVLGVS
GMMMGMFNMISKVLSVS

SEQ ID NO: 182360 - protein, 17 aa, Artificial Sequence
  Description of Artificial Sequence: Synthetic peptide
  Seed: GMMMGMFNMLSTVLGVS
GMMMGMFNMISNVLAVS

SEQ ID NO: 182361 - protein, 17 aa, Artificial Sequence
  Description of Artificial Sequence: Synthetic peptide
  Seed: GMMMGMFNMLSTVLGVS
GMMMGMFNMISNVLDVS

SEQ ID NO: 182362 - protein, 17 aa, Artificial Sequence
  Description of Artificial Sequence: Synthetic peptide
  Seed: GMMMGMFNMLSTVLGVS
GMMMGMFNMISNVLEVS

SEQ ID NO: 182363 - protein, 17 aa, Artificial Sequence
  Description of Artificial Sequence: Synthetic peptide
  Seed: GMMMGMFNMLSTVLGVS
GMMMGMFNMISNVLGVS

SEQ ID NO: 182364 - protein, 17 aa, Artificial Sequence
  Description of Artificial Sequence: Synthetic peptide
  Seed: GMMMGMFNMLSTVLGVS
GMMMGMFNMISNVLHVS

SEQ ID NO: 182365 - protein, 17 aa, Artificial Sequence
  Description of Artificial Sequence: Synthetic peptide
  Seed: GMMMGMFNMLSTVLGVS
GMMMGMFNMISNVLLVS

SEQ ID NO: 182366 - protein, 17 aa, Artificial Sequence
  Description of Artificial Sequence: Synthetic peptide
  Seed: GMMMGMFNMLSTVLGVS
GMMMGMFNMISNVLNVS

SEQ ID NO: 182367 - protein, 17 aa, Artificial Sequence
  Description of Artificial Sequence: Synthetic peptide
  Seed: GMMMGMFNMLSTVLGVS
GMMMGMFNMISNVLSVS

SEQ ID NO: 182368 - protein, 17 aa, Artificial Sequence
  Description of Artificial Sequence: Synthetic peptide
  Seed: GMMMGMFNMLSTVLGVS
GMMMGMFNMISNVLTVS

SEQ ID NO: 182369 - protein, 17 aa, Artificial Sequence
  Description of Artificial Sequence: Synthetic peptide
  Seed: GMMMGMFNMLSTVLGVS
GMMMGMFNMISNVLVVS

SEQ ID NO: 182370 - protein, 17 aa, Artificial Sequence
  Description of Artificial Sequence: Synthetic peptide
  Seed: GMMMGMFNMLSTVLGVS
GMMMGMFNMISPVLAVS

SEQ ID NO: 182371 - protein, 17 aa, Artificial Sequence
  Description of Artificial Sequence: Synthetic peptide
  Seed: GMMMGMFNMLSTVLGVS
GMMMGMFNMISPVLDVS

SEQ ID NO: 182372 - protein, 17 aa, Artificial Sequence
  Description of Artificial Sequence: Synthetic peptide
  Seed: GMMMGMFNMLSTVLGVS
GMMMGMFNMISPVLEVS

SEQ ID NO: 182373 - protein, 17 aa, Artificial Sequence
  Description of Artificial Sequence: Synthetic peptide
  Seed: GMMMGMFNMLSTVLGVS
GMMMGMFNMISPVLFVS

SEQ ID NO: 182374 - protein, 17 aa, Artificial Sequence
  Description of Artificial Sequence: Synthetic peptide
  Seed: GMMMGMFNMLSTVLGVS
GMMMGMFNMISPVLGVS

SEQ ID NO: 182375 - protein, 17 aa, Artificial Sequence
  Description of Artificial Sequence: Synthetic peptide
  Seed: GMMMGMFNMLSTVLGVS
GMMMGMFNMISPVLHVS

SEQ ID NO: 182376 - protein, 17 aa, Artificial Sequence
  Description of Artificial Sequence: Synthetic peptide
  Seed: GMMMGMFNMLSTVLGVS
GMMMGMFNMISPVLIVS

SEQ ID NO: 182377 - protein, 17 aa, Artificial Sequence
  Description of Artificial Sequence: Synthetic peptide
  Seed: GMMMGMFNMLSTVLGVS
GMMMGMFNMISPVLKVS

SEQ ID NO: 182378 - protein, 17 aa, Artificial Sequence
  Description of Artificial Sequence: Synthetic peptide
  Seed: GMMMGMFNMLSTVLGVS
GMMMGMFNMISPVLLVS

SEQ ID NO: 182379 - protein, 17 aa, Artificial Sequence
  Description of Artificial Sequence: Synthetic peptide
  Seed: GMMMGMFNMLSTVLGVS
GMMMGMFNMISPVLMVS

SEQ ID NO: 182380 - protein, 17 aa, Artificial Sequence
  Description of Artificial Sequence: Synthetic peptide
  Seed: GMMMGMFNMLSTVLGVS
GMMMGMFNMISPVLNVS

SEQ ID NO: 182381 - protein, 17 aa, Artificial Sequence
  Description of Artificial Sequence: Synthetic peptide
  Seed: GMMMGMFNMLSTVLGVS
GMMMGMFNMISPVLPVS

SEQ ID NO: 182382 - protein, 17 aa, Artificial Sequence
  Description of Artificial Sequence: Synthetic peptide
  Seed: GMMMGMFNMLSTVLGVS
GMMMGMFNMISPVLQVS

SEQ ID NO: 182383 - protein, 17 aa, Artificial Sequence
  Description of Artificial Sequence: Synthetic peptide
  Seed: GMMMGMFNMLSTVLGVS
GMMMGMFNMISPVLRVS

SEQ ID NO: 182384 - protein, 17 aa, Artificial Sequence
  Description of Artificial Sequence: Synthetic peptide
  Seed: GMMMGMFNMLSTVLGVS
GMMMGMFNMISPVLSVS

SEQ ID NO: 182385 - protein, 17 aa, Artificial Sequence
  Description of Artificial Sequence: Synthetic peptide
  Seed: GMMMGMFNMLSTVLGVS
GMMMGMFNMISPVLTVS

SEQ ID NO: 182386 - protein, 17 aa, Artificial Sequence
  Description of Artificial Sequence: Synthetic peptide
  Seed: GMMMGMFNMLSTVLGVS
GMMMGMFNMISPVLVVS

SEQ ID NO: 182387 - protein, 17 aa, Artificial Sequence
  Description of Artificial Sequence: Synthetic peptide
  Seed: GMMMGMFNMLSTVLGVS
GMMMGMFNMISPVLYVS

SEQ ID NO: 182388 - protein, 17 aa, Artificial Sequence
  Description of Artificial Sequence: Synthetic peptide
  Seed: GMMMGMFNMLSTVLGVS
GMMMGMFNMISRVLHVS

SEQ ID NO: 182389 - protein, 17 aa, Artificial Sequence
  Description of Artificial Sequence: Synthetic peptide
  Seed: GMMMGMFNMLSTVLGVS
GMMMGMFNMISRVLKVS

SEQ ID NO: 182390 - protein, 17 aa, Artificial Sequence
  Description of Artificial Sequence: Synthetic peptide
  Seed: GMMMGMFNMLSTVLGVS
GMMMGMFNMISRVLNVS

SEQ ID NO: 182391 - protein, 17 aa, Artificial Sequence
  Description of Artificial Sequence: Synthetic peptide
  Seed: GMMMGMFNMLSTVLGVS
GMMMGMFNMISRVLSVS

SEQ ID NO: 182392 - protein, 17 aa, Artificial Sequence
  Description of Artificial Sequence: Synthetic peptide
  Seed: GMMMGMFNMLSTVLGVS
GMMMGMFNMISSVLAVS

SEQ ID NO: 182393 - protein, 17 aa, Artificial Sequence
  Description of Artificial Sequence: Synthetic peptide
  Seed: GMMMGMFNMLSTVLGVS
GMMMGMFNMISSVLDVS

SEQ ID NO: 182394 - protein, 17 aa, Artificial Sequence
  Description of Artificial Sequence: Synthetic peptide
  Seed: GMMMGMFNMLSTVLGVS
GMMMGMFNMISSVLGVS

SEQ ID NO: 182395 - protein, 17 aa, Artificial Sequence
  Description of Artificial Sequence: Synthetic peptide
  Seed: GMMMGMFNMLSTVLGVS
GMMMGMFNMISSVLHVS

SEQ ID NO: 182396 - protein, 17 aa, Artificial Sequence
  Description of Artificial Sequence: Synthetic peptide
  Seed: GMMMGMFNMLSTVLGVS
GMMMGMFNMISSVLKVS

SEQ ID NO: 182397 - protein, 17 aa, Artificial Sequence
  Description of Artificial Sequence: Synthetic peptide
  Seed: GMMMGMFNMLSTVLGVS
GMMMGMFNMISSVLLVS

SEQ ID NO: 182398 - protein, 17 aa, Artificial Sequence
  Description of Artificial Sequence: Synthetic peptide
  Seed: GMMMGMFNMLSTVLGVS
GMMMGMFNMISSVLNVS

SEQ ID NO: 182399 - protein, 17 aa, Artificial Sequence
  Description of Artificial Sequence: Synthetic peptide
  Seed: GMMMGMFNMLSTVLGVS
GMMMGMFNMISSVLRVS

SEQ ID NO: 182400 - protein, 17 aa, Artificial Sequence
  Description of Artificial Sequence: Synthetic peptide
  Seed: GMMMGMFNMLSTVLGVS
GMMMGMFNMISSVLSVS

SEQ ID NO: 182401 - protein, 17 aa, Artificial Sequence
  Description of Artificial Sequence: Synthetic peptide
  Seed: GMMMGMFNMLSTVLGVS
GMMMGMFNMISSVLTVS

SEQ ID NO: 182402 - protein, 17 aa, Artificial Sequence
  Description of Artificial Sequence: Synthetic peptide
  Seed: GMMMGMFNMLSTVLGVS
GMMMGMFNMISSVLVVS

SEQ ID NO: 182403 - protein, 17 aa, Artificial Sequence
  Description of Artificial Sequence: Synthetic peptide
  Seed: GMMMGMFNMLSTVLGVS
GMMMGMFNMISTVLAVS

SEQ ID NO: 182404 - protein, 17 aa, Artificial Sequence
  Description of Artificial Sequence: Synthetic peptide
  Seed: GMMMGMFNMLSTVLGVS
GMMMGMFNMISTVLDVS

SEQ ID NO: 182405 - protein, 17 aa, Artificial Sequence
  Description of Artificial Sequence: Synthetic peptide
  Seed: GMMMGMFNMLSTVLGVS
GMMMGMFNMISTVLEVS

SEQ ID NO: 182406 - protein, 17 aa, Artificial Sequence
  Description of Artificial Sequence: Synthetic peptide
  Seed: GMMMGMFNMLSTVLGVS
GMMMGMFNMISTVLHVS

SEQ ID NO: 182407 - protein, 17 aa, Artificial Sequence
  Description of Artificial Sequence: Synthetic peptide
  Seed: GMMMGMFNMLSTVLGVS
GMMMGMFNMISTVLKVS

SEQ ID NO: 182408 - protein, 17 aa, Artificial Sequence
  Description of Artificial Sequence: Synthetic peptide
  Seed: GMMMGMFNMLSTVLGVS
GMMMGMFNMISTVLNVS

SEQ ID NO: 182409 - protein, 17 aa, Artificial Sequence
  Description of Artificial Sequence: Synthetic peptide
  Seed: GMMMGMFNMLSTVLGVS
GMMMGMFNMISTVLSVS

SEQ ID NO: 182410 - protein, 17 aa, Artificial Sequence
  Description of Artificial Sequence: Synthetic peptide
  Seed: GMMMGMFNMLSTVLGVS
GMMMGMFNMISTVLTVS

SEQ ID NO: 182411 - protein, 17 aa, Artificial Sequence
  Description of Artificial Sequence: Synthetic peptide
  Seed: GMMMGMFNMLSTVLGVS
GMMMGMFNMISVVLHVS

SEQ ID NO: 182412 - protein, 17 aa, Artificial Sequence
  Description of Artificial Sequence: Synthetic peptide
  Seed: GMMMGMFNMLSTVLGVS
GMMMGMFNMISVVLNVS

SEQ ID NO: 182413 - protein, 17 aa, Artificial Sequence
  Description of Artificial Sequence: Synthetic peptide
  Seed: GMMMGMFNMLSTVLGVS
GMMMGMFNMKSAVLAVS

SEQ ID NO: 182414 - protein, 17 aa, Artificial Sequence
  Description of Artificial Sequence: Synthetic peptide
  Seed: GMMMGMFNMLSTVLGVS
GMMMGMFNMKSAVLGVS

SEQ ID NO: 182415 - protein, 17 aa, Artificial Sequence
  Description of Artificial Sequence: Synthetic peptide
  Seed: GMMMGMFNMLSTVLGVS
GMMMGMFNMKSAVLHVS

SEQ ID NO: 182416 - protein, 17 aa, Artificial Sequence
  Description of Artificial Sequence: Synthetic peptide
  Seed: GMMMGMFNMLSTVLGVS
GMMMGMFNMKSAVLIVS

SEQ ID NO: 182417 - protein, 17 aa, Artificial Sequence
  Description of Artificial Sequence: Synthetic peptide
  Seed: GMMMGMFNMLSTVLGVS
GMMMGMFNMKSAVLLVS

SEQ ID NO: 182418 - protein, 17 aa, Artificial Sequence
  Description of Artificial Sequence: Synthetic peptide
  Seed: GMMMGMFNMLSTVLGVS
GMMMGMFNMKSAVLMVS

SEQ ID NO: 182419 - protein, 17 aa, Artificial Sequence
  Description of Artificial Sequence: Synthetic peptide
  Seed: GMMMGMFNMLSTVLGVS
GMMMGMFNMKSAVLNVS

SEQ ID NO: 182420 - protein, 17 aa, Artificial Sequence
  Description of Artificial Sequence: Synthetic peptide
  Seed: GMMMGMFNMLSTVLGVS
GMMMGMFNMKSAVLSVS

SEQ ID NO: 182421 - protein, 17 aa, Artificial Sequence
  Description of Artificial Sequence: Synthetic peptide
  Seed: GMMMGMFNMLSTVLGVS
GMMMGMFNMKSAVLVVS

SEQ ID NO: 182422 - protein, 17 aa, Artificial Sequence
  Description of Artificial Sequence: Synthetic peptide
  Seed: GMMMGMFNMLSTVLGVS
GMMMGMFNMKSGVLAVS

SEQ ID NO: 182423 - protein, 17 aa, Artificial Sequence
  Description of Artificial Sequence: Synthetic peptide
  Seed: GMMMGMFNMLSTVLGVS
GMMMGMFNMKSGVLGVS

SEQ ID NO: 182424 - protein, 17 aa, Artificial Sequence
  Description of Artificial Sequence: Synthetic peptide
  Seed: GMMMGMFNMLSTVLGVS
GMMMGMFNMKSGVLIVS

SEQ ID NO: 182425 - protein, 17 aa, Artificial Sequence
  Description of Artificial Sequence: Synthetic peptide
  Seed: GMMMGMFNMLSTVLGVS
GMMMGMFNMKSGVLLVS

SEQ ID NO: 182426 - protein, 17 aa, Artificial Sequence
  Description of Artificial Sequence: Synthetic peptide
  Seed: GMMMGMFNMLSTVLGVS
GMMMGMFNMKSGVLMVS

SEQ ID NO: 182427 - protein, 17 aa, Artificial Sequence
  Description of Artificial Sequence: Synthetic peptide
  Seed: GMMMGMFNMLSTVLGVS
GMMMGMFNMKSGVLSVS

SEQ ID NO: 182428 - protein, 17 aa, Artificial Sequence
  Description of Artificial Sequence: Synthetic peptide
  Seed: GMMMGMFNMLSTVLGVS
GMMMGMFNMKSGVLTVS

SEQ ID NO: 182429 - protein, 17 aa, Artificial Sequence
  Description of Artificial Sequence: Synthetic peptide
  Seed: GMMMGMFNMLSTVLGVS
GMMMGMFNMKSGVLVVS

SEQ ID NO: 182430 - protein, 17 aa, Artificial Sequence
  Description of Artificial Sequence: Synthetic peptide
  Seed: GMMMGMFNMLSTVLGVS
GMMMGMFNMKSPVLAVS

SEQ ID NO: 182431 - protein, 17 aa, Artificial Sequence
  Description of Artificial Sequence: Synthetic peptide
  Seed: GMMMGMFNMLSTVLGVS
GMMMGMFNMKSPVLIVS

SEQ ID NO: 182432 - protein, 17 aa, Artificial Sequence
  Description of Artificial Sequence: Synthetic peptide
  Seed: GMMMGMFNMLSTVLGVS
GMMMGMFNMKSPVLLVS

SEQ ID NO: 182433 - protein, 17 aa, Artificial Sequence
  Description of Artificial Sequence: Synthetic peptide
  Seed: GMMMGMFNMLSTVLGVS
GMMMGMFNMKSPVLMVS

SEQ ID NO: 182434 - protein, 17 aa, Artificial Sequence
  Description of Artificial Sequence: Synthetic peptide
  Seed: GMMMGMFNMLSTVLGVS
GMMMGMFNMKSPVLNVS

SEQ ID NO: 182435 - protein, 17 aa, Artificial Sequence
  Description of Artificial Sequence: Synthetic peptide
  Seed: GMMMGMFNMLSTVLGVS
GMMMGMFNMKSPVLVVS

SEQ ID NO: 182436 - protein, 17 aa, Artificial Sequence
  Description of Artificial Sequence: Synthetic peptide
  Seed: GMMMGMFNMLSTVLGVS
GMMMGMFNMKSSVLAVS

SEQ ID NO: 182437 - protein, 17 aa, Artificial Sequence
  Description of Artificial Sequence: Synthetic peptide
  Seed: GMMMGMFNMLSTVLGVS
GMMMGMFNMKSSVLIVS

SEQ ID NO: 182438 - protein, 17 aa, Artificial Sequence
  Description of Artificial Sequence: Synthetic peptide
  Seed: GMMMGMFNMLSTVLGVS
GMMMGMFNMKSSVLLVS

SEQ ID NO: 182439 - protein, 17 aa, Artificial Sequence
  Description of Artificial Sequence: Synthetic peptide
  Seed: GMMMGMFNMLSTVLGVS
GMMMGMFNMKSSVLNVS

SEQ ID NO: 182440 - protein, 17 aa, Artificial Sequence
  Description of Artificial Sequence: Synthetic peptide
  Seed: GMMMGMFNMLSTVLGVS
GMMMGMFNMKSSVLVVS

SEQ ID NO: 182441 - protein, 17 aa, Artificial Sequence
  Description of Artificial Sequence: Synthetic peptide
  Seed: GMMMGMFNMLSTVLGVS
GMMMGMFNMKSTVLNVS

SEQ ID NO: 182442 - protein, 17 aa, Artificial Sequence
  Description of Artificial Sequence: Synthetic peptide
  Seed: GMMMGMFNMLSTVLGVS
GMMMGMFNMLSAVLAVS

SEQ ID NO: 182443 - protein, 17 aa, Artificial Sequence
  Description of Artificial Sequence: Synthetic peptide
  Seed: GMMMGMFNMLSTVLGVS
GMMMGMFNMLSAVLDVS

SEQ ID NO: 182444 - protein, 17 aa, Artificial Sequence
  Description of Artificial Sequence: Synthetic peptide
  Seed: GMMMGMFNMLSTVLGVS
GMMMGMFNMLSAVLEVS

SEQ ID NO: 182445 - protein, 17 aa, Artificial Sequence
  Description of Artificial Sequence: Synthetic peptide
  Seed: GMMMGMFNMLSTVLGVS
GMMMGMFNMLSAVLGVS

SEQ ID NO: 182446 - protein, 17 aa, Artificial Sequence
  Description of Artificial Sequence: Synthetic peptide
  Seed: GMMMGMFNMLSTVLGVS
GMMMGMFNMLSAVLHVS

SEQ ID NO: 182447 - protein, 17 aa, Artificial Sequence
  Description of Artificial Sequence: Synthetic peptide
  Seed: GMMMGMFNMLSTVLGVS
GMMMGMFNMLSAVLIVS

SEQ ID NO: 182448 - protein, 17 aa, Artificial Sequence
  Description of Artificial Sequence: Synthetic peptide
  Seed: GMMMGMFNMLSTVLGVS
GMMMGMFNMLSAVLKVS

SEQ ID NO: 182449 - protein, 17 aa, Artificial Sequence
  Description of Artificial Sequence: Synthetic peptide
  Seed: GMMMGMFNMLSTVLGVS
GMMMGMFNMLSAVLLVS

SEQ ID NO: 182450 - protein, 17 aa, Artificial Sequence
  Description of Artificial Sequence: Synthetic peptide
  Seed: GMMMGMFNMLSTVLGVS
GMMMGMFNMLSAVLMVS

SEQ ID NO: 182451 - protein, 17 aa, Artificial Sequence
  Description of Artificial Sequence: Synthetic peptide
  Seed: GMMMGMFNMLSTVLGVS
GMMMGMFNMLSAVLNVS

SEQ ID NO: 182452 - protein, 17 aa, Artificial Sequence
  Description of Artificial Sequence: Synthetic peptide
  Seed: GMMMGMFNMLSTVLGVS
GMMMGMFNMLSAVLPVS

SEQ ID NO: 182453 - protein, 17 aa, Artificial Sequence
  Description of Artificial Sequence: Synthetic peptide
  Seed: GMMMGMFNMLSTVLGVS
GMMMGMFNMLSAVLQVS

SEQ ID NO: 182454 - protein, 17 aa, Artificial Sequence
  Description of Artificial Sequence: Synthetic peptide
  Seed: GMMMGMFNMLSTVLGVS
GMMMGMFNMLSAVLRVS

SEQ ID NO: 182455 - protein, 17 aa, Artificial Sequence
  Description of Artificial Sequence: Synthetic peptide
  Seed: GMMMGMFNMLSTVLGVS
GMMMGMFNMLSAVLSVS

SEQ ID NO: 182456 - protein, 17 aa, Artificial Sequence
  Description of Artificial Sequence: Synthetic peptide
  Seed: GMMMGMFNMLSTVLGVS
GMMMGMFNMLSAVLTVS

SEQ ID NO: 182457 - protein, 17 aa, Artificial Sequence
  Description of Artificial Sequence: Synthetic peptide
  Seed: GMMMGMFNMLSTVLGVS
GMMMGMFNMLSAVLVVS

SEQ ID NO: 182458 - protein, 17 aa, Artificial Sequence
  Description of Artificial Sequence: Synthetic peptide
  Seed: GMMMGMFNMLSTVLGVS
GMMMGMFNMLSAVLYVS

SEQ ID NO: 182459 - protein, 17 aa, Artificial Sequence
  Description of Artificial Sequence: Synthetic peptide
  Seed: GMMMGMFNMLSTVLGVS
GMMMGMFNMLSGVLAVS

SEQ ID NO: 182460 - protein, 17 aa, Artificial Sequence
  Description of Artificial Sequence: Synthetic peptide
  Seed: GMMMGMFNMLSTVLGVS
GMMMGMFNMLSGVLDVS

SEQ ID NO: 182461 - protein, 17 aa, Artificial Sequence
  Description of Artificial Sequence: Synthetic peptide
  Seed: GMMMGMFNMLSTVLGVS
GMMMGMFNMLSGVLGVS

SEQ ID NO: 182462 - protein, 17 aa, Artificial Sequence
  Description of Artificial Sequence: Synthetic peptide
  Seed: GMMMGMFNMLSTVLGVS
GMMMGMFNMLSGVLHVS

SEQ ID NO: 182463 - protein, 17 aa, Artificial Sequence
  Description of Artificial Sequence: Synthetic peptide
  Seed: GMMMGMFNMLSTVLGVS
GMMMGMFNMLSGVLIVS

SEQ ID NO: 182464 - protein, 17 aa, Artificial Sequence
  Description of Artificial Sequence: Synthetic peptide
  Seed: GMMMGMFNMLSTVLGVS
GMMMGMFNMLSGVLKVS

SEQ ID NO: 182465 - protein, 17 aa, Artificial Sequence
  Description of Artificial Sequence: Synthetic peptide
  Seed: GMMMGMFNMLSTVLGVS
GMMMGMFNMLSGVLLVS

SEQ ID NO: 182466 - protein, 17 aa, Artificial Sequence
  Description of Artificial Sequence: Synthetic peptide
  Seed: GMMMGMFNMLSTVLGVS
GMMMGMFNMLSGVLMVS

SEQ ID NO: 182467 - protein, 17 aa, Artificial Sequence
  Description of Artificial Sequence: Synthetic peptide
  Seed: GMMMGMFNMLSTVLGVS
GMMMGMFNMLSGVLNVS

SEQ ID NO: 182468 - protein, 17 aa, Artificial Sequence
  Description of Artificial Sequence: Synthetic peptide
  Seed: GMMMGMFNMLSTVLGVS
GMMMGMFNMLSGVLPVS

SEQ ID NO: 182469 - protein, 17 aa, Artificial Sequence
  Description of Artificial Sequence: Synthetic peptide
  Seed: GMMMGMFNMLSTVLGVS
GMMMGMFNMLSGVLQVS

SEQ ID NO: 182470 - protein, 17 aa, Artificial Sequence
  Description of Artificial Sequence: Synthetic peptide
  Seed: GMMMGMFNMLSTVLGVS
GMMMGMFNMLSGVLRVS

SEQ ID NO: 182471 - protein, 17 aa, Artificial Sequence
  Description of Artificial Sequence: Synthetic peptide
  Seed: GMMMGMFNMLSTVLGVS
GMMMGMFNMLSGVLSVS

SEQ ID NO: 182472 - protein, 17 aa, Artificial Sequence
  Description of Artificial Sequence: Synthetic peptide
  Seed: GMMMGMFNMLSTVLGVS
GMMMGMFNMLSGVLTVS

SEQ ID NO: 182473 - protein, 17 aa, Artificial Sequence
  Description of Artificial Sequence: Synthetic peptide
  Seed: GMMMGMFNMLSTVLGVS
GMMMGMFNMLSGVLVVS

SEQ ID NO: 182474 - protein, 17 aa, Artificial Sequence
  Description of Artificial Sequence: Synthetic peptide
  Seed: GMMMGMFNMLSTVLGVS
GMMMGMFNMLSGVLYVS

SEQ ID NO: 182475 - protein, 17 aa, Artificial Sequence
  Description of Artificial Sequence: Synthetic peptide
  Seed: GMMMGMFNMLSTVLGVS
GMMMGMFNMLSHVLAVS

SEQ ID NO: 182476 - protein, 17 aa, Artificial Sequence
  Description of Artificial Sequence: Synthetic peptide
  Seed: GMMMGMFNMLSTVLGVS
GMMMGMFNMLSHVLNVS

SEQ ID NO: 182477 - protein, 17 aa, Artificial Sequence
  Description of Artificial Sequence: Synthetic peptide
  Seed: GMMMGMFNMLSTVLGVS
GMMMGMFNMLSIVLHVS

SEQ ID NO: 182478 - protein, 17 aa, Artificial Sequence
  Description of Artificial Sequence: Synthetic peptide
  Seed: GMMMGMFNMLSTVLGVS
GMMMGMFNMLSIVLNVS

SEQ ID NO: 182479 - protein, 17 aa, Artificial Sequence
  Description of Artificial Sequence: Synthetic peptide
  Seed: GMMMGMFNMLSTVLGVS
GMMMGMFNMLSKVLGVS

SEQ ID NO: 182480 - protein, 17 aa, Artificial Sequence
  Description of Artificial Sequence: Synthetic peptide
  Seed: GMMMGMFNMLSTVLGVS
GMMMGMFNMLSKVLHVS

SEQ ID NO: 182481 - protein, 17 aa, Artificial Sequence
  Description of Artificial Sequence: Synthetic peptide
  Seed: GMMMGMFNMLSTVLGVS
GMMMGMFNMLSKVLKVS

SEQ ID NO: 182482 - protein, 17 aa, Artificial Sequence
  Description of Artificial Sequence: Synthetic peptide
  Seed: GMMMGMFNMLSTVLGVS
GMMMGMFNMLSKVLNVS

SEQ ID NO: 182483 - protein, 17 aa, Artificial Sequence
  Description of Artificial Sequence: Synthetic peptide
  Seed: GMMMGMFNMLSTVLGVS
GMMMGMFNMLSKVLSVS

SEQ ID NO: 182484 - protein, 17 aa, Artificial Sequence
  Description of Artificial Sequence: Synthetic peptide
  Seed: GMMMGMFNMLSTVLGVS
GMMMGMFNMLSNVLAVS

SEQ ID NO: 182485 - protein, 17 aa, Artificial Sequence
  Description of Artificial Sequence: Synthetic peptide
  Seed: GMMMGMFNMLSTVLGVS
GMMMGMFNMLSNVLDVS

SEQ ID NO: 182486 - protein, 17 aa, Artificial Sequence
  Description of Artificial Sequence: Synthetic peptide
  Seed: GMMMGMFNMLSTVLGVS
GMMMGMFNMLSNVLEVS

SEQ ID NO: 182487 - protein, 17 aa, Artificial Sequence
  Description of Artificial Sequence: Synthetic peptide
  Seed: GMMMGMFNMLSTVLGVS
GMMMGMFNMLSNVLGVS

SEQ ID NO: 182488 - protein, 17 aa, Artificial Sequence
  Description of Artificial Sequence: Synthetic peptide
  Seed: GMMMGMFNMLSTVLGVS
GMMMGMFNMLSNVLHVS

SEQ ID NO: 182489 - protein, 17 aa, Artificial Sequence
  Description of Artificial Sequence: Synthetic peptide
  Seed: GMMMGMFNMLSTVLGVS
GMMMGMFNMLSNVLIVS

SEQ ID NO: 182490 - protein, 17 aa, Artificial Sequence
  Description of Artificial Sequence: Synthetic peptide
  Seed: GMMMGMFNMLSTVLGVS
GMMMGMFNMLSNVLKVS

SEQ ID NO: 182491 - protein, 17 aa, Artificial Sequence
  Description of Artificial Sequence: Synthetic peptide
  Seed: GMMMGMFNMLSTVLGVS
GMMMGMFNMLSNVLLVS

SEQ ID NO: 182492 - protein, 17 aa, Artificial Sequence
  Description of Artificial Sequence: Synthetic peptide
  Seed: GMMMGMFNMLSTVLGVS
GMMMGMFNMLSNVLMVS

SEQ ID NO: 182493 - protein, 17 aa, Artificial Sequence
  Description of Artificial Sequence: Synthetic peptide
  Seed: GMMMGMFNMLSTVLGVS
GMMMGMFNMLSNVLNVS

SEQ ID NO: 182494 - protein, 17 aa, Artificial Sequence
  Description of Artificial Sequence: Synthetic peptide
  Seed: GMMMGMFNMLSTVLGVS
GMMMGMFNMLSNVLPVS

SEQ ID NO: 182495 - protein, 17 aa, Artificial Sequence
  Description of Artificial Sequence: Synthetic peptide
  Seed: GMMMGMFNMLSTVLGVS
GMMMGMFNMLSNVLRVS

SEQ ID NO: 182496 - protein, 17 aa, Artificial Sequence
  Description of Artificial Sequence: Synthetic peptide
  Seed: GMMMGMFNMLSTVLGVS
GMMMGMFNMLSNVLSVS

SEQ ID NO: 182497 - protein, 17 aa, Artificial Sequence
  Description of Artificial Sequence: Synthetic peptide
  Seed: GMMMGMFNMLSTVLGVS
GMMMGMFNMLSNVLTVS

SEQ ID NO: 182498 - protein, 17 aa, Artificial Sequence
  Description of Artificial Sequence: Synthetic peptide
  Seed: GMMMGMFNMLSTVLGVS
GMMMGMFNMLSNVLVVS

SEQ ID NO: 182499 - protein, 17 aa, Artificial Sequence
  Description of Artificial Sequence: Synthetic peptide
  Seed: GMMMGMFNMLSTVLGVS
GMMMGMFNMLSPVLAVS

SEQ ID NO: 182500 - protein, 17 aa, Artificial Sequence
  Description of Artificial Sequence: Synthetic peptide
  Seed: GMMMGMFNMLSTVLGVS
GMMMGMFNMLSPVLCVS

SEQ ID NO: 182501 - protein, 17 aa, Artificial Sequence
  Description of Artificial Sequence: Synthetic peptide
  Seed: GMMMGMFNMLSTVLGVS
GMMMGMFNMLSPVLDVS

SEQ ID NO: 182502 - protein, 17 aa, Artificial Sequence
  Description of Artificial Sequence: Synthetic peptide
  Seed: GMMMGMFNMLSTVLGVS
GMMMGMFNMLSPVLEVS

SEQ ID NO: 182503 - protein, 17 aa, Artificial Sequence
  Description of Artificial Sequence: Synthetic peptide
  Seed: GMMMGMFNMLSTVLGVS
GMMMGMFNMLSPVLFVS

SEQ ID NO: 182504 - protein, 17 aa, Artificial Sequence
  Description of Artificial Sequence: Synthetic peptide
  Seed: GMMMGMFNMLSTVLGVS
GMMMGMFNMLSPVLGVS

SEQ ID NO: 182505 - protein, 17 aa, Artificial Sequence
  Description of Artificial Sequence: Synthetic peptide
  Seed: GMMMGMFNMLSTVLGVS
GMMMGMFNMLSPVLHVS

SEQ ID NO: 182506 - protein, 17 aa, Artificial Sequence
  Description of Artificial Sequence: Synthetic peptide
  Seed: GMMMGMFNMLSTVLGVS
GMMMGMFNMLSPVLIVS

SEQ ID NO: 182507 - protein, 17 aa, Artificial Sequence
  Description of Artificial Sequence: Synthetic peptide
  Seed: GMMMGMFNMLSTVLGVS
GMMMGMFNMLSPVLKVS

SEQ ID NO: 182508 - protein, 17 aa, Artificial Sequence
  Description of Artificial Sequence: Synthetic peptide
  Seed: GMMMGMFNMLSTVLGVS
GMMMGMFNMLSPVLLVS

SEQ ID NO: 182509 - protein, 17 aa, Artificial Sequence
  Description of Artificial Sequence: Synthetic peptide
  Seed: GMMMGMFNMLSTVLGVS
GMMMGMFNMLSPVLMVS

SEQ ID NO: 182510 - protein, 17 aa, Artificial Sequence
  Description of Artificial Sequence: Synthetic peptide
  Seed: GMMMGMFNMLSTVLGVS
GMMMGMFNMLSPVLNVS

SEQ ID NO: 182511 - protein, 17 aa, Artificial Sequence
  Description of Artificial Sequence: Synthetic peptide
  Seed: GMMMGMFNMLSTVLGVS
GMMMGMFNMLSPVLPVS

SEQ ID NO: 182512 - protein, 17 aa, Artificial Sequence
  Description of Artificial Sequence: Synthetic peptide
  Seed: GMMMGMFNMLSTVLGVS
GMMMGMFNMLSPVLQVS

SEQ ID NO: 182513 - protein, 17 aa, Artificial Sequence
  Description of Artificial Sequence: Synthetic peptide
  Seed: GMMMGMFNMLSTVLGVS
GMMMGMFNMLSPVLRVS

SEQ ID NO: 182514 - protein, 17 aa, Artificial Sequence
  Description of Artificial Sequence: Synthetic peptide
  Seed: GMMMGMFNMLSTVLGVS
GMMMGMFNMLSPVLSVS

SEQ ID NO: 182515 - protein, 17 aa, Artificial Sequence
  Description of Artificial Sequence: Synthetic peptide
  Seed: GMMMGMFNMLSTVLGVS
GMMMGMFNMLSPVLTVS

SEQ ID NO: 182516 - protein, 17 aa, Artificial Sequence
  Description of Artificial Sequence: Synthetic peptide
  Seed: GMMMGMFNMLSTVLGVS
GMMMGMFNMLSPVLVVS

SEQ ID NO: 182517 - protein, 17 aa, Artificial Sequence
  Description of Artificial Sequence: Synthetic peptide
  Seed: GMMMGMFNMLSTVLGVS
GMMMGMFNMLSPVLYVS

SEQ ID NO: 182518 - protein, 17 aa, Artificial Sequence
  Description of Artificial Sequence: Synthetic peptide
  Seed: GMMMGMFNMLSTVLGVS
GMMMGMFNMLSRVLHVS

SEQ ID NO: 182519 - protein, 17 aa, Artificial Sequence
  Description of Artificial Sequence: Synthetic peptide
  Seed: GMMMGMFNMLSTVLGVS
GMMMGMFNMLSRVLKVS

SEQ ID NO: 182520 - protein, 17 aa, Artificial Sequence
  Description of Artificial Sequence: Synthetic peptide
  Seed: GMMMGMFNMLSTVLGVS
GMMMGMFNMLSRVLNVS

SEQ ID NO: 182521 - protein, 17 aa, Artificial Sequence
  Description of Artificial Sequence: Synthetic peptide
  Seed: GMMMGMFNMLSTVLGVS
GMMMGMFNMLSRVLRVS

SEQ ID NO: 182522 - protein, 17 aa, Artificial Sequence
  Description of Artificial Sequence: Synthetic peptide
  Seed: GMMMGMFNMLSTVLGVS
GMMMGMFNMLSRVLSVS

SEQ ID NO: 182523 - protein, 17 aa, Artificial Sequence
  Description of Artificial Sequence: Synthetic peptide
  Seed: GMMMGMFNMLSTVLGVS
GMMMGMFNMLSSVLAVS

SEQ ID NO: 182524 - protein, 17 aa, Artificial Sequence
  Description of Artificial Sequence: Synthetic peptide
  Seed: GMMMGMFNMLSTVLGVS
GMMMGMFNMLSSVLDVS

SEQ ID NO: 182525 - protein, 17 aa, Artificial Sequence
  Description of Artificial Sequence: Synthetic peptide
  Seed: GMMMGMFNMLSTVLGVS
GMMMGMFNMLSSVLGVS

SEQ ID NO: 182526 - protein, 17 aa, Artificial Sequence
  Description of Artificial Sequence: Synthetic peptide
  Seed: GMMMGMFNMLSTVLGVS
GMMMGMFNMLSSVLHVS

SEQ ID NO: 182527 - protein, 17 aa, Artificial Sequence
  Description of Artificial Sequence: Synthetic peptide
  Seed: GMMMGMFNMLSTVLGVS
GMMMGMFNMLSSVLIVS

SEQ ID NO: 182528 - protein, 17 aa, Artificial Sequence
  Description of Artificial Sequence: Synthetic peptide
  Seed: GMMMGMFNMLSTVLGVS
GMMMGMFNMLSSVLKVS

SEQ ID NO: 182529 - protein, 17 aa, Artificial Sequence
  Description of Artificial Sequence: Synthetic peptide
  Seed: GMMMGMFNMLSTVLGVS
GMMMGMFNMLSSVLLVS

SEQ ID NO: 182530 - protein, 17 aa, Artificial Sequence
  Description of Artificial Sequence: Synthetic peptide
  Seed: GMMMGMFNMLSTVLGVS
GMMMGMFNMLSSVLMVS

SEQ ID NO: 182531 - protein, 17 aa, Artificial Sequence
  Description of Artificial Sequence: Synthetic peptide
  Seed: GMMMGMFNMLSTVLGVS
GMMMGMFNMLSSVLNVS

SEQ ID NO: 182532 - protein, 17 aa, Artificial Sequence
  Description of Artificial Sequence: Synthetic peptide
  Seed: GMMMGMFNMLSTVLGVS
GMMMGMFNMLSSVLPVS

SEQ ID NO: 182533 - protein, 17 aa, Artificial Sequence
  Description of Artificial Sequence: Synthetic peptide
  Seed: GMMMGMFNMLSTVLGVS
GMMMGMFNMLSSVLRVS

SEQ ID NO: 182534 - protein, 17 aa, Artificial Sequence
  Description of Artificial Sequence: Synthetic peptide
  Seed: GMMMGMFNMLSTVLGVS
GMMMGMFNMLSSVLSVS

SEQ ID NO: 182535 - protein, 17 aa, Artificial Sequence
  Description of Artificial Sequence: Synthetic peptide
  Seed: GMMMGMFNMLSTVLGVS
GMMMGMFNMLSSVLTVS

SEQ ID NO: 182536 - protein, 17 aa, Artificial Sequence
  Description of Artificial Sequence: Synthetic peptide
  Seed: GMMMGMFNMLSTVLGVS
GMMMGMFNMLSSVLVVS

SEQ ID NO: 182537 - protein, 17 aa, Artificial Sequence
  Description of Artificial Sequence: Synthetic peptide
  Seed: GMMMGMFNMLSTVLGVS
GMMMGMFNMLSTVLAVS

SEQ ID NO: 182538 - protein, 17 aa, Artificial Sequence
  Description of Artificial Sequence: Synthetic peptide
  Seed: GMMMGMFNMLSTVLGVS
GMMMGMFNMLSTVLDVS

SEQ ID NO: 182539 - protein, 17 aa, Artificial Sequence
  Description of Artificial Sequence: Synthetic peptide
  Seed: GMMMGMFNMLSTVLGVS
GMMMGMFNMLSTVLHVS

SEQ ID NO: 182540 - protein, 17 aa, Artificial Sequence
  Description of Artificial Sequence: Synthetic peptide
  Seed: GMMMGMFNMLSTVLGVS
GMMMGMFNMLSTVLIVS

SEQ ID NO: 182541 - protein, 17 aa, Artificial Sequence
  Description of Artificial Sequence: Synthetic peptide
  Seed: GMMMGMFNMLSTVLGVS
GMMMGMFNMLSTVLKVS

SEQ ID NO: 182542 - protein, 17 aa, Artificial Sequence
  Description of Artificial Sequence: Synthetic peptide
  Seed: GMMMGMFNMLSTVLGVS
GMMMGMFNMLSTVLLVS

SEQ ID NO: 182543 - protein, 17 aa, Artificial Sequence
  Description of Artificial Sequence: Synthetic peptide
  Seed: GMMMGMFNMLSTVLGVS
GMMMGMFNMLSTVLMVS

SEQ ID NO: 182544 - protein, 17 aa, Artificial Sequence
  Description of Artificial Sequence: Synthetic peptide
  Seed: GMMMGMFNMLSTVLGVS
GMMMGMFNMLSTVLNVS

SEQ ID NO: 182545 - protein, 17 aa, Artificial Sequence
  Description of Artificial Sequence: Synthetic peptide
  Seed: GMMMGMFNMLSTVLGVS
GMMMGMFNMLSTVLRVS

SEQ ID NO: 182546 - protein, 17 aa, Artificial Sequence
  Description of Artificial Sequence: Synthetic peptide
  Seed: GMMMGMFNMLSTVLGVS
GMMMGMFNMLSTVLSVS

SEQ ID NO: 182547 - protein, 17 aa, Artificial Sequence
  Description of Artificial Sequence: Synthetic peptide
  Seed: GMMMGMFNMLSTVLGVS
GMMMGMFNMLSTVLTVS

SEQ ID NO: 182548 - protein, 17 aa, Artificial Sequence
  Description of Artificial Sequence: Synthetic peptide
  Seed: GMMMGMFNMLSTVLGVS
GMMMGMFNMLSTVLVVS

SEQ ID NO: 182549 - protein, 17 aa, Artificial Sequence
  Description of Artificial Sequence: Synthetic peptide
  Seed: GMMMGMFNMLSTVLGVS
GMMMGMFNMLSVVLHVS

SEQ ID NO: 182550 - protein, 17 aa, Artificial Sequence
  Description of Artificial Sequence: Synthetic peptide
  Seed: GMMMGMFNMLSTVLGVS
GMMMGMFNMLSVVLNVS

SEQ ID NO: 182551 - protein, 17 aa, Artificial Sequence
  Description of Artificial Sequence: Synthetic peptide
  Seed: GMMMGMFNMLSTVLGVS
GMMMGMFNMMSAVLAVS

SEQ ID NO: 182552 - protein, 17 aa, Artificial Sequence
  Description of Artificial Sequence: Synthetic peptide
  Seed: GMMMGMFNMLSTVLGVS
GMMMGMFNMMSAVLDVS

SEQ ID NO: 182553 - protein, 17 aa, Artificial Sequence
  Description of Artificial Sequence: Synthetic peptide
  Seed: GMMMGMFNMLSTVLGVS
GMMMGMFNMMSAVLEVS

SEQ ID NO: 182554 - protein, 17 aa, Artificial Sequence
  Description of Artificial Sequence: Synthetic peptide
  Seed: GMMMGMFNMLSTVLGVS
GMMMGMFNMMSAVLGVS

SEQ ID NO: 182555 - protein, 17 aa, Artificial Sequence
  Description of Artificial Sequence: Synthetic peptide
  Seed: GMMMGMFNMLSTVLGVS
GMMMGMFNMMSAVLHVS

SEQ ID NO: 182556 - protein, 17 aa, Artificial Sequence
  Description of Artificial Sequence: Synthetic peptide
  Seed: GMMMGMFNMLSTVLGVS
GMMMGMFNMMSAVLIVS

SEQ ID NO: 182557 - protein, 17 aa, Artificial Sequence
  Description of Artificial Sequence: Synthetic peptide
  Seed: GMMMGMFNMLSTVLGVS
GMMMGMFNMMSAVLKVS

SEQ ID NO: 182558 - protein, 17 aa, Artificial Sequence
  Description of Artificial Sequence: Synthetic peptide
  Seed: GMMMGMFNMLSTVLGVS
GMMMGMFNMMSAVLLVS

SEQ ID NO: 182559 - protein, 17 aa, Artificial Sequence
  Description of Artificial Sequence: Synthetic peptide
  Seed: GMMMGMFNMLSTVLGVS
GMMMGMFNMMSAVLMVS

SEQ ID NO: 182560 - protein, 17 aa, Artificial Sequence
  Description of Artificial Sequence: Synthetic peptide
  Seed: GMMMGMFNMLSTVLGVS
GMMMGMFNMMSAVLNVS

SEQ ID NO: 182561 - protein, 17 aa, Artificial Sequence
  Description of Artificial Sequence: Synthetic peptide
  Seed: GMMMGMFNMLSTVLGVS
GMMMGMFNMMSAVLPVS

SEQ ID NO: 182562 - protein, 17 aa, Artificial Sequence
  Description of Artificial Sequence: Synthetic peptide
  Seed: GMMMGMFNMLSTVLGVS
GMMMGMFNMMSAVLQVS

SEQ ID NO: 182563 - protein, 17 aa, Artificial Sequence
  Description of Artificial Sequence: Synthetic peptide
  Seed: GMMMGMFNMLSTVLGVS
GMMMGMFNMMSAVLRVS

SEQ ID NO: 182564 - protein, 17 aa, Artificial Sequence
  Description of Artificial Sequence: Synthetic peptide
  Seed: GMMMGMFNMLSTVLGVS
GMMMGMFNMMSAVLSVS

SEQ ID NO: 182565 - protein, 17 aa, Artificial Sequence
  Description of Artificial Sequence: Synthetic peptide
  Seed: GMMMGMFNMLSTVLGVS
GMMMGMFNMMSAVLTVS

SEQ ID NO: 182566 - protein, 17 aa, Artificial Sequence
  Description of Artificial Sequence: Synthetic peptide
  Seed: GMMMGMFNMLSTVLGVS
GMMMGMFNMMSAVLVVS

SEQ ID NO: 182567 - protein, 17 aa, Artificial Sequence
  Description of Artificial Sequence: Synthetic peptide
  Seed: GMMMGMFNMLSTVLGVS
GMMMGMFNMMSAVLYVS

SEQ ID NO: 182568 - protein, 17 aa, Artificial Sequence
  Description of Artificial Sequence: Synthetic peptide
  Seed: GMMMGMFNMLSTVLGVS
GMMMGMFNMMSDVLAVS

SEQ ID NO: 182569 - protein, 17 aa, Artificial Sequence
  Description of Artificial Sequence: Synthetic peptide
  Seed: GMMMGMFNMLSTVLGVS
GMMMGMFNMMSDVLDVS

SEQ ID NO: 182570 - protein, 17 aa, Artificial Sequence
  Description of Artificial Sequence: Synthetic peptide
  Seed: GMMMGMFNMLSTVLGVS
GMMMGMFNMMSDVLNVS

SEQ ID NO: 182571 - protein, 17 aa, Artificial Sequence
  Description of Artificial Sequence: Synthetic peptide
  Seed: GMMMGMFNMLSTVLGVS
GMMMGMFNMMSDVLSVS

SEQ ID NO: 182572 - protein, 17 aa, Artificial Sequence
  Description of Artificial Sequence: Synthetic peptide
  Seed: GMMMGMFNMLSTVLGVS
GMMMGMFNMMSEVLHVS

SEQ ID NO: 182573 - protein, 17 aa, Artificial Sequence
  Description of Artificial Sequence: Synthetic peptide
  Seed: GMMMGMFNMLSTVLGVS
GMMMGMFNMMSEVLNVS

SEQ ID NO: 182574 - protein, 17 aa, Artificial Sequence
  Description of Artificial Sequence: Synthetic peptide
  Seed: GMMMGMFNMLSTVLGVS
GMMMGMFNMMSEVLSVS

SEQ ID NO: 182575 - protein, 17 aa, Artificial Sequence
  Description of Artificial Sequence: Synthetic peptide
  Seed: GMMMGMFNMLSTVLGVS
GMMMGMFNMMSGVLAVS

SEQ ID NO: 182576 - protein, 17 aa, Artificial Sequence
  Description of Artificial Sequence: Synthetic peptide
  Seed: GMMMGMFNMLSTVLGVS
GMMMGMFNMMSGVLDVS

SEQ ID NO: 182577 - protein, 17 aa, Artificial Sequence
  Description of Artificial Sequence: Synthetic peptide
  Seed: GMMMGMFNMLSTVLGVS
GMMMGMFNMMSGVLEVS

SEQ ID NO: 182578 - protein, 17 aa, Artificial Sequence
  Description of Artificial Sequence: Synthetic peptide
  Seed: GMMMGMFNMLSTVLGVS
GMMMGMFNMMSGVLGVS

SEQ ID NO: 182579 - protein, 17 aa, Artificial Sequence
  Description of Artificial Sequence: Synthetic peptide
  Seed: GMMMGMFNMLSTVLGVS
GMMMGMFNMMSGVLHVS

SEQ ID NO: 182580 - protein, 17 aa, Artificial Sequence
  Description of Artificial Sequence: Synthetic peptide
  Seed: GMMMGMFNMLSTVLGVS
GMMMGMFNMMSGVLIVS

SEQ ID NO: 182581 - protein, 17 aa, Artificial Sequence
  Description of Artificial Sequence: Synthetic peptide
  Seed: GMMMGMFNMLSTVLGVS
GMMMGMFNMMSGVLKVS

SEQ ID NO: 182582 - protein, 17 aa, Artificial Sequence
  Description of Artificial Sequence: Synthetic peptide
  Seed: GMMMGMFNMLSTVLGVS
GMMMGMFNMMSGVLLVS

SEQ ID NO: 182583 - protein, 17 aa, Artificial Sequence
  Description of Artificial Sequence: Synthetic peptide
  Seed: GMMMGMFNMLSTVLGVS
GMMMGMFNMMSGVLMVS

SEQ ID NO: 182584 - protein, 17 aa, Artificial Sequence
  Description of Artificial Sequence: Synthetic peptide
  Seed: GMMMGMFNMLSTVLGVS
GMMMGMFNMMSGVLNVS

SEQ ID NO: 182585 - protein, 17 aa, Artificial Sequence
  Description of Artificial Sequence: Synthetic peptide
  Seed: GMMMGMFNMLSTVLGVS
GMMMGMFNMMSGVLPVS

SEQ ID NO: 182586 - protein, 17 aa, Artificial Sequence
  Description of Artificial Sequence: Synthetic peptide
  Seed: GMMMGMFNMLSTVLGVS
GMMMGMFNMMSGVLQVS

SEQ ID NO: 182587 - protein, 17 aa, Artificial Sequence
  Description of Artificial Sequence: Synthetic peptide
  Seed: GMMMGMFNMLSTVLGVS
GMMMGMFNMMSGVLRVS

SEQ ID NO: 182588 - protein, 17 aa, Artificial Sequence
  Description of Artificial Sequence: Synthetic peptide
  Seed: GMMMGMFNMLSTVLGVS
GMMMGMFNMMSGVLSVS

SEQ ID NO: 182589 - protein, 17 aa, Artificial Sequence
  Description of Artificial Sequence: Synthetic peptide
  Seed: GMMMGMFNMLSTVLGVS
GMMMGMFNMMSGVLTVS

SEQ ID NO: 182590 - protein, 17 aa, Artificial Sequence
  Description of Artificial Sequence: Synthetic peptide
  Seed: GMMMGMFNMLSTVLGVS
GMMMGMFNMMSGVLVVS

SEQ ID NO: 182591 - protein, 17 aa, Artificial Sequence
  Description of Artificial Sequence: Synthetic peptide
  Seed: GMMMGMFNMLSTVLGVS
GMMMGMFNMMSGVLYVS

SEQ ID NO: 182592 - protein, 17 aa, Artificial Sequence
  Description of Artificial Sequence: Synthetic peptide
  Seed: GMMMGMFNMLSTVLGVS
GMMMGMFNMMSHVLAVS

SEQ ID NO: 182593 - protein, 17 aa, Artificial Sequence
  Description of Artificial Sequence: Synthetic peptide
  Seed: GMMMGMFNMLSTVLGVS
GMMMGMFNMMSHVLGVS

SEQ ID NO: 182594 - protein, 17 aa, Artificial Sequence
  Description of Artificial Sequence: Synthetic peptide
  Seed: GMMMGMFNMLSTVLGVS
GMMMGMFNMMSHVLHVS

SEQ ID NO: 182595 - protein, 17 aa, Artificial Sequence
  Description of Artificial Sequence: Synthetic peptide
  Seed: GMMMGMFNMLSTVLGVS
GMMMGMFNMMSHVLMVS

SEQ ID NO: 182596 - protein, 17 aa, Artificial Sequence
  Description of Artificial Sequence: Synthetic peptide
  Seed: GMMMGMFNMLSTVLGVS
GMMMGMFNMMSHVLNVS

SEQ ID NO: 182597 - protein, 17 aa, Artificial Sequence
  Description of Artificial Sequence: Synthetic peptide
  Seed: GMMMGMFNMLSTVLGVS
GMMMGMFNMMSHVLSVS

SEQ ID NO: 182598 - protein, 17 aa, Artificial Sequence
  Description of Artificial Sequence: Synthetic peptide
  Seed: GMMMGMFNMLSTVLGVS
GMMMGMFNMMSHVLTVS

SEQ ID NO: 182599 - protein, 17 aa, Artificial Sequence
  Description of Artificial Sequence: Synthetic peptide
  Seed: GMMMGMFNMLSTVLGVS
GMMMGMFNMMSHVLVVS

SEQ ID NO: 182600 - protein, 17 aa, Artificial Sequence
  Description of Artificial Sequence: Synthetic peptide
  Seed: GMMMGMFNMLSTVLGVS
GMMMGMFNMMSIVLHVS

SEQ ID NO: 182601 - protein, 17 aa, Artificial Sequence
  Description of Artificial Sequence: Synthetic peptide
  Seed: GMMMGMFNMLSTVLGVS
GMMMGMFNMMSIVLNVS

SEQ ID NO: 182602 - protein, 17 aa, Artificial Sequence
  Description of Artificial Sequence: Synthetic peptide
  Seed: GMMMGMFNMLSTVLGVS
GMMMGMFNMMSKVLAVS

SEQ ID NO: 182603 - protein, 17 aa, Artificial Sequence
  Description of Artificial Sequence: Synthetic peptide
  Seed: GMMMGMFNMLSTVLGVS
GMMMGMFNMMSKVLGVS

SEQ ID NO: 182604 - protein, 17 aa, Artificial Sequence
  Description of Artificial Sequence: Synthetic peptide
  Seed: GMMMGMFNMLSTVLGVS
GMMMGMFNMMSKVLHVS

SEQ ID NO: 182605 - protein, 17 aa, Artificial Sequence
  Description of Artificial Sequence: Synthetic peptide
  Seed: GMMMGMFNMLSTVLGVS
GMMMGMFNMMSKVLKVS

SEQ ID NO: 182606 - protein, 17 aa, Artificial Sequence
  Description of Artificial Sequence: Synthetic peptide
  Seed: GMMMGMFNMLSTVLGVS
GMMMGMFNMMSKVLNVS

SEQ ID NO: 182607 - protein, 17 aa, Artificial Sequence
  Description of Artificial Sequence: Synthetic peptide
  Seed: GMMMGMFNMLSTVLGVS
GMMMGMFNMMSKVLQVS

SEQ ID NO: 182608 - protein, 17 aa, Artificial Sequence
  Description of Artificial Sequence: Synthetic peptide
  Seed: GMMMGMFNMLSTVLGVS
GMMMGMFNMMSKVLRVS

SEQ ID NO: 182609 - protein, 17 aa, Artificial Sequence
  Description of Artificial Sequence: Synthetic peptide
  Seed: GMMMGMFNMLSTVLGVS
GMMMGMFNMMSKVLSVS

SEQ ID NO: 182610 - protein, 17 aa, Artificial Sequence
  Description of Artificial Sequence: Synthetic peptide
  Seed: GMMMGMFNMLSTVLGVS
GMMMGMFNMMSKVLTVS

SEQ ID NO: 182611 - protein, 17 aa, Artificial Sequence
  Description of Artificial Sequence: Synthetic peptide
  Seed: GMMMGMFNMLSTVLGVS
GMMMGMFNMMSLVLHVS

SEQ ID NO: 182612 - protein, 17 aa, Artificial Sequence
  Description of Artificial Sequence: Synthetic peptide
  Seed: GMMMGMFNMLSTVLGVS
GMMMGMFNMMSMVLHVS

SEQ ID NO: 182613 - protein, 17 aa, Artificial Sequence
  Description of Artificial Sequence: Synthetic peptide
  Seed: GMMMGMFNMLSTVLGVS
GMMMGMFNMMSMVLNVS

SEQ ID NO: 182614 - protein, 17 aa, Artificial Sequence
  Description of Artificial Sequence: Synthetic peptide
  Seed: GMMMGMFNMLSTVLGVS
GMMMGMFNMMSNVLAVS

SEQ ID NO: 182615 - protein, 17 aa, Artificial Sequence
  Description of Artificial Sequence: Synthetic peptide
  Seed: GMMMGMFNMLSTVLGVS
GMMMGMFNMMSNVLDVS

SEQ ID NO: 182616 - protein, 17 aa, Artificial Sequence
  Description of Artificial Sequence: Synthetic peptide
  Seed: GMMMGMFNMLSTVLGVS
GMMMGMFNMMSNVLEVS

SEQ ID NO: 182617 - protein, 17 aa, Artificial Sequence
  Description of Artificial Sequence: Synthetic peptide
  Seed: GMMMGMFNMLSTVLGVS
GMMMGMFNMMSNVLGVS

SEQ ID NO: 182618 - protein, 17 aa, Artificial Sequence
  Description of Artificial Sequence: Synthetic peptide
  Seed: GMMMGMFNMLSTVLGVS
GMMMGMFNMMSNVLHVS

SEQ ID NO: 182619 - protein, 17 aa, Artificial Sequence
  Description of Artificial Sequence: Synthetic peptide
  Seed: GMMMGMFNMLSTVLGVS
GMMMGMFNMMSNVLIVS

SEQ ID NO: 182620 - protein, 17 aa, Artificial Sequence
  Description of Artificial Sequence: Synthetic peptide
  Seed: GMMMGMFNMLSTVLGVS
GMMMGMFNMMSNVLKVS

SEQ ID NO: 182621 - protein, 17 aa, Artificial Sequence
  Description of Artificial Sequence: Synthetic peptide
  Seed: GMMMGMFNMLSTVLGVS
GMMMGMFNMMSNVLLVS

SEQ ID NO: 182622 - protein, 17 aa, Artificial Sequence
  Description of Artificial Sequence: Synthetic peptide
  Seed: GMMMGMFNMLSTVLGVS
GMMMGMFNMMSNVLMVS

SEQ ID NO: 182623 - protein, 17 aa, Artificial Sequence
  Description of Artificial Sequence: Synthetic peptide
  Seed: GMMMGMFNMLSTVLGVS
GMMMGMFNMMSNVLNVS

SEQ ID NO: 182624 - protein, 17 aa, Artificial Sequence
  Description of Artificial Sequence: Synthetic peptide
  Seed: GMMMGMFNMLSTVLGVS
GMMMGMFNMMSNVLPVS

SEQ ID NO: 182625 - protein, 17 aa, Artificial Sequence
  Description of Artificial Sequence: Synthetic peptide
  Seed: GMMMGMFNMLSTVLGVS
GMMMGMFNMMSNVLQVS

SEQ ID NO: 182626 - protein, 17 aa, Artificial Sequence
  Description of Artificial Sequence: Synthetic peptide
  Seed: GMMMGMFNMLSTVLGVS
GMMMGMFNMMSNVLRVS

SEQ ID NO: 182627 - protein, 17 aa, Artificial Sequence
  Description of Artificial Sequence: Synthetic peptide
  Seed: GMMMGMFNMLSTVLGVS
GMMMGMFNMMSNVLSVS

SEQ ID NO: 182628 - protein, 17 aa, Artificial Sequence
  Description of Artificial Sequence: Synthetic peptide
  Seed: GMMMGMFNMLSTVLGVS
GMMMGMFNMMSNVLTVS

SEQ ID NO: 182629 - protein, 17 aa, Artificial Sequence
  Description of Artificial Sequence: Synthetic peptide
  Seed: GMMMGMFNMLSTVLGVS
GMMMGMFNMMSNVLVVS

SEQ ID NO: 182630 - protein, 17 aa, Artificial Sequence
  Description of Artificial Sequence: Synthetic peptide
  Seed: GMMMGMFNMLSTVLGVS
GMMMGMFNMMSNVLYVS

SEQ ID NO: 182631 - protein, 17 aa, Artificial Sequence
  Description of Artificial Sequence: Synthetic peptide
  Seed: GMMMGMFNMLSTVLGVS
GMMMGMFNMMSPVLAVS

SEQ ID NO: 182632 - protein, 17 aa, Artificial Sequence
  Description of Artificial Sequence: Synthetic peptide
  Seed: GMMMGMFNMLSTVLGVS
GMMMGMFNMMSPVLCVS

SEQ ID NO: 182633 - protein, 17 aa, Artificial Sequence
  Description of Artificial Sequence: Synthetic peptide
  Seed: GMMMGMFNMLSTVLGVS
GMMMGMFNMMSPVLDVS

SEQ ID NO: 182634 - protein, 17 aa, Artificial Sequence
  Description of Artificial Sequence: Synthetic peptide
  Seed: GMMMGMFNMLSTVLGVS
GMMMGMFNMMSPVLEVS

SEQ ID NO: 182635 - protein, 17 aa, Artificial Sequence
  Description of Artificial Sequence: Synthetic peptide
  Seed: GMMMGMFNMLSTVLGVS
GMMMGMFNMMSPVLFVS

SEQ ID NO: 182636 - protein, 17 aa, Artificial Sequence
  Description of Artificial Sequence: Synthetic peptide
  Seed: GMMMGMFNMLSTVLGVS
GMMMGMFNMMSPVLGVS

SEQ ID NO: 182637 - protein, 17 aa, Artificial Sequence
  Description of Artificial Sequence: Synthetic peptide
  Seed: GMMMGMFNMLSTVLGVS
GMMMGMFNMMSPVLHVS

SEQ ID NO: 182638 - protein, 17 aa, Artificial Sequence
  Description of Artificial Sequence: Synthetic peptide
  Seed: GMMMGMFNMLSTVLGVS
GMMMGMFNMMSPVLIVS

SEQ ID NO: 182639 - protein, 17 aa, Artificial Sequence
  Description of Artificial Sequence: Synthetic peptide
  Seed: GMMMGMFNMLSTVLGVS
GMMMGMFNMMSPVLKVS

SEQ ID NO: 182640 - protein, 17 aa, Artificial Sequence
  Description of Artificial Sequence: Synthetic peptide
  Seed: GMMMGMFNMLSTVLGVS
GMMMGMFNMMSPVLLVS

SEQ ID NO: 182641 - protein, 17 aa, Artificial Sequence
  Description of Artificial Sequence: Synthetic peptide
  Seed: GMMMGMFNMLSTVLGVS
GMMMGMFNMMSPVLMVS

SEQ ID NO: 182642 - protein, 17 aa, Artificial Sequence
  Description of Artificial Sequence: Synthetic peptide
  Seed: GMMMGMFNMLSTVLGVS
GMMMGMFNMMSPVLNVS

SEQ ID NO: 182643 - protein, 17 aa, Artificial Sequence
  Description of Artificial Sequence: Synthetic peptide
  Seed: GMMMGMFNMLSTVLGVS
GMMMGMFNMMSPVLPVS

SEQ ID NO: 182644 - protein, 17 aa, Artificial Sequence
  Description of Artificial Sequence: Synthetic peptide
  Seed: GMMMGMFNMLSTVLGVS
GMMMGMFNMMSPVLQVS

SEQ ID NO: 182645 - protein, 17 aa, Artificial Sequence
  Description of Artificial Sequence: Synthetic peptide
  Seed: GMMMGMFNMLSTVLGVS
GMMMGMFNMMSPVLRVS

SEQ ID NO: 182646 - protein, 17 aa, Artificial Sequence
  Description of Artificial Sequence: Synthetic peptide
  Seed: GMMMGMFNMLSTVLGVS
GMMMGMFNMMSPVLSVS

SEQ ID NO: 182647 - protein, 17 aa, Artificial Sequence
  Description of Artificial Sequence: Synthetic peptide
  Seed: GMMMGMFNMLSTVLGVS
GMMMGMFNMMSPVLTVS

SEQ ID NO: 182648 - protein, 17 aa, Artificial Sequence
  Description of Artificial Sequence: Synthetic peptide
  Seed: GMMMGMFNMLSTVLGVS
GMMMGMFNMMSPVLVVS

SEQ ID NO: 182649 - protein, 17 aa, Artificial Sequence
  Description of Artificial Sequence: Synthetic peptide
  Seed: GMMMGMFNMLSTVLGVS
GMMMGMFNMMSPVLYVS

SEQ ID NO: 182650 - protein, 17 aa, Artificial Sequence
  Description of Artificial Sequence: Synthetic peptide
  Seed: GMMMGMFNMLSTVLGVS
GMMMGMFNMMSQVLHVS

SEQ ID NO: 182651 - protein, 17 aa, Artificial Sequence
  Description of Artificial Sequence: Synthetic peptide
  Seed: GMMMGMFNMLSTVLGVS
GMMMGMFNMMSQVLNVS

SEQ ID NO: 182652 - protein, 17 aa, Artificial Sequence
  Description of Artificial Sequence: Synthetic peptide
  Seed: GMMMGMFNMLSTVLGVS
GMMMGMFNMMSQVLSVS

SEQ ID NO: 182653 - protein, 17 aa, Artificial Sequence
  Description of Artificial Sequence: Synthetic peptide
  Seed: GMMMGMFNMLSTVLGVS
GMMMGMFNMMSRVLGVS

SEQ ID NO: 182654 - protein, 17 aa, Artificial Sequence
  Description of Artificial Sequence: Synthetic peptide
  Seed: GMMMGMFNMLSTVLGVS
GMMMGMFNMMSRVLHVS

SEQ ID NO: 182655 - protein, 17 aa, Artificial Sequence
  Description of Artificial Sequence: Synthetic peptide
  Seed: GMMMGMFNMLSTVLGVS
GMMMGMFNMMSRVLKVS

SEQ ID NO: 182656 - protein, 17 aa, Artificial Sequence
  Description of Artificial Sequence: Synthetic peptide
  Seed: GMMMGMFNMLSTVLGVS
GMMMGMFNMMSRVLNVS

SEQ ID NO: 182657 - protein, 17 aa, Artificial Sequence
  Description of Artificial Sequence: Synthetic peptide
  Seed: GMMMGMFNMLSTVLGVS
GMMMGMFNMMSRVLRVS

SEQ ID NO: 182658 - protein, 17 aa, Artificial Sequence
  Description of Artificial Sequence: Synthetic peptide
  Seed: GMMMGMFNMLSTVLGVS
GMMMGMFNMMSRVLSVS

SEQ ID NO: 182659 - protein, 17 aa, Artificial Sequence
  Description of Artificial Sequence: Synthetic peptide
  Seed: GMMMGMFNMLSTVLGVS
GMMMGMFNMMSRVLTVS

SEQ ID NO: 182660 - protein, 17 aa, Artificial Sequence
  Description of Artificial Sequence: Synthetic peptide
  Seed: GMMMGMFNMLSTVLGVS
GMMMGMFNMMSSVLAVS

SEQ ID NO: 182661 - protein, 17 aa, Artificial Sequence
  Description of Artificial Sequence: Synthetic peptide
  Seed: GMMMGMFNMLSTVLGVS
GMMMGMFNMMSSVLDVS

SEQ ID NO: 182662 - protein, 17 aa, Artificial Sequence
  Description of Artificial Sequence: Synthetic peptide
  Seed: GMMMGMFNMLSTVLGVS
GMMMGMFNMMSSVLEVS

SEQ ID NO: 182663 - protein, 17 aa, Artificial Sequence
  Description of Artificial Sequence: Synthetic peptide
  Seed: GMMMGMFNMLSTVLGVS
GMMMGMFNMMSSVLGVS

SEQ ID NO: 182664 - protein, 17 aa, Artificial Sequence
  Description of Artificial Sequence: Synthetic peptide
  Seed: GMMMGMFNMLSTVLGVS
GMMMGMFNMMSSVLIVS

SEQ ID NO: 182665 - protein, 17 aa, Artificial Sequence
  Description of Artificial Sequence: Synthetic peptide
  Seed: GMMMGMFNMLSTVLGVS
GMMMGMFNMMSSVLKVS

SEQ ID NO: 182666 - protein, 17 aa, Artificial Sequence
  Description of Artificial Sequence: Synthetic peptide
  Seed: GMMMGMFNMLSTVLGVS
GMMMGMFNMMSSVLLVS

SEQ ID NO: 182667 - protein, 17 aa, Artificial Sequence
  Description of Artificial Sequence: Synthetic peptide
  Seed: GMMMGMFNMLSTVLGVS
GMMMGMFNMMSSVLMVS

SEQ ID NO: 182668 - protein, 17 aa, Artificial Sequence
  Description of Artificial Sequence: Synthetic peptide
  Seed: GMMMGMFNMLSTVLGVS
GMMMGMFNMMSSVLNVS

SEQ ID NO: 182669 - protein, 17 aa, Artificial Sequence
  Description of Artificial Sequence: Synthetic peptide
  Seed: GMMMGMFNMLSTVLGVS
GMMMGMFNMMSSVLPVS

SEQ ID NO: 182670 - protein, 17 aa, Artificial Sequence
  Description of Artificial Sequence: Synthetic peptide
  Seed: GMMMGMFNMLSTVLGVS
GMMMGMFNMMSSVLQVS

SEQ ID NO: 182671 - protein, 17 aa, Artificial Sequence
  Description of Artificial Sequence: Synthetic peptide
  Seed: GMMMGMFNMLSTVLGVS
GMMMGMFNMMSSVLRVS

SEQ ID NO: 182672 - protein, 17 aa, Artificial Sequence
  Description of Artificial Sequence: Synthetic peptide
  Seed: GMMMGMFNMLSTVLGVS
GMMMGMFNMMSSVLSVS

SEQ ID NO: 182673 - protein, 17 aa, Artificial Sequence
  Description of Artificial Sequence: Synthetic peptide
  Seed: GMMMGMFNMLSTVLGVS
GMMMGMFNMMSSVLTVS

SEQ ID NO: 182674 - protein, 17 aa, Artificial Sequence
  Description of Artificial Sequence: Synthetic peptide
  Seed: GMMMGMFNMLSTVLGVS
GMMMGMFNMMSSVLVVS

SEQ ID NO: 182675 - protein, 17 aa, Artificial Sequence
  Description of Artificial Sequence: Synthetic peptide
  Seed: GMMMGMFNMLSTVLGVS
GMMMGMFNMMSSVLYVS

SEQ ID NO: 182676 - protein, 17 aa, Artificial Sequence
  Description of Artificial Sequence: Synthetic peptide
  Seed: GMMMGMFNMLSTVLGVS
GMMMGMFNMMSTVLAVS

SEQ ID NO: 182677 - protein, 17 aa, Artificial Sequence
  Description of Artificial Sequence: Synthetic peptide
  Seed: GMMMGMFNMLSTVLGVS
GMMMGMFNMMSTVLDVS

SEQ ID NO: 182678 - protein, 17 aa, Artificial Sequence
  Description of Artificial Sequence: Synthetic peptide
  Seed: GMMMGMFNMLSTVLGVS
GMMMGMFNMMSTVLEVS

SEQ ID NO: 182679 - protein, 17 aa, Artificial Sequence
  Description of Artificial Sequence: Synthetic peptide
  Seed: GMMMGMFNMLSTVLGVS
GMMMGMFNMMSTVLGVS

SEQ ID NO: 182680 - protein, 17 aa, Artificial Sequence
  Description of Artificial Sequence: Synthetic peptide
  Seed: GMMMGMFNMLSTVLGVS
GMMMGMFNMMSTVLHVS

SEQ ID NO: 182681 - protein, 17 aa, Artificial Sequence
  Description of Artificial Sequence: Synthetic peptide
  Seed: GMMMGMFNMLSTVLGVS
GMMMGMFNMMSTVLIVS

SEQ ID NO: 182682 - protein, 17 aa, Artificial Sequence
  Description of Artificial Sequence: Synthetic peptide
  Seed: GMMMGMFNMLSTVLGVS
GMMMGMFNMMSTVLKVS

SEQ ID NO: 182683 - protein, 17 aa, Artificial Sequence
  Description of Artificial Sequence: Synthetic peptide
  Seed: GMMMGMFNMLSTVLGVS
GMMMGMFNMMSTVLLVS

SEQ ID NO: 182684 - protein, 17 aa, Artificial Sequence
  Description of Artificial Sequence: Synthetic peptide
  Seed: GMMMGMFNMLSTVLGVS
GMMMGMFNMMSTVLMVS

SEQ ID NO: 182685 - protein, 17 aa, Artificial Sequence
  Description of Artificial Sequence: Synthetic peptide
  Seed: GMMMGMFNMLSTVLGVS
GMMMGMFNMMSTVLNVS

SEQ ID NO: 182686 - protein, 17 aa, Artificial Sequence
  Description of Artificial Sequence: Synthetic peptide
  Seed: GMMMGMFNMLSTVLGVS
GMMMGMFNMMSTVLPVS

SEQ ID NO: 182687 - protein, 17 aa, Artificial Sequence
  Description of Artificial Sequence: Synthetic peptide
  Seed: GMMMGMFNMLSTVLGVS
GMMMGMFNMMSTVLQVS

SEQ ID NO: 182688 - protein, 17 aa, Artificial Sequence
  Description of Artificial Sequence: Synthetic peptide
  Seed: GMMMGMFNMLSTVLGVS
GMMMGMFNMMSTVLRVS

SEQ ID NO: 182689 - protein, 17 aa, Artificial Sequence
  Description of Artificial Sequence: Synthetic peptide
  Seed: GMMMGMFNMLSTVLGVS
GMMMGMFNMMSTVLSVS

SEQ ID NO: 182690 - protein, 17 aa, Artificial Sequence
  Description of Artificial Sequence: Synthetic peptide
  Seed: GMMMGMFNMLSTVLGVS
GMMMGMFNMMSTVLTVS

SEQ ID NO: 182691 - protein, 17 aa, Artificial Sequence
  Description of Artificial Sequence: Synthetic peptide
  Seed: GMMMGMFNMLSTVLGVS
GMMMGMFNMMSTVLVVS

SEQ ID NO: 182692 - protein, 17 aa, Artificial Sequence
  Description of Artificial Sequence: Synthetic peptide
  Seed: GMMMGMFNMLSTVLGVS
GMMMGMFNMMSVVLHVS

SEQ ID NO: 182693 - protein, 17 aa, Artificial Sequence
  Description of Artificial Sequence: Synthetic peptide
  Seed: GMMMGMFNMLSTVLGVS
GMMMGMFNMMSVVLKVS
